United States Patent Application Publication US 2018/0305689 A1 - sequence listing, part 27

SEQ ID NO: 325526 - RNA, 19 nt, Artificial Sequence
  Description of Artificial Sequence: Synthetic oligonucleotide
  Antisense Strand to SEQ ID NO: 325525
ugucuaguaauaauuacca

SEQ ID NO: 325527 - RNA, 19 nt, Artificial Sequence
  Description of Artificial Sequence: Synthetic oligonucleotide
  Sense Strand Starting at position 87 of SEQ ID NO: 316425
uuaauauguuucuuuggga

SEQ ID NO: 325528 - RNA, 19 nt, Artificial Sequence
  Description of Artificial Sequence: Synthetic oligonucleotide
  Antisense Strand to SEQ ID NO: 325527
ucccaaagaaacauauuaa

SEQ ID NO: 325529 - RNA, 19 nt, Artificial Sequence
  Description of Artificial Sequence: Synthetic oligonucleotide
  Sense Strand Starting at position 87 of SEQ ID NO: 316632
aaaggaugguaguuugagu

SEQ ID NO: 325530 - RNA, 19 nt, Artificial Sequence
  Description of Artificial Sequence: Synthetic oligonucleotide
  Antisense Strand to SEQ ID NO: 325529
acucaaacuaccauccuuu

SEQ ID NO: 325531 - RNA, 19 nt, Artificial Sequence
  Description of Artificial Sequence: Synthetic oligonucleotide
  Sense Strand Starting at position 87 of SEQ ID NO: 316650
ucuguaaagugacuaguaa

SEQ ID NO: 325532 - RNA, 19 nt, Artificial Sequence
  Description of Artificial Sequence: Synthetic oligonucleotide
  Antisense Strand to SEQ ID NO: 325531
uuacuagucacuuuacaga

SEQ ID NO: 325533 - RNA, 19 nt, Artificial Sequence
  Description of Artificial Sequence: Synthetic oligonucleotide
  Sense Strand Starting at position 87 of SEQ ID NO: 316651
cuguaaagugacuaguaag

SEQ ID NO: 325534 - RNA, 19 nt, Artificial Sequence
  Description of Artificial Sequence: Synthetic oligonucleotide
  Antisense Strand to SEQ ID NO: 325533
cuuacuagucacuuuacag

SEQ ID NO: 325535 - RNA, 19 nt, Artificial Sequence
  Description of Artificial Sequence: Synthetic oligonucleotide
  Sense Strand Starting at position 87 of SEQ ID NO: 316712
gugcauucugacggauuuc

SEQ ID NO: 325536 - RNA, 19 nt, Artificial Sequence
  Description of Artificial Sequence: Synthetic oligonucleotide
  Antisense Strand to SEQ ID NO: 325535
gaaauccgucagaaugcac

SEQ ID NO: 325537 - RNA, 19 nt, Artificial Sequence
  Description of Artificial Sequence: Synthetic oligonucleotide
  Sense Strand Starting at position 87 of SEQ ID NO: 316899
ugaacaaauugagcucuaa

SEQ ID NO: 325538 - RNA, 19 nt, Artificial Sequence
  Description of Artificial Sequence: Synthetic oligonucleotide
  Antisense Strand to SEQ ID NO: 325537
uuagagcucaauuuguuca

SEQ ID NO: 325539 - RNA, 19 nt, Artificial Sequence
  Description of Artificial Sequence: Synthetic oligonucleotide
  Sense Strand Starting at position 87 of SEQ ID NO: 316934
ccaaaugagucucugauac

SEQ ID NO: 325540 - RNA, 19 nt, Artificial Sequence
  Description of Artificial Sequence: Synthetic oligonucleotide
  Antisense Strand to SEQ ID NO: 325539
guaucagagacucauuugg

SEQ ID NO: 325541 - RNA, 19 nt, Artificial Sequence
  Description of Artificial Sequence: Synthetic oligonucleotide
  Sense Strand Starting at position 87 of SEQ ID NO: 316953
agauccugucaugguuaca

SEQ ID NO: 325542 - RNA, 19 nt, Artificial Sequence
  Description of Artificial Sequence: Synthetic oligonucleotide
  Antisense Strand to SEQ ID NO: 325541
uguaaccaugacaggaucu

SEQ ID NO: 325543 - RNA, 19 nt, Artificial Sequence
  Description of Artificial Sequence: Synthetic oligonucleotide
  Sense Strand Starting at position 87 of SEQ ID NO: 317059
uuaccuuuggugcagaauu

SEQ ID NO: 325544 - RNA, 19 nt, Artificial Sequence
  Description of Artificial Sequence: Synthetic oligonucleotide
  Antisense Strand to SEQ ID NO: 325543
aauucugcaccaaagguaa

SEQ ID NO: 325545 - RNA, 19 nt, Artificial Sequence
  Description of Artificial Sequence: Synthetic oligonucleotide
  Sense Strand Starting at position 87 of SEQ ID NO: 317466
gcauuaugcaccgaagauu

SEQ ID NO: 325546 - RNA, 19 nt, Artificial Sequence
  Description of Artificial Sequence: Synthetic oligonucleotide
  Antisense Strand to SEQ ID NO: 325545
aaucuucggugcauaaugc

SEQ ID NO: 325547 - RNA, 19 nt, Artificial Sequence
  Description of Artificial Sequence: Synthetic oligonucleotide
  Sense Strand Starting at position 87 of SEQ ID NO: 317667
ugguuucucucuuuaugaa

SEQ ID NO: 325548 - RNA, 19 nt, Artificial Sequence
  Description of Artificial Sequence: Synthetic oligonucleotide
  Antisense Strand to SEQ ID NO: 325547
uucauaaagagagaaacca

SEQ ID NO: 325549 - RNA, 19 nt, Artificial Sequence
  Description of Artificial Sequence: Synthetic oligonucleotide
  Sense Strand Starting at position 87 of SEQ ID NO: 317668
gguuucucucuuuaugaaa

SEQ ID NO: 325550 - RNA, 19 nt, Artificial Sequence
  Description of Artificial Sequence: Synthetic oligonucleotide
  Antisense Strand to SEQ ID NO: 325549
uuucauaaagagagaaacc

SEQ ID NO: 325551 - RNA, 19 nt, Artificial Sequence
  Description of Artificial Sequence: Synthetic oligonucleotide
  Sense Strand Starting at position 87 of SEQ ID NO: 317768
uuuauaauggcauggcuga

SEQ ID NO: 325552 - RNA, 19 nt, Artificial Sequence
  Description of Artificial Sequence: Synthetic oligonucleotide
  Antisense Strand to SEQ ID NO: 325551
ucagccaugccauuauaaa

SEQ ID NO: 325553 - RNA, 19 nt, Artificial Sequence
  Description of Artificial Sequence: Synthetic oligonucleotide
  Sense Strand Starting at position 87 of SEQ ID NO: 317803
cuacuuauaguuugggaag

SEQ ID NO: 325554 - RNA, 19 nt, Artificial Sequence
  Description of Artificial Sequence: Synthetic oligonucleotide
  Antisense Strand to SEQ ID NO: 325553
cuucccaaacuauaaguag

SEQ ID NO: 325555 - RNA, 19 nt, Artificial Sequence
  Description of Artificial Sequence: Synthetic oligonucleotide
  Sense Strand Starting at position 87 of SEQ ID NO: 318392
agucaauaguuucuggauu

SEQ ID NO: 325556 - RNA, 19 nt, Artificial Sequence
  Description of Artificial Sequence: Synthetic oligonucleotide
  Antisense Strand to SEQ ID NO: 325555
aauccagaaacuauugacu

SEQ ID NO: 325557 - RNA, 19 nt, Artificial Sequence
  Description of Artificial Sequence: Synthetic oligonucleotide
  Sense Strand Starting at position 87 of SEQ ID NO: 318484
uugagagcuagacaugcau

SEQ ID NO: 325558 - RNA, 19 nt, Artificial Sequence
  Description of Artificial Sequence: Synthetic oligonucleotide
  Antisense Strand to SEQ ID NO: 325557
augcaugucuagcucucaa

SEQ ID NO: 325559 - RNA, 19 nt, Artificial Sequence
  Description of Artificial Sequence: Synthetic oligonucleotide
  Sense Strand Starting at position 87 of SEQ ID NO: 318514
guggauugcuaaucaauag

SEQ ID NO: 325560 - RNA, 19 nt, Artificial Sequence
  Description of Artificial Sequence: Synthetic oligonucleotide
  Antisense Strand to SEQ ID NO: 325559
cuauugauuagcaauccac

SEQ ID NO: 325561 - RNA, 19 nt, Artificial Sequence
  Description of Artificial Sequence: Synthetic oligonucleotide
  Sense Strand Starting at position 87 of SEQ ID NO: 318592
aauagaaaucaucgugucu

SEQ ID NO: 325562 - RNA, 19 nt, Artificial Sequence
  Description of Artificial Sequence: Synthetic oligonucleotide
  Antisense Strand to SEQ ID NO: 325561
agacacgaugauuucuauu

SEQ ID NO: 325563 - RNA, 19 nt, Artificial Sequence
  Description of Artificial Sequence: Synthetic oligonucleotide
  Sense Strand Starting at position 87 of SEQ ID NO: 318661
gcauaaaugucagugaugg

SEQ ID NO: 325564 - RNA, 19 nt, Artificial Sequence
  Description of Artificial Sequence: Synthetic oligonucleotide
  Antisense Strand to SEQ ID NO: 325563
ccaucacugacauuuaugc

SEQ ID NO: 325565 - RNA, 19 nt, Artificial Sequence
  Description of Artificial Sequence: Synthetic oligonucleotide
  Sense Strand Starting at position 87 of SEQ ID NO: 318662
cauaaaugucagugauggu

SEQ ID NO: 325566 - RNA, 19 nt, Artificial Sequence
  Description of Artificial Sequence: Synthetic oligonucleotide
  Antisense Strand to SEQ ID NO: 325565
accaucacugacauuuaug

SEQ ID NO: 325567 - RNA, 19 nt, Artificial Sequence
  Description of Artificial Sequence: Synthetic oligonucleotide
  Sense Strand Starting at position 87 of SEQ ID NO: 318663
auaaaugucagugaugguu

SEQ ID NO: 325568 - RNA, 19 nt, Artificial Sequence
  Description of Artificial Sequence: Synthetic oligonucleotide
  Antisense Strand to SEQ ID NO: 325567
aaccaucacugacauuuau

SEQ ID NO: 325569 - RNA, 19 nt, Artificial Sequence
  Description of Artificial Sequence: Synthetic oligonucleotide
  Sense Strand Starting at position 87 of SEQ ID NO: 318669
gucagugaugguuacgaaa

SEQ ID NO: 325570 - RNA, 19 nt, Artificial Sequence
  Description of Artificial Sequence: Synthetic oligonucleotide
  Antisense Strand to SEQ ID NO: 325569
uuucguaaccaucacugac

SEQ ID NO: 325571 - RNA, 19 nt, Artificial Sequence
  Description of Artificial Sequence: Synthetic oligonucleotide
  Sense Strand Starting at position 87 of SEQ ID NO: 318799
ggugaacagcaauguaauu

SEQ ID NO: 325572 - RNA, 19 nt, Artificial Sequence
  Description of Artificial Sequence: Synthetic oligonucleotide
  Antisense Strand to SEQ ID NO: 325571
aauuacauugcuguucacc

SEQ ID NO: 325573 - RNA, 19 nt, Artificial Sequence
  Description of Artificial Sequence: Synthetic oligonucleotide
  Sense Strand Starting at position 87 of SEQ ID NO: 318930
cagggacagccuggauaua

SEQ ID NO: 325574 - RNA, 19 nt, Artificial Sequence
  Description of Artificial Sequence: Synthetic oligonucleotide
  Antisense Strand to SEQ ID NO: 325573
uauauccaggcugucccug

SEQ ID NO: 325575 - RNA, 19 nt, Artificial Sequence
  Description of Artificial Sequence: Synthetic oligonucleotide
  Sense Strand Starting at position 87 of SEQ ID NO: 318957
cguaauuaccaggacacgu

SEQ ID NO: 325576 - RNA, 19 nt, Artificial Sequence
  Description of Artificial Sequence: Synthetic oligonucleotide
  Antisense Strand to SEQ ID NO: 325575
acguguccugguaauuacg

SEQ ID NO: 325577 - RNA, 19 nt, Artificial Sequence
  Description of Artificial Sequence: Synthetic oligonucleotide
  Sense Strand Starting at position 87 of SEQ ID NO: 318994
ucuaaagucagcgagguau

SEQ ID NO: 325578 - RNA, 19 nt, Artificial Sequence
  Description of Artificial Sequence: Synthetic oligonucleotide
  Antisense Strand to SEQ ID NO: 325577
auaccucgcugacuuuaga

SEQ ID NO: 325579 - RNA, 19 nt, Artificial Sequence
  Description of Artificial Sequence: Synthetic oligonucleotide
  Sense Strand Starting at position 87 of SEQ ID NO: 318998
aagucagcgagguauuauu

SEQ ID NO: 325580 - RNA, 19 nt, Artificial Sequence
  Description of Artificial Sequence: Synthetic oligonucleotide
  Antisense Strand to SEQ ID NO: 325579
aauaauaccucgcugacuu

SEQ ID NO: 325581 - RNA, 19 nt, Artificial Sequence
  Description of Artificial Sequence: Synthetic oligonucleotide
  Sense Strand Starting at position 87 of SEQ ID NO: 319006
gagguauuauucuugcaug

SEQ ID NO: 325582 - RNA, 19 nt, Artificial Sequence
  Description of Artificial Sequence: Synthetic oligonucleotide
  Antisense Strand to SEQ ID NO: 325581
caugcaagaauaauaccuc

SEQ ID NO: 325583 - RNA, 19 nt, Artificial Sequence
  Description of Artificial Sequence: Synthetic oligonucleotide
  Sense Strand Starting at position 87 of SEQ ID NO: 319016
ucuugcaugccugaaucau

SEQ ID NO: 325584 - RNA, 19 nt, Artificial Sequence
  Description of Artificial Sequence: Synthetic oligonucleotide
  Antisense Strand to SEQ ID NO: 325583
augauucaggcaugcaaga

SEQ ID NO: 325585 - RNA, 19 nt, Artificial Sequence
  Description of Artificial Sequence: Synthetic oligonucleotide
  Sense Strand Starting at position 87 of SEQ ID NO: 319133
guucucuuugcugagaaag

SEQ ID NO: 325586 - RNA, 19 nt, Artificial Sequence
  Description of Artificial Sequence: Synthetic oligonucleotide
  Antisense Strand to SEQ ID NO: 325585
cuuucucagcaaagagaac

SEQ ID NO: 325587 - RNA, 19 nt, Artificial Sequence
  Description of Artificial Sequence: Synthetic oligonucleotide
  Sense Strand Starting at position 88 of SEQ ID NO: 315346
uuauuagaacuuggcauaa

SEQ ID NO: 325588 - RNA, 19 nt, Artificial Sequence
  Description of Artificial Sequence: Synthetic oligonucleotide
  Antisense Strand to SEQ ID NO: 325587
uuaugccaaguucuaauaa

SEQ ID NO: 325589 - RNA, 19 nt, Artificial Sequence
  Description of Artificial Sequence: Synthetic oligonucleotide
  Sense Strand Starting at position 88 of SEQ ID NO: 315648
cagaacuuuccaggugaua

SEQ ID NO: 325590 - RNA, 19 nt, Artificial Sequence
  Description of Artificial Sequence: Synthetic oligonucleotide
  Antisense Strand to SEQ ID NO: 325589
uaucaccuggaaaguucug

SEQ ID NO: 325591 - RNA, 19 nt, Artificial Sequence
  Description of Artificial Sequence: Synthetic oligonucleotide
  Sense Strand Starting at position 88 of SEQ ID NO: 315726
aggcuacuaccaugugaua

SEQ ID NO: 325592 - RNA, 19 nt, Artificial Sequence
  Description of Artificial Sequence: Synthetic oligonucleotide
  Antisense Strand to SEQ ID NO: 325591
uaucacaugguaguagccu

SEQ ID NO: 325593 - RNA, 19 nt, Artificial Sequence
  Description of Artificial Sequence: Synthetic oligonucleotide
  Sense Strand Starting at position 88 of SEQ ID NO: 315752
gaaugaugccaguacuuac

SEQ ID NO: 325594 - RNA, 19 nt, Artificial Sequence
  Description of Artificial Sequence: Synthetic oligonucleotide
  Antisense Strand to SEQ ID NO: 325593
guaaguacuggcaucauuc

SEQ ID NO: 325595 - RNA, 19 nt, Artificial Sequence
  Description of Artificial Sequence: Synthetic oligonucleotide
  Sense Strand Starting at position 88 of SEQ ID NO: 316003
acuuauguagcuuaucauu

SEQ ID NO: 325596 - RNA, 19 nt, Artificial Sequence
  Description of Artificial Sequence: Synthetic oligonucleotide
  Antisense Strand to SEQ ID NO: 325595
aaugauaagcuacauaagu

SEQ ID NO: 325597 - RNA, 19 nt, Artificial Sequence
  Description of Artificial Sequence: Synthetic oligonucleotide
  Sense Strand Starting at position 88 of SEQ ID NO: 316017
ucauuaucuuguccacaga

SEQ ID NO: 325598 - RNA, 19 nt, Artificial Sequence
  Description of Artificial Sequence: Synthetic oligonucleotide
  Antisense Strand to SEQ ID NO: 325597
ucuguggacaagauaauga

SEQ ID NO: 325599 - RNA, 19 nt, Artificial Sequence
  Description of Artificial Sequence: Synthetic oligonucleotide
  Sense Strand Starting at position 88 of SEQ ID NO: 316046
auugaauuccgaugaggau

SEQ ID NO: 325600 - RNA, 19 nt, Artificial Sequence
  Description of Artificial Sequence: Synthetic oligonucleotide
  Antisense Strand to SEQ ID NO: 325599
auccucaucggaauucaau

SEQ ID NO: 325601 - RNA, 19 nt, Artificial Sequence
  Description of Artificial Sequence: Synthetic oligonucleotide
  Sense Strand Starting at position 88 of SEQ ID NO: 316055
cgaugaggauucccacuga

SEQ ID NO: 325602 - RNA, 19 nt, Artificial Sequence
  Description of Artificial Sequence: Synthetic oligonucleotide
  Antisense Strand to SEQ ID NO: 325601
ucagugggaauccucaucg

SEQ ID NO: 325603 - RNA, 19 nt, Artificial Sequence
  Description of Artificial Sequence: Synthetic oligonucleotide
  Sense Strand Starting at position 88 of SEQ ID NO: 316131
gaaauacuuuagccagugu

SEQ ID NO: 325604 - RNA, 19 nt, Artificial Sequence
  Description of Artificial Sequence: Synthetic oligonucleotide
  Antisense Strand to SEQ ID NO: 325603
acacuggcuaaaguauuuc

SEQ ID NO: 325605 - RNA, 19 nt, Artificial Sequence
  Description of Artificial Sequence: Synthetic oligonucleotide
  Sense Strand Starting at position 88 of SEQ ID NO: 316203
acaguaacucauugugaug

SEQ ID NO: 325606 - RNA, 19 nt, Artificial Sequence
  Description of Artificial Sequence: Synthetic oligonucleotide
  Antisense Strand to SEQ ID NO: 325605
caucacaaugaguuacugu

SEQ ID NO: 325607 - RNA, 19 nt, Artificial Sequence
  Description of Artificial Sequence: Synthetic oligonucleotide
  Sense Strand Starting at position 88 of SEQ ID NO: 316512
acagguguucugcauauau

SEQ ID NO: 325608 - RNA, 19 nt, Artificial Sequence
  Description of Artificial Sequence: Synthetic oligonucleotide
  Antisense Strand to SEQ ID NO: 325607
auauaugcagaacaccugu

SEQ ID NO: 325609 - RNA, 19 nt, Artificial Sequence
  Description of Artificial Sequence: Synthetic oligonucleotide
  Sense Strand Starting at position 88 of SEQ ID NO: 316514
agguguucugcauauauac

SEQ ID NO: 325610 - RNA, 19 nt, Artificial Sequence
  Description of Artificial Sequence: Synthetic oligonucleotide
  Antisense Strand to SEQ ID NO: 325609
guauauaugcagaacaccu

SEQ ID NO: 325611 - RNA, 19 nt, Artificial Sequence
  Description of Artificial Sequence: Synthetic oligonucleotide
  Sense Strand Starting at position 88 of SEQ ID NO: 316661
ucaguaagauaaucuguag

SEQ ID NO: 325612 - RNA, 19 nt, Artificial Sequence
  Description of Artificial Sequence: Synthetic oligonucleotide
  Antisense Strand to SEQ ID NO: 325611
cuacagauuaucuuacuga

SEQ ID NO: 325613 - RNA, 19 nt, Artificial Sequence
  Description of Artificial Sequence: Synthetic oligonucleotide
  Sense Strand Starting at position 88 of SEQ ID NO: 316665
uaagauaaucuguagggcu

SEQ ID NO: 325614 - RNA, 19 nt, Artificial Sequence
  Description of Artificial Sequence: Synthetic oligonucleotide
  Antisense Strand to SEQ ID NO: 325613
agcccuacagauuaucuua

SEQ ID NO: 325615 - RNA, 19 nt, Artificial Sequence
  Description of Artificial Sequence: Synthetic oligonucleotide
  Sense Strand Starting at position 88 of SEQ ID NO: 316667
agauaaucuguagggcuua

SEQ ID NO: 325616 - RNA, 19 nt, Artificial Sequence
  Description of Artificial Sequence: Synthetic oligonucleotide
  Antisense Strand to SEQ ID NO: 325615
uaagcccuacagauuaucu

SEQ ID NO: 325617 - RNA, 19 nt, Artificial Sequence
  Description of Artificial Sequence: Synthetic oligonucleotide
  Sense Strand Starting at position 88 of SEQ ID NO: 316672
aucuguagggcuuaucuua

SEQ ID NO: 325618 - RNA, 19 nt, Artificial Sequence
  Description of Artificial Sequence: Synthetic oligonucleotide
  Antisense Strand to SEQ ID NO: 325617
uaagauaagcccuacagau

SEQ ID NO: 325619 - RNA, 19 nt, Artificial Sequence
  Description of Artificial Sequence: Synthetic oligonucleotide
  Sense Strand Starting at position 88 of SEQ ID NO: 316680
ggcuuaucuuaauucuaag

SEQ ID NO: 325620 - RNA, 19 nt, Artificial Sequence
  Description of Artificial Sequence: Synthetic oligonucleotide
  Antisense Strand to SEQ ID NO: 325619
cuuagaauuaagauaagcc

SEQ ID NO: 325621 - RNA, 19 nt, Artificial Sequence
  Description of Artificial Sequence: Synthetic oligonucleotide
  Sense Strand Starting at position 88 of SEQ ID NO: 316839
aucuuagaagcauauuagu

SEQ ID NO: 325622 - RNA, 19 nt, Artificial Sequence
  Description of Artificial Sequence: Synthetic oligonucleotide
  Antisense Strand to SEQ ID NO: 325621
acuaauaugcuucuaagau

SEQ ID NO: 325623 - RNA, 19 nt, Artificial Sequence
  Description of Artificial Sequence: Synthetic oligonucleotide
  Sense Strand Starting at position 88 of SEQ ID NO: 316986
caggaacucccugguuagu

SEQ ID NO: 325624 - RNA, 19 nt, Artificial Sequence
  Description of Artificial Sequence: Synthetic oligonucleotide
  Antisense Strand to SEQ ID NO: 325623
acuaaccagggaguuccug

SEQ ID NO: 325625 - RNA, 19 nt, Artificial Sequence
  Description of Artificial Sequence: Synthetic oligonucleotide
  Sense Strand Starting at position 88 of SEQ ID NO: 316988
ggaacucccugguuaguau

SEQ ID NO: 325626 - RNA, 19 nt, Artificial Sequence
  Description of Artificial Sequence: Synthetic oligonucleotide
  Antisense Strand to SEQ ID NO: 325625
auacuaaccagggaguucc

SEQ ID NO: 325627 - RNA, 19 nt, Artificial Sequence
  Description of Artificial Sequence: Synthetic oligonucleotide
  Sense Strand Starting at position 88 of SEQ ID NO: 317031
auuauugagucuucuuucu

SEQ ID NO: 325628 - RNA, 19 nt, Artificial Sequence
  Description of Artificial Sequence: Synthetic oligonucleotide
  Antisense Strand to SEQ ID NO: 325627
agaaagaagacucaauaau

SEQ ID NO: 325629 - RNA, 19 nt, Artificial Sequence
  Description of Artificial Sequence: Synthetic oligonucleotide
  Sense Strand Starting at position 88 of SEQ ID NO: 317036
ugagucuucuuucuaagaa

SEQ ID NO: 325630 - RNA, 19 nt, Artificial Sequence
  Description of Artificial Sequence: Synthetic oligonucleotide
  Antisense Strand to SEQ ID NO: 325629
uucuuagaaagaagacuca

SEQ ID NO: 325631 - RNA, 19 nt, Artificial Sequence
  Description of Artificial Sequence: Synthetic oligonucleotide
  Sense Strand Starting at position 88 of SEQ ID NO: 317165
auccaauggucagccuuua

SEQ ID NO: 325632 - RNA, 19 nt, Artificial Sequence
  Description of Artificial Sequence: Synthetic oligonucleotide
  Antisense Strand to SEQ ID NO: 325631
uaaaggcugaccauuggau

SEQ ID NO: 325633 - RNA, 19 nt, Artificial Sequence
  Description of Artificial Sequence: Synthetic oligonucleotide
  Sense Strand Starting at position 88 of SEQ ID NO: 317324
augcucuaacauggcuaau

SEQ ID NO: 325634 - RNA, 19 nt, Artificial Sequence
  Description of Artificial Sequence: Synthetic oligonucleotide
  Antisense Strand to SEQ ID NO: 325633
auuagccauguuagagcau

SEQ ID NO: 325635 - RNA, 19 nt, Artificial Sequence
  Description of Artificial Sequence: Synthetic oligonucleotide
  Sense Strand Starting at position 88 of SEQ ID NO: 317467
gacaaaucagcauguagug

SEQ ID NO: 325636 - RNA, 19 nt, Artificial Sequence
  Description of Artificial Sequence: Synthetic oligonucleotide
  Antisense Strand to SEQ ID NO: 325635
cacuacaugcugauuuguc

SEQ ID NO: 325637 - RNA, 19 nt, Artificial Sequence
  Description of Artificial Sequence: Synthetic oligonucleotide
  Sense Strand Starting at position 88 of SEQ ID NO: 317623
auaaaucaugccuggagag

SEQ ID NO: 325638 - RNA, 19 nt, Artificial Sequence
  Description of Artificial Sequence: Synthetic oligonucleotide
  Antisense Strand to SEQ ID NO: 325637
cucuccaggcaugauuuau

SEQ ID NO: 325639 - RNA, 19 nt, Artificial Sequence
  Description of Artificial Sequence: Synthetic oligonucleotide
  Sense Strand Starting at position 88 of SEQ ID NO: 317731
guaaucaauuauguuucca

SEQ ID NO: 325640 - RNA, 19 nt, Artificial Sequence
  Description of Artificial Sequence: Synthetic oligonucleotide
  Antisense Strand to SEQ ID NO: 325639
uggaaacauaauugauuac

SEQ ID NO: 325641 - RNA, 19 nt, Artificial Sequence
  Description of Artificial Sequence: Synthetic oligonucleotide
  Sense Strand Starting at position 88 of SEQ ID NO: 317765
ggaagcauauuccucaaag

SEQ ID NO: 325642 - RNA, 19 nt, Artificial Sequence
  Description of Artificial Sequence: Synthetic oligonucleotide
  Antisense Strand to SEQ ID NO: 325641
cuuugaggaauaugcuucc

SEQ ID NO: 325643 - RNA, 19 nt, Artificial Sequence
  Description of Artificial Sequence: Synthetic oligonucleotide
  Sense Strand Starting at position 88 of SEQ ID NO: 317985
guagauuacucggcuauuu

SEQ ID NO: 325644 - RNA, 19 nt, Artificial Sequence
  Description of Artificial Sequence: Synthetic oligonucleotide
  Antisense Strand to SEQ ID NO: 325643
aaauagccgaguaaucuac

SEQ ID NO: 325645 - RNA, 19 nt, Artificial Sequence
  Description of Artificial Sequence: Synthetic oligonucleotide
  Sense Strand Starting at position 88 of SEQ ID NO: 318079
auauuuaagcccuguggua

SEQ ID NO: 325646 - RNA, 19 nt, Artificial Sequence
  Description of Artificial Sequence: Synthetic oligonucleotide
  Antisense Strand to SEQ ID NO: 325645
uaccacagggcuuaaauau

SEQ ID NO: 325647 - RNA, 19 nt, Artificial Sequence
  Description of Artificial Sequence: Synthetic oligonucleotide
  Sense Strand Starting at position 88 of SEQ ID NO: 318081
auuuaagcccugugguaau

SEQ ID NO: 325648 - RNA, 19 nt, Artificial Sequence
  Description of Artificial Sequence: Synthetic oligonucleotide
  Antisense Strand to SEQ ID NO: 325647
auuaccacagggcuuaaau

SEQ ID NO: 325649 - RNA, 19 nt, Artificial Sequence
  Description of Artificial Sequence: Synthetic oligonucleotide
  Sense Strand Starting at position 88 of SEQ ID NO: 318351
gagugucauacugguagaa

SEQ ID NO: 325650 - RNA, 19 nt, Artificial Sequence
  Description of Artificial Sequence: Synthetic oligonucleotide
  Antisense Strand to SEQ ID NO: 325649
uucuaccaguaugacacuc

SEQ ID NO: 325651 - RNA, 19 nt, Artificial Sequence
  Description of Artificial Sequence: Synthetic oligonucleotide
  Sense Strand Starting at position 88 of SEQ ID NO: 318526
ggauucuguccuuacccua

SEQ ID NO: 325652 - RNA, 19 nt, Artificial Sequence
  Description of Artificial Sequence: Synthetic oligonucleotide
  Antisense Strand to SEQ ID NO: 325651
uaggguaaggacagaaucc

SEQ ID NO: 325653 - RNA, 19 nt, Artificial Sequence
  Description of Artificial Sequence: Synthetic oligonucleotide
  Sense Strand Starting at position 88 of SEQ ID NO: 318722
gaguaaauuggcgauugca

SEQ ID NO: 325654 - RNA, 19 nt, Artificial Sequence
  Description of Artificial Sequence: Synthetic oligonucleotide
  Antisense Strand to SEQ ID NO: 325653
ugcaaucgccaauuuacuc

SEQ ID NO: 325655 - RNA, 19 nt, Artificial Sequence
  Description of Artificial Sequence: Synthetic oligonucleotide
  Sense Strand Starting at position 88 of SEQ ID NO: 318928
acuguagacuucucugaug

SEQ ID NO: 325656 - RNA, 19 nt, Artificial Sequence
  Description of Artificial Sequence: Synthetic oligonucleotide
  Antisense Strand to SEQ ID NO: 325655
caucagagaagucuacagu

SEQ ID NO: 325657 - RNA, 19 nt, Artificial Sequence
  Description of Artificial Sequence: Synthetic oligonucleotide
  Sense Strand Starting at position 88 of SEQ ID NO: 318930
uguagacuucucugaugaa

SEQ ID NO: 325658 - RNA, 19 nt, Artificial Sequence
  Description of Artificial Sequence: Synthetic oligonucleotide
  Antisense Strand to SEQ ID NO: 325657
uucaucagagaagucuaca

SEQ ID NO: 325659 - RNA, 19 nt, Artificial Sequence
  Description of Artificial Sequence: Synthetic oligonucleotide
  Sense Strand Starting at position 88 of SEQ ID NO: 319003
ccaucccuccuugacgaaa

SEQ ID NO: 325660 - RNA, 19 nt, Artificial Sequence
  Description of Artificial Sequence: Synthetic oligonucleotide
  Antisense Strand to SEQ ID NO: 325659
uuucgucaaggagggaugg

SEQ ID NO: 325661 - RNA, 19 nt, Artificial Sequence
  Description of Artificial Sequence: Synthetic oligonucleotide
  Sense Strand Starting at position 88 of SEQ ID NO: 319173
gucggaagaccuugauuau

SEQ ID NO: 325662 - RNA, 19 nt, Artificial Sequence
  Description of Artificial Sequence: Synthetic oligonucleotide
  Antisense Strand to SEQ ID NO: 325661
auaaucaaggucuuccgac

SEQ ID NO: 325663 - RNA, 19 nt, Artificial Sequence
  Description of Artificial Sequence: Synthetic oligonucleotide
  Sense Strand Starting at position 88 of SEQ ID NO: 319185
ugauuauuaccuugaucga

SEQ ID NO: 325664 - RNA, 19 nt, Artificial Sequence
  Description of Artificial Sequence: Synthetic oligonucleotide
  Antisense Strand to SEQ ID NO: 325663
ucgaucaagguaauaauca

SEQ ID NO: 325665 - RNA, 19 nt, Artificial Sequence
  Description of Artificial Sequence: Synthetic oligonucleotide
  Sense Strand Starting at position 88 of SEQ ID NO: 319188
uuauuaccuugaucgaacu

SEQ ID NO: 325666 - RNA, 19 nt, Artificial Sequence
  Description of Artificial Sequence: Synthetic oligonucleotide
  Antisense Strand to SEQ ID NO: 325665
aguucgaucaagguaauaa

SEQ ID NO: 325667 - RNA, 19 nt, Artificial Sequence
  Description of Artificial Sequence: Synthetic oligonucleotide
  Sense Strand Starting at position 89 of SEQ ID NO: 315254
caggucuaccuagaauguu

SEQ ID NO: 325668 - RNA, 19 nt, Artificial Sequence
  Description of Artificial Sequence: Synthetic oligonucleotide
  Antisense Strand to SEQ ID NO: 325667
aacauucuagguagaccug

SEQ ID NO: 325669 - RNA, 19 nt, Artificial Sequence
  Description of Artificial Sequence: Synthetic oligonucleotide
  Sense Strand Starting at position 89 of SEQ ID NO: 315623
uguuaacuguugguauaua

SEQ ID NO: 325670 - RNA, 19 nt, Artificial Sequence
  Description of Artificial Sequence: Synthetic oligonucleotide
  Antisense Strand to SEQ ID NO: 325669
uauauaccaacaguuaaca

SEQ ID NO: 325671 - RNA, 19 nt, Artificial Sequence
  Description of Artificial Sequence: Synthetic oligonucleotide
  Sense Strand Starting at position 89 of SEQ ID NO: 315647
uuaacacuucuguaguuua

SEQ ID NO: 325672 - RNA, 19 nt, Artificial Sequence
  Description of Artificial Sequence: Synthetic oligonucleotide
  Antisense Strand to SEQ ID NO: 325671
uaaacuacagaaguguuaa

SEQ ID NO: 325673 - RNA, 19 nt, Artificial Sequence
  Description of Artificial Sequence: Synthetic oligonucleotide
  Sense Strand Starting at position 89 of SEQ ID NO: 315652
acuucuguaguuuaguuaa

SEQ ID NO: 325674 - RNA, 19 nt, Artificial Sequence
  Description of Artificial Sequence: Synthetic oligonucleotide
  Antisense Strand to SEQ ID NO: 325673
uuaacuaaacuacagaagu

SEQ ID NO: 325675 - RNA, 19 nt, Artificial Sequence
  Description of Artificial Sequence: Synthetic oligonucleotide
  Sense Strand Starting at position 89 of SEQ ID NO: 315691
gcuauuuguaagugcaguu

SEQ ID NO: 325676 - RNA, 19 nt, Artificial Sequence
  Description of Artificial Sequence: Synthetic oligonucleotide
  Antisense Strand to SEQ ID NO: 325675
aacugcacuuacaaauagc

SEQ ID NO: 325677 - RNA, 19 nt, Artificial Sequence
  Description of Artificial Sequence: Synthetic oligonucleotide
  Sense Strand Starting at position 89 of SEQ ID NO: 315737
cuuguaaaucaugauaugu

SEQ ID NO: 325678 - RNA, 19 nt, Artificial Sequence
  Description of Artificial Sequence: Synthetic oligonucleotide
  Antisense Strand to SEQ ID NO: 325677
acauaucaugauuuacaag

SEQ ID NO: 325679 - RNA, 19 nt, Artificial Sequence
  Description of Artificial Sequence: Synthetic oligonucleotide
  Sense Strand Starting at position 89 of SEQ ID NO: 315815
ucucucuuuggcugggaau

SEQ ID NO: 325680 - RNA, 19 nt, Artificial Sequence
  Description of Artificial Sequence: Synthetic oligonucleotide
  Antisense Strand to SEQ ID NO: 325679
auucccagccaaagagaga

SEQ ID NO: 325681 - RNA, 19 nt, Artificial Sequence
  Description of Artificial Sequence: Synthetic oligonucleotide
  Sense Strand Starting at position 89 of SEQ ID NO: 315816
cucucuuuggcugggaauu

SEQ ID NO: 325682 - RNA, 19 nt, Artificial Sequence
  Description of Artificial Sequence: Synthetic oligonucleotide
  Antisense Strand to SEQ ID NO: 325681
aauucccagccaaagagag

SEQ ID NO: 325683 - RNA, 19 nt, Artificial Sequence
  Description of Artificial Sequence: Synthetic oligonucleotide
  Sense Strand Starting at position 89 of SEQ ID NO: 315916
cuuaguuuaccaugaauug

SEQ ID NO: 325684 - RNA, 19 nt, Artificial Sequence
  Description of Artificial Sequence: Synthetic oligonucleotide
  Antisense Strand to SEQ ID NO: 325683
caauucaugguaaacuaag

SEQ ID NO: 325685 - RNA, 19 nt, Artificial Sequence
  Description of Artificial Sequence: Synthetic oligonucleotide
  Sense Strand Starting at position 89 of SEQ ID NO: 315987
uaaagcugccuugggagaa

SEQ ID NO: 325686 - RNA, 19 nt, Artificial Sequence
  Description of Artificial Sequence: Synthetic oligonucleotide
  Antisense Strand to SEQ ID NO: 325685
uucucccaaggcagcuuua

SEQ ID NO: 325687 - RNA, 19 nt, Artificial Sequence
  Description of Artificial Sequence: Synthetic oligonucleotide
  Sense Strand Starting at position 89 of SEQ ID NO: 316000
ggagaagcccucuauguac

SEQ ID NO: 325688 - RNA, 19 nt, Artificial Sequence
  Description of Artificial Sequence: Synthetic oligonucleotide
  Antisense Strand to SEQ ID NO: 325687
guacauagagggcuucucc

SEQ ID NO: 325689 - RNA, 19 nt, Artificial Sequence
  Description of Artificial Sequence: Synthetic oligonucleotide
  Sense Strand Starting at position 89 of SEQ ID NO: 316023
ugagguguucuggaaauug

SEQ ID NO: 325690 - RNA, 19 nt, Artificial Sequence
  Description of Artificial Sequence: Synthetic oligonucleotide
  Antisense Strand to SEQ ID NO: 325689
caauuuccagaacaccuca

SEQ ID NO: 325691 - RNA, 19 nt, Artificial Sequence
  Description of Artificial Sequence: Synthetic oligonucleotide
  Sense Strand Starting at position 89 of SEQ ID NO: 316250
cacacaguuguaugagagu

SEQ ID NO: 325692 - RNA, 19 nt, Artificial Sequence
  Description of Artificial Sequence: Synthetic oligonucleotide
  Antisense Strand to SEQ ID NO: 325691
acucucauacaacugugug

SEQ ID NO: 325693 - RNA, 19 nt, Artificial Sequence
  Description of Artificial Sequence: Synthetic oligonucleotide
  Sense Strand Starting at position 89 of SEQ ID NO: 316486
aagucagugcaagguauuu

SEQ ID NO: 325694 - RNA, 19 nt, Artificial Sequence
  Description of Artificial Sequence: Synthetic oligonucleotide
  Antisense Strand to SEQ ID NO: 325693
aaauaccuugcacugacuu

SEQ ID NO: 325695 - RNA, 19 nt, Artificial Sequence
  Description of Artificial Sequence: Synthetic oligonucleotide
  Sense Strand Starting at position 89 of SEQ ID NO: 316671
gugaauacaccuugccauc

SEQ ID NO: 325696 - RNA, 19 nt, Artificial Sequence
  Description of Artificial Sequence: Synthetic oligonucleotide
  Antisense Strand to SEQ ID NO: 325695
gauggcaagguguauucac

SEQ ID NO: 325697 - RNA, 19 nt, Artificial Sequence
  Description of Artificial Sequence: Synthetic oligonucleotide
  Sense Strand Starting at position 89 of SEQ ID NO: 316812
cucgacuucugacucaaga

SEQ ID NO: 325698 - RNA, 19 nt, Artificial Sequence
  Description of Artificial Sequence: Synthetic oligonucleotide
  Antisense Strand to SEQ ID NO: 325697
ucuugagucagaagucgag

SEQ ID NO: 325699 - RNA, 19 nt, Artificial Sequence
  Description of Artificial Sequence: Synthetic oligonucleotide
  Sense Strand Starting at position 89 of SEQ ID NO: 316821
ugacucaagauguggcauu

SEQ ID NO: 325700 - RNA, 19 nt, Artificial Sequence
  Description of Artificial Sequence: Synthetic oligonucleotide
  Antisense Strand to SEQ ID NO: 325699
aaugccacaucuugaguca

SEQ ID NO: 325701 - RNA, 19 nt, Artificial Sequence
  Description of Artificial Sequence: Synthetic oligonucleotide
  Sense Strand Starting at position 89 of SEQ ID NO: 316845
ucugcagcaucucuaagau

SEQ ID NO: 325702 - RNA, 19 nt, Artificial Sequence
  Description of Artificial Sequence: Synthetic oligonucleotide
  Antisense Strand to SEQ ID NO: 325701
aucuuagagaugcugcaga

SEQ ID NO: 325703 - RNA, 19 nt, Artificial Sequence
  Description of Artificial Sequence: Synthetic oligonucleotide
  Sense Strand Starting at position 89 of SEQ ID NO: 316895
agacaugcuucccuaggua

SEQ ID NO: 325704 - RNA, 19 nt, Artificial Sequence
  Description of Artificial Sequence: Synthetic oligonucleotide
  Antisense Strand to SEQ ID NO: 325703
uaccuagggaagcaugucu

SEQ ID NO: 325705 - RNA, 19 nt, Artificial Sequence
  Description of Artificial Sequence: Synthetic oligonucleotide
  Sense Strand Starting at position 89 of SEQ ID NO: 316899
augcuucccuagguauaaa

SEQ ID NO: 325706 - RNA, 19 nt, Artificial Sequence
  Description of Artificial Sequence: Synthetic oligonucleotide
  Antisense Strand to SEQ ID NO: 325705
uuuauaccuagggaagcau

SEQ ID NO: 325707 - RNA, 19 nt, Artificial Sequence
  Description of Artificial Sequence: Synthetic oligonucleotide
  Sense Strand Starting at position 89 of SEQ ID NO: 316917
agaauacaguagucugcaa

SEQ ID NO: 325708 - RNA, 19 nt, Artificial Sequence
  Description of Artificial Sequence: Synthetic oligonucleotide
  Antisense Strand to SEQ ID NO: 325707
uugcagacuacuguauucu

SEQ ID NO: 325709 - RNA, 19 nt, Artificial Sequence
  Description of Artificial Sequence: Synthetic oligonucleotide
  Sense Strand Starting at position 89 of SEQ ID NO: 316924
aguagucugcaaggucaaa

SEQ ID NO: 325710 - RNA, 19 nt, Artificial Sequence
  Description of Artificial Sequence: Synthetic oligonucleotide
  Antisense Strand to SEQ ID NO: 325709
uuugaccuugcagacuacu

SEQ ID NO: 325711 - RNA, 19 nt, Artificial Sequence
  Description of Artificial Sequence: Synthetic oligonucleotide
  Sense Strand Starting at position 89 of SEQ ID NO: 316994
gcaauaaaccuuugagggu

SEQ ID NO: 325712 - RNA, 19 nt, Artificial Sequence
  Description of Artificial Sequence: Synthetic oligonucleotide
  Antisense Strand to SEQ ID NO: 325711
acccucaaagguuuauugc

SEQ ID NO: 325713 - RNA, 19 nt, Artificial Sequence
  Description of Artificial Sequence: Synthetic oligonucleotide
  Sense Strand Starting at position 89 of SEQ ID NO: 317481
cuuagaaaguuaguucuuu

SEQ ID NO: 325714 - RNA, 19 nt, Artificial Sequence
  Description of Artificial Sequence: Synthetic oligonucleotide
  Antisense Strand to SEQ ID NO: 325713
aaagaacuaacuuucuaag

SEQ ID NO: 325715 - RNA, 19 nt, Artificial Sequence
  Description of Artificial Sequence: Synthetic oligonucleotide
  Sense Strand Starting at position 89 of SEQ ID NO: 317546
ugguaauuauuacuagaca

SEQ ID NO: 325716 - RNA, 19 nt, Artificial Sequence
  Description of Artificial Sequence: Synthetic oligonucleotide
  Antisense Strand to SEQ ID NO: 325715
ugucuaguaauaauuacca

SEQ ID NO: 325717 - RNA, 19 nt, Artificial Sequence
  Description of Artificial Sequence: Synthetic oligonucleotide
  Sense Strand Starting at position 89 of SEQ ID NO: 317575
uuaauauguuucuuuggga

SEQ ID NO: 325718 - RNA, 19 nt, Artificial Sequence
  Description of Artificial Sequence: Synthetic oligonucleotide
  Antisense Strand to SEQ ID NO: 325717
ucccaaagaaacauauuaa

SEQ ID NO: 325719 - RNA, 19 nt, Artificial Sequence
  Description of Artificial Sequence: Synthetic oligonucleotide
  Sense Strand Starting at position 89 of SEQ ID NO: 317782
aaaggaugguaguuugagu

SEQ ID NO: 325720 - RNA, 19 nt, Artificial Sequence
  Description of Artificial Sequence: Synthetic oligonucleotide
  Antisense Strand to SEQ ID NO: 325719
acucaaacuaccauccuuu

SEQ ID NO: 325721 - RNA, 19 nt, Artificial Sequence
  Description of Artificial Sequence: Synthetic oligonucleotide
  Sense Strand Starting at position 89 of SEQ ID NO: 317800
ucuguaaagugacuaguaa

SEQ ID NO: 325722 - RNA, 19 nt, Artificial Sequence
  Description of Artificial Sequence: Synthetic oligonucleotide
  Antisense Strand to SEQ ID NO: 325721
uuacuagucacuuuacaga

SEQ ID NO: 325723 - RNA, 19 nt, Artificial Sequence
  Description of Artificial Sequence: Synthetic oligonucleotide
  Sense Strand Starting at position 89 of SEQ ID NO: 317801
cuguaaagugacuaguaag

SEQ ID NO: 325724 - RNA, 19 nt, Artificial Sequence
  Description of Artificial Sequence: Synthetic oligonucleotide
  Antisense Strand to SEQ ID NO: 325723
cuuacuagucacuuuacag

SEQ ID NO: 325725 - RNA, 19 nt, Artificial Sequence
  Description of Artificial Sequence: Synthetic oligonucleotide
  Sense Strand Starting at position 89 of SEQ ID NO: 317862
gugcauucugacggauuuc

SEQ ID NO: 325726 - RNA, 19 nt, Artificial Sequence
  Description of Artificial Sequence: Synthetic oligonucleotide
  Antisense Strand to SEQ ID NO: 325725
gaaauccgucagaaugcac

SEQ ID NO: 325727 - RNA, 19 nt, Artificial Sequence
  Description of Artificial Sequence: Synthetic oligonucleotide
  Sense Strand Starting at position 89 of SEQ ID NO: 318049
ugaacaaauugagcucuaa

SEQ ID NO: 325728 - RNA, 19 nt, Artificial Sequence
  Description of Artificial Sequence: Synthetic oligonucleotide
  Antisense Strand to SEQ ID NO: 325727
uuagagcucaauuuguuca

SEQ ID NO: 325729 - RNA, 19 nt, Artificial Sequence
  Description of Artificial Sequence: Synthetic oligonucleotide
  Sense Strand Starting at position 89 of SEQ ID NO: 318084
ccaaaugagucucugauac

SEQ ID NO: 325730 - RNA, 19 nt, Artificial Sequence
  Description of Artificial Sequence: Synthetic oligonucleotide
  Antisense Strand to SEQ ID NO: 325729
guaucagagacucauuugg

SEQ ID NO: 325731 - RNA, 19 nt, Artificial Sequence
  Description of Artificial Sequence: Synthetic oligonucleotide
  Sense Strand Starting at position 89 of SEQ ID NO: 318103
agauccugucaugguuaca

SEQ ID NO: 325732 - RNA, 19 nt, Artificial Sequence
  Description of Artificial Sequence: Synthetic oligonucleotide
  Antisense Strand to SEQ ID NO: 325731
uguaaccaugacaggaucu

SEQ ID NO: 325733 - RNA, 19 nt, Artificial Sequence
  Description of Artificial Sequence: Synthetic oligonucleotide
  Sense Strand Starting at position 89 of SEQ ID NO: 318209
uuaccuuuggugcagaauu

SEQ ID NO: 325734 - RNA, 19 nt, Artificial Sequence
  Description of Artificial Sequence: Synthetic oligonucleotide
  Antisense Strand to SEQ ID NO: 325733
aauucugcaccaaagguaa

SEQ ID NO: 325735 - RNA, 19 nt, Artificial Sequence
  Description of Artificial Sequence: Synthetic oligonucleotide
  Sense Strand Starting at position 89 of SEQ ID NO: 318616
gcauuaugcaccgaagauu

SEQ ID NO: 325736 - RNA, 19 nt, Artificial Sequence
  Description of Artificial Sequence: Synthetic oligonucleotide
  Antisense Strand to SEQ ID NO: 325735
aaucuucggugcauaaugc

SEQ ID NO: 325737 - RNA, 19 nt, Artificial Sequence
  Description of Artificial Sequence: Synthetic oligonucleotide
  Sense Strand Starting at position 89 of SEQ ID NO: 318817
ugguuucucucuuuaugaa

SEQ ID NO: 325738 - RNA, 19 nt, Artificial Sequence
  Description of Artificial Sequence: Synthetic oligonucleotide
  Antisense Strand to SEQ ID NO: 325737
uucauaaagagagaaacca

SEQ ID NO: 325739 - RNA, 19 nt, Artificial Sequence
  Description of Artificial Sequence: Synthetic oligonucleotide
  Sense Strand Starting at position 89 of SEQ ID NO: 318818
gguuucucucuuuaugaaa

SEQ ID NO: 325740 - RNA, 19 nt, Artificial Sequence
  Description of Artificial Sequence: Synthetic oligonucleotide
  Antisense Strand to SEQ ID NO: 325739
uuucauaaagagagaaacc

SEQ ID NO: 325741 - RNA, 19 nt, Artificial Sequence
  Description of Artificial Sequence: Synthetic oligonucleotide
  Sense Strand Starting at position 89 of SEQ ID NO: 318918
uuuauaauggcauggcuga

SEQ ID NO: 325742 - RNA, 19 nt, Artificial Sequence
  Description of Artificial Sequence: Synthetic oligonucleotide
  Antisense Strand to SEQ ID NO: 325741
ucagccaugccauuauaaa

SEQ ID NO: 325743 - RNA, 19 nt, Artificial Sequence
  Description of Artificial Sequence: Synthetic oligonucleotide
  Sense Strand Starting at position 89 of SEQ ID NO: 318953
cuacuuauaguuugggaag

SEQ ID NO: 325744 - RNA, 19 nt, Artificial Sequence
  Description of Artificial Sequence: Synthetic oligonucleotide
  Antisense Strand to SEQ ID NO: 325743
cuucccaaacuauaaguag

SEQ ID NO: 325745 - RNA, 19 nt, Artificial Sequence
  Description of Artificial Sequence: Synthetic oligonucleotide
  Sense Strand Starting at position 89 of SEQ ID NO: 318985
auucuuguugcagggugaa

SEQ ID NO: 325746 - RNA, 19 nt, Artificial Sequence
  Description of Artificial Sequence: Synthetic oligonucleotide
  Antisense Strand to SEQ ID NO: 325745
uucacccugcaacaagaau

SEQ ID NO: 325747 - RNA, 19 nt, Artificial Sequence
  Description of Artificial Sequence: Synthetic oligonucleotide
  Sense Strand Starting at position 90 of SEQ ID NO: 315578
ccucucuaaguagggauaa

SEQ ID NO: 325748 - RNA, 19 nt, Artificial Sequence
  Description of Artificial Sequence: Synthetic oligonucleotide
  Antisense Strand to SEQ ID NO: 325747
uuaucccuacuuagagagg

SEQ ID NO: 325749 - RNA, 19 nt, Artificial Sequence
  Description of Artificial Sequence: Synthetic oligonucleotide
  Sense Strand Starting at position 90 of SEQ ID NO: 315681
uagugaucacuccaugguu

SEQ ID NO: 325750 - RNA, 19 nt, Artificial Sequence
  Description of Artificial Sequence: Synthetic oligonucleotide
  Antisense Strand to SEQ ID NO: 325749
aaccauggagugaucacua

SEQ ID NO: 325751 - RNA, 19 nt, Artificial Sequence
  Description of Artificial Sequence: Synthetic oligonucleotide
  Sense Strand Starting at position 90 of SEQ ID NO: 315717
acuauauagguuugaugua

SEQ ID NO: 325752 - RNA, 19 nt, Artificial Sequence
  Description of Artificial Sequence: Synthetic oligonucleotide
  Antisense Strand to SEQ ID NO: 325751
uacaucaaaccuauauagu

SEQ ID NO: 325753 - RNA, 19 nt, Artificial Sequence
  Description of Artificial Sequence: Synthetic oligonucleotide
  Sense Strand Starting at position 90 of SEQ ID NO: 315827
caaguaaacuggguuauca

SEQ ID NO: 325754 - RNA, 19 nt, Artificial Sequence
  Description of Artificial Sequence: Synthetic oligonucleotide
  Antisense Strand to SEQ ID NO: 325753
ugauaacccaguuuacuug

SEQ ID NO: 325755 - RNA, 19 nt, Artificial Sequence
  Description of Artificial Sequence: Synthetic oligonucleotide
  Sense Strand Starting at position 90 of SEQ ID NO: 315861
ugguuacugccucaggaga

SEQ ID NO: 325756 - RNA, 19 nt, Artificial Sequence
  Description of Artificial Sequence: Synthetic oligonucleotide
  Antisense Strand to SEQ ID NO: 325755
ucuccugaggcaguaacca

SEQ ID NO: 325757 - RNA, 19 nt, Artificial Sequence
  Description of Artificial Sequence: Synthetic oligonucleotide
  Sense Strand Starting at position 90 of SEQ ID NO: 315919
ugccauauccaggacgauu

SEQ ID NO: 325758 - RNA, 19 nt, Artificial Sequence
  Description of Artificial Sequence: Synthetic oligonucleotide
  Antisense Strand to SEQ ID NO: 325757
aaucguccuggauauggca

SEQ ID NO: 325759 - RNA, 19 nt, Artificial Sequence
  Description of Artificial Sequence: Synthetic oligonucleotide
  Sense Strand Starting at position 90 of SEQ ID NO: 315928
caggacgauucuucuuaca

SEQ ID NO: 325760 - RNA, 19 nt, Artificial Sequence
  Description of Artificial Sequence: Synthetic oligonucleotide
  Antisense Strand to SEQ ID NO: 325759
uguaagaagaaucguccug

SEQ ID NO: 325761 - RNA, 19 nt, Artificial Sequence
  Description of Artificial Sequence: Synthetic oligonucleotide
  Sense Strand Starting at position 90 of SEQ ID NO: 315930
ggacgauucuucuuacacc

SEQ ID NO: 325762 - RNA, 19 nt, Artificial Sequence
  Description of Artificial Sequence: Synthetic oligonucleotide
  Antisense Strand to SEQ ID NO: 325761
gguguaagaagaaucgucc

SEQ ID NO: 325763 - RNA, 19 nt, Artificial Sequence
  Description of Artificial Sequence: Synthetic oligonucleotide
  Sense Strand Starting at position 90 of SEQ ID NO: 316087
cccuacuaagguugaagau

SEQ ID NO: 325764 - RNA, 19 nt, Artificial Sequence
  Description of Artificial Sequence: Synthetic oligonucleotide
  Antisense Strand to SEQ ID NO: 325763
aucuucaaccuuaguaggg

SEQ ID NO: 325765 - RNA, 19 nt, Artificial Sequence
  Description of Artificial Sequence: Synthetic oligonucleotide
  Sense Strand Starting at position 90 of SEQ ID NO: 316096
gguugaagauaacuaacuu

SEQ ID NO: 325766 - RNA, 19 nt, Artificial Sequence
  Description of Artificial Sequence: Synthetic oligonucleotide
  Antisense Strand to SEQ ID NO: 325765
aaguuaguuaucuucaacc

SEQ ID NO: 325767 - RNA, 19 nt, Artificial Sequence
  Description of Artificial Sequence: Synthetic oligonucleotide
  Sense Strand Starting at position 90 of SEQ ID NO: 316311
ucuaguuaggcauaauauc

SEQ ID NO: 325768 - RNA, 19 nt, Artificial Sequence
  Description of Artificial Sequence: Synthetic oligonucleotide
  Antisense Strand to SEQ ID NO: 325767
gauauuaugccuaacuaga

SEQ ID NO: 325769 - RNA, 19 nt, Artificial Sequence
  Description of Artificial Sequence: Synthetic oligonucleotide
  Sense Strand Starting at position 90 of SEQ ID NO: 316343
auugacagcuccuuggauu

SEQ ID NO: 325770 - RNA, 19 nt, Artificial Sequence
  Description of Artificial Sequence: Synthetic oligonucleotide
  Antisense Strand to SEQ ID NO: 325769
aauccaaggagcugucaau

SEQ ID NO: 325771 - RNA, 19 nt, Artificial Sequence
  Description of Artificial Sequence: Synthetic oligonucleotide
  Sense Strand Starting at position 90 of SEQ ID NO: 316436
uacuauauugccgaugaga

SEQ ID NO: 325772 - RNA, 19 nt, Artificial Sequence
  Description of Artificial Sequence: Synthetic oligonucleotide
  Antisense Strand to SEQ ID NO: 325771
ucucaucggcaauauagua

SEQ ID NO: 325773 - RNA, 19 nt, Artificial Sequence
  Description of Artificial Sequence: Synthetic oligonucleotide
  Sense Strand Starting at position 90 of SEQ ID NO: 316438
cuauauugccgaugagaaa

SEQ ID NO: 325774 - RNA, 19 nt, Artificial Sequence
  Description of Artificial Sequence: Synthetic oligonucleotide
  Antisense Strand to SEQ ID NO: 325773
uuucucaucggcaauauag

SEQ ID NO: 325775 - RNA, 19 nt, Artificial Sequence
  Description of Artificial Sequence: Synthetic oligonucleotide
  Sense Strand Starting at position 90 of SEQ ID NO: 316490
cuguuccuggcuuauaaau

SEQ ID NO: 325776 - RNA, 19 nt, Artificial Sequence
  Description of Artificial Sequence: Synthetic oligonucleotide
  Antisense Strand to SEQ ID NO: 325775
auuuauaagccaggaacag

SEQ ID NO: 325777 - RNA, 19 nt, Artificial Sequence
  Description of Artificial Sequence: Synthetic oligonucleotide
  Sense Strand Starting at position 90 of SEQ ID NO: 316514
gcaaacucuguugaaugau

SEQ ID NO: 325778 - RNA, 19 nt, Artificial Sequence
  Description of Artificial Sequence: Synthetic oligonucleotide
  Antisense Strand to SEQ ID NO: 325777
aucauucaacagaguuugc

SEQ ID NO: 325779 - RNA, 19 nt, Artificial Sequence
  Description of Artificial Sequence: Synthetic oligonucleotide
  Sense Strand Starting at position 90 of SEQ ID NO: 316572
gguguaauuauccauguga

SEQ ID NO: 325780 - RNA, 19 nt, Artificial Sequence
  Description of Artificial Sequence: Synthetic oligonucleotide
  Antisense Strand to SEQ ID NO: 325779
ucacauggauaauuacacc

SEQ ID NO: 325781 - RNA, 19 nt, Artificial Sequence
  Description of Artificial Sequence: Synthetic oligonucleotide
  Sense Strand Starting at position 90 of SEQ ID NO: 316574
uguaauuauccaugugaaa

SEQ ID NO: 325782 - RNA, 19 nt, Artificial Sequence
  Description of Artificial Sequence: Synthetic oligonucleotide
  Antisense Strand to SEQ ID NO: 325781
uuucacauggauaauuaca

SEQ ID NO: 325783 - RNA, 19 nt, Artificial Sequence
  Description of Artificial Sequence: Synthetic oligonucleotide
  Sense Strand Starting at position 90 of SEQ ID NO: 316593
cguggacagguuuacuuua

SEQ ID NO: 325784 - RNA, 19 nt, Artificial Sequence
  Description of Artificial Sequence: Synthetic oligonucleotide
  Antisense Strand to SEQ ID NO: 325783
uaaaguaaaccuguccacg

SEQ ID NO: 325785 - RNA, 19 nt, Artificial Sequence
  Description of Artificial Sequence: Synthetic oligonucleotide
  Sense Strand Starting at position 90 of SEQ ID NO: 316595
uggacagguuuacuuuaaa

SEQ ID NO: 325786 - RNA, 19 nt, Artificial Sequence
  Description of Artificial Sequence: Synthetic oligonucleotide
  Antisense Strand to SEQ ID NO: 325785
uuuaaaguaaaccugucca

SEQ ID NO: 325787 - RNA, 19 nt, Artificial Sequence
  Description of Artificial Sequence: Synthetic oligonucleotide
  Sense Strand Starting at position 90 of SEQ ID NO: 316598
acagguuuacuuuaaaguc

SEQ ID NO: 325788 - RNA, 19 nt, Artificial Sequence
  Description of Artificial Sequence: Synthetic oligonucleotide
  Antisense Strand to SEQ ID NO: 325787
gacuuuaaaguaaaccugu

SEQ ID NO: 325789 - RNA, 19 nt, Artificial Sequence
  Description of Artificial Sequence: Synthetic oligonucleotide
  Sense Strand Starting at position 90 of SEQ ID NO: 316809
agaaguuuccaugaguagc

SEQ ID NO: 325790 - RNA, 19 nt, Artificial Sequence
  Description of Artificial Sequence: Synthetic oligonucleotide
  Antisense Strand to SEQ ID NO: 325789
gcuacucauggaaacuucu

SEQ ID NO: 325791 - RNA, 19 nt, Artificial Sequence
  Description of Artificial Sequence: Synthetic oligonucleotide
  Sense Strand Starting at position 90 of SEQ ID NO: 316864
caaauaagacuucgguuag

SEQ ID NO: 325792 - RNA, 19 nt, Artificial Sequence
  Description of Artificial Sequence: Synthetic oligonucleotide
  Antisense Strand to SEQ ID NO: 325791
cuaaccgaagucuuauuug

SEQ ID NO: 325793 - RNA, 19 nt, Artificial Sequence
  Description of Artificial Sequence: Synthetic oligonucleotide
  Sense Strand Starting at position 90 of SEQ ID NO: 317069
uggauacagcaguaguaaa

SEQ ID NO: 325794 - RNA, 19 nt, Artificial Sequence
  Description of Artificial Sequence: Synthetic oligonucleotide
  Antisense Strand to SEQ ID NO: 325793
uuuacuacugcuguaucca

SEQ ID NO: 325795 - RNA, 19 nt, Artificial Sequence
  Description of Artificial Sequence: Synthetic oligonucleotide
  Sense Strand Starting at position 90 of SEQ ID NO: 317239
acauguaagccucagaauu

SEQ ID NO: 325796 - RNA, 19 nt, Artificial Sequence
  Description of Artificial Sequence: Synthetic oligonucleotide
  Antisense Strand to SEQ ID NO: 325795
aauucugaggcuuacaugu

SEQ ID NO: 325797 - RNA, 19 nt, Artificial Sequence
  Description of Artificial Sequence: Synthetic oligonucleotide
  Sense Strand Starting at position 90 of SEQ ID NO: 317383
uuggaaacaugaucucuuu

SEQ ID NO: 325798 - RNA, 19 nt, Artificial Sequence
  Description of Artificial Sequence: Synthetic oligonucleotide
  Antisense Strand to SEQ ID NO: 325797
aaagagaucauguuuccaa

SEQ ID NO: 325799 - RNA, 19 nt, Artificial Sequence
  Description of Artificial Sequence: Synthetic oligonucleotide
  Sense Strand Starting at position 90 of SEQ ID NO: 317933
cgaugucuuagagguaaga

SEQ ID NO: 325800 - RNA, 19 nt, Artificial Sequence
  Description of Artificial Sequence: Synthetic oligonucleotide
  Antisense Strand to SEQ ID NO: 325799
ucuuaccucuaagacaucg

SEQ ID NO: 325801 - RNA, 19 nt, Artificial Sequence
  Description of Artificial Sequence: Synthetic oligonucleotide
  Sense Strand Starting at position 90 of SEQ ID NO: 317960
gguauaguuggguaacuuu

SEQ ID NO: 325802 - RNA, 19 nt, Artificial Sequence
  Description of Artificial Sequence: Synthetic oligonucleotide
  Antisense Strand to SEQ ID NO: 325801
aaaguuacccaacuauacc

SEQ ID NO: 325803 - RNA, 19 nt, Artificial Sequence
  Description of Artificial Sequence: Synthetic oligonucleotide
  Sense Strand Starting at position 90 of SEQ ID NO: 318030
guauaauuacuuuagguag

SEQ ID NO: 325804 - RNA, 19 nt, Artificial Sequence
  Description of Artificial Sequence: Synthetic oligonucleotide
  Antisense Strand to SEQ ID NO: 325803
cuaccuaaaguaauuauac

SEQ ID NO: 325805 - RNA, 19 nt, Artificial Sequence
  Description of Artificial Sequence: Synthetic oligonucleotide
  Sense Strand Starting at position 90 of SEQ ID NO: 318036
uuacuuuagguaggagagu

SEQ ID NO: 325806 - RNA, 19 nt, Artificial Sequence
  Description of Artificial Sequence: Synthetic oligonucleotide
  Antisense Strand to SEQ ID NO: 325805
acucuccuaccuaaaguaa

SEQ ID NO: 325807 - RNA, 19 nt, Artificial Sequence
  Description of Artificial Sequence: Synthetic oligonucleotide
  Sense Strand Starting at position 90 of SEQ ID NO: 318198
agaacaaugcaaugagugu

SEQ ID NO: 325808 - RNA, 19 nt, Artificial Sequence
  Description of Artificial Sequence: Synthetic oligonucleotide
  Antisense Strand to SEQ ID NO: 325807
acacucauugcauuguucu

SEQ ID NO: 325809 - RNA, 19 nt, Artificial Sequence
  Description of Artificial Sequence: Synthetic oligonucleotide
  Sense Strand Starting at position 90 of SEQ ID NO: 318207
caaugaguguuugcaaaga

SEQ ID NO: 325810 - RNA, 19 nt, Artificial Sequence
  Description of Artificial Sequence: Synthetic oligonucleotide
  Antisense Strand to SEQ ID NO: 325809
ucuuugcaaacacucauug

SEQ ID NO: 325811 - RNA, 19 nt, Artificial Sequence
  Description of Artificial Sequence: Synthetic oligonucleotide
  Sense Strand Starting at position 90 of SEQ ID NO: 318369
gcuugauccagugccgagu

SEQ ID NO: 325812 - RNA, 19 nt, Artificial Sequence
  Description of Artificial Sequence: Synthetic oligonucleotide
  Antisense Strand to SEQ ID NO: 325811
acucggcacuggaucaagc

SEQ ID NO: 325813 - RNA, 19 nt, Artificial Sequence
  Description of Artificial Sequence: Synthetic oligonucleotide
  Sense Strand Starting at position 90 of SEQ ID NO: 318429
uagaaugucccguagugga

SEQ ID NO: 325814 - RNA, 19 nt, Artificial Sequence
  Description of Artificial Sequence: Synthetic oligonucleotide
  Antisense Strand to SEQ ID NO: 325813
uccacuacgggacauucua

SEQ ID NO: 325815 - RNA, 19 nt, Artificial Sequence
  Description of Artificial Sequence: Synthetic oligonucleotide
  Sense Strand Starting at position 90 of SEQ ID NO: 318498
ccgacuuuauaauccgaga

SEQ ID NO: 325816 - RNA, 19 nt, Artificial Sequence
  Description of Artificial Sequence: Synthetic oligonucleotide
  Antisense Strand to SEQ ID NO: 325815
ucucggauuauaaagucgg

SEQ ID NO: 325817 - RNA, 19 nt, Artificial Sequence
  Description of Artificial Sequence: Synthetic oligonucleotide
  Sense Strand Starting at position 90 of SEQ ID NO: 318625
cuaagaucauaauugugau

SEQ ID NO: 325818 - RNA, 19 nt, Artificial Sequence
  Description of Artificial Sequence: Synthetic oligonucleotide
  Antisense Strand to SEQ ID NO: 325817
aucacaauuaugaucuuag

SEQ ID NO: 325819 - RNA, 19 nt, Artificial Sequence
  Description of Artificial Sequence: Synthetic oligonucleotide
  Sense Strand Starting at position 90 of SEQ ID NO: 319034
aaguauuucguauggugca

SEQ ID NO: 325820 - RNA, 19 nt, Artificial Sequence
  Description of Artificial Sequence: Synthetic oligonucleotide
  Antisense Strand to SEQ ID NO: 325819
ugcaccauacgaaauacuu

SEQ ID NO: 325821 - RNA, 19 nt, Artificial Sequence
  Description of Artificial Sequence: Synthetic oligonucleotide
  Sense Strand Starting at position 90 of SEQ ID NO: 319051
caugauucuagguguggaa

SEQ ID NO: 325822 - RNA, 19 nt, Artificial Sequence
  Description of Artificial Sequence: Synthetic oligonucleotide
  Antisense Strand to SEQ ID NO: 325821
uuccacaccuagaaucaug

SEQ ID NO: 325823 - RNA, 19 nt, Artificial Sequence
  Description of Artificial Sequence: Synthetic oligonucleotide
  Sense Strand Starting at position 90 of SEQ ID NO: 319053
ugauucuagguguggaaga

SEQ ID NO: 325824 - RNA, 19 nt, Artificial Sequence
  Description of Artificial Sequence: Synthetic oligonucleotide
  Antisense Strand to SEQ ID NO: 325823
ucuuccacaccuagaauca

SEQ ID NO: 325825 - RNA, 19 nt, Artificial Sequence
  Description of Artificial Sequence: Synthetic oligonucleotide
  Sense Strand Starting at position 90 of SEQ ID NO: 319213
ugcuuagagcucuaaucca

SEQ ID NO: 325826 - RNA, 19 nt, Artificial Sequence
  Description of Artificial Sequence: Synthetic oligonucleotide
  Antisense Strand to SEQ ID NO: 325825
uggauuagagcucuaagca

SEQ ID NO: 325827 - RNA, 19 nt, Artificial Sequence
  Description of Artificial Sequence: Synthetic oligonucleotide
  Sense Strand Starting at position 91 of SEQ ID NO: 315670
agaauuugcuuugaagaag

SEQ ID NO: 325828 - RNA, 19 nt, Artificial Sequence
  Description of Artificial Sequence: Synthetic oligonucleotide
  Antisense Strand to SEQ ID NO: 325827
cuucuucaaagcaaauucu

SEQ ID NO: 325829 - RNA, 19 nt, Artificial Sequence
  Description of Artificial Sequence: Synthetic oligonucleotide
  Sense Strand Starting at position 91 of SEQ ID NO: 315803
gguggauugggaugaaagu

SEQ ID NO: 325830 - RNA, 19 nt, Artificial Sequence
  Description of Artificial Sequence: Synthetic oligonucleotide
  Antisense Strand to SEQ ID NO: 325829
acuuucaucccaauccacc

SEQ ID NO: 325831 - RNA, 19 nt, Artificial Sequence
  Description of Artificial Sequence: Synthetic oligonucleotide
  Sense Strand Starting at position 91 of SEQ ID NO: 315960
agaagagaaggguguucua

SEQ ID NO: 325832 - RNA, 19 nt, Artificial Sequence
  Description of Artificial Sequence: Synthetic oligonucleotide
  Antisense Strand to SEQ ID NO: 325831
uagaacacccuucucuucu

SEQ ID NO: 325833 - RNA, 19 nt, Artificial Sequence
  Description of Artificial Sequence: Synthetic oligonucleotide
  Sense Strand Starting at position 91 of SEQ ID NO: 315963
agagaaggguguucuaauu

SEQ ID NO: 325834 - RNA, 19 nt, Artificial Sequence
  Description of Artificial Sequence: Synthetic oligonucleotide
  Antisense Strand to SEQ ID NO: 325833
aauuagaacacccuucucu

SEQ ID NO: 325835 - RNA, 19 nt, Artificial Sequence
  Description of Artificial Sequence: Synthetic oligonucleotide
  Sense Strand Starting at position 91 of SEQ ID NO: 316115
auccgaacuugaucaacau

SEQ ID NO: 325836 - RNA, 19 nt, Artificial Sequence
  Description of Artificial Sequence: Synthetic oligonucleotide
  Antisense Strand to SEQ ID NO: 325835
auguugaucaaguucggau

SEQ ID NO: 325837 - RNA, 19 nt, Artificial Sequence
  Description of Artificial Sequence: Synthetic oligonucleotide
  Sense Strand Starting at position 91 of SEQ ID NO: 316140
gcaucacucgaacaaccuu

SEQ ID NO: 325838 - RNA, 19 nt, Artificial Sequence
  Description of Artificial Sequence: Synthetic oligonucleotide
  Antisense Strand to SEQ ID NO: 325837
aagguuguucgagugaugc

SEQ ID NO: 325839 - RNA, 19 nt, Artificial Sequence
  Description of Artificial Sequence: Synthetic oligonucleotide
  Sense Strand Starting at position 91 of SEQ ID NO: 316148
cgaacaaccuuuccagaga

SEQ ID NO: 325840 - RNA, 19 nt, Artificial Sequence
  Description of Artificial Sequence: Synthetic oligonucleotide
  Antisense Strand to SEQ ID NO: 325839
ucucuggaaagguuguucg

SEQ ID NO: 325841 - RNA, 19 nt, Artificial Sequence
  Description of Artificial Sequence: Synthetic oligonucleotide
  Sense Strand Starting at position 91 of SEQ ID NO: 316166
agauguugcagccaugaca

SEQ ID NO: 325842 - RNA, 19 nt, Artificial Sequence
  Description of Artificial Sequence: Synthetic oligonucleotide
  Antisense Strand to SEQ ID NO: 325841
ugucauggcugcaacaucu

SEQ ID NO: 325843 - RNA, 19 nt, Artificial Sequence
  Description of Artificial Sequence: Synthetic oligonucleotide
  Sense Strand Starting at position 91 of SEQ ID NO: 316279
ggagauguggugugaugaa

SEQ ID NO: 325844 - RNA, 19 nt, Artificial Sequence
  Description of Artificial Sequence: Synthetic oligonucleotide
  Antisense Strand to SEQ ID NO: 325843
uucaucacaccacaucucc

SEQ ID NO: 325845 - RNA, 19 nt, Artificial Sequence
  Description of Artificial Sequence: Synthetic oligonucleotide
  Sense Strand Starting at position 91 of SEQ ID NO: 316349
uguacuuauccugauucuu

SEQ ID NO: 325846 - RNA, 19 nt, Artificial Sequence
  Description of Artificial Sequence: Synthetic oligonucleotide
  Antisense Strand to SEQ ID NO: 325845
aagaaucaggauaaguaca

SEQ ID NO: 325847 - RNA, 19 nt, Artificial Sequence
  Description of Artificial Sequence: Synthetic oligonucleotide
  Sense Strand Starting at position 91 of SEQ ID NO: 316434
cacugcuaggcagaguuaa

SEQ ID NO: 325848 - RNA, 19 nt, Artificial Sequence
  Description of Artificial Sequence: Synthetic oligonucleotide
  Antisense Strand to SEQ ID NO: 325847
uuaacucugccuagcagug

SEQ ID NO: 325849 - RNA, 19 nt, Artificial Sequence
  Description of Artificial Sequence: Synthetic oligonucleotide
  Sense Strand Starting at position 91 of SEQ ID NO: 316650
guggacuuaccuuaguauc

SEQ ID NO: 325850 - RNA, 19 nt, Artificial Sequence
  Description of Artificial Sequence: Synthetic oligonucleotide
  Antisense Strand to SEQ ID NO: 325849
gauacuaagguaaguccac

SEQ ID NO: 325851 - RNA, 19 nt, Artificial Sequence
  Description of Artificial Sequence: Synthetic oligonucleotide
  Sense Strand Starting at position 91 of SEQ ID NO: 316668
cuuugauaacuguagaugu

SEQ ID NO: 325852 - RNA, 19 nt, Artificial Sequence
  Description of Artificial Sequence: Synthetic oligonucleotide
  Antisense Strand to SEQ ID NO: 325851
acaucuacaguuaucaaag

SEQ ID NO: 325853 - RNA, 19 nt, Artificial Sequence
  Description of Artificial Sequence: Synthetic oligonucleotide
  Sense Strand Starting at position 91 of SEQ ID NO: 316814
gcugaugggaaauguaaag

SEQ ID NO: 325854 - RNA, 19 nt, Artificial Sequence
  Description of Artificial Sequence: Synthetic oligonucleotide
  Antisense Strand to SEQ ID NO: 325853
cuuuacauuucccaucagc

SEQ ID NO: 325855 - RNA, 19 nt, Artificial Sequence
  Description of Artificial Sequence: Synthetic oligonucleotide
  Sense Strand Starting at position 91 of SEQ ID NO: 316830
aaggguuaacucugcagaa

SEQ ID NO: 325856 - RNA, 19 nt, Artificial Sequence
  Description of Artificial Sequence: Synthetic oligonucleotide
  Antisense Strand to SEQ ID NO: 325855
uucugcagaguuaacccuu

SEQ ID NO: 325857 - RNA, 19 nt, Artificial Sequence
  Description of Artificial Sequence: Synthetic oligonucleotide
  Sense Strand Starting at position 91 of SEQ ID NO: 316831
aggguuaacucugcagaag

SEQ ID NO: 325858 - RNA, 19 nt, Artificial Sequence
  Description of Artificial Sequence: Synthetic oligonucleotide
  Antisense Strand to SEQ ID NO: 325857
cuucugcagaguuaacccu

SEQ ID NO: 325859 - RNA, 19 nt, Artificial Sequence
  Description of Artificial Sequence: Synthetic oligonucleotide
  Sense Strand Starting at position 91 of SEQ ID NO: 316832
ggguuaacucugcagaagu

SEQ ID NO: 325860 - RNA, 19 nt, Artificial Sequence
  Description of Artificial Sequence: Synthetic oligonucleotide
  Antisense Strand to SEQ ID NO: 325859
acuucugcagaguuaaccc

SEQ ID NO: 325861 - RNA, 19 nt, Artificial Sequence
  Description of Artificial Sequence: Synthetic oligonucleotide
  Sense Strand Starting at position 91 of SEQ ID NO: 316834
guuaacucugcagaaguaa

SEQ ID NO: 325862 - RNA, 19 nt, Artificial Sequence
  Description of Artificial Sequence: Synthetic oligonucleotide
  Antisense Strand to SEQ ID NO: 325861
uuacuucugcagaguuaac

SEQ ID NO: 325863 - RNA, 19 nt, Artificial Sequence
  Description of Artificial Sequence: Synthetic oligonucleotide
  Sense Strand Starting at position 91 of SEQ ID NO: 316881
gacugaucagcucauaguu

SEQ ID NO: 325864 - RNA, 19 nt, Artificial Sequence
  Description of Artificial Sequence: Synthetic oligonucleotide
  Antisense Strand to SEQ ID NO: 325863
aacuaugagcugaucaguc

SEQ ID NO: 325865 - RNA, 19 nt, Artificial Sequence
  Description of Artificial Sequence: Synthetic oligonucleotide
  Sense Strand Starting at position 91 of SEQ ID NO: 316980
aagagaggucacuguuuga

SEQ ID NO: 325866 - RNA, 19 nt, Artificial Sequence
  Description of Artificial Sequence: Synthetic oligonucleotide
  Antisense Strand to SEQ ID NO: 325865
ucaaacagugaccucucuu

SEQ ID NO: 325867 - RNA, 19 nt, Artificial Sequence
  Description of Artificial Sequence: Synthetic oligonucleotide
  Sense Strand Starting at position 91 of SEQ ID NO: 316983
agaggucacuguuugauac

SEQ ID NO: 325868 - RNA, 19 nt, Artificial Sequence
  Description of Artificial Sequence: Synthetic oligonucleotide
  Antisense Strand to SEQ ID NO: 325867
guaucaaacagugaccucu

SEQ ID NO: 325869 - RNA, 19 nt, Artificial Sequence
  Description of Artificial Sequence: Synthetic oligonucleotide
  Sense Strand Starting at position 91 of SEQ ID NO: 317029
gucaucguaguguuuguua

SEQ ID NO: 325870 - RNA, 19 nt, Artificial Sequence
  Description of Artificial Sequence: Synthetic oligonucleotide
  Antisense Strand to SEQ ID NO: 325869
uaacaaacacuacgaugac

SEQ ID NO: 325871 - RNA, 19 nt, Artificial Sequence
  Description of Artificial Sequence: Synthetic oligonucleotide
  Sense Strand Starting at position 91 of SEQ ID NO: 317169
caagauccguaacuggaau

SEQ ID NO: 325872 - RNA, 19 nt, Artificial Sequence
  Description of Artificial Sequence: Synthetic oligonucleotide
  Antisense Strand to SEQ ID NO: 325871
auuccaguuacggaucuug

SEQ ID NO: 325873 - RNA, 19 nt, Artificial Sequence
  Description of Artificial Sequence: Synthetic oligonucleotide
  Sense Strand Starting at position 91 of SEQ ID NO: 317182
uggaaucaguaucuuuaga

SEQ ID NO: 325874 - RNA, 19 nt, Artificial Sequence
  Description of Artificial Sequence: Synthetic oligonucleotide
  Antisense Strand to SEQ ID NO: 325873
ucuaaagauacugauucca

SEQ ID NO: 325875 - RNA, 19 nt, Artificial Sequence
  Description of Artificial Sequence: Synthetic oligonucleotide
  Sense Strand Starting at position 91 of SEQ ID NO: 317193
ucuuuagagcucugagaaa

SEQ ID NO: 325876 - RNA, 19 nt, Artificial Sequence
  Description of Artificial Sequence: Synthetic oligonucleotide
  Antisense Strand to SEQ ID NO: 325875
uuucucagagcucuaaaga

SEQ ID NO: 325877 - RNA, 19 nt, Artificial Sequence
  Description of Artificial Sequence: Synthetic oligonucleotide
  Sense Strand Starting at position 91 of SEQ ID NO: 317384
ggaauuaccgucuaagcua

SEQ ID NO: 325878 - RNA, 19 nt, Artificial Sequence
  Description of Artificial Sequence: Synthetic oligonucleotide
  Antisense Strand to SEQ ID NO: 325877
uagcuuagacgguaauucc

SEQ ID NO: 325879 - RNA, 19 nt, Artificial Sequence
  Description of Artificial Sequence: Synthetic oligonucleotide
  Sense Strand Starting at position 91 of SEQ ID NO: 317436
ucccauauugucuaaguac

SEQ ID NO: 325880 - RNA, 19 nt, Artificial Sequence
  Description of Artificial Sequence: Synthetic oligonucleotide
  Antisense Strand to SEQ ID NO: 325879
guacuuagacaauauggga

SEQ ID NO: 325881 - RNA, 19 nt, Artificial Sequence
  Description of Artificial Sequence: Synthetic oligonucleotide
  Sense Strand Starting at position 91 of SEQ ID NO: 317443
uugucuaaguaccugagaa

SEQ ID NO: 325882 - RNA, 19 nt, Artificial Sequence
  Description of Artificial Sequence: Synthetic oligonucleotide
  Antisense Strand to SEQ ID NO: 325881
uucucagguacuuagacaa

SEQ ID NO: 325883 - RNA, 19 nt, Artificial Sequence
  Description of Artificial Sequence: Synthetic oligonucleotide
  Sense Strand Starting at position 91 of SEQ ID NO: 317491
gaggaugccugguuaaaca

SEQ ID NO: 325884 - RNA, 19 nt, Artificial Sequence
  Description of Artificial Sequence: Synthetic oligonucleotide
  Antisense Strand to SEQ ID NO: 325883
uguuuaaccaggcauccuc

SEQ ID NO: 325885 - RNA, 19 nt, Artificial Sequence
  Description of Artificial Sequence: Synthetic oligonucleotide
  Sense Strand Starting at position 91 of SEQ ID NO: 317960
gcaggaguucagucagcgu

SEQ ID NO: 325886 - RNA, 19 nt, Artificial Sequence
  Description of Artificial Sequence: Synthetic oligonucleotide
  Antisense Strand to SEQ ID NO: 325885
acgcugacugaacuccugc

SEQ ID NO: 325887 - RNA, 19 nt, Artificial Sequence
  Description of Artificial Sequence: Synthetic oligonucleotide
  Sense Strand Starting at position 91 of SEQ ID NO: 317976
cguggugggaaauauuauu

SEQ ID NO: 325888 - RNA, 19 nt, Artificial Sequence
  Description of Artificial Sequence: Synthetic oligonucleotide
  Antisense Strand to SEQ ID NO: 325887
aauaauauuucccaccacg

SEQ ID NO: 325889 - RNA, 19 nt, Artificial Sequence
  Description of Artificial Sequence: Synthetic oligonucleotide
  Sense Strand Starting at position 91 of SEQ ID NO: 318080
auucucucagaguagguua

SEQ ID NO: 325890 - RNA, 19 nt, Artificial Sequence
  Description of Artificial Sequence: Synthetic oligonucleotide
  Antisense Strand to SEQ ID NO: 325889
uaaccuacucugagagaau

SEQ ID NO: 325891 - RNA, 19 nt, Artificial Sequence
  Description of Artificial Sequence: Synthetic oligonucleotide
  Sense Strand Starting at position 91 of SEQ ID NO: 318136
uuacuuaggccucagaacu

SEQ ID NO: 325892 - RNA, 19 nt, Artificial Sequence
  Description of Artificial Sequence: Synthetic oligonucleotide
  Antisense Strand to SEQ ID NO: 325891
aguucugaggccuaaguaa

SEQ ID NO: 325893 - RNA, 19 nt, Artificial Sequence
  Description of Artificial Sequence: Synthetic oligonucleotide
  Sense Strand Starting at position 91 of SEQ ID NO: 318149
agaacuggccuuuaaucau

SEQ ID NO: 325894 - RNA, 19 nt, Artificial Sequence
  Description of Artificial Sequence: Synthetic oligonucleotide
  Antisense Strand to SEQ ID NO: 325893
augauuaaaggccaguucu

SEQ ID NO: 325895 - RNA, 19 nt, Artificial Sequence
  Description of Artificial Sequence: Synthetic oligonucleotide
  Sense Strand Starting at position 91 of SEQ ID NO: 318224
acacgaugugcugacucaa

SEQ ID NO: 325896 - RNA, 19 nt, Artificial Sequence
  Description of Artificial Sequence: Synthetic oligonucleotide
  Antisense Strand to SEQ ID NO: 325895
uugagucagcacaucgugu

SEQ ID NO: 325897 - RNA, 19 nt, Artificial Sequence
  Description of Artificial Sequence: Synthetic oligonucleotide
  Sense Strand Starting at position 91 of SEQ ID NO: 318354
acuggauaccuaugucuaa

SEQ ID NO: 325898 - RNA, 19 nt, Artificial Sequence
  Description of Artificial Sequence: Synthetic oligonucleotide
  Antisense Strand to SEQ ID NO: 325897
uuagacauagguauccagu

SEQ ID NO: 325899 - RNA, 19 nt, Artificial Sequence
  Description of Artificial Sequence: Synthetic oligonucleotide
  Sense Strand Starting at position 91 of SEQ ID NO: 318357
ggauaccuaugucuaagua

SEQ ID NO: 325900 - RNA, 19 nt, Artificial Sequence
  Description of Artificial Sequence: Synthetic oligonucleotide
  Antisense Strand to SEQ ID NO: 325899
uacuuagacauagguaucc

SEQ ID NO: 325901 - RNA, 19 nt, Artificial Sequence
  Description of Artificial Sequence: Synthetic oligonucleotide
  Sense Strand Starting at position 91 of SEQ ID NO: 318624
uggccugaauucuuaggga

SEQ ID NO: 325902 - RNA, 19 nt, Artificial Sequence
  Description of Artificial Sequence: Synthetic oligonucleotide
  Antisense Strand to SEQ ID NO: 325901
ucccuaagaauucaggcca

SEQ ID NO: 325903 - RNA, 19 nt, Artificial Sequence
  Description of Artificial Sequence: Synthetic oligonucleotide
  Sense Strand Starting at position 91 of SEQ ID NO: 318726
gaaucagaggccugaccau

SEQ ID NO: 325904 - RNA, 19 nt, Artificial Sequence
  Description of Artificial Sequence: Synthetic oligonucleotide
  Antisense Strand to SEQ ID NO: 325903
auggucaggccucugauuc

SEQ ID NO: 325905 - RNA, 19 nt, Artificial Sequence
  Description of Artificial Sequence: Synthetic oligonucleotide
  Sense Strand Starting at position 91 of SEQ ID NO: 318801
uguauuucuugagcaaucu

SEQ ID NO: 325906 - RNA, 19 nt, Artificial Sequence
  Description of Artificial Sequence: Synthetic oligonucleotide
  Antisense Strand to SEQ ID NO: 325905
agauugcucaagaaauaca

SEQ ID NO: 325907 - RNA, 19 nt, Artificial Sequence
  Description of Artificial Sequence: Synthetic oligonucleotide
  Sense Strand Starting at position 92 of SEQ ID NO: 315316
uaugaauacuucccggaug

SEQ ID NO: 325908 - RNA, 19 nt, Artificial Sequence
  Description of Artificial Sequence: Synthetic oligonucleotide
  Antisense Strand to SEQ ID NO: 325907
cauccgggaaguauucaua

SEQ ID NO: 325909 - RNA, 19 nt, Artificial Sequence
  Description of Artificial Sequence: Synthetic oligonucleotide
  Sense Strand Starting at position 92 of SEQ ID NO: 315318
ugaauacuucccggaugag

SEQ ID NO: 325910 - RNA, 19 nt, Artificial Sequence
  Description of Artificial Sequence: Synthetic oligonucleotide
  Antisense Strand to SEQ ID NO: 325909
cucauccgggaaguauuca

SEQ ID NO: 325911 - RNA, 19 nt, Artificial Sequence
  Description of Artificial Sequence: Synthetic oligonucleotide
  Sense Strand Starting at position 92 of SEQ ID NO: 315319
gaauacuucccggaugagu

SEQ ID NO: 325912 - RNA, 19 nt, Artificial Sequence
  Description of Artificial Sequence: Synthetic oligonucleotide
  Antisense Strand to SEQ ID NO: 325911
acucauccgggaaguauuc

SEQ ID NO: 325913 - RNA, 19 nt, Artificial Sequence
  Description of Artificial Sequence: Synthetic oligonucleotide
  Sense Strand Starting at position 92 of SEQ ID NO: 315321
auacuucccggaugaguaa

SEQ ID NO: 325914 - RNA, 19 nt, Artificial Sequence
  Description of Artificial Sequence: Synthetic oligonucleotide
  Antisense Strand to SEQ ID NO: 325913
uuacucauccgggaaguau

SEQ ID NO: 325915 - RNA, 19 nt, Artificial Sequence
  Description of Artificial Sequence: Synthetic oligonucleotide
  Sense Strand Starting at position 92 of SEQ ID NO: 315664
acucauuaguccucggaua

SEQ ID NO: 325916 - RNA, 19 nt, Artificial Sequence
  Description of Artificial Sequence: Synthetic oligonucleotide
  Antisense Strand to SEQ ID NO: 325915
uauccgaggacuaaugagu

SEQ ID NO: 325917 - RNA, 19 nt, Artificial Sequence
  Description of Artificial Sequence: Synthetic oligonucleotide
  Sense Strand Starting at position 92 of SEQ ID NO: 315806
ugaagugcucuuuagauag

SEQ ID NO: 325918 - RNA, 19 nt, Artificial Sequence
  Description of Artificial Sequence: Synthetic oligonucleotide
  Antisense Strand to SEQ ID NO: 325917
cuaucuaaagagcacuuca

SEQ ID NO: 325919 - RNA, 19 nt, Artificial Sequence
  Description of Artificial Sequence: Synthetic oligonucleotide
  Sense Strand Starting at position 92 of SEQ ID NO: 315936
gguuguaaucuuuggaugg

SEQ ID NO: 325920 - RNA, 19 nt, Artificial Sequence
  Description of Artificial Sequence: Synthetic oligonucleotide
  Antisense Strand to SEQ ID NO: 325919
ccauccaaagauuacaacc

SEQ ID NO: 325921 - RNA, 19 nt, Artificial Sequence
  Description of Artificial Sequence: Synthetic oligonucleotide
  Sense Strand Starting at position 92 of SEQ ID NO: 315941
uaaucuuuggauggugaca

SEQ ID NO: 325922 - RNA, 19 nt, Artificial Sequence
  Description of Artificial Sequence: Synthetic oligonucleotide
  Antisense Strand to SEQ ID NO: 325921
ugucaccauccaaagauua

SEQ ID NO: 325923 - RNA, 19 nt, Artificial Sequence
  Description of Artificial Sequence: Synthetic oligonucleotide
  Sense Strand Starting at position 92 of SEQ ID NO: 315990
guugaaguccauuacugac

SEQ ID NO: 325924 - RNA, 19 nt, Artificial Sequence
  Description of Artificial Sequence: Synthetic oligonucleotide
  Antisense Strand to SEQ ID NO: 325923
gucaguaauggacuucaac

SEQ ID NO: 325925 - RNA, 19 nt, Artificial Sequence
  Description of Artificial Sequence: Synthetic oligonucleotide
  Sense Strand Starting at position 92 of SEQ ID NO: 316016
uauagaaguucugugaacu

SEQ ID NO: 325926 - RNA, 19 nt, Artificial Sequence
  Description of Artificial Sequence: Synthetic oligonucleotide
  Antisense Strand to SEQ ID NO: 325925
aguucacagaacuucuaua

SEQ ID NO: 325927 - RNA, 19 nt, Artificial Sequence
  Description of Artificial Sequence: Synthetic oligonucleotide
  Sense Strand Starting at position 92 of SEQ ID NO: 316017
auagaaguucugugaacuu

SEQ ID NO: 325928 - RNA, 19 nt, Artificial Sequence
  Description of Artificial Sequence: Synthetic oligonucleotide
  Antisense Strand to SEQ ID NO: 325927
aaguucacagaacuucuau

SEQ ID NO: 325929 - RNA, 19 nt, Artificial Sequence
  Description of Artificial Sequence: Synthetic oligonucleotide
  Sense Strand Starting at position 92 of SEQ ID NO: 316024
uucugugaacuuugauucu

SEQ ID NO: 325930 - RNA, 19 nt, Artificial Sequence
  Description of Artificial Sequence: Synthetic oligonucleotide
  Antisense Strand to SEQ ID NO: 325929
agaaucaaaguucacagaa

SEQ ID NO: 325931 - RNA, 19 nt, Artificial Sequence
  Description of Artificial Sequence: Synthetic oligonucleotide
  Sense Strand Starting at position 92 of SEQ ID NO: 316027
ugugaacuuugauucuuaa

SEQ ID NO: 325932 - RNA, 19 nt, Artificial Sequence
  Description of Artificial Sequence: Synthetic oligonucleotide
  Antisense Strand to SEQ ID NO: 325931
uuaagaaucaaaguucaca

SEQ ID NO: 325933 - RNA, 19 nt, Artificial Sequence
  Description of Artificial Sequence: Synthetic oligonucleotide
  Sense Strand Starting at position 92 of SEQ ID NO: 316030
gaacuuugauucuuaagug

SEQ ID NO: 325934 - RNA, 19 nt, Artificial Sequence
  Description of Artificial Sequence: Synthetic oligonucleotide
  Antisense Strand to SEQ ID NO: 325933
cacuuaagaaucaaaguuc

SEQ ID NO: 325935 - RNA, 19 nt, Artificial Sequence
  Description of Artificial Sequence: Synthetic oligonucleotide
  Sense Strand Starting at position 92 of SEQ ID NO: 316034
uuugauucuuaagugguaa

SEQ ID NO: 325936 - RNA, 19 nt, Artificial Sequence
  Description of Artificial Sequence: Synthetic oligonucleotide
  Antisense Strand to SEQ ID NO: 325935
uuaccacuuaagaaucaaa

SEQ ID NO: 325937 - RNA, 19 nt, Artificial Sequence
  Description of Artificial Sequence: Synthetic oligonucleotide
  Sense Strand Starting at position 92 of SEQ ID NO: 316048
gguaauagucaacaucuua

SEQ ID NO: 325938 - RNA, 19 nt, Artificial Sequence
  Description of Artificial Sequence: Synthetic oligonucleotide
  Antisense Strand to SEQ ID NO: 325937
uaagauguugacuauuacc

SEQ ID NO: 325939 - RNA, 19 nt, Artificial Sequence
  Description of Artificial Sequence: Synthetic oligonucleotide
  Sense Strand Starting at position 92 of SEQ ID NO: 316166
uaaaguaagguguguagga

SEQ ID NO: 325940 - RNA, 19 nt, Artificial Sequence
  Description of Artificial Sequence: Synthetic oligonucleotide
  Antisense Strand to SEQ ID NO: 325939
uccuacacaccuuacuuua

SEQ ID NO: 325941 - RNA, 19 nt, Artificial Sequence
  Description of Artificial Sequence: Synthetic oligonucleotide
  Sense Strand Starting at position 92 of SEQ ID NO: 316175
guguguaggaccuaugaua

SEQ ID NO: 325942 - RNA, 19 nt, Artificial Sequence
  Description of Artificial Sequence: Synthetic oligonucleotide
  Antisense Strand to SEQ ID NO: 325941
uaucauagguccuacacac

SEQ ID NO: 325943 - RNA, 19 nt, Artificial Sequence
  Description of Artificial Sequence: Synthetic oligonucleotide
  Sense Strand Starting at position 92 of SEQ ID NO: 316631
cccugucaguaucucagaa

SEQ ID NO: 325944 - RNA, 19 nt, Artificial Sequence
  Description of Artificial Sequence: Synthetic oligonucleotide
  Antisense Strand to SEQ ID NO: 325943
uucugagauacugacaggg

SEQ ID NO: 325945 - RNA, 19 nt, Artificial Sequence
  Description of Artificial Sequence: Synthetic oligonucleotide
  Sense Strand Starting at position 92 of SEQ ID NO: 316664
guacuuauuucuuugcaag

SEQ ID NO: 325946 - RNA, 19 nt, Artificial Sequence
  Description of Artificial Sequence: Synthetic oligonucleotide
  Antisense Strand to SEQ ID NO: 325945
cuugcaaagaaauaaguac

SEQ ID NO: 325947 - RNA, 19 nt, Artificial Sequence
  Description of Artificial Sequence: Synthetic oligonucleotide
  Sense Strand Starting at position 92 of SEQ ID NO: 316901
aggaguagcuccuccauca

SEQ ID NO: 325948 - RNA, 19 nt, Artificial Sequence
  Description of Artificial Sequence: Synthetic oligonucleotide
  Antisense Strand to SEQ ID NO: 325947
ugauggaggagcuacuccu

SEQ ID NO: 325949 - RNA, 19 nt, Artificial Sequence
  Description of Artificial Sequence: Synthetic oligonucleotide
  Sense Strand Starting at position 92 of SEQ ID NO: 317505
cgcuuuccuggacaucuua

SEQ ID NO: 325950 - RNA, 19 nt, Artificial Sequence
  Description of Artificial Sequence: Synthetic oligonucleotide
  Antisense Strand to SEQ ID NO: 325949
uaagauguccaggaaagcg

SEQ ID NO: 325951 - RNA, 19 nt, Artificial Sequence
  Description of Artificial Sequence: Synthetic oligonucleotide
  Sense Strand Starting at position 92 of SEQ ID NO: 317694
uccucuuauuaccugggaa

SEQ ID NO: 325952 - RNA, 19 nt, Artificial Sequence
  Description of Artificial Sequence: Synthetic oligonucleotide
  Antisense Strand to SEQ ID NO: 325951
uucccagguaauaagagga

SEQ ID NO: 325953 - RNA, 19 nt, Artificial Sequence
  Description of Artificial Sequence: Synthetic oligonucleotide
  Sense Strand Starting at position 92 of SEQ ID NO: 317696
cucuuauuaccugggaaga

SEQ ID NO: 325954 - RNA, 19 nt, Artificial Sequence
  Description of Artificial Sequence: Synthetic oligonucleotide
  Antisense Strand to SEQ ID NO: 325953
ucuucccagguaauaagag

SEQ ID NO: 325955 - RNA, 19 nt, Artificial Sequence
  Description of Artificial Sequence: Synthetic oligonucleotide
  Sense Strand Starting at position 92 of SEQ ID NO: 317697
ucuuauuaccugggaagau

SEQ ID NO: 325956 - RNA, 19 nt, Artificial Sequence
  Description of Artificial Sequence: Synthetic oligonucleotide
  Antisense Strand to SEQ ID NO: 325955
aucuucccagguaauaaga

SEQ ID NO: 325957 - RNA, 19 nt, Artificial Sequence
  Description of Artificial Sequence: Synthetic oligonucleotide
  Sense Strand Starting at position 92 of SEQ ID NO: 317808
gguaguaacuuucuccaag

SEQ ID NO: 325958 - RNA, 19 nt, Artificial Sequence
  Description of Artificial Sequence: Synthetic oligonucleotide
  Antisense Strand to SEQ ID NO: 325957
cuuggagaaaguuacuacc

SEQ ID NO: 325959 - RNA, 19 nt, Artificial Sequence
  Description of Artificial Sequence: Synthetic oligonucleotide
  Sense Strand Starting at position 92 of SEQ ID NO: 317875
aguugaucugcuggacacu

SEQ ID NO: 325960 - RNA, 19 nt, Artificial Sequence
  Description of Artificial Sequence: Synthetic oligonucleotide
  Antisense Strand to SEQ ID NO: 325959
aguguccagcagaucaacu

SEQ ID NO: 325961 - RNA, 19 nt, Artificial Sequence
  Description of Artificial Sequence: Synthetic oligonucleotide
  Sense Strand Starting at position 92 of SEQ ID NO: 317876
guugaucugcuggacacuu

SEQ ID NO: 325962 - RNA, 19 nt, Artificial Sequence
  Description of Artificial Sequence: Synthetic oligonucleotide
  Antisense Strand to SEQ ID NO: 325961
aaguguccagcagaucaac

SEQ ID NO: 325963 - RNA, 19 nt, Artificial Sequence
  Description of Artificial Sequence: Synthetic oligonucleotide
  Sense Strand Starting at position 92 of SEQ ID NO: 317901
cuuaacaagguuuguuaaa

SEQ ID NO: 325964 - RNA, 19 nt, Artificial Sequence
  Description of Artificial Sequence: Synthetic oligonucleotide
  Antisense Strand to SEQ ID NO: 325963
uuuaacaaaccuuguuaag

SEQ ID NO: 325965 - RNA, 19 nt, Artificial Sequence
  Description of Artificial Sequence: Synthetic oligonucleotide
  Sense Strand Starting at position 92 of SEQ ID NO: 317924
uaguauaugccaggaggua

SEQ ID NO: 325966 - RNA, 19 nt, Artificial Sequence
  Description of Artificial Sequence: Synthetic oligonucleotide
  Antisense Strand to SEQ ID NO: 325965
uaccuccuggcauauacua

SEQ ID NO: 325967 - RNA, 19 nt, Artificial Sequence
  Description of Artificial Sequence: Synthetic oligonucleotide
  Sense Strand Starting at position 92 of SEQ ID NO: 317925
aguauaugccaggagguau

SEQ ID NO: 325968 - RNA, 19 nt, Artificial Sequence
  Description of Artificial Sequence: Synthetic oligonucleotide
  Antisense Strand to SEQ ID NO: 325967
auaccuccuggcauauacu

SEQ ID NO: 325969 - RNA, 19 nt, Artificial Sequence
  Description of Artificial Sequence: Synthetic oligonucleotide
  Sense Strand Starting at position 92 of SEQ ID NO: 317936
ggagguaugccagggauug

SEQ ID NO: 325970 - RNA, 19 nt, Artificial Sequence
  Description of Artificial Sequence: Synthetic oligonucleotide
  Antisense Strand to SEQ ID NO: 325969
caaucccuggcauaccucc

SEQ ID NO: 325971 - RNA, 19 nt, Artificial Sequence
  Description of Artificial Sequence: Synthetic oligonucleotide
  Sense Strand Starting at position 92 of SEQ ID NO: 318029
gugaacagauaguucuaga

SEQ ID NO: 325972 - RNA, 19 nt, Artificial Sequence
  Description of Artificial Sequence: Synthetic oligonucleotide
  Antisense Strand to SEQ ID NO: 325971
ucuagaacuaucuguucac

SEQ ID NO: 325973 - RNA, 19 nt, Artificial Sequence
  Description of Artificial Sequence: Synthetic oligonucleotide
  Sense Strand Starting at position 92 of SEQ ID NO: 318081
uaugguugcgcagaggaga

SEQ ID NO: 325974 - RNA, 19 nt, Artificial Sequence
  Description of Artificial Sequence: Synthetic oligonucleotide
  Antisense Strand to SEQ ID NO: 325973
ucuccucugcgcaaccaua

SEQ ID NO: 325975 - RNA, 19 nt, Artificial Sequence
  Description of Artificial Sequence: Synthetic oligonucleotide
  Sense Strand Starting at position 92 of SEQ ID NO: 318203
ggaccagacuacuuaagca

SEQ ID NO: 325976 - RNA, 19 nt, Artificial Sequence
  Description of Artificial Sequence: Synthetic oligonucleotide
  Antisense Strand to SEQ ID NO: 325975
ugcuuaaguagucuggucc

SEQ ID NO: 325977 - RNA, 19 nt, Artificial Sequence
  Description of Artificial Sequence: Synthetic oligonucleotide
  Sense Strand Starting at position 92 of SEQ ID NO: 318228
gguuuagacuguccuuuaa

SEQ ID NO: 325978 - RNA, 19 nt, Artificial Sequence
  Description of Artificial Sequence: Synthetic oligonucleotide
  Antisense Strand to SEQ ID NO: 325977
uuaaaggacagucuaaacc

SEQ ID NO: 325979 - RNA, 19 nt, Artificial Sequence
  Description of Artificial Sequence: Synthetic oligonucleotide
  Sense Strand Starting at position 92 of SEQ ID NO: 318376
gaaagucuguaaguccaua

SEQ ID NO: 325980 - RNA, 19 nt, Artificial Sequence
  Description of Artificial Sequence: Synthetic oligonucleotide
  Antisense Strand to SEQ ID NO: 325979
uauggacuuacagacuuuc

SEQ ID NO: 325981 - RNA, 19 nt, Artificial Sequence
  Description of Artificial Sequence: Synthetic oligonucleotide
  Sense Strand Starting at position 92 of SEQ ID NO: 318517
acgugucuuuggaagggaa

SEQ ID NO: 325982 - RNA, 19 nt, Artificial Sequence
  Description of Artificial Sequence: Synthetic oligonucleotide
  Antisense Strand to SEQ ID NO: 325981
uucccuuccaaagacacgu

SEQ ID NO: 325983 - RNA, 19 nt, Artificial Sequence
  Description of Artificial Sequence: Synthetic oligonucleotide
  Sense Strand Starting at position 92 of SEQ ID NO: 318562
ugguauuagguacaacuua

SEQ ID NO: 325984 - RNA, 19 nt, Artificial Sequence
  Description of Artificial Sequence: Synthetic oligonucleotide
  Antisense Strand to SEQ ID NO: 325983
uaaguuguaccuaauacca

SEQ ID NO: 325985 - RNA, 19 nt, Artificial Sequence
  Description of Artificial Sequence: Synthetic oligonucleotide
  Sense Strand Starting at position 92 of SEQ ID NO: 318895
cuuuguaccuacucauaug

SEQ ID NO: 325986 - RNA, 19 nt, Artificial Sequence
  Description of Artificial Sequence: Synthetic oligonucleotide
  Antisense Strand to SEQ ID NO: 325985
cauaugaguagguacaaag

SEQ ID NO: 325987 - RNA, 19 nt, Artificial Sequence
  Description of Artificial Sequence: Synthetic oligonucleotide
  Sense Strand Starting at position 93 of SEQ ID NO: 315251
acaguuugcacaggaguau

SEQ ID NO: 325988 - RNA, 19 nt, Artificial Sequence
  Description of Artificial Sequence: Synthetic oligonucleotide
  Antisense Strand to SEQ ID NO: 325987
auacuccugugcaaacugu

SEQ ID NO: 325989 - RNA, 19 nt, Artificial Sequence
  Description of Artificial Sequence: Synthetic oligonucleotide
  Sense Strand Starting at position 93 of SEQ ID NO: 315347
caguuuggugagcaaguau

SEQ ID NO: 325990 - RNA, 19 nt, Artificial Sequence
  Description of Artificial Sequence: Synthetic oligonucleotide
  Antisense Strand to SEQ ID NO: 325989
auacuugcucaccaaacug

SEQ ID NO: 325991 - RNA, 19 nt, Artificial Sequence
  Description of Artificial Sequence: Synthetic oligonucleotide
  Sense Strand Starting at position 93 of SEQ ID NO: 315430
uccucucucccggaaacua

SEQ ID NO: 325992 - RNA, 19 nt, Artificial Sequence
  Description of Artificial Sequence: Synthetic oligonucleotide
  Antisense Strand to SEQ ID NO: 325991
uaguuuccgggagagagga

SEQ ID NO: 325993 - RNA, 19 nt, Artificial Sequence
  Description of Artificial Sequence: Synthetic oligonucleotide
  Sense Strand Starting at position 93 of SEQ ID NO: 315450
aaaguuguacaauggugua

SEQ ID NO: 325994 - RNA, 19 nt, Artificial Sequence
  Description of Artificial Sequence: Synthetic oligonucleotide
  Antisense Strand to SEQ ID NO: 325993
uacaccauuguacaacuuu

SEQ ID NO: 325995 - RNA, 19 nt, Artificial Sequence
  Description of Artificial Sequence: Synthetic oligonucleotide
  Sense Strand Starting at position 93 of SEQ ID NO: 315455
uguacaaugguguauuauu

SEQ ID NO: 325996 - RNA, 19 nt, Artificial Sequence
  Description of Artificial Sequence: Synthetic oligonucleotide
  Antisense Strand to SEQ ID NO: 325995
aauaauacaccauuguaca

SEQ ID NO: 325997 - RNA, 19 nt, Artificial Sequence
  Description of Artificial Sequence: Synthetic oligonucleotide
  Sense Strand Starting at position 93 of SEQ ID NO: 315479
acuguauaccuagguagau

SEQ ID NO: 325998 - RNA, 19 nt, Artificial Sequence
  Description of Artificial Sequence: Synthetic oligonucleotide
  Antisense Strand to SEQ ID NO: 325997
aucuaccuagguauacagu

SEQ ID NO: 325999 - RNA, 19 nt, Artificial Sequence
  Description of Artificial Sequence: Synthetic oligonucleotide
  Sense Strand Starting at position 93 of SEQ ID NO: 315480
cuguauaccuagguagaua

SEQ ID NO: 326000 - RNA, 19 nt, Artificial Sequence
  Description of Artificial Sequence: Synthetic oligonucleotide
  Antisense Strand to SEQ ID NO: 325999
uaucuaccuagguauacag

SEQ ID NO: 326001 - RNA, 19 nt, Artificial Sequence
  Description of Artificial Sequence: Synthetic oligonucleotide
  Sense Strand Starting at position 93 of SEQ ID NO: 315562
ccaaucuuaguuugacuga

SEQ ID NO: 326002 - RNA, 19 nt, Artificial Sequence
  Description of Artificial Sequence: Synthetic oligonucleotide
  Antisense Strand to SEQ ID NO: 326001
ucagucaaacuaagauugg

SEQ ID NO: 326003 - RNA, 19 nt, Artificial Sequence
  Description of Artificial Sequence: Synthetic oligonucleotide
  Sense Strand Starting at position 93 of SEQ ID NO: 315565
aucuuaguuugacugaaua

SEQ ID NO: 326004 - RNA, 19 nt, Artificial Sequence
  Description of Artificial Sequence: Synthetic oligonucleotide
  Antisense Strand to SEQ ID NO: 326003
uauucagucaaacuaagau

SEQ ID NO: 326005 - RNA, 19 nt, Artificial Sequence
  Description of Artificial Sequence: Synthetic oligonucleotide
  Sense Strand Starting at position 93 of SEQ ID NO: 315640
cauuuauaaucgcugguuu

SEQ ID NO: 326006 - RNA, 19 nt, Artificial Sequence
  Description of Artificial Sequence: Synthetic oligonucleotide
  Antisense Strand to SEQ ID NO: 326005
aaaccagcgauuauaaaug

SEQ ID NO: 326007 - RNA, 19 nt, Artificial Sequence
  Description of Artificial Sequence: Synthetic oligonucleotide
  Sense Strand Starting at position 93 of SEQ ID NO: 315641
auuuauaaucgcugguuua

SEQ ID NO: 326008 - RNA, 19 nt, Artificial Sequence
  Description of Artificial Sequence: Synthetic oligonucleotide
  Antisense Strand to SEQ ID NO: 326007
uaaaccagcgauuauaaau

SEQ ID NO: 326009 - RNA, 19 nt, Artificial Sequence
  Description of Artificial Sequence: Synthetic oligonucleotide
  Sense Strand Starting at position 93 of SEQ ID NO: 315644
uauaaucgcugguuuauuu

SEQ ID NO: 326010 - RNA, 19 nt, Artificial Sequence
  Description of Artificial Sequence: Synthetic oligonucleotide
  Antisense Strand to SEQ ID NO: 326009
aaauaaaccagcgauuaua

SEQ ID NO: 326011 - RNA, 19 nt, Artificial Sequence
  Description of Artificial Sequence: Synthetic oligonucleotide
  Sense Strand Starting at position 93 of SEQ ID NO: 315664
uuacuuggccaauaaguua

SEQ ID NO: 326012 - RNA, 19 nt, Artificial Sequence
  Description of Artificial Sequence: Synthetic oligonucleotide
  Antisense Strand to SEQ ID NO: 326011
uaacuuauuggccaaguaa

SEQ ID NO: 326013 - RNA, 19 nt, Artificial Sequence
  Description of Artificial Sequence: Synthetic oligonucleotide
  Sense Strand Starting at position 93 of SEQ ID NO: 315820
gguacauucuaacugaaag

SEQ ID NO: 326014 - RNA, 19 nt, Artificial Sequence
  Description of Artificial Sequence: Synthetic oligonucleotide
  Antisense Strand to SEQ ID NO: 326013
cuuucaguuagaauguacc

SEQ ID NO: 326015 - RNA, 19 nt, Artificial Sequence
  Description of Artificial Sequence: Synthetic oligonucleotide
  Sense Strand Starting at position 93 of SEQ ID NO: 315970
cuugaaggcaguuguagaa

SEQ ID NO: 326016 - RNA, 19 nt, Artificial Sequence
  Description of Artificial Sequence: Synthetic oligonucleotide
  Antisense Strand to SEQ ID NO: 326015
uucuacaacugccuucaag

SEQ ID NO: 326017 - RNA, 19 nt, Artificial Sequence
  Description of Artificial Sequence: Synthetic oligonucleotide
  Sense Strand Starting at position 93 of SEQ ID NO: 316177
guuagauggguucaagguu

SEQ ID NO: 326018 - RNA, 19 nt, Artificial Sequence
  Description of Artificial Sequence: Synthetic oligonucleotide
  Antisense Strand to SEQ ID NO: 326017
aaccuugaacccaucuaac

SEQ ID NO: 326019 - RNA, 19 nt, Artificial Sequence
  Description of Artificial Sequence: Synthetic oligonucleotide
  Sense Strand Starting at position 93 of SEQ ID NO: 316234
cugaaaucuaaacgaguug

SEQ ID NO: 326020 - RNA, 19 nt, Artificial Sequence
  Description of Artificial Sequence: Synthetic oligonucleotide
  Antisense Strand to SEQ ID NO: 326019
caacucguuuagauuucag

SEQ ID NO: 326021 - RNA, 19 nt, Artificial Sequence
  Description of Artificial Sequence: Synthetic oligonucleotide
  Sense Strand Starting at position 93 of SEQ ID NO: 316403
gacuuccaguguuuggauu

SEQ ID NO: 326022 - RNA, 19 nt, Artificial Sequence
  Description of Artificial Sequence: Synthetic oligonucleotide
  Antisense Strand to SEQ ID NO: 326021
aauccaaacacuggaaguc

SEQ ID NO: 326023 - RNA, 19 nt, Artificial Sequence
  Description of Artificial Sequence: Synthetic oligonucleotide
  Sense Strand Starting at position 93 of SEQ ID NO: 316482
cagaguuaugacgggagaa

SEQ ID NO: 326024 - RNA, 19 nt, Artificial Sequence
  Description of Artificial Sequence: Synthetic oligonucleotide
  Antisense Strand to SEQ ID NO: 326023
uucucccgucauaacucug

SEQ ID NO: 326025 - RNA, 19 nt, Artificial Sequence
  Description of Artificial Sequence: Synthetic oligonucleotide
  Sense Strand Starting at position 93 of SEQ ID NO: 316544
gucagaaagcccuaacgaa

SEQ ID NO: 326026 - RNA, 19 nt, Artificial Sequence
  Description of Artificial Sequence: Synthetic oligonucleotide
  Antisense Strand to SEQ ID NO: 326025
uucguuagggcuuucugac

SEQ ID NO: 326027 - RNA, 19 nt, Artificial Sequence
  Description of Artificial Sequence: Synthetic oligonucleotide
  Sense Strand Starting at position 93 of SEQ ID NO: 317711
gcugucaguauuggcauuu

SEQ ID NO: 326028 - RNA, 19 nt, Artificial Sequence
  Description of Artificial Sequence: Synthetic oligonucleotide
  Antisense Strand to SEQ ID NO: 326027
aaaugccaauacugacagc

SEQ ID NO: 326029 - RNA, 19 nt, Artificial Sequence
  Description of Artificial Sequence: Synthetic oligonucleotide
  Sense Strand Starting at position 93 of SEQ ID NO: 317776
ggaggcuuugggcaaguua

SEQ ID NO: 326030 - RNA, 19 nt, Artificial Sequence
  Description of Artificial Sequence: Synthetic oligonucleotide
  Antisense Strand to SEQ ID NO: 326029
uaacuugcccaaagccucc

SEQ ID NO: 326031 - RNA, 19 nt, Artificial Sequence
  Description of Artificial Sequence: Synthetic oligonucleotide
  Sense Strand Starting at position 93 of SEQ ID NO: 317815
guguccucagccuaucaaa

SEQ ID NO: 326032 - RNA, 19 nt, Artificial Sequence
  Description of Artificial Sequence: Synthetic oligonucleotide
  Antisense Strand to SEQ ID NO: 326031
uuugauaggcugaggacac

SEQ ID NO: 326033 - RNA, 19 nt, Artificial Sequence
  Description of Artificial Sequence: Synthetic oligonucleotide
  Sense Strand Starting at position 93 of SEQ ID NO: 317935
cguuauuguaaugaagucu

SEQ ID NO: 326034 - RNA, 19 nt, Artificial Sequence
  Description of Artificial Sequence: Synthetic oligonucleotide
  Antisense Strand to SEQ ID NO: 326033
agacuucauuacaauaacg

SEQ ID NO: 326035 - RNA, 19 nt, Artificial Sequence
  Description of Artificial Sequence: Synthetic oligonucleotide
  Sense Strand Starting at position 93 of SEQ ID NO: 318246
cgcuugaguccgguaggua

SEQ ID NO: 326036 - RNA, 19 nt, Artificial Sequence
  Description of Artificial Sequence: Synthetic oligonucleotide
  Antisense Strand to SEQ ID NO: 326035
uaccuaccggacucaagcg

SEQ ID NO: 326037 - RNA, 19 nt, Artificial Sequence
  Description of Artificial Sequence: Synthetic oligonucleotide
  Sense Strand Starting at position 93 of SEQ ID NO: 318400
ugcaaagugucauuugcuc

SEQ ID NO: 326038 - RNA, 19 nt, Artificial Sequence
  Description of Artificial Sequence: Synthetic oligonucleotide
  Antisense Strand to SEQ ID NO: 326037
gagcaaaugacacuuugca

SEQ ID NO: 326039 - RNA, 19 nt, Artificial Sequence
  Description of Artificial Sequence: Synthetic oligonucleotide
  Sense Strand Starting at position 93 of SEQ ID NO: 318408
gucauuugcucaccugcua

SEQ ID NO: 326040 - RNA, 19 nt, Artificial Sequence
  Description of Artificial Sequence: Synthetic oligonucleotide
  Antisense Strand to SEQ ID NO: 326039
uagcaggugagcaaaugac

SEQ ID NO: 326041 - RNA, 19 nt, Artificial Sequence
  Description of Artificial Sequence: Synthetic oligonucleotide
  Sense Strand Starting at position 93 of SEQ ID NO: 318585
ccucacgaucaaugguauu

SEQ ID NO: 326042 - RNA, 19 nt, Artificial Sequence
  Description of Artificial Sequence: Synthetic oligonucleotide
  Antisense Strand to SEQ ID NO: 326041
aauaccauugaucgugagg

SEQ ID NO: 326043 - RNA, 19 nt, Artificial Sequence
  Description of Artificial Sequence: Synthetic oligonucleotide
  Sense Strand Starting at position 93 of SEQ ID NO: 318591
gaucaaugguauuugcguu

SEQ ID NO: 326044 - RNA, 19 nt, Artificial Sequence
  Description of Artificial Sequence: Synthetic oligonucleotide
  Antisense Strand to SEQ ID NO: 326043
aacgcaaauaccauugauc

SEQ ID NO: 326045 - RNA, 19 nt, Artificial Sequence
  Description of Artificial Sequence: Synthetic oligonucleotide
  Sense Strand Starting at position 93 of SEQ ID NO: 318795
ugccaaugaagguaaguua

SEQ ID NO: 326046 - RNA, 19 nt, Artificial Sequence
  Description of Artificial Sequence: Synthetic oligonucleotide
  Antisense Strand to SEQ ID NO: 326045
uaacuuaccuucauuggca

SEQ ID NO: 326047 - RNA, 19 nt, Artificial Sequence
  Description of Artificial Sequence: Synthetic oligonucleotide
  Sense Strand Starting at position 93 of SEQ ID NO: 318808
aaguuaagacuugguauau

SEQ ID NO: 326048 - RNA, 19 nt, Artificial Sequence
  Description of Artificial Sequence: Synthetic oligonucleotide
  Antisense Strand to SEQ ID NO: 326047
auauaccaagucuuaacuu

SEQ ID NO: 326049 - RNA, 19 nt, Artificial Sequence
  Description of Artificial Sequence: Synthetic oligonucleotide
  Sense Strand Starting at position 93 of SEQ ID NO: 318809
aguuaagacuugguauaug

SEQ ID NO: 326050 - RNA, 19 nt, Artificial Sequence
  Description of Artificial Sequence: Synthetic oligonucleotide
  Antisense Strand to SEQ ID NO: 326049
cauauaccaagucuuaacu

SEQ ID NO: 326051 - RNA, 19 nt, Artificial Sequence
  Description of Artificial Sequence: Synthetic oligonucleotide
  Sense Strand Starting at position 93 of SEQ ID NO: 318812
uaagacuugguauaugcau

SEQ ID NO: 326052 - RNA, 19 nt, Artificial Sequence
  Description of Artificial Sequence: Synthetic oligonucleotide
  Antisense Strand to SEQ ID NO: 326051
augcauauaccaagucuua

SEQ ID NO: 326053 - RNA, 19 nt, Artificial Sequence
  Description of Artificial Sequence: Synthetic oligonucleotide
  Sense Strand Starting at position 93 of SEQ ID NO: 318820
gguauaugcauggagcacu

SEQ ID NO: 326054 - RNA, 19 nt, Artificial Sequence
  Description of Artificial Sequence: Synthetic oligonucleotide
  Antisense Strand to SEQ ID NO: 326053
agugcuccaugcauauacc

SEQ ID NO: 326055 - RNA, 19 nt, Artificial Sequence
  Description of Artificial Sequence: Synthetic oligonucleotide
  Sense Strand Starting at position 93 of SEQ ID NO: 318987
auggaugaaaugugaguca

SEQ ID NO: 326056 - RNA, 19 nt, Artificial Sequence
  Description of Artificial Sequence: Synthetic oligonucleotide
  Antisense Strand to SEQ ID NO: 326055
ugacucacauuucauccau

SEQ ID NO: 326057 - RNA, 19 nt, Artificial Sequence
  Description of Artificial Sequence: Synthetic oligonucleotide
  Sense Strand Starting at position 93 of SEQ ID NO: 318990
gaugaaaugugagucaauc

SEQ ID NO: 326058 - RNA, 19 nt, Artificial Sequence
  Description of Artificial Sequence: Synthetic oligonucleotide
  Antisense Strand to SEQ ID NO: 326057
gauugacucacauuucauc

SEQ ID NO: 326059 - RNA, 19 nt, Artificial Sequence
  Description of Artificial Sequence: Synthetic oligonucleotide
  Sense Strand Starting at position 93 of SEQ ID NO: 319033
ugaagaaccagucguaaca

SEQ ID NO: 326060 - RNA, 19 nt, Artificial Sequence
  Description of Artificial Sequence: Synthetic oligonucleotide
  Antisense Strand to SEQ ID NO: 326059
uguuacgacugguucuuca

SEQ ID NO: 326061 - RNA, 19 nt, Artificial Sequence
  Description of Artificial Sequence: Synthetic oligonucleotide
  Sense Strand Starting at position 93 of SEQ ID NO: 319042
agucguaacauuugacugu

SEQ ID NO: 326062 - RNA, 19 nt, Artificial Sequence
  Description of Artificial Sequence: Synthetic oligonucleotide
  Antisense Strand to SEQ ID NO: 326061
acagucaaauguuacgacu

SEQ ID NO: 326063 - RNA, 19 nt, Artificial Sequence
  Description of Artificial Sequence: Synthetic oligonucleotide
  Sense Strand Starting at position 93 of SEQ ID NO: 319099
uguguaauugcgccuuauu

SEQ ID NO: 326064 - RNA, 19 nt, Artificial Sequence
  Description of Artificial Sequence: Synthetic oligonucleotide
  Antisense Strand to SEQ ID NO: 326063
aauaaggcgcaauuacaca

SEQ ID NO: 326065 - RNA, 19 nt, Artificial Sequence
  Description of Artificial Sequence: Synthetic oligonucleotide
  Sense Strand Starting at position 93 of SEQ ID NO: 319196
aggugucagcauuauauug

SEQ ID NO: 326066 - RNA, 19 nt, Artificial Sequence
  Description of Artificial Sequence: Synthetic oligonucleotide
  Antisense Strand to SEQ ID NO: 326065
caauauaaugcugacaccu

SEQ ID NO: 326067 - RNA, 19 nt, Artificial Sequence
  Description of Artificial Sequence: Synthetic oligonucleotide
  Sense Strand Starting at position 94 of SEQ ID NO: 315251
aaguaaacucuuugaggac

SEQ ID NO: 326068 - RNA, 19 nt, Artificial Sequence
  Description of Artificial Sequence: Synthetic oligonucleotide
  Antisense Strand to SEQ ID NO: 326067
guccucaaagaguuuacuu

SEQ ID NO: 326069 - RNA, 19 nt, Artificial Sequence
  Description of Artificial Sequence: Synthetic oligonucleotide
  Sense Strand Starting at position 94 of SEQ ID NO: 315263
ugaggacagggauguguau

SEQ ID NO: 326070 - RNA, 19 nt, Artificial Sequence
  Description of Artificial Sequence: Synthetic oligonucleotide
  Antisense Strand to SEQ ID NO: 326069
auacacaucccuguccuca

SEQ ID NO: 326071 - RNA, 19 nt, Artificial Sequence
  Description of Artificial Sequence: Synthetic oligonucleotide
  Sense Strand Starting at position 94 of SEQ ID NO: 315347
guuuauucucuauaaugag

SEQ ID NO: 326072 - RNA, 19 nt, Artificial Sequence
  Description of Artificial Sequence: Synthetic oligonucleotide
  Antisense Strand to SEQ ID NO: 326071
cucauuauagagaauaaac

SEQ ID NO: 326073 - RNA, 19 nt, Artificial Sequence
  Description of Artificial Sequence: Synthetic oligonucleotide
  Sense Strand Starting at position 94 of SEQ ID NO: 315388
ggaaccugugguugaguaa

SEQ ID NO: 326074 - RNA, 19 nt, Artificial Sequence
  Description of Artificial Sequence: Synthetic oligonucleotide
  Antisense Strand to SEQ ID NO: 326073
uuacucaaccacagguucc

SEQ ID NO: 326075 - RNA, 19 nt, Artificial Sequence
  Description of Artificial Sequence: Synthetic oligonucleotide
  Sense Strand Starting at position 94 of SEQ ID NO: 315389
gaaccugugguugaguaau

SEQ ID NO: 326076 - RNA, 19 nt, Artificial Sequence
  Description of Artificial Sequence: Synthetic oligonucleotide
  Antisense Strand to SEQ ID NO: 326075
auuacucaaccacagguuc

SEQ ID NO: 326077 - RNA, 19 nt, Artificial Sequence
  Description of Artificial Sequence: Synthetic oligonucleotide
  Sense Strand Starting at position 94 of SEQ ID NO: 315397
gguugaguaauggaaaguc

SEQ ID NO: 326078 - RNA, 19 nt, Artificial Sequence
  Description of Artificial Sequence: Synthetic oligonucleotide
  Antisense Strand to SEQ ID NO: 326077
gacuuuccauuacucaacc

SEQ ID NO: 326079 - RNA, 19 nt, Artificial Sequence
  Description of Artificial Sequence: Synthetic oligonucleotide
  Sense Strand Starting at position 94 of SEQ ID NO: 315859
acaauaaugccaggcacau

SEQ ID NO: 326080 - RNA, 19 nt, Artificial Sequence
  Description of Artificial Sequence: Synthetic oligonucleotide
  Antisense Strand to SEQ ID NO: 326079
augugccuggcauuauugu

SEQ ID NO: 326081 - RNA, 19 nt, Artificial Sequence
  Description of Artificial Sequence: Synthetic oligonucleotide
  Sense Strand Starting at position 94 of SEQ ID NO: 315999
uuaaguuuacuaugagcaa

SEQ ID NO: 326082 - RNA, 19 nt, Artificial Sequence
  Description of Artificial Sequence: Synthetic oligonucleotide
  Antisense Strand to SEQ ID NO: 326081
uugcucauaguaaacuuaa

SEQ ID NO: 326083 - RNA, 19 nt, Artificial Sequence
  Description of Artificial Sequence: Synthetic oligonucleotide
  Sense Strand Starting at position 94 of SEQ ID NO: 316002
aguuuacuaugagcaaaua

SEQ ID NO: 326084 - RNA, 19 nt, Artificial Sequence
  Description of Artificial Sequence: Synthetic oligonucleotide
  Antisense Strand to SEQ ID NO: 326083
uauuugcucauaguaaacu

SEQ ID NO: 326085 - RNA, 19 nt, Artificial Sequence
  Description of Artificial Sequence: Synthetic oligonucleotide
  Sense Strand Starting at position 94 of SEQ ID NO: 316027
auaugcuuagccuagagaa

SEQ ID NO: 326086 - RNA, 19 nt, Artificial Sequence
  Description of Artificial Sequence: Synthetic oligonucleotide
  Antisense Strand to SEQ ID NO: 326085
uucucuaggcuaagcauau

SEQ ID NO: 326087 - RNA, 19 nt, Artificial Sequence
  Description of Artificial Sequence: Synthetic oligonucleotide
  Sense Strand Starting at position 94 of SEQ ID NO: 316029
augcuuagccuagagaaga

SEQ ID NO: 326088 - RNA, 19 nt, Artificial Sequence
  Description of Artificial Sequence: Synthetic oligonucleotide
  Antisense Strand to SEQ ID NO: 326087
ucuucucuaggcuaagcau

SEQ ID NO: 326089 - RNA, 19 nt, Artificial Sequence
  Description of Artificial Sequence: Synthetic oligonucleotide
  Sense Strand Starting at position 94 of SEQ ID NO: 316110
gggugauuccaagagccug

SEQ ID NO: 326090 - RNA, 19 nt, Artificial Sequence
  Description of Artificial Sequence: Synthetic oligonucleotide
  Antisense Strand to SEQ ID NO: 326089
caggcucuuggaaucaccc

SEQ ID NO: 326091 - RNA, 19 nt, Artificial Sequence
  Description of Artificial Sequence: Synthetic oligonucleotide
  Sense Strand Starting at position 94 of SEQ ID NO: 316142
gagcuaagauuaccgagua

SEQ ID NO: 326092 - RNA, 19 nt, Artificial Sequence
  Description of Artificial Sequence: Synthetic oligonucleotide
  Antisense Strand to SEQ ID NO: 326091
uacucgguaaucuuagcuc

SEQ ID NO: 326093 - RNA, 19 nt, Artificial Sequence
  Description of Artificial Sequence: Synthetic oligonucleotide
  Sense Strand Starting at position 94 of SEQ ID NO: 316338
cacagauaugacugguuac

SEQ ID NO: 326094 - RNA, 19 nt, Artificial Sequence
  Description of Artificial Sequence: Synthetic oligonucleotide
  Antisense Strand to SEQ ID NO: 326093
guaaccagucauaucugug

SEQ ID NO: 326095 - RNA, 19 nt, Artificial Sequence
  Description of Artificial Sequence: Synthetic oligonucleotide
  Sense Strand Starting at position 94 of SEQ ID NO: 316341
agauaugacugguuacagu

SEQ ID NO: 326096 - RNA, 19 nt, Artificial Sequence
  Description of Artificial Sequence: Synthetic oligonucleotide
  Antisense Strand to SEQ ID NO: 326095
acuguaaccagucauaucu

SEQ ID NO: 326097 - RNA, 19 nt, Artificial Sequence
  Description of Artificial Sequence: Synthetic oligonucleotide
  Sense Strand Starting at position 94 of SEQ ID NO: 316587
uuuaccuuaccggauugau

SEQ ID NO: 326098 - RNA, 19 nt, Artificial Sequence
  Description of Artificial Sequence: Synthetic oligonucleotide
  Antisense Strand to SEQ ID NO: 326097
aucaauccgguaagguaaa

SEQ ID NO: 326099 - RNA, 19 nt, Artificial Sequence
  Description of Artificial Sequence: Synthetic oligonucleotide
  Sense Strand Starting at position 94 of SEQ ID NO: 316646
cgagaaucuucuuucucag

SEQ ID NO: 326100 - RNA, 19 nt, Artificial Sequence
  Description of Artificial Sequence: Synthetic oligonucleotide
  Antisense Strand to SEQ ID NO: 326099
cugagaaagaagauucucg

SEQ ID NO: 326101 - RNA, 19 nt, Artificial Sequence
  Description of Artificial Sequence: Synthetic oligonucleotide
  Sense Strand Starting at position 94 of SEQ ID NO: 316692
uaaacaaauggcggauuau

SEQ ID NO: 326102 - RNA, 19 nt, Artificial Sequence
  Description of Artificial Sequence: Synthetic oligonucleotide
  Antisense Strand to SEQ ID NO: 326101
auaauccgccauuuguuua

SEQ ID NO: 326103 - RNA, 19 nt, Artificial Sequence
  Description of Artificial Sequence: Synthetic oligonucleotide
  Sense Strand Starting at position 94 of SEQ ID NO: 316816
guguuccaacacugaagau

SEQ ID NO: 326104 - RNA, 19 nt, Artificial Sequence
  Description of Artificial Sequence: Synthetic oligonucleotide
  Antisense Strand to SEQ ID NO: 326103
aucuucaguguuggaacac

SEQ ID NO: 326105 - RNA, 19 nt, Artificial Sequence
  Description of Artificial Sequence: Synthetic oligonucleotide
  Sense Strand Starting at position 94 of SEQ ID NO: 317284
ggaggaacuugagucguga

SEQ ID NO: 326106 - RNA, 19 nt, Artificial Sequence
  Description of Artificial Sequence: Synthetic oligonucleotide
  Antisense Strand to SEQ ID NO: 326105
ucacgacucaaguuccucc

SEQ ID NO: 326107 - RNA, 19 nt, Artificial Sequence
  Description of Artificial Sequence: Synthetic oligonucleotide
  Sense Strand Starting at position 94 of SEQ ID NO: 317444
caggaaugaucaccauggu

SEQ ID NO: 326108 - RNA, 19 nt, Artificial Sequence
  Description of Artificial Sequence: Synthetic oligonucleotide
  Antisense Strand to SEQ ID NO: 326107
accauggugaucauuccug

SEQ ID NO: 326109 - RNA, 19 nt, Artificial Sequence
  Description of Artificial Sequence: Synthetic oligonucleotide
  Sense Strand Starting at position 94 of SEQ ID NO: 317447
gaaugaucaccauggucau

SEQ ID NO: 326110 - RNA, 19 nt, Artificial Sequence
  Description of Artificial Sequence: Synthetic oligonucleotide
  Antisense Strand to SEQ ID NO: 326109
augaccauggugaucauuc

SEQ ID NO: 326111 - RNA, 19 nt, Artificial Sequence
  Description of Artificial Sequence: Synthetic oligonucleotide
  Sense Strand Starting at position 94 of SEQ ID NO: 317460
ggucauucuccaggagagg

SEQ ID NO: 326112 - RNA, 19 nt, Artificial Sequence
  Description of Artificial Sequence: Synthetic oligonucleotide
  Antisense Strand to SEQ ID NO: 326111
ccucuccuggagaaugacc

SEQ ID NO: 326113 - RNA, 19 nt, Artificial Sequence
  Description of Artificial Sequence: Synthetic oligonucleotide
  Sense Strand Starting at position 94 of SEQ ID NO: 317622
cugucagugagauaaaguu

SEQ ID NO: 326114 - RNA, 19 nt, Artificial Sequence
  Description of Artificial Sequence: Synthetic oligonucleotide
  Antisense Strand to SEQ ID NO: 326113
aacuuuaucucacugacag

SEQ ID NO: 326115 - RNA, 19 nt, Artificial Sequence
  Description of Artificial Sequence: Synthetic oligonucleotide
  Sense Strand Starting at position 94 of SEQ ID NO: 317646
cucucaauacuugguuaga

SEQ ID NO: 326116 - RNA, 19 nt, Artificial Sequence
  Description of Artificial Sequence: Synthetic oligonucleotide
  Antisense Strand to SEQ ID NO: 326115
ucuaaccaaguauugagag

SEQ ID NO: 326117 - RNA, 19 nt, Artificial Sequence
  Description of Artificial Sequence: Synthetic oligonucleotide
  Sense Strand Starting at position 94 of SEQ ID NO: 317647
ucucaauacuugguuagau

SEQ ID NO: 326118 - RNA, 19 nt, Artificial Sequence
  Description of Artificial Sequence: Synthetic oligonucleotide
  Antisense Strand to SEQ ID NO: 326117
aucuaaccaaguauugaga

SEQ ID NO: 326119 - RNA, 19 nt, Artificial Sequence
  Description of Artificial Sequence: Synthetic oligonucleotide
  Sense Strand Starting at position 94 of SEQ ID NO: 317648
cucaauacuugguuagaua

SEQ ID NO: 326120 - RNA, 19 nt, Artificial Sequence
  Description of Artificial Sequence: Synthetic oligonucleotide
  Antisense Strand to SEQ ID NO: 326119
uaucuaaccaaguauugag

SEQ ID NO: 326121 - RNA, 19 nt, Artificial Sequence
  Description of Artificial Sequence: Synthetic oligonucleotide
  Sense Strand Starting at position 94 of SEQ ID NO: 317663
gauacucugcgcgugcaaa

SEQ ID NO: 326122 - RNA, 19 nt, Artificial Sequence
  Description of Artificial Sequence: Synthetic oligonucleotide
  Antisense Strand to SEQ ID NO: 326121
uuugcacgcgcagaguauc

SEQ ID NO: 326123 - RNA, 19 nt, Artificial Sequence
  Description of Artificial Sequence: Synthetic oligonucleotide
  Sense Strand Starting at position 94 of SEQ ID NO: 317699
aagauacagcagugauuau

SEQ ID NO: 326124 - RNA, 19 nt, Artificial Sequence
  Description of Artificial Sequence: Synthetic oligonucleotide
  Antisense Strand to SEQ ID NO: 326123
auaaucacugcuguaucuu

SEQ ID NO: 326125 - RNA, 19 nt, Artificial Sequence
  Description of Artificial Sequence: Synthetic oligonucleotide
  Sense Strand Starting at position 94 of SEQ ID NO: 317703
uacagcagugauuaugaca

SEQ ID NO: 326126 - RNA, 19 nt, Artificial Sequence
  Description of Artificial Sequence: Synthetic oligonucleotide
  Antisense Strand to SEQ ID NO: 326125
ugucauaaucacugcugua

SEQ ID NO: 326127 - RNA, 19 nt, Artificial Sequence
  Description of Artificial Sequence: Synthetic oligonucleotide
  Sense Strand Starting at position 94 of SEQ ID NO: 317950
ccaggaacguaaucugaag

SEQ ID NO: 326128 - RNA, 19 nt, Artificial Sequence
  Description of Artificial Sequence: Synthetic oligonucleotide
  Antisense Strand to SEQ ID NO: 326127
cuucagauuacguuccugg

SEQ ID NO: 326129 - RNA, 19 nt, Artificial Sequence
  Description of Artificial Sequence: Synthetic oligonucleotide
  Sense Strand Starting at position 94 of SEQ ID NO: 317952
aggaacguaaucugaaguu

SEQ ID NO: 326130 - RNA, 19 nt, Artificial Sequence
  Description of Artificial Sequence: Synthetic oligonucleotide
  Antisense Strand to SEQ ID NO: 326129
aacuucagauuacguuccu

SEQ ID NO: 326131 - RNA, 19 nt, Artificial Sequence
  Description of Artificial Sequence: Synthetic oligonucleotide
  Sense Strand Starting at position 94 of SEQ ID NO: 318412
gugagaucacucugaccaa

SEQ ID NO: 326132 - RNA, 19 nt, Artificial Sequence
  Description of Artificial Sequence: Synthetic oligonucleotide
  Antisense Strand to SEQ ID NO: 326131
uuggucagagugaucucac

SEQ ID NO: 326133 - RNA, 19 nt, Artificial Sequence
  Description of Artificial Sequence: Synthetic oligonucleotide
  Sense Strand Starting at position 94 of SEQ ID NO: 318442
auguuucaaugguuaggga

SEQ ID NO: 326134 - RNA, 19 nt, Artificial Sequence
  Description of Artificial Sequence: Synthetic oligonucleotide
  Antisense Strand to SEQ ID NO: 326133
ucccuaaccauugaaacau

SEQ ID NO: 326135 - RNA, 19 nt, Artificial Sequence
  Description of Artificial Sequence: Synthetic oligonucleotide
  Sense Strand Starting at position 94 of SEQ ID NO: 318443
uguuucaaugguuagggaa

SEQ ID NO: 326136 - RNA, 19 nt, Artificial Sequence
  Description of Artificial Sequence: Synthetic oligonucleotide
  Antisense Strand to SEQ ID NO: 326135
uucccuaaccauugaaaca

SEQ ID NO: 326137 - RNA, 19 nt, Artificial Sequence
  Description of Artificial Sequence: Synthetic oligonucleotide
  Sense Strand Starting at position 94 of SEQ ID NO: 318694
acugaagauccgcagaagu

SEQ ID NO: 326138 - RNA, 19 nt, Artificial Sequence
  Description of Artificial Sequence: Synthetic oligonucleotide
  Antisense Strand to SEQ ID NO: 326137
acuucugcggaucuucagu

SEQ ID NO: 326139 - RNA, 19 nt, Artificial Sequence
  Description of Artificial Sequence: Synthetic oligonucleotide
  Sense Strand Starting at position 94 of SEQ ID NO: 318696
ugaagauccgcagaaguga

SEQ ID NO: 326140 - RNA, 19 nt, Artificial Sequence
  Description of Artificial Sequence: Synthetic oligonucleotide
  Antisense Strand to SEQ ID NO: 326139
ucacuucugcggaucuuca

SEQ ID NO: 326141 - RNA, 19 nt, Artificial Sequence
  Description of Artificial Sequence: Synthetic oligonucleotide
  Sense Strand Starting at position 94 of SEQ ID NO: 319095
cugagaguagguuaaagua

SEQ ID NO: 326142 - RNA, 19 nt, Artificial Sequence
  Description of Artificial Sequence: Synthetic oligonucleotide
  Antisense Strand to SEQ ID NO: 326141
uacuuuaaccuacucucag

SEQ ID NO: 326143 - RNA, 19 nt, Artificial Sequence
  Description of Artificial Sequence: Synthetic oligonucleotide
  Sense Strand Starting at position 94 of SEQ ID NO: 319142
acccaaguuugguuaauaa

SEQ ID NO: 326144 - RNA, 19 nt, Artificial Sequence
  Description of Artificial Sequence: Synthetic oligonucleotide
  Antisense Strand to SEQ ID NO: 326143
uuauuaaccaaacuugggu

SEQ ID NO: 326145 - RNA, 19 nt, Artificial Sequence
  Description of Artificial Sequence: Synthetic oligonucleotide
  Sense Strand Starting at position 94 of SEQ ID NO: 319191
gcagcucuguaaucauuua

SEQ ID NO: 326146 - RNA, 19 nt, Artificial Sequence
  Description of Artificial Sequence: Synthetic oligonucleotide
  Antisense Strand to SEQ ID NO: 326145
uaaaugauuacagagcugc

SEQ ID NO: 326147 - RNA, 19 nt, Artificial Sequence
  Description of Artificial Sequence: Synthetic oligonucleotide
  Sense Strand Starting at position 95 of SEQ ID NO: 315284
cugucuugaagaugagcau

SEQ ID NO: 326148 - RNA, 19 nt, Artificial Sequence
  Description of Artificial Sequence: Synthetic oligonucleotide
  Antisense Strand to SEQ ID NO: 326147
augcucaucuucaagacag

SEQ ID NO: 326149 - RNA, 19 nt, Artificial Sequence
  Description of Artificial Sequence: Synthetic oligonucleotide
  Sense Strand Starting at position 95 of SEQ ID NO: 315290
ugaagaugagcaugguuau

SEQ ID NO: 326150 - RNA, 19 nt, Artificial Sequence
  Description of Artificial Sequence: Synthetic oligonucleotide
  Antisense Strand to SEQ ID NO: 326149
auaaccaugcucaucuuca

SEQ ID NO: 326151 - RNA, 19 nt, Artificial Sequence
  Description of Artificial Sequence: Synthetic oligonucleotide
  Sense Strand Starting at position 95 of SEQ ID NO: 315291
gaagaugagcaugguuaua

SEQ ID NO: 326152 - RNA, 19 nt, Artificial Sequence
  Description of Artificial Sequence: Synthetic oligonucleotide
  Antisense Strand to SEQ ID NO: 326151
uauaaccaugcucaucuuc

SEQ ID NO: 326153 - RNA, 19 nt, Artificial Sequence
  Description of Artificial Sequence: Synthetic oligonucleotide
  Sense Strand Starting at position 95 of SEQ ID NO: 315293
agaugagcaugguuauaca

SEQ ID NO: 326154 - RNA, 19 nt, Artificial Sequence
  Description of Artificial Sequence: Synthetic oligonucleotide
  Antisense Strand to SEQ ID NO: 326153
uguauaaccaugcucaucu

SEQ ID NO: 326155 - RNA, 19 nt, Artificial Sequence
  Description of Artificial Sequence: Synthetic oligonucleotide
  Sense Strand Starting at position 95 of SEQ ID NO: 315452
acaagaagauuuggcaaau

SEQ ID NO: 326156 - RNA, 19 nt, Artificial Sequence
  Description of Artificial Sequence: Synthetic oligonucleotide
  Antisense Strand to SEQ ID NO: 326155
auuugccaaaucuucuugu

SEQ ID NO: 326157 - RNA, 19 nt, Artificial Sequence
  Description of Artificial Sequence: Synthetic oligonucleotide
  Sense Strand Starting at position 95 of SEQ ID NO: 315551
guauuacaagaugguauua

SEQ ID NO: 326158 - RNA, 19 nt, Artificial Sequence
  Description of Artificial Sequence: Synthetic oligonucleotide
  Antisense Strand to SEQ ID NO: 326157
uaauaccaucuuguaauac

SEQ ID NO: 326159 - RNA, 19 nt, Artificial Sequence
  Description of Artificial Sequence: Synthetic oligonucleotide
  Sense Strand Starting at position 95 of SEQ ID NO: 315601
agcauauaucugggauauc

SEQ ID NO: 326160 - RNA, 19 nt, Artificial Sequence
  Description of Artificial Sequence: Synthetic oligonucleotide
  Antisense Strand to SEQ ID NO: 326159
gauaucccagauauaugcu

SEQ ID NO: 326161 - RNA, 19 nt, Artificial Sequence
  Description of Artificial Sequence: Synthetic oligonucleotide
  Sense Strand Starting at position 95 of SEQ ID NO: 315755
accacacuucuuggucuua

SEQ ID NO: 326162 - RNA, 19 nt, Artificial Sequence
  Description of Artificial Sequence: Synthetic oligonucleotide
  Antisense Strand to SEQ ID NO: 326161
uaagaccaagaaguguggu

SEQ ID NO: 326163 - RNA, 19 nt, Artificial Sequence
  Description of Artificial Sequence: Synthetic oligonucleotide
  Sense Strand Starting at position 95 of SEQ ID NO: 315809
gaguuaucagugcuuucgu

SEQ ID NO: 326164 - RNA, 19 nt, Artificial Sequence
  Description of Artificial Sequence: Synthetic oligonucleotide
  Antisense Strand to SEQ ID NO: 326163
acgaaagcacugauaacuc

SEQ ID NO: 326165 - RNA, 19 nt, Artificial Sequence
  Description of Artificial Sequence: Synthetic oligonucleotide
  Sense Strand Starting at position 95 of SEQ ID NO: 315868
ccuuuagaauuaguaaaug

SEQ ID NO: 326166 - RNA, 19 nt, Artificial Sequence
  Description of Artificial Sequence: Synthetic oligonucleotide
  Antisense Strand to SEQ ID NO: 326165
cauuuacuaauucuaaagg

SEQ ID NO: 326167 - RNA, 19 nt, Artificial Sequence
  Description of Artificial Sequence: Synthetic oligonucleotide
  Sense Strand Starting at position 95 of SEQ ID NO: 315984
ggcaauuucuguccuaauu

SEQ ID NO: 326168 - RNA, 19 nt, Artificial Sequence
  Description of Artificial Sequence: Synthetic oligonucleotide
  Antisense Strand to SEQ ID NO: 326167
aauuaggacagaaauugcc

SEQ ID NO: 326169 - RNA, 19 nt, Artificial Sequence
  Description of Artificial Sequence: Synthetic oligonucleotide
  Sense Strand Starting at position 95 of SEQ ID NO: 316143
guguccagauguuccaaua

SEQ ID NO: 326170 - RNA, 19 nt, Artificial Sequence
  Description of Artificial Sequence: Synthetic oligonucleotide
  Antisense Strand to SEQ ID NO: 326169
uauuggaacaucuggacac

SEQ ID NO: 326171 - RNA, 19 nt, Artificial Sequence
  Description of Artificial Sequence: Synthetic oligonucleotide
  Sense Strand Starting at position 95 of SEQ ID NO: 316293
acaguacguaucguucgua

SEQ ID NO: 326172 - RNA, 19 nt, Artificial Sequence
  Description of Artificial Sequence: Synthetic oligonucleotide
  Antisense Strand to SEQ ID NO: 326171
uacgaacgauacguacugu

SEQ ID NO: 326173 - RNA, 19 nt, Artificial Sequence
  Description of Artificial Sequence: Synthetic oligonucleotide
  Sense Strand Starting at position 95 of SEQ ID NO: 316538
caaauuguucgaggcagga

SEQ ID NO: 326174 - RNA, 19 nt, Artificial Sequence
  Description of Artificial Sequence: Synthetic oligonucleotide
  Antisense Strand to SEQ ID NO: 326173
uccugccucgaacaauuug

SEQ ID NO: 326175 - RNA, 19 nt, Artificial Sequence
  Description of Artificial Sequence: Synthetic oligonucleotide
  Sense Strand Starting at position 95 of SEQ ID NO: 317416
guuguggguccgggaagaa

SEQ ID NO: 326176 - RNA, 19 nt, Artificial Sequence
  Description of Artificial Sequence: Synthetic oligonucleotide
  Antisense Strand to SEQ ID NO: 326175
uucuucccggacccacaac

SEQ ID NO: 326177 - RNA, 19 nt, Artificial Sequence
  Description of Artificial Sequence: Synthetic oligonucleotide
  Sense Strand Starting at position 95 of SEQ ID NO: 317656
gaacguaugugacugaaag

SEQ ID NO: 326178 - RNA, 19 nt, Artificial Sequence
  Description of Artificial Sequence: Synthetic oligonucleotide
  Antisense Strand to SEQ ID NO: 326177
cuuucagucacauacguuc

SEQ ID NO: 326179 - RNA, 19 nt, Artificial Sequence
  Description of Artificial Sequence: Synthetic oligonucleotide
  Sense Strand Starting at position 95 of SEQ ID NO: 317657
aacguaugugacugaaagu

SEQ ID NO: 326180 - RNA, 19 nt, Artificial Sequence
  Description of Artificial Sequence: Synthetic oligonucleotide
  Antisense Strand to SEQ ID NO: 326179
acuuucagucacauacguu

SEQ ID NO: 326181 - RNA, 19 nt, Artificial Sequence
  Description of Artificial Sequence: Synthetic oligonucleotide
  Sense Strand Starting at position 95 of SEQ ID NO: 317658
acguaugugacugaaaguu

SEQ ID NO: 326182 - RNA, 19 nt, Artificial Sequence
  Description of Artificial Sequence: Synthetic oligonucleotide
  Antisense Strand to SEQ ID NO: 326181
aacuuucagucacauacgu

SEQ ID NO: 326183 - RNA, 19 nt, Artificial Sequence
  Description of Artificial Sequence: Synthetic oligonucleotide
  Sense Strand Starting at position 95 of SEQ ID NO: 317712
gcuguaagagcuuucgucu

SEQ ID NO: 326184 - RNA, 19 nt, Artificial Sequence
  Description of Artificial Sequence: Synthetic oligonucleotide
  Antisense Strand to SEQ ID NO: 326183
agacgaaagcucuuacagc

SEQ ID NO: 326185 - RNA, 19 nt, Artificial Sequence
  Description of Artificial Sequence: Synthetic oligonucleotide
  Sense Strand Starting at position 95 of SEQ ID NO: 317742
aggccucuucuuuagcaaa

SEQ ID NO: 326186 - RNA, 19 nt, Artificial Sequence
  Description of Artificial Sequence: Synthetic oligonucleotide
  Antisense Strand to SEQ ID NO: 326185
uuugcuaaagaagaggccu

SEQ ID NO: 326187 - RNA, 19 nt, Artificial Sequence
  Description of Artificial Sequence: Synthetic oligonucleotide
  Sense Strand Starting at position 95 of SEQ ID NO: 317795
cccauuaagugauucgaaa

SEQ ID NO: 326188 - RNA, 19 nt, Artificial Sequence
  Description of Artificial Sequence: Synthetic oligonucleotide
  Antisense Strand to SEQ ID NO: 326187
uuucgaaucacuuaauggg

SEQ ID NO: 326189 - RNA, 19 nt, Artificial Sequence
  Description of Artificial Sequence: Synthetic oligonucleotide
  Sense Strand Starting at position 95 of SEQ ID NO: 317852
guguuucuaggcgaaugga

SEQ ID NO: 326190 - RNA, 19 nt, Artificial Sequence
  Description of Artificial Sequence: Synthetic oligonucleotide
  Antisense Strand to SEQ ID NO: 326189
uccauucgccuagaaacac

SEQ ID NO: 326191 - RNA, 19 nt, Artificial Sequence
  Description of Artificial Sequence: Synthetic oligonucleotide
  Sense Strand Starting at position 95 of SEQ ID NO: 317880
cugucuugccgugugcuaa

SEQ ID NO: 326192 - RNA, 19 nt, Artificial Sequence
  Description of Artificial Sequence: Synthetic oligonucleotide
  Antisense Strand to SEQ ID NO: 326191
uuagcacacggcaagacag

SEQ ID NO: 326193 - RNA, 19 nt, Artificial Sequence
  Description of Artificial Sequence: Synthetic oligonucleotide
  Sense Strand Starting at position 95 of SEQ ID NO: 317883
ucuugccgugugcuaaauu

SEQ ID NO: 326194 - RNA, 19 nt, Artificial Sequence
  Description of Artificial Sequence: Synthetic oligonucleotide
  Antisense Strand to SEQ ID NO: 326193
aauuuagcacacggcaaga

SEQ ID NO: 326195 - RNA, 19 nt, Artificial Sequence
  Description of Artificial Sequence: Synthetic oligonucleotide
  Sense Strand Starting at position 95 of SEQ ID NO: 318053
ggaacaaggcuuugacuua

SEQ ID NO: 326196 - RNA, 19 nt, Artificial Sequence
  Description of Artificial Sequence: Synthetic oligonucleotide
  Antisense Strand to SEQ ID NO: 326195
uaagucaaagccuuguucc

SEQ ID NO: 326197 - RNA, 19 nt, Artificial Sequence
  Description of Artificial Sequence: Synthetic oligonucleotide
  Sense Strand Starting at position 95 of SEQ ID NO: 318540
augagauuagcaugacuag

SEQ ID NO: 326198 - RNA, 19 nt, Artificial Sequence
  Description of Artificial Sequence: Synthetic oligonucleotide
  Antisense Strand to SEQ ID NO: 326197
cuagucaugcuaaucucau

SEQ ID NO: 326199 - RNA, 19 nt, Artificial Sequence
  Description of Artificial Sequence: Synthetic oligonucleotide
  Sense Strand Starting at position 95 of SEQ ID NO: 318598
guagacauuucuuacuaua

SEQ ID NO: 326200 - RNA, 19 nt, Artificial Sequence
  Description of Artificial Sequence: Synthetic oligonucleotide
  Antisense Strand to SEQ ID NO: 326199
uauaguaagaaaugucuac

SEQ ID NO: 326201 - RNA, 19 nt, Artificial Sequence
  Description of Artificial Sequence: Synthetic oligonucleotide
  Sense Strand Starting at position 95 of SEQ ID NO: 318758
guggcuaaaccuuacuuua

SEQ ID NO: 326202 - RNA, 19 nt, Artificial Sequence
  Description of Artificial Sequence: Synthetic oligonucleotide
  Antisense Strand to SEQ ID NO: 326201
uaaaguaagguuuagccac

SEQ ID NO: 326203 - RNA, 19 nt, Artificial Sequence
  Description of Artificial Sequence: Synthetic oligonucleotide
  Sense Strand Starting at position 95 of SEQ ID NO: 318760
ggcuaaaccuuacuuuaug

SEQ ID NO: 326204 - RNA, 19 nt, Artificial Sequence
  Description of Artificial Sequence: Synthetic oligonucleotide
  Antisense Strand to SEQ ID NO: 326203
cauaaaguaagguuuagcc

SEQ ID NO: 326205 - RNA, 19 nt, Artificial Sequence
  Description of Artificial Sequence: Synthetic oligonucleotide
  Sense Strand Starting at position 95 of SEQ ID NO: 318870
guaucaaguucuuuacuug

SEQ ID NO: 326206 - RNA, 19 nt, Artificial Sequence
  Description of Artificial Sequence: Synthetic oligonucleotide
  Antisense Strand to SEQ ID NO: 326205
caaguaaagaacuugauac

SEQ ID NO: 326207 - RNA, 19 nt, Artificial Sequence
  Description of Artificial Sequence: Synthetic oligonucleotide
  Sense Strand Starting at position 95 of SEQ ID NO: 318914
ucccuugaaguagguauua

SEQ ID NO: 326208 - RNA, 19 nt, Artificial Sequence
  Description of Artificial Sequence: Synthetic oligonucleotide
  Antisense Strand to SEQ ID NO: 326207
uaauaccuacuucaaggga

SEQ ID NO: 326209 - RNA, 19 nt, Artificial Sequence
  Description of Artificial Sequence: Synthetic oligonucleotide
  Sense Strand Starting at position 95 of SEQ ID NO: 318999
uggauugucaggcaauagu

SEQ ID NO: 326210 - RNA, 19 nt, Artificial Sequence
  Description of Artificial Sequence: Synthetic oligonucleotide
  Antisense Strand to SEQ ID NO: 326209
acuauugccugacaaucca

SEQ ID NO: 326211 - RNA, 19 nt, Artificial Sequence
  Description of Artificial Sequence: Synthetic oligonucleotide
  Sense Strand Starting at position 95 of SEQ ID NO: 319075
aucugcaaaugguuugauu

SEQ ID NO: 326212 - RNA, 19 nt, Artificial Sequence
  Description of Artificial Sequence: Synthetic oligonucleotide
  Antisense Strand to SEQ ID NO: 326211
aaucaaaccauuugcagau

SEQ ID NO: 326213 - RNA, 19 nt, Artificial Sequence
  Description of Artificial Sequence: Synthetic oligonucleotide
  Sense Strand Starting at position 95 of SEQ ID NO: 319077
cugcaaaugguuugauuac

SEQ ID NO: 326214 - RNA, 19 nt, Artificial Sequence
  Description of Artificial Sequence: Synthetic oligonucleotide
  Antisense Strand to SEQ ID NO: 326213
guaaucaaaccauuugcag

SEQ ID NO: 326215 - RNA, 19 nt, Artificial Sequence
  Description of Artificial Sequence: Synthetic oligonucleotide
  Sense Strand Starting at position 95 of SEQ ID NO: 319094
acaaauuaggccuggaaau

SEQ ID NO: 326216 - RNA, 19 nt, Artificial Sequence
  Description of Artificial Sequence: Synthetic oligonucleotide
  Antisense Strand to SEQ ID NO: 326215
auuuccaggccuaauuugu

SEQ ID NO: 326217 - RNA, 19 nt, Artificial Sequence
  Description of Artificial Sequence: Synthetic oligonucleotide
  Sense Strand Starting at position 95 of SEQ ID NO: 319153
gaaauagcgaucuggagaa

SEQ ID NO: 326218 - RNA, 19 nt, Artificial Sequence
  Description of Artificial Sequence: Synthetic oligonucleotide
  Antisense Strand to SEQ ID NO: 326217
uucuccagaucgcuauuuc

SEQ ID NO: 326219 - RNA, 19 nt, Artificial Sequence
  Description of Artificial Sequence: Synthetic oligonucleotide
  Sense Strand Starting at position 95 of SEQ ID NO: 319157
uagcgaucuggagaauacu

SEQ ID NO: 326220 - RNA, 19 nt, Artificial Sequence
  Description of Artificial Sequence: Synthetic oligonucleotide
  Antisense Strand to SEQ ID NO: 326219
aguauucuccagaucgcua

SEQ ID NO: 326221 - RNA, 19 nt, Artificial Sequence
  Description of Artificial Sequence: Synthetic oligonucleotide
  Sense Strand Starting at position 95 of SEQ ID NO: 319165
uggagaauacuuuguguau

SEQ ID NO: 326222 - RNA, 19 nt, Artificial Sequence
  Description of Artificial Sequence: Synthetic oligonucleotide
  Antisense Strand to SEQ ID NO: 326221
auacacaaaguauucucca

SEQ ID NO: 326223 - RNA, 19 nt, Artificial Sequence
  Description of Artificial Sequence: Synthetic oligonucleotide
  Sense Strand Starting at position 95 of SEQ ID NO: 319166
ggagaauacuuuguguauc

SEQ ID NO: 326224 - RNA, 19 nt, Artificial Sequence
  Description of Artificial Sequence: Synthetic oligonucleotide
  Antisense Strand to SEQ ID NO: 326223
gauacacaaaguauucucc

SEQ ID NO: 326225 - RNA, 19 nt, Artificial Sequence
  Description of Artificial Sequence: Synthetic oligonucleotide
  Sense Strand Starting at position 95 of SEQ ID NO: 319168
agaauacuuuguguaucau

SEQ ID NO: 326226 - RNA, 19 nt, Artificial Sequence
  Description of Artificial Sequence: Synthetic oligonucleotide
  Antisense Strand to SEQ ID NO: 326225
augauacacaaaguauucu

SEQ ID NO: 326227 - RNA, 19 nt, Artificial Sequence
  Description of Artificial Sequence: Synthetic oligonucleotide
  Sense Strand Starting at position 96 of SEQ ID NO: 315273
gaggaaacgucacugaaac

SEQ ID NO: 326228 - RNA, 19 nt, Artificial Sequence
  Description of Artificial Sequence: Synthetic oligonucleotide
  Antisense Strand to SEQ ID NO: 326227
guuucagugacguuuccuc

SEQ ID NO: 326229 - RNA, 19 nt, Artificial Sequence
  Description of Artificial Sequence: Synthetic oligonucleotide
  Sense Strand Starting at position 96 of SEQ ID NO: 315296
aaggcugguucuuugaaau

SEQ ID NO: 326230 - RNA, 19 nt, Artificial Sequence
  Description of Artificial Sequence: Synthetic oligonucleotide
  Antisense Strand to SEQ ID NO: 326229
auuucaaagaaccagccuu

SEQ ID NO: 326231 - RNA, 19 nt, Artificial Sequence
  Description of Artificial Sequence: Synthetic oligonucleotide
  Sense Strand Starting at position 96 of SEQ ID NO: 315376
gcaaauuaccaguaucagu

SEQ ID NO: 326232 - RNA, 19 nt, Artificial Sequence
  Description of Artificial Sequence: Synthetic oligonucleotide
  Antisense Strand to SEQ ID NO: 326231
acugauacugguaauuugc

SEQ ID NO: 326233 - RNA, 19 nt, Artificial Sequence
  Description of Artificial Sequence: Synthetic oligonucleotide
  Sense Strand Starting at position 96 of SEQ ID NO: 315381
uuaccaguaucaguaauaa

SEQ ID NO: 326234 - RNA, 19 nt, Artificial Sequence
  Description of Artificial Sequence: Synthetic oligonucleotide
  Antisense Strand to SEQ ID NO: 326233
uuauuacugauacugguaa

SEQ ID NO: 326235 - RNA, 19 nt, Artificial Sequence
  Description of Artificial Sequence: Synthetic oligonucleotide
  Sense Strand Starting at position 96 of SEQ ID NO: 315458
gcaacuugacacugauaca

SEQ ID NO: 326236 - RNA, 19 nt, Artificial Sequence
  Description of Artificial Sequence: Synthetic oligonucleotide
  Antisense Strand to SEQ ID NO: 326235
uguaucagugucaaguugc

SEQ ID NO: 326237 - RNA, 19 nt, Artificial Sequence
  Description of Artificial Sequence: Synthetic oligonucleotide
  Sense Strand Starting at position 96 of SEQ ID NO: 315556
uggccaugaguuugauaac

SEQ ID NO: 326238 - RNA, 19 nt, Artificial Sequence
  Description of Artificial Sequence: Synthetic oligonucleotide
  Antisense Strand to SEQ ID NO: 326237
guuaucaaacucauggcca

SEQ ID NO: 326239 - RNA, 19 nt, Artificial Sequence
  Description of Artificial Sequence: Synthetic oligonucleotide
  Sense Strand Starting at position 96 of SEQ ID NO: 315562
ugaguuugauaacugcuaa

SEQ ID NO: 326240 - RNA, 19 nt, Artificial Sequence
  Description of Artificial Sequence: Synthetic oligonucleotide
  Antisense Strand to SEQ ID NO: 326239
uuagcaguuaucaaacuca

SEQ ID NO: 326241 - RNA, 19 nt, Artificial Sequence
  Description of Artificial Sequence: Synthetic oligonucleotide
  Sense Strand Starting at position 96 of SEQ ID NO: 315593
agcugagugaauggauaca

SEQ ID NO: 326242 - RNA, 19 nt, Artificial Sequence
  Description of Artificial Sequence: Synthetic oligonucleotide
  Antisense Strand to SEQ ID NO: 326241
uguauccauucacucagcu

SEQ ID NO: 326243 - RNA, 19 nt, Artificial Sequence
  Description of Artificial Sequence: Synthetic oligonucleotide
  Sense Strand Starting at position 96 of SEQ ID NO: 315646
auguguagaaauuguugau

SEQ ID NO: 326244 - RNA, 19 nt, Artificial Sequence
  Description of Artificial Sequence: Synthetic oligonucleotide
  Antisense Strand to SEQ ID NO: 326243
aucaacaauuucuacacau

SEQ ID NO: 326245 - RNA, 19 nt, Artificial Sequence
  Description of Artificial Sequence: Synthetic oligonucleotide
  Sense Strand Starting at position 96 of SEQ ID NO: 315908
cacagagggccacgaauau

SEQ ID NO: 326246 - RNA, 19 nt, Artificial Sequence
  Description of Artificial Sequence: Synthetic oligonucleotide
  Antisense Strand to SEQ ID NO: 326245
auauucguggcccucugug

SEQ ID NO: 326247 - RNA, 19 nt, Artificial Sequence
  Description of Artificial Sequence: Synthetic oligonucleotide
  Sense Strand Starting at position 96 of SEQ ID NO: 317084
aaauauuucuguuucgguu

SEQ ID NO: 326248 - RNA, 19 nt, Artificial Sequence
  Description of Artificial Sequence: Synthetic oligonucleotide
  Antisense Strand to SEQ ID NO: 326247
aaccgaaacagaaauauuu

SEQ ID NO: 326249 - RNA, 19 nt, Artificial Sequence
  Description of Artificial Sequence: Synthetic oligonucleotide
  Sense Strand Starting at position 96 of SEQ ID NO: 317198
ccaucugucacucguagag

SEQ ID NO: 326250 - RNA, 19 nt, Artificial Sequence
  Description of Artificial Sequence: Synthetic oligonucleotide
  Antisense Strand to SEQ ID NO: 326249
cucuacgagugacagaugg

SEQ ID NO: 326251 - RNA, 19 nt, Artificial Sequence
  Description of Artificial Sequence: Synthetic oligonucleotide
  Sense Strand Starting at position 96 of SEQ ID NO: 317242
cuaguuagcucaccgaagu

SEQ ID NO: 326252 - RNA, 19 nt, Artificial Sequence
  Description of Artificial Sequence: Synthetic oligonucleotide
  Antisense Strand to SEQ ID NO: 326251
acuucggugagcuaacuag

SEQ ID NO: 326253 - RNA, 19 nt, Artificial Sequence
  Description of Artificial Sequence: Synthetic oligonucleotide
  Sense Strand Starting at position 96 of SEQ ID NO: 317243
uaguuagcucaccgaaguu

SEQ ID NO: 326254 - RNA, 19 nt, Artificial Sequence
  Description of Artificial Sequence: Synthetic oligonucleotide
  Antisense Strand to SEQ ID NO: 326253
aacuucggugagcuaacua

SEQ ID NO: 326255 - RNA, 19 nt, Artificial Sequence
  Description of Artificial Sequence: Synthetic oligonucleotide
  Sense Strand Starting at position 96 of SEQ ID NO: 317318
aggcuauugugcuuaacca

SEQ ID NO: 326256 - RNA, 19 nt, Artificial Sequence
  Description of Artificial Sequence: Synthetic oligonucleotide
  Antisense Strand to SEQ ID NO: 326255
ugguuaagcacaauagccu

SEQ ID NO: 326257 - RNA, 19 nt, Artificial Sequence
  Description of Artificial Sequence: Synthetic oligonucleotide
  Sense Strand Starting at position 96 of SEQ ID NO: 317319
ggcuauugugcuuaaccaa

SEQ ID NO: 326258 - RNA, 19 nt, Artificial Sequence
  Description of Artificial Sequence: Synthetic oligonucleotide
  Antisense Strand to SEQ ID NO: 326257
uugguuaagcacaauagcc

SEQ ID NO: 326259 - RNA, 19 nt, Artificial Sequence
  Description of Artificial Sequence: Synthetic oligonucleotide
  Sense Strand Starting at position 96 of SEQ ID NO: 317363
uugauuugcugugugaguu

SEQ ID NO: 326260 - RNA, 19 nt, Artificial Sequence
  Description of Artificial Sequence: Synthetic oligonucleotide
  Antisense Strand to SEQ ID NO: 326259
aacucacacagcaaaucaa

SEQ ID NO: 326261 - RNA, 19 nt, Artificial Sequence
  Description of Artificial Sequence: Synthetic oligonucleotide
  Sense Strand Starting at position 96 of SEQ ID NO: 317364
ugauuugcugugugaguuu

SEQ ID NO: 326262 - RNA, 19 nt, Artificial Sequence
  Description of Artificial Sequence: Synthetic oligonucleotide
  Antisense Strand to SEQ ID NO: 326261
aaacucacacagcaaauca

SEQ ID NO: 326263 - RNA, 19 nt, Artificial Sequence
  Description of Artificial Sequence: Synthetic oligonucleotide
  Sense Strand Starting at position 96 of SEQ ID NO: 317632
ugaguuucucaagaguugu

SEQ ID NO: 326264 - RNA, 19 nt, Artificial Sequence
  Description of Artificial Sequence: Synthetic oligonucleotide
  Antisense Strand to SEQ ID NO: 326263
acaacucuugagaaacuca

SEQ ID NO: 326265 - RNA, 19 nt, Artificial Sequence
  Description of Artificial Sequence: Synthetic oligonucleotide
  Sense Strand Starting at position 96 of SEQ ID NO: 317658
uuauaauagugagugugga

SEQ ID NO: 326266 - RNA, 19 nt, Artificial Sequence
  Description of Artificial Sequence: Synthetic oligonucleotide
  Antisense Strand to SEQ ID NO: 326265
uccacacucacuauuauaa

SEQ ID NO: 326267 - RNA, 19 nt, Artificial Sequence
  Description of Artificial Sequence: Synthetic oligonucleotide
  Sense Strand Starting at position 96 of SEQ ID NO: 317694
aaggauagucuauguacgu

SEQ ID NO: 326268 - RNA, 19 nt, Artificial Sequence
  Description of Artificial Sequence: Synthetic oligonucleotide
  Antisense Strand to SEQ ID NO: 326267
acguacauagacuauccuu

SEQ ID NO: 326269 - RNA, 19 nt, Artificial Sequence
  Description of Artificial Sequence: Synthetic oligonucleotide
  Sense Strand Starting at position 96 of SEQ ID NO: 317704
uauguacgugccuacaauu

SEQ ID NO: 326270 - RNA, 19 nt, Artificial Sequence
  Description of Artificial Sequence: Synthetic oligonucleotide
  Antisense Strand to SEQ ID NO: 326269
aauuguaggcacguacaua

SEQ ID NO: 326271 - RNA, 19 nt, Artificial Sequence
  Description of Artificial Sequence: Synthetic oligonucleotide
  Sense Strand Starting at position 96 of SEQ ID NO: 317756
aacgaccuguaaucaagua

SEQ ID NO: 326272 - RNA, 19 nt, Artificial Sequence
  Description of Artificial Sequence: Synthetic oligonucleotide
  Antisense Strand to SEQ ID NO: 326271
uacuugauuacaggucguu

SEQ ID NO: 326273 - RNA, 19 nt, Artificial Sequence
  Description of Artificial Sequence: Synthetic oligonucleotide
  Sense Strand Starting at position 96 of SEQ ID NO: 317936
cguggucagcauggugaaa

SEQ ID NO: 326274 - RNA, 19 nt, Artificial Sequence
  Description of Artificial Sequence: Synthetic oligonucleotide
  Antisense Strand to SEQ ID NO: 326273
uuucaccaugcugaccacg

SEQ ID NO: 326275 - RNA, 19 nt, Artificial Sequence
  Description of Artificial Sequence: Synthetic oligonucleotide
  Sense Strand Starting at position 96 of SEQ ID NO: 318389
gaggguugcaaugagcaga

SEQ ID NO: 326276 - RNA, 19 nt, Artificial Sequence
  Description of Artificial Sequence: Synthetic oligonucleotide
  Antisense Strand to SEQ ID NO: 326275
ucugcucauugcaacccuc

SEQ ID NO: 326277 - RNA, 19 nt, Artificial Sequence
  Description of Artificial Sequence: Synthetic oligonucleotide
  Sense Strand Starting at position 96 of SEQ ID NO: 318517
ucucaaugguguuuaaguu

SEQ ID NO: 326278 - RNA, 19 nt, Artificial Sequence
  Description of Artificial Sequence: Synthetic oligonucleotide
  Antisense Strand to SEQ ID NO: 326277
aacuuaaacaccauugaga

SEQ ID NO: 326279 - RNA, 19 nt, Artificial Sequence
  Description of Artificial Sequence: Synthetic oligonucleotide
  Sense Strand Starting at position 96 of SEQ ID NO: 318518
cucaaugguguuuaaguuu

SEQ ID NO: 326280 - RNA, 19 nt, Artificial Sequence
  Description of Artificial Sequence: Synthetic oligonucleotide
  Antisense Strand to SEQ ID NO: 326279
aaacuuaaacaccauugag

SEQ ID NO: 326281 - RNA, 19 nt, Artificial Sequence
  Description of Artificial Sequence: Synthetic oligonucleotide
  Sense Strand Starting at position 96 of SEQ ID NO: 318524
gguguuuaaguuuauaaca

SEQ ID NO: 326282 - RNA, 19 nt, Artificial Sequence
  Description of Artificial Sequence: Synthetic oligonucleotide
  Antisense Strand to SEQ ID NO: 326281
uguuauaaacuuaaacacc

SEQ ID NO: 326283 - RNA, 19 nt, Artificial Sequence
  Description of Artificial Sequence: Synthetic oligonucleotide
  Sense Strand Starting at position 96 of SEQ ID NO: 318576
cacugagauuucugugaca

SEQ ID NO: 326284 - RNA, 19 nt, Artificial Sequence
  Description of Artificial Sequence: Synthetic oligonucleotide
  Antisense Strand to SEQ ID NO: 326283
ugucacagaaaucucagug

SEQ ID NO: 326285 - RNA, 19 nt, Artificial Sequence
  Description of Artificial Sequence: Synthetic oligonucleotide
  Sense Strand Starting at position 96 of SEQ ID NO: 318579
ugagauuucugugacaccu

SEQ ID NO: 326286 - RNA, 19 nt, Artificial Sequence
  Description of Artificial Sequence: Synthetic oligonucleotide
  Antisense Strand to SEQ ID NO: 326285
aggugucacagaaaucuca

SEQ ID NO: 326287 - RNA, 19 nt, Artificial Sequence
  Description of Artificial Sequence: Synthetic oligonucleotide
  Sense Strand Starting at position 96 of SEQ ID NO: 318595
ccuuguauuguugaaugag

SEQ ID NO: 326288 - RNA, 19 nt, Artificial Sequence
  Description of Artificial Sequence: Synthetic oligonucleotide
  Antisense Strand to SEQ ID NO: 326287
cucauucaacaauacaagg

SEQ ID NO: 326289 - RNA, 19 nt, Artificial Sequence
  Description of Artificial Sequence: Synthetic oligonucleotide
  Sense Strand Starting at position 96 of SEQ ID NO: 318598
uguauuguugaaugagaga

SEQ ID NO: 326290 - RNA, 19 nt, Artificial Sequence
  Description of Artificial Sequence: Synthetic oligonucleotide
  Antisense Strand to SEQ ID NO: 326289
ucucucauucaacaauaca

SEQ ID NO: 326291 - RNA, 19 nt, Artificial Sequence
  Description of Artificial Sequence: Synthetic oligonucleotide
  Sense Strand Starting at position 96 of SEQ ID NO: 318725
agccaagagugcuuuaaug

SEQ ID NO: 326292 - RNA, 19 nt, Artificial Sequence
  Description of Artificial Sequence: Synthetic oligonucleotide
  Antisense Strand to SEQ ID NO: 326291
cauuaaagcacucuuggcu

SEQ ID NO: 326293 - RNA, 19 nt, Artificial Sequence
  Description of Artificial Sequence: Synthetic oligonucleotide
  Sense Strand Starting at position 96 of SEQ ID NO: 318733
gugcuuuaaugaucuugaa

SEQ ID NO: 326294 - RNA, 19 nt, Artificial Sequence
  Description of Artificial Sequence: Synthetic oligonucleotide
  Antisense Strand to SEQ ID NO: 326293
uucaagaucauuaaagcac

SEQ ID NO: 326295 - RNA, 19 nt, Artificial Sequence
  Description of Artificial Sequence: Synthetic oligonucleotide
  Sense Strand Starting at position 96 of SEQ ID NO: 318809
uacaguaacugagaagaua

SEQ ID NO: 326296 - RNA, 19 nt, Artificial Sequence
  Description of Artificial Sequence: Synthetic oligonucleotide
  Antisense Strand to SEQ ID NO: 326295
uaucuucucaguuacugua

SEQ ID NO: 326297 - RNA, 19 nt, Artificial Sequence
  Description of Artificial Sequence: Synthetic oligonucleotide
  Sense Strand Starting at position 96 of SEQ ID NO: 318820
agaagauaaccuuguccag

SEQ ID NO: 326298 - RNA, 19 nt, Artificial Sequence
  Description of Artificial Sequence: Synthetic oligonucleotide
  Antisense Strand to SEQ ID NO: 326297
cuggacaagguuaucuucu

SEQ ID NO: 326299 - RNA, 19 nt, Artificial Sequence
  Description of Artificial Sequence: Synthetic oligonucleotide
  Sense Strand Starting at position 96 of SEQ ID NO: 318888
cguuuaaagccuuaacuuu

SEQ ID NO: 326300 - RNA, 19 nt, Artificial Sequence
  Description of Artificial Sequence: Synthetic oligonucleotide
  Antisense Strand to SEQ ID NO: 326299
aaaguuaaggcuuuaaacg

SEQ ID NO: 326301 - RNA, 19 nt, Artificial Sequence
  Description of Artificial Sequence: Synthetic oligonucleotide
  Sense Strand Starting at position 96 of SEQ ID NO: 318998
uugugacaauucuuuauga

SEQ ID NO: 326302 - RNA, 19 nt, Artificial Sequence
  Description of Artificial Sequence: Synthetic oligonucleotide
  Antisense Strand to SEQ ID NO: 326301
ucauaaagaauugucacaa

SEQ ID NO: 326303 - RNA, 19 nt, Artificial Sequence
  Description of Artificial Sequence: Synthetic oligonucleotide
  Sense Strand Starting at position 96 of SEQ ID NO: 318999
ugugacaauucuuuaugag

SEQ ID NO: 326304 - RNA, 19 nt, Artificial Sequence
  Description of Artificial Sequence: Synthetic oligonucleotide
  Antisense Strand to SEQ ID NO: 326303
cucauaaagaauugucaca

SEQ ID NO: 326305 - RNA, 19 nt, Artificial Sequence
  Description of Artificial Sequence: Synthetic oligonucleotide
  Sense Strand Starting at position 96 of SEQ ID NO: 319189
uguguuuaggcuuaaggaa

SEQ ID NO: 326306 - RNA, 19 nt, Artificial Sequence
  Description of Artificial Sequence: Synthetic oligonucleotide
  Antisense Strand to SEQ ID NO: 326305
uuccuuaagccuaaacaca

SEQ ID NO: 326307 - RNA, 19 nt, Artificial Sequence
  Description of Artificial Sequence: Synthetic oligonucleotide
  Sense Strand Starting at position 97 of SEQ ID NO: 315305
gggauggaggagugaguua

SEQ ID NO: 326308 - RNA, 19 nt, Artificial Sequence
  Description of Artificial Sequence: Synthetic oligonucleotide
  Antisense Strand to SEQ ID NO: 326307
uaacucacuccuccauccc

SEQ ID NO: 326309 - RNA, 19 nt, Artificial Sequence
  Description of Artificial Sequence: Synthetic oligonucleotide
  Sense Strand Starting at position 97 of SEQ ID NO: 315364
cagguuucuguaggcagaa

SEQ ID NO: 326310 - RNA, 19 nt, Artificial Sequence
  Description of Artificial Sequence: Synthetic oligonucleotide
  Antisense Strand to SEQ ID NO: 326309
uucugccuacagaaaccug

SEQ ID NO: 326311 - RNA, 19 nt, Artificial Sequence
  Description of Artificial Sequence: Synthetic oligonucleotide
  Sense Strand Starting at position 97 of SEQ ID NO: 315366
gguuucuguaggcagaaga

SEQ ID NO: 326312 - RNA, 19 nt, Artificial Sequence
  Description of Artificial Sequence: Synthetic oligonucleotide
  Antisense Strand to SEQ ID NO: 326311
ucuucugccuacagaaacc

SEQ ID NO: 326313 - RNA, 19 nt, Artificial Sequence
  Description of Artificial Sequence: Synthetic oligonucleotide
  Sense Strand Starting at position 97 of SEQ ID NO: 315527
cguggaguucuccaugcau

SEQ ID NO: 326314 - RNA, 19 nt, Artificial Sequence
  Description of Artificial Sequence: Synthetic oligonucleotide
  Antisense Strand to SEQ ID NO: 326313
augcauggagaacuccacg

SEQ ID NO: 326315 - RNA, 19 nt, Artificial Sequence
  Description of Artificial Sequence: Synthetic oligonucleotide
  Sense Strand Starting at position 97 of SEQ ID NO: 315529
uggaguucuccaugcaucu

SEQ ID NO: 326316 - RNA, 19 nt, Artificial Sequence
  Description of Artificial Sequence: Synthetic oligonucleotide
  Antisense Strand to SEQ ID NO: 326315
agaugcauggagaacucca

SEQ ID NO: 326317 - RNA, 19 nt, Artificial Sequence
  Description of Artificial Sequence: Synthetic oligonucleotide
  Sense Strand Starting at position 97 of SEQ ID NO: 315615
gguaacaguuucccuacaa

SEQ ID NO: 326318 - RNA, 19 nt, Artificial Sequence
  Description of Artificial Sequence: Synthetic oligonucleotide
  Antisense Strand to SEQ ID NO: 326317
uuguagggaaacuguuacc

SEQ ID NO: 326319 - RNA, 19 nt, Artificial Sequence
  Description of Artificial Sequence: Synthetic oligonucleotide
  Sense Strand Starting at position 97 of SEQ ID NO: 315616
guaacaguuucccuacaac

SEQ ID NO: 326320 - RNA, 19 nt, Artificial Sequence
  Description of Artificial Sequence: Synthetic oligonucleotide
  Antisense Strand to SEQ ID NO: 326319
guuguagggaaacuguuac

SEQ ID NO: 326321 - RNA, 19 nt, Artificial Sequence
  Description of Artificial Sequence: Synthetic oligonucleotide
  Sense Strand Starting at position 97 of SEQ ID NO: 315634
ccaugaaugucuucuggaa

SEQ ID NO: 326322 - RNA, 19 nt, Artificial Sequence
  Description of Artificial Sequence: Synthetic oligonucleotide
  Antisense Strand to SEQ ID NO: 326321
uuccagaagacauucaugg

SEQ ID NO: 326323 - RNA, 19 nt, Artificial Sequence
  Description of Artificial Sequence: Synthetic oligonucleotide
  Sense Strand Starting at position 97 of SEQ ID NO: 315680
agacaaauugucugagagc

SEQ ID NO: 326324 - RNA, 19 nt, Artificial Sequence
  Description of Artificial Sequence: Synthetic oligonucleotide
  Antisense Strand to SEQ ID NO: 326323
gcucucagacaauuugucu

SEQ ID NO: 326325 - RNA, 19 nt, Artificial Sequence
  Description of Artificial Sequence: Synthetic oligonucleotide
  Sense Strand Starting at position 97 of SEQ ID NO: 315949
ggcagucaaaucugaauga

SEQ ID NO: 326326 - RNA, 19 nt, Artificial Sequence
  Description of Artificial Sequence: Synthetic oligonucleotide
  Antisense Strand to SEQ ID NO: 326325
ucauucagauuugacugcc

SEQ ID NO: 326327 - RNA, 19 nt, Artificial Sequence
  Description of Artificial Sequence: Synthetic oligonucleotide
  Sense Strand Starting at position 97 of SEQ ID NO: 315953
gucaaaucugaaugaagua

SEQ ID NO: 326328 - RNA, 19 nt, Artificial Sequence
  Description of Artificial Sequence: Synthetic oligonucleotide
  Antisense Strand to SEQ ID NO: 326327
uacuucauucagauuugac

SEQ ID NO: 326329 - RNA, 19 nt, Artificial Sequence
  Description of Artificial Sequence: Synthetic oligonucleotide
  Sense Strand Starting at position 97 of SEQ ID NO: 316116
agaccaguuuaggaacaaa

SEQ ID NO: 326330 - RNA, 19 nt, Artificial Sequence
  Description of Artificial Sequence: Synthetic oligonucleotide
  Antisense Strand to SEQ ID NO: 326329
uuuguuccuaaacuggucu

SEQ ID NO: 326331 - RNA, 19 nt, Artificial Sequence
  Description of Artificial Sequence: Synthetic oligonucleotide
  Sense Strand Starting at position 97 of SEQ ID NO: 316138
uguaauagucagggcuaaa

SEQ ID NO: 326332 - RNA, 19 nt, Artificial Sequence
  Description of Artificial Sequence: Synthetic oligonucleotide
  Antisense Strand to SEQ ID NO: 326331
uuuagcccugacuauuaca

SEQ ID NO: 326333 - RNA, 19 nt, Artificial Sequence
  Description of Artificial Sequence: Synthetic oligonucleotide
  Sense Strand Starting at position 97 of SEQ ID NO: 316208
acauauuaauuccaggaag

SEQ ID NO: 326334 - RNA, 19 nt, Artificial Sequence
  Description of Artificial Sequence: Synthetic oligonucleotide
  Antisense Strand to SEQ ID NO: 326333
cuuccuggaauuaauaugu

SEQ ID NO: 326335 - RNA, 19 nt, Artificial Sequence
  Description of Artificial Sequence: Synthetic oligonucleotide
  Sense Strand Starting at position 97 of SEQ ID NO: 316395
ucauccugagcaugaaagu

SEQ ID NO: 326336 - RNA, 19 nt, Artificial Sequence
  Description of Artificial Sequence: Synthetic oligonucleotide
  Antisense Strand to SEQ ID NO: 326335
acuuucaugcucaggauga

SEQ ID NO: 326337 - RNA, 19 nt, Artificial Sequence
  Description of Artificial Sequence: Synthetic oligonucleotide
  Sense Strand Starting at position 97 of SEQ ID NO: 316404
gcaugaaagucaucuuuga

SEQ ID NO: 326338 - RNA, 19 nt, Artificial Sequence
  Description of Artificial Sequence: Synthetic oligonucleotide
  Antisense Strand to SEQ ID NO: 326337
ucaaagaugacuuucaugc

SEQ ID NO: 326339 - RNA, 19 nt, Artificial Sequence
  Description of Artificial Sequence: Synthetic oligonucleotide
  Sense Strand Starting at position 97 of SEQ ID NO: 316547
aaauguguguaggcugaua

SEQ ID NO: 326340 - RNA, 19 nt, Artificial Sequence
  Description of Artificial Sequence: Synthetic oligonucleotide
  Antisense Strand to SEQ ID NO: 326339
uaucagccuacacacauuu

SEQ ID NO: 326341 - RNA, 19 nt, Artificial Sequence
  Description of Artificial Sequence: Synthetic oligonucleotide
  Sense Strand Starting at position 97 of SEQ ID NO: 316555
guaggcugauaauuguuaa

SEQ ID NO: 326342 - RNA, 19 nt, Artificial Sequence
  Description of Artificial Sequence: Synthetic oligonucleotide
  Antisense Strand to SEQ ID NO: 326341
uuaacaauuaucagccuac

SEQ ID NO: 326343 - RNA, 19 nt, Artificial Sequence
  Description of Artificial Sequence: Synthetic oligonucleotide
  Sense Strand Starting at position 97 of SEQ ID NO: 316558
ggcugauaauuguuaauau

SEQ ID NO: 326344 - RNA, 19 nt, Artificial Sequence
  Description of Artificial Sequence: Synthetic oligonucleotide
  Antisense Strand to SEQ ID NO: 326343
auauuaacaauuaucagcc

SEQ ID NO: 326345 - RNA, 19 nt, Artificial Sequence
  Description of Artificial Sequence: Synthetic oligonucleotide
  Sense Strand Starting at position 97 of SEQ ID NO: 317911
acuauauggccagacucuu

SEQ ID NO: 326346 - RNA, 19 nt, Artificial Sequence
  Description of Artificial Sequence: Synthetic oligonucleotide
  Antisense Strand to SEQ ID NO: 326345
aagagucuggccauauagu

SEQ ID NO: 326347 - RNA, 19 nt, Artificial Sequence
  Description of Artificial Sequence: Synthetic oligonucleotide
  Sense Strand Starting at position 97 of SEQ ID NO: 318008
uacccucguguugauguaa

SEQ ID NO: 326348 - RNA, 19 nt, Artificial Sequence
  Description of Artificial Sequence: Synthetic oligonucleotide
  Antisense Strand to SEQ ID NO: 326347
uuacaucaacacgagggua

SEQ ID NO: 326349 - RNA, 19 nt, Artificial Sequence
  Description of Artificial Sequence: Synthetic oligonucleotide
  Sense Strand Starting at position 97 of SEQ ID NO: 318053
uagaaaguggauuguuauu

SEQ ID NO: 326350 - RNA, 19 nt, Artificial Sequence
  Description of Artificial Sequence: Synthetic oligonucleotide
  Antisense Strand to SEQ ID NO: 326349
aauaacaauccacuuucua

SEQ ID NO: 326351 - RNA, 19 nt, Artificial Sequence
  Description of Artificial Sequence: Synthetic oligonucleotide
  Sense Strand Starting at position 97 of SEQ ID NO: 318055
gaaaguggauuguuauuau

SEQ ID NO: 326352 - RNA, 19 nt, Artificial Sequence
  Description of Artificial Sequence: Synthetic oligonucleotide
  Antisense Strand to SEQ ID NO: 326351
auaauaacaauccacuuuc

SEQ ID NO: 326353 - RNA, 19 nt, Artificial Sequence
  Description of Artificial Sequence: Synthetic oligonucleotide
  Sense Strand Starting at position 97 of SEQ ID NO: 318058
aguggauuguuauuauaag

SEQ ID NO: 326354 - RNA, 19 nt, Artificial Sequence
  Description of Artificial Sequence: Synthetic oligonucleotide
  Antisense Strand to SEQ ID NO: 326353
cuuauaauaacaauccacu

SEQ ID NO: 326355 - RNA, 19 nt, Artificial Sequence
  Description of Artificial Sequence: Synthetic oligonucleotide
  Sense Strand Starting at position 97 of SEQ ID NO: 318112
cccaaugugguguagagaa

SEQ ID NO: 326356 - RNA, 19 nt, Artificial Sequence
  Description of Artificial Sequence: Synthetic oligonucleotide
  Antisense Strand to SEQ ID NO: 326355
uucucuacaccacauuggg

SEQ ID NO: 326357 - RNA, 19 nt, Artificial Sequence
  Description of Artificial Sequence: Synthetic oligonucleotide
  Sense Strand Starting at position 97 of SEQ ID NO: 318191
cuugcugugugaucauuua

SEQ ID NO: 326358 - RNA, 19 nt, Artificial Sequence
  Description of Artificial Sequence: Synthetic oligonucleotide
  Antisense Strand to SEQ ID NO: 326357
uaaaugaucacacagcaag

SEQ ID NO: 326359 - RNA, 19 nt, Artificial Sequence
  Description of Artificial Sequence: Synthetic oligonucleotide
  Sense Strand Starting at position 97 of SEQ ID NO: 318280
gugaaaguacauuguacag

SEQ ID NO: 326360 - RNA, 19 nt, Artificial Sequence
  Description of Artificial Sequence: Synthetic oligonucleotide
  Antisense Strand to SEQ ID NO: 326359
cuguacaauguacuuucac

SEQ ID NO: 326361 - RNA, 19 nt, Artificial Sequence
  Description of Artificial Sequence: Synthetic oligonucleotide
  Sense Strand Starting at position 97 of SEQ ID NO: 318290
auuguacagcacugaucaa

SEQ ID NO: 326362 - RNA, 19 nt, Artificial Sequence
  Description of Artificial Sequence: Synthetic oligonucleotide
  Antisense Strand to SEQ ID NO: 326361
uugaucagugcuguacaau

SEQ ID NO: 326363 - RNA, 19 nt, Artificial Sequence
  Description of Artificial Sequence: Synthetic oligonucleotide
  Sense Strand Starting at position 97 of SEQ ID NO: 318310
ugcuguuaggauuauuaaa

SEQ ID NO: 326364 - RNA, 19 nt, Artificial Sequence
  Description of Artificial Sequence: Synthetic oligonucleotide
  Antisense Strand to SEQ ID NO: 326363
uuuaauaauccuaacagca

SEQ ID NO: 326365 - RNA, 19 nt, Artificial Sequence
  Description of Artificial Sequence: Synthetic oligonucleotide
  Sense Strand Starting at position 97 of SEQ ID NO: 318312
cuguuaggauuauuaaacu

SEQ ID NO: 326366 - RNA, 19 nt, Artificial Sequence
  Description of Artificial Sequence: Synthetic oligonucleotide
  Antisense Strand to SEQ ID NO: 326365
aguuuaauaauccuaacag

SEQ ID NO: 326367 - RNA, 19 nt, Artificial Sequence
  Description of Artificial Sequence: Synthetic oligonucleotide
  Sense Strand Starting at position 97 of SEQ ID NO: 318389
uuuggaaggccugaguuca

SEQ ID NO: 326368 - RNA, 19 nt, Artificial Sequence
  Description of Artificial Sequence: Synthetic oligonucleotide
  Antisense Strand to SEQ ID NO: 326367
ugaacucaggccuuccaaa

SEQ ID NO: 326369 - RNA, 19 nt, Artificial Sequence
  Description of Artificial Sequence: Synthetic oligonucleotide
  Sense Strand Starting at position 97 of SEQ ID NO: 318432
uugugcuaccuugggauau

SEQ ID NO: 326370 - RNA, 19 nt, Artificial Sequence
  Description of Artificial Sequence: Synthetic oligonucleotide
  Antisense Strand to SEQ ID NO: 326369
auaucccaagguagcacaa

SEQ ID NO: 326371 - RNA, 19 nt, Artificial Sequence
  Description of Artificial Sequence: Synthetic oligonucleotide
  Sense Strand Starting at position 97 of SEQ ID NO: 318543
gaaagagugccugggaaau

SEQ ID NO: 326372 - RNA, 19 nt, Artificial Sequence
  Description of Artificial Sequence: Synthetic oligonucleotide
  Antisense Strand to SEQ ID NO: 326371
auuucccaggcacucuuuc

SEQ ID NO: 326373 - RNA, 19 nt, Artificial Sequence
  Description of Artificial Sequence: Synthetic oligonucleotide
  Sense Strand Starting at position 97 of SEQ ID NO: 318556
ggaaauaauagguguucca

SEQ ID NO: 326374 - RNA, 19 nt, Artificial Sequence
  Description of Artificial Sequence: Synthetic oligonucleotide
  Antisense Strand to SEQ ID NO: 326373
uggaacaccuauuauuucc

SEQ ID NO: 326375 - RNA, 19 nt, Artificial Sequence
  Description of Artificial Sequence: Synthetic oligonucleotide
  Sense Strand Starting at position 97 of SEQ ID NO: 318609
cugucugucccucaagcua

SEQ ID NO: 326376 - RNA, 19 nt, Artificial Sequence
  Description of Artificial Sequence: Synthetic oligonucleotide
  Antisense Strand to SEQ ID NO: 326375
uagcuugagggacagacag

SEQ ID NO: 326377 - RNA, 19 nt, Artificial Sequence
  Description of Artificial Sequence: Synthetic oligonucleotide
  Sense Strand Starting at position 97 of SEQ ID NO: 318625
cuacauuggcaaugauauc

SEQ ID NO: 326378 - RNA, 19 nt, Artificial Sequence
  Description of Artificial Sequence: Synthetic oligonucleotide
  Antisense Strand to SEQ ID NO: 326377
gauaucauugccaauguag

SEQ ID NO: 326379 - RNA, 19 nt, Artificial Sequence
  Description of Artificial Sequence: Synthetic oligonucleotide
  Sense Strand Starting at position 97 of SEQ ID NO: 318662
acccuaaugugaccaagau

SEQ ID NO: 326380 - RNA, 19 nt, Artificial Sequence
  Description of Artificial Sequence: Synthetic oligonucleotide
  Antisense Strand to SEQ ID NO: 326379
aucuuggucacauuagggu

SEQ ID NO: 326381 - RNA, 19 nt, Artificial Sequence
  Description of Artificial Sequence: Synthetic oligonucleotide
  Sense Strand Starting at position 97 of SEQ ID NO: 318727
ugagcaaauagugaaguau

SEQ ID NO: 326382 - RNA, 19 nt, Artificial Sequence
  Description of Artificial Sequence: Synthetic oligonucleotide
  Antisense Strand to SEQ ID NO: 326381
auacuucacuauuugcuca

SEQ ID NO: 326383 - RNA, 19 nt, Artificial Sequence
  Description of Artificial Sequence: Synthetic oligonucleotide
  Sense Strand Starting at position 97 of SEQ ID NO: 319153
cagccuuacuaggcaguaa

SEQ ID NO: 326384 - RNA, 19 nt, Artificial Sequence
  Description of Artificial Sequence: Synthetic oligonucleotide
  Antisense Strand to SEQ ID NO: 326383
uuacugccuaguaaggcug

SEQ ID NO: 326385 - RNA, 19 nt, Artificial Sequence
  Description of Artificial Sequence: Synthetic oligonucleotide
  Sense Strand Starting at position 97 of SEQ ID NO: 319157
cuuacuaggcaguaauuau

SEQ ID NO: 326386 - RNA, 19 nt, Artificial Sequence
  Description of Artificial Sequence: Synthetic oligonucleotide
  Antisense Strand to SEQ ID NO: 326385
auaauuacugccuaguaag

SEQ ID NO: 326387 - RNA, 19 nt, Artificial Sequence
  Description of Artificial Sequence: Synthetic oligonucleotide
  Sense Strand Starting at position 98 of SEQ ID NO: 315270
uagcaauugcaagaucagu

SEQ ID NO: 326388 - RNA, 19 nt, Artificial Sequence
  Description of Artificial Sequence: Synthetic oligonucleotide
  Antisense Strand to SEQ ID NO: 326387
acugaucuugcaauugcua

SEQ ID NO: 326389 - RNA, 19 nt, Artificial Sequence
  Description of Artificial Sequence: Synthetic oligonucleotide
  Sense Strand Starting at position 98 of SEQ ID NO: 315586
cuguuugugagugagagaa

SEQ ID NO: 326390 - RNA, 19 nt, Artificial Sequence
  Description of Artificial Sequence: Synthetic oligonucleotide
  Antisense Strand to SEQ ID NO: 326389
uucucucacucacaaacag

SEQ ID NO: 326391 - RNA, 19 nt, Artificial Sequence
  Description of Artificial Sequence: Synthetic oligonucleotide
  Sense Strand Starting at position 98 of SEQ ID NO: 315609
aguaucaggcuauaaacuu

SEQ ID NO: 326392 - RNA, 19 nt, Artificial Sequence
  Description of Artificial Sequence: Synthetic oligonucleotide
  Antisense Strand to SEQ ID NO: 326391
aaguuuauagccugauacu

SEQ ID NO: 326393 - RNA, 19 nt, Artificial Sequence
  Description of Artificial Sequence: Synthetic oligonucleotide
  Sense Strand Starting at position 98 of SEQ ID NO: 315634
uaaagcaacuaguuagaga

SEQ ID NO: 326394 - RNA, 19 nt, Artificial Sequence
  Description of Artificial Sequence: Synthetic oligonucleotide
  Antisense Strand to SEQ ID NO: 326393
ucucuaacuaguugcuuua

SEQ ID NO: 326395 - RNA, 19 nt, Artificial Sequence
  Description of Artificial Sequence: Synthetic oligonucleotide
  Sense Strand Starting at position 98 of SEQ ID NO: 315788
agugcugugcuauugucaa

SEQ ID NO: 326396 - RNA, 19 nt, Artificial Sequence
  Description of Artificial Sequence: Synthetic oligonucleotide
  Antisense Strand to SEQ ID NO: 326395
uugacaauagcacagcacu

SEQ ID NO: 326397 - RNA, 19 nt, Artificial Sequence
  Description of Artificial Sequence: Synthetic oligonucleotide
  Sense Strand Starting at position 98 of SEQ ID NO: 316488
aucacugaggucugaggau

SEQ ID NO: 326398 - RNA, 19 nt, Artificial Sequence
  Description of Artificial Sequence: Synthetic oligonucleotide
  Antisense Strand to SEQ ID NO: 326397
auccucagaccucagugau

SEQ ID NO: 326399 - RNA, 19 nt, Artificial Sequence
  Description of Artificial Sequence: Synthetic oligonucleotide
  Sense Strand Starting at position 98 of SEQ ID NO: 316771
cuagguuaugcauacauac

SEQ ID NO: 326400 - RNA, 19 nt, Artificial Sequence
  Description of Artificial Sequence: Synthetic oligonucleotide
  Antisense Strand to SEQ ID NO: 326399
guauguaugcauaaccuag

SEQ ID NO: 326401 - RNA, 19 nt, Artificial Sequence
  Description of Artificial Sequence: Synthetic oligonucleotide
  Sense Strand Starting at position 98 of SEQ ID NO: 316956
uucuaucauccagagguca

SEQ ID NO: 326402 - RNA, 19 nt, Artificial Sequence
  Description of Artificial Sequence: Synthetic oligonucleotide
  Antisense Strand to SEQ ID NO: 326401
ugaccucuggaugauagaa

SEQ ID NO: 326403 - RNA, 19 nt, Artificial Sequence
  Description of Artificial Sequence: Synthetic oligonucleotide
  Sense Strand Starting at position 98 of SEQ ID NO: 317014
ggugcuuugcagcccuuaa

SEQ ID NO: 326404 - RNA, 19 nt, Artificial Sequence
  Description of Artificial Sequence: Synthetic oligonucleotide
  Antisense Strand to SEQ ID NO: 326403
uuaagggcugcaaagcacc

SEQ ID NO: 326405 - RNA, 19 nt, Artificial Sequence
  Description of Artificial Sequence: Synthetic oligonucleotide
  Sense Strand Starting at position 98 of SEQ ID NO: 317262
cuggcuaacuccuuggaga

SEQ ID NO: 326406 - RNA, 19 nt, Artificial Sequence
  Description of Artificial Sequence: Synthetic oligonucleotide
  Antisense Strand to SEQ ID NO: 326405
ucuccaaggaguuagccag

SEQ ID NO: 326407 - RNA, 19 nt, Artificial Sequence
  Description of Artificial Sequence: Synthetic oligonucleotide
  Sense Strand Starting at position 98 of SEQ ID NO: 317263
uggcuaacuccuuggagaa

SEQ ID NO: 326408 - RNA, 19 nt, Artificial Sequence
  Description of Artificial Sequence: Synthetic oligonucleotide
  Antisense Strand to SEQ ID NO: 326407
uucuccaaggaguuagcca

SEQ ID NO: 326409 - RNA, 19 nt, Artificial Sequence
  Description of Artificial Sequence: Synthetic oligonucleotide
  Sense Strand Starting at position 98 of SEQ ID NO: 317264
ggcuaacuccuuggagaaa

SEQ ID NO: 326410 - RNA, 19 nt, Artificial Sequence
  Description of Artificial Sequence: Synthetic oligonucleotide
  Antisense Strand to SEQ ID NO: 326409
uuucuccaaggaguuagcc

SEQ ID NO: 326411 - RNA, 19 nt, Artificial Sequence
  Description of Artificial Sequence: Synthetic oligonucleotide
  Sense Strand Starting at position 98 of SEQ ID NO: 317306
ugaacuuggaaucgucaca

SEQ ID NO: 326412 - RNA, 19 nt, Artificial Sequence
  Description of Artificial Sequence: Synthetic oligonucleotide
  Antisense Strand to SEQ ID NO: 326411
ugugacgauuccaaguuca

SEQ ID NO: 326413 - RNA, 19 nt, Artificial Sequence
  Description of Artificial Sequence: Synthetic oligonucleotide
  Sense Strand Starting at position 98 of SEQ ID NO: 317419
acaggauuggucuguuaau

SEQ ID NO: 326414 - RNA, 19 nt, Artificial Sequence
  Description of Artificial Sequence: Synthetic oligonucleotide
  Antisense Strand to SEQ ID NO: 326413
auuaacagaccaauccugu

SEQ ID NO: 326415 - RNA, 19 nt, Artificial Sequence
  Description of Artificial Sequence: Synthetic oligonucleotide
  Sense Strand Starting at position 98 of SEQ ID NO: 317481
agauaugagugccucaaga

SEQ ID NO: 326416 - RNA, 19 nt, Artificial Sequence
  Description of Artificial Sequence: Synthetic oligonucleotide
  Antisense Strand to SEQ ID NO: 326415
ucuugaggcacucauaucu

SEQ ID NO: 326417 - RNA, 19 nt, Artificial Sequence
  Description of Artificial Sequence: Synthetic oligonucleotide
  Sense Strand Starting at position 98 of SEQ ID NO: 317581
gaaugagaauagucacuuu

SEQ ID NO: 326418 - RNA, 19 nt, Artificial Sequence
  Description of Artificial Sequence: Synthetic oligonucleotide
  Antisense Strand to SEQ ID NO: 326417
aaagugacuauucucauuc

SEQ ID NO: 326419 - RNA, 19 nt, Artificial Sequence
  Description of Artificial Sequence: Synthetic oligonucleotide
  Sense Strand Starting at position 98 of SEQ ID NO: 317619
aggauuagccagugagaga

SEQ ID NO: 326420 - RNA, 19 nt, Artificial Sequence
  Description of Artificial Sequence: Synthetic oligonucleotide
  Antisense Strand to SEQ ID NO: 326419
ucucucacuggcuaauccu

SEQ ID NO: 326421 - RNA, 19 nt, Artificial Sequence
  Description of Artificial Sequence: Synthetic oligonucleotide
  Sense Strand Starting at position 98 of SEQ ID NO: 317624
uagccagugagagauguau

SEQ ID NO: 326422 - RNA, 19 nt, Artificial Sequence
  Description of Artificial Sequence: Synthetic oligonucleotide
  Antisense Strand to SEQ ID NO: 326421
auacaucucucacuggcua

SEQ ID NO: 326423 - RNA, 19 nt, Artificial Sequence
  Description of Artificial Sequence: Synthetic oligonucleotide
  Sense Strand Starting at position 98 of SEQ ID NO: 317626
gccagugagagauguauaa

SEQ ID NO: 326424 - RNA, 19 nt, Artificial Sequence
  Description of Artificial Sequence: Synthetic oligonucleotide
  Antisense Strand to SEQ ID NO: 326423
uuauacaucucucacuggc

SEQ ID NO: 326425 - RNA, 19 nt, Artificial Sequence
  Description of Artificial Sequence: Synthetic oligonucleotide
  Sense Strand Starting at position 98 of SEQ ID NO: 317868
gauuuaagaugauagucau

SEQ ID NO: 326426 - RNA, 19 nt, Artificial Sequence
  Description of Artificial Sequence: Synthetic oligonucleotide
  Antisense Strand to SEQ ID NO: 326425
augacuaucaucuuaaauc

SEQ ID NO: 326427 - RNA, 19 nt, Artificial Sequence
  Description of Artificial Sequence: Synthetic oligonucleotide
  Sense Strand Starting at position 98 of SEQ ID NO: 318073
uagaaaguccgaggauuaa

SEQ ID NO: 326428 - RNA, 19 nt, Artificial Sequence
  Description of Artificial Sequence: Synthetic oligonucleotide
  Antisense Strand to SEQ ID NO: 326427
uuaauccucggacuuucua

SEQ ID NO: 326429 - RNA, 19 nt, Artificial Sequence
  Description of Artificial Sequence: Synthetic oligonucleotide
  Sense Strand Starting at position 98 of SEQ ID NO: 318142
auagguauacugugaucca

SEQ ID NO: 326430 - RNA, 19 nt, Artificial Sequence
  Description of Artificial Sequence: Synthetic oligonucleotide
  Antisense Strand to SEQ ID NO: 326429
uggaucacaguauaccuau

SEQ ID NO: 326431 - RNA, 19 nt, Artificial Sequence
  Description of Artificial Sequence: Synthetic oligonucleotide
  Sense Strand Starting at position 98 of SEQ ID NO: 318160
auuccagagucaguuaauu

SEQ ID NO: 326432 - RNA, 19 nt, Artificial Sequence
  Description of Artificial Sequence: Synthetic oligonucleotide
  Antisense Strand to SEQ ID NO: 326431
aauuaacugacucuggaau

SEQ ID NO: 326433 - RNA, 19 nt, Artificial Sequence
  Description of Artificial Sequence: Synthetic oligonucleotide
  Sense Strand Starting at position 98 of SEQ ID NO: 318169
ucaguuaauuuguuuguga

SEQ ID NO: 326434 - RNA, 19 nt, Artificial Sequence
  Description of Artificial Sequence: Synthetic oligonucleotide
  Antisense Strand to SEQ ID NO: 326433
ucacaaacaaauuaacuga

SEQ ID NO: 326435 - RNA, 19 nt, Artificial Sequence
  Description of Artificial Sequence: Synthetic oligonucleotide
  Sense Strand Starting at position 98 of SEQ ID NO: 318170
caguuaauuuguuugugau

SEQ ID NO: 326436 - RNA, 19 nt, Artificial Sequence
  Description of Artificial Sequence: Synthetic oligonucleotide
  Antisense Strand to SEQ ID NO: 326435
aucacaaacaaauuaacug

SEQ ID NO: 326437 - RNA, 19 nt, Artificial Sequence
  Description of Artificial Sequence: Synthetic oligonucleotide
  Sense Strand Starting at position 98 of SEQ ID NO: 318171
aguuaauuuguuugugaug

SEQ ID NO: 326438 - RNA, 19 nt, Artificial Sequence
  Description of Artificial Sequence: Synthetic oligonucleotide
  Antisense Strand to SEQ ID NO: 326437
caucacaaacaaauuaacu

SEQ ID NO: 326439 - RNA, 19 nt, Artificial Sequence
  Description of Artificial Sequence: Synthetic oligonucleotide
  Sense Strand Starting at position 98 of SEQ ID NO: 318228
gcacuuugacuauggaaga

SEQ ID NO: 326440 - RNA, 19 nt, Artificial Sequence
  Description of Artificial Sequence: Synthetic oligonucleotide
  Antisense Strand to SEQ ID NO: 326439
ucuuccauagucaaagugc

SEQ ID NO: 326441 - RNA, 19 nt, Artificial Sequence
  Description of Artificial Sequence: Synthetic oligonucleotide
  Sense Strand Starting at position 98 of SEQ ID NO: 318328
ggcauaaguguccaacuug

SEQ ID NO: 326442 - RNA, 19 nt, Artificial Sequence
  Description of Artificial Sequence: Synthetic oligonucleotide
  Antisense Strand to SEQ ID NO: 326441
caaguuggacacuuaugcc

SEQ ID NO: 326443 - RNA, 19 nt, Artificial Sequence
  Description of Artificial Sequence: Synthetic oligonucleotide
  Sense Strand Starting at position 98 of SEQ ID NO: 318343
cuugguguucaggagagau

SEQ ID NO: 326444 - RNA, 19 nt, Artificial Sequence
  Description of Artificial Sequence: Synthetic oligonucleotide
  Antisense Strand to SEQ ID NO: 326443
aucucuccugaacaccaag

SEQ ID NO: 326445 - RNA, 19 nt, Artificial Sequence
  Description of Artificial Sequence: Synthetic oligonucleotide
  Sense Strand Starting at position 98 of SEQ ID NO: 318598
uccgcuauuuacuuguauu

SEQ ID NO: 326446 - RNA, 19 nt, Artificial Sequence
  Description of Artificial Sequence: Synthetic oligonucleotide
  Antisense Strand to SEQ ID NO: 326445
aauacaaguaaauagcgga

SEQ ID NO: 326447 - RNA, 19 nt, Artificial Sequence
  Description of Artificial Sequence: Synthetic oligonucleotide
  Sense Strand Starting at position 98 of SEQ ID NO: 318699
gcguguggcccaguucuaa

SEQ ID NO: 326448 - RNA, 19 nt, Artificial Sequence
  Description of Artificial Sequence: Synthetic oligonucleotide
  Antisense Strand to SEQ ID NO: 326447
uuagaacugggccacacgc

SEQ ID NO: 326449 - RNA, 19 nt, Artificial Sequence
  Description of Artificial Sequence: Synthetic oligonucleotide
  Sense Strand Starting at position 98 of SEQ ID NO: 318750
ugggaaagguuaucuuguu

SEQ ID NO: 326450 - RNA, 19 nt, Artificial Sequence
  Description of Artificial Sequence: Synthetic oligonucleotide
  Antisense Strand to SEQ ID NO: 326449
aacaagauaaccuuuccca

SEQ ID NO: 326451 - RNA, 19 nt, Artificial Sequence
  Description of Artificial Sequence: Synthetic oligonucleotide
  Sense Strand Starting at position 98 of SEQ ID NO: 318751
gggaaagguuaucuuguug

SEQ ID NO: 326452 - RNA, 19 nt, Artificial Sequence
  Description of Artificial Sequence: Synthetic oligonucleotide
  Antisense Strand to SEQ ID NO: 326451
caacaagauaaccuuuccc

SEQ ID NO: 326453 - RNA, 19 nt, Artificial Sequence
  Description of Artificial Sequence: Synthetic oligonucleotide
  Sense Strand Starting at position 98 of SEQ ID NO: 318755
aagguuaucuuguugauga

SEQ ID NO: 326454 - RNA, 19 nt, Artificial Sequence
  Description of Artificial Sequence: Synthetic oligonucleotide
  Antisense Strand to SEQ ID NO: 326453
ucaucaacaagauaaccuu

SEQ ID NO: 326455 - RNA, 19 nt, Artificial Sequence
  Description of Artificial Sequence: Synthetic oligonucleotide
  Sense Strand Starting at position 98 of SEQ ID NO: 318757
gguuaucuuguugaugaaa

SEQ ID NO: 326456 - RNA, 19 nt, Artificial Sequence
  Description of Artificial Sequence: Synthetic oligonucleotide
  Antisense Strand to SEQ ID NO: 326455
uuucaucaacaagauaacc

SEQ ID NO: 326457 - RNA, 19 nt, Artificial Sequence
  Description of Artificial Sequence: Synthetic oligonucleotide
  Sense Strand Starting at position 98 of SEQ ID NO: 318819
cuuugaaagugauccauga

SEQ ID NO: 326458 - RNA, 19 nt, Artificial Sequence
  Description of Artificial Sequence: Synthetic oligonucleotide
  Antisense Strand to SEQ ID NO: 326457
ucauggaucacuuucaaag

SEQ ID NO: 326459 - RNA, 19 nt, Artificial Sequence
  Description of Artificial Sequence: Synthetic oligonucleotide
  Sense Strand Starting at position 98 of SEQ ID NO: 319115
agauguuccagacauugug

SEQ ID NO: 326460 - RNA, 19 nt, Artificial Sequence
  Description of Artificial Sequence: Synthetic oligonucleotide
  Antisense Strand to SEQ ID NO: 326459
cacaaugucuggaacaucu

SEQ ID NO: 326461 - RNA, 19 nt, Artificial Sequence
  Description of Artificial Sequence: Synthetic oligonucleotide
  Sense Strand Starting at position 98 of SEQ ID NO: 319181
gagaguuuauaguuacuug

SEQ ID NO: 326462 - RNA, 19 nt, Artificial Sequence
  Description of Artificial Sequence: Synthetic oligonucleotide
  Antisense Strand to SEQ ID NO: 326461
caaguaacuauaaacucuc

SEQ ID NO: 326463 - RNA, 19 nt, Artificial Sequence
  Description of Artificial Sequence: Synthetic oligonucleotide
  Sense Strand Starting at position 98 of SEQ ID NO: 319184
aguuuauaguuacuuggga

SEQ ID NO: 326464 - RNA, 19 nt, Artificial Sequence
  Description of Artificial Sequence: Synthetic oligonucleotide
  Antisense Strand to SEQ ID NO: 326463
ucccaaguaacuauaaacu

SEQ ID NO: 326465 - RNA, 19 nt, Artificial Sequence
  Description of Artificial Sequence: Synthetic oligonucleotide
  Sense Strand Starting at position 98 of SEQ ID NO: 319185
guuuauaguuacuugggaa

SEQ ID NO: 326466 - RNA, 19 nt, Artificial Sequence
  Description of Artificial Sequence: Synthetic oligonucleotide
  Antisense Strand to SEQ ID NO: 326465
uucccaaguaacuauaaac

SEQ ID NO: 326467 - RNA, 19 nt, Artificial Sequence
  Description of Artificial Sequence: Synthetic oligonucleotide
  Sense Strand Starting at position 99 of SEQ ID NO: 315254
aucucuacccuaggucaua

SEQ ID NO: 326468 - RNA, 19 nt, Artificial Sequence
  Description of Artificial Sequence: Synthetic oligonucleotide
  Antisense Strand to SEQ ID NO: 326467
uaugaccuaggguagagau

SEQ ID NO: 326469 - RNA, 19 nt, Artificial Sequence
  Description of Artificial Sequence: Synthetic oligonucleotide
  Sense Strand Starting at position 99 of SEQ ID NO: 315288
agagcacuaucugcaguaa

SEQ ID NO: 326470 - RNA, 19 nt, Artificial Sequence
  Description of Artificial Sequence: Synthetic oligonucleotide
  Antisense Strand to SEQ ID NO: 326469
uuacugcagauagugcucu

SEQ ID NO: 326471 - RNA, 19 nt, Artificial Sequence
  Description of Artificial Sequence: Synthetic oligonucleotide
  Sense Strand Starting at position 99 of SEQ ID NO: 315335
uacuccguucuggaaauga

SEQ ID NO: 326472 - RNA, 19 nt, Artificial Sequence
  Description of Artificial Sequence: Synthetic oligonucleotide
  Antisense Strand to SEQ ID NO: 326471
ucauuuccagaacggagua

SEQ ID NO: 326473 - RNA, 19 nt, Artificial Sequence
  Description of Artificial Sequence: Synthetic oligonucleotide
  Sense Strand Starting at position 99 of SEQ ID NO: 315339
ccguucuggaaaugaggaa

SEQ ID NO: 326474 - RNA, 19 nt, Artificial Sequence
  Description of Artificial Sequence: Synthetic oligonucleotide
  Antisense Strand to SEQ ID NO: 326473
uuccucauuuccagaacgg

SEQ ID NO: 326475 - RNA, 19 nt, Artificial Sequence
  Description of Artificial Sequence: Synthetic oligonucleotide
  Sense Strand Starting at position 99 of SEQ ID NO: 315440
guuaguacacucuagaaac

SEQ ID NO: 326476 - RNA, 19 nt, Artificial Sequence
  Description of Artificial Sequence: Synthetic oligonucleotide
  Antisense Strand to SEQ ID NO: 326475
guuucuagaguguacuaac

SEQ ID NO: 326477 - RNA, 19 nt, Artificial Sequence
  Description of Artificial Sequence: Synthetic oligonucleotide
  Sense Strand Starting at position 99 of SEQ ID NO: 315496
cauguaagucuggaugcaa

SEQ ID NO: 326478 - RNA, 19 nt, Artificial Sequence
  Description of Artificial Sequence: Synthetic oligonucleotide
  Antisense Strand to SEQ ID NO: 326477
uugcauccagacuuacaug

SEQ ID NO: 326479 - RNA, 19 nt, Artificial Sequence
  Description of Artificial Sequence: Synthetic oligonucleotide
  Sense Strand Starting at position 99 of SEQ ID NO: 315578
gagugauuaccaugcaguu

SEQ ID NO: 326480 - RNA, 19 nt, Artificial Sequence
  Description of Artificial Sequence: Synthetic oligonucleotide
  Antisense Strand to SEQ ID NO: 326479
aacugcaugguaaucacuc

SEQ ID NO: 326481 - RNA, 19 nt, Artificial Sequence
  Description of Artificial Sequence: Synthetic oligonucleotide
  Sense Strand Starting at position 99 of SEQ ID NO: 315664
ggcuuuguggcauauguaa

SEQ ID NO: 326482 - RNA, 19 nt, Artificial Sequence
  Description of Artificial Sequence: Synthetic oligonucleotide
  Antisense Strand to SEQ ID NO: 326481
uuacauaugccacaaagcc

SEQ ID NO: 326483 - RNA, 19 nt, Artificial Sequence
  Description of Artificial Sequence: Synthetic oligonucleotide
  Sense Strand Starting at position 99 of SEQ ID NO: 315885
aaauguugugcccaaauag

SEQ ID NO: 326484 - RNA, 19 nt, Artificial Sequence
  Description of Artificial Sequence: Synthetic oligonucleotide
  Antisense Strand to SEQ ID NO: 326483
cuauuugggcacaacauuu

SEQ ID NO: 326485 - RNA, 19 nt, Artificial Sequence
  Description of Artificial Sequence: Synthetic oligonucleotide
  Sense Strand Starting at position 99 of SEQ ID NO: 316097
cacgguagaugguuuaaau

SEQ ID NO: 326486 - RNA, 19 nt, Artificial Sequence
  Description of Artificial Sequence: Synthetic oligonucleotide
  Antisense Strand to SEQ ID NO: 326485
auuuaaaccaucuaccgug

SEQ ID NO: 326487 - RNA, 19 nt, Artificial Sequence
  Description of Artificial Sequence: Synthetic oligonucleotide
  Sense Strand Starting at position 99 of SEQ ID NO: 316208
cuguguuguucagacagga

SEQ ID NO: 326488 - RNA, 19 nt, Artificial Sequence
  Description of Artificial Sequence: Synthetic oligonucleotide
  Antisense Strand to SEQ ID NO: 326487
uccugucugaacaacacag

SEQ ID NO: 326489 - RNA, 19 nt, Artificial Sequence
  Description of Artificial Sequence: Synthetic oligonucleotide
  Sense Strand Starting at position 99 of SEQ ID NO: 316352
auguacuucugugauuaac

SEQ ID NO: 326490 - RNA, 19 nt, Artificial Sequence
  Description of Artificial Sequence: Synthetic oligonucleotide
  Antisense Strand to SEQ ID NO: 326489
guuaaucacagaaguacau

SEQ ID NO: 326491 - RNA, 19 nt, Artificial Sequence
  Description of Artificial Sequence: Synthetic oligonucleotide
  Sense Strand Starting at position 99 of SEQ ID NO: 316354
guacuucugugauuaacuc

SEQ ID NO: 326492 - RNA, 19 nt, Artificial Sequence
  Description of Artificial Sequence: Synthetic oligonucleotide
  Antisense Strand to SEQ ID NO: 326491
gaguuaaucacagaaguac

SEQ ID NO: 326493 - RNA, 19 nt, Artificial Sequence
  Description of Artificial Sequence: Synthetic oligonucleotide
  Sense Strand Starting at position 99 of SEQ ID NO: 316363
ugauuaacucaccgcuaca

SEQ ID NO: 326494 - RNA, 19 nt, Artificial Sequence
  Description of Artificial Sequence: Synthetic oligonucleotide
  Antisense Strand to SEQ ID NO: 326493
uguagcggugaguuaauca

SEQ ID NO: 326495 - RNA, 19 nt, Artificial Sequence
  Description of Artificial Sequence: Synthetic oligonucleotide
  Sense Strand Starting at position 99 of SEQ ID NO: 316374
ccgcuacacguuuaagcaa

SEQ ID NO: 326496 - RNA, 19 nt, Artificial Sequence
  Description of Artificial Sequence: Synthetic oligonucleotide
  Antisense Strand to SEQ ID NO: 326495
uugcuuaaacguguagcgg

SEQ ID NO: 326497 - RNA, 19 nt, Artificial Sequence
  Description of Artificial Sequence: Synthetic oligonucleotide
  Sense Strand Starting at position 99 of SEQ ID NO: 316448
guggacgagucacaagaua

SEQ ID NO: 326498 - RNA, 19 nt, Artificial Sequence
  Description of Artificial Sequence: Synthetic oligonucleotide
  Antisense Strand to SEQ ID NO: 326497
uaucuugugacucguccac

SEQ ID NO: 326499 - RNA, 19 nt, Artificial Sequence
  Description of Artificial Sequence: Synthetic oligonucleotide
  Sense Strand Starting at position 99 of SEQ ID NO: 317450
gaagguuuagucgcacgca

SEQ ID NO: 326500 - RNA, 19 nt, Artificial Sequence
  Description of Artificial Sequence: Synthetic oligonucleotide
  Antisense Strand to SEQ ID NO: 326499
ugcgugcgacuaaaccuuc

SEQ ID NO: 326501 - RNA, 19 nt, Artificial Sequence
  Description of Artificial Sequence: Synthetic oligonucleotide
  Sense Strand Starting at position 99 of SEQ ID NO: 317459
gucgcacgcacguuuauaa

SEQ ID NO: 326502 - RNA, 19 nt, Artificial Sequence
  Description of Artificial Sequence: Synthetic oligonucleotide
  Antisense Strand to SEQ ID NO: 326501
uuauaaacgugcgugcgac

SEQ ID NO: 326503 - RNA, 19 nt, Artificial Sequence
  Description of Artificial Sequence: Synthetic oligonucleotide
  Sense Strand Starting at position 99 of SEQ ID NO: 317625
cggcuuccucucugaggga

SEQ ID NO: 326504 - RNA, 19 nt, Artificial Sequence
  Description of Artificial Sequence: Synthetic oligonucleotide
  Antisense Strand to SEQ ID NO: 326503
ucccucagagaggaagccg

SEQ ID NO: 326505 - RNA, 19 nt, Artificial Sequence
  Description of Artificial Sequence: Synthetic oligonucleotide
  Sense Strand Starting at position 99 of SEQ ID NO: 317626
ggcuuccucucugagggaa

SEQ ID NO: 326506 - RNA, 19 nt, Artificial Sequence
  Description of Artificial Sequence: Synthetic oligonucleotide
  Antisense Strand to SEQ ID NO: 326505
uucccucagagaggaagcc

SEQ ID NO: 326507 - RNA, 19 nt, Artificial Sequence
  Description of Artificial Sequence: Synthetic oligonucleotide
  Sense Strand Starting at position 99 of SEQ ID NO: 317702
cugugacguuccuacagga

SEQ ID NO: 326508 - RNA, 19 nt, Artificial Sequence
  Description of Artificial Sequence: Synthetic oligonucleotide
  Antisense Strand to SEQ ID NO: 326507
uccuguaggaacgucacag

SEQ ID NO: 326509 - RNA, 19 nt, Artificial Sequence
  Description of Artificial Sequence: Synthetic oligonucleotide
  Sense Strand Starting at position 99 of SEQ ID NO: 317858
gugcacugcuguucugaga

SEQ ID NO: 326510 - RNA, 19 nt, Artificial Sequence
  Description of Artificial Sequence: Synthetic oligonucleotide
  Antisense Strand to SEQ ID NO: 326509
ucucagaacagcagugcac

SEQ ID NO: 326511 - RNA, 19 nt, Artificial Sequence
  Description of Artificial Sequence: Synthetic oligonucleotide
  Sense Strand Starting at position 99 of SEQ ID NO: 317929
ggaauuccguucuaaauau

SEQ ID NO: 326512 - RNA, 19 nt, Artificial Sequence
  Description of Artificial Sequence: Synthetic oligonucleotide
  Antisense Strand to SEQ ID NO: 326511
auauuuagaacggaauucc

SEQ ID NO: 326513 - RNA, 19 nt, Artificial Sequence
  Description of Artificial Sequence: Synthetic oligonucleotide
  Sense Strand Starting at position 99 of SEQ ID NO: 317941
uaaauaugccagugaaugg

SEQ ID NO: 326514 - RNA, 19 nt, Artificial Sequence
  Description of Artificial Sequence: Synthetic oligonucleotide
  Antisense Strand to SEQ ID NO: 326513
ccauucacuggcauauuua

SEQ ID NO: 326515 - RNA, 19 nt, Artificial Sequence
  Description of Artificial Sequence: Synthetic oligonucleotide
  Sense Strand Starting at position 99 of SEQ ID NO: 318375
ggagaaauguaauagccau

SEQ ID NO: 326516 - RNA, 19 nt, Artificial Sequence
  Description of Artificial Sequence: Synthetic oligonucleotide
  Antisense Strand to SEQ ID NO: 326515
auggcuauuacauuucucc

SEQ ID NO: 326517 - RNA, 19 nt, Artificial Sequence
  Description of Artificial Sequence: Synthetic oligonucleotide
  Sense Strand Starting at position 99 of SEQ ID NO: 318390
ccaucuuauuguuuggagu

SEQ ID NO: 326518 - RNA, 19 nt, Artificial Sequence
  Description of Artificial Sequence: Synthetic oligonucleotide
  Antisense Strand to SEQ ID NO: 326517
acuccaaacaauaagaugg

SEQ ID NO: 326519 - RNA, 19 nt, Artificial Sequence
  Description of Artificial Sequence: Synthetic oligonucleotide
  Sense Strand Starting at position 99 of SEQ ID NO: 318393
ucuuauuguuuggagugau

SEQ ID NO: 326520 - RNA, 19 nt, Artificial Sequence
  Description of Artificial Sequence: Synthetic oligonucleotide
  Antisense Strand to SEQ ID NO: 326519
aucacuccaaacaauaaga

SEQ ID NO: 326521 - RNA, 19 nt, Artificial Sequence
  Description of Artificial Sequence: Synthetic oligonucleotide
  Sense Strand Starting at position 99 of SEQ ID NO: 318396
uauuguuuggagugaugaa

SEQ ID NO: 326522 - RNA, 19 nt, Artificial Sequence
  Description of Artificial Sequence: Synthetic oligonucleotide
  Antisense Strand to SEQ ID NO: 326521
uucaucacuccaaacaaua

SEQ ID NO: 326523 - RNA, 19 nt, Artificial Sequence
  Description of Artificial Sequence: Synthetic oligonucleotide
  Sense Strand Starting at position 99 of SEQ ID NO: 318397
auuguuuggagugaugaau

SEQ ID NO: 326524 - RNA, 19 nt, Artificial Sequence
  Description of Artificial Sequence: Synthetic oligonucleotide
  Antisense Strand to SEQ ID NO: 326523
auucaucacuccaaacaau

SEQ ID NO: 326525 - RNA, 19 nt, Artificial Sequence
  Description of Artificial Sequence: Synthetic oligonucleotide
  Sense Strand Starting at position 99 of SEQ ID NO: 318412
gaauuauaaucugucugga

SEQ ID NO: 326526 - RNA, 19 nt, Artificial Sequence
  Description of Artificial Sequence: Synthetic oligonucleotide
  Antisense Strand to SEQ ID NO: 326525
uccagacagauuauaauuc

SEQ ID NO: 326527 - RNA, 19 nt, Artificial Sequence
  Description of Artificial Sequence: Synthetic oligonucleotide
  Sense Strand Starting at position 99 of SEQ ID NO: 318414
auuauaaucugucuggaag

SEQ ID NO: 326528 - RNA, 19 nt, Artificial Sequence
  Description of Artificial Sequence: Synthetic oligonucleotide
  Antisense Strand to SEQ ID NO: 326527
cuuccagacagauuauaau

SEQ ID NO: 326529 - RNA, 19 nt, Artificial Sequence
  Description of Artificial Sequence: Synthetic oligonucleotide
  Sense Strand Starting at position 99 of SEQ ID NO: 318415
uuauaaucugucuggaagu

SEQ ID NO: 326530 - RNA, 19 nt, Artificial Sequence
  Description of Artificial Sequence: Synthetic oligonucleotide
  Antisense Strand to SEQ ID NO: 326529
acuuccagacagauuauaa

SEQ ID NO: 326531 - RNA, 19 nt, Artificial Sequence
  Description of Artificial Sequence: Synthetic oligonucleotide
  Sense Strand Starting at position 99 of SEQ ID NO: 318417
auaaucugucuggaaguuu

SEQ ID NO: 326532 - RNA, 19 nt, Artificial Sequence
  Description of Artificial Sequence: Synthetic oligonucleotide
  Antisense Strand to SEQ ID NO: 326531
aaacuuccagacagauuau

SEQ ID NO: 326533 - RNA, 19 nt, Artificial Sequence
  Description of Artificial Sequence: Synthetic oligonucleotide
  Sense Strand Starting at position 99 of SEQ ID NO: 318432
guuuaaacagccugcaaau

SEQ ID NO: 326534 - RNA, 19 nt, Artificial Sequence
  Description of Artificial Sequence: Synthetic oligonucleotide
  Antisense Strand to SEQ ID NO: 326533
auuugcaggcuguuuaaac

SEQ ID NO: 326535 - RNA, 19 nt, Artificial Sequence
  Description of Artificial Sequence: Synthetic oligonucleotide
  Sense Strand Starting at position 99 of SEQ ID NO: 318648
agaagcauguuggagaguu

SEQ ID NO: 326536 - RNA, 19 nt, Artificial Sequence
  Description of Artificial Sequence: Synthetic oligonucleotide
  Antisense Strand to SEQ ID NO: 326535
aacucuccaacaugcuucu

SEQ ID NO: 326537 - RNA, 19 nt, Artificial Sequence
  Description of Artificial Sequence: Synthetic oligonucleotide
  Sense Strand Starting at position 99 of SEQ ID NO: 318658
uggagaguuuggcaugaaa

SEQ ID NO: 326538 - RNA, 19 nt, Artificial Sequence
  Description of Artificial Sequence: Synthetic oligonucleotide
  Antisense Strand to SEQ ID NO: 326537
uuucaugccaaacucucca

SEQ ID NO: 326539 - RNA, 19 nt, Artificial Sequence
  Description of Artificial Sequence: Synthetic oligonucleotide
  Sense Strand Starting at position 99 of SEQ ID NO: 318660
gagaguuuggcaugaaaug

SEQ ID NO: 326540 - RNA, 19 nt, Artificial Sequence
  Description of Artificial Sequence: Synthetic oligonucleotide
  Antisense Strand to SEQ ID NO: 326539
cauuucaugccaaacucuc

SEQ ID NO: 326541 - RNA, 19 nt, Artificial Sequence
  Description of Artificial Sequence: Synthetic oligonucleotide
  Sense Strand Starting at position 99 of SEQ ID NO: 318665
uuuggcaugaaaugaguau

SEQ ID NO: 326542 - RNA, 19 nt, Artificial Sequence
  Description of Artificial Sequence: Synthetic oligonucleotide
  Antisense Strand to SEQ ID NO: 326541
auacucauuucaugccaaa

SEQ ID NO: 326543 - RNA, 19 nt, Artificial Sequence
  Description of Artificial Sequence: Synthetic oligonucleotide
  Sense Strand Starting at position 99 of SEQ ID NO: 318666
uuggcaugaaaugaguauu

SEQ ID NO: 326544 - RNA, 19 nt, Artificial Sequence
  Description of Artificial Sequence: Synthetic oligonucleotide
  Antisense Strand to SEQ ID NO: 326543
aauacucauuucaugccaa

SEQ ID NO: 326545 - RNA, 19 nt, Artificial Sequence
  Description of Artificial Sequence: Synthetic oligonucleotide
  Sense Strand Starting at position 99 of SEQ ID NO: 318727
uuuaaaucauaggcaagau

SEQ ID NO: 326546 - RNA, 19 nt, Artificial Sequence
  Description of Artificial Sequence: Synthetic oligonucleotide
  Antisense Strand to SEQ ID NO: 326545
aucuugccuaugauuuaaa

SEQ ID NO: 326547 - RNA, 19 nt, Artificial Sequence
  Description of Artificial Sequence: Synthetic oligonucleotide
  Sense Strand Starting at position 100 of SEQ ID NO: 315288
gccuguggccgucuucuua

SEQ ID NO: 326548 - RNA, 19 nt, Artificial Sequence
  Description of Artificial Sequence: Synthetic oligonucleotide
  Antisense Strand to SEQ ID NO: 326547
uaagaagacggccacaggc

SEQ ID NO: 326549 - RNA, 19 nt, Artificial Sequence
  Description of Artificial Sequence: Synthetic oligonucleotide
  Sense Strand Starting at position 100 of SEQ ID NO: 315301
uucuuaugugugcaacuga

SEQ ID NO: 326550 - RNA, 19 nt, Artificial Sequence
  Description of Artificial Sequence: Synthetic oligonucleotide
  Antisense Strand to SEQ ID NO: 326549
ucaguugcacacauaagaa

SEQ ID NO: 326551 - RNA, 19 nt, Artificial Sequence
  Description of Artificial Sequence: Synthetic oligonucleotide
  Sense Strand Starting at position 100 of SEQ ID NO: 315495
ucccguguuagugcuacau

SEQ ID NO: 326552 - RNA, 19 nt, Artificial Sequence
  Description of Artificial Sequence: Synthetic oligonucleotide
  Antisense Strand to SEQ ID NO: 326551
auguagcacuaacacggga

SEQ ID NO: 326553 - RNA, 19 nt, Artificial Sequence
  Description of Artificial Sequence: Synthetic oligonucleotide
  Sense Strand Starting at position 100 of SEQ ID NO: 315499
guguuagugcuacaugcau

SEQ ID NO: 326554 - RNA, 19 nt, Artificial Sequence
  Description of Artificial Sequence: Synthetic oligonucleotide
  Antisense Strand to SEQ ID NO: 326553
augcauguagcacuaacac

SEQ ID NO: 326555 - RNA, 19 nt, Artificial Sequence
  Description of Artificial Sequence: Synthetic oligonucleotide
  Sense Strand Starting at position 100 of SEQ ID NO: 315642
augggcauuccauaugugu

SEQ ID NO: 326556 - RNA, 19 nt, Artificial Sequence
  Description of Artificial Sequence: Synthetic oligonucleotide
  Antisense Strand to SEQ ID NO: 326555
acacauauggaaugcccau

SEQ ID NO: 326557 - RNA, 19 nt, Artificial Sequence
  Description of Artificial Sequence: Synthetic oligonucleotide
  Sense Strand Starting at position 100 of SEQ ID NO: 315644
gggcauuccauauguguau

SEQ ID NO: 326558 - RNA, 19 nt, Artificial Sequence
  Description of Artificial Sequence: Synthetic oligonucleotide
  Antisense Strand to SEQ ID NO: 326557
auacacauauggaaugccc

SEQ ID NO: 326559 - RNA, 19 nt, Artificial Sequence
  Description of Artificial Sequence: Synthetic oligonucleotide
  Sense Strand Starting at position 100 of SEQ ID NO: 315645
ggcauuccauauguguaua

SEQ ID NO: 326560 - RNA, 19 nt, Artificial Sequence
  Description of Artificial Sequence: Synthetic oligonucleotide
  Antisense Strand to SEQ ID NO: 326559
uauacacauauggaaugcc

SEQ ID NO: 326561 - RNA, 19 nt, Artificial Sequence
  Description of Artificial Sequence: Synthetic oligonucleotide
  Sense Strand Starting at position 100 of SEQ ID NO: 315690
acuuauggguacuauauuu

SEQ ID NO: 326562 - RNA, 19 nt, Artificial Sequence
  Description of Artificial Sequence: Synthetic oligonucleotide
  Antisense Strand to SEQ ID NO: 326561
aaauauaguacccauaagu

SEQ ID NO: 326563 - RNA, 19 nt, Artificial Sequence
  Description of Artificial Sequence: Synthetic oligonucleotide
  Sense Strand Starting at position 100 of SEQ ID NO: 315701
cuauauuuguaucugugca

SEQ ID NO: 326564 - RNA, 19 nt, Artificial Sequence
  Description of Artificial Sequence: Synthetic oligonucleotide
  Antisense Strand to SEQ ID NO: 326563
ugcacagauacaaauauag

SEQ ID NO: 326565 - RNA, 19 nt, Artificial Sequence
  Description of Artificial Sequence: Synthetic oligonucleotide
  Sense Strand Starting at position 100 of SEQ ID NO: 315706
uuuguaucugugcauaugu

SEQ ID NO: 326566 - RNA, 19 nt, Artificial Sequence
  Description of Artificial Sequence: Synthetic oligonucleotide
  Antisense Strand to SEQ ID NO: 326565
acauaugcacagauacaaa

SEQ ID NO: 326567 - RNA, 19 nt, Artificial Sequence
  Description of Artificial Sequence: Synthetic oligonucleotide
  Sense Strand Starting at position 100 of SEQ ID NO: 315713
cugugcauaugugugaauu

SEQ ID NO: 326568 - RNA, 19 nt, Artificial Sequence
  Description of Artificial Sequence: Synthetic oligonucleotide
  Antisense Strand to SEQ ID NO: 326567
aauucacacauaugcacag

SEQ ID NO: 326569 - RNA, 19 nt, Artificial Sequence
  Description of Artificial Sequence: Synthetic oligonucleotide
  Sense Strand Starting at position 100 of SEQ ID NO: 315714
ugugcauaugugugaauuu

SEQ ID NO: 326570 - RNA, 19 nt, Artificial Sequence
  Description of Artificial Sequence: Synthetic oligonucleotide
  Antisense Strand to SEQ ID NO: 326569
aaauucacacauaugcaca

SEQ ID NO: 326571 - RNA, 19 nt, Artificial Sequence
  Description of Artificial Sequence: Synthetic oligonucleotide
  Sense Strand Starting at position 100 of SEQ ID NO: 315725
gugaauuugugggcaugca

SEQ ID NO: 326572 - RNA, 19 nt, Artificial Sequence
  Description of Artificial Sequence: Synthetic oligonucleotide
  Antisense Strand to SEQ ID NO: 326571
ugcaugcccacaaauucac

SEQ ID NO: 326573 - RNA, 19 nt, Artificial Sequence
  Description of Artificial Sequence: Synthetic oligonucleotide
  Sense Strand Starting at position 100 of SEQ ID NO: 315740
ugcauaugcccugauguga

SEQ ID NO: 326574 - RNA, 19 nt, Artificial Sequence
  Description of Artificial Sequence: Synthetic oligonucleotide
  Antisense Strand to SEQ ID NO: 326573
ucacaucagggcauaugca

SEQ ID NO: 326575 - RNA, 19 nt, Artificial Sequence
  Description of Artificial Sequence: Synthetic oligonucleotide
  Sense Strand Starting at position 100 of SEQ ID NO: 315748
cccugaugugaaugggacu

SEQ ID NO: 326576 - RNA, 19 nt, Artificial Sequence
  Description of Artificial Sequence: Synthetic oligonucleotide
  Antisense Strand to SEQ ID NO: 326575
agucccauucacaucaggg

SEQ ID NO: 326577 - RNA, 19 nt, Artificial Sequence
  Description of Artificial Sequence: Synthetic oligonucleotide
  Sense Strand Starting at position 100 of SEQ ID NO: 315749
ccugaugugaaugggacua

SEQ ID NO: 326578 - RNA, 19 nt, Artificial Sequence
  Description of Artificial Sequence: Synthetic oligonucleotide
  Antisense Strand to SEQ ID NO: 326577
uagucccauucacaucagg

SEQ ID NO: 326579 - RNA, 19 nt, Artificial Sequence
  Description of Artificial Sequence: Synthetic oligonucleotide
  Sense Strand Starting at position 100 of SEQ ID NO: 315770
gugugaagguggcuaaaua

SEQ ID NO: 326580 - RNA, 19 nt, Artificial Sequence
  Description of Artificial Sequence: Synthetic oligonucleotide
  Antisense Strand to SEQ ID NO: 326579
uauuuagccaccuucacac

SEQ ID NO: 326581 - RNA, 19 nt, Artificial Sequence
  Description of Artificial Sequence: Synthetic oligonucleotide
  Sense Strand Starting at position 100 of SEQ ID NO: 315771
ugugaagguggcuaaauaa

SEQ ID NO: 326582 - RNA, 19 nt, Artificial Sequence
  Description of Artificial Sequence: Synthetic oligonucleotide
  Antisense Strand to SEQ ID NO: 326581
uuauuuagccaccuucaca

SEQ ID NO: 326583 - RNA, 19 nt, Artificial Sequence
  Description of Artificial Sequence: Synthetic oligonucleotide
  Sense Strand Starting at position 100 of SEQ ID NO: 315930
gcacacgucaaaggagaau

SEQ ID NO: 326584 - RNA, 19 nt, Artificial Sequence
  Description of Artificial Sequence: Synthetic oligonucleotide
  Antisense Strand to SEQ ID NO: 326583
auucuccuuugacgugugc

SEQ ID NO: 326585 - RNA, 19 nt, Artificial Sequence
  Description of Artificial Sequence: Synthetic oligonucleotide
  Sense Strand Starting at position 100 of SEQ ID NO: 315963
cccgcugauccuggaaaua

SEQ ID NO: 326586 - RNA, 19 nt, Artificial Sequence
  Description of Artificial Sequence: Synthetic oligonucleotide
  Antisense Strand to SEQ ID NO: 326585
uauuuccaggaucagcggg

SEQ ID NO: 326587 - RNA, 19 nt, Artificial Sequence
  Description of Artificial Sequence: Synthetic oligonucleotide
  Sense Strand Starting at position 100 of SEQ ID NO: 316008
cagcgauucggagagcaau

SEQ ID NO: 326588 - RNA, 19 nt, Artificial Sequence
  Description of Artificial Sequence: Synthetic oligonucleotide
  Antisense Strand to SEQ ID NO: 326587
auugcucuccgaaucgcug

SEQ ID NO: 326589 - RNA, 19 nt, Artificial Sequence
  Description of Artificial Sequence: Synthetic oligonucleotide
  Sense Strand Starting at position 100 of SEQ ID NO: 316269
auagcuacuuggcuagaaa

SEQ ID NO: 326590 - RNA, 19 nt, Artificial Sequence
  Description of Artificial Sequence: Synthetic oligonucleotide
  Antisense Strand to SEQ ID NO: 326589
uuucuagccaaguagcuau

SEQ ID NO: 326591 - RNA, 19 nt, Artificial Sequence
  Description of Artificial Sequence: Synthetic oligonucleotide
  Sense Strand Starting at position 100 of SEQ ID NO: 316270
uagcuacuuggcuagaaag

SEQ ID NO: 326592 - RNA, 19 nt, Artificial Sequence
  Description of Artificial Sequence: Synthetic oligonucleotide
  Antisense Strand to SEQ ID NO: 326591
cuuucuagccaaguagcua

SEQ ID NO: 326593 - RNA, 19 nt, Artificial Sequence
  Description of Artificial Sequence: Synthetic oligonucleotide
  Sense Strand Starting at position 100 of SEQ ID NO: 316743
gcuugcuggcccuugcaua

SEQ ID NO: 326594 - RNA, 19 nt, Artificial Sequence
  Description of Artificial Sequence: Synthetic oligonucleotide
  Antisense Strand to SEQ ID NO: 326593
uaugcaagggccagcaagc

SEQ ID NO: 326595 - RNA, 19 nt, Artificial Sequence
  Description of Artificial Sequence: Synthetic oligonucleotide
  Sense Strand Starting at position 100 of SEQ ID NO: 316795
gccggaaucuaccugagac

SEQ ID NO: 326596 - RNA, 19 nt, Artificial Sequence
  Description of Artificial Sequence: Synthetic oligonucleotide
  Antisense Strand to SEQ ID NO: 326595
gucucagguagauuccggc

SEQ ID NO: 326597 - RNA, 19 nt, Artificial Sequence
  Description of Artificial Sequence: Synthetic oligonucleotide
  Sense Strand Starting at position 100 of SEQ ID NO: 317105
ccgguacuuacuuggcuau

SEQ ID NO: 326598 - RNA, 19 nt, Artificial Sequence
  Description of Artificial Sequence: Synthetic oligonucleotide
  Antisense Strand to SEQ ID NO: 326597
auagccaaguaaguaccgg

SEQ ID NO: 326599 - RNA, 19 nt, Artificial Sequence
  Description of Artificial Sequence: Synthetic oligonucleotide
  Sense Strand Starting at position 100 of SEQ ID NO: 317107
gguacuuacuuggcuauga

SEQ ID NO: 326600 - RNA, 19 nt, Artificial Sequence
  Description of Artificial Sequence: Synthetic oligonucleotide
  Antisense Strand to SEQ ID NO: 326599
ucauagccaaguaaguacc

SEQ ID NO: 326601 - RNA, 19 nt, Artificial Sequence
  Description of Artificial Sequence: Synthetic oligonucleotide
  Sense Strand Starting at position 100 of SEQ ID NO: 317108
guacuuacuuggcuaugaa

SEQ ID NO: 326602 - RNA, 19 nt, Artificial Sequence
  Description of Artificial Sequence: Synthetic oligonucleotide
  Antisense Strand to SEQ ID NO: 326601
uucauagccaaguaaguac

SEQ ID NO: 326603 - RNA, 19 nt, Artificial Sequence
  Description of Artificial Sequence: Synthetic oligonucleotide
  Sense Strand Starting at position 100 of SEQ ID NO: 317529
ggcagagucccaggaauau

SEQ ID NO: 326604 - RNA, 19 nt, Artificial Sequence
  Description of Artificial Sequence: Synthetic oligonucleotide
  Antisense Strand to SEQ ID NO: 326603
auauuccugggacucugcc

SEQ ID NO: 326605 - RNA, 19 nt, Artificial Sequence
  Description of Artificial Sequence: Synthetic oligonucleotide
  Sense Strand Starting at position 100 of SEQ ID NO: 317999
gggugucugcaugucugua

SEQ ID NO: 326606 - RNA, 19 nt, Artificial Sequence
  Description of Artificial Sequence: Synthetic oligonucleotide
  Antisense Strand to SEQ ID NO: 326605
uacagacaugcagacaccc

SEQ ID NO: 326607 - RNA, 19 nt, Artificial Sequence
  Description of Artificial Sequence: Synthetic oligonucleotide
  Sense Strand Starting at position 100 of SEQ ID NO: 318105
gugaggagucgguaggguu

SEQ ID NO: 326608 - RNA, 19 nt, Artificial Sequence
  Description of Artificial Sequence: Synthetic oligonucleotide
  Antisense Strand to SEQ ID NO: 326607
aacccuaccgacuccucac

SEQ ID NO: 326609 - RNA, 19 nt, Artificial Sequence
  Description of Artificial Sequence: Synthetic oligonucleotide
  Sense Strand Starting at position 100 of SEQ ID NO: 318154
cugccuaaucucugccaga

SEQ ID NO: 326610 - RNA, 19 nt, Artificial Sequence
  Description of Artificial Sequence: Synthetic oligonucleotide
  Antisense Strand to SEQ ID NO: 326609
ucuggcagagauuaggcag

SEQ ID NO: 326611 - RNA, 19 nt, Artificial Sequence
  Description of Artificial Sequence: Synthetic oligonucleotide
  Sense Strand Starting at position 100 of SEQ ID NO: 318155
ugccuaaucucugccagac

SEQ ID NO: 326612 - RNA, 19 nt, Artificial Sequence
  Description of Artificial Sequence: Synthetic oligonucleotide
  Antisense Strand to SEQ ID NO: 326611
gucuggcagagauuaggca

SEQ ID NO: 326613 - RNA, 19 nt, Artificial Sequence
  Description of Artificial Sequence: Synthetic oligonucleotide
  Sense Strand Starting at position 100 of SEQ ID NO: 318535
auaccaauuugucucguua

SEQ ID NO: 326614 - RNA, 19 nt, Artificial Sequence
  Description of Artificial Sequence: Synthetic oligonucleotide
  Antisense Strand to SEQ ID NO: 326613
uaacgagacaaauugguau

SEQ ID NO: 326615 - RNA, 19 nt, Artificial Sequence
  Description of Artificial Sequence: Synthetic oligonucleotide
  Sense Strand Starting at position 100 of SEQ ID NO: 318539
caauuugucucguuaagcu

SEQ ID NO: 326616 - RNA, 19 nt, Artificial Sequence
  Description of Artificial Sequence: Synthetic oligonucleotide
  Antisense Strand to SEQ ID NO: 326615
agcuuaacgagacaaauug

SEQ ID NO: 326617 - RNA, 19 nt, Artificial Sequence
  Description of Artificial Sequence: Synthetic oligonucleotide
  Sense Strand Starting at position 100 of SEQ ID NO: 318543
uugucucguuaagcugaaa

SEQ ID NO: 326618 - RNA, 19 nt, Artificial Sequence
  Description of Artificial Sequence: Synthetic oligonucleotide
  Antisense Strand to SEQ ID NO: 326617
uuucagcuuaacgagacaa

SEQ ID NO: 326619 - RNA, 19 nt, Artificial Sequence
  Description of Artificial Sequence: Synthetic oligonucleotide
  Sense Strand Starting at position 100 of SEQ ID NO: 319131
ccguguaaagcuguuccga

SEQ ID NO: 326620 - RNA, 19 nt, Artificial Sequence
  Description of Artificial Sequence: Synthetic oligonucleotide
  Antisense Strand to SEQ ID NO: 326619
ucggaacagcuuuacacgg

SEQ ID NO: 326621 - RNA, 19 nt, Artificial Sequence
  Description of Artificial Sequence: Synthetic oligonucleotide
  Sense Strand Starting at position 100 of SEQ ID NO: 319132
cguguaaagcuguuccgag

SEQ ID NO: 326622 - RNA, 19 nt, Artificial Sequence
  Description of Artificial Sequence: Synthetic oligonucleotide
  Antisense Strand to SEQ ID NO: 326621
cucggaacagcuuuacacg

SEQ ID NO: 326623 - RNA, 19 nt, Artificial Sequence
  Description of Artificial Sequence: Synthetic oligonucleotide
  Sense Strand Starting at position 100 of SEQ ID NO: 319133
guguaaagcuguuccgaga

SEQ ID NO: 326624 - RNA, 19 nt, Artificial Sequence
  Description of Artificial Sequence: Synthetic oligonucleotide
  Antisense Strand to SEQ ID NO: 326623
ucucggaacagcuuuacac

SEQ ID NO: 326625 - RNA, 19 nt, Artificial Sequence
  Description of Artificial Sequence: Synthetic oligonucleotide
  Sense Strand Starting at position 100 of SEQ ID NO: 319140
gcuguuccgagauguugga

SEQ ID NO: 326626 - RNA, 19 nt, Artificial Sequence
  Description of Artificial Sequence: Synthetic oligonucleotide
  Antisense Strand to SEQ ID NO: 326625
uccaacaucucggaacagc

SEQ ID NO: 326627 - RNA, 19 nt, Artificial Sequence
  Description of Artificial Sequence: Synthetic oligonucleotide
  Sense Strand Starting at position 101 of SEQ ID NO: 315621
gucauuuguuaaguaucuu

SEQ ID NO: 326628 - RNA, 19 nt, Artificial Sequence
  Description of Artificial Sequence: Synthetic oligonucleotide
  Antisense Strand to SEQ ID NO: 326627
aagauacuuaacaaaugac

SEQ ID NO: 326629 - RNA, 19 nt, Artificial Sequence
  Description of Artificial Sequence: Synthetic oligonucleotide
  Sense Strand Starting at position 101 of SEQ ID NO: 315783
aucagugcuguguaggaaa

SEQ ID NO: 326630 - RNA, 19 nt, Artificial Sequence
  Description of Artificial Sequence: Synthetic oligonucleotide
  Antisense Strand to SEQ ID NO: 326629
uuuccuacacagcacugau

SEQ ID NO: 326631 - RNA, 19 nt, Artificial Sequence
  Description of Artificial Sequence: Synthetic oligonucleotide
  Sense Strand Starting at position 101 of SEQ ID NO: 315837
guaacaugugaaugacgau

SEQ ID NO: 326632 - RNA, 19 nt, Artificial Sequence
  Description of Artificial Sequence: Synthetic oligonucleotide
  Antisense Strand to SEQ ID NO: 326631
aucgucauucacauguuac

SEQ ID NO: 326633 - RNA, 19 nt, Artificial Sequence
  Description of Artificial Sequence: Synthetic oligonucleotide
  Sense Strand Starting at position 101 of SEQ ID NO: 315851
acgaucuaauguguccaaa

SEQ ID NO: 326634 - RNA, 19 nt, Artificial Sequence
  Description of Artificial Sequence: Synthetic oligonucleotide
  Antisense Strand to SEQ ID NO: 326633
uuuggacacauuagaucgu

SEQ ID NO: 326635 - RNA, 19 nt, Artificial Sequence
  Description of Artificial Sequence: Synthetic oligonucleotide
  Sense Strand Starting at position 101 of SEQ ID NO: 315853
gaucuaauguguccaaagu

SEQ ID NO: 326636 - RNA, 19 nt, Artificial Sequence
  Description of Artificial Sequence: Synthetic oligonucleotide
  Antisense Strand to SEQ ID NO: 326635
acuuuggacacauuagauc

SEQ ID NO: 326637 - RNA, 19 nt, Artificial Sequence
  Description of Artificial Sequence: Synthetic oligonucleotide
  Sense Strand Starting at position 101 of SEQ ID NO: 315854
aucuaauguguccaaagug

SEQ ID NO: 326638 - RNA, 19 nt, Artificial Sequence
  Description of Artificial Sequence: Synthetic oligonucleotide
  Antisense Strand to SEQ ID NO: 326637
cacuuuggacacauuagau

SEQ ID NO: 326639 - RNA, 19 nt, Artificial Sequence
  Description of Artificial Sequence: Synthetic oligonucleotide
  Sense Strand Starting at position 101 of SEQ ID NO: 315866
caaaguguacagugaacaa

SEQ ID NO: 326640 - RNA, 19 nt, Artificial Sequence
  Description of Artificial Sequence: Synthetic oligonucleotide
  Antisense Strand to SEQ ID NO: 326639
uuguucacuguacacuuug

SEQ ID NO: 326641 - RNA, 19 nt, Artificial Sequence
  Description of Artificial Sequence: Synthetic oligonucleotide
  Sense Strand Starting at position 101 of SEQ ID NO: 316334
guaagcaaauccuuggaca

SEQ ID NO: 326642 - RNA, 19 nt, Artificial Sequence
  Description of Artificial Sequence: Synthetic oligonucleotide
  Antisense Strand to SEQ ID NO: 326641
uguccaaggauuugcuuac

SEQ ID NO: 326643 - RNA, 19 nt, Artificial Sequence
  Description of Artificial Sequence: Synthetic oligonucleotide
  Sense Strand Starting at position 101 of SEQ ID NO: 317263
acuauuacuuccgcugaga

SEQ ID NO: 326644 - RNA, 19 nt, Artificial Sequence
  Description of Artificial Sequence: Synthetic oligonucleotide
  Antisense Strand to SEQ ID NO: 326643
ucucagcggaaguaauagu

SEQ ID NO: 326645 - RNA, 19 nt, Artificial Sequence
  Description of Artificial Sequence: Synthetic oligonucleotide
  Sense Strand Starting at position 101 of SEQ ID NO: 317265
uauuacuuccgcugagaga

SEQ ID NO: 326646 - RNA, 19 nt, Artificial Sequence
  Description of Artificial Sequence: Synthetic oligonucleotide
  Antisense Strand to SEQ ID NO: 326645
ucucucagcggaaguaaua

SEQ ID NO: 326647 - RNA, 19 nt, Artificial Sequence
  Description of Artificial Sequence: Synthetic oligonucleotide
  Sense Strand Starting at position 101 of SEQ ID NO: 317361
gacaauguuuggguuugga

SEQ ID NO: 326648 - RNA, 19 nt, Artificial Sequence
  Description of Artificial Sequence: Synthetic oligonucleotide
  Antisense Strand to SEQ ID NO: 326647
uccaaacccaaacauuguc

SEQ ID NO: 326649 - RNA, 19 nt, Artificial Sequence
  Description of Artificial Sequence: Synthetic oligonucleotide
  Sense Strand Starting at position 101 of SEQ ID NO: 317452
cgguguccgcccguuuaua

SEQ ID NO: 326650 - RNA, 19 nt, Artificial Sequence
  Description of Artificial Sequence: Synthetic oligonucleotide
  Antisense Strand to SEQ ID NO: 326649
uauaaacgggcggacaccg

SEQ ID NO: 326651 - RNA, 19 nt, Artificial Sequence
  Description of Artificial Sequence: Synthetic oligonucleotide
  Sense Strand Starting at position 101 of SEQ ID NO: 317453
gguguccgcccguuuauau

SEQ ID NO: 326652 - RNA, 19 nt, Artificial Sequence
  Description of Artificial Sequence: Synthetic oligonucleotide
  Antisense Strand to SEQ ID NO: 326651
auauaaacgggcggacacc

SEQ ID NO: 326653 - RNA, 19 nt, Artificial Sequence
  Description of Artificial Sequence: Synthetic oligonucleotide
  Sense Strand Starting at position 101 of SEQ ID NO: 317585
ggcguuuaagcgcucucua

SEQ ID NO: 326654 - RNA, 19 nt, Artificial Sequence
  Description of Artificial Sequence: Synthetic oligonucleotide
  Antisense Strand to SEQ ID NO: 326653
uagagagcgcuuaaacgcc

SEQ ID NO: 326655 - RNA, 19 nt, Artificial Sequence
  Description of Artificial Sequence: Synthetic oligonucleotide
  Sense Strand Starting at position 101 of SEQ ID NO: 317586
gcguuuaagcgcucucuac

SEQ ID NO: 326656 - RNA, 19 nt, Artificial Sequence
  Description of Artificial Sequence: Synthetic oligonucleotide
  Antisense Strand to SEQ ID NO: 326655
guagagagcgcuuaaacgc

SEQ ID NO: 326657 - RNA, 19 nt, Artificial Sequence
  Description of Artificial Sequence: Synthetic oligonucleotide
  Sense Strand Starting at position 101 of SEQ ID NO: 317587
cguuuaagcgcucucuaca

SEQ ID NO: 326658 - RNA, 19 nt, Artificial Sequence
  Description of Artificial Sequence: Synthetic oligonucleotide
  Antisense Strand to SEQ ID NO: 326657
uguagagagcgcuuaaacg

SEQ ID NO: 326659 - RNA, 19 nt, Artificial Sequence
  Description of Artificial Sequence: Synthetic oligonucleotide
  Sense Strand Starting at position 101 of SEQ ID NO: 317838
uuaguuaccauguguaaug

SEQ ID NO: 326660 - RNA, 19 nt, Artificial Sequence
  Description of Artificial Sequence: Synthetic oligonucleotide
  Antisense Strand to SEQ ID NO: 326659
cauuacacaugguaacuaa

SEQ ID NO: 326661 - RNA, 19 nt, Artificial Sequence
  Description of Artificial Sequence: Synthetic oligonucleotide
  Sense Strand Starting at position 101 of SEQ ID NO: 317839
uaguuaccauguguaauga

SEQ ID NO: 326662 - RNA, 19 nt, Artificial Sequence
  Description of Artificial Sequence: Synthetic oligonucleotide
  Antisense Strand to SEQ ID NO: 326661
ucauuacacaugguaacua

SEQ ID NO: 326663 - RNA, 19 nt, Artificial Sequence
  Description of Artificial Sequence: Synthetic oligonucleotide
  Sense Strand Starting at position 101 of SEQ ID NO: 317909
ucguuugugguauauggaa

SEQ ID NO: 326664 - RNA, 19 nt, Artificial Sequence
  Description of Artificial Sequence: Synthetic oligonucleotide
  Antisense Strand to SEQ ID NO: 326663
uuccauauaccacaaacga

SEQ ID NO: 326665 - RNA, 19 nt, Artificial Sequence
  Description of Artificial Sequence: Synthetic oligonucleotide
  Sense Strand Starting at position 101 of SEQ ID NO: 317911
guuugugguauauggaacu

SEQ ID NO: 326666 - RNA, 19 nt, Artificial Sequence
  Description of Artificial Sequence: Synthetic oligonucleotide
  Antisense Strand to SEQ ID NO: 326665
aguuccauauaccacaaac

SEQ ID NO: 326667 - RNA, 19 nt, Artificial Sequence
  Description of Artificial Sequence: Synthetic oligonucleotide
  Sense Strand Starting at position 101 of SEQ ID NO: 318118
cguggugagccagacauau

SEQ ID NO: 326668 - RNA, 19 nt, Artificial Sequence
  Description of Artificial Sequence: Synthetic oligonucleotide
  Antisense Strand to SEQ ID NO: 326667
auaugucuggcucaccacg

SEQ ID NO: 326669 - RNA, 19 nt, Artificial Sequence
  Description of Artificial Sequence: Synthetic oligonucleotide
  Sense Strand Starting at position 101 of SEQ ID NO: 318192
uacugaguuggugaucauc

SEQ ID NO: 326670 - RNA, 19 nt, Artificial Sequence
  Description of Artificial Sequence: Synthetic oligonucleotide
  Antisense Strand to SEQ ID NO: 326669
gaugaucaccaacucagua

SEQ ID NO: 326671 - RNA, 19 nt, Artificial Sequence
  Description of Artificial Sequence: Synthetic oligonucleotide
  Sense Strand Starting at position 101 of SEQ ID NO: 318195
ugaguuggugaucauccua

SEQ ID NO: 326672 - RNA, 19 nt, Artificial Sequence
  Description of Artificial Sequence: Synthetic oligonucleotide
  Antisense Strand to SEQ ID NO: 326671
uaggaugaucaccaacuca

SEQ ID NO: 326673 - RNA, 19 nt, Artificial Sequence
  Description of Artificial Sequence: Synthetic oligonucleotide
  Sense Strand Starting at position 101 of SEQ ID NO: 318303
gguccuguaacauaucgca

SEQ ID NO: 326674 - RNA, 19 nt, Artificial Sequence
  Description of Artificial Sequence: Synthetic oligonucleotide
  Antisense Strand to SEQ ID NO: 326673
ugcgauauguuacaggacc

SEQ ID NO: 326675 - RNA, 19 nt, Artificial Sequence
  Description of Artificial Sequence: Synthetic oligonucleotide
  Sense Strand Starting at position 101 of SEQ ID NO: 318367
guugccuguguuucuauau

SEQ ID NO: 326676 - RNA, 19 nt, Artificial Sequence
  Description of Artificial Sequence: Synthetic oligonucleotide
  Antisense Strand to SEQ ID NO: 326675
auauagaaacacaggcaac

SEQ ID NO: 326677 - RNA, 19 nt, Artificial Sequence
  Description of Artificial Sequence: Synthetic oligonucleotide
  Sense Strand Starting at position 101 of SEQ ID NO: 318400
gugguacuagacuaggauu

SEQ ID NO: 326678 - RNA, 19 nt, Artificial Sequence
  Description of Artificial Sequence: Synthetic oligonucleotide
  Antisense Strand to SEQ ID NO: 326677
aauccuagucuaguaccac

SEQ ID NO: 326679 - RNA, 19 nt, Artificial Sequence
  Description of Artificial Sequence: Synthetic oligonucleotide
  Sense Strand Starting at position 101 of SEQ ID NO: 318426
cuggacagcuuucuagauu

SEQ ID NO: 326680 - RNA, 19 nt, Artificial Sequence
  Description of Artificial Sequence: Synthetic oligonucleotide
  Antisense Strand to SEQ ID NO: 326679
aaucuagaaagcuguccag

SEQ ID NO: 326681 - RNA, 19 nt, Artificial Sequence
  Description of Artificial Sequence: Synthetic oligonucleotide
  Sense Strand Starting at position 101 of SEQ ID NO: 318427
uggacagcuuucuagauuu

SEQ ID NO: 326682 - RNA, 19 nt, Artificial Sequence
  Description of Artificial Sequence: Synthetic oligonucleotide
  Antisense Strand to SEQ ID NO: 326681
aaaucuagaaagcugucca

SEQ ID NO: 326683 - RNA, 19 nt, Artificial Sequence
  Description of Artificial Sequence: Synthetic oligonucleotide
  Sense Strand Starting at position 101 of SEQ ID NO: 318526
gauuucuagucuuaacgag

SEQ ID NO: 326684 - RNA, 19 nt, Artificial Sequence
  Description of Artificial Sequence: Synthetic oligonucleotide
  Antisense Strand to SEQ ID NO: 326683
cucguuaagacuagaaauc

SEQ ID NO: 326685 - RNA, 19 nt, Artificial Sequence
  Description of Artificial Sequence: Synthetic oligonucleotide
  Sense Strand Starting at position 101 of SEQ ID NO: 318540
acgaguuaacuaugaucca

SEQ ID NO: 326686 - RNA, 19 nt, Artificial Sequence
  Description of Artificial Sequence: Synthetic oligonucleotide
  Antisense Strand to SEQ ID NO: 326685
uggaucauaguuaacucgu

SEQ ID NO: 326687 - RNA, 19 nt, Artificial Sequence
  Description of Artificial Sequence: Synthetic oligonucleotide
  Sense Strand Starting at position 101 of SEQ ID NO: 318566
caugcauggucagugauuu

SEQ ID NO: 326688 - RNA, 19 nt, Artificial Sequence
  Description of Artificial Sequence: Synthetic oligonucleotide
  Antisense Strand to SEQ ID NO: 326687
aaaucacugaccaugcaug

SEQ ID NO: 326689 - RNA, 19 nt, Artificial Sequence
  Description of Artificial Sequence: Synthetic oligonucleotide
  Sense Strand Starting at position 101 of SEQ ID NO: 318622
guugccugugcuucuauau

SEQ ID NO: 326690 - RNA, 19 nt, Artificial Sequence
  Description of Artificial Sequence: Synthetic oligonucleotide
  Antisense Strand to SEQ ID NO: 326689
auauagaagcacaggcaac

SEQ ID NO: 326691 - RNA, 19 nt, Artificial Sequence
  Description of Artificial Sequence: Synthetic oligonucleotide
  Sense Strand Starting at position 101 of SEQ ID NO: 318847
aaugacauagccugugauu

SEQ ID NO: 326692 - RNA, 19 nt, Artificial Sequence
  Description of Artificial Sequence: Synthetic oligonucleotide
  Antisense Strand to SEQ ID NO: 326691
aaucacaggcuaugucauu

SEQ ID NO: 326693 - RNA, 19 nt, Artificial Sequence
  Description of Artificial Sequence: Synthetic oligonucleotide
  Sense Strand Starting at position 101 of SEQ ID NO: 318864
uuuguacaaugauugugau

SEQ ID NO: 326694 - RNA, 19 nt, Artificial Sequence
  Description of Artificial Sequence: Synthetic oligonucleotide
  Antisense Strand to SEQ ID NO: 326693
aucacaaucauuguacaaa

SEQ ID NO: 326695 - RNA, 19 nt, Artificial Sequence
  Description of Artificial Sequence: Synthetic oligonucleotide
  Sense Strand Starting at position 101 of SEQ ID NO: 318956
gcaccuaagguaggaaauu

SEQ ID NO: 326696 - RNA, 19 nt, Artificial Sequence
  Description of Artificial Sequence: Synthetic oligonucleotide
  Antisense Strand to SEQ ID NO: 326695
aauuuccuaccuuaggugc

SEQ ID NO: 326697 - RNA, 19 nt, Artificial Sequence
  Description of Artificial Sequence: Synthetic oligonucleotide
  Sense Strand Starting at position 101 of SEQ ID NO: 319039
uugguauugggucacuuua

SEQ ID NO: 326698 - RNA, 19 nt, Artificial Sequence
  Description of Artificial Sequence: Synthetic oligonucleotide
  Antisense Strand to SEQ ID NO: 326697
uaaagugacccaauaccaa

SEQ ID NO: 326699 - RNA, 19 nt, Artificial Sequence
  Description of Artificial Sequence: Synthetic oligonucleotide
  Sense Strand Starting at position 101 of SEQ ID NO: 319046
ugggucacuuuagcugaaa

SEQ ID NO: 326700 - RNA, 19 nt, Artificial Sequence
  Description of Artificial Sequence: Synthetic oligonucleotide
  Antisense Strand to SEQ ID NO: 326699
uuucagcuaaagugaccca

SEQ ID NO: 326701 - RNA, 19 nt, Artificial Sequence
  Description of Artificial Sequence: Synthetic oligonucleotide
  Sense Strand Starting at position 101 of SEQ ID NO: 319049
gucacuuuagcugaaacau

SEQ ID NO: 326702 - RNA, 19 nt, Artificial Sequence
  Description of Artificial Sequence: Synthetic oligonucleotide
  Antisense Strand to SEQ ID NO: 326701
auguuucagcuaaagugac

SEQ ID NO: 326703 - RNA, 19 nt, Artificial Sequence
  Description of Artificial Sequence: Synthetic oligonucleotide
  Sense Strand Starting at position 101 of SEQ ID NO: 319085
ucagaacuaucuguuguau

SEQ ID NO: 326704 - RNA, 19 nt, Artificial Sequence
  Description of Artificial Sequence: Synthetic oligonucleotide
  Antisense Strand to SEQ ID NO: 326703
auacaacagauaguucuga

SEQ ID NO: 326705 - RNA, 19 nt, Artificial Sequence
  Description of Artificial Sequence: Synthetic oligonucleotide
  Sense Strand Starting at position 101 of SEQ ID NO: 319158
uuuauagcuccaugguuua

SEQ ID NO: 326706 - RNA, 19 nt, Artificial Sequence
  Description of Artificial Sequence: Synthetic oligonucleotide
  Antisense Strand to SEQ ID NO: 326705
uaaaccauggagcuauaaa

SEQ ID NO: 326707 - RNA, 19 nt, Artificial Sequence
  Description of Artificial Sequence: Synthetic oligonucleotide
  Sense Strand Starting at position 102 of SEQ ID NO: 315252
gguaucaaucuauguaguu

SEQ ID NO: 326708 - RNA, 19 nt, Artificial Sequence
  Description of Artificial Sequence: Synthetic oligonucleotide
  Antisense Strand to SEQ ID NO: 326707
aacuacauagauugauacc

SEQ ID NO: 326709 - RNA, 19 nt, Artificial Sequence
  Description of Artificial Sequence: Synthetic oligonucleotide
  Sense Strand Starting at position 102 of SEQ ID NO: 315267
aguuuaauauggucaguca

SEQ ID NO: 326710 - RNA, 19 nt, Artificial Sequence
  Description of Artificial Sequence: Synthetic oligonucleotide
  Antisense Strand to SEQ ID NO: 326709
ugacugaccauauuaaacu

SEQ ID NO: 326711 - RNA, 19 nt, Artificial Sequence
  Description of Artificial Sequence: Synthetic oligonucleotide
  Sense Strand Starting at position 102 of SEQ ID NO: 315268
guuuaauauggucagucac

SEQ ID NO: 326712 - RNA, 19 nt, Artificial Sequence
  Description of Artificial Sequence: Synthetic oligonucleotide
  Antisense Strand to SEQ ID NO: 326711
gugacugaccauauuaaac

SEQ ID NO: 326713 - RNA, 19 nt, Artificial Sequence
  Description of Artificial Sequence: Synthetic oligonucleotide
  Sense Strand Starting at position 102 of SEQ ID NO: 315270
uuaauauggucagucacuu

SEQ ID NO: 326714 - RNA, 19 nt, Artificial Sequence
  Description of Artificial Sequence: Synthetic oligonucleotide
  Antisense Strand to SEQ ID NO: 326713
aagugacugaccauauuaa

SEQ ID NO: 326715 - RNA, 19 nt, Artificial Sequence
  Description of Artificial Sequence: Synthetic oligonucleotide
  Sense Strand Starting at position 102 of SEQ ID NO: 315378
gucucuugauggucaagaa

SEQ ID NO: 326716 - RNA, 19 nt, Artificial Sequence
  Description of Artificial Sequence: Synthetic oligonucleotide
  Antisense Strand to SEQ ID NO: 326715
uucuugaccaucaagagac

SEQ ID NO: 326717 - RNA, 19 nt, Artificial Sequence
  Description of Artificial Sequence: Synthetic oligonucleotide
  Sense Strand Starting at position 102 of SEQ ID NO: 315547
uaaugagaaucggcuuuau

SEQ ID NO: 326718 - RNA, 19 nt, Artificial Sequence
  Description of Artificial Sequence: Synthetic oligonucleotide
  Antisense Strand to SEQ ID NO: 326717
auaaagccgauucucauua

SEQ ID NO: 326719 - RNA, 19 nt, Artificial Sequence
  Description of Artificial Sequence: Synthetic oligonucleotide
  Sense Strand Starting at position 102 of SEQ ID NO: 315551
gagaaucggcuuuauuacu

SEQ ID NO: 326720 - RNA, 19 nt, Artificial Sequence
  Description of Artificial Sequence: Synthetic oligonucleotide
  Antisense Strand to SEQ ID NO: 326719
aguaauaaagccgauucuc

SEQ ID NO: 326721 - RNA, 19 nt, Artificial Sequence
  Description of Artificial Sequence: Synthetic oligonucleotide
  Sense Strand Starting at position 102 of SEQ ID NO: 315573
gcucuuccuccugagagau

SEQ ID NO: 326722 - RNA, 19 nt, Artificial Sequence
  Description of Artificial Sequence: Synthetic oligonucleotide
  Antisense Strand to SEQ ID NO: 326721
aucucucaggaggaagagc

SEQ ID NO: 326723 - RNA, 19 nt, Artificial Sequence
  Description of Artificial Sequence: Synthetic oligonucleotide
  Sense Strand Starting at position 102 of SEQ ID NO: 315752
gucucaugugcagaaugga

SEQ ID NO: 326724 - RNA, 19 nt, Artificial Sequence
  Description of Artificial Sequence: Synthetic oligonucleotide
  Antisense Strand to SEQ ID NO: 326723
uccauucugcacaugagac

SEQ ID NO: 326725 - RNA, 19 nt, Artificial Sequence
  Description of Artificial Sequence: Synthetic oligonucleotide
  Sense Strand Starting at position 102 of SEQ ID NO: 316196
gucauuuguuaaguaucuu

SEQ ID NO: 326726 - RNA, 19 nt, Artificial Sequence
  Description of Artificial Sequence: Synthetic oligonucleotide
  Antisense Strand to SEQ ID NO: 326725
aagauacuuaacaaaugac

SEQ ID NO: 326727 - RNA, 19 nt, Artificial Sequence
  Description of Artificial Sequence: Synthetic oligonucleotide
  Sense Strand Starting at position 102 of SEQ ID NO: 316358
aucagugcuguguaggaaa

SEQ ID NO: 326728 - RNA, 19 nt, Artificial Sequence
  Description of Artificial Sequence: Synthetic oligonucleotide
  Antisense Strand to SEQ ID NO: 326727
uuuccuacacagcacugau

SEQ ID NO: 326729 - RNA, 19 nt, Artificial Sequence
  Description of Artificial Sequence: Synthetic oligonucleotide
  Sense Strand Starting at position 102 of SEQ ID NO: 316412
guaacaugugaaugacgau

SEQ ID NO: 326730 - RNA, 19 nt, Artificial Sequence
  Description of Artificial Sequence: Synthetic oligonucleotide
  Antisense Strand to SEQ ID NO: 326729
aucgucauucacauguuac

SEQ ID NO: 326731 - RNA, 19 nt, Artificial Sequence
  Description of Artificial Sequence: Synthetic oligonucleotide
  Sense Strand Starting at position 102 of SEQ ID NO: 316426
acgaucuaauguguccaaa

SEQ ID NO: 326732 - RNA, 19 nt, Artificial Sequence
  Description of Artificial Sequence: Synthetic oligonucleotide
  Antisense Strand to SEQ ID NO: 326731
uuuggacacauuagaucgu

SEQ ID NO: 326733 - RNA, 19 nt, Artificial Sequence
  Description of Artificial Sequence: Synthetic oligonucleotide
  Sense Strand Starting at position 102 of SEQ ID NO: 316428
gaucuaauguguccaaagu

SEQ ID NO: 326734 - RNA, 19 nt, Artificial Sequence
  Description of Artificial Sequence: Synthetic oligonucleotide
  Antisense Strand to SEQ ID NO: 326733
acuuuggacacauuagauc

SEQ ID NO: 326735 - RNA, 19 nt, Artificial Sequence
  Description of Artificial Sequence: Synthetic oligonucleotide
  Sense Strand Starting at position 102 of SEQ ID NO: 316429
aucuaauguguccaaagug

SEQ ID NO: 326736 - RNA, 19 nt, Artificial Sequence
  Description of Artificial Sequence: Synthetic oligonucleotide
  Antisense Strand to SEQ ID NO: 326735
cacuuuggacacauuagau

SEQ ID NO: 326737 - RNA, 19 nt, Artificial Sequence
  Description of Artificial Sequence: Synthetic oligonucleotide
  Sense Strand Starting at position 102 of SEQ ID NO: 316441
caaaguguacagugaacaa

SEQ ID NO: 326738 - RNA, 19 nt, Artificial Sequence
  Description of Artificial Sequence: Synthetic oligonucleotide
  Antisense Strand to SEQ ID NO: 326737
uuguucacuguacacuuug

SEQ ID NO: 326739 - RNA, 19 nt, Artificial Sequence
  Description of Artificial Sequence: Synthetic oligonucleotide
  Sense Strand Starting at position 102 of SEQ ID NO: 316909
guaagcaaauccuuggaca

SEQ ID NO: 326740 - RNA, 19 nt, Artificial Sequence
  Description of Artificial Sequence: Synthetic oligonucleotide
  Antisense Strand to SEQ ID NO: 326739
uguccaaggauuugcuuac

SEQ ID NO: 326741 - RNA, 19 nt, Artificial Sequence
  Description of Artificial Sequence: Synthetic oligonucleotide
  Sense Strand Starting at position 102 of SEQ ID NO: 317838
acuauuacuuccgcugaga

SEQ ID NO: 326742 - RNA, 19 nt, Artificial Sequence
  Description of Artificial Sequence: Synthetic oligonucleotide
  Antisense Strand to SEQ ID NO: 326741
ucucagcggaaguaauagu

SEQ ID NO: 326743 - RNA, 19 nt, Artificial Sequence
  Description of Artificial Sequence: Synthetic oligonucleotide
  Sense Strand Starting at position 102 of SEQ ID NO: 317840
uauuacuuccgcugagaga

SEQ ID NO: 326744 - RNA, 19 nt, Artificial Sequence
  Description of Artificial Sequence: Synthetic oligonucleotide
  Antisense Strand to SEQ ID NO: 326743
ucucucagcggaaguaaua

SEQ ID NO: 326745 - RNA, 19 nt, Artificial Sequence
  Description of Artificial Sequence: Synthetic oligonucleotide
  Sense Strand Starting at position 102 of SEQ ID NO: 317936
gacaauguuuggguuugga

SEQ ID NO: 326746 - RNA, 19 nt, Artificial Sequence
  Description of Artificial Sequence: Synthetic oligonucleotide
  Antisense Strand to SEQ ID NO: 326745
uccaaacccaaacauuguc

SEQ ID NO: 326747 - RNA, 19 nt, Artificial Sequence
  Description of Artificial Sequence: Synthetic oligonucleotide
  Sense Strand Starting at position 102 of SEQ ID NO: 318027
cgguguccgcccguuuaua

SEQ ID NO: 326748 - RNA, 19 nt, Artificial Sequence
  Description of Artificial Sequence: Synthetic oligonucleotide
  Antisense Strand to SEQ ID NO: 326747
uauaaacgggcggacaccg

SEQ ID NO: 326749 - RNA, 19 nt, Artificial Sequence
  Description of Artificial Sequence: Synthetic oligonucleotide
  Sense Strand Starting at position 102 of SEQ ID NO: 318028
gguguccgcccguuuauau

SEQ ID NO: 326750 - RNA, 19 nt, Artificial Sequence
  Description of Artificial Sequence: Synthetic oligonucleotide
  Antisense Strand to SEQ ID NO: 326749
auauaaacgggcggacacc

SEQ ID NO: 326751 - RNA, 19 nt, Artificial Sequence
  Description of Artificial Sequence: Synthetic oligonucleotide
  Sense Strand Starting at position 102 of SEQ ID NO: 318160
ggcguuuaagcgcucucua

SEQ ID NO: 326752 - RNA, 19 nt, Artificial Sequence
  Description of Artificial Sequence: Synthetic oligonucleotide
  Antisense Strand to SEQ ID NO: 326751
uagagagcgcuuaaacgcc

SEQ ID NO: 326753 - RNA, 19 nt, Artificial Sequence
  Description of Artificial Sequence: Synthetic oligonucleotide
  Sense Strand Starting at position 102 of SEQ ID NO: 318161
gcguuuaagcgcucucuac

SEQ ID NO: 326754 - RNA, 19 nt, Artificial Sequence
  Description of Artificial Sequence: Synthetic oligonucleotide
  Antisense Strand to SEQ ID NO: 326753
guagagagcgcuuaaacgc

SEQ ID NO: 326755 - RNA, 19 nt, Artificial Sequence
  Description of Artificial Sequence: Synthetic oligonucleotide
  Sense Strand Starting at position 102 of SEQ ID NO: 318162
cguuuaagcgcucucuaca

SEQ ID NO: 326756 - RNA, 19 nt, Artificial Sequence
  Description of Artificial Sequence: Synthetic oligonucleotide
  Antisense Strand to SEQ ID NO: 326755
uguagagagcgcuuaaacg

SEQ ID NO: 326757 - RNA, 19 nt, Artificial Sequence
  Description of Artificial Sequence: Synthetic oligonucleotide
  Sense Strand Starting at position 102 of SEQ ID NO: 318413
uuaguuaccauguguaaug

SEQ ID NO: 326758 - RNA, 19 nt, Artificial Sequence
  Description of Artificial Sequence: Synthetic oligonucleotide
  Antisense Strand to SEQ ID NO: 326757
cauuacacaugguaacuaa

SEQ ID NO: 326759 - RNA, 19 nt, Artificial Sequence
  Description of Artificial Sequence: Synthetic oligonucleotide
  Sense Strand Starting at position 102 of SEQ ID NO: 318414
uaguuaccauguguaauga

SEQ ID NO: 326760 - RNA, 19 nt, Artificial Sequence
  Description of Artificial Sequence: Synthetic oligonucleotide
  Antisense Strand to SEQ ID NO: 326759
ucauuacacaugguaacua

SEQ ID NO: 326761 - RNA, 19 nt, Artificial Sequence
  Description of Artificial Sequence: Synthetic oligonucleotide
  Sense Strand Starting at position 102 of SEQ ID NO: 318484
ucguuugugguauauggaa

SEQ ID NO: 326762 - RNA, 19 nt, Artificial Sequence
  Description of Artificial Sequence: Synthetic oligonucleotide
  Antisense Strand to SEQ ID NO: 326761
uuccauauaccacaaacga

SEQ ID NO: 326763 - RNA, 19 nt, Artificial Sequence
  Description of Artificial Sequence: Synthetic oligonucleotide
  Sense Strand Starting at position 102 of SEQ ID NO: 318486
guuugugguauauggaacu

SEQ ID NO: 326764 - RNA, 19 nt, Artificial Sequence
  Description of Artificial Sequence: Synthetic oligonucleotide
  Antisense Strand to SEQ ID NO: 326763
aguuccauauaccacaaac

SEQ ID NO: 326765 - RNA, 19 nt, Artificial Sequence
  Description of Artificial Sequence: Synthetic oligonucleotide
  Sense Strand Starting at position 102 of SEQ ID NO: 318693
cguggugagccagacauau

SEQ ID NO: 326766 - RNA, 19 nt, Artificial Sequence
  Description of Artificial Sequence: Synthetic oligonucleotide
  Antisense Strand to SEQ ID NO: 326765
auaugucuggcucaccacg

SEQ ID NO: 326767 - RNA, 19 nt, Artificial Sequence
  Description of Artificial Sequence: Synthetic oligonucleotide
  Sense Strand Starting at position 102 of SEQ ID NO: 318767
uacugaguuggugaucauc

SEQ ID NO: 326768 - RNA, 19 nt, Artificial Sequence
  Description of Artificial Sequence: Synthetic oligonucleotide
  Antisense Strand to SEQ ID NO: 326767
gaugaucaccaacucagua

SEQ ID NO: 326769 - RNA, 19 nt, Artificial Sequence
  Description of Artificial Sequence: Synthetic oligonucleotide
  Sense Strand Starting at position 102 of SEQ ID NO: 318770
ugaguuggugaucauccua

SEQ ID NO: 326770 - RNA, 19 nt, Artificial Sequence
  Description of Artificial Sequence: Synthetic oligonucleotide
  Antisense Strand to SEQ ID NO: 326769
uaggaugaucaccaacuca

SEQ ID NO: 326771 - RNA, 19 nt, Artificial Sequence
  Description of Artificial Sequence: Synthetic oligonucleotide
  Sense Strand Starting at position 102 of SEQ ID NO: 318878
gguccuguaacauaucgca

SEQ ID NO: 326772 - RNA, 19 nt, Artificial Sequence
  Description of Artificial Sequence: Synthetic oligonucleotide
  Antisense Strand to SEQ ID NO: 326771
ugcgauauguuacaggacc

SEQ ID NO: 326773 - RNA, 19 nt, Artificial Sequence
  Description of Artificial Sequence: Synthetic oligonucleotide
  Sense Strand Starting at position 102 of SEQ ID NO: 318942
guugccuguguuucuauau

SEQ ID NO: 326774 - RNA, 19 nt, Artificial Sequence
  Description of Artificial Sequence: Synthetic oligonucleotide
  Antisense Strand to SEQ ID NO: 326773
auauagaaacacaggcaac

SEQ ID NO: 326775 - RNA, 19 nt, Artificial Sequence
  Description of Artificial Sequence: Synthetic oligonucleotide
  Sense Strand Starting at position 102 of SEQ ID NO: 318975
gugguacuagacuaggauu

SEQ ID NO: 326776 - RNA, 19 nt, Artificial Sequence
  Description of Artificial Sequence: Synthetic oligonucleotide
  Antisense Strand to SEQ ID NO: 326775
aauccuagucuaguaccac

SEQ ID NO: 326777 - RNA, 19 nt, Artificial Sequence
  Description of Artificial Sequence: Synthetic oligonucleotide
  Sense Strand Starting at position 102 of SEQ ID NO: 319001
cuggacagcuuucuagauu

SEQ ID NO: 326778 - RNA, 19 nt, Artificial Sequence
  Description of Artificial Sequence: Synthetic oligonucleotide
  Antisense Strand to SEQ ID NO: 326777
aaucuagaaagcuguccag

SEQ ID NO: 326779 - RNA, 19 nt, Artificial Sequence
  Description of Artificial Sequence: Synthetic oligonucleotide
  Sense Strand Starting at position 102 of SEQ ID NO: 319002
uggacagcuuucuagauuu

SEQ ID NO: 326780 - RNA, 19 nt, Artificial Sequence
  Description of Artificial Sequence: Synthetic oligonucleotide
  Antisense Strand to SEQ ID NO: 326779
aaaucuagaaagcugucca

SEQ ID NO: 326781 - RNA, 19 nt, Artificial Sequence
  Description of Artificial Sequence: Synthetic oligonucleotide
  Sense Strand Starting at position 102 of SEQ ID NO: 319101
gauuucuagucuuaacgag

SEQ ID NO: 326782 - RNA, 19 nt, Artificial Sequence
  Description of Artificial Sequence: Synthetic oligonucleotide
  Antisense Strand to SEQ ID NO: 326781
cucguuaagacuagaaauc

SEQ ID NO: 326783 - RNA, 19 nt, Artificial Sequence
  Description of Artificial Sequence: Synthetic oligonucleotide
  Sense Strand Starting at position 102 of SEQ ID NO: 319115
acgaguuaacuaugaucca

SEQ ID NO: 326784 - RNA, 19 nt, Artificial Sequence
  Description of Artificial Sequence: Synthetic oligonucleotide
  Antisense Strand to SEQ ID NO: 326783
uggaucauaguuaacucgu

SEQ ID NO: 326785 - RNA, 19 nt, Artificial Sequence
  Description of Artificial Sequence: Synthetic oligonucleotide
  Sense Strand Starting at position 102 of SEQ ID NO: 319197
guugccugugcuucuauau

SEQ ID NO: 326786 - RNA, 19 nt, Artificial Sequence
  Description of Artificial Sequence: Synthetic oligonucleotide
  Antisense Strand to SEQ ID NO: 326785
auauagaagcacaggcaac

SEQ ID NO: 326787 - RNA, 19 nt, Artificial Sequence
  Description of Artificial Sequence: Synthetic oligonucleotide
  Sense Strand Starting at position 103 of SEQ ID NO: 315597
gucauuuguuaaguaucuu

SEQ ID NO: 326788 - RNA, 19 nt, Artificial Sequence
  Description of Artificial Sequence: Synthetic oligonucleotide
  Antisense Strand to SEQ ID NO: 326787
aagauacuuaacaaaugac

SEQ ID NO: 326789 - RNA, 19 nt, Artificial Sequence
  Description of Artificial Sequence: Synthetic oligonucleotide
  Sense Strand Starting at position 103 of SEQ ID NO: 315759
aucagugcuguguaggaaa

SEQ ID NO: 326790 - RNA, 19 nt, Artificial Sequence
  Description of Artificial Sequence: Synthetic oligonucleotide
  Antisense Strand to SEQ ID NO: 326789
uuuccuacacagcacugau

SEQ ID NO: 326791 - RNA, 19 nt, Artificial Sequence
  Description of Artificial Sequence: Synthetic oligonucleotide
  Sense Strand Starting at position 103 of SEQ ID NO: 315813
guaacaugugaaugacgau

SEQ ID NO: 326792 - RNA, 19 nt, Artificial Sequence
  Description of Artificial Sequence: Synthetic oligonucleotide
  Antisense Strand to SEQ ID NO: 326791
aucgucauucacauguuac

SEQ ID NO: 326793 - RNA, 19 nt, Artificial Sequence
  Description of Artificial Sequence: Synthetic oligonucleotide
  Sense Strand Starting at position 103 of SEQ ID NO: 315827
acgaucuaauguguccaaa

SEQ ID NO: 326794 - RNA, 19 nt, Artificial Sequence
  Description of Artificial Sequence: Synthetic oligonucleotide
  Antisense Strand to SEQ ID NO: 326793
uuuggacacauuagaucgu

SEQ ID NO: 326795 - RNA, 19 nt, Artificial Sequence
  Description of Artificial Sequence: Synthetic oligonucleotide
  Sense Strand Starting at position 103 of SEQ ID NO: 315829
gaucuaauguguccaaagu

SEQ ID NO: 326796 - RNA, 19 nt, Artificial Sequence
  Description of Artificial Sequence: Synthetic oligonucleotide
  Antisense Strand to SEQ ID NO: 326795
acuuuggacacauuagauc

SEQ ID NO: 326797 - RNA, 19 nt, Artificial Sequence
  Description of Artificial Sequence: Synthetic oligonucleotide
  Sense Strand Starting at position 103 of SEQ ID NO: 315830
aucuaauguguccaaagug

SEQ ID NO: 326798 - RNA, 19 nt, Artificial Sequence
  Description of Artificial Sequence: Synthetic oligonucleotide
  Antisense Strand to SEQ ID NO: 326797
cacuuuggacacauuagau

SEQ ID NO: 326799 - RNA, 19 nt, Artificial Sequence
  Description of Artificial Sequence: Synthetic oligonucleotide
  Sense Strand Starting at position 103 of SEQ ID NO: 315842
caaaguguacagugaacaa

SEQ ID NO: 326800 - RNA, 19 nt, Artificial Sequence
  Description of Artificial Sequence: Synthetic oligonucleotide
  Antisense Strand to SEQ ID NO: 326799
uuguucacuguacacuuug

SEQ ID NO: 326801 - RNA, 19 nt, Artificial Sequence
  Description of Artificial Sequence: Synthetic oligonucleotide
  Sense Strand Starting at position 103 of SEQ ID NO: 316310
guaagcaaauccuuggaca

SEQ ID NO: 326802 - RNA, 19 nt, Artificial Sequence
  Description of Artificial Sequence: Synthetic oligonucleotide
  Antisense Strand to SEQ ID NO: 326801
uguccaaggauuugcuuac

SEQ ID NO: 326803 - RNA, 19 nt, Artificial Sequence
  Description of Artificial Sequence: Synthetic oligonucleotide
  Sense Strand Starting at position 103 of SEQ ID NO: 317239
acuauuacuuccgcugaga

SEQ ID NO: 326804 - RNA, 19 nt, Artificial Sequence
  Description of Artificial Sequence: Synthetic oligonucleotide
  Antisense Strand to SEQ ID NO: 326803
ucucagcggaaguaauagu

SEQ ID NO: 326805 - RNA, 19 nt, Artificial Sequence
  Description of Artificial Sequence: Synthetic oligonucleotide
  Sense Strand Starting at position 103 of SEQ ID NO: 317241
uauuacuuccgcugagaga

SEQ ID NO: 326806 - RNA, 19 nt, Artificial Sequence
  Description of Artificial Sequence: Synthetic oligonucleotide
  Antisense Strand to SEQ ID NO: 326805
ucucucagcggaaguaaua

SEQ ID NO: 326807 - RNA, 19 nt, Artificial Sequence
  Description of Artificial Sequence: Synthetic oligonucleotide
  Sense Strand Starting at position 103 of SEQ ID NO: 317337
gacaauguuuggguuugga

SEQ ID NO: 326808 - RNA, 19 nt, Artificial Sequence
  Description of Artificial Sequence: Synthetic oligonucleotide
  Antisense Strand to SEQ ID NO: 326807
uccaaacccaaacauuguc

SEQ ID NO: 326809 - RNA, 19 nt, Artificial Sequence
  Description of Artificial Sequence: Synthetic oligonucleotide
  Sense Strand Starting at position 103 of SEQ ID NO: 317428
cgguguccgcccguuuaua

SEQ ID NO: 326810 - RNA, 19 nt, Artificial Sequence
  Description of Artificial Sequence: Synthetic oligonucleotide
  Antisense Strand to SEQ ID NO: 326809
uauaaacgggcggacaccg

SEQ ID NO: 326811 - RNA, 19 nt, Artificial Sequence
  Description of Artificial Sequence: Synthetic oligonucleotide
  Sense Strand Starting at position 103 of SEQ ID NO: 317429
gguguccgcccguuuauau

SEQ ID NO: 326812 - RNA, 19 nt, Artificial Sequence
  Description of Artificial Sequence: Synthetic oligonucleotide
  Antisense Strand to SEQ ID NO: 326811
auauaaacgggcggacacc

SEQ ID NO: 326813 - RNA, 19 nt, Artificial Sequence
  Description of Artificial Sequence: Synthetic oligonucleotide
  Sense Strand Starting at position 103 of SEQ ID NO: 317561
ggcguuuaagcgcucucua

SEQ ID NO: 326814 - RNA, 19 nt, Artificial Sequence
  Description of Artificial Sequence: Synthetic oligonucleotide
  Antisense Strand to SEQ ID NO: 326813
uagagagcgcuuaaacgcc

SEQ ID NO: 326815 - RNA, 19 nt, Artificial Sequence
  Description of Artificial Sequence: Synthetic oligonucleotide
  Sense Strand Starting at position 103 of SEQ ID NO: 317562
gcguuuaagcgcucucuac

SEQ ID NO: 326816 - RNA, 19 nt, Artificial Sequence
  Description of Artificial Sequence: Synthetic oligonucleotide
  Antisense Strand to SEQ ID NO: 326815
guagagagcgcuuaaacgc

SEQ ID NO: 326817 - RNA, 19 nt, Artificial Sequence
  Description of Artificial Sequence: Synthetic oligonucleotide
  Sense Strand Starting at position 103 of SEQ ID NO: 317563
cguuuaagcgcucucuaca

SEQ ID NO: 326818 - RNA, 19 nt, Artificial Sequence
  Description of Artificial Sequence: Synthetic oligonucleotide
  Antisense Strand to SEQ ID NO: 326817
uguagagagcgcuuaaacg

SEQ ID NO: 326819 - RNA, 19 nt, Artificial Sequence
  Description of Artificial Sequence: Synthetic oligonucleotide
  Sense Strand Starting at position 103 of SEQ ID NO: 317814
uuaguuaccauguguaaug

SEQ ID NO: 326820 - RNA, 19 nt, Artificial Sequence
  Description of Artificial Sequence: Synthetic oligonucleotide
  Antisense Strand to SEQ ID NO: 326819
cauuacacaugguaacuaa

SEQ ID NO: 326821 - RNA, 19 nt, Artificial Sequence
  Description of Artificial Sequence: Synthetic oligonucleotide
  Sense Strand Starting at position 103 of SEQ ID NO: 317815
uaguuaccauguguaauga

SEQ ID NO: 326822 - RNA, 19 nt, Artificial Sequence
  Description of Artificial Sequence: Synthetic oligonucleotide
  Antisense Strand to SEQ ID NO: 326821
ucauuacacaugguaacua

SEQ ID NO: 326823 - RNA, 19 nt, Artificial Sequence
  Description of Artificial Sequence: Synthetic oligonucleotide
  Sense Strand Starting at position 103 of SEQ ID NO: 317885
ucguuugugguauauggaa

SEQ ID NO: 326824 - RNA, 19 nt, Artificial Sequence
  Description of Artificial Sequence: Synthetic oligonucleotide
  Antisense Strand to SEQ ID NO: 326823
uuccauauaccacaaacga

SEQ ID NO: 326825 - RNA, 19 nt, Artificial Sequence
  Description of Artificial Sequence: Synthetic oligonucleotide
  Sense Strand Starting at position 103 of SEQ ID NO: 317887
guuugugguauauggaacu

SEQ ID NO: 326826 - RNA, 19 nt, Artificial Sequence
  Description of Artificial Sequence: Synthetic oligonucleotide
  Antisense Strand to SEQ ID NO: 326825
aguuccauauaccacaaac

SEQ ID NO: 326827 - RNA, 19 nt, Artificial Sequence
  Description of Artificial Sequence: Synthetic oligonucleotide
  Sense Strand Starting at position 103 of SEQ ID NO: 318094
cguggugagccagacauau

SEQ ID NO: 326828 - RNA, 19 nt, Artificial Sequence
  Description of Artificial Sequence: Synthetic oligonucleotide
  Antisense Strand to SEQ ID NO: 326827
auaugucuggcucaccacg

SEQ ID NO: 326829 - RNA, 19 nt, Artificial Sequence
  Description of Artificial Sequence: Synthetic oligonucleotide
  Sense Strand Starting at position 103 of SEQ ID NO: 318168
uacugaguuggugaucauc

SEQ ID NO: 326830 - RNA, 19 nt, Artificial Sequence
  Description of Artificial Sequence: Synthetic oligonucleotide
  Antisense Strand to SEQ ID NO: 326829
gaugaucaccaacucagua

SEQ ID NO: 326831 - RNA, 19 nt, Artificial Sequence
  Description of Artificial Sequence: Synthetic oligonucleotide
  Sense Strand Starting at position 103 of SEQ ID NO: 318171
ugaguuggugaucauccua

SEQ ID NO: 326832 - RNA, 19 nt, Artificial Sequence
  Description of Artificial Sequence: Synthetic oligonucleotide
  Antisense Strand to SEQ ID NO: 326831
uaggaugaucaccaacuca

SEQ ID NO: 326833 - RNA, 19 nt, Artificial Sequence
  Description of Artificial Sequence: Synthetic oligonucleotide
  Sense Strand Starting at position 103 of SEQ ID NO: 318279
gguccuguaacauaucgca

SEQ ID NO: 326834 - RNA, 19 nt, Artificial Sequence
  Description of Artificial Sequence: Synthetic oligonucleotide
  Antisense Strand to SEQ ID NO: 326833
ugcgauauguuacaggacc

SEQ ID NO: 326835 - RNA, 19 nt, Artificial Sequence
  Description of Artificial Sequence: Synthetic oligonucleotide
  Sense Strand Starting at position 103 of SEQ ID NO: 318343
guugccuguguuucuauau

SEQ ID NO: 326836 - RNA, 19 nt, Artificial Sequence
  Description of Artificial Sequence: Synthetic oligonucleotide
  Antisense Strand to SEQ ID NO: 326835
auauagaaacacaggcaac

SEQ ID NO: 326837 - RNA, 19 nt, Artificial Sequence
  Description of Artificial Sequence: Synthetic oligonucleotide
  Sense Strand Starting at position 103 of SEQ ID NO: 318376
gugguacuagacuaggauu

SEQ ID NO: 326838 - RNA, 19 nt, Artificial Sequence
  Description of Artificial Sequence: Synthetic oligonucleotide
  Antisense Strand to SEQ ID NO: 326837
aauccuagucuaguaccac

SEQ ID NO: 326839 - RNA, 19 nt, Artificial Sequence
  Description of Artificial Sequence: Synthetic oligonucleotide
  Sense Strand Starting at position 103 of SEQ ID NO: 318402
cuggacagcuuucuagauu

SEQ ID NO: 326840 - RNA, 19 nt, Artificial Sequence
  Description of Artificial Sequence: Synthetic oligonucleotide
  Antisense Strand to SEQ ID NO: 326839
aaucuagaaagcuguccag

SEQ ID NO: 326841 - RNA, 19 nt, Artificial Sequence
  Description of Artificial Sequence: Synthetic oligonucleotide
  Sense Strand Starting at position 103 of SEQ ID NO: 318403
uggacagcuuucuagauuu

SEQ ID NO: 326842 - RNA, 19 nt, Artificial Sequence
  Description of Artificial Sequence: Synthetic oligonucleotide
  Antisense Strand to SEQ ID NO: 326841
aaaucuagaaagcugucca

SEQ ID NO: 326843 - RNA, 19 nt, Artificial Sequence
  Description of Artificial Sequence: Synthetic oligonucleotide
  Sense Strand Starting at position 103 of SEQ ID NO: 318502
gauuucuagucuuaacgag

SEQ ID NO: 326844 - RNA, 19 nt, Artificial Sequence
  Description of Artificial Sequence: Synthetic oligonucleotide
  Antisense Strand to SEQ ID NO: 326843
cucguuaagacuagaaauc

SEQ ID NO: 326845 - RNA, 19 nt, Artificial Sequence
  Description of Artificial Sequence: Synthetic oligonucleotide
  Sense Strand Starting at position 103 of SEQ ID NO: 318516
acgaguuaacuaugaucca

SEQ ID NO: 326846 - RNA, 19 nt, Artificial Sequence
  Description of Artificial Sequence: Synthetic oligonucleotide
  Antisense Strand to SEQ ID NO: 326845
uggaucauaguuaacucgu

SEQ ID NO: 326847 - RNA, 19 nt, Artificial Sequence
  Description of Artificial Sequence: Synthetic oligonucleotide
  Sense Strand Starting at position 103 of SEQ ID NO: 318542
caugcauggucagugauuu

SEQ ID NO: 326848 - RNA, 19 nt, Artificial Sequence
  Description of Artificial Sequence: Synthetic oligonucleotide
  Antisense Strand to SEQ ID NO: 326847
aaaucacugaccaugcaug

SEQ ID NO: 326849 - RNA, 19 nt, Artificial Sequence
  Description of Artificial Sequence: Synthetic oligonucleotide
  Sense Strand Starting at position 103 of SEQ ID NO: 318598
guugccugugcuucuauau

SEQ ID NO: 326850 - RNA, 19 nt, Artificial Sequence
  Description of Artificial Sequence: Synthetic oligonucleotide
  Antisense Strand to SEQ ID NO: 326849
auauagaagcacaggcaac

SEQ ID NO: 326851 - RNA, 19 nt, Artificial Sequence
  Description of Artificial Sequence: Synthetic oligonucleotide
  Sense Strand Starting at position 103 of SEQ ID NO: 318823
aaugacauagccugugauu

SEQ ID NO: 326852 - RNA, 19 nt, Artificial Sequence
  Description of Artificial Sequence: Synthetic oligonucleotide
  Antisense Strand to SEQ ID NO: 326851
aaucacaggcuaugucauu

SEQ ID NO: 326853 - RNA, 19 nt, Artificial Sequence
  Description of Artificial Sequence: Synthetic oligonucleotide
  Sense Strand Starting at position 103 of SEQ ID NO: 318840
uuuguacaaugauugugau

SEQ ID NO: 326854 - RNA, 19 nt, Artificial Sequence
  Description of Artificial Sequence: Synthetic oligonucleotide
  Antisense Strand to SEQ ID NO: 326853
aucacaaucauuguacaaa

SEQ ID NO: 326855 - RNA, 19 nt, Artificial Sequence
  Description of Artificial Sequence: Synthetic oligonucleotide
  Sense Strand Starting at position 103 of SEQ ID NO: 318932
gcaccuaagguaggaaauu

SEQ ID NO: 326856 - RNA, 19 nt, Artificial Sequence
  Description of Artificial Sequence: Synthetic oligonucleotide
  Antisense Strand to SEQ ID NO: 326855
aauuuccuaccuuaggugc

SEQ ID NO: 326857 - RNA, 19 nt, Artificial Sequence
  Description of Artificial Sequence: Synthetic oligonucleotide
  Sense Strand Starting at position 103 of SEQ ID NO: 319015
uugguauugggucacuuua

SEQ ID NO: 326858 - RNA, 19 nt, Artificial Sequence
  Description of Artificial Sequence: Synthetic oligonucleotide
  Antisense Strand to SEQ ID NO: 326857
uaaagugacccaauaccaa

SEQ ID NO: 326859 - RNA, 19 nt, Artificial Sequence
  Description of Artificial Sequence: Synthetic oligonucleotide
  Sense Strand Starting at position 103 of SEQ ID NO: 319022
ugggucacuuuagcugaaa

SEQ ID NO: 326860 - RNA, 19 nt, Artificial Sequence
  Description of Artificial Sequence: Synthetic oligonucleotide
  Antisense Strand to SEQ ID NO: 326859
uuucagcuaaagugaccca

SEQ ID NO: 326861 - RNA, 19 nt, Artificial Sequence
  Description of Artificial Sequence: Synthetic oligonucleotide
  Sense Strand Starting at position 103 of SEQ ID NO: 319025
gucacuuuagcugaaacau

SEQ ID NO: 326862 - RNA, 19 nt, Artificial Sequence
  Description of Artificial Sequence: Synthetic oligonucleotide
  Antisense Strand to SEQ ID NO: 326861
auguuucagcuaaagugac

SEQ ID NO: 326863 - RNA, 19 nt, Artificial Sequence
  Description of Artificial Sequence: Synthetic oligonucleotide
  Sense Strand Starting at position 103 of SEQ ID NO: 319061
ucagaacuaucuguuguau

SEQ ID NO: 326864 - RNA, 19 nt, Artificial Sequence
  Description of Artificial Sequence: Synthetic oligonucleotide
  Antisense Strand to SEQ ID NO: 326863
auacaacagauaguucuga

SEQ ID NO: 326865 - RNA, 19 nt, Artificial Sequence
  Description of Artificial Sequence: Synthetic oligonucleotide
  Sense Strand Starting at position 103 of SEQ ID NO: 319134
uuuauagcuccaugguuua

SEQ ID NO: 326866 - RNA, 19 nt, Artificial Sequence
  Description of Artificial Sequence: Synthetic oligonucleotide
  Antisense Strand to SEQ ID NO: 326865
uaaaccauggagcuauaaa

SEQ ID NO: 326867 - RNA, 19 nt, Artificial Sequence
  Description of Artificial Sequence: Synthetic oligonucleotide
  Sense Strand Starting at position 104 of SEQ ID NO: 315300
uucuaauggucuucugaau

SEQ ID NO: 326868 - RNA, 19 nt, Artificial Sequence
  Description of Artificial Sequence: Synthetic oligonucleotide
  Antisense Strand to SEQ ID NO: 326867
auucagaagaccauuagaa

SEQ ID NO: 326869 - RNA, 19 nt, Artificial Sequence
  Description of Artificial Sequence: Synthetic oligonucleotide
  Sense Strand Starting at position 104 of SEQ ID NO: 315306
uggucuucugaaugcauuu

SEQ ID NO: 326870 - RNA, 19 nt, Artificial Sequence
  Description of Artificial Sequence: Synthetic oligonucleotide
  Antisense Strand to SEQ ID NO: 326869
aaaugcauucagaagacca

SEQ ID NO: 326871 - RNA, 19 nt, Artificial Sequence
  Description of Artificial Sequence: Synthetic oligonucleotide
  Sense Strand Starting at position 104 of SEQ ID NO: 315497
ugaagaagcccgugaacau

SEQ ID NO: 326872 - RNA, 19 nt, Artificial Sequence
  Description of Artificial Sequence: Synthetic oligonucleotide
  Antisense Strand to SEQ ID NO: 326871
auguucacgggcuucuuca

SEQ ID NO: 326873 - RNA, 19 nt, Artificial Sequence
  Description of Artificial Sequence: Synthetic oligonucleotide
  Sense Strand Starting at position 104 of SEQ ID NO: 315498
gaagaagcccgugaacauu

SEQ ID NO: 326874 - RNA, 19 nt, Artificial Sequence
  Description of Artificial Sequence: Synthetic oligonucleotide
  Antisense Strand to SEQ ID NO: 326873
aauguucacgggcuucuuc

SEQ ID NO: 326875 - RNA, 19 nt, Artificial Sequence
  Description of Artificial Sequence: Synthetic oligonucleotide
  Sense Strand Starting at position 104 of SEQ ID NO: 315629
ugacaccuugccuaaguaa

SEQ ID NO: 326876 - RNA, 19 nt, Artificial Sequence
  Description of Artificial Sequence: Synthetic oligonucleotide
  Antisense Strand to SEQ ID NO: 326875
uuacuuaggcaagguguca

SEQ ID NO: 326877 - RNA, 19 nt, Artificial Sequence
  Description of Artificial Sequence: Synthetic oligonucleotide
  Sense Strand Starting at position 104 of SEQ ID NO: 315677
ugaacagagucuguuugaa

SEQ ID NO: 326878 - RNA, 19 nt, Artificial Sequence
  Description of Artificial Sequence: Synthetic oligonucleotide
  Antisense Strand to SEQ ID NO: 326877
uucaaacagacucuguuca

SEQ ID NO: 326879 - RNA, 19 nt, Artificial Sequence
  Description of Artificial Sequence: Synthetic oligonucleotide
  Sense Strand Starting at position 104 of SEQ ID NO: 315679
aacagagucuguuugaauu

SEQ ID NO: 326880 - RNA, 19 nt, Artificial Sequence
  Description of Artificial Sequence: Synthetic oligonucleotide
  Antisense Strand to SEQ ID NO: 326879
aauucaaacagacucuguu

SEQ ID NO: 326881 - RNA, 19 nt, Artificial Sequence
  Description of Artificial Sequence: Synthetic oligonucleotide
  Sense Strand Starting at position 104 of SEQ ID NO: 315713
auuauuaaagcagggcaua

SEQ ID NO: 326882 - RNA, 19 nt, Artificial Sequence
  Description of Artificial Sequence: Synthetic oligonucleotide
  Antisense Strand to SEQ ID NO: 326881
uaugcccugcuuuaauaau

SEQ ID NO: 326883 - RNA, 19 nt, Artificial Sequence
  Description of Artificial Sequence: Synthetic oligonucleotide
  Sense Strand Starting at position 104 of SEQ ID NO: 315861
uuaagugggucaucucaua

SEQ ID NO: 326884 - RNA, 19 nt, Artificial Sequence
  Description of Artificial Sequence: Synthetic oligonucleotide
  Antisense Strand to SEQ ID NO: 326883
uaugagaugacccacuuaa

SEQ ID NO: 326885 - RNA, 19 nt, Artificial Sequence
  Description of Artificial Sequence: Synthetic oligonucleotide
  Sense Strand Starting at position 104 of SEQ ID NO: 315911
ugauaucuccugcauaguu

SEQ ID NO: 326886 - RNA, 19 nt, Artificial Sequence
  Description of Artificial Sequence: Synthetic oligonucleotide
  Antisense Strand to SEQ ID NO: 326885
aacuaugcaggagauauca

SEQ ID NO: 326887 - RNA, 19 nt, Artificial Sequence
  Description of Artificial Sequence: Synthetic oligonucleotide
  Sense Strand Starting at position 104 of SEQ ID NO: 316350
gcuucugaaugaucuuuau

SEQ ID NO: 326888 - RNA, 19 nt, Artificial Sequence
  Description of Artificial Sequence: Synthetic oligonucleotide
  Antisense Strand to SEQ ID NO: 326887
auaaagaucauucagaagc

SEQ ID NO: 326889 - RNA, 19 nt, Artificial Sequence
  Description of Artificial Sequence: Synthetic oligonucleotide
  Sense Strand Starting at position 104 of SEQ ID NO: 316353
ucugaaugaucuuuauagc

SEQ ID NO: 326890 - RNA, 19 nt, Artificial Sequence
  Description of Artificial Sequence: Synthetic oligonucleotide
  Antisense Strand to SEQ ID NO: 326889
gcuauaaagaucauucaga

SEQ ID NO: 326891 - RNA, 19 nt, Artificial Sequence
  Description of Artificial Sequence: Synthetic oligonucleotide
  Sense Strand Starting at position 104 of SEQ ID NO: 316373
uguuaaugaucuguuuaag

SEQ ID NO: 326892 - RNA, 19 nt, Artificial Sequence
  Description of Artificial Sequence: Synthetic oligonucleotide
  Antisense Strand to SEQ ID NO: 326891
cuuaaacagaucauuaaca

SEQ ID NO: 326893 - RNA, 19 nt, Artificial Sequence
  Description of Artificial Sequence: Synthetic oligonucleotide
  Sense Strand Starting at position 104 of SEQ ID NO: 316376
uaaugaucuguuuaagguu

SEQ ID NO: 326894 - RNA, 19 nt, Artificial Sequence
  Description of Artificial Sequence: Synthetic oligonucleotide
  Antisense Strand to SEQ ID NO: 326893
aaccuuaaacagaucauua

SEQ ID NO: 326895 - RNA, 19 nt, Artificial Sequence
  Description of Artificial Sequence: Synthetic oligonucleotide
  Sense Strand Starting at position 104 of SEQ ID NO: 316424
gcaaauucuggcuauguaa

SEQ ID NO: 326896 - RNA, 19 nt, Artificial Sequence
  Description of Artificial Sequence: Synthetic oligonucleotide
  Antisense Strand to SEQ ID NO: 326895
uuacauagccagaauuugc

SEQ ID NO: 326897 - RNA, 19 nt, Artificial Sequence
  Description of Artificial Sequence: Synthetic oligonucleotide
  Sense Strand Starting at position 104 of SEQ ID NO: 316473
acuucuagggucugauacu

SEQ ID NO: 326898 - RNA, 19 nt, Artificial Sequence
  Description of Artificial Sequence: Synthetic oligonucleotide
  Antisense Strand to SEQ ID NO: 326897
aguaucagacccuagaagu

SEQ ID NO: 326899 - RNA, 19 nt, Artificial Sequence
  Description of Artificial Sequence: Synthetic oligonucleotide
  Sense Strand Starting at position 104 of SEQ ID NO: 316486
gauacuuucuuuguugaga

SEQ ID NO: 326900 - RNA, 19 nt, Artificial Sequence
  Description of Artificial Sequence: Synthetic oligonucleotide
  Antisense Strand to SEQ ID NO: 326899
ucucaacaaagaaaguauc

SEQ ID NO: 326901 - RNA, 19 nt, Artificial Sequence
  Description of Artificial Sequence: Synthetic oligonucleotide
  Sense Strand Starting at position 104 of SEQ ID NO: 316487
auacuuucuuuguugagau

SEQ ID NO: 326902 - RNA, 19 nt, Artificial Sequence
  Description of Artificial Sequence: Synthetic oligonucleotide
  Antisense Strand to SEQ ID NO: 326901
aucucaacaaagaaaguau

SEQ ID NO: 326903 - RNA, 19 nt, Artificial Sequence
  Description of Artificial Sequence: Synthetic oligonucleotide
  Sense Strand Starting at position 104 of SEQ ID NO: 316489
acuuucuuuguugagauau

SEQ ID NO: 326904 - RNA, 19 nt, Artificial Sequence
  Description of Artificial Sequence: Synthetic oligonucleotide
  Antisense Strand to SEQ ID NO: 326903
auaucucaacaaagaaagu

SEQ ID NO: 326905 - RNA, 19 nt, Artificial Sequence
  Description of Artificial Sequence: Synthetic oligonucleotide
  Sense Strand Starting at position 104 of SEQ ID NO: 316574
uagaguagcucuuuagaag

SEQ ID NO: 326906 - RNA, 19 nt, Artificial Sequence
  Description of Artificial Sequence: Synthetic oligonucleotide
  Antisense Strand to SEQ ID NO: 326905
cuucuaaagagcuacucua

SEQ ID NO: 326907 - RNA, 19 nt, Artificial Sequence
  Description of Artificial Sequence: Synthetic oligonucleotide
  Sense Strand Starting at position 104 of SEQ ID NO: 316612
auuacagaacuccgcuuaa

SEQ ID NO: 326908 - RNA, 19 nt, Artificial Sequence
  Description of Artificial Sequence: Synthetic oligonucleotide
  Antisense Strand to SEQ ID NO: 326907
uuaagcggaguucuguaau

SEQ ID NO: 326909 - RNA, 19 nt, Artificial Sequence
  Description of Artificial Sequence: Synthetic oligonucleotide
  Sense Strand Starting at position 104 of SEQ ID NO: 316625
gcuuaaucucaggaucuga

SEQ ID NO: 326910 - RNA, 19 nt, Artificial Sequence
  Description of Artificial Sequence: Synthetic oligonucleotide
  Antisense Strand to SEQ ID NO: 326909
ucagauccugagauuaagc

SEQ ID NO: 326911 - RNA, 19 nt, Artificial Sequence
  Description of Artificial Sequence: Synthetic oligonucleotide
  Sense Strand Starting at position 104 of SEQ ID NO: 316633
ucaggaucugaauguucca

SEQ ID NO: 326912 - RNA, 19 nt, Artificial Sequence
  Description of Artificial Sequence: Synthetic oligonucleotide
  Antisense Strand to SEQ ID NO: 326911
uggaacauucagauccuga

SEQ ID NO: 326913 - RNA, 19 nt, Artificial Sequence
  Description of Artificial Sequence: Synthetic oligonucleotide
  Sense Strand Starting at position 104 of SEQ ID NO: 316636
ggaucugaauguuccaagu

SEQ ID NO: 326914 - RNA, 19 nt, Artificial Sequence
  Description of Artificial Sequence: Synthetic oligonucleotide
  Antisense Strand to SEQ ID NO: 326913
acuuggaacauucagaucc

SEQ ID NO: 326915 - RNA, 19 nt, Artificial Sequence
  Description of Artificial Sequence: Synthetic oligonucleotide
  Sense Strand Starting at position 104 of SEQ ID NO: 316673
gccugcuugcuuucugauu

SEQ ID NO: 326916 - RNA, 19 nt, Artificial Sequence
  Description of Artificial Sequence: Synthetic oligonucleotide
  Antisense Strand to SEQ ID NO: 326915
aaucagaaagcaagcaggc

SEQ ID NO: 326917 - RNA, 19 nt, Artificial Sequence
  Description of Artificial Sequence: Synthetic oligonucleotide
  Sense Strand Starting at position 104 of SEQ ID NO: 316716
ggaucugaccuguaccuau

SEQ ID NO: 326918 - RNA, 19 nt, Artificial Sequence
  Description of Artificial Sequence: Synthetic oligonucleotide
  Antisense Strand to SEQ ID NO: 326917
auagguacaggucagaucc

SEQ ID NO: 326919 - RNA, 19 nt, Artificial Sequence
  Description of Artificial Sequence: Synthetic oligonucleotide
  Sense Strand Starting at position 104 of SEQ ID NO: 317227
ugaugcgacuguccuauuu

SEQ ID NO: 326920 - RNA, 19 nt, Artificial Sequence
  Description of Artificial Sequence: Synthetic oligonucleotide
  Antisense Strand to SEQ ID NO: 326919
aaauaggacagucgcauca

SEQ ID NO: 326921 - RNA, 19 nt, Artificial Sequence
  Description of Artificial Sequence: Synthetic oligonucleotide
  Sense Strand Starting at position 104 of SEQ ID NO: 317476
ucuugagaagacuguuaua

SEQ ID NO: 326922 - RNA, 19 nt, Artificial Sequence
  Description of Artificial Sequence: Synthetic oligonucleotide
  Antisense Strand to SEQ ID NO: 326921
uauaacagucuucucaaga

SEQ ID NO: 326923 - RNA, 19 nt, Artificial Sequence
  Description of Artificial Sequence: Synthetic oligonucleotide
  Sense Strand Starting at position 104 of SEQ ID NO: 317647
aacagauucuguucugagu

SEQ ID NO: 326924 - RNA, 19 nt, Artificial Sequence
  Description of Artificial Sequence: Synthetic oligonucleotide
  Antisense Strand to SEQ ID NO: 326923
acucagaacagaaucuguu

SEQ ID NO: 326925 - RNA, 19 nt, Artificial Sequence
  Description of Artificial Sequence: Synthetic oligonucleotide
  Sense Strand Starting at position 104 of SEQ ID NO: 317999
gguuccuuugauggaaaca

SEQ ID NO: 326926 - RNA, 19 nt, Artificial Sequence
  Description of Artificial Sequence: Synthetic oligonucleotide
  Antisense Strand to SEQ ID NO: 326925
uguuuccaucaaaggaacc

SEQ ID NO: 326927 - RNA, 19 nt, Artificial Sequence
  Description of Artificial Sequence: Synthetic oligonucleotide
  Sense Strand Starting at position 104 of SEQ ID NO: 318092
uucuuuaagggugaaagca

SEQ ID NO: 326928 - RNA, 19 nt, Artificial Sequence
  Description of Artificial Sequence: Synthetic oligonucleotide
  Antisense Strand to SEQ ID NO: 326927
ugcuuucacccuuaaagaa

SEQ ID NO: 326929 - RNA, 19 nt, Artificial Sequence
  Description of Artificial Sequence: Synthetic oligonucleotide
  Sense Strand Starting at position 104 of SEQ ID NO: 318336
ggugaucuuccagacucac

SEQ ID NO: 326930 - RNA, 19 nt, Artificial Sequence
  Description of Artificial Sequence: Synthetic oligonucleotide
  Antisense Strand to SEQ ID NO: 326929
gugagucuggaagaucacc

SEQ ID NO: 326931 - RNA, 19 nt, Artificial Sequence
  Description of Artificial Sequence: Synthetic oligonucleotide
  Sense Strand Starting at position 104 of SEQ ID NO: 318366
uggcaauuccaagaaguca

SEQ ID NO: 326932 - RNA, 19 nt, Artificial Sequence
  Description of Artificial Sequence: Synthetic oligonucleotide
  Antisense Strand to SEQ ID NO: 326931
ugacuucuuggaauugcca

SEQ ID NO: 326933 - RNA, 19 nt, Artificial Sequence
  Description of Artificial Sequence: Synthetic oligonucleotide
  Sense Strand Starting at position 104 of SEQ ID NO: 318500
ggagacagcugacucuaau

SEQ ID NO: 326934 - RNA, 19 nt, Artificial Sequence
  Description of Artificial Sequence: Synthetic oligonucleotide
  Antisense Strand to SEQ ID NO: 326933
auuagagucagcugucucc

SEQ ID NO: 326935 - RNA, 19 nt, Artificial Sequence
  Description of Artificial Sequence: Synthetic oligonucleotide
  Sense Strand Starting at position 104 of SEQ ID NO: 318643
acuugaagcccuggaaaga

SEQ ID NO: 326936 - RNA, 19 nt, Artificial Sequence
  Description of Artificial Sequence: Synthetic oligonucleotide
  Antisense Strand to SEQ ID NO: 326935
ucuuuccagggcuucaagu

SEQ ID NO: 326937 - RNA, 19 nt, Artificial Sequence
  Description of Artificial Sequence: Synthetic oligonucleotide
  Sense Strand Starting at position 104 of SEQ ID NO: 318778
ucuuuauugugggcagaag

SEQ ID NO: 326938 - RNA, 19 nt, Artificial Sequence
  Description of Artificial Sequence: Synthetic oligonucleotide
  Antisense Strand to SEQ ID NO: 326937
cuucugcccacaauaaaga

SEQ ID NO: 326939 - RNA, 19 nt, Artificial Sequence
  Description of Artificial Sequence: Synthetic oligonucleotide
  Sense Strand Starting at position 104 of SEQ ID NO: 318907
ggcugaggugagugaugaa

SEQ ID NO: 326940 - RNA, 19 nt, Artificial Sequence
  Description of Artificial Sequence: Synthetic oligonucleotide
  Antisense Strand to SEQ ID NO: 326939
uucaucacucaccucagcc

SEQ ID NO: 326941 - RNA, 19 nt, Artificial Sequence
  Description of Artificial Sequence: Synthetic oligonucleotide
  Sense Strand Starting at position 104 of SEQ ID NO: 318969
guucuauuagauuaagcac

SEQ ID NO: 326942 - RNA, 19 nt, Artificial Sequence
  Description of Artificial Sequence: Synthetic oligonucleotide
  Antisense Strand to SEQ ID NO: 326941
gugcuuaaucuaauagaac

SEQ ID NO: 326943 - RNA, 19 nt, Artificial Sequence
  Description of Artificial Sequence: Synthetic oligonucleotide
  Sense Strand Starting at position 104 of SEQ ID NO: 319136
aguaacauauggguaaacu

SEQ ID NO: 326944 - RNA, 19 nt, Artificial Sequence
  Description of Artificial Sequence: Synthetic oligonucleotide
  Antisense Strand to SEQ ID NO: 326943
aguuuacccauauguuacu

SEQ ID NO: 326945 - RNA, 19 nt, Artificial Sequence
  Description of Artificial Sequence: Synthetic oligonucleotide
  Sense Strand Starting at position 104 of SEQ ID NO: 319215
ggauucuaaccagguaaac

SEQ ID NO: 326946 - RNA, 19 nt, Artificial Sequence
  Description of Artificial Sequence: Synthetic oligonucleotide
  Antisense Strand to SEQ ID NO: 326945
guuuaccugguuagaaucc

SEQ ID NO: 326947 - RNA, 19 nt, Artificial Sequence
  Description of Artificial Sequence: Synthetic oligonucleotide
  Sense Strand Starting at position 105 of SEQ ID NO: 315667
gucauuuguuaaguaucuu

SEQ ID NO: 326948 - RNA, 19 nt, Artificial Sequence
  Description of Artificial Sequence: Synthetic oligonucleotide
  Antisense Strand to SEQ ID NO: 326947
aagauacuuaacaaaugac

SEQ ID NO: 326949 - RNA, 19 nt, Artificial Sequence
  Description of Artificial Sequence: Synthetic oligonucleotide
  Sense Strand Starting at position 105 of SEQ ID NO: 315829
aucagugcuguguaggaaa

SEQ ID NO: 326950 - RNA, 19 nt, Artificial Sequence
  Description of Artificial Sequence: Synthetic oligonucleotide
  Antisense Strand to SEQ ID NO: 326949
uuuccuacacagcacugau

SEQ ID NO: 326951 - RNA, 19 nt, Artificial Sequence
  Description of Artificial Sequence: Synthetic oligonucleotide
  Sense Strand Starting at position 105 of SEQ ID NO: 315883
guaacaugugaaugacgau

SEQ ID NO: 326952 - RNA, 19 nt, Artificial Sequence
  Description of Artificial Sequence: Synthetic oligonucleotide
  Antisense Strand to SEQ ID NO: 326951
aucgucauucacauguuac

SEQ ID NO: 326953 - RNA, 19 nt, Artificial Sequence
  Description of Artificial Sequence: Synthetic oligonucleotide
  Sense Strand Starting at position 105 of SEQ ID NO: 315897
acgaucuaauguguccaaa

SEQ ID NO: 326954 - RNA, 19 nt, Artificial Sequence
  Description of Artificial Sequence: Synthetic oligonucleotide
  Antisense Strand to SEQ ID NO: 326953
uuuggacacauuagaucgu

SEQ ID NO: 326955 - RNA, 19 nt, Artificial Sequence
  Description of Artificial Sequence: Synthetic oligonucleotide
  Sense Strand Starting at position 105 of SEQ ID NO: 315899
gaucuaauguguccaaagu

SEQ ID NO: 326956 - RNA, 19 nt, Artificial Sequence
  Description of Artificial Sequence: Synthetic oligonucleotide
  Antisense Strand to SEQ ID NO: 326955
acuuuggacacauuagauc

SEQ ID NO: 326957 - RNA, 19 nt, Artificial Sequence
  Description of Artificial Sequence: Synthetic oligonucleotide
  Sense Strand Starting at position 105 of SEQ ID NO: 315900
aucuaauguguccaaagug

SEQ ID NO: 326958 - RNA, 19 nt, Artificial Sequence
  Description of Artificial Sequence: Synthetic oligonucleotide
  Antisense Strand to SEQ ID NO: 326957
cacuuuggacacauuagau

SEQ ID NO: 326959 - RNA, 19 nt, Artificial Sequence
  Description of Artificial Sequence: Synthetic oligonucleotide
  Sense Strand Starting at position 105 of SEQ ID NO: 315912
caaaguguacagugaacaa

SEQ ID NO: 326960 - RNA, 19 nt, Artificial Sequence
  Description of Artificial Sequence: Synthetic oligonucleotide
  Antisense Strand to SEQ ID NO: 326959
uuguucacuguacacuuug

SEQ ID NO: 326961 - RNA, 19 nt, Artificial Sequence
  Description of Artificial Sequence: Synthetic oligonucleotide
  Sense Strand Starting at position 105 of SEQ ID NO: 316380
guaagcaaauccuuggaca

SEQ ID NO: 326962 - RNA, 19 nt, Artificial Sequence
  Description of Artificial Sequence: Synthetic oligonucleotide
  Antisense Strand to SEQ ID NO: 326961
uguccaaggauuugcuuac

SEQ ID NO: 326963 - RNA, 19 nt, Artificial Sequence
  Description of Artificial Sequence: Synthetic oligonucleotide
  Sense Strand Starting at position 105 of SEQ ID NO: 317309
acuauuacuuccgcugaga

SEQ ID NO: 326964 - RNA, 19 nt, Artificial Sequence
  Description of Artificial Sequence: Synthetic oligonucleotide
  Antisense Strand to SEQ ID NO: 326963
ucucagcggaaguaauagu

SEQ ID NO: 326965 - RNA, 19 nt, Artificial Sequence
  Description of Artificial Sequence: Synthetic oligonucleotide
  Sense Strand Starting at position 105 of SEQ ID NO: 317311
uauuacuuccgcugagaga

SEQ ID NO: 326966 - RNA, 19 nt, Artificial Sequence
  Description of Artificial Sequence: Synthetic oligonucleotide
  Antisense Strand to SEQ ID NO: 326965
ucucucagcggaaguaaua

SEQ ID NO: 326967 - RNA, 19 nt, Artificial Sequence
  Description of Artificial Sequence: Synthetic oligonucleotide
  Sense Strand Starting at position 105 of SEQ ID NO: 317407
gacaauguuuggguuugga

SEQ ID NO: 326968 - RNA, 19 nt, Artificial Sequence
  Description of Artificial Sequence: Synthetic oligonucleotide
  Antisense Strand to SEQ ID NO: 326967
uccaaacccaaacauuguc

SEQ ID NO: 326969 - RNA, 19 nt, Artificial Sequence
  Description of Artificial Sequence: Synthetic oligonucleotide
  Sense Strand Starting at position 105 of SEQ ID NO: 317498
cgguguccgcccguuuaua

SEQ ID NO: 326970 - RNA, 19 nt, Artificial Sequence
  Description of Artificial Sequence: Synthetic oligonucleotide
  Antisense Strand to SEQ ID NO: 326969
uauaaacgggcggacaccg

SEQ ID NO: 326971 - RNA, 19 nt, Artificial Sequence
  Description of Artificial Sequence: Synthetic oligonucleotide
  Sense Strand Starting at position 105 of SEQ ID NO: 317499
gguguccgcccguuuauau

SEQ ID NO: 326972 - RNA, 19 nt, Artificial Sequence
  Description of Artificial Sequence: Synthetic oligonucleotide
  Antisense Strand to SEQ ID NO: 326971
auauaaacgggcggacacc

SEQ ID NO: 326973 - RNA, 19 nt, Artificial Sequence
  Description of Artificial Sequence: Synthetic oligonucleotide
  Sense Strand Starting at position 105 of SEQ ID NO: 317631
ggcguuuaagcgcucucua

SEQ ID NO: 326974 - RNA, 19 nt, Artificial Sequence
  Description of Artificial Sequence: Synthetic oligonucleotide
  Antisense Strand to SEQ ID NO: 326973
uagagagcgcuuaaacgcc

SEQ ID NO: 326975 - RNA, 19 nt, Artificial Sequence
  Description of Artificial Sequence: Synthetic oligonucleotide
  Sense Strand Starting at position 105 of SEQ ID NO: 317632
gcguuuaagcgcucucuac

SEQ ID NO: 326976 - RNA, 19 nt, Artificial Sequence
  Description of Artificial Sequence: Synthetic oligonucleotide
  Antisense Strand to SEQ ID NO: 326975
guagagagcgcuuaaacgc

SEQ ID NO: 326977 - RNA, 19 nt, Artificial Sequence
  Description of Artificial Sequence: Synthetic oligonucleotide
  Sense Strand Starting at position 105 of SEQ ID NO: 317633
cguuuaagcgcucucuaca

SEQ ID NO: 326978 - RNA, 19 nt, Artificial Sequence
  Description of Artificial Sequence: Synthetic oligonucleotide
  Antisense Strand to SEQ ID NO: 326977
uguagagagcgcuuaaacg

SEQ ID NO: 326979 - RNA, 19 nt, Artificial Sequence
  Description of Artificial Sequence: Synthetic oligonucleotide
  Sense Strand Starting at position 105 of SEQ ID NO: 317884
uuaguuaccauguguaaug

SEQ ID NO: 326980 - RNA, 19 nt, Artificial Sequence
  Description of Artificial Sequence: Synthetic oligonucleotide
  Antisense Strand to SEQ ID NO: 326979
cauuacacaugguaacuaa

SEQ ID NO: 326981 - RNA, 19 nt, Artificial Sequence
  Description of Artificial Sequence: Synthetic oligonucleotide
  Sense Strand Starting at position 105 of SEQ ID NO: 317885
uaguuaccauguguaauga

SEQ ID NO: 326982 - RNA, 19 nt, Artificial Sequence
  Description of Artificial Sequence: Synthetic oligonucleotide
  Antisense Strand to SEQ ID NO: 326981
ucauuacacaugguaacua

SEQ ID NO: 326983 - RNA, 19 nt, Artificial Sequence
  Description of Artificial Sequence: Synthetic oligonucleotide
  Sense Strand Starting at position 105 of SEQ ID NO: 317955
ucguuugugguauauggaa

SEQ ID NO: 326984 - RNA, 19 nt, Artificial Sequence
  Description of Artificial Sequence: Synthetic oligonucleotide
  Antisense Strand to SEQ ID NO: 326983
uuccauauaccacaaacga

SEQ ID NO: 326985 - RNA, 19 nt, Artificial Sequence
  Description of Artificial Sequence: Synthetic oligonucleotide
  Sense Strand Starting at position 105 of SEQ ID NO: 317957
guuugugguauauggaacu

SEQ ID NO: 326986 - RNA, 19 nt, Artificial Sequence
  Description of Artificial Sequence: Synthetic oligonucleotide
  Antisense Strand to SEQ ID NO: 326985
aguuccauauaccacaaac

SEQ ID NO: 326987 - RNA, 19 nt, Artificial Sequence
  Description of Artificial Sequence: Synthetic oligonucleotide
  Sense Strand Starting at position 105 of SEQ ID NO: 318164
cguggugagccagacauau

SEQ ID NO: 326988 - RNA, 19 nt, Artificial Sequence
  Description of Artificial Sequence: Synthetic oligonucleotide
  Antisense Strand to SEQ ID NO: 326987
auaugucuggcucaccacg

SEQ ID NO: 326989 - RNA, 19 nt, Artificial Sequence
  Description of Artificial Sequence: Synthetic oligonucleotide
  Sense Strand Starting at position 105 of SEQ ID NO: 318238
uacugaguuggugaucauc

SEQ ID NO: 326990 - RNA, 19 nt, Artificial Sequence
  Description of Artificial Sequence: Synthetic oligonucleotide
  Antisense Strand to SEQ ID NO: 326989
gaugaucaccaacucagua

SEQ ID NO: 326991 - RNA, 19 nt, Artificial Sequence
  Description of Artificial Sequence: Synthetic oligonucleotide
  Sense Strand Starting at position 105 of SEQ ID NO: 318241
ugaguuggugaucauccua

SEQ ID NO: 326992 - RNA, 19 nt, Artificial Sequence
  Description of Artificial Sequence: Synthetic oligonucleotide
  Antisense Strand to SEQ ID NO: 326991
uaggaugaucaccaacuca

SEQ ID NO: 326993 - RNA, 19 nt, Artificial Sequence
  Description of Artificial Sequence: Synthetic oligonucleotide
  Sense Strand Starting at position 105 of SEQ ID NO: 318349
gguccuguaacauaucgca

SEQ ID NO: 326994 - RNA, 19 nt, Artificial Sequence
  Description of Artificial Sequence: Synthetic oligonucleotide
  Antisense Strand to SEQ ID NO: 326993
ugcgauauguuacaggacc

SEQ ID NO: 326995 - RNA, 19 nt, Artificial Sequence
  Description of Artificial Sequence: Synthetic oligonucleotide
  Sense Strand Starting at position 105 of SEQ ID NO: 318413
guugccuguguuucuauau

SEQ ID NO: 326996 - RNA, 19 nt, Artificial Sequence
  Description of Artificial Sequence: Synthetic oligonucleotide
  Antisense Strand to SEQ ID NO: 326995
auauagaaacacaggcaac

SEQ ID NO: 326997 - RNA, 19 nt, Artificial Sequence
  Description of Artificial Sequence: Synthetic oligonucleotide
  Sense Strand Starting at position 105 of SEQ ID NO: 318446
gugguacuagacuaggauu

SEQ ID NO: 326998 - RNA, 19 nt, Artificial Sequence
  Description of Artificial Sequence: Synthetic oligonucleotide
  Antisense Strand to SEQ ID NO: 326997
aauccuagucuaguaccac

SEQ ID NO: 326999 - RNA, 19 nt, Artificial Sequence
  Description of Artificial Sequence: Synthetic oligonucleotide
  Sense Strand Starting at position 105 of SEQ ID NO: 318472
cuggacagcuuucuagauu

SEQ ID NO: 327000 - RNA, 19 nt, Artificial Sequence
  Description of Artificial Sequence: Synthetic oligonucleotide
  Antisense Strand to SEQ ID NO: 326999
aaucuagaaagcuguccag

SEQ ID NO: 327001 - RNA, 19 nt, Artificial Sequence
  Description of Artificial Sequence: Synthetic oligonucleotide
  Sense Strand Starting at position 105 of SEQ ID NO: 318473
uggacagcuuucuagauuu

SEQ ID NO: 327002 - RNA, 19 nt, Artificial Sequence
  Description of Artificial Sequence: Synthetic oligonucleotide
  Antisense Strand to SEQ ID NO: 327001
aaaucuagaaagcugucca

SEQ ID NO: 327003 - RNA, 19 nt, Artificial Sequence
  Description of Artificial Sequence: Synthetic oligonucleotide
  Sense Strand Starting at position 105 of SEQ ID NO: 318572
gauuucuagucuuaacgag

SEQ ID NO: 327004 - RNA, 19 nt, Artificial Sequence
  Description of Artificial Sequence: Synthetic oligonucleotide
  Antisense Strand to SEQ ID NO: 327003
cucguuaagacuagaaauc

SEQ ID NO: 327005 - RNA, 19 nt, Artificial Sequence
  Description of Artificial Sequence: Synthetic oligonucleotide
  Sense Strand Starting at position 105 of SEQ ID NO: 318586
acgaguuaacuaugaucca

SEQ ID NO: 327006 - RNA, 19 nt, Artificial Sequence
  Description of Artificial Sequence: Synthetic oligonucleotide
  Antisense Strand to SEQ ID NO: 327005
uggaucauaguuaacucgu

SEQ ID NO: 327007 - RNA, 19 nt, Artificial Sequence
  Description of Artificial Sequence: Synthetic oligonucleotide
  Sense Strand Starting at position 105 of SEQ ID NO: 318612
caugcauggucagugauuu

SEQ ID NO: 327008 - RNA, 19 nt, Artificial Sequence
  Description of Artificial Sequence: Synthetic oligonucleotide
  Antisense Strand to SEQ ID NO: 327007
aaaucacugaccaugcaug

SEQ ID NO: 327009 - RNA, 19 nt, Artificial Sequence
  Description of Artificial Sequence: Synthetic oligonucleotide
  Sense Strand Starting at position 105 of SEQ ID NO: 318668
guugccugugcuucuauau

SEQ ID NO: 327010 - RNA, 19 nt, Artificial Sequence
  Description of Artificial Sequence: Synthetic oligonucleotide
  Antisense Strand to SEQ ID NO: 327009
auauagaagcacaggcaac

SEQ ID NO: 327011 - RNA, 19 nt, Artificial Sequence
  Description of Artificial Sequence: Synthetic oligonucleotide
  Sense Strand Starting at position 105 of SEQ ID NO: 318893
aaugacauagccugugauu

SEQ ID NO: 327012 - RNA, 19 nt, Artificial Sequence
  Description of Artificial Sequence: Synthetic oligonucleotide
  Antisense Strand to SEQ ID NO: 327011
aaucacaggcuaugucauu

SEQ ID NO: 327013 - RNA, 19 nt, Artificial Sequence
  Description of Artificial Sequence: Synthetic oligonucleotide
  Sense Strand Starting at position 105 of SEQ ID NO: 318910
uuuguacaaugauugugau

SEQ ID NO: 327014 - RNA, 19 nt, Artificial Sequence
  Description of Artificial Sequence: Synthetic oligonucleotide
  Antisense Strand to SEQ ID NO: 327013
aucacaaucauuguacaaa

SEQ ID NO: 327015 - RNA, 19 nt, Artificial Sequence
  Description of Artificial Sequence: Synthetic oligonucleotide
  Sense Strand Starting at position 105 of SEQ ID NO: 319002
gcaccuaagguaggaaauu

SEQ ID NO: 327016 - RNA, 19 nt, Artificial Sequence
  Description of Artificial Sequence: Synthetic oligonucleotide
  Antisense Strand to SEQ ID NO: 327015
aauuuccuaccuuaggugc

SEQ ID NO: 327017 - RNA, 19 nt, Artificial Sequence
  Description of Artificial Sequence: Synthetic oligonucleotide
  Sense Strand Starting at position 105 of SEQ ID NO: 319085
uugguauugggucacuuua

SEQ ID NO: 327018 - RNA, 19 nt, Artificial Sequence
  Description of Artificial Sequence: Synthetic oligonucleotide
  Antisense Strand to SEQ ID NO: 327017
uaaagugacccaauaccaa

SEQ ID NO: 327019 - RNA, 19 nt, Artificial Sequence
  Description of Artificial Sequence: Synthetic oligonucleotide
  Sense Strand Starting at position 105 of SEQ ID NO: 319092
ugggucacuuuagcugaaa

SEQ ID NO: 327020 - RNA, 19 nt, Artificial Sequence
  Description of Artificial Sequence: Synthetic oligonucleotide
  Antisense Strand to SEQ ID NO: 327019
uuucagcuaaagugaccca

SEQ ID NO: 327021 - RNA, 19 nt, Artificial Sequence
  Description of Artificial Sequence: Synthetic oligonucleotide
  Sense Strand Starting at position 105 of SEQ ID NO: 319095
gucacuuuagcugaaacau

SEQ ID NO: 327022 - RNA, 19 nt, Artificial Sequence
  Description of Artificial Sequence: Synthetic oligonucleotide
  Antisense Strand to SEQ ID NO: 327021
auguuucagcuaaagugac

SEQ ID NO: 327023 - RNA, 19 nt, Artificial Sequence
  Description of Artificial Sequence: Synthetic oligonucleotide
  Sense Strand Starting at position 105 of SEQ ID NO: 319131
ucagaacuaucuguuguau

SEQ ID NO: 327024 - RNA, 19 nt, Artificial Sequence
  Description of Artificial Sequence: Synthetic oligonucleotide
  Antisense Strand to SEQ ID NO: 327023
auacaacagauaguucuga

SEQ ID NO: 327025 - RNA, 19 nt, Artificial Sequence
  Description of Artificial Sequence: Synthetic oligonucleotide
  Sense Strand Starting at position 105 of SEQ ID NO: 319204
uuuauagcuccaugguuua

SEQ ID NO: 327026 - RNA, 19 nt, Artificial Sequence
  Description of Artificial Sequence: Synthetic oligonucleotide
  Antisense Strand to SEQ ID NO: 327025
uaaaccauggagcuauaaa

SEQ ID NO: 327027 - RNA, 19 nt, Artificial Sequence
  Description of Artificial Sequence: Synthetic oligonucleotide
  Sense Strand Starting at position 106 of SEQ ID NO: 315236
gucucuugauggucaagaa

SEQ ID NO: 327028 - RNA, 19 nt, Artificial Sequence
  Description of Artificial Sequence: Synthetic oligonucleotide
  Antisense Strand to SEQ ID NO: 327027
uucuugaccaucaagagac

SEQ ID NO: 327029 - RNA, 19 nt, Artificial Sequence
  Description of Artificial Sequence: Synthetic oligonucleotide
  Sense Strand Starting at position 106 of SEQ ID NO: 315405
uaaugagaaucggcuuuau

SEQ ID NO: 327030 - RNA, 19 nt, Artificial Sequence
  Description of Artificial Sequence: Synthetic oligonucleotide
  Antisense Strand to SEQ ID NO: 327029
auaaagccgauucucauua

SEQ ID NO: 327031 - RNA, 19 nt, Artificial Sequence
  Description of Artificial Sequence: Synthetic oligonucleotide
  Sense Strand Starting at position 106 of SEQ ID NO: 315409
gagaaucggcuuuauuacu

SEQ ID NO: 327032 - RNA, 19 nt, Artificial Sequence
  Description of Artificial Sequence: Synthetic oligonucleotide
  Antisense Strand to SEQ ID NO: 327031
aguaauaaagccgauucuc

SEQ ID NO: 327033 - RNA, 19 nt, Artificial Sequence
  Description of Artificial Sequence: Synthetic oligonucleotide
  Sense Strand Starting at position 106 of SEQ ID NO: 315431
gcucuuccuccugagagau

SEQ ID NO: 327034 - RNA, 19 nt, Artificial Sequence
  Description of Artificial Sequence: Synthetic oligonucleotide
  Antisense Strand to SEQ ID NO: 327033
aucucucaggaggaagagc

SEQ ID NO: 327035 - RNA, 19 nt, Artificial Sequence
  Description of Artificial Sequence: Synthetic oligonucleotide
  Sense Strand Starting at position 106 of SEQ ID NO: 315610
gucucaugugcagaaugga

SEQ ID NO: 327036 - RNA, 19 nt, Artificial Sequence
  Description of Artificial Sequence: Synthetic oligonucleotide
  Antisense Strand to SEQ ID NO: 327035
uccauucugcacaugagac

SEQ ID NO: 327037 - RNA, 19 nt, Artificial Sequence
  Description of Artificial Sequence: Synthetic oligonucleotide
  Sense Strand Starting at position 106 of SEQ ID NO: 316054
gucauuuguuaaguaucuu

SEQ ID NO: 327038 - RNA, 19 nt, Artificial Sequence
  Description of Artificial Sequence: Synthetic oligonucleotide
  Antisense Strand to SEQ ID NO: 327037
aagauacuuaacaaaugac

SEQ ID NO: 327039 - RNA, 19 nt, Artificial Sequence
  Description of Artificial Sequence: Synthetic oligonucleotide
  Sense Strand Starting at position 106 of SEQ ID NO: 316216
aucagugcuguguaggaaa

SEQ ID NO: 327040 - RNA, 19 nt, Artificial Sequence
  Description of Artificial Sequence: Synthetic oligonucleotide
  Antisense Strand to SEQ ID NO: 327039
uuuccuacacagcacugau

SEQ ID NO: 327041 - RNA, 19 nt, Artificial Sequence
  Description of Artificial Sequence: Synthetic oligonucleotide
  Sense Strand Starting at position 106 of SEQ ID NO: 316270
guaacaugugaaugacgau

SEQ ID NO: 327042 - RNA, 19 nt, Artificial Sequence
  Description of Artificial Sequence: Synthetic oligonucleotide
  Antisense Strand to SEQ ID NO: 327041
aucgucauucacauguuac

SEQ ID NO: 327043 - RNA, 19 nt, Artificial Sequence
  Description of Artificial Sequence: Synthetic oligonucleotide
  Sense Strand Starting at position 106 of SEQ ID NO: 316284
acgaucuaauguguccaaa

SEQ ID NO: 327044 - RNA, 19 nt, Artificial Sequence
  Description of Artificial Sequence: Synthetic oligonucleotide
  Antisense Strand to SEQ ID NO: 327043
uuuggacacauuagaucgu

SEQ ID NO: 327045 - RNA, 19 nt, Artificial Sequence
  Description of Artificial Sequence: Synthetic oligonucleotide
  Sense Strand Starting at position 106 of SEQ ID NO: 316286
gaucuaauguguccaaagu

SEQ ID NO: 327046 - RNA, 19 nt, Artificial Sequence
  Description of Artificial Sequence: Synthetic oligonucleotide
  Antisense Strand to SEQ ID NO: 327045
acuuuggacacauuagauc

SEQ ID NO: 327047 - RNA, 19 nt, Artificial Sequence
  Description of Artificial Sequence: Synthetic oligonucleotide
  Sense Strand Starting at position 106 of SEQ ID NO: 316287
aucuaauguguccaaagug

SEQ ID NO: 327048 - RNA, 19 nt, Artificial Sequence
  Description of Artificial Sequence: Synthetic oligonucleotide
  Antisense Strand to SEQ ID NO: 327047
cacuuuggacacauuagau

SEQ ID NO: 327049 - RNA, 19 nt, Artificial Sequence
  Description of Artificial Sequence: Synthetic oligonucleotide
  Sense Strand Starting at position 106 of SEQ ID NO: 316299
caaaguguacagugaacaa

SEQ ID NO: 327050 - RNA, 19 nt, Artificial Sequence
  Description of Artificial Sequence: Synthetic oligonucleotide
  Antisense Strand to SEQ ID NO: 327049
uuguucacuguacacuuug

SEQ ID NO: 327051 - RNA, 19 nt, Artificial Sequence
  Description of Artificial Sequence: Synthetic oligonucleotide
  Sense Strand Starting at position 106 of SEQ ID NO: 316472
auggcuugcuuucuuauaa

SEQ ID NO: 327052 - RNA, 19 nt, Artificial Sequence
  Description of Artificial Sequence: Synthetic oligonucleotide
  Antisense Strand to SEQ ID NO: 327051
uuauaagaaagcaagccau

SEQ ID NO: 327053 - RNA, 19 nt, Artificial Sequence
  Description of Artificial Sequence: Synthetic oligonucleotide
  Sense Strand Starting at position 106 of SEQ ID NO: 316473
uggcuugcuuucuuauaaa

SEQ ID NO: 327054 - RNA, 19 nt, Artificial Sequence
  Description of Artificial Sequence: Synthetic oligonucleotide
  Antisense Strand to SEQ ID NO: 327053
uuuauaagaaagcaagcca

SEQ ID NO: 327055 - RNA, 19 nt, Artificial Sequence
  Description of Artificial Sequence: Synthetic oligonucleotide
  Sense Strand Starting at position 106 of SEQ ID NO: 316767
guaagcaaauccuuggaca

SEQ ID NO: 327056 - RNA, 19 nt, Artificial Sequence
  Description of Artificial Sequence: Synthetic oligonucleotide
  Antisense Strand to SEQ ID NO: 327055
uguccaaggauuugcuuac

SEQ ID NO: 327057 - RNA, 19 nt, Artificial Sequence
  Description of Artificial Sequence: Synthetic oligonucleotide
  Sense Strand Starting at position 106 of SEQ ID NO: 317685
ccagcuuugucacuauuac

SEQ ID NO: 327058 - RNA, 19 nt, Artificial Sequence
  Description of Artificial Sequence: Synthetic oligonucleotide
  Antisense Strand to SEQ ID NO: 327057
guaauagugacaaagcugg

SEQ ID NO: 327059 - RNA, 19 nt, Artificial Sequence
  Description of Artificial Sequence: Synthetic oligonucleotide
  Sense Strand Starting at position 106 of SEQ ID NO: 317696
acuauuacuuccgcugaga

SEQ ID NO: 327060 - RNA, 19 nt, Artificial Sequence
  Description of Artificial Sequence: Synthetic oligonucleotide
  Antisense Strand to SEQ ID NO: 327059
ucucagcggaaguaauagu

SEQ ID NO: 327061 - RNA, 19 nt, Artificial Sequence
  Description of Artificial Sequence: Synthetic oligonucleotide
  Sense Strand Starting at position 106 of SEQ ID NO: 317698
uauuacuuccgcugagaga

SEQ ID NO: 327062 - RNA, 19 nt, Artificial Sequence
  Description of Artificial Sequence: Synthetic oligonucleotide
  Antisense Strand to SEQ ID NO: 327061
ucucucagcggaaguaaua

SEQ ID NO: 327063 - RNA, 19 nt, Artificial Sequence
  Description of Artificial Sequence: Synthetic oligonucleotide
  Sense Strand Starting at position 106 of SEQ ID NO: 317794
gacaauguuuggguuugga

SEQ ID NO: 327064 - RNA, 19 nt, Artificial Sequence
  Description of Artificial Sequence: Synthetic oligonucleotide
  Antisense Strand to SEQ ID NO: 327063
uccaaacccaaacauuguc

SEQ ID NO: 327065 - RNA, 19 nt, Artificial Sequence
  Description of Artificial Sequence: Synthetic oligonucleotide
  Sense Strand Starting at position 106 of SEQ ID NO: 317885
cgguguccgcccguuuaua

SEQ ID NO: 327066 - RNA, 19 nt, Artificial Sequence
  Description of Artificial Sequence: Synthetic oligonucleotide
  Antisense Strand to SEQ ID NO: 327065
uauaaacgggcggacaccg

SEQ ID NO: 327067 - RNA, 19 nt, Artificial Sequence
  Description of Artificial Sequence: Synthetic oligonucleotide
  Sense Strand Starting at position 106 of SEQ ID NO: 317886
gguguccgcccguuuauau

SEQ ID NO: 327068 - RNA, 19 nt, Artificial Sequence
  Description of Artificial Sequence: Synthetic oligonucleotide
  Antisense Strand to SEQ ID NO: 327067
auauaaacgggcggacacc

SEQ ID NO: 327069 - RNA, 19 nt, Artificial Sequence
  Description of Artificial Sequence: Synthetic oligonucleotide
  Sense Strand Starting at position 106 of SEQ ID NO: 318018
ggcguuuaagcgcucucua

SEQ ID NO: 327070 - RNA, 19 nt, Artificial Sequence
  Description of Artificial Sequence: Synthetic oligonucleotide
  Antisense Strand to SEQ ID NO: 327069
uagagagcgcuuaaacgcc

SEQ ID NO: 327071 - RNA, 19 nt, Artificial Sequence
  Description of Artificial Sequence: Synthetic oligonucleotide
  Sense Strand Starting at position 106 of SEQ ID NO: 318019
gcguuuaagcgcucucuac

SEQ ID NO: 327072 - RNA, 19 nt, Artificial Sequence
  Description of Artificial Sequence: Synthetic oligonucleotide
  Antisense Strand to SEQ ID NO: 327071
guagagagcgcuuaaacgc

SEQ ID NO: 327073 - RNA, 19 nt, Artificial Sequence
  Description of Artificial Sequence: Synthetic oligonucleotide
  Sense Strand Starting at position 106 of SEQ ID NO: 318020
cguuuaagcgcucucuaca

SEQ ID NO: 327074 - RNA, 19 nt, Artificial Sequence
  Description of Artificial Sequence: Synthetic oligonucleotide
  Antisense Strand to SEQ ID NO: 327073
uguagagagcgcuuaaacg

SEQ ID NO: 327075 - RNA, 19 nt, Artificial Sequence
  Description of Artificial Sequence: Synthetic oligonucleotide
  Sense Strand Starting at position 106 of SEQ ID NO: 318271
uuaguuaccauguguaaug

SEQ ID NO: 327076 - RNA, 19 nt, Artificial Sequence
  Description of Artificial Sequence: Synthetic oligonucleotide
  Antisense Strand to SEQ ID NO: 327075
cauuacacaugguaacuaa

SEQ ID NO: 327077 - RNA, 19 nt, Artificial Sequence
  Description of Artificial Sequence: Synthetic oligonucleotide
  Sense Strand Starting at position 106 of SEQ ID NO: 318272
uaguuaccauguguaauga

SEQ ID NO: 327078 - RNA, 19 nt, Artificial Sequence
  Description of Artificial Sequence: Synthetic oligonucleotide
  Antisense Strand to SEQ ID NO: 327077
ucauuacacaugguaacua

SEQ ID NO: 327079 - RNA, 19 nt, Artificial Sequence
  Description of Artificial Sequence: Synthetic oligonucleotide
  Sense Strand Starting at position 106 of SEQ ID NO: 318342
ucguuugugguauauggaa

SEQ ID NO: 327080 - RNA, 19 nt, Artificial Sequence
  Description of Artificial Sequence: Synthetic oligonucleotide
  Antisense Strand to SEQ ID NO: 327079
uuccauauaccacaaacga

SEQ ID NO: 327081 - RNA, 19 nt, Artificial Sequence
  Description of Artificial Sequence: Synthetic oligonucleotide
  Sense Strand Starting at position 106 of SEQ ID NO: 318344
guuugugguauauggaacu

SEQ ID NO: 327082 - RNA, 19 nt, Artificial Sequence
  Description of Artificial Sequence: Synthetic oligonucleotide
  Antisense Strand to SEQ ID NO: 327081
aguuccauauaccacaaac

SEQ ID NO: 327083 - RNA, 19 nt, Artificial Sequence
  Description of Artificial Sequence: Synthetic oligonucleotide
  Sense Strand Starting at position 106 of SEQ ID NO: 318551
cguggugagccagacauau

SEQ ID NO: 327084 - RNA, 19 nt, Artificial Sequence
  Description of Artificial Sequence: Synthetic oligonucleotide
  Antisense Strand to SEQ ID NO: 327083
auaugucuggcucaccacg

SEQ ID NO: 327085 - RNA, 19 nt, Artificial Sequence
  Description of Artificial Sequence: Synthetic oligonucleotide
  Sense Strand Starting at position 106 of SEQ ID NO: 318625
uacugaguuggugaucauc

SEQ ID NO: 327086 - RNA, 19 nt, Artificial Sequence
  Description of Artificial Sequence: Synthetic oligonucleotide
  Antisense Strand to SEQ ID NO: 327085
gaugaucaccaacucagua

SEQ ID NO: 327087 - RNA, 19 nt, Artificial Sequence
  Description of Artificial Sequence: Synthetic oligonucleotide
  Sense Strand Starting at position 106 of SEQ ID NO: 318628
ugaguuggugaucauccua

SEQ ID NO: 327088 - RNA, 19 nt, Artificial Sequence
  Description of Artificial Sequence: Synthetic oligonucleotide
  Antisense Strand to SEQ ID NO: 327087
uaggaugaucaccaacuca

SEQ ID NO: 327089 - RNA, 19 nt, Artificial Sequence
  Description of Artificial Sequence: Synthetic oligonucleotide
  Sense Strand Starting at position 106 of SEQ ID NO: 318736
gguccuguaacauaucgca

SEQ ID NO: 327090 - RNA, 19 nt, Artificial Sequence
  Description of Artificial Sequence: Synthetic oligonucleotide
  Antisense Strand to SEQ ID NO: 327089
ugcgauauguuacaggacc

SEQ ID NO: 327091 - RNA, 19 nt, Artificial Sequence
  Description of Artificial Sequence: Synthetic oligonucleotide
  Sense Strand Starting at position 106 of SEQ ID NO: 318800
guugccuguguuucuauau

SEQ ID NO: 327092 - RNA, 19 nt, Artificial Sequence
  Description of Artificial Sequence: Synthetic oligonucleotide
  Antisense Strand to SEQ ID NO: 327091
auauagaaacacaggcaac

SEQ ID NO: 327093 - RNA, 19 nt, Artificial Sequence
  Description of Artificial Sequence: Synthetic oligonucleotide
  Sense Strand Starting at position 106 of SEQ ID NO: 318833
gugguacuagacuaggauu

SEQ ID NO: 327094 - RNA, 19 nt, Artificial Sequence
  Description of Artificial Sequence: Synthetic oligonucleotide
  Antisense Strand to SEQ ID NO: 327093
aauccuagucuaguaccac

SEQ ID NO: 327095 - RNA, 19 nt, Artificial Sequence
  Description of Artificial Sequence: Synthetic oligonucleotide
  Sense Strand Starting at position 106 of SEQ ID NO: 318859
cuggacagcuuucuagauu

SEQ ID NO: 327096 - RNA, 19 nt, Artificial Sequence
  Description of Artificial Sequence: Synthetic oligonucleotide
  Antisense Strand to SEQ ID NO: 327095
aaucuagaaagcuguccag

SEQ ID NO: 327097 - RNA, 19 nt, Artificial Sequence
  Description of Artificial Sequence: Synthetic oligonucleotide
  Sense Strand Starting at position 106 of SEQ ID NO: 318860
uggacagcuuucuagauuu

SEQ ID NO: 327098 - RNA, 19 nt, Artificial Sequence
  Description of Artificial Sequence: Synthetic oligonucleotide
  Antisense Strand to SEQ ID NO: 327097
aaaucuagaaagcugucca

SEQ ID NO: 327099 - RNA, 19 nt, Artificial Sequence
  Description of Artificial Sequence: Synthetic oligonucleotide
  Sense Strand Starting at position 106 of SEQ ID NO: 318959
gauuucuagucuuaacgag

SEQ ID NO: 327100 - RNA, 19 nt, Artificial Sequence
  Description of Artificial Sequence: Synthetic oligonucleotide
  Antisense Strand to SEQ ID NO: 327099
cucguuaagacuagaaauc

SEQ ID NO: 327101 - RNA, 19 nt, Artificial Sequence
  Description of Artificial Sequence: Synthetic oligonucleotide
  Sense Strand Starting at position 106 of SEQ ID NO: 318973
acgaguuaacuaugaucca

SEQ ID NO: 327102 - RNA, 19 nt, Artificial Sequence
  Description of Artificial Sequence: Synthetic oligonucleotide
  Antisense Strand to SEQ ID NO: 327101
uggaucauaguuaacucgu

SEQ ID NO: 327103 - RNA, 19 nt, Artificial Sequence
  Description of Artificial Sequence: Synthetic oligonucleotide
  Sense Strand Starting at position 106 of SEQ ID NO: 319055
guugccugugcuucuauau

SEQ ID NO: 327104 - RNA, 19 nt, Artificial Sequence
  Description of Artificial Sequence: Synthetic oligonucleotide
  Antisense Strand to SEQ ID NO: 327103
auauagaagcacaggcaac

SEQ ID NO: 327105 - RNA, 19 nt, Artificial Sequence
  Description of Artificial Sequence: Synthetic oligonucleotide
  Sense Strand Starting at position 106 of SEQ ID NO: 319209
gauuucuagucuuaggagu

SEQ ID NO: 327106 - RNA, 19 nt, Artificial Sequence
  Description of Artificial Sequence: Synthetic oligonucleotide
  Antisense Strand to SEQ ID NO: 327105
acuccuaagacuagaaauc

SEQ ID NO: 327107 - RNA, 19 nt, Artificial Sequence
  Description of Artificial Sequence: Synthetic oligonucleotide
  Sense Strand Starting at position 107 of SEQ ID NO: 315264
aaggaauucuccuuacgug

SEQ ID NO: 327108 - RNA, 19 nt, Artificial Sequence
  Description of Artificial Sequence: Synthetic oligonucleotide
  Antisense Strand to SEQ ID NO: 327107
cacguaaggagaauuccuu

SEQ ID NO: 327109 - RNA, 19 nt, Artificial Sequence
  Description of Artificial Sequence: Synthetic oligonucleotide
  Sense Strand Starting at position 107 of SEQ ID NO: 315291
ucaccuggucacugaagua

SEQ ID NO: 327110 - RNA, 19 nt, Artificial Sequence
  Description of Artificial Sequence: Synthetic oligonucleotide
  Antisense Strand to SEQ ID NO: 327109
uacuucagugaccagguga

SEQ ID NO: 327111 - RNA, 19 nt, Artificial Sequence
  Description of Artificial Sequence: Synthetic oligonucleotide
  Sense Strand Starting at position 107 of SEQ ID NO: 315432
auuagucuauuguccagua

SEQ ID NO: 327112 - RNA, 19 nt, Artificial Sequence
  Description of Artificial Sequence: Synthetic oligonucleotide
  Antisense Strand to SEQ ID NO: 327111
uacuggacaauagacuaau

SEQ ID NO: 327113 - RNA, 19 nt, Artificial Sequence
  Description of Artificial Sequence: Synthetic oligonucleotide
  Sense Strand Starting at position 107 of SEQ ID NO: 315433
uuagucuauuguccaguau

SEQ ID NO: 327114 - RNA, 19 nt, Artificial Sequence
  Description of Artificial Sequence: Synthetic oligonucleotide
  Antisense Strand to SEQ ID NO: 327113
auacuggacaauagacuaa

SEQ ID NO: 327115 - RNA, 19 nt, Artificial Sequence
  Description of Artificial Sequence: Synthetic oligonucleotide
  Sense Strand Starting at position 107 of SEQ ID NO: 315437
ucuauuguccaguaugggu

SEQ ID NO: 327116 - RNA, 19 nt, Artificial Sequence
  Description of Artificial Sequence: Synthetic oligonucleotide
  Antisense Strand to SEQ ID NO: 327115
acccauacuggacaauaga

SEQ ID NO: 327117 - RNA, 19 nt, Artificial Sequence
  Description of Artificial Sequence: Synthetic oligonucleotide
  Sense Strand Starting at position 107 of SEQ ID NO: 315450
augggucguaaguacgaaa

SEQ ID NO: 327118 - RNA, 19 nt, Artificial Sequence
  Description of Artificial Sequence: Synthetic oligonucleotide
  Antisense Strand to SEQ ID NO: 327117
uuucguacuuacgacccau

SEQ ID NO: 327119 - RNA, 19 nt, Artificial Sequence
  Description of Artificial Sequence: Synthetic oligonucleotide
  Sense Strand Starting at position 107 of SEQ ID NO: 315457
guaaguacgaaaugcuaaa

SEQ ID NO: 327120 - RNA, 19 nt, Artificial Sequence
  Description of Artificial Sequence: Synthetic oligonucleotide
  Antisense Strand to SEQ ID NO: 327119
uuuagcauuucguacuuac

SEQ ID NO: 327121 - RNA, 19 nt, Artificial Sequence
  Description of Artificial Sequence: Synthetic oligonucleotide
  Sense Strand Starting at position 107 of SEQ ID NO: 315521
aagcaacaucuccgagguu

SEQ ID NO: 327122 - RNA, 19 nt, Artificial Sequence
  Description of Artificial Sequence: Synthetic oligonucleotide
  Antisense Strand to SEQ ID NO: 327121
aaccucggagauguugcuu

SEQ ID NO: 327123 - RNA, 19 nt, Artificial Sequence
  Description of Artificial Sequence: Synthetic oligonucleotide
  Sense Strand Starting at position 107 of SEQ ID NO: 315524
caacaucuccgagguuaug

SEQ ID NO: 327124 - RNA, 19 nt, Artificial Sequence
  Description of Artificial Sequence: Synthetic oligonucleotide
  Antisense Strand to SEQ ID NO: 327123
cauaaccucggagauguug

SEQ ID NO: 327125 - RNA, 19 nt, Artificial Sequence
  Description of Artificial Sequence: Synthetic oligonucleotide
  Sense Strand Starting at position 107 of SEQ ID NO: 315560
ucaauaagcuagguuaugu

SEQ ID NO: 327126 - RNA, 19 nt, Artificial Sequence
  Description of Artificial Sequence: Synthetic oligonucleotide
  Antisense Strand to SEQ ID NO: 327125
acauaaccuagcuuauuga

SEQ ID NO: 327127 - RNA, 19 nt, Artificial Sequence
  Description of Artificial Sequence: Synthetic oligonucleotide
  Sense Strand Starting at position 107 of SEQ ID NO: 315657
uaagaccguuuauuguaua

SEQ ID NO: 327128 - RNA, 19 nt, Artificial Sequence
  Description of Artificial Sequence: Synthetic oligonucleotide
  Antisense Strand to SEQ ID NO: 327127
uauacaauaaacggucuua

SEQ ID NO: 327129 - RNA, 19 nt, Artificial Sequence
  Description of Artificial Sequence: Synthetic oligonucleotide
  Sense Strand Starting at position 107 of SEQ ID NO: 315662
ccguuuauuguauagaauu

SEQ ID NO: 327130 - RNA, 19 nt, Artificial Sequence
  Description of Artificial Sequence: Synthetic oligonucleotide
  Antisense Strand to SEQ ID NO: 327129
aauucuauacaauaaacgg

SEQ ID NO: 327131 - RNA, 19 nt, Artificial Sequence
  Description of Artificial Sequence: Synthetic oligonucleotide
  Sense Strand Starting at position 107 of SEQ ID NO: 315852
uuuguaauauucguaagac

SEQ ID NO: 327132 - RNA, 19 nt, Artificial Sequence
  Description of Artificial Sequence: Synthetic oligonucleotide
  Antisense Strand to SEQ ID NO: 327131
gucuuacgaauauuacaaa

SEQ ID NO: 327133 - RNA, 19 nt, Artificial Sequence
  Description of Artificial Sequence: Synthetic oligonucleotide
  Sense Strand Starting at position 107 of SEQ ID NO: 315899
cugaguuugcaguauaaau

SEQ ID NO: 327134 - RNA, 19 nt, Artificial Sequence
  Description of Artificial Sequence: Synthetic oligonucleotide
  Antisense Strand to SEQ ID NO: 327133
auuuauacugcaaacucag

SEQ ID NO: 327135 - RNA, 19 nt, Artificial Sequence
  Description of Artificial Sequence: Synthetic oligonucleotide
  Sense Strand Starting at position 107 of SEQ ID NO: 315901
gaguuugcaguauaaauaa

SEQ ID NO: 327136 - RNA, 19 nt, Artificial Sequence
  Description of Artificial Sequence: Synthetic oligonucleotide
  Antisense Strand to SEQ ID NO: 327135
uuauuuauacugcaaacuc

SEQ ID NO: 327137 - RNA, 19 nt, Artificial Sequence
  Description of Artificial Sequence: Synthetic oligonucleotide
  Sense Strand Starting at position 107 of SEQ ID NO: 316011
gaguacuuggguuggacaa

SEQ ID NO: 327138 - RNA, 19 nt, Artificial Sequence
  Description of Artificial Sequence: Synthetic oligonucleotide
  Antisense Strand to SEQ ID NO: 327137
uuguccaacccaaguacuc

SEQ ID NO: 327139 - RNA, 19 nt, Artificial Sequence
  Description of Artificial Sequence: Synthetic oligonucleotide
  Sense Strand Starting at position 107 of SEQ ID NO: 316184
auagauugggagugccaau

SEQ ID NO: 327140 - RNA, 19 nt, Artificial Sequence
  Description of Artificial Sequence: Synthetic oligonucleotide
  Antisense Strand to SEQ ID NO: 327139
auuggcacucccaaucuau

SEQ ID NO: 327141 - RNA, 19 nt, Artificial Sequence
  Description of Artificial Sequence: Synthetic oligonucleotide
  Sense Strand Starting at position 107 of SEQ ID NO: 316271
acaucucgacuugauucua

SEQ ID NO: 327142 - RNA, 19 nt, Artificial Sequence
  Description of Artificial Sequence: Synthetic oligonucleotide
  Antisense Strand to SEQ ID NO: 327141
uagaaucaagucgagaugu

SEQ ID NO: 327143 - RNA, 19 nt, Artificial Sequence
  Description of Artificial Sequence: Synthetic oligonucleotide
  Sense Strand Starting at position 107 of SEQ ID NO: 316347
uuauuucgguuucagggaa

SEQ ID NO: 327144 - RNA, 19 nt, Artificial Sequence
  Description of Artificial Sequence: Synthetic oligonucleotide
  Antisense Strand to SEQ ID NO: 327143
uucccugaaaccgaaauaa

SEQ ID NO: 327145 - RNA, 19 nt, Artificial Sequence
  Description of Artificial Sequence: Synthetic oligonucleotide
  Sense Strand Starting at position 107 of SEQ ID NO: 316503
cuguccucucugcagagaa

SEQ ID NO: 327146 - RNA, 19 nt, Artificial Sequence
  Description of Artificial Sequence: Synthetic oligonucleotide
  Antisense Strand to SEQ ID NO: 327145
uucucugcagagaggacag

SEQ ID NO: 327147 - RNA, 19 nt, Artificial Sequence
  Description of Artificial Sequence: Synthetic oligonucleotide
  Sense Strand Starting at position 107 of SEQ ID NO: 316505
guccucucugcagagaaga

SEQ ID NO: 327148 - RNA, 19 nt, Artificial Sequence
  Description of Artificial Sequence: Synthetic oligonucleotide
  Antisense Strand to SEQ ID NO: 327147
ucuucucugcagagaggac

SEQ ID NO: 327149 - RNA, 19 nt, Artificial Sequence
  Description of Artificial Sequence: Synthetic oligonucleotide
  Sense Strand Starting at position 107 of SEQ ID NO: 316559
auccgaagcacgugaacau

SEQ ID NO: 327150 - RNA, 19 nt, Artificial Sequence
  Description of Artificial Sequence: Synthetic oligonucleotide
  Antisense Strand to SEQ ID NO: 327149
auguucacgugcuucggau

SEQ ID NO: 327151 - RNA, 19 nt, Artificial Sequence
  Description of Artificial Sequence: Synthetic oligonucleotide
  Sense Strand Starting at position 107 of SEQ ID NO: 316583
gaaccuucccugcagguau

SEQ ID NO: 327152 - RNA, 19 nt, Artificial Sequence
  Description of Artificial Sequence: Synthetic oligonucleotide
  Antisense Strand to SEQ ID NO: 327151
auaccugcagggaagguuc

SEQ ID NO: 327153 - RNA, 19 nt, Artificial Sequence
  Description of Artificial Sequence: Synthetic oligonucleotide
  Sense Strand Starting at position 107 of SEQ ID NO: 316666
cagugagggccguaucagu

SEQ ID NO: 327154 - RNA, 19 nt, Artificial Sequence
  Description of Artificial Sequence: Synthetic oligonucleotide
  Antisense Strand to SEQ ID NO: 327153
acugauacggcccucacug

SEQ ID NO: 327155 - RNA, 19 nt, Artificial Sequence
  Description of Artificial Sequence: Synthetic oligonucleotide
  Sense Strand Starting at position 107 of SEQ ID NO: 316782
ugaggaccuuugccaaaga

SEQ ID NO: 327156 - RNA, 19 nt, Artificial Sequence
  Description of Artificial Sequence: Synthetic oligonucleotide
  Antisense Strand to SEQ ID NO: 327155
ucuuuggcaaagguccuca

SEQ ID NO: 327157 - RNA, 19 nt, Artificial Sequence
  Description of Artificial Sequence: Synthetic oligonucleotide
  Sense Strand Starting at position 107 of SEQ ID NO: 316793
gccaaagaaugggcuuuaa

SEQ ID NO: 327158 - RNA, 19 nt, Artificial Sequence
  Description of Artificial Sequence: Synthetic oligonucleotide
  Antisense Strand to SEQ ID NO: 327157
uuaaagcccauucuuuggc

SEQ ID NO: 327159 - RNA, 19 nt, Artificial Sequence
  Description of Artificial Sequence: Synthetic oligonucleotide
  Sense Strand Starting at position 107 of SEQ ID NO: 316818
ggaccuaaugucuacugca

SEQ ID NO: 327160 - RNA, 19 nt, Artificial Sequence
  Description of Artificial Sequence: Synthetic oligonucleotide
  Antisense Strand to SEQ ID NO: 327159
ugcaguagacauuaggucc

SEQ ID NO: 327161 - RNA, 19 nt, Artificial Sequence
  Description of Artificial Sequence: Synthetic oligonucleotide
  Sense Strand Starting at position 107 of SEQ ID NO: 316830
uacugcagacccugugaaa

SEQ ID NO: 327162 - RNA, 19 nt, Artificial Sequence
  Description of Artificial Sequence: Synthetic oligonucleotide
  Antisense Strand to SEQ ID NO: 327161
uuucacagggucugcagua

SEQ ID NO: 327163 - RNA, 19 nt, Artificial Sequence
  Description of Artificial Sequence: Synthetic oligonucleotide
  Sense Strand Starting at position 107 of SEQ ID NO: 316841
cugugaaauggcugaaaca

SEQ ID NO: 327164 - RNA, 19 nt, Artificial Sequence
  Description of Artificial Sequence: Synthetic oligonucleotide
  Antisense Strand to SEQ ID NO: 327163
uguuucagccauuucacag

SEQ ID NO: 327165 - RNA, 19 nt, Artificial Sequence
  Description of Artificial Sequence: Synthetic oligonucleotide
  Sense Strand Starting at position 107 of SEQ ID NO: 317381
ucacaaagaguauguuaua

SEQ ID NO: 327166 - RNA, 19 nt, Artificial Sequence
  Description of Artificial Sequence: Synthetic oligonucleotide
  Antisense Strand to SEQ ID NO: 327165
uauaacauacucuuuguga

SEQ ID NO: 327167 - RNA, 19 nt, Artificial Sequence
  Description of Artificial Sequence: Synthetic oligonucleotide
  Sense Strand Starting at position 107 of SEQ ID NO: 317544
gggccaaucacgugaucuu

SEQ ID NO: 327168 - RNA, 19 nt, Artificial Sequence
  Description of Artificial Sequence: Synthetic oligonucleotide
  Antisense Strand to SEQ ID NO: 327167
aagaucacgugauuggccc

SEQ ID NO: 327169 - RNA, 19 nt, Artificial Sequence
  Description of Artificial Sequence: Synthetic oligonucleotide
  Sense Strand Starting at position 107 of SEQ ID NO: 317545
ggccaaucacgugaucuua

SEQ ID NO: 327170 - RNA, 19 nt, Artificial Sequence
  Description of Artificial Sequence: Synthetic oligonucleotide
  Antisense Strand to SEQ ID NO: 327169
uaagaucacgugauuggcc

SEQ ID NO: 327171 - RNA, 19 nt, Artificial Sequence
  Description of Artificial Sequence: Synthetic oligonucleotide
  Sense Strand Starting at position 107 of SEQ ID NO: 317547
ccaaucacgugaucuuaaa

SEQ ID NO: 327172 - RNA, 19 nt, Artificial Sequence
  Description of Artificial Sequence: Synthetic oligonucleotide
  Antisense Strand to SEQ ID NO: 327171
uuuaagaucacgugauugg

SEQ ID NO: 327173 - RNA, 19 nt, Artificial Sequence
  Description of Artificial Sequence: Synthetic oligonucleotide
  Sense Strand Starting at position 107 of SEQ ID NO: 317602
ccgauuguuaacuacguuu

SEQ ID NO: 327174 - RNA, 19 nt, Artificial Sequence
  Description of Artificial Sequence: Synthetic oligonucleotide
  Antisense Strand to SEQ ID NO: 327173
aaacguaguuaacaaucgg

SEQ ID NO: 327175 - RNA, 19 nt, Artificial Sequence
  Description of Artificial Sequence: Synthetic oligonucleotide
  Sense Strand Starting at position 107 of SEQ ID NO: 317767
cuaucuugcggauauggga

SEQ ID NO: 327176 - RNA, 19 nt, Artificial Sequence
  Description of Artificial Sequence: Synthetic oligonucleotide
  Antisense Strand to SEQ ID NO: 327175
ucccauauccgcaagauag

SEQ ID NO: 327177 - RNA, 19 nt, Artificial Sequence
  Description of Artificial Sequence: Synthetic oligonucleotide
  Sense Strand Starting at position 107 of SEQ ID NO: 318918
ggaaguauaggguggauca

SEQ ID NO: 327178 - RNA, 19 nt, Artificial Sequence
  Description of Artificial Sequence: Synthetic oligonucleotide
  Antisense Strand to SEQ ID NO: 327177
ugauccacccuauacuucc

SEQ ID NO: 327179 - RNA, 19 nt, Artificial Sequence
  Description of Artificial Sequence: Synthetic oligonucleotide
  Sense Strand Starting at position 107 of SEQ ID NO: 319054
accguuugccucuuacgua

SEQ ID NO: 327180 - RNA, 19 nt, Artificial Sequence
  Description of Artificial Sequence: Synthetic oligonucleotide
  Antisense Strand to SEQ ID NO: 327179
uacguaagaggcaaacggu

SEQ ID NO: 327181 - RNA, 19 nt, Artificial Sequence
  Description of Artificial Sequence: Synthetic oligonucleotide
  Sense Strand Starting at position 107 of SEQ ID NO: 319087
uuuggaucgacugguuaag

SEQ ID NO: 327182 - RNA, 19 nt, Artificial Sequence
  Description of Artificial Sequence: Synthetic oligonucleotide
  Antisense Strand to SEQ ID NO: 327181
cuuaaccagucgauccaaa

SEQ ID NO: 327183 - RNA, 19 nt, Artificial Sequence
  Description of Artificial Sequence: Synthetic oligonucleotide
  Sense Strand Starting at position 107 of SEQ ID NO: 319089
uggaucgacugguuaaguu

SEQ ID NO: 327184 - RNA, 19 nt, Artificial Sequence
  Description of Artificial Sequence: Synthetic oligonucleotide
  Antisense Strand to SEQ ID NO: 327183
aacuuaaccagucgaucca

SEQ ID NO: 327185 - RNA, 19 nt, Artificial Sequence
  Description of Artificial Sequence: Synthetic oligonucleotide
  Sense Strand Starting at position 107 of SEQ ID NO: 319203
ugucuuuacccucaaagag

SEQ ID NO: 327186 - RNA, 19 nt, Artificial Sequence
  Description of Artificial Sequence: Synthetic oligonucleotide
  Antisense Strand to SEQ ID NO: 327185
cucuuugaggguaaagaca

SEQ ID NO: 327187 - RNA, 19 nt, Artificial Sequence
  Description of Artificial Sequence: Synthetic oligonucleotide
  Sense Strand Starting at position 108 of SEQ ID NO: 315259
aaauuuaucugagggacug

SEQ ID NO: 327188 - RNA, 19 nt, Artificial Sequence
  Description of Artificial Sequence: Synthetic oligonucleotide
  Antisense Strand to SEQ ID NO: 327187
cagucccucagauaaauuu

SEQ ID NO: 327189 - RNA, 19 nt, Artificial Sequence
  Description of Artificial Sequence: Synthetic oligonucleotide
  Sense Strand Starting at position 108 of SEQ ID NO: 315327
gucuaauugccauagucaa

SEQ ID NO: 327190 - RNA, 19 nt, Artificial Sequence
  Description of Artificial Sequence: Synthetic oligonucleotide
  Antisense Strand to SEQ ID NO: 327189
uugacuauggcaauuagac

SEQ ID NO: 327191 - RNA, 19 nt, Artificial Sequence
  Description of Artificial Sequence: Synthetic oligonucleotide
  Sense Strand Starting at position 108 of SEQ ID NO: 315374
ccuugaaagcuugaaucug

SEQ ID NO: 327192 - RNA, 19 nt, Artificial Sequence
  Description of Artificial Sequence: Synthetic oligonucleotide
  Antisense Strand to SEQ ID NO: 327191
cagauucaagcuuucaagg

SEQ ID NO: 327193 - RNA, 19 nt, Artificial Sequence
  Description of Artificial Sequence: Synthetic oligonucleotide
  Sense Strand Starting at position 108 of SEQ ID NO: 315479
auucuaugucauggauaua

SEQ ID NO: 327194 - RNA, 19 nt, Artificial Sequence
  Description of Artificial Sequence: Synthetic oligonucleotide
  Antisense Strand to SEQ ID NO: 327193
uauauccaugacauagaau

SEQ ID NO: 327195 - RNA, 19 nt, Artificial Sequence
  Description of Artificial Sequence: Synthetic oligonucleotide
  Sense Strand Starting at position 108 of SEQ ID NO: 315784
ucacaaugagccugaaaga

SEQ ID NO: 327196 - RNA, 19 nt, Artificial Sequence
  Description of Artificial Sequence: Synthetic oligonucleotide
  Antisense Strand to SEQ ID NO: 327195
ucuuucaggcucauuguga

SEQ ID NO: 327197 - RNA, 19 nt, Artificial Sequence
  Description of Artificial Sequence: Synthetic oligonucleotide
  Sense Strand Starting at position 108 of SEQ ID NO: 315800
agaugaaauuuguaaacca

SEQ ID NO: 327198 - RNA, 19 nt, Artificial Sequence
  Description of Artificial Sequence: Synthetic oligonucleotide
  Antisense Strand to SEQ ID NO: 327197
ugguuuacaaauuucaucu

SEQ ID NO: 327199 - RNA, 19 nt, Artificial Sequence
  Description of Artificial Sequence: Synthetic oligonucleotide
  Sense Strand Starting at position 108 of SEQ ID NO: 315854
uagagagguagagguuauu

SEQ ID NO: 327200 - RNA, 19 nt, Artificial Sequence
  Description of Artificial Sequence: Synthetic oligonucleotide
  Antisense Strand to SEQ ID NO: 327199
aauaaccucuaccucucua

SEQ ID NO: 327201 - RNA, 19 nt, Artificial Sequence
  Description of Artificial Sequence: Synthetic oligonucleotide
  Sense Strand Starting at position 108 of SEQ ID NO: 315891
guauacuugccacagauaa

SEQ ID NO: 327202 - RNA, 19 nt, Artificial Sequence
  Description of Artificial Sequence: Synthetic oligonucleotide
  Antisense Strand to SEQ ID NO: 327201
uuaucuguggcaaguauac

SEQ ID NO: 327203 - RNA, 19 nt, Artificial Sequence
  Description of Artificial Sequence: Synthetic oligonucleotide
  Sense Strand Starting at position 108 of SEQ ID NO: 315936
uagugaugcaguuacgaca

SEQ ID NO: 327204 - RNA, 19 nt, Artificial Sequence
  Description of Artificial Sequence: Synthetic oligonucleotide
  Antisense Strand to SEQ ID NO: 327203
ugucguaacugcaucacua

SEQ ID NO: 327205 - RNA, 19 nt, Artificial Sequence
  Description of Artificial Sequence: Synthetic oligonucleotide
  Sense Strand Starting at position 108 of SEQ ID NO: 316086
cuuugacuuuguguggaaa

SEQ ID NO: 327206 - RNA, 19 nt, Artificial Sequence
  Description of Artificial Sequence: Synthetic oligonucleotide
  Antisense Strand to SEQ ID NO: 327205
uuuccacacaaagucaaag

SEQ ID NO: 327207 - RNA, 19 nt, Artificial Sequence
  Description of Artificial Sequence: Synthetic oligonucleotide
  Sense Strand Starting at position 108 of SEQ ID NO: 316087
uuugacuuuguguggaaag

SEQ ID NO: 327208 - RNA, 19 nt, Artificial Sequence
  Description of Artificial Sequence: Synthetic oligonucleotide
  Antisense Strand to SEQ ID NO: 327207
cuuuccacacaaagucaaa

SEQ ID NO: 327209 - RNA, 19 nt, Artificial Sequence
  Description of Artificial Sequence: Synthetic oligonucleotide
  Sense Strand Starting at position 108 of SEQ ID NO: 316089
ugacuuuguguggaaaguu

SEQ ID NO: 327210 - RNA, 19 nt, Artificial Sequence
  Description of Artificial Sequence: Synthetic oligonucleotide
  Antisense Strand to SEQ ID NO: 327209
aacuuuccacacaaaguca

SEQ ID NO: 327211 - RNA, 19 nt, Artificial Sequence
  Description of Artificial Sequence: Synthetic oligonucleotide
  Sense Strand Starting at position 108 of SEQ ID NO: 316126
uugggaagcaguuauucca

SEQ ID NO: 327212 - RNA, 19 nt, Artificial Sequence
  Description of Artificial Sequence: Synthetic oligonucleotide
  Antisense Strand to SEQ ID NO: 327211
uggaauaacugcuucccaa

SEQ ID NO: 327213 - RNA, 19 nt, Artificial Sequence
  Description of Artificial Sequence: Synthetic oligonucleotide
  Sense Strand Starting at position 108 of SEQ ID NO: 316129
ggaagcaguuauuccaaau

SEQ ID NO: 327214 - RNA, 19 nt, Artificial Sequence
  Description of Artificial Sequence: Synthetic oligonucleotide
  Antisense Strand to SEQ ID NO: 327213
auuuggaauaacugcuucc

SEQ ID NO: 327215 - RNA, 19 nt, Artificial Sequence
  Description of Artificial Sequence: Synthetic oligonucleotide
  Sense Strand Starting at position 108 of SEQ ID NO: 316270
cuguguauugaagaggugu

SEQ ID NO: 327216 - RNA, 19 nt, Artificial Sequence
  Description of Artificial Sequence: Synthetic oligonucleotide
  Antisense Strand to SEQ ID NO: 327215
acaccucuucaauacacag

SEQ ID NO: 327217 - RNA, 19 nt, Artificial Sequence
  Description of Artificial Sequence: Synthetic oligonucleotide
  Sense Strand Starting at position 108 of SEQ ID NO: 316636
caauuccuccacgagugau

SEQ ID NO: 327218 - RNA, 19 nt, Artificial Sequence
  Description of Artificial Sequence: Synthetic oligonucleotide
  Antisense Strand to SEQ ID NO: 327217
aucacucguggaggaauug

SEQ ID NO: 327219 - RNA, 19 nt, Artificial Sequence
  Description of Artificial Sequence: Synthetic oligonucleotide
  Sense Strand Starting at position 108 of SEQ ID NO: 316642
cuccacgagugaucacaaa

SEQ ID NO: 327220 - RNA, 19 nt, Artificial Sequence
  Description of Artificial Sequence: Synthetic oligonucleotide
  Antisense Strand to SEQ ID NO: 327219
uuugugaucacucguggag

SEQ ID NO: 327221 - RNA, 19 nt, Artificial Sequence
  Description of Artificial Sequence: Synthetic oligonucleotide
  Sense Strand Starting at position 108 of SEQ ID NO: 316896
gggagaagcgcccaaauca

SEQ ID NO: 327222 - RNA, 19 nt, Artificial Sequence
  Description of Artificial Sequence: Synthetic oligonucleotide
  Antisense Strand to SEQ ID NO: 327221
ugauuugggcgcuucuccc

SEQ ID NO: 327223 - RNA, 19 nt, Artificial Sequence
  Description of Artificial Sequence: Synthetic oligonucleotide
  Sense Strand Starting at position 108 of SEQ ID NO: 317392
guucgugaagcuuucguuu

SEQ ID NO: 327224 - RNA, 19 nt, Artificial Sequence
  Description of Artificial Sequence: Synthetic oligonucleotide
  Antisense Strand to SEQ ID NO: 327223
aaacgaaagcuucacgaac

SEQ ID NO: 327225 - RNA, 19 nt, Artificial Sequence
  Description of Artificial Sequence: Synthetic oligonucleotide
  Sense Strand Starting at position 108 of SEQ ID NO: 317520
augugagaacuaugacagu

SEQ ID NO: 327226 - RNA, 19 nt, Artificial Sequence
  Description of Artificial Sequence: Synthetic oligonucleotide
  Antisense Strand to SEQ ID NO: 327225
acugucauaguucucacau

SEQ ID NO: 327227 - RNA, 19 nt, Artificial Sequence
  Description of Artificial Sequence: Synthetic oligonucleotide
  Sense Strand Starting at position 108 of SEQ ID NO: 317829
auccgcaaccugugauuua

SEQ ID NO: 327228 - RNA, 19 nt, Artificial Sequence
  Description of Artificial Sequence: Synthetic oligonucleotide
  Antisense Strand to SEQ ID NO: 327227
uaaaucacagguugcggau

SEQ ID NO: 327229 - RNA, 19 nt, Artificial Sequence
  Description of Artificial Sequence: Synthetic oligonucleotide
  Sense Strand Starting at position 108 of SEQ ID NO: 317832
cgcaaccugugauuuaauu

SEQ ID NO: 327230 - RNA, 19 nt, Artificial Sequence
  Description of Artificial Sequence: Synthetic oligonucleotide
  Antisense Strand to SEQ ID NO: 327229
aauuaaaucacagguugcg

SEQ ID NO: 327231 - RNA, 19 nt, Artificial Sequence
  Description of Artificial Sequence: Synthetic oligonucleotide
  Sense Strand Starting at position 108 of SEQ ID NO: 317898
cucaauuuauuggaaagau

SEQ ID NO: 327232 - RNA, 19 nt, Artificial Sequence
  Description of Artificial Sequence: Synthetic oligonucleotide
  Antisense Strand to SEQ ID NO: 327231
aucuuuccaauaaauugag

SEQ ID NO: 327233 - RNA, 19 nt, Artificial Sequence
  Description of Artificial Sequence: Synthetic oligonucleotide
  Sense Strand Starting at position 108 of SEQ ID NO: 317942
gucaaaguuauguaguuaa

SEQ ID NO: 327234 - RNA, 19 nt, Artificial Sequence
  Description of Artificial Sequence: Synthetic oligonucleotide
  Antisense Strand to SEQ ID NO: 327233
uuaacuacauaacuuugac

SEQ ID NO: 327235 - RNA, 19 nt, Artificial Sequence
  Description of Artificial Sequence: Synthetic oligonucleotide
  Sense Strand Starting at position 108 of SEQ ID NO: 317949
uuauguaguuaaucacuca

SEQ ID NO: 327236 - RNA, 19 nt, Artificial Sequence
  Description of Artificial Sequence: Synthetic oligonucleotide
  Antisense Strand to SEQ ID NO: 327235
ugagugauuaacuacauaa

SEQ ID NO: 327237 - RNA, 19 nt, Artificial Sequence
  Description of Artificial Sequence: Synthetic oligonucleotide
  Sense Strand Starting at position 108 of SEQ ID NO: 317952
uguaguuaaucacucaaag

SEQ ID NO: 327238 - RNA, 19 nt, Artificial Sequence
  Description of Artificial Sequence: Synthetic oligonucleotide
  Antisense Strand to SEQ ID NO: 327237
cuuugagugauuaacuaca

SEQ ID NO: 327239 - RNA, 19 nt, Artificial Sequence
  Description of Artificial Sequence: Synthetic oligonucleotide
  Sense Strand Starting at position 108 of SEQ ID NO: 317984
uuacauuuguucuuuggua

SEQ ID NO: 327240 - RNA, 19 nt, Artificial Sequence
  Description of Artificial Sequence: Synthetic oligonucleotide
  Antisense Strand to SEQ ID NO: 327239
uaccaaagaacaaauguaa

SEQ ID NO: 327241 - RNA, 19 nt, Artificial Sequence
  Description of Artificial Sequence: Synthetic oligonucleotide
  Sense Strand Starting at position 108 of SEQ ID NO: 317993
uucuuugguacaugaggau

SEQ ID NO: 327242 - RNA, 19 nt, Artificial Sequence
  Description of Artificial Sequence: Synthetic oligonucleotide
  Antisense Strand to SEQ ID NO: 327241
auccucauguaccaaagaa

SEQ ID NO: 327243 - RNA, 19 nt, Artificial Sequence
  Description of Artificial Sequence: Synthetic oligonucleotide
  Sense Strand Starting at position 108 of SEQ ID NO: 318007
aggauaguuaaccgauaca

SEQ ID NO: 327244 - RNA, 19 nt, Artificial Sequence
  Description of Artificial Sequence: Synthetic oligonucleotide
  Antisense Strand to SEQ ID NO: 327243
uguaucgguuaacuauccu

SEQ ID NO: 327245 - RNA, 19 nt, Artificial Sequence
  Description of Artificial Sequence: Synthetic oligonucleotide
  Sense Strand Starting at position 108 of SEQ ID NO: 318010
auaguuaaccgauacagua

SEQ ID NO: 327246 - RNA, 19 nt, Artificial Sequence
  Description of Artificial Sequence: Synthetic oligonucleotide
  Antisense Strand to SEQ ID NO: 327245
uacuguaucgguuaacuau

SEQ ID NO: 327247 - RNA, 19 nt, Artificial Sequence
  Description of Artificial Sequence: Synthetic oligonucleotide
  Sense Strand Starting at position 108 of SEQ ID NO: 318018
ccgauacaguaucuuaaag

SEQ ID NO: 327248 - RNA, 19 nt, Artificial Sequence
  Description of Artificial Sequence: Synthetic oligonucleotide
  Antisense Strand to SEQ ID NO: 327247
cuuuaagauacuguaucgg

SEQ ID NO: 327249 - RNA, 19 nt, Artificial Sequence
  Description of Artificial Sequence: Synthetic oligonucleotide
  Sense Strand Starting at position 108 of SEQ ID NO: 318064
augcucuugccucaagaac

SEQ ID NO: 327250 - RNA, 19 nt, Artificial Sequence
  Description of Artificial Sequence: Synthetic oligonucleotide
  Antisense Strand to SEQ ID NO: 327249
guucuugaggcaagagcau

SEQ ID NO: 327251 - RNA, 19 nt, Artificial Sequence
  Description of Artificial Sequence: Synthetic oligonucleotide
  Sense Strand Starting at position 108 of SEQ ID NO: 318220
uuagauacauugucuuacu

SEQ ID NO: 327252 - RNA, 19 nt, Artificial Sequence
  Description of Artificial Sequence: Synthetic oligonucleotide
  Antisense Strand to SEQ ID NO: 327251
aguaagacaauguaucuaa

SEQ ID NO: 327253 - RNA, 19 nt, Artificial Sequence
  Description of Artificial Sequence: Synthetic oligonucleotide
  Sense Strand Starting at position 108 of SEQ ID NO: 318247
cagguucuagugcaaugaa

SEQ ID NO: 327254 - RNA, 19 nt, Artificial Sequence
  Description of Artificial Sequence: Synthetic oligonucleotide
  Antisense Strand to SEQ ID NO: 327253
uucauugcacuagaaccug

SEQ ID NO: 327255 - RNA, 19 nt, Artificial Sequence
  Description of Artificial Sequence: Synthetic oligonucleotide
  Sense Strand Starting at position 108 of SEQ ID NO: 318639
auaggugguguucaguaaa

SEQ ID NO: 327256 - RNA, 19 nt, Artificial Sequence
  Description of Artificial Sequence: Synthetic oligonucleotide
  Antisense Strand to SEQ ID NO: 327255
uuuacugaacaccaccuau

SEQ ID NO: 327257 - RNA, 19 nt, Artificial Sequence
  Description of Artificial Sequence: Synthetic oligonucleotide
  Sense Strand Starting at position 108 of SEQ ID NO: 318642
ggugguguucaguaaacau

SEQ ID NO: 327258 - RNA, 19 nt, Artificial Sequence
  Description of Artificial Sequence: Synthetic oligonucleotide
  Antisense Strand to SEQ ID NO: 327257
auguuuacugaacaccacc

SEQ ID NO: 327259 - RNA, 19 nt, Artificial Sequence
  Description of Artificial Sequence: Synthetic oligonucleotide
  Sense Strand Starting at position 108 of SEQ ID NO: 318762
ucaguaaaguuacuuaauc

SEQ ID NO: 327260 - RNA, 19 nt, Artificial Sequence
  Description of Artificial Sequence: Synthetic oligonucleotide
  Antisense Strand to SEQ ID NO: 327259
gauuaaguaacuuuacuga

SEQ ID NO: 327261 - RNA, 19 nt, Artificial Sequence
  Description of Artificial Sequence: Synthetic oligonucleotide
  Sense Strand Starting at position 108 of SEQ ID NO: 319029
gcguugugugaguuaugua

SEQ ID NO: 327262 - RNA, 19 nt, Artificial Sequence
  Description of Artificial Sequence: Synthetic oligonucleotide
  Antisense Strand to SEQ ID NO: 327261
uacauaacucacacaacgc

SEQ ID NO: 327263 - RNA, 19 nt, Artificial Sequence
  Description of Artificial Sequence: Synthetic oligonucleotide
  Sense Strand Starting at position 108 of SEQ ID NO: 319036
gugaguuauguauacaaau

SEQ ID NO: 327264 - RNA, 19 nt, Artificial Sequence
  Description of Artificial Sequence: Synthetic oligonucleotide
  Antisense Strand to SEQ ID NO: 327263
auuuguauacauaacucac

SEQ ID NO: 327265 - RNA, 19 nt, Artificial Sequence
  Description of Artificial Sequence: Synthetic oligonucleotide
  Sense Strand Starting at position 108 of SEQ ID NO: 319095
auaucaacuccaggauagu

SEQ ID NO: 327266 - RNA, 19 nt, Artificial Sequence
  Description of Artificial Sequence: Synthetic oligonucleotide
  Antisense Strand to SEQ ID NO: 327265
acuauccuggaguugauau

SEQ ID NO: 327267 - RNA, 19 nt, Artificial Sequence
  Description of Artificial Sequence: Synthetic oligonucleotide
  Sense Strand Starting at position 109 of SEQ ID NO: 315794
cguauaucuguguaagaca

SEQ ID NO: 327268 - RNA, 19 nt, Artificial Sequence
  Description of Artificial Sequence: Synthetic oligonucleotide
  Antisense Strand to SEQ ID NO: 327267
ugucuuacacagauauacg

SEQ ID NO: 327269 - RNA, 19 nt, Artificial Sequence
  Description of Artificial Sequence: Synthetic oligonucleotide
  Sense Strand Starting at position 109 of SEQ ID NO: 315836
gaucacucagaaugugaug

SEQ ID NO: 327270 - RNA, 19 nt, Artificial Sequence
  Description of Artificial Sequence: Synthetic oligonucleotide
  Antisense Strand to SEQ ID NO: 327269
caucacauucugagugauc

SEQ ID NO: 327271 - RNA, 19 nt, Artificial Sequence
  Description of Artificial Sequence: Synthetic oligonucleotide
  Sense Strand Starting at position 109 of SEQ ID NO: 315861
cucacuuguagggagucaa

SEQ ID NO: 327272 - RNA, 19 nt, Artificial Sequence
  Description of Artificial Sequence: Synthetic oligonucleotide
  Antisense Strand to SEQ ID NO: 327271
uugacucccuacaagugag

SEQ ID NO: 327273 - RNA, 19 nt, Artificial Sequence
  Description of Artificial Sequence: Synthetic oligonucleotide
  Sense Strand Starting at position 109 of SEQ ID NO: 315954
guagaagcaaugugaauag

SEQ ID NO: 327274 - RNA, 19 nt, Artificial Sequence
  Description of Artificial Sequence: Synthetic oligonucleotide
  Antisense Strand to SEQ ID NO: 327273
cuauucacauugcuucuac

SEQ ID NO: 327275 - RNA, 19 nt, Artificial Sequence
  Description of Artificial Sequence: Synthetic oligonucleotide
  Sense Strand Starting at position 109 of SEQ ID NO: 316088
uaguuacuuccuuguggaa

SEQ ID NO: 327276 - RNA, 19 nt, Artificial Sequence
  Description of Artificial Sequence: Synthetic oligonucleotide
  Antisense Strand to SEQ ID NO: 327275
uuccacaaggaaguaacua

SEQ ID NO: 327277 - RNA, 19 nt, Artificial Sequence
  Description of Artificial Sequence: Synthetic oligonucleotide
  Sense Strand Starting at position 109 of SEQ ID NO: 316111
uggucaucauucucugaau

SEQ ID NO: 327278 - RNA, 19 nt, Artificial Sequence
  Description of Artificial Sequence: Synthetic oligonucleotide
  Antisense Strand to SEQ ID NO: 327277
auucagagaaugaugacca

SEQ ID NO: 327279 - RNA, 19 nt, Artificial Sequence
  Description of Artificial Sequence: Synthetic oligonucleotide
  Sense Strand Starting at position 109 of SEQ ID NO: 316112
ggucaucauucucugaaug

SEQ ID NO: 327280 - RNA, 19 nt, Artificial Sequence
  Description of Artificial Sequence: Synthetic oligonucleotide
  Antisense Strand to SEQ ID NO: 327279
cauucagagaaugaugacc

SEQ ID NO: 327281 - RNA, 19 nt, Artificial Sequence
  Description of Artificial Sequence: Synthetic oligonucleotide
  Sense Strand Starting at position 109 of SEQ ID NO: 316179
ccaggaaaugaucguguug

SEQ ID NO: 327282 - RNA, 19 nt, Artificial Sequence
  Description of Artificial Sequence: Synthetic oligonucleotide
  Antisense Strand to SEQ ID NO: 327281
caacacgaucauuuccugg

SEQ ID NO: 327283 - RNA, 19 nt, Artificial Sequence
  Description of Artificial Sequence: Synthetic oligonucleotide
  Sense Strand Starting at position 109 of SEQ ID NO: 316185
aaugaucguguugaguuua

SEQ ID NO: 327284 - RNA, 19 nt, Artificial Sequence
  Description of Artificial Sequence: Synthetic oligonucleotide
  Antisense Strand to SEQ ID NO: 327283
uaaacucaacacgaucauu

SEQ ID NO: 327285 - RNA, 19 nt, Artificial Sequence
  Description of Artificial Sequence: Synthetic oligonucleotide
  Sense Strand Starting at position 109 of SEQ ID NO: 316198
aguuuaaggugccuugaga

SEQ ID NO: 327286 - RNA, 19 nt, Artificial Sequence
  Description of Artificial Sequence: Synthetic oligonucleotide
  Antisense Strand to SEQ ID NO: 327285
ucucaaggcaccuuaaacu

SEQ ID NO: 327287 - RNA, 19 nt, Artificial Sequence
  Description of Artificial Sequence: Synthetic oligonucleotide
  Sense Strand Starting at position 109 of SEQ ID NO: 316378
acaguuuacugguuguaua

SEQ ID NO: 327288 - RNA, 19 nt, Artificial Sequence
  Description of Artificial Sequence: Synthetic oligonucleotide
  Antisense Strand to SEQ ID NO: 327287
uauacaaccaguaaacugu

SEQ ID NO: 327289 - RNA, 19 nt, Artificial Sequence
  Description of Artificial Sequence: Synthetic oligonucleotide
  Sense Strand Starting at position 109 of SEQ ID NO: 317580
cuaggcuuucuugaggaga

SEQ ID NO: 327290 - RNA, 19 nt, Artificial Sequence
  Description of Artificial Sequence: Synthetic oligonucleotide
  Antisense Strand to SEQ ID NO: 327289
ucuccucaagaaagccuag

SEQ ID NO: 327291 - RNA, 19 nt, Artificial Sequence
  Description of Artificial Sequence: Synthetic oligonucleotide
  Sense Strand Starting at position 109 of SEQ ID NO: 317588
ucuugaggagaguggaauu

SEQ ID NO: 327292 - RNA, 19 nt, Artificial Sequence
  Description of Artificial Sequence: Synthetic oligonucleotide
  Antisense Strand to SEQ ID NO: 327291
aauuccacucuccucaaga

SEQ ID NO: 327293 - RNA, 19 nt, Artificial Sequence
  Description of Artificial Sequence: Synthetic oligonucleotide
  Sense Strand Starting at position 109 of SEQ ID NO: 317627
uagagcugucgugugcaga

SEQ ID NO: 327294 - RNA, 19 nt, Artificial Sequence
  Description of Artificial Sequence: Synthetic oligonucleotide
  Antisense Strand to SEQ ID NO: 327293
ucugcacacgacagcucua

SEQ ID NO: 327295 - RNA, 19 nt, Artificial Sequence
  Description of Artificial Sequence: Synthetic oligonucleotide
  Sense Strand Starting at position 109 of SEQ ID NO: 317646
caucuucggguuuagugaa

SEQ ID NO: 327296 - RNA, 19 nt, Artificial Sequence
  Description of Artificial Sequence: Synthetic oligonucleotide
  Antisense Strand to SEQ ID NO: 327295
uucacuaaacccgaagaug

SEQ ID NO: 327297 - RNA, 19 nt, Artificial Sequence
  Description of Artificial Sequence: Synthetic oligonucleotide
  Sense Strand Starting at position 109 of SEQ ID NO: 317653
ggguuuagugaauguuuca

SEQ ID NO: 327298 - RNA, 19 nt, Artificial Sequence
  Description of Artificial Sequence: Synthetic oligonucleotide
  Antisense Strand to SEQ ID NO: 327297
ugaaacauucacuaaaccc

SEQ ID NO: 327299 - RNA, 19 nt, Artificial Sequence
  Description of Artificial Sequence: Synthetic oligonucleotide
  Sense Strand Starting at position 109 of SEQ ID NO: 317884
ccuacaaguugagucaagu

SEQ ID NO: 327300 - RNA, 19 nt, Artificial Sequence
  Description of Artificial Sequence: Synthetic oligonucleotide
  Antisense Strand to SEQ ID NO: 327299
acuugacucaacuuguagg

SEQ ID NO: 327301 - RNA, 19 nt, Artificial Sequence
  Description of Artificial Sequence: Synthetic oligonucleotide
  Sense Strand Starting at position 109 of SEQ ID NO: 318088
agaaguuagccgcaauaga

SEQ ID NO: 327302 - RNA, 19 nt, Artificial Sequence
  Description of Artificial Sequence: Synthetic oligonucleotide
  Antisense Strand to SEQ ID NO: 327301
ucuauugcggcuaacuucu

SEQ ID NO: 327303 - RNA, 19 nt, Artificial Sequence
  Description of Artificial Sequence: Synthetic oligonucleotide
  Sense Strand Starting at position 109 of SEQ ID NO: 318103
uagagaauuuggcaaugga

SEQ ID NO: 327304 - RNA, 19 nt, Artificial Sequence
  Description of Artificial Sequence: Synthetic oligonucleotide
  Antisense Strand to SEQ ID NO: 327303
uccauugccaaauucucua

SEQ ID NO: 327305 - RNA, 19 nt, Artificial Sequence
  Description of Artificial Sequence: Synthetic oligonucleotide
  Sense Strand Starting at position 109 of SEQ ID NO: 318173
accugugaguguccuagga

SEQ ID NO: 327306 - RNA, 19 nt, Artificial Sequence
  Description of Artificial Sequence: Synthetic oligonucleotide
  Antisense Strand to SEQ ID NO: 327305
uccuaggacacucacaggu

SEQ ID NO: 327307 - RNA, 19 nt, Artificial Sequence
  Description of Artificial Sequence: Synthetic oligonucleotide
  Sense Strand Starting at position 109 of SEQ ID NO: 318177
gugaguguccuaggaauau

SEQ ID NO: 327308 - RNA, 19 nt, Artificial Sequence
  Description of Artificial Sequence: Synthetic oligonucleotide
  Antisense Strand to SEQ ID NO: 327307
auauuccuaggacacucac

SEQ ID NO: 327309 - RNA, 19 nt, Artificial Sequence
  Description of Artificial Sequence: Synthetic oligonucleotide
  Sense Strand Starting at position 109 of SEQ ID NO: 318188
aggaauauuugugaaagca

SEQ ID NO: 327310 - RNA, 19 nt, Artificial Sequence
  Description of Artificial Sequence: Synthetic oligonucleotide
  Antisense Strand to SEQ ID NO: 327309
ugcuuucacaaauauuccu

SEQ ID NO: 327311 - RNA, 19 nt, Artificial Sequence
  Description of Artificial Sequence: Synthetic oligonucleotide
  Sense Strand Starting at position 109 of SEQ ID NO: 318246
ggccuauaaugucuaagga

SEQ ID NO: 327312 - RNA, 19 nt, Artificial Sequence
  Description of Artificial Sequence: Synthetic oligonucleotide
  Antisense Strand to SEQ ID NO: 327311
uccuuagacauuauaggcc

SEQ ID NO: 327313 - RNA, 19 nt, Artificial Sequence
  Description of Artificial Sequence: Synthetic oligonucleotide
  Sense Strand Starting at position 109 of SEQ ID NO: 318247
gccuauaaugucuaaggag

SEQ ID NO: 327314 - RNA, 19 nt, Artificial Sequence
  Description of Artificial Sequence: Synthetic oligonucleotide
  Antisense Strand to SEQ ID NO: 327313
cuccuuagacauuauaggc

SEQ ID NO: 327315 - RNA, 19 nt, Artificial Sequence
  Description of Artificial Sequence: Synthetic oligonucleotide
  Sense Strand Starting at position 109 of SEQ ID NO: 318288
gguagucuccgucagauag

SEQ ID NO: 327316 - RNA, 19 nt, Artificial Sequence
  Description of Artificial Sequence: Synthetic oligonucleotide
  Antisense Strand to SEQ ID NO: 327315
cuaucugacggagacuacc

SEQ ID NO: 327317 - RNA, 19 nt, Artificial Sequence
  Description of Artificial Sequence: Synthetic oligonucleotide
  Sense Strand Starting at position 109 of SEQ ID NO: 318339
gacucugguccuggaaaga

SEQ ID NO: 327318 - RNA, 19 nt, Artificial Sequence
  Description of Artificial Sequence: Synthetic oligonucleotide
  Antisense Strand to SEQ ID NO: 327317
ucuuuccaggaccagaguc

SEQ ID NO: 327319 - RNA, 19 nt, Artificial Sequence
  Description of Artificial Sequence: Synthetic oligonucleotide
  Sense Strand Starting at position 109 of SEQ ID NO: 318411
ucaggaacagugugaauca

SEQ ID NO: 327320 - RNA, 19 nt, Artificial Sequence
  Description of Artificial Sequence: Synthetic oligonucleotide
  Antisense Strand to SEQ ID NO: 327319
ugauucacacuguuccuga

SEQ ID NO: 327321 - RNA, 19 nt, Artificial Sequence
  Description of Artificial Sequence: Synthetic oligonucleotide
  Sense Strand Starting at position 109 of SEQ ID NO: 318524
cugugcaacuuucuggaga

SEQ ID NO: 327322 - RNA, 19 nt, Artificial Sequence
  Description of Artificial Sequence: Synthetic oligonucleotide
  Antisense Strand to SEQ ID NO: 327321
ucuccagaaaguugcacag

SEQ ID NO: 327323 - RNA, 19 nt, Artificial Sequence
  Description of Artificial Sequence: Synthetic oligonucleotide
  Sense Strand Starting at position 109 of SEQ ID NO: 318568
cccucucccgcguuaauau

SEQ ID NO: 327324 - RNA, 19 nt, Artificial Sequence
  Description of Artificial Sequence: Synthetic oligonucleotide
  Antisense Strand to SEQ ID NO: 327323
auauuaacgcgggagaggg

SEQ ID NO: 327325 - RNA, 19 nt, Artificial Sequence
  Description of Artificial Sequence: Synthetic oligonucleotide
  Sense Strand Starting at position 109 of SEQ ID NO: 318643
gucucauaaugguuccaga

SEQ ID NO: 327326 - RNA, 19 nt, Artificial Sequence
  Description of Artificial Sequence: Synthetic oligonucleotide
  Antisense Strand to SEQ ID NO: 327325
ucuggaaccauuaugagac

SEQ ID NO: 327327 - RNA, 19 nt, Artificial Sequence
  Description of Artificial Sequence: Synthetic oligonucleotide
  Sense Strand Starting at position 109 of SEQ ID NO: 318667
cuucgacaauauucucaga

SEQ ID NO: 327328 - RNA, 19 nt, Artificial Sequence
  Description of Artificial Sequence: Synthetic oligonucleotide
  Antisense Strand to SEQ ID NO: 327327
ucugagaauauugucgaag

SEQ ID NO: 327329 - RNA, 19 nt, Artificial Sequence
  Description of Artificial Sequence: Synthetic oligonucleotide
  Sense Strand Starting at position 109 of SEQ ID NO: 318669
ucgacaauauucucagaga

SEQ ID NO: 327330 - RNA, 19 nt, Artificial Sequence
  Description of Artificial Sequence: Synthetic oligonucleotide
  Antisense Strand to SEQ ID NO: 327329
ucucugagaauauugucga

SEQ ID NO: 327331 - RNA, 19 nt, Artificial Sequence
  Description of Artificial Sequence: Synthetic oligonucleotide
  Sense Strand Starting at position 109 of SEQ ID NO: 318672
acaauauucucagagaaag

SEQ ID NO: 327332 - RNA, 19 nt, Artificial Sequence
  Description of Artificial Sequence: Synthetic oligonucleotide
  Antisense Strand to SEQ ID NO: 327331
cuuucucugagaauauugu

SEQ ID NO: 327333 - RNA, 19 nt, Artificial Sequence
  Description of Artificial Sequence: Synthetic oligonucleotide
  Sense Strand Starting at position 109 of SEQ ID NO: 318683
agagaaagcugagcauuau

SEQ ID NO: 327334 - RNA, 19 nt, Artificial Sequence
  Description of Artificial Sequence: Synthetic oligonucleotide
  Antisense Strand to SEQ ID NO: 327333
auaaugcucagcuuucucu

SEQ ID NO: 327335 - RNA, 19 nt, Artificial Sequence
  Description of Artificial Sequence: Synthetic oligonucleotide
  Sense Strand Starting at position 109 of SEQ ID NO: 318684
gagaaagcugagcauuauu

SEQ ID NO: 327336 - RNA, 19 nt, Artificial Sequence
  Description of Artificial Sequence: Synthetic oligonucleotide
  Antisense Strand to SEQ ID NO: 327335
aauaaugcucagcuuucuc

SEQ ID NO: 327337 - RNA, 19 nt, Artificial Sequence
  Description of Artificial Sequence: Synthetic oligonucleotide
  Sense Strand Starting at position 109 of SEQ ID NO: 318689
agcugagcauuauuaacau

SEQ ID NO: 327338 - RNA, 19 nt, Artificial Sequence
  Description of Artificial Sequence: Synthetic oligonucleotide
  Antisense Strand to SEQ ID NO: 327337
auguuaauaaugcucagcu

SEQ ID NO: 327339 - RNA, 19 nt, Artificial Sequence
  Description of Artificial Sequence: Synthetic oligonucleotide
  Sense Strand Starting at position 109 of SEQ ID NO: 318958
gucucugucuuugcauuua

SEQ ID NO: 327340 - RNA, 19 nt, Artificial Sequence
  Description of Artificial Sequence: Synthetic oligonucleotide
  Antisense Strand to SEQ ID NO: 327339
uaaaugcaaagacagagac

SEQ ID NO: 327341 - RNA, 19 nt, Artificial Sequence
  Description of Artificial Sequence: Synthetic oligonucleotide
  Sense Strand Starting at position 109 of SEQ ID NO: 319200
cugccucuuccacaguaga

SEQ ID NO: 327342 - RNA, 19 nt, Artificial Sequence
  Description of Artificial Sequence: Synthetic oligonucleotide
  Antisense Strand to SEQ ID NO: 327341
ucuacuguggaagaggcag

SEQ ID NO: 327343 - RNA, 19 nt, Artificial Sequence
  Description of Artificial Sequence: Synthetic oligonucleotide
  Sense Strand Starting at position 109 of SEQ ID NO: 319215
uagagaaguuccuugacaa

SEQ ID NO: 327344 - RNA, 19 nt, Artificial Sequence
  Description of Artificial Sequence: Synthetic oligonucleotide
  Antisense Strand to SEQ ID NO: 327343
uugucaaggaacuucucua

SEQ ID NO: 327345 - RNA, 19 nt, Artificial Sequence
  Description of Artificial Sequence: Synthetic oligonucleotide
  Sense Strand Starting at position 109 of SEQ ID NO: 319216
agagaaguuccuugacaac

SEQ ID NO: 327346 - RNA, 19 nt, Artificial Sequence
  Description of Artificial Sequence: Synthetic oligonucleotide
  Antisense Strand to SEQ ID NO: 327345
guugucaaggaacuucucu

SEQ ID NO: 327347 - RNA, 19 nt, Artificial Sequence
  Description of Artificial Sequence: Synthetic oligonucleotide
  Sense Strand Starting at position 110 of SEQ ID NO: 315264
ccaagagucucaucuaaag

SEQ ID NO: 327348 - RNA, 19 nt, Artificial Sequence
  Description of Artificial Sequence: Synthetic oligonucleotide
  Antisense Strand to SEQ ID NO: 327347
cuuuagaugagacucuugg

SEQ ID NO: 327349 - RNA, 19 nt, Artificial Sequence
  Description of Artificial Sequence: Synthetic oligonucleotide
  Sense Strand Starting at position 110 of SEQ ID NO: 315288
ggagaucucauuggccaga

SEQ ID NO: 327350 - RNA, 19 nt, Artificial Sequence
  Description of Artificial Sequence: Synthetic oligonucleotide
  Antisense Strand to SEQ ID NO: 327349
ucuggccaaugagaucucc

SEQ ID NO: 327351 - RNA, 19 nt, Artificial Sequence
  Description of Artificial Sequence: Synthetic oligonucleotide
  Sense Strand Starting at position 110 of SEQ ID NO: 315289
gagaucucauuggccagaa

SEQ ID NO: 327352 - RNA, 19 nt, Artificial Sequence
  Description of Artificial Sequence: Synthetic oligonucleotide
  Antisense Strand to SEQ ID NO: 327351
uucuggccaaugagaucuc

SEQ ID NO: 327353 - RNA, 19 nt, Artificial Sequence
  Description of Artificial Sequence: Synthetic oligonucleotide
  Sense Strand Starting at position 110 of SEQ ID NO: 315301
gccagaacucaaugaucua

SEQ ID NO: 327354 - RNA, 19 nt, Artificial Sequence
  Description of Artificial Sequence: Synthetic oligonucleotide
  Antisense Strand to SEQ ID NO: 327353
uagaucauugaguucuggc

SEQ ID NO: 327355 - RNA, 19 nt, Artificial Sequence
  Description of Artificial Sequence: Synthetic oligonucleotide
  Sense Strand Starting at position 110 of SEQ ID NO: 315475
gugauuaagaacugcagaa

SEQ ID NO: 327356 - RNA, 19 nt, Artificial Sequence
  Description of Artificial Sequence: Synthetic oligonucleotide
  Antisense Strand to SEQ ID NO: 327355
uucugcaguucuuaaucac

SEQ ID NO: 327357 - RNA, 19 nt, Artificial Sequence
  Description of Artificial Sequence: Synthetic oligonucleotide
  Sense Strand Starting at position 110 of SEQ ID NO: 315524
acagcaaucugacuuaagu

SEQ ID NO: 327358 - RNA, 19 nt, Artificial Sequence
  Description of Artificial Sequence: Synthetic oligonucleotide
  Antisense Strand to SEQ ID NO: 327357
acuuaagucagauugcugu

SEQ ID NO: 327359 - RNA, 19 nt, Artificial Sequence
  Description of Artificial Sequence: Synthetic oligonucleotide
  Sense Strand Starting at position 110 of SEQ ID NO: 315532
cugacuuaagugggaugau

SEQ ID NO: 327360 - RNA, 19 nt, Artificial Sequence
  Description of Artificial Sequence: Synthetic oligonucleotide
  Antisense Strand to SEQ ID NO: 327359
aucaucccacuuaagucag

SEQ ID NO: 327361 - RNA, 19 nt, Artificial Sequence
  Description of Artificial Sequence: Synthetic oligonucleotide
  Sense Strand Starting at position 110 of SEQ ID NO: 316177
cguauaucuguguaagaca

SEQ ID NO: 327362 - RNA, 19 nt, Artificial Sequence
  Description of Artificial Sequence: Synthetic oligonucleotide
  Antisense Strand to SEQ ID NO: 327361
ugucuuacacagauauacg

SEQ ID NO: 327363 - RNA, 19 nt, Artificial Sequence
  Description of Artificial Sequence: Synthetic oligonucleotide
  Sense Strand Starting at position 110 of SEQ ID NO: 316219
gaucacucagaaugugaug

SEQ ID NO: 327364 - RNA, 19 nt, Artificial Sequence
  Description of Artificial Sequence: Synthetic oligonucleotide
  Antisense Strand to SEQ ID NO: 327363
caucacauucugagugauc

SEQ ID NO: 327365 - RNA, 19 nt, Artificial Sequence
  Description of Artificial Sequence: Synthetic oligonucleotide
  Sense Strand Starting at position 110 of SEQ ID NO: 316244
cucacuuguagggagucaa

SEQ ID NO: 327366 - RNA, 19 nt, Artificial Sequence
  Description of Artificial Sequence: Synthetic oligonucleotide
  Antisense Strand to SEQ ID NO: 327365
uugacucccuacaagugag

SEQ ID NO: 327367 - RNA, 19 nt, Artificial Sequence
  Description of Artificial Sequence: Synthetic oligonucleotide
  Sense Strand Starting at position 110 of SEQ ID NO: 316337
guagaagcaaugugaauag

SEQ ID NO: 327368 - RNA, 19 nt, Artificial Sequence
  Description of Artificial Sequence: Synthetic oligonucleotide
  Antisense Strand to SEQ ID NO: 327367
cuauucacauugcuucuac

SEQ ID NO: 327369 - RNA, 19 nt, Artificial Sequence
  Description of Artificial Sequence: Synthetic oligonucleotide
  Sense Strand Starting at position 110 of SEQ ID NO: 316471
uaguuacuuccuuguggaa

SEQ ID NO: 327370 - RNA, 19 nt, Artificial Sequence
  Description of Artificial Sequence: Synthetic oligonucleotide
  Antisense Strand to SEQ ID NO: 327369
uuccacaaggaaguaacua

SEQ ID NO: 327371 - RNA, 19 nt, Artificial Sequence
  Description of Artificial Sequence: Synthetic oligonucleotide
  Sense Strand Starting at position 110 of SEQ ID NO: 316494
uggucaucauucucugaau

SEQ ID NO: 327372 - RNA, 19 nt, Artificial Sequence
  Description of Artificial Sequence: Synthetic oligonucleotide
  Antisense Strand to SEQ ID NO: 327371
auucagagaaugaugacca

SEQ ID NO: 327373 - RNA, 19 nt, Artificial Sequence
  Description of Artificial Sequence: Synthetic oligonucleotide
  Sense Strand Starting at position 110 of SEQ ID NO: 316495
ggucaucauucucugaaug

SEQ ID NO: 327374 - RNA, 19 nt, Artificial Sequence
  Description of Artificial Sequence: Synthetic oligonucleotide
  Antisense Strand to SEQ ID NO: 327373
cauucagagaaugaugacc

SEQ ID NO: 327375 - RNA, 19 nt, Artificial Sequence
  Description of Artificial Sequence: Synthetic oligonucleotide
  Sense Strand Starting at position 110 of SEQ ID NO: 316562
ccaggaaaugaucguguug

SEQ ID NO: 327376 - RNA, 19 nt, Artificial Sequence
  Description of Artificial Sequence: Synthetic oligonucleotide
  Antisense Strand to SEQ ID NO: 327375
caacacgaucauuuccugg

SEQ ID NO: 327377 - RNA, 19 nt, Artificial Sequence
  Description of Artificial Sequence: Synthetic oligonucleotide
  Sense Strand Starting at position 110 of SEQ ID NO: 316568
aaugaucguguugaguuua

SEQ ID NO: 327378 - RNA, 19 nt, Artificial Sequence
  Description of Artificial Sequence: Synthetic oligonucleotide
  Antisense Strand to SEQ ID NO: 327377
uaaacucaacacgaucauu

SEQ ID NO: 327379 - RNA, 19 nt, Artificial Sequence
  Description of Artificial Sequence: Synthetic oligonucleotide
  Sense Strand Starting at position 110 of SEQ ID NO: 316581
aguuuaaggugccuugaga

SEQ ID NO: 327380 - RNA, 19 nt, Artificial Sequence
  Description of Artificial Sequence: Synthetic oligonucleotide
  Antisense Strand to SEQ ID NO: 327379
ucucaaggcaccuuaaacu

SEQ ID NO: 327381 - RNA, 19 nt, Artificial Sequence
  Description of Artificial Sequence: Synthetic oligonucleotide
  Sense Strand Starting at position 110 of SEQ ID NO: 317963
cuaggcuuucuugaggaga

SEQ ID NO: 327382 - RNA, 19 nt, Artificial Sequence
  Description of Artificial Sequence: Synthetic oligonucleotide
  Antisense Strand to SEQ ID NO: 327381
ucuccucaagaaagccuag

SEQ ID NO: 327383 - RNA, 19 nt, Artificial Sequence
  Description of Artificial Sequence: Synthetic oligonucleotide
  Sense Strand Starting at position 110 of SEQ ID NO: 317971
ucuugaggagaguggaauu

SEQ ID NO: 327384 - RNA, 19 nt, Artificial Sequence
  Description of Artificial Sequence: Synthetic oligonucleotide
  Antisense Strand to SEQ ID NO: 327383
aauuccacucuccucaaga

SEQ ID NO: 327385 - RNA, 19 nt, Artificial Sequence
  Description of Artificial Sequence: Synthetic oligonucleotide
  Sense Strand Starting at position 110 of SEQ ID NO: 318010
uagagcugucgugugcaga

SEQ ID NO: 327386 - RNA, 19 nt, Artificial Sequence
  Description of Artificial Sequence: Synthetic oligonucleotide
  Antisense Strand to SEQ ID NO: 327385
ucugcacacgacagcucua

SEQ ID NO: 327387 - RNA, 19 nt, Artificial Sequence
  Description of Artificial Sequence: Synthetic oligonucleotide
  Sense Strand Starting at position 110 of SEQ ID NO: 318029
caucuucggguuuagugaa

SEQ ID NO: 327388 - RNA, 19 nt, Artificial Sequence
  Description of Artificial Sequence: Synthetic oligonucleotide
  Antisense Strand to SEQ ID NO: 327387
uucacuaaacccgaagaug

SEQ ID NO: 327389 - RNA, 19 nt, Artificial Sequence
  Description of Artificial Sequence: Synthetic oligonucleotide
  Sense Strand Starting at position 110 of SEQ ID NO: 318267
ccuacaaguugagucaagu

SEQ ID NO: 327390 - RNA, 19 nt, Artificial Sequence
  Description of Artificial Sequence: Synthetic oligonucleotide
  Antisense Strand to SEQ ID NO: 327389
acuugacucaacuuguagg

SEQ ID NO: 327391 - RNA, 19 nt, Artificial Sequence
  Description of Artificial Sequence: Synthetic oligonucleotide
  Sense Strand Starting at position 110 of SEQ ID NO: 318471
agaaguuagccgcaauaga

SEQ ID NO: 327392 - RNA, 19 nt, Artificial Sequence
  Description of Artificial Sequence: Synthetic oligonucleotide
  Antisense Strand to SEQ ID NO: 327391
ucuauugcggcuaacuucu

SEQ ID NO: 327393 - RNA, 19 nt, Artificial Sequence
  Description of Artificial Sequence: Synthetic oligonucleotide
  Sense Strand Starting at position 110 of SEQ ID NO: 318486
uagagaauuuggcaaugga

SEQ ID NO: 327394 - RNA, 19 nt, Artificial Sequence
  Description of Artificial Sequence: Synthetic oligonucleotide
  Antisense Strand to SEQ ID NO: 327393
uccauugccaaauucucua

SEQ ID NO: 327395 - RNA, 19 nt, Artificial Sequence
  Description of Artificial Sequence: Synthetic oligonucleotide
  Sense Strand Starting at position 110 of SEQ ID NO: 318556
accugugaguguccuagga

SEQ ID NO: 327396 - RNA, 19 nt, Artificial Sequence
  Description of Artificial Sequence: Synthetic oligonucleotide
  Antisense Strand to SEQ ID NO: 327395
uccuaggacacucacaggu

SEQ ID NO: 327397 - RNA, 19 nt, Artificial Sequence
  Description of Artificial Sequence: Synthetic oligonucleotide
  Sense Strand Starting at position 110 of SEQ ID NO: 318560
gugaguguccuaggaauau

SEQ ID NO: 327398 - RNA, 19 nt, Artificial Sequence
  Description of Artificial Sequence: Synthetic oligonucleotide
  Antisense Strand to SEQ ID NO: 327397
auauuccuaggacacucac

SEQ ID NO: 327399 - RNA, 19 nt, Artificial Sequence
  Description of Artificial Sequence: Synthetic oligonucleotide
  Sense Strand Starting at position 110 of SEQ ID NO: 318571
aggaauauuugugaaagca

SEQ ID NO: 327400 - RNA, 19 nt, Artificial Sequence
  Description of Artificial Sequence: Synthetic oligonucleotide
  Antisense Strand to SEQ ID NO: 327399
ugcuuucacaaauauuccu

SEQ ID NO: 327401 - RNA, 19 nt, Artificial Sequence
  Description of Artificial Sequence: Synthetic oligonucleotide
  Sense Strand Starting at position 110 of SEQ ID NO: 318629
ggccuauaaugucuaagga

SEQ ID NO: 327402 - RNA, 19 nt, Artificial Sequence
  Description of Artificial Sequence: Synthetic oligonucleotide
  Antisense Strand to SEQ ID NO: 327401
uccuuagacauuauaggcc

SEQ ID NO: 327403 - RNA, 19 nt, Artificial Sequence
  Description of Artificial Sequence: Synthetic oligonucleotide
  Sense Strand Starting at position 110 of SEQ ID NO: 318630
gccuauaaugucuaaggag

SEQ ID NO: 327404 - RNA, 19 nt, Artificial Sequence
  Description of Artificial Sequence: Synthetic oligonucleotide
  Antisense Strand to SEQ ID NO: 327403
cuccuuagacauuauaggc

SEQ ID NO: 327405 - RNA, 19 nt, Artificial Sequence
  Description of Artificial Sequence: Synthetic oligonucleotide
  Sense Strand Starting at position 110 of SEQ ID NO: 318671
gguagucuccgucagauag

SEQ ID NO: 327406 - RNA, 19 nt, Artificial Sequence
  Description of Artificial Sequence: Synthetic oligonucleotide
  Antisense Strand to SEQ ID NO: 327405
cuaucugacggagacuacc

SEQ ID NO: 327407 - RNA, 19 nt, Artificial Sequence
  Description of Artificial Sequence: Synthetic oligonucleotide
  Sense Strand Starting at position 110 of SEQ ID NO: 318722
gacucugguccuggaaaga

SEQ ID NO: 327408 - RNA, 19 nt, Artificial Sequence
  Description of Artificial Sequence: Synthetic oligonucleotide
  Antisense Strand to SEQ ID NO: 327407
ucuuuccaggaccagaguc

SEQ ID NO: 327409 - RNA, 19 nt, Artificial Sequence
  Description of Artificial Sequence: Synthetic oligonucleotide
  Sense Strand Starting at position 110 of SEQ ID NO: 318794
ucaggaacagugugaauca

SEQ ID NO: 327410 - RNA, 19 nt, Artificial Sequence
  Description of Artificial Sequence: Synthetic oligonucleotide
  Antisense Strand to SEQ ID NO: 327409
ugauucacacuguuccuga

SEQ ID NO: 327411 - RNA, 19 nt, Artificial Sequence
  Description of Artificial Sequence: Synthetic oligonucleotide
  Sense Strand Starting at position 110 of SEQ ID NO: 318907
cugugcaacuuucuggaga

SEQ ID NO: 327412 - RNA, 19 nt, Artificial Sequence
  Description of Artificial Sequence: Synthetic oligonucleotide
  Antisense Strand to SEQ ID NO: 327411
ucuccagaaaguugcacag

SEQ ID NO: 327413 - RNA, 19 nt, Artificial Sequence
  Description of Artificial Sequence: Synthetic oligonucleotide
  Sense Strand Starting at position 110 of SEQ ID NO: 318951
cccucucccgcguuaauau

SEQ ID NO: 327414 - RNA, 19 nt, Artificial Sequence
  Description of Artificial Sequence: Synthetic oligonucleotide
  Antisense Strand to SEQ ID NO: 327413
auauuaacgcgggagaggg

SEQ ID NO: 327415 - RNA, 19 nt, Artificial Sequence
  Description of Artificial Sequence: Synthetic oligonucleotide
  Sense Strand Starting at position 110 of SEQ ID NO: 319026
gucucauaaugguuccaga

SEQ ID NO: 327416 - RNA, 19 nt, Artificial Sequence
  Description of Artificial Sequence: Synthetic oligonucleotide
  Antisense Strand to SEQ ID NO: 327415
ucuggaaccauuaugagac

SEQ ID NO: 327417 - RNA, 19 nt, Artificial Sequence
  Description of Artificial Sequence: Synthetic oligonucleotide
  Sense Strand Starting at position 110 of SEQ ID NO: 319050
cuucgacaauauucucaga

SEQ ID NO: 327418 - RNA, 19 nt, Artificial Sequence
  Description of Artificial Sequence: Synthetic oligonucleotide
  Antisense Strand to SEQ ID NO: 327417
ucugagaauauugucgaag

SEQ ID NO: 327419 - RNA, 19 nt, Artificial Sequence
  Description of Artificial Sequence: Synthetic oligonucleotide
  Sense Strand Starting at position 110 of SEQ ID NO: 319052
ucgacaauauucucagaga

SEQ ID NO: 327420 - RNA, 19 nt, Artificial Sequence
  Description of Artificial Sequence: Synthetic oligonucleotide
  Antisense Strand to SEQ ID NO: 327419
ucucugagaauauugucga

SEQ ID NO: 327421 - RNA, 19 nt, Artificial Sequence
  Description of Artificial Sequence: Synthetic oligonucleotide
  Sense Strand Starting at position 110 of SEQ ID NO: 319066
agagaaagcugagcauuau

SEQ ID NO: 327422 - RNA, 19 nt, Artificial Sequence
  Description of Artificial Sequence: Synthetic oligonucleotide
  Antisense Strand to SEQ ID NO: 327421
auaaugcucagcuuucucu

SEQ ID NO: 327423 - RNA, 19 nt, Artificial Sequence
  Description of Artificial Sequence: Synthetic oligonucleotide
  Sense Strand Starting at position 110 of SEQ ID NO: 319067
gagaaagcugagcauuauu

SEQ ID NO: 327424 - RNA, 19 nt, Artificial Sequence
  Description of Artificial Sequence: Synthetic oligonucleotide
  Antisense Strand to SEQ ID NO: 327423
aauaaugcucagcuuucuc

SEQ ID NO: 327425 - RNA, 19 nt, Artificial Sequence
  Description of Artificial Sequence: Synthetic oligonucleotide
  Sense Strand Starting at position 110 of SEQ ID NO: 319072
agcugagcauuauuaacau

SEQ ID NO: 327426 - RNA, 19 nt, Artificial Sequence
  Description of Artificial Sequence: Synthetic oligonucleotide
  Antisense Strand to SEQ ID NO: 327425
auguuaauaaugcucagcu

SEQ ID NO: 327427 - RNA, 19 nt, Artificial Sequence
  Description of Artificial Sequence: Synthetic oligonucleotide
  Sense Strand Starting at position 111 of SEQ ID NO: 315411
acuaguugguaggcugaga

SEQ ID NO: 327428 - RNA, 19 nt, Artificial Sequence
  Description of Artificial Sequence: Synthetic oligonucleotide
  Antisense Strand to SEQ ID NO: 327427
ucucagccuaccaacuagu

SEQ ID NO: 327429 - RNA, 19 nt, Artificial Sequence
  Description of Artificial Sequence: Synthetic oligonucleotide
  Sense Strand Starting at position 111 of SEQ ID NO: 315604
uggucuuauuacuccagaa

SEQ ID NO: 327430 - RNA, 19 nt, Artificial Sequence
  Description of Artificial Sequence: Synthetic oligonucleotide
  Antisense Strand to SEQ ID NO: 327429
uucuggaguaauaagacca

SEQ ID NO: 327431 - RNA, 19 nt, Artificial Sequence
  Description of Artificial Sequence: Synthetic oligonucleotide
  Sense Strand Starting at position 111 of SEQ ID NO: 315697
augaauaacucagagagua

SEQ ID NO: 327432 - RNA, 19 nt, Artificial Sequence
  Description of Artificial Sequence: Synthetic oligonucleotide
  Antisense Strand to SEQ ID NO: 327431
uacucucugaguuauucau

SEQ ID NO: 327433 - RNA, 19 nt, Artificial Sequence
  Description of Artificial Sequence: Synthetic oligonucleotide
  Sense Strand Starting at position 111 of SEQ ID NO: 315744
agugauacuuucccaugaa

SEQ ID NO: 327434 - RNA, 19 nt, Artificial Sequence
  Description of Artificial Sequence: Synthetic oligonucleotide
  Antisense Strand to SEQ ID NO: 327433
uucaugggaaaguaucacu

SEQ ID NO: 327435 - RNA, 19 nt, Artificial Sequence
  Description of Artificial Sequence: Synthetic oligonucleotide
  Sense Strand Starting at position 111 of SEQ ID NO: 316180
ggccgacaauuacuuucua

SEQ ID NO: 327436 - RNA, 19 nt, Artificial Sequence
  Description of Artificial Sequence: Synthetic oligonucleotide
  Antisense Strand to SEQ ID NO: 327435
uagaaaguaauugucggcc

SEQ ID NO: 327437 - RNA, 19 nt, Artificial Sequence
  Description of Artificial Sequence: Synthetic oligonucleotide
  Sense Strand Starting at position 111 of SEQ ID NO: 316181
gccgacaauuacuuucuaa

SEQ ID NO: 327438 - RNA, 19 nt, Artificial Sequence
  Description of Artificial Sequence: Synthetic oligonucleotide
  Antisense Strand to SEQ ID NO: 327437
uuagaaaguaauugucggc

SEQ ID NO: 327439 - RNA, 19 nt, Artificial Sequence
  Description of Artificial Sequence: Synthetic oligonucleotide
  Sense Strand Starting at position 111 of SEQ ID NO: 316263
guuuacaaucuguaguacu

SEQ ID NO: 327440 - RNA, 19 nt, Artificial Sequence
  Description of Artificial Sequence: Synthetic oligonucleotide
  Antisense Strand to SEQ ID NO: 327439
aguacuacagauuguaaac

SEQ ID NO: 327441 - RNA, 19 nt, Artificial Sequence
  Description of Artificial Sequence: Synthetic oligonucleotide
  Sense Strand Starting at position 111 of SEQ ID NO: 316345
gucugaugaugcccaccua

SEQ ID NO: 327442 - RNA, 19 nt, Artificial Sequence
  Description of Artificial Sequence: Synthetic oligonucleotide
  Antisense Strand to SEQ ID NO: 327441
uaggugggcaucaucagac

SEQ ID NO: 327443 - RNA, 19 nt, Artificial Sequence
  Description of Artificial Sequence: Synthetic oligonucleotide
  Sense Strand Starting at position 111 of SEQ ID NO: 316368
cagcguuuaggucaguauu

SEQ ID NO: 327444 - RNA, 19 nt, Artificial Sequence
  Description of Artificial Sequence: Synthetic oligonucleotide
  Antisense Strand to SEQ ID NO: 327443
aauacugaccuaaacgcug

SEQ ID NO: 327445 - RNA, 19 nt, Artificial Sequence
  Description of Artificial Sequence: Synthetic oligonucleotide
  Sense Strand Starting at position 111 of SEQ ID NO: 316473
aaagucaaguucuugagca

SEQ ID NO: 327446 - RNA, 19 nt, Artificial Sequence
  Description of Artificial Sequence: Synthetic oligonucleotide
  Antisense Strand to SEQ ID NO: 327445
ugcucaagaacuugacuuu

SEQ ID NO: 327447 - RNA, 19 nt, Artificial Sequence
  Description of Artificial Sequence: Synthetic oligonucleotide
  Sense Strand Starting at position 111 of SEQ ID NO: 316475
agucaaguucuugagcacu

SEQ ID NO: 327448 - RNA, 19 nt, Artificial Sequence
  Description of Artificial Sequence: Synthetic oligonucleotide
  Antisense Strand to SEQ ID NO: 327447
agugcucaagaacuugacu

SEQ ID NO: 327449 - RNA, 19 nt, Artificial Sequence
  Description of Artificial Sequence: Synthetic oligonucleotide
  Sense Strand Starting at position 111 of SEQ ID NO: 316477
ucaaguucuugagcacuaa

SEQ ID NO: 327450 - RNA, 19 nt, Artificial Sequence
  Description of Artificial Sequence: Synthetic oligonucleotide
  Antisense Strand to SEQ ID NO: 327449
uuagugcucaagaacuuga

SEQ ID NO: 327451 - RNA, 19 nt, Artificial Sequence
  Description of Artificial Sequence: Synthetic oligonucleotide
  Sense Strand Starting at position 111 of SEQ ID NO: 316481
guucuugagcacuaauucu

SEQ ID NO: 327452 - RNA, 19 nt, Artificial Sequence
  Description of Artificial Sequence: Synthetic oligonucleotide
  Antisense Strand to SEQ ID NO: 327451
agaauuagugcucaagaac

SEQ ID NO: 327453 - RNA, 19 nt, Artificial Sequence
  Description of Artificial Sequence: Synthetic oligonucleotide
  Sense Strand Starting at position 111 of SEQ ID NO: 316489
gcacuaauucuugagagca

SEQ ID NO: 327454 - RNA, 19 nt, Artificial Sequence
  Description of Artificial Sequence: Synthetic oligonucleotide
  Antisense Strand to SEQ ID NO: 327453
ugcucucaagaauuagugc

SEQ ID NO: 327455 - RNA, 19 nt, Artificial Sequence
  Description of Artificial Sequence: Synthetic oligonucleotide
  Sense Strand Starting at position 111 of SEQ ID NO: 316497
ucuugagagcacuguaaug

SEQ ID NO: 327456 - RNA, 19 nt, Artificial Sequence
  Description of Artificial Sequence: Synthetic oligonucleotide
  Antisense Strand to SEQ ID NO: 327455
cauuacagugcucucaaga

SEQ ID NO: 327457 - RNA, 19 nt, Artificial Sequence
  Description of Artificial Sequence: Synthetic oligonucleotide
  Sense Strand Starting at position 111 of SEQ ID NO: 316523
ugaagucacuggucucaca

SEQ ID NO: 327458 - RNA, 19 nt, Artificial Sequence
  Description of Artificial Sequence: Synthetic oligonucleotide
  Antisense Strand to SEQ ID NO: 327457
ugugagaccagugacuuca

SEQ ID NO: 327459 - RNA, 19 nt, Artificial Sequence
  Description of Artificial Sequence: Synthetic oligonucleotide
  Sense Strand Starting at position 111 of SEQ ID NO: 316561
cauauuucuugcuagaggu

SEQ ID NO: 327460 - RNA, 19 nt, Artificial Sequence
  Description of Artificial Sequence: Synthetic oligonucleotide
  Antisense Strand to SEQ ID NO: 327459
accucuagcaagaaauaug

SEQ ID NO: 327461 - RNA, 19 nt, Artificial Sequence
  Description of Artificial Sequence: Synthetic oligonucleotide
  Sense Strand Starting at position 111 of SEQ ID NO: 316658
accuaaauuuaguaaggaa

SEQ ID NO: 327462 - RNA, 19 nt, Artificial Sequence
  Description of Artificial Sequence: Synthetic oligonucleotide
  Antisense Strand to SEQ ID NO: 327461
uuccuuacuaaauuuaggu

SEQ ID NO: 327463 - RNA, 19 nt, Artificial Sequence
  Description of Artificial Sequence: Synthetic oligonucleotide
  Sense Strand Starting at position 111 of SEQ ID NO: 316717
cggauaugaagaugcaaga

SEQ ID NO: 327464 - RNA, 19 nt, Artificial Sequence
  Description of Artificial Sequence: Synthetic oligonucleotide
  Antisense Strand to SEQ ID NO: 327463
ucuugcaucuucauauccg

SEQ ID NO: 327465 - RNA, 19 nt, Artificial Sequence
  Description of Artificial Sequence: Synthetic oligonucleotide
  Sense Strand Starting at position 111 of SEQ ID NO: 316766
aacgguauggcugaauaaa

SEQ ID NO: 327466 - RNA, 19 nt, Artificial Sequence
  Description of Artificial Sequence: Synthetic oligonucleotide
  Antisense Strand to SEQ ID NO: 327465
uuuauucagccauaccguu

SEQ ID NO: 327467 - RNA, 19 nt, Artificial Sequence
  Description of Artificial Sequence: Synthetic oligonucleotide
  Sense Strand Starting at position 111 of SEQ ID NO: 318636
aguggauugugggugagaa

SEQ ID NO: 327468 - RNA, 19 nt, Artificial Sequence
  Description of Artificial Sequence: Synthetic oligonucleotide
  Antisense Strand to SEQ ID NO: 327467
uucucacccacaauccacu

SEQ ID NO: 327469 - RNA, 19 nt, Artificial Sequence
  Description of Artificial Sequence: Synthetic oligonucleotide
  Sense Strand Starting at position 111 of SEQ ID NO: 318637
guggauugugggugagaag

SEQ ID NO: 327470 - RNA, 19 nt, Artificial Sequence
  Description of Artificial Sequence: Synthetic oligonucleotide
  Antisense Strand to SEQ ID NO: 327469
cuucucacccacaauccac

SEQ ID NO: 327471 - RNA, 19 nt, Artificial Sequence
  Description of Artificial Sequence: Synthetic oligonucleotide
  Sense Strand Starting at position 111 of SEQ ID NO: 318696
gagguauccggagggugau

SEQ ID NO: 327472 - RNA, 19 nt, Artificial Sequence
  Description of Artificial Sequence: Synthetic oligonucleotide
  Antisense Strand to SEQ ID NO: 327471
aucacccuccggauaccuc

SEQ ID NO: 327473 - RNA, 19 nt, Artificial Sequence
  Description of Artificial Sequence: Synthetic oligonucleotide
  Sense Strand Starting at position 111 of SEQ ID NO: 318706
gagggugaucaggaagugu

SEQ ID NO: 327474 - RNA, 19 nt, Artificial Sequence
  Description of Artificial Sequence: Synthetic oligonucleotide
  Antisense Strand to SEQ ID NO: 327473
acacuuccugaucacccuc

SEQ ID NO: 327475 - RNA, 19 nt, Artificial Sequence
  Description of Artificial Sequence: Synthetic oligonucleotide
  Sense Strand Starting at position 111 of SEQ ID NO: 318717
ggaaguguaccugggagau

SEQ ID NO: 327476 - RNA, 19 nt, Artificial Sequence
  Description of Artificial Sequence: Synthetic oligonucleotide
  Antisense Strand to SEQ ID NO: 327475
aucucccagguacacuucc

SEQ ID NO: 327477 - RNA, 19 nt, Artificial Sequence
  Description of Artificial Sequence: Synthetic oligonucleotide
  Sense Strand Starting at position 111 of SEQ ID NO: 318719
aaguguaccugggagauuu

SEQ ID NO: 327478 - RNA, 19 nt, Artificial Sequence
  Description of Artificial Sequence: Synthetic oligonucleotide
  Antisense Strand to SEQ ID NO: 327477
aaaucucccagguacacuu

SEQ ID NO: 327479 - RNA, 19 nt, Artificial Sequence
  Description of Artificial Sequence: Synthetic oligonucleotide
  Sense Strand Starting at position 111 of SEQ ID NO: 318823
gggugguugucagcuggga

SEQ ID NO: 327480 - RNA, 19 nt, Artificial Sequence
  Description of Artificial Sequence: Synthetic oligonucleotide
  Antisense Strand to SEQ ID NO: 327479
ucccagcugacaaccaccc

SEQ ID NO: 327481 - RNA, 19 nt, Artificial Sequence
  Description of Artificial Sequence: Synthetic oligonucleotide
  Sense Strand Starting at position 111 of SEQ ID NO: 318825
gugguugucagcugggaug

SEQ ID NO: 327482 - RNA, 19 nt, Artificial Sequence
  Description of Artificial Sequence: Synthetic oligonucleotide
  Antisense Strand to SEQ ID NO: 327481
caucccagcugacaaccac

SEQ ID NO: 327483 - RNA, 19 nt, Artificial Sequence
  Description of Artificial Sequence: Synthetic oligonucleotide
  Sense Strand Starting at position 111 of SEQ ID NO: 318827
gguugucagcugggaugaa

SEQ ID NO: 327484 - RNA, 19 nt, Artificial Sequence
  Description of Artificial Sequence: Synthetic oligonucleotide
  Antisense Strand to SEQ ID NO: 327483
uucaucccagcugacaacc

SEQ ID NO: 327485 - RNA, 19 nt, Artificial Sequence
  Description of Artificial Sequence: Synthetic oligonucleotide
  Sense Strand Starting at position 111 of SEQ ID NO: 318863
uggguuuguggacagucua

SEQ ID NO: 327486 - RNA, 19 nt, Artificial Sequence
  Description of Artificial Sequence: Synthetic oligonucleotide
  Antisense Strand to SEQ ID NO: 327485
uagacuguccacaaaccca

SEQ ID NO: 327487 - RNA, 19 nt, Artificial Sequence
  Description of Artificial Sequence: Synthetic oligonucleotide
  Sense Strand Starting at position 111 of SEQ ID NO: 318877
gucuaagggagauggucua

SEQ ID NO: 327488 - RNA, 19 nt, Artificial Sequence
  Description of Artificial Sequence: Synthetic oligonucleotide
  Antisense Strand to SEQ ID NO: 327487
uagaccaucucccuuagac

SEQ ID NO: 327489 - RNA, 19 nt, Artificial Sequence
  Description of Artificial Sequence: Synthetic oligonucleotide
  Sense Strand Starting at position 111 of SEQ ID NO: 318896
uggacugagagcggaaaua

SEQ ID NO: 327490 - RNA, 19 nt, Artificial Sequence
  Description of Artificial Sequence: Synthetic oligonucleotide
  Antisense Strand to SEQ ID NO: 327489
uauuuccgcucucagucca

SEQ ID NO: 327491 - RNA, 19 nt, Artificial Sequence
  Description of Artificial Sequence: Synthetic oligonucleotide
  Sense Strand Starting at position 111 of SEQ ID NO: 318906
gcggaaauaaggugacacu

SEQ ID NO: 327492 - RNA, 19 nt, Artificial Sequence
  Description of Artificial Sequence: Synthetic oligonucleotide
  Antisense Strand to SEQ ID NO: 327491
agugucaccuuauuuccgc

SEQ ID NO: 327493 - RNA, 19 nt, Artificial Sequence
  Description of Artificial Sequence: Synthetic oligonucleotide
  Sense Strand Starting at position 111 of SEQ ID NO: 318962
ccuacaagguaucugguua

SEQ ID NO: 327494 - RNA, 19 nt, Artificial Sequence
  Description of Artificial Sequence: Synthetic oligonucleotide
  Antisense Strand to SEQ ID NO: 327493
uaaccagauaccuuguagg

SEQ ID NO: 327495 - RNA, 19 nt, Artificial Sequence
  Description of Artificial Sequence: Synthetic oligonucleotide
  Sense Strand Starting at position 111 of SEQ ID NO: 318966
caagguaucugguuaggga

SEQ ID NO: 327496 - RNA, 19 nt, Artificial Sequence
  Description of Artificial Sequence: Synthetic oligonucleotide
  Antisense Strand to SEQ ID NO: 327495
ucccuaaccagauaccuug

SEQ ID NO: 327497 - RNA, 19 nt, Artificial Sequence
  Description of Artificial Sequence: Synthetic oligonucleotide
  Sense Strand Starting at position 111 of SEQ ID NO: 318993
guccuuugauaucugggaa

SEQ ID NO: 327498 - RNA, 19 nt, Artificial Sequence
  Description of Artificial Sequence: Synthetic oligonucleotide
  Antisense Strand to SEQ ID NO: 327497
uucccagauaucaaaggac

SEQ ID NO: 327499 - RNA, 19 nt, Artificial Sequence
  Description of Artificial Sequence: Synthetic oligonucleotide
  Sense Strand Starting at position 111 of SEQ ID NO: 318994
uccuuugauaucugggaag

SEQ ID NO: 327500 - RNA, 19 nt, Artificial Sequence
  Description of Artificial Sequence: Synthetic oligonucleotide
  Antisense Strand to SEQ ID NO: 327499
cuucccagauaucaaagga

SEQ ID NO: 327501 - RNA, 19 nt, Artificial Sequence
  Description of Artificial Sequence: Synthetic oligonucleotide
  Sense Strand Starting at position 111 of SEQ ID NO: 319050
gugaccgguaacuguaaau

SEQ ID NO: 327502 - RNA, 19 nt, Artificial Sequence
  Description of Artificial Sequence: Synthetic oligonucleotide
  Antisense Strand to SEQ ID NO: 327501
auuuacaguuaccggucac

SEQ ID NO: 327503 - RNA, 19 nt, Artificial Sequence
  Description of Artificial Sequence: Synthetic oligonucleotide
  Sense Strand Starting at position 111 of SEQ ID NO: 319062
uguaaaugccuguggagag

SEQ ID NO: 327504 - RNA, 19 nt, Artificial Sequence
  Description of Artificial Sequence: Synthetic oligonucleotide
  Antisense Strand to SEQ ID NO: 327503
cucuccacaggcauuuaca

SEQ ID NO: 327505 - RNA, 19 nt, Artificial Sequence
  Description of Artificial Sequence: Synthetic oligonucleotide
  Sense Strand Starting at position 111 of SEQ ID NO: 319161
uuuccagacugauaaagag

SEQ ID NO: 327506 - RNA, 19 nt, Artificial Sequence
  Description of Artificial Sequence: Synthetic oligonucleotide
  Antisense Strand to SEQ ID NO: 327505
cucuuuaucagucuggaaa

SEQ ID NO: 327507 - RNA, 19 nt, Artificial Sequence
  Description of Artificial Sequence: Synthetic oligonucleotide
  Sense Strand Starting at position 112 of SEQ ID NO: 315270
acacaaguaucucuauagu

SEQ ID NO: 327508 - RNA, 19 nt, Artificial Sequence
  Description of Artificial Sequence: Synthetic oligonucleotide
  Antisense Strand to SEQ ID NO: 327507
acuauagagauacuugugu

SEQ ID NO: 327509 - RNA, 19 nt, Artificial Sequence
  Description of Artificial Sequence: Synthetic oligonucleotide
  Sense Strand Starting at position 112 of SEQ ID NO: 315276
guaucucuauagucucaau

SEQ ID NO: 327510 - RNA, 19 nt, Artificial Sequence
  Description of Artificial Sequence: Synthetic oligonucleotide
  Antisense Strand to SEQ ID NO: 327509
auugagacuauagagauac

SEQ ID NO: 327511 - RNA, 19 nt, Artificial Sequence
  Description of Artificial Sequence: Synthetic oligonucleotide
  Sense Strand Starting at position 112 of SEQ ID NO: 315287
gucucaauuuggucuaggu

SEQ ID NO: 327512 - RNA, 19 nt, Artificial Sequence
  Description of Artificial Sequence: Synthetic oligonucleotide
  Antisense Strand to SEQ ID NO: 327511
accuagaccaaauugagac

SEQ ID NO: 327513 - RNA, 19 nt, Artificial Sequence
  Description of Artificial Sequence: Synthetic oligonucleotide
  Sense Strand Starting at position 112 of SEQ ID NO: 315321
ugaaacauaugggcuauua

SEQ ID NO: 327514 - RNA, 19 nt, Artificial Sequence
  Description of Artificial Sequence: Synthetic oligonucleotide
  Antisense Strand to SEQ ID NO: 327513
uaauagcccauauguuuca

SEQ ID NO: 327515 - RNA, 19 nt, Artificial Sequence
  Description of Artificial Sequence: Synthetic oligonucleotide
  Sense Strand Starting at position 112 of SEQ ID NO: 315570
agagcaacucugcaaggua

SEQ ID NO: 327516 - RNA, 19 nt, Artificial Sequence
  Description of Artificial Sequence: Synthetic oligonucleotide
  Antisense Strand to SEQ ID NO: 327515
uaccuugcagaguugcucu

SEQ ID NO: 327517 - RNA, 19 nt, Artificial Sequence
  Description of Artificial Sequence: Synthetic oligonucleotide
  Sense Strand Starting at position 112 of SEQ ID NO: 315573
gcaacucugcaagguacaa

SEQ ID NO: 327518 - RNA, 19 nt, Artificial Sequence
  Description of Artificial Sequence: Synthetic oligonucleotide
  Antisense Strand to SEQ ID NO: 327517
uuguaccuugcagaguugc

SEQ ID NO: 327519 - RNA, 19 nt, Artificial Sequence
  Description of Artificial Sequence: Synthetic oligonucleotide
  Sense Strand Starting at position 112 of SEQ ID NO: 315804
augagugauuaauuaccca

SEQ ID NO: 327520 - RNA, 19 nt, Artificial Sequence
  Description of Artificial Sequence: Synthetic oligonucleotide
  Antisense Strand to SEQ ID NO: 327519
uggguaauuaaucacucau

SEQ ID NO: 327521 - RNA, 19 nt, Artificial Sequence
  Description of Artificial Sequence: Synthetic oligonucleotide
  Sense Strand Starting at position 112 of SEQ ID NO: 315808
gugauuaauuacccaggaa

SEQ ID NO: 327522 - RNA, 19 nt, Artificial Sequence
  Description of Artificial Sequence: Synthetic oligonucleotide
  Antisense Strand to SEQ ID NO: 327521
uuccuggguaauuaaucac

SEQ ID NO: 327523 - RNA, 19 nt, Artificial Sequence
  Description of Artificial Sequence: Synthetic oligonucleotide
  Sense Strand Starting at position 112 of SEQ ID NO: 315841
augagucugcaacacacau

SEQ ID NO: 327524 - RNA, 19 nt, Artificial Sequence
  Description of Artificial Sequence: Synthetic oligonucleotide
  Antisense Strand to SEQ ID NO: 327523
auguguguugcagacucau

SEQ ID NO: 327525 - RNA, 19 nt, Artificial Sequence
  Description of Artificial Sequence: Synthetic oligonucleotide
  Sense Strand Starting at position 112 of SEQ ID NO: 316102
uccggucaagcucauuauu

SEQ ID NO: 327526 - RNA, 19 nt, Artificial Sequence
  Description of Artificial Sequence: Synthetic oligonucleotide
  Antisense Strand to SEQ ID NO: 327525
aauaaugagcuugaccgga

SEQ ID NO: 327527 - RNA, 19 nt, Artificial Sequence
  Description of Artificial Sequence: Synthetic oligonucleotide
  Sense Strand Starting at position 112 of SEQ ID NO: 316105
ggucaagcucauuauuaca

SEQ ID NO: 327528 - RNA, 19 nt, Artificial Sequence
  Description of Artificial Sequence: Synthetic oligonucleotide
  Antisense Strand to SEQ ID NO: 327527
uguaauaaugagcuugacc

SEQ ID NO: 327529 - RNA, 19 nt, Artificial Sequence
  Description of Artificial Sequence: Synthetic oligonucleotide
  Sense Strand Starting at position 112 of SEQ ID NO: 316198
gucugagacagguaaggua

SEQ ID NO: 327530 - RNA, 19 nt, Artificial Sequence
  Description of Artificial Sequence: Synthetic oligonucleotide
  Antisense Strand to SEQ ID NO: 327529
uaccuuaccugucucagac

SEQ ID NO: 327531 - RNA, 19 nt, Artificial Sequence
  Description of Artificial Sequence: Synthetic oligonucleotide
  Sense Strand Starting at position 112 of SEQ ID NO: 316309
gcagucaguccauaauuaa

SEQ ID NO: 327532 - RNA, 19 nt, Artificial Sequence
  Description of Artificial Sequence: Synthetic oligonucleotide
  Antisense Strand to SEQ ID NO: 327531
uuaauuauggacugacugc

SEQ ID NO: 327533 - RNA, 19 nt, Artificial Sequence
  Description of Artificial Sequence: Synthetic oligonucleotide
  Sense Strand Starting at position 112 of SEQ ID NO: 316312
gucaguccauaauuaaauu

SEQ ID NO: 327534 - RNA, 19 nt, Artificial Sequence
  Description of Artificial Sequence: Synthetic oligonucleotide
  Antisense Strand to SEQ ID NO: 327533
aauuuaauuauggacugac

SEQ ID NO: 327535 - RNA, 19 nt, Artificial Sequence
  Description of Artificial Sequence: Synthetic oligonucleotide
  Sense Strand Starting at position 112 of SEQ ID NO: 316357
augacuucccaggguuacu

SEQ ID NO: 327536 - RNA, 19 nt, Artificial Sequence
  Description of Artificial Sequence: Synthetic oligonucleotide
  Antisense Strand to SEQ ID NO: 327535
aguaacccugggaagucau

SEQ ID NO: 327537 - RNA, 19 nt, Artificial Sequence
  Description of Artificial Sequence: Synthetic oligonucleotide
  Sense Strand Starting at position 112 of SEQ ID NO: 316367
aggguuacuguuuguauuu

SEQ ID NO: 327538 - RNA, 19 nt, Artificial Sequence
  Description of Artificial Sequence: Synthetic oligonucleotide
  Antisense Strand to SEQ ID NO: 327537
aaauacaaacaguaacccu

SEQ ID NO: 327539 - RNA, 19 nt, Artificial Sequence
  Description of Artificial Sequence: Synthetic oligonucleotide
  Sense Strand Starting at position 112 of SEQ ID NO: 316422
gaaacuuugcuguggaauu

SEQ ID NO: 327540 - RNA, 19 nt, Artificial Sequence
  Description of Artificial Sequence: Synthetic oligonucleotide
  Antisense Strand to SEQ ID NO: 327539
aauuccacagcaaaguuuc

SEQ ID NO: 327541 - RNA, 19 nt, Artificial Sequence
  Description of Artificial Sequence: Synthetic oligonucleotide
  Sense Strand Starting at position 112 of SEQ ID NO: 316424
aacuuugcuguggaauuga

SEQ ID NO: 327542 - RNA, 19 nt, Artificial Sequence
  Description of Artificial Sequence: Synthetic oligonucleotide
  Antisense Strand to SEQ ID NO: 327541
ucaauuccacagcaaaguu

SEQ ID NO: 327543 - RNA, 19 nt, Artificial Sequence
  Description of Artificial Sequence: Synthetic oligonucleotide
  Sense Strand Starting at position 112 of SEQ ID NO: 316429
ugcuguggaauugaaguau

SEQ ID NO: 327544 - RNA, 19 nt, Artificial Sequence
  Description of Artificial Sequence: Synthetic oligonucleotide
  Antisense Strand to SEQ ID NO: 327543
auacuucaauuccacagca

SEQ ID NO: 327545 - RNA, 19 nt, Artificial Sequence
  Description of Artificial Sequence: Synthetic oligonucleotide
  Sense Strand Starting at position 112 of SEQ ID NO: 316614
gggaacuguuuggugcaaa

SEQ ID NO: 327546 - RNA, 19 nt, Artificial Sequence
  Description of Artificial Sequence: Synthetic oligonucleotide
  Antisense Strand to SEQ ID NO: 327545
uuugcaccaaacaguuccc

SEQ ID NO: 327547 - RNA, 19 nt, Artificial Sequence
  Description of Artificial Sequence: Synthetic oligonucleotide
  Sense Strand Starting at position 112 of SEQ ID NO: 316679
aucugaacuuuggccagau

SEQ ID NO: 327548 - RNA, 19 nt, Artificial Sequence
  Description of Artificial Sequence: Synthetic oligonucleotide
  Antisense Strand to SEQ ID NO: 327547
aucuggccaaaguucagau

SEQ ID NO: 327549 - RNA, 19 nt, Artificial Sequence
  Description of Artificial Sequence: Synthetic oligonucleotide
  Sense Strand Starting at position 112 of SEQ ID NO: 316681
cugaacuuuggccagauca

SEQ ID NO: 327550 - RNA, 19 nt, Artificial Sequence
  Description of Artificial Sequence: Synthetic oligonucleotide
  Antisense Strand to SEQ ID NO: 327549
ugaucuggccaaaguucag

SEQ ID NO: 327551 - RNA, 19 nt, Artificial Sequence
  Description of Artificial Sequence: Synthetic oligonucleotide
  Sense Strand Starting at position 112 of SEQ ID NO: 316688
uuggccagaucacucaaau

SEQ ID NO: 327552 - RNA, 19 nt, Artificial Sequence
  Description of Artificial Sequence: Synthetic oligonucleotide
  Antisense Strand to SEQ ID NO: 327551
auuugagugaucuggccaa

SEQ ID NO: 327553 - RNA, 19 nt, Artificial Sequence
  Description of Artificial Sequence: Synthetic oligonucleotide
  Sense Strand Starting at position 112 of SEQ ID NO: 316888
ccaaaucugcuugguucua

SEQ ID NO: 327554 - RNA, 19 nt, Artificial Sequence
  Description of Artificial Sequence: Synthetic oligonucleotide
  Antisense Strand to SEQ ID NO: 327553
uagaaccaagcagauuugg

SEQ ID NO: 327555 - RNA, 19 nt, Artificial Sequence
  Description of Artificial Sequence: Synthetic oligonucleotide
  Sense Strand Starting at position 112 of SEQ ID NO: 316897
cuugguucuauguaagguu

SEQ ID NO: 327556 - RNA, 19 nt, Artificial Sequence
  Description of Artificial Sequence: Synthetic oligonucleotide
  Antisense Strand to SEQ ID NO: 327555
aaccuuacauagaaccaag

SEQ ID NO: 327557 - RNA, 19 nt, Artificial Sequence
  Description of Artificial Sequence: Synthetic oligonucleotide
  Sense Strand Starting at position 112 of SEQ ID NO: 316905
uauguaagguuagcaaaga

SEQ ID NO: 327558 - RNA, 19 nt, Artificial Sequence
  Description of Artificial Sequence: Synthetic oligonucleotide
  Antisense Strand to SEQ ID NO: 327557
ucuuugcuaaccuuacaua

SEQ ID NO: 327559 - RNA, 19 nt, Artificial Sequence
  Description of Artificial Sequence: Synthetic oligonucleotide
  Sense Strand Starting at position 112 of SEQ ID NO: 317277
gcguccuggcugguguaaa

SEQ ID NO: 327560 - RNA, 19 nt, Artificial Sequence
  Description of Artificial Sequence: Synthetic oligonucleotide
  Antisense Strand to SEQ ID NO: 327559
uuuacaccagccaggacgc

SEQ ID NO: 327561 - RNA, 19 nt, Artificial Sequence
  Description of Artificial Sequence: Synthetic oligonucleotide
  Sense Strand Starting at position 112 of SEQ ID NO: 317288
gguguaaauuaaucuuucu

SEQ ID NO: 327562 - RNA, 19 nt, Artificial Sequence
  Description of Artificial Sequence: Synthetic oligonucleotide
  Antisense Strand to SEQ ID NO: 327561
agaaagauuaauuuacacc

SEQ ID NO: 327563 - RNA, 19 nt, Artificial Sequence
  Description of Artificial Sequence: Synthetic oligonucleotide
  Sense Strand Starting at position 112 of SEQ ID NO: 317485
gguagaccuaaaggucuua

SEQ ID NO: 327564 - RNA, 19 nt, Artificial Sequence
  Description of Artificial Sequence: Synthetic oligonucleotide
  Antisense Strand to SEQ ID NO: 327563
uaagaccuuuaggucuacc

SEQ ID NO: 327565 - RNA, 19 nt, Artificial Sequence
  Description of Artificial Sequence: Synthetic oligonucleotide
  Sense Strand Starting at position 112 of SEQ ID NO: 317655
uucugugcauauuuguaaa

SEQ ID NO: 327566 - RNA, 19 nt, Artificial Sequence
  Description of Artificial Sequence: Synthetic oligonucleotide
  Antisense Strand to SEQ ID NO: 327565
uuuacaaauaugcacagaa

SEQ ID NO: 327567 - RNA, 19 nt, Artificial Sequence
  Description of Artificial Sequence: Synthetic oligonucleotide
  Sense Strand Starting at position 112 of SEQ ID NO: 318052
acugccaagugaucugagu

SEQ ID NO: 327568 - RNA, 19 nt, Artificial Sequence
  Description of Artificial Sequence: Synthetic oligonucleotide
  Antisense Strand to SEQ ID NO: 327567
acucagaucacuuggcagu

SEQ ID NO: 327569 - RNA, 19 nt, Artificial Sequence
  Description of Artificial Sequence: Synthetic oligonucleotide
  Sense Strand Starting at position 112 of SEQ ID NO: 318410
gauuccuuacaguaacguu

SEQ ID NO: 327570 - RNA, 19 nt, Artificial Sequence
  Description of Artificial Sequence: Synthetic oligonucleotide
  Antisense Strand to SEQ ID NO: 327569
aacguuacuguaaggaauc

SEQ ID NO: 327571 - RNA, 19 nt, Artificial Sequence
  Description of Artificial Sequence: Synthetic oligonucleotide
  Sense Strand Starting at position 112 of SEQ ID NO: 318732
guaggaggaucuuucugga

SEQ ID NO: 327572 - RNA, 19 nt, Artificial Sequence
  Description of Artificial Sequence: Synthetic oligonucleotide
  Antisense Strand to SEQ ID NO: 327571
uccagaaagauccuccuac

SEQ ID NO: 327573 - RNA, 19 nt, Artificial Sequence
  Description of Artificial Sequence: Synthetic oligonucleotide
  Sense Strand Starting at position 112 of SEQ ID NO: 318772
acuguacuuguaugacaga

SEQ ID NO: 327574 - RNA, 19 nt, Artificial Sequence
  Description of Artificial Sequence: Synthetic oligonucleotide
  Antisense Strand to SEQ ID NO: 327573
ucugucauacaaguacagu

SEQ ID NO: 327575 - RNA, 19 nt, Artificial Sequence
  Description of Artificial Sequence: Synthetic oligonucleotide
  Sense Strand Starting at position 112 of SEQ ID NO: 318848
uucguacacagugauugua

SEQ ID NO: 327576 - RNA, 19 nt, Artificial Sequence
  Description of Artificial Sequence: Synthetic oligonucleotide
  Antisense Strand to SEQ ID NO: 327575
uacaaucacuguguacgaa

SEQ ID NO: 327577 - RNA, 19 nt, Artificial Sequence
  Description of Artificial Sequence: Synthetic oligonucleotide
  Sense Strand Starting at position 112 of SEQ ID NO: 318851
guacacagugauuguacga

SEQ ID NO: 327578 - RNA, 19 nt, Artificial Sequence
  Description of Artificial Sequence: Synthetic oligonucleotide
  Antisense Strand to SEQ ID NO: 327577
ucguacaaucacuguguac

SEQ ID NO: 327579 - RNA, 19 nt, Artificial Sequence
  Description of Artificial Sequence: Synthetic oligonucleotide
  Sense Strand Starting at position 112 of SEQ ID NO: 318890
cguuaugagagucagccaa

SEQ ID NO: 327580 - RNA, 19 nt, Artificial Sequence
  Description of Artificial Sequence: Synthetic oligonucleotide
  Antisense Strand to SEQ ID NO: 327579
uuggcugacucucauaacg

SEQ ID NO: 327581 - RNA, 19 nt, Artificial Sequence
  Description of Artificial Sequence: Synthetic oligonucleotide
  Sense Strand Starting at position 112 of SEQ ID NO: 319072
agggaugaauggucgugua

SEQ ID NO: 327582 - RNA, 19 nt, Artificial Sequence
  Description of Artificial Sequence: Synthetic oligonucleotide
  Antisense Strand to SEQ ID NO: 327581
uacacgaccauucaucccu

SEQ ID NO: 327583 - RNA, 19 nt, Artificial Sequence
  Description of Artificial Sequence: Synthetic oligonucleotide
  Sense Strand Starting at position 112 of SEQ ID NO: 319073
gggaugaauggucguguau

SEQ ID NO: 327584 - RNA, 19 nt, Artificial Sequence
  Description of Artificial Sequence: Synthetic oligonucleotide
  Antisense Strand to SEQ ID NO: 327583
auacacgaccauucauccc

SEQ ID NO: 327585 - RNA, 19 nt, Artificial Sequence
  Description of Artificial Sequence: Synthetic oligonucleotide
  Sense Strand Starting at position 112 of SEQ ID NO: 319210
ugcuuuguucugcuuguaa

SEQ ID NO: 327586 - RNA, 19 nt, Artificial Sequence
  Description of Artificial Sequence: Synthetic oligonucleotide
  Antisense Strand to SEQ ID NO: 327585
uuacaagcagaacaaagca

SEQ ID NO: 327587 - RNA, 19 nt, Artificial Sequence
  Description of Artificial Sequence: Synthetic oligonucleotide
  Sense Strand Starting at position 113 of SEQ ID NO: 315362
gcaucacauuuguugccua

SEQ ID NO: 327588 - RNA, 19 nt, Artificial Sequence
  Description of Artificial Sequence: Synthetic oligonucleotide
  Antisense Strand to SEQ ID NO: 327587
uaggcaacaaaugugaugc

SEQ ID NO: 327589 - RNA, 19 nt, Artificial Sequence
  Description of Artificial Sequence: Synthetic oligonucleotide
  Sense Strand Starting at position 113 of SEQ ID NO: 315365
ucacauuuguugccuaagu

SEQ ID NO: 327590 - RNA, 19 nt, Artificial Sequence
  Description of Artificial Sequence: Synthetic oligonucleotide
  Antisense Strand to SEQ ID NO: 327589
acuuaggcaacaaauguga

SEQ ID NO: 327591 - RNA, 19 nt, Artificial Sequence
  Description of Artificial Sequence: Synthetic oligonucleotide
  Sense Strand Starting at position 113 of SEQ ID NO: 315374
uugccuaaguauguaagau

SEQ ID NO: 327592 - RNA, 19 nt, Artificial Sequence
  Description of Artificial Sequence: Synthetic oligonucleotide
  Antisense Strand to SEQ ID NO: 327591
aucuuacauacuuaggcaa

SEQ ID NO: 327593 - RNA, 19 nt, Artificial Sequence
  Description of Artificial Sequence: Synthetic oligonucleotide
  Sense Strand Starting at position 113 of SEQ ID NO: 315387
uaagauaguugauuccaga

SEQ ID NO: 327594 - RNA, 19 nt, Artificial Sequence
  Description of Artificial Sequence: Synthetic oligonucleotide
  Antisense Strand to SEQ ID NO: 327593
ucuggaaucaacuaucuua

SEQ ID NO: 327595 - RNA, 19 nt, Artificial Sequence
  Description of Artificial Sequence: Synthetic oligonucleotide
  Sense Strand Starting at position 113 of SEQ ID NO: 315394
guugauuccagaggcugaa

SEQ ID NO: 327596 - RNA, 19 nt, Artificial Sequence
  Description of Artificial Sequence: Synthetic oligonucleotide
  Antisense Strand to SEQ ID NO: 327595
uucagccucuggaaucaac

SEQ ID NO: 327597 - RNA, 19 nt, Artificial Sequence
  Description of Artificial Sequence: Synthetic oligonucleotide
  Sense Strand Starting at position 113 of SEQ ID NO: 315617
ucaagcucuugagcucaaa

SEQ ID NO: 327598 - RNA, 19 nt, Artificial Sequence
  Description of Artificial Sequence: Synthetic oligonucleotide
  Antisense Strand to SEQ ID NO: 327597
uuugagcucaagagcuuga

SEQ ID NO: 327599 - RNA, 19 nt, Artificial Sequence
  Description of Artificial Sequence: Synthetic oligonucleotide
  Sense Strand Starting at position 113 of SEQ ID NO: 315620
agcucuugagcucaaacca

SEQ ID NO: 327600 - RNA, 19 nt, Artificial Sequence
  Description of Artificial Sequence: Synthetic oligonucleotide
  Antisense Strand to SEQ ID NO: 327599
ugguuugagcucaagagcu

SEQ ID NO: 327601 - RNA, 19 nt, Artificial Sequence
  Description of Artificial Sequence: Synthetic oligonucleotide
  Sense Strand Starting at position 113 of SEQ ID NO: 316243
guggacaugcagugagaaa

SEQ ID NO: 327602 - RNA, 19 nt, Artificial Sequence
  Description of Artificial Sequence: Synthetic oligonucleotide
  Antisense Strand to SEQ ID NO: 327601
uuucucacugcauguccac

SEQ ID NO: 327603 - RNA, 19 nt, Artificial Sequence
  Description of Artificial Sequence: Synthetic oligonucleotide
  Sense Strand Starting at position 113 of SEQ ID NO: 316582
auuaaugauggcugcuauu

SEQ ID NO: 327604 - RNA, 19 nt, Artificial Sequence
  Description of Artificial Sequence: Synthetic oligonucleotide
  Antisense Strand to SEQ ID NO: 327603
aauagcagccaucauuaau

SEQ ID NO: 327605 - RNA, 19 nt, Artificial Sequence
  Description of Artificial Sequence: Synthetic oligonucleotide
  Sense Strand Starting at position 113 of SEQ ID NO: 316666
cccagaaaguguuccugaa

SEQ ID NO: 327606 - RNA, 19 nt, Artificial Sequence
  Description of Artificial Sequence: Synthetic oligonucleotide
  Antisense Strand to SEQ ID NO: 327605
uucaggaacacuuucuggg

SEQ ID NO: 327607 - RNA, 19 nt, Artificial Sequence
  Description of Artificial Sequence: Synthetic oligonucleotide
  Sense Strand Starting at position 113 of SEQ ID NO: 316668
cagaaaguguuccugaaga

SEQ ID NO: 327608 - RNA, 19 nt, Artificial Sequence
  Description of Artificial Sequence: Synthetic oligonucleotide
  Antisense Strand to SEQ ID NO: 327607
ucuucaggaacacuuucug

SEQ ID NO: 327609 - RNA, 19 nt, Artificial Sequence
  Description of Artificial Sequence: Synthetic oligonucleotide
  Sense Strand Starting at position 113 of SEQ ID NO: 316699
uuuacagucuugcugauga

SEQ ID NO: 327610 - RNA, 19 nt, Artificial Sequence
  Description of Artificial Sequence: Synthetic oligonucleotide
  Antisense Strand to SEQ ID NO: 327609
ucaucagcaagacuguaaa

SEQ ID NO: 327611 - RNA, 19 nt, Artificial Sequence
  Description of Artificial Sequence: Synthetic oligonucleotide
  Sense Strand Starting at position 113 of SEQ ID NO: 316732
agcagcugggucuacauua

SEQ ID NO: 327612 - RNA, 19 nt, Artificial Sequence
  Description of Artificial Sequence: Synthetic oligonucleotide
  Antisense Strand to SEQ ID NO: 327611
uaauguagacccagcugcu

SEQ ID NO: 327613 - RNA, 19 nt, Artificial Sequence
  Description of Artificial Sequence: Synthetic oligonucleotide
  Sense Strand Starting at position 113 of SEQ ID NO: 316779
gggaauggugcuggaaaga

SEQ ID NO: 327614 - RNA, 19 nt, Artificial Sequence
  Description of Artificial Sequence: Synthetic oligonucleotide
  Antisense Strand to SEQ ID NO: 327613
ucuuuccagcaccauuccc

SEQ ID NO: 327615 - RNA, 19 nt, Artificial Sequence
  Description of Artificial Sequence: Synthetic oligonucleotide
  Sense Strand Starting at position 113 of SEQ ID NO: 316834
guggguauagacugggaaa

SEQ ID NO: 327616 - RNA, 19 nt, Artificial Sequence
  Description of Artificial Sequence: Synthetic oligonucleotide
  Antisense Strand to SEQ ID NO: 327615
uuucccagucuauacccac

SEQ ID NO: 327617 - RNA, 19 nt, Artificial Sequence
  Description of Artificial Sequence: Synthetic oligonucleotide
  Sense Strand Starting at position 113 of SEQ ID NO: 316837
gguauagacugggaaagaa

SEQ ID NO: 327618 - RNA, 19 nt, Artificial Sequence
  Description of Artificial Sequence: Synthetic oligonucleotide
  Antisense Strand to SEQ ID NO: 327617
uucuuucccagucuauacc

SEQ ID NO: 327619 - RNA, 19 nt, Artificial Sequence
  Description of Artificial Sequence: Synthetic oligonucleotide
  Sense Strand Starting at position 113 of SEQ ID NO: 317084
cuggaagcauuauauuuau

SEQ ID NO: 327620 - RNA, 19 nt, Artificial Sequence
  Description of Artificial Sequence: Synthetic oligonucleotide
  Antisense Strand to SEQ ID NO: 327619
auaaauauaaugcuuccag

SEQ ID NO: 327621 - RNA, 19 nt, Artificial Sequence
  Description of Artificial Sequence: Synthetic oligonucleotide
  Sense Strand Starting at position 113 of SEQ ID NO: 317302
aaucucauugguugccaga

SEQ ID NO: 327622 - RNA, 19 nt, Artificial Sequence
  Description of Artificial Sequence: Synthetic oligonucleotide
  Antisense Strand to SEQ ID NO: 327621
ucuggcaaccaaugagauu

SEQ ID NO: 327623 - RNA, 19 nt, Artificial Sequence
  Description of Artificial Sequence: Synthetic oligonucleotide
  Sense Strand Starting at position 113 of SEQ ID NO: 317304
ucucauugguugccagaua

SEQ ID NO: 327624 - RNA, 19 nt, Artificial Sequence
  Description of Artificial Sequence: Synthetic oligonucleotide
  Antisense Strand to SEQ ID NO: 327623
uaucuggcaaccaaugaga

SEQ ID NO: 327625 - RNA, 19 nt, Artificial Sequence
  Description of Artificial Sequence: Synthetic oligonucleotide
  Sense Strand Starting at position 113 of SEQ ID NO: 317329
aauuauaugugcuuugaga

SEQ ID NO: 327626 - RNA, 19 nt, Artificial Sequence
  Description of Artificial Sequence: Synthetic oligonucleotide
  Antisense Strand to SEQ ID NO: 327625
ucucaaagcacauauaauu

SEQ ID NO: 327627 - RNA, 19 nt, Artificial Sequence
  Description of Artificial Sequence: Synthetic oligonucleotide
  Sense Strand Starting at position 113 of SEQ ID NO: 317331
uuauaugugcuuugagaug

SEQ ID NO: 327628 - RNA, 19 nt, Artificial Sequence
  Description of Artificial Sequence: Synthetic oligonucleotide
  Antisense Strand to SEQ ID NO: 327627
caucucaaagcacauauaa

SEQ ID NO: 327629 - RNA, 19 nt, Artificial Sequence
  Description of Artificial Sequence: Synthetic oligonucleotide
  Sense Strand Starting at position 113 of SEQ ID NO: 317419
gaacuuaauuggcuauagu

SEQ ID NO: 327630 - RNA, 19 nt, Artificial Sequence
  Description of Artificial Sequence: Synthetic oligonucleotide
  Antisense Strand to SEQ ID NO: 327629
acuauagccaauuaaguuc

SEQ ID NO: 327631 - RNA, 19 nt, Artificial Sequence
  Description of Artificial Sequence: Synthetic oligonucleotide
  Sense Strand Starting at position 113 of SEQ ID NO: 317621
uuauuaucuggagagcuca

SEQ ID NO: 327632 - RNA, 19 nt, Artificial Sequence
  Description of Artificial Sequence: Synthetic oligonucleotide
  Antisense Strand to SEQ ID NO: 327631
ugagcucuccagauaauaa

SEQ ID NO: 327633 - RNA, 19 nt, Artificial Sequence
  Description of Artificial Sequence: Synthetic oligonucleotide
  Sense Strand Starting at position 113 of SEQ ID NO: 317735
aggaaacuaugugcuccau

SEQ ID NO: 327634 - RNA, 19 nt, Artificial Sequence
  Description of Artificial Sequence: Synthetic oligonucleotide
  Antisense Strand to SEQ ID NO: 327633
auggagcacauaguuuccu

SEQ ID NO: 327635 - RNA, 19 nt, Artificial Sequence
  Description of Artificial Sequence: Synthetic oligonucleotide
  Sense Strand Starting at position 113 of SEQ ID NO: 317802
uuaauuaauuuguggagga

SEQ ID NO: 327636 - RNA, 19 nt, Artificial Sequence
  Description of Artificial Sequence: Synthetic oligonucleotide
  Antisense Strand to SEQ ID NO: 327635
uccuccacaaauuaauuaa

SEQ ID NO: 327637 - RNA, 19 nt, Artificial Sequence
  Description of Artificial Sequence: Synthetic oligonucleotide
  Sense Strand Starting at position 113 of SEQ ID NO: 317803
uaauuaauuuguggaggag

SEQ ID NO: 327638 - RNA, 19 nt, Artificial Sequence
  Description of Artificial Sequence: Synthetic oligonucleotide
  Antisense Strand to SEQ ID NO: 327637
cuccuccacaaauuaauua

SEQ ID NO: 327639 - RNA, 19 nt, Artificial Sequence
  Description of Artificial Sequence: Synthetic oligonucleotide
  Sense Strand Starting at position 113 of SEQ ID NO: 317916
cgacaaauaugggcaauga

SEQ ID NO: 327640 - RNA, 19 nt, Artificial Sequence
  Description of Artificial Sequence: Synthetic oligonucleotide
  Antisense Strand to SEQ ID NO: 327639
ucauugcccauauuugucg

SEQ ID NO: 327641 - RNA, 19 nt, Artificial Sequence
  Description of Artificial Sequence: Synthetic oligonucleotide
  Sense Strand Starting at position 113 of SEQ ID NO: 317936
acagcuaucgggcagaugu

SEQ ID NO: 327642 - RNA, 19 nt, Artificial Sequence
  Description of Artificial Sequence: Synthetic oligonucleotide
  Antisense Strand to SEQ ID NO: 327641
acaucugcccgauagcugu

SEQ ID NO: 327643 - RNA, 19 nt, Artificial Sequence
  Description of Artificial Sequence: Synthetic oligonucleotide
  Sense Strand Starting at position 113 of SEQ ID NO: 317949
agauguugucaagguauaa

SEQ ID NO: 327644 - RNA, 19 nt, Artificial Sequence
  Description of Artificial Sequence: Synthetic oligonucleotide
  Antisense Strand to SEQ ID NO: 327643
uuauaccuugacaacaucu

SEQ ID NO: 327645 - RNA, 19 nt, Artificial Sequence
  Description of Artificial Sequence: Synthetic oligonucleotide
  Sense Strand Starting at position 113 of SEQ ID NO: 318046
gcaagauguggaggaggua

SEQ ID NO: 327646 - RNA, 19 nt, Artificial Sequence
  Description of Artificial Sequence: Synthetic oligonucleotide
  Antisense Strand to SEQ ID NO: 327645
uaccuccuccacaucuugc

SEQ ID NO: 327647 - RNA, 19 nt, Artificial Sequence
  Description of Artificial Sequence: Synthetic oligonucleotide
  Sense Strand Starting at position 113 of SEQ ID NO: 318121
auuccuauggccugagauc

SEQ ID NO: 327648 - RNA, 19 nt, Artificial Sequence
  Description of Artificial Sequence: Synthetic oligonucleotide
  Antisense Strand to SEQ ID NO: 327647
gaucucaggccauaggaau

SEQ ID NO: 327649 - RNA, 19 nt, Artificial Sequence
  Description of Artificial Sequence: Synthetic oligonucleotide
  Sense Strand Starting at position 113 of SEQ ID NO: 318176
cugaaauuauaugccaugu

SEQ ID NO: 327650 - RNA, 19 nt, Artificial Sequence
  Description of Artificial Sequence: Synthetic oligonucleotide
  Antisense Strand to SEQ ID NO: 327649
acauggcauauaauuucag

SEQ ID NO: 327651 - RNA, 19 nt, Artificial Sequence
  Description of Artificial Sequence: Synthetic oligonucleotide
  Sense Strand Starting at position 113 of SEQ ID NO: 318466
caugucuguccugagccaa

SEQ ID NO: 327652 - RNA, 19 nt, Artificial Sequence
  Description of Artificial Sequence: Synthetic oligonucleotide
  Antisense Strand to SEQ ID NO: 327651
uuggcucaggacagacaug

SEQ ID NO: 327653 - RNA, 19 nt, Artificial Sequence
  Description of Artificial Sequence: Synthetic oligonucleotide
  Sense Strand Starting at position 113 of SEQ ID NO: 318731
gcugcuauuucuccaaagu

SEQ ID NO: 327654 - RNA, 19 nt, Artificial Sequence
  Description of Artificial Sequence: Synthetic oligonucleotide
  Antisense Strand to SEQ ID NO: 327653
acuuuggagaaauagcagc

SEQ ID NO: 327655 - RNA, 19 nt, Artificial Sequence
  Description of Artificial Sequence: Synthetic oligonucleotide
  Sense Strand Starting at position 113 of SEQ ID NO: 318744
caaaguauccaaggaaguc

SEQ ID NO: 327656 - RNA, 19 nt, Artificial Sequence
  Description of Artificial Sequence: Synthetic oligonucleotide
  Antisense Strand to SEQ ID NO: 327655
gacuuccuuggauacuuug

SEQ ID NO: 327657 - RNA, 19 nt, Artificial Sequence
  Description of Artificial Sequence: Synthetic oligonucleotide
  Sense Strand Starting at position 113 of SEQ ID NO: 318953
cuuucuuuaguaugggaaa

SEQ ID NO: 327658 - RNA, 19 nt, Artificial Sequence
  Description of Artificial Sequence: Synthetic oligonucleotide
  Antisense Strand to SEQ ID NO: 327657
uuucccauacuaaagaaag

SEQ ID NO: 327659 - RNA, 19 nt, Artificial Sequence
  Description of Artificial Sequence: Synthetic oligonucleotide
  Sense Strand Starting at position 113 of SEQ ID NO: 319037
cuguuacuaugaucuccau

SEQ ID NO: 327660 - RNA, 19 nt, Artificial Sequence
  Description of Artificial Sequence: Synthetic oligonucleotide
  Antisense Strand to SEQ ID NO: 327659
auggagaucauaguaacag

SEQ ID NO: 327661 - RNA, 19 nt, Artificial Sequence
  Description of Artificial Sequence: Synthetic oligonucleotide
  Sense Strand Starting at position 113 of SEQ ID NO: 319077
ugaggaaggucauaauuug

SEQ ID NO: 327662 - RNA, 19 nt, Artificial Sequence
  Description of Artificial Sequence: Synthetic oligonucleotide
  Antisense Strand to SEQ ID NO: 327661
caaauuaugaccuuccuca

SEQ ID NO: 327663 - RNA, 19 nt, Artificial Sequence
  Description of Artificial Sequence: Synthetic oligonucleotide
  Sense Strand Starting at position 113 of SEQ ID NO: 319112
caacaaguggugugaaacu

SEQ ID NO: 327664 - RNA, 19 nt, Artificial Sequence
  Description of Artificial Sequence: Synthetic oligonucleotide
  Antisense Strand to SEQ ID NO: 327663
aguuucacaccacuuguug

SEQ ID NO: 327665 - RNA, 19 nt, Artificial Sequence
  Description of Artificial Sequence: Synthetic oligonucleotide
  Sense Strand Starting at position 113 of SEQ ID NO: 319123
gugaaacuguaacuagaau

SEQ ID NO: 327666 - RNA, 19 nt, Artificial Sequence
  Description of Artificial Sequence: Synthetic oligonucleotide
  Antisense Strand to SEQ ID NO: 327665
auucuaguuacaguuucac

SEQ ID NO: 327667 - RNA, 19 nt, Artificial Sequence
  Description of Artificial Sequence: Synthetic oligonucleotide
  Sense Strand Starting at position 114 of SEQ ID NO: 315267
uugcacucugaauauaagu

SEQ ID NO: 327668 - RNA, 19 nt, Artificial Sequence
  Description of Artificial Sequence: Synthetic oligonucleotide
  Antisense Strand to SEQ ID NO: 327667
acuuauauucagagugcaa

SEQ ID NO: 327669 - RNA, 19 nt, Artificial Sequence
  Description of Artificial Sequence: Synthetic oligonucleotide
  Sense Strand Starting at position 114 of SEQ ID NO: 315479
auguaauaccucugagguu

SEQ ID NO: 327670 - RNA, 19 nt, Artificial Sequence
  Description of Artificial Sequence: Synthetic oligonucleotide
  Antisense Strand to SEQ ID NO: 327669
aaccucagagguauuacau

SEQ ID NO: 327671 - RNA, 19 nt, Artificial Sequence
  Description of Artificial Sequence: Synthetic oligonucleotide
  Sense Strand Starting at position 114 of SEQ ID NO: 315497
uguaaagaaucuccucaga

SEQ ID NO: 327672 - RNA, 19 nt, Artificial Sequence
  Description of Artificial Sequence: Synthetic oligonucleotide
  Antisense Strand to SEQ ID NO: 327671
ucugaggagauucuuuaca

SEQ ID NO: 327673 - RNA, 19 nt, Artificial Sequence
  Description of Artificial Sequence: Synthetic oligonucleotide
  Sense Strand Starting at position 114 of SEQ ID NO: 315523
uggagaaauugagacauga

SEQ ID NO: 327674 - RNA, 19 nt, Artificial Sequence
  Description of Artificial Sequence: Synthetic oligonucleotide
  Antisense Strand to SEQ ID NO: 327673
ucaugucucaauuucucca

SEQ ID NO: 327675 - RNA, 19 nt, Artificial Sequence
  Description of Artificial Sequence: Synthetic oligonucleotide
  Sense Strand Starting at position 114 of SEQ ID NO: 315795
cuucuacuugcguaagaug

SEQ ID NO: 327676 - RNA, 19 nt, Artificial Sequence
  Description of Artificial Sequence: Synthetic oligonucleotide
  Antisense Strand to SEQ ID NO: 327675
caucuuacgcaaguagaag

SEQ ID NO: 327677 - RNA, 19 nt, Artificial Sequence
  Description of Artificial Sequence: Synthetic oligonucleotide
  Sense Strand Starting at position 114 of SEQ ID NO: 315807
uaagaugucuggcuuacaa

SEQ ID NO: 327678 - RNA, 19 nt, Artificial Sequence
  Description of Artificial Sequence: Synthetic oligonucleotide
  Antisense Strand to SEQ ID NO: 327677
uuguaagccagacaucuua

SEQ ID NO: 327679 - RNA, 19 nt, Artificial Sequence
  Description of Artificial Sequence: Synthetic oligonucleotide
  Sense Strand Starting at position 114 of SEQ ID NO: 315809
agaugucuggcuuacaaac

SEQ ID NO: 327680 - RNA, 19 nt, Artificial Sequence
  Description of Artificial Sequence: Synthetic oligonucleotide
  Antisense Strand to SEQ ID NO: 327679
guuuguaagccagacaucu

SEQ ID NO: 327681 - RNA, 19 nt, Artificial Sequence
  Description of Artificial Sequence: Synthetic oligonucleotide
  Sense Strand Starting at position 114 of SEQ ID NO: 315871
guucucaauuuacagauga

SEQ ID NO: 327682 - RNA, 19 nt, Artificial Sequence
  Description of Artificial Sequence: Synthetic oligonucleotide
  Antisense Strand to SEQ ID NO: 327681
ucaucuguaaauugagaac

SEQ ID NO: 327683 - RNA, 19 nt, Artificial Sequence
  Description of Artificial Sequence: Synthetic oligonucleotide
  Sense Strand Starting at position 114 of SEQ ID NO: 315898
ucacaagauugggcaauga

SEQ ID NO: 327684 - RNA, 19 nt, Artificial Sequence
  Description of Artificial Sequence: Synthetic oligonucleotide
  Antisense Strand to SEQ ID NO: 327683
ucauugcccaaucuuguga

SEQ ID NO: 327685 - RNA, 19 nt, Artificial Sequence
  Description of Artificial Sequence: Synthetic oligonucleotide
  Sense Strand Starting at position 114 of SEQ ID NO: 315937
augaaauucugccuugaga

SEQ ID NO: 327686 - RNA, 19 nt, Artificial Sequence
  Description of Artificial Sequence: Synthetic oligonucleotide
  Antisense Strand to SEQ ID NO: 327685
ucucaaggcagaauuucau

SEQ ID NO: 327687 - RNA, 19 nt, Artificial Sequence
  Description of Artificial Sequence: Synthetic oligonucleotide
  Sense Strand Starting at position 114 of SEQ ID NO: 315950
uugagaucuugcucaaucc

SEQ ID NO: 327688 - RNA, 19 nt, Artificial Sequence
  Description of Artificial Sequence: Synthetic oligonucleotide
  Antisense Strand to SEQ ID NO: 327687
ggauugagcaagaucucaa

SEQ ID NO: 327689 - RNA, 19 nt, Artificial Sequence
  Description of Artificial Sequence: Synthetic oligonucleotide
  Sense Strand Starting at position 114 of SEQ ID NO: 315951
ugagaucuugcucaaucca

SEQ ID NO: 327690 - RNA, 19 nt, Artificial Sequence
  Description of Artificial Sequence: Synthetic oligonucleotide
  Antisense Strand to SEQ ID NO: 327689
uggauugagcaagaucuca

SEQ ID NO: 327691 - RNA, 19 nt, Artificial Sequence
  Description of Artificial Sequence: Synthetic oligonucleotide
  Sense Strand Starting at position 114 of SEQ ID NO: 316085
agcaacugaugguuugauu

SEQ ID NO: 327692 - RNA, 19 nt, Artificial Sequence
  Description of Artificial Sequence: Synthetic oligonucleotide
  Antisense Strand to SEQ ID NO: 327691
aaucaaaccaucaguugcu

SEQ ID NO: 327693 - RNA, 19 nt, Artificial Sequence
  Description of Artificial Sequence: Synthetic oligonucleotide
  Sense Strand Starting at position 114 of SEQ ID NO: 316190
aguaguaguuacucaacaa

SEQ ID NO: 327694 - RNA, 19 nt, Artificial Sequence
  Description of Artificial Sequence: Synthetic oligonucleotide
  Antisense Strand to SEQ ID NO: 327693
uuguugaguaacuacuacu

SEQ ID NO: 327695 - RNA, 19 nt, Artificial Sequence
  Description of Artificial Sequence: Synthetic oligonucleotide
  Sense Strand Starting at position 114 of SEQ ID NO: 316232
ccguauacagguuagacau

SEQ ID NO: 327696 - RNA, 19 nt, Artificial Sequence
  Description of Artificial Sequence: Synthetic oligonucleotide
  Antisense Strand to SEQ ID NO: 327695
augucuaaccuguauacgg

SEQ ID NO: 327697 - RNA, 19 nt, Artificial Sequence
  Description of Artificial Sequence: Synthetic oligonucleotide
  Sense Strand Starting at position 114 of SEQ ID NO: 316269
cuguuagcccucgaucaag

SEQ ID NO: 327698 - RNA, 19 nt, Artificial Sequence
  Description of Artificial Sequence: Synthetic oligonucleotide
  Antisense Strand to SEQ ID NO: 327697
cuugaucgagggcuaacag

SEQ ID NO: 327699 - RNA, 19 nt, Artificial Sequence
  Description of Artificial Sequence: Synthetic oligonucleotide
  Sense Strand Starting at position 114 of SEQ ID NO: 316363
uaauuuguaucggaaagaa

SEQ ID NO: 327700 - RNA, 19 nt, Artificial Sequence
  Description of Artificial Sequence: Synthetic oligonucleotide
  Antisense Strand to SEQ ID NO: 327699
uucuuuccgauacaaauua

SEQ ID NO: 327701 - RNA, 19 nt, Artificial Sequence
  Description of Artificial Sequence: Synthetic oligonucleotide
  Sense Strand Starting at position 114 of SEQ ID NO: 316756
auuccuuaguguuuggaaa

SEQ ID NO: 327702 - RNA, 19 nt, Artificial Sequence
  Description of Artificial Sequence: Synthetic oligonucleotide
  Antisense Strand to SEQ ID NO: 327701
uuuccaaacacuaaggaau

SEQ ID NO: 327703 - RNA, 19 nt, Artificial Sequence
  Description of Artificial Sequence: Synthetic oligonucleotide
  Sense Strand Starting at position 114 of SEQ ID NO: 316757
uuccuuaguguuuggaaac

SEQ ID NO: 327704 - RNA, 19 nt, Artificial Sequence
  Description of Artificial Sequence: Synthetic oligonucleotide
  Antisense Strand to SEQ ID NO: 327703
guuuccaaacacuaaggaa

SEQ ID NO: 327705 - RNA, 19 nt, Artificial Sequence
  Description of Artificial Sequence: Synthetic oligonucleotide
  Sense Strand Starting at position 114 of SEQ ID NO: 317053
ccggaaagugauuggaagu

SEQ ID NO: 327706 - RNA, 19 nt, Artificial Sequence
  Description of Artificial Sequence: Synthetic oligonucleotide
  Antisense Strand to SEQ ID NO: 327705
acuuccaaucacuuuccgg

SEQ ID NO: 327707 - RNA, 19 nt, Artificial Sequence
  Description of Artificial Sequence: Synthetic oligonucleotide
  Sense Strand Starting at position 114 of SEQ ID NO: 317059
agugauuggaaguguggau

SEQ ID NO: 327708 - RNA, 19 nt, Artificial Sequence
  Description of Artificial Sequence: Synthetic oligonucleotide
  Antisense Strand to SEQ ID NO: 327707
auccacacuuccaaucacu

SEQ ID NO: 327709 - RNA, 19 nt, Artificial Sequence
  Description of Artificial Sequence: Synthetic oligonucleotide
  Sense Strand Starting at position 114 of SEQ ID NO: 317711
cuugguuauuucuagauga

SEQ ID NO: 327710 - RNA, 19 nt, Artificial Sequence
  Description of Artificial Sequence: Synthetic oligonucleotide
  Antisense Strand to SEQ ID NO: 327709
ucaucuagaaauaaccaag

SEQ ID NO: 327711 - RNA, 19 nt, Artificial Sequence
  Description of Artificial Sequence: Synthetic oligonucleotide
  Sense Strand Starting at position 114 of SEQ ID NO: 317747
uggagucacaaguaguuga

SEQ ID NO: 327712 - RNA, 19 nt, Artificial Sequence
  Description of Artificial Sequence: Synthetic oligonucleotide
  Antisense Strand to SEQ ID NO: 327711
ucaacuacuugugacucca

SEQ ID NO: 327713 - RNA, 19 nt, Artificial Sequence
  Description of Artificial Sequence: Synthetic oligonucleotide
  Sense Strand Starting at position 114 of SEQ ID NO: 317750
agucacaaguaguugaauu

SEQ ID NO: 327714 - RNA, 19 nt, Artificial Sequence
  Description of Artificial Sequence: Synthetic oligonucleotide
  Antisense Strand to SEQ ID NO: 327713
aauucaacuacuugugacu

SEQ ID NO: 327715 - RNA, 19 nt, Artificial Sequence
  Description of Artificial Sequence: Synthetic oligonucleotide
  Sense Strand Starting at position 114 of SEQ ID NO: 317766
auuaauuagucauugaagg

SEQ ID NO: 327716 - RNA, 19 nt, Artificial Sequence
  Description of Artificial Sequence: Synthetic oligonucleotide
  Antisense Strand to SEQ ID NO: 327715
ccuucaaugacuaauuaau

SEQ ID NO: 327717 - RNA, 19 nt, Artificial Sequence
  Description of Artificial Sequence: Synthetic oligonucleotide
  Sense Strand Starting at position 114 of SEQ ID NO: 317767
uuaauuagucauugaaggu

SEQ ID NO: 327718 - RNA, 19 nt, Artificial Sequence
  Description of Artificial Sequence: Synthetic oligonucleotide
  Antisense Strand to SEQ ID NO: 327717
accuucaaugacuaauuaa

SEQ ID NO: 327719 - RNA, 19 nt, Artificial Sequence
  Description of Artificial Sequence: Synthetic oligonucleotide
  Sense Strand Starting at position 114 of SEQ ID NO: 318125
cuuagaaaucuguguuaau

SEQ ID NO: 327720 - RNA, 19 nt, Artificial Sequence
  Description of Artificial Sequence: Synthetic oligonucleotide
  Antisense Strand to SEQ ID NO: 327719
auuaacacagauuucuaag

SEQ ID NO: 327721 - RNA, 19 nt, Artificial Sequence
  Description of Artificial Sequence: Synthetic oligonucleotide
  Sense Strand Starting at position 114 of SEQ ID NO: 318126
uuagaaaucuguguuaaug

SEQ ID NO: 327722 - RNA, 19 nt, Artificial Sequence
  Description of Artificial Sequence: Synthetic oligonucleotide
  Antisense Strand to SEQ ID NO: 327721
cauuaacacagauuucuaa

SEQ ID NO: 327723 - RNA, 19 nt, Artificial Sequence
  Description of Artificial Sequence: Synthetic oligonucleotide
  Sense Strand Starting at position 114 of SEQ ID NO: 318141
aauguuaucguugagaaag

SEQ ID NO: 327724 - RNA, 19 nt, Artificial Sequence
  Description of Artificial Sequence: Synthetic oligonucleotide
  Antisense Strand to SEQ ID NO: 327723
cuuucucaacgauaacauu

SEQ ID NO: 327725 - RNA, 19 nt, Artificial Sequence
  Description of Artificial Sequence: Synthetic oligonucleotide
  Sense Strand Starting at position 114 of SEQ ID NO: 318291
aaccauuagguguauguuu

SEQ ID NO: 327726 - RNA, 19 nt, Artificial Sequence
  Description of Artificial Sequence: Synthetic oligonucleotide
  Antisense Strand to SEQ ID NO: 327725
aaacauacaccuaaugguu

SEQ ID NO: 327727 - RNA, 19 nt, Artificial Sequence
  Description of Artificial Sequence: Synthetic oligonucleotide
  Sense Strand Starting at position 114 of SEQ ID NO: 318485
uuucuuucugaguaaguaa

SEQ ID NO: 327728 - RNA, 19 nt, Artificial Sequence
  Description of Artificial Sequence: Synthetic oligonucleotide
  Antisense Strand to SEQ ID NO: 327727
uuacuuacucagaaagaaa

SEQ ID NO: 327729 - RNA, 19 nt, Artificial Sequence
  Description of Artificial Sequence: Synthetic oligonucleotide
  Sense Strand Starting at position 114 of SEQ ID NO: 318488
cuuucugaguaaguaaaga

SEQ ID NO: 327730 - RNA, 19 nt, Artificial Sequence
  Description of Artificial Sequence: Synthetic oligonucleotide
  Antisense Strand to SEQ ID NO: 327729
ucuuuacuuacucagaaag

SEQ ID NO: 327731 - RNA, 19 nt, Artificial Sequence
  Description of Artificial Sequence: Synthetic oligonucleotide
  Sense Strand Starting at position 114 of SEQ ID NO: 318623
uuugcuuaaccaggaugua

SEQ ID NO: 327732 - RNA, 19 nt, Artificial Sequence
  Description of Artificial Sequence: Synthetic oligonucleotide
  Antisense Strand to SEQ ID NO: 327731
uacauccugguuaagcaaa

SEQ ID NO: 327733 - RNA, 19 nt, Artificial Sequence
  Description of Artificial Sequence: Synthetic oligonucleotide
  Sense Strand Starting at position 114 of SEQ ID NO: 318721
auauaauccguauagucau

SEQ ID NO: 327734 - RNA, 19 nt, Artificial Sequence
  Description of Artificial Sequence: Synthetic oligonucleotide
  Antisense Strand to SEQ ID NO: 327733
augacuauacggauuauau

SEQ ID NO: 327735 - RNA, 19 nt, Artificial Sequence
  Description of Artificial Sequence: Synthetic oligonucleotide
  Sense Strand Starting at position 114 of SEQ ID NO: 318728
ccguauagucauuggauuu

SEQ ID NO: 327736 - RNA, 19 nt, Artificial Sequence
  Description of Artificial Sequence: Synthetic oligonucleotide
  Antisense Strand to SEQ ID NO: 327735
aaauccaaugacuauacgg

SEQ ID NO: 327737 - RNA, 19 nt, Artificial Sequence
  Description of Artificial Sequence: Synthetic oligonucleotide
  Sense Strand Starting at position 114 of SEQ ID NO: 318937
ugguuagauaauuguuaag

SEQ ID NO: 327738 - RNA, 19 nt, Artificial Sequence
  Description of Artificial Sequence: Synthetic oligonucleotide
  Antisense Strand to SEQ ID NO: 327737
cuuaacaauuaucuaacca

SEQ ID NO: 327739 - RNA, 19 nt, Artificial Sequence
  Description of Artificial Sequence: Synthetic oligonucleotide
  Sense Strand Starting at position 114 of SEQ ID NO: 318947
auuguuaagcucuaagaaa

SEQ ID NO: 327740 - RNA, 19 nt, Artificial Sequence
  Description of Artificial Sequence: Synthetic oligonucleotide
  Antisense Strand to SEQ ID NO: 327739
uuucuuagagcuuaacaau

SEQ ID NO: 327741 - RNA, 19 nt, Artificial Sequence
  Description of Artificial Sequence: Synthetic oligonucleotide
  Sense Strand Starting at position 114 of SEQ ID NO: 319038
agagcaucuugauuccauu

SEQ ID NO: 327742 - RNA, 19 nt, Artificial Sequence
  Description of Artificial Sequence: Synthetic oligonucleotide
  Antisense Strand to SEQ ID NO: 327741
aauggaaucaagaugcucu

SEQ ID NO: 327743 - RNA, 19 nt, Artificial Sequence
  Description of Artificial Sequence: Synthetic oligonucleotide
  Sense Strand Starting at position 114 of SEQ ID NO: 319066
uggaacuuugcuuagggau

SEQ ID NO: 327744 - RNA, 19 nt, Artificial Sequence
  Description of Artificial Sequence: Synthetic oligonucleotide
  Antisense Strand to SEQ ID NO: 327743
aucccuaagcaaaguucca

SEQ ID NO: 327745 - RNA, 19 nt, Artificial Sequence
  Description of Artificial Sequence: Synthetic oligonucleotide
  Sense Strand Starting at position 114 of SEQ ID NO: 319110
ccaagagggaguugugaau

SEQ ID NO: 327746 - RNA, 19 nt, Artificial Sequence
  Description of Artificial Sequence: Synthetic oligonucleotide
  Antisense Strand to SEQ ID NO: 327745
auucacaacucccucuugg

SEQ ID NO: 327747 - RNA, 19 nt, Artificial Sequence
  Description of Artificial Sequence: Synthetic oligonucleotide
  Sense Strand Starting at position 115 of SEQ ID NO: 315281
ugaacuuaccuguggaauu

SEQ ID NO: 327748 - RNA, 19 nt, Artificial Sequence
  Description of Artificial Sequence: Synthetic oligonucleotide
  Antisense Strand to SEQ ID NO: 327747
aauuccacagguaaguuca

SEQ ID NO: 327749 - RNA, 19 nt, Artificial Sequence
  Description of Artificial Sequence: Synthetic oligonucleotide
  Sense Strand Starting at position 115 of SEQ ID NO: 315358
acacucagaucuguuguga

SEQ ID NO: 327750 - RNA, 19 nt, Artificial Sequence
  Description of Artificial Sequence: Synthetic oligonucleotide
  Antisense Strand to SEQ ID NO: 327749
ucacaacagaucugagugu

SEQ ID NO: 327751 - RNA, 19 nt, Artificial Sequence
  Description of Artificial Sequence: Synthetic oligonucleotide
  Sense Strand Starting at position 115 of SEQ ID NO: 315474
ggagccauuuauuacauau

SEQ ID NO: 327752 - RNA, 19 nt, Artificial Sequence
  Description of Artificial Sequence: Synthetic oligonucleotide
  Antisense Strand to SEQ ID NO: 327751
auauguaauaaauggcucc

SEQ ID NO: 327753 - RNA, 19 nt, Artificial Sequence
  Description of Artificial Sequence: Synthetic oligonucleotide
  Sense Strand Starting at position 115 of SEQ ID NO: 316014
cgauucuguucuccagacu

SEQ ID NO: 327754 - RNA, 19 nt, Artificial Sequence
  Description of Artificial Sequence: Synthetic oligonucleotide
  Antisense Strand to SEQ ID NO: 327753
agucuggagaacagaaucg

SEQ ID NO: 327755 - RNA, 19 nt, Artificial Sequence
  Description of Artificial Sequence: Synthetic oligonucleotide
  Sense Strand Starting at position 115 of SEQ ID NO: 316017
uucuguucuccagacugau

SEQ ID NO: 327756 - RNA, 19 nt, Artificial Sequence
  Description of Artificial Sequence: Synthetic oligonucleotide
  Antisense Strand to SEQ ID NO: 327755
aucagucuggagaacagaa

SEQ ID NO: 327757 - RNA, 19 nt, Artificial Sequence
  Description of Artificial Sequence: Synthetic oligonucleotide
  Sense Strand Starting at position 115 of SEQ ID NO: 316198
aaagacaugguuuggcaau

SEQ ID NO: 327758 - RNA, 19 nt, Artificial Sequence
  Description of Artificial Sequence: Synthetic oligonucleotide
  Antisense Strand to SEQ ID NO: 327757
auugccaaaccaugucuuu

SEQ ID NO: 327759 - RNA, 19 nt, Artificial Sequence
  Description of Artificial Sequence: Synthetic oligonucleotide
  Sense Strand Starting at position 115 of SEQ ID NO: 316361
aaagacuacccguacuuga

SEQ ID NO: 327760 - RNA, 19 nt, Artificial Sequence
  Description of Artificial Sequence: Synthetic oligonucleotide
  Antisense Strand to SEQ ID NO: 327759
ucaaguacggguagucuuu

SEQ ID NO: 327761 - RNA, 19 nt, Artificial Sequence
  Description of Artificial Sequence: Synthetic oligonucleotide
  Sense Strand Starting at position 115 of SEQ ID NO: 316449
cccuguauguuccuuaaca

SEQ ID NO: 327762 - RNA, 19 nt, Artificial Sequence
  Description of Artificial Sequence: Synthetic oligonucleotide
  Antisense Strand to SEQ ID NO: 327761
uguuaaggaacauacaggg

SEQ ID NO: 327763 - RNA, 19 nt, Artificial Sequence
  Description of Artificial Sequence: Synthetic oligonucleotide
  Sense Strand Starting at position 115 of SEQ ID NO: 316450
ccuguauguuccuuaacac

SEQ ID NO: 327764 - RNA, 19 nt, Artificial Sequence
  Description of Artificial Sequence: Synthetic oligonucleotide
  Antisense Strand to SEQ ID NO: 327763
guguuaaggaacauacagg

SEQ ID NO: 327765 - RNA, 19 nt, Artificial Sequence
  Description of Artificial Sequence: Synthetic oligonucleotide
  Sense Strand Starting at position 115 of SEQ ID NO: 316451
cuguauguuccuuaacacu

SEQ ID NO: 327766 - RNA, 19 nt, Artificial Sequence
  Description of Artificial Sequence: Synthetic oligonucleotide
  Antisense Strand to SEQ ID NO: 327765
aguguuaaggaacauacag

SEQ ID NO: 327767 - RNA, 19 nt, Artificial Sequence
  Description of Artificial Sequence: Synthetic oligonucleotide
  Sense Strand Starting at position 115 of SEQ ID NO: 316463
uaacacugccuguaggaau

SEQ ID NO: 327768 - RNA, 19 nt, Artificial Sequence
  Description of Artificial Sequence: Synthetic oligonucleotide
  Antisense Strand to SEQ ID NO: 327767
auuccuacaggcaguguua

SEQ ID NO: 327769 - RNA, 19 nt, Artificial Sequence
  Description of Artificial Sequence: Synthetic oligonucleotide
  Sense Strand Starting at position 115 of SEQ ID NO: 316474
guaggaauccuguagcccu

SEQ ID NO: 327770 - RNA, 19 nt, Artificial Sequence
  Description of Artificial Sequence: Synthetic oligonucleotide
  Antisense Strand to SEQ ID NO: 327769
agggcuacaggauuccuac

SEQ ID NO: 327771 - RNA, 19 nt, Artificial Sequence
  Description of Artificial Sequence: Synthetic oligonucleotide
  Sense Strand Starting at position 115 of SEQ ID NO: 316696
ggucgcuacccggauuuga

SEQ ID NO: 327772 - RNA, 19 nt, Artificial Sequence
  Description of Artificial Sequence: Synthetic oligonucleotide
  Antisense Strand to SEQ ID NO: 327771
ucaaauccggguagcgacc

SEQ ID NO: 327773 - RNA, 19 nt, Artificial Sequence
  Description of Artificial Sequence: Synthetic oligonucleotide
  Sense Strand Starting at position 115 of SEQ ID NO: 317339
uauguaugccuuuaguuga

SEQ ID NO: 327774 - RNA, 19 nt, Artificial Sequence
  Description of Artificial Sequence: Synthetic oligonucleotide
  Antisense Strand to SEQ ID NO: 327773
ucaacuaaaggcauacaua

SEQ ID NO: 327775 - RNA, 19 nt, Artificial Sequence
  Description of Artificial Sequence: Synthetic oligonucleotide
  Sense Strand Starting at position 115 of SEQ ID NO: 317564
guucuucuuccggaaucga

SEQ ID NO: 327776 - RNA, 19 nt, Artificial Sequence
  Description of Artificial Sequence: Synthetic oligonucleotide
  Antisense Strand to SEQ ID NO: 327775
ucgauuccggaagaagaac

SEQ ID NO: 327777 - RNA, 19 nt, Artificial Sequence
  Description of Artificial Sequence: Synthetic oligonucleotide
  Sense Strand Starting at position 115 of SEQ ID NO: 317639
augggagucccagggaguu

SEQ ID NO: 327778 - RNA, 19 nt, Artificial Sequence
  Description of Artificial Sequence: Synthetic oligonucleotide
  Antisense Strand to SEQ ID NO: 327777
aacucccugggacucccau

SEQ ID NO: 327779 - RNA, 19 nt, Artificial Sequence
  Description of Artificial Sequence: Synthetic oligonucleotide
  Sense Strand Starting at position 115 of SEQ ID NO: 317719
uaccaagaugugcaguauu

SEQ ID NO: 327780 - RNA, 19 nt, Artificial Sequence
  Description of Artificial Sequence: Synthetic oligonucleotide
  Antisense Strand to SEQ ID NO: 327779
aauacugcacaucuuggua

SEQ ID NO: 327781 - RNA, 19 nt, Artificial Sequence
  Description of Artificial Sequence: Synthetic oligonucleotide
  Sense Strand Starting at position 115 of SEQ ID NO: 317722
caagaugugcaguauugau

SEQ ID NO: 327782 - RNA, 19 nt, Artificial Sequence
  Description of Artificial Sequence: Synthetic oligonucleotide
  Antisense Strand to SEQ ID NO: 327781
aucaauacugcacaucuug

SEQ ID NO: 327783 - RNA, 19 nt, Artificial Sequence
  Description of Artificial Sequence: Synthetic oligonucleotide
  Sense Strand Starting at position 115 of SEQ ID NO: 317767
gugggucuggaucauguau

SEQ ID NO: 327784 - RNA, 19 nt, Artificial Sequence
  Description of Artificial Sequence: Synthetic oligonucleotide
  Antisense Strand to SEQ ID NO: 327783
auacaugauccagacccac

SEQ ID NO: 327785 - RNA, 19 nt, Artificial Sequence
  Description of Artificial Sequence: Synthetic oligonucleotide
  Sense Strand Starting at position 115 of SEQ ID NO: 317932
uacuuaggauaguuugaag

SEQ ID NO: 327786 - RNA, 19 nt, Artificial Sequence
  Description of Artificial Sequence: Synthetic oligonucleotide
  Antisense Strand to SEQ ID NO: 327785
cuucaaacuauccuaagua

SEQ ID NO: 327787 - RNA, 19 nt, Artificial Sequence
  Description of Artificial Sequence: Synthetic oligonucleotide
  Sense Strand Starting at position 115 of SEQ ID NO: 318024
aguguaagucaaggacuua

SEQ ID NO: 327788 - RNA, 19 nt, Artificial Sequence
  Description of Artificial Sequence: Synthetic oligonucleotide
  Antisense Strand to SEQ ID NO: 327787
uaaguccuugacuuacacu

SEQ ID NO: 327789 - RNA, 19 nt, Artificial Sequence
  Description of Artificial Sequence: Synthetic oligonucleotide
  Sense Strand Starting at position 115 of SEQ ID NO: 318039
cuuaguugacacugcauaa

SEQ ID NO: 327790 - RNA, 19 nt, Artificial Sequence
  Description of Artificial Sequence: Synthetic oligonucleotide
  Antisense Strand to SEQ ID NO: 327789
uuaugcagugucaacuaag

SEQ ID NO: 327791 - RNA, 19 nt, Artificial Sequence
  Description of Artificial Sequence: Synthetic oligonucleotide
  Sense Strand Starting at position 115 of SEQ ID NO: 318043
guugacacugcauaaauaa

SEQ ID NO: 327792 - RNA, 19 nt, Artificial Sequence
  Description of Artificial Sequence: Synthetic oligonucleotide
  Antisense Strand to SEQ ID NO: 327791
uuauuuaugcagugucaac

SEQ ID NO: 327793 - RNA, 19 nt, Artificial Sequence
  Description of Artificial Sequence: Synthetic oligonucleotide
  Sense Strand Starting at position 115 of SEQ ID NO: 318087
ucuaaauuaugguugagau

SEQ ID NO: 327794 - RNA, 19 nt, Artificial Sequence
  Description of Artificial Sequence: Synthetic oligonucleotide
  Antisense Strand to SEQ ID NO: 327793
aucucaaccauaauuuaga

SEQ ID NO: 327795 - RNA, 19 nt, Artificial Sequence
  Description of Artificial Sequence: Synthetic oligonucleotide
  Sense Strand Starting at position 115 of SEQ ID NO: 318088
cuaaauuaugguugagauu

SEQ ID NO: 327796 - RNA, 19 nt, Artificial Sequence
  Description of Artificial Sequence: Synthetic oligonucleotide
  Antisense Strand to SEQ ID NO: 327795
aaucucaaccauaauuuag

SEQ ID NO: 327797 - RNA, 19 nt, Artificial Sequence
  Description of Artificial Sequence: Synthetic oligonucleotide
  Sense Strand Starting at position 115 of SEQ ID NO: 318138
guguccuuugcagagggua

SEQ ID NO: 327798 - RNA, 19 nt, Artificial Sequence
  Description of Artificial Sequence: Synthetic oligonucleotide
  Antisense Strand to SEQ ID NO: 327797
uacccucugcaaaggacac

SEQ ID NO: 327799 - RNA, 19 nt, Artificial Sequence
  Description of Artificial Sequence: Synthetic oligonucleotide
  Sense Strand Starting at position 115 of SEQ ID NO: 318140
guccuuugcagaggguaaa

SEQ ID NO: 327800 - RNA, 19 nt, Artificial Sequence
  Description of Artificial Sequence: Synthetic oligonucleotide
  Antisense Strand to SEQ ID NO: 327799
uuuacccucugcaaaggac

SEQ ID NO: 327801 - RNA, 19 nt, Artificial Sequence
  Description of Artificial Sequence: Synthetic oligonucleotide
  Sense Strand Starting at position 115 of SEQ ID NO: 318305
accucuuauuuggaagaau

SEQ ID NO: 327802 - RNA, 19 nt, Artificial Sequence
  Description of Artificial Sequence: Synthetic oligonucleotide
  Antisense Strand to SEQ ID NO: 327801
auucuuccaaauaagaggu

SEQ ID NO: 327803 - RNA, 19 nt, Artificial Sequence
  Description of Artificial Sequence: Synthetic oligonucleotide
  Sense Strand Starting at position 115 of SEQ ID NO: 318316
ggaagaaugcuuuagggca

SEQ ID NO: 327804 - RNA, 19 nt, Artificial Sequence
  Description of Artificial Sequence: Synthetic oligonucleotide
  Antisense Strand to SEQ ID NO: 327803
ugcccuaaagcauucuucc

SEQ ID NO: 327805 - RNA, 19 nt, Artificial Sequence
  Description of Artificial Sequence: Synthetic oligonucleotide
  Sense Strand Starting at position 115 of SEQ ID NO: 318324
gcuuuagggcauuaauacu

SEQ ID NO: 327806 - RNA, 19 nt, Artificial Sequence
  Description of Artificial Sequence: Synthetic oligonucleotide
  Antisense Strand to SEQ ID NO: 327805
aguauuaaugcccuaaagc

SEQ ID NO: 327807 - RNA, 19 nt, Artificial Sequence
  Description of Artificial Sequence: Synthetic oligonucleotide
  Sense Strand Starting at position 115 of SEQ ID NO: 318330
gggcauuaauacuauauuu

SEQ ID NO: 327808 - RNA, 19 nt, Artificial Sequence
  Description of Artificial Sequence: Synthetic oligonucleotide
  Antisense Strand to SEQ ID NO: 327807
aaauauaguauuaaugccc

SEQ ID NO: 327809 - RNA, 19 nt, Artificial Sequence
  Description of Artificial Sequence: Synthetic oligonucleotide
  Sense Strand Starting at position 115 of SEQ ID NO: 318411
uugaauguccuuugaguaa

SEQ ID NO: 327810 - RNA, 19 nt, Artificial Sequence
  Description of Artificial Sequence: Synthetic oligonucleotide
  Antisense Strand to SEQ ID NO: 327809
uuacucaaaggacauucaa

SEQ ID NO: 327811 - RNA, 19 nt, Artificial Sequence
  Description of Artificial Sequence: Synthetic oligonucleotide
  Sense Strand Starting at position 115 of SEQ ID NO: 318422
uugaguaaccagcagguau

SEQ ID NO: 327812 - RNA, 19 nt, Artificial Sequence
  Description of Artificial Sequence: Synthetic oligonucleotide
  Antisense Strand to SEQ ID NO: 327811
auaccugcugguuacucaa

SEQ ID NO: 327813 - RNA, 19 nt, Artificial Sequence
  Description of Artificial Sequence: Synthetic oligonucleotide
  Sense Strand Starting at position 115 of SEQ ID NO: 318424
gaguaaccagcagguauau

SEQ ID NO: 327814 - RNA, 19 nt, Artificial Sequence
  Description of Artificial Sequence: Synthetic oligonucleotide
  Antisense Strand to SEQ ID NO: 327813
auauaccugcugguuacuc

SEQ ID NO: 327815 - RNA, 19 nt, Artificial Sequence
  Description of Artificial Sequence: Synthetic oligonucleotide
  Sense Strand Starting at position 115 of SEQ ID NO: 318613
gugauugagucaucuauug

SEQ ID NO: 327816 - RNA, 19 nt, Artificial Sequence
  Description of Artificial Sequence: Synthetic oligonucleotide
  Antisense Strand to SEQ ID NO: 327815
caauagaugacucaaucac

SEQ ID NO: 327817 - RNA, 19 nt, Artificial Sequence
  Description of Artificial Sequence: Synthetic oligonucleotide
  Sense Strand Starting at position 115 of SEQ ID NO: 318625
ucuauugcugcagaucgaa

SEQ ID NO: 327818 - RNA, 19 nt, Artificial Sequence
  Description of Artificial Sequence: Synthetic oligonucleotide
  Antisense Strand to SEQ ID NO: 327817
uucgaucugcagcaauaga

SEQ ID NO: 327819 - RNA, 19 nt, Artificial Sequence
  Description of Artificial Sequence: Synthetic oligonucleotide
  Sense Strand Starting at position 115 of SEQ ID NO: 318731
ugauuuggcucacucguau

SEQ ID NO: 327820 - RNA, 19 nt, Artificial Sequence
  Description of Artificial Sequence: Synthetic oligonucleotide
  Antisense Strand to SEQ ID NO: 327819
auacgagugagccaaauca

SEQ ID NO: 327821 - RNA, 19 nt, Artificial Sequence
  Description of Artificial Sequence: Synthetic oligonucleotide
  Sense Strand Starting at position 115 of SEQ ID NO: 318737
ggcucacucguauagauac

SEQ ID NO: 327822 - RNA, 19 nt, Artificial Sequence
  Description of Artificial Sequence: Synthetic oligonucleotide
  Antisense Strand to SEQ ID NO: 327821
guaucuauacgagugagcc

SEQ ID NO: 327823 - RNA, 19 nt, Artificial Sequence
  Description of Artificial Sequence: Synthetic oligonucleotide
  Sense Strand Starting at position 115 of SEQ ID NO: 318818
agacuuugucucugucaca

SEQ ID NO: 327824 - RNA, 19 nt, Artificial Sequence
  Description of Artificial Sequence: Synthetic oligonucleotide
  Antisense Strand to SEQ ID NO: 327823
ugugacagagacaaagucu

SEQ ID NO: 327825 - RNA, 19 nt, Artificial Sequence
  Description of Artificial Sequence: Synthetic oligonucleotide
  Sense Strand Starting at position 115 of SEQ ID NO: 319092
uuucuuaaggccuagacuu

SEQ ID NO: 327826 - RNA, 19 nt, Artificial Sequence
  Description of Artificial Sequence: Synthetic oligonucleotide
  Antisense Strand to SEQ ID NO: 327825
aagucuaggccuuaagaaa

SEQ ID NO: 327827 - RNA, 19 nt, Artificial Sequence
  Description of Artificial Sequence: Synthetic oligonucleotide
  Sense Strand Starting at position 116 of SEQ ID NO: 315311
ugagucagaacuugaaguu

SEQ ID NO: 327828 - RNA, 19 nt, Artificial Sequence
  Description of Artificial Sequence: Synthetic oligonucleotide
  Antisense Strand to SEQ ID NO: 327827
aacuucaaguucugacuca

SEQ ID NO: 327829 - RNA, 19 nt, Artificial Sequence
  Description of Artificial Sequence: Synthetic oligonucleotide
  Sense Strand Starting at position 116 of SEQ ID NO: 315373
ccugaagaaccaugguauu

SEQ ID NO: 327830 - RNA, 19 nt, Artificial Sequence
  Description of Artificial Sequence: Synthetic oligonucleotide
  Antisense Strand to SEQ ID NO: 327829
aauaccaugguucuucagg

SEQ ID NO: 327831 - RNA, 19 nt, Artificial Sequence
  Description of Artificial Sequence: Synthetic oligonucleotide
  Sense Strand Starting at position 116 of SEQ ID NO: 315631
ugaugaaagaaucguacua

SEQ ID NO: 327832 - RNA, 19 nt, Artificial Sequence
  Description of Artificial Sequence: Synthetic oligonucleotide
  Antisense Strand to SEQ ID NO: 327831
uaguacgauucuuucauca

SEQ ID NO: 327833 - RNA, 19 nt, Artificial Sequence
  Description of Artificial Sequence: Synthetic oligonucleotide
  Sense Strand Starting at position 116 of SEQ ID NO: 315670
ggcugcaucaacgauacuu

SEQ ID NO: 327834 - RNA, 19 nt, Artificial Sequence
  Description of Artificial Sequence: Synthetic oligonucleotide
  Antisense Strand to SEQ ID NO: 327833
aaguaucguugaugcagcc

SEQ ID NO: 327835 - RNA, 19 nt, Artificial Sequence
  Description of Artificial Sequence: Synthetic oligonucleotide
  Sense Strand Starting at position 116 of SEQ ID NO: 315672
cugcaucaacgauacuuaa

SEQ ID NO: 327836 - RNA, 19 nt, Artificial Sequence
  Description of Artificial Sequence: Synthetic oligonucleotide
  Antisense Strand to SEQ ID NO: 327835
uuaaguaucguugaugcag

SEQ ID NO: 327837 - RNA, 19 nt, Artificial Sequence
  Description of Artificial Sequence: Synthetic oligonucleotide
  Sense Strand Starting at position 116 of SEQ ID NO: 315693
ccuuguaaagggcauuauu

SEQ ID NO: 327838 - RNA, 19 nt, Artificial Sequence
  Description of Artificial Sequence: Synthetic oligonucleotide
  Antisense Strand to SEQ ID NO: 327837
aauaaugcccuuuacaagg

SEQ ID NO: 327839 - RNA, 19 nt, Artificial Sequence
  Description of Artificial Sequence: Synthetic oligonucleotide
  Sense Strand Starting at position 116 of SEQ ID NO: 315696
uguaaagggcauuauuaug

SEQ ID NO: 327840 - RNA, 19 nt, Artificial Sequence
  Description of Artificial Sequence: Synthetic oligonucleotide
  Antisense Strand to SEQ ID NO: 327839
cauaauaaugcccuuuaca

SEQ ID NO: 327841 - RNA, 19 nt, Artificial Sequence
  Description of Artificial Sequence: Synthetic oligonucleotide
  Sense Strand Starting at position 116 of SEQ ID NO: 315758
ugaacuuaccuguggaauu

SEQ ID NO: 327842 - RNA, 19 nt, Artificial Sequence
  Description of Artificial Sequence: Synthetic oligonucleotide
  Antisense Strand to SEQ ID NO: 327841
aauuccacagguaaguuca

SEQ ID NO: 327843 - RNA, 19 nt, Artificial Sequence
  Description of Artificial Sequence: Synthetic oligonucleotide
  Sense Strand Starting at position 116 of SEQ ID NO: 315835
acacucagaucuguuguga

SEQ ID NO: 327844 - RNA, 19 nt, Artificial Sequence
  Description of Artificial Sequence: Synthetic oligonucleotide
  Antisense Strand to SEQ ID NO: 327843
ucacaacagaucugagugu

SEQ ID NO: 327845 - RNA, 19 nt, Artificial Sequence
  Description of Artificial Sequence: Synthetic oligonucleotide
  Sense Strand Starting at position 116 of SEQ ID NO: 315951
ggagccauuuauuacauau

SEQ ID NO: 327846 - RNA, 19 nt, Artificial Sequence
  Description of Artificial Sequence: Synthetic oligonucleotide
  Antisense Strand to SEQ ID NO: 327845
auauguaauaaauggcucc

SEQ ID NO: 327847 - RNA, 19 nt, Artificial Sequence
  Description of Artificial Sequence: Synthetic oligonucleotide
  Sense Strand Starting at position 116 of SEQ ID NO: 316494
uucuguucuccagacugau

SEQ ID NO: 327848 - RNA, 19 nt, Artificial Sequence
  Description of Artificial Sequence: Synthetic oligonucleotide
  Antisense Strand to SEQ ID NO: 327847
aucagucuggagaacagaa

SEQ ID NO: 327849 - RNA, 19 nt, Artificial Sequence
  Description of Artificial Sequence: Synthetic oligonucleotide
  Sense Strand Starting at position 116 of SEQ ID NO: 316675
aaagacaugguuuggcaau

SEQ ID NO: 327850 - RNA, 19 nt, Artificial Sequence
  Description of Artificial Sequence: Synthetic oligonucleotide
  Antisense Strand to SEQ ID NO: 327849
auugccaaaccaugucuuu

SEQ ID NO: 327851 - RNA, 19 nt, Artificial Sequence
  Description of Artificial Sequence: Synthetic oligonucleotide
  Sense Strand Starting at position 116 of SEQ ID NO: 316838
aaagacuacccguacuuga

SEQ ID NO: 327852 - RNA, 19 nt, Artificial Sequence
  Description of Artificial Sequence: Synthetic oligonucleotide
  Antisense Strand to SEQ ID NO: 327851
ucaaguacggguagucuuu

SEQ ID NO: 327853 - RNA, 19 nt, Artificial Sequence
  Description of Artificial Sequence: Synthetic oligonucleotide
  Sense Strand Starting at position 116 of SEQ ID NO: 316928
cuguauguuccuuaacacu

SEQ ID NO: 327854 - RNA, 19 nt, Artificial Sequence
  Description of Artificial Sequence: Synthetic oligonucleotide
  Antisense Strand to SEQ ID NO: 327853
aguguuaaggaacauacag

SEQ ID NO: 327855 - RNA, 19 nt, Artificial Sequence
  Description of Artificial Sequence: Synthetic oligonucleotide
  Sense Strand Starting at position 116 of SEQ ID NO: 316940
uaacacugccuguaggaau

SEQ ID NO: 327856 - RNA, 19 nt, Artificial Sequence
  Description of Artificial Sequence: Synthetic oligonucleotide
  Antisense Strand to SEQ ID NO: 327855
auuccuacaggcaguguua

SEQ ID NO: 327857 - RNA, 19 nt, Artificial Sequence
  Description of Artificial Sequence: Synthetic oligonucleotide
  Sense Strand Starting at position 116 of SEQ ID NO: 316951
guaggaauccuguagcccu

SEQ ID NO: 327858 - RNA, 19 nt, Artificial Sequence
  Description of Artificial Sequence: Synthetic oligonucleotide
  Antisense Strand to SEQ ID NO: 327857
agggcuacaggauuccuac

SEQ ID NO: 327859 - RNA, 19 nt, Artificial Sequence
  Description of Artificial Sequence: Synthetic oligonucleotide
  Sense Strand Starting at position 116 of SEQ ID NO: 317173
ggucgcuacccggauuuga

SEQ ID NO: 327860 - RNA, 19 nt, Artificial Sequence
  Description of Artificial Sequence: Synthetic oligonucleotide
  Antisense Strand to SEQ ID NO: 327859
ucaaauccggguagcgacc

SEQ ID NO: 327861 - RNA, 19 nt, Artificial Sequence
  Description of Artificial Sequence: Synthetic oligonucleotide
  Sense Strand Starting at position 116 of SEQ ID NO: 317816
uauguaugccuuuaguuga

SEQ ID NO: 327862 - RNA, 19 nt, Artificial Sequence
  Description of Artificial Sequence: Synthetic oligonucleotide
  Antisense Strand to SEQ ID NO: 327861
ucaacuaaaggcauacaua

SEQ ID NO: 327863 - RNA, 19 nt, Artificial Sequence
  Description of Artificial Sequence: Synthetic oligonucleotide
  Sense Strand Starting at position 116 of SEQ ID NO: 318041
guucuucuuccggaaucga

SEQ ID NO: 327864 - RNA, 19 nt, Artificial Sequence
  Description of Artificial Sequence: Synthetic oligonucleotide
  Antisense Strand to SEQ ID NO: 327863
ucgauuccggaagaagaac

SEQ ID NO: 327865 - RNA, 19 nt, Artificial Sequence
  Description of Artificial Sequence: Synthetic oligonucleotide
  Sense Strand Starting at position 116 of SEQ ID NO: 318116
augggagucccagggaguu

SEQ ID NO: 327866 - RNA, 19 nt, Artificial Sequence
  Description of Artificial Sequence: Synthetic oligonucleotide
  Antisense Strand to SEQ ID NO: 327865
aacucccugggacucccau

SEQ ID NO: 327867 - RNA, 19 nt, Artificial Sequence
  Description of Artificial Sequence: Synthetic oligonucleotide
  Sense Strand Starting at position 116 of SEQ ID NO: 318196
uaccaagaugugcaguauu

SEQ ID NO: 327868 - RNA, 19 nt, Artificial Sequence
  Description of Artificial Sequence: Synthetic oligonucleotide
  Antisense Strand to SEQ ID NO: 327867
aauacugcacaucuuggua

SEQ ID NO: 327869 - RNA, 19 nt, Artificial Sequence
  Description of Artificial Sequence: Synthetic oligonucleotide
  Sense Strand Starting at position 116 of SEQ ID NO: 318199
caagaugugcaguauugau

SEQ ID NO: 327870 - RNA, 19 nt, Artificial Sequence
  Description of Artificial Sequence: Synthetic oligonucleotide
  Antisense Strand to SEQ ID NO: 327869
aucaauacugcacaucuug

SEQ ID NO: 327871 - RNA, 19 nt, Artificial Sequence
  Description of Artificial Sequence: Synthetic oligonucleotide
  Sense Strand Starting at position 116 of SEQ ID NO: 318244
gugggucuggaucauguau

SEQ ID NO: 327872 - RNA, 19 nt, Artificial Sequence
  Description of Artificial Sequence: Synthetic oligonucleotide
  Antisense Strand to SEQ ID NO: 327871
auacaugauccagacccac

SEQ ID NO: 327873 - RNA, 19 nt, Artificial Sequence
  Description of Artificial Sequence: Synthetic oligonucleotide
  Sense Strand Starting at position 116 of SEQ ID NO: 318409
uacuuaggauaguuugaag

SEQ ID NO: 327874 - RNA, 19 nt, Artificial Sequence
  Description of Artificial Sequence: Synthetic oligonucleotide
  Antisense Strand to SEQ ID NO: 327873
cuucaaacuauccuaagua

SEQ ID NO: 327875 - RNA, 19 nt, Artificial Sequence
  Description of Artificial Sequence: Synthetic oligonucleotide
  Sense Strand Starting at position 116 of SEQ ID NO: 318501
aguguaagucaaggacuua

SEQ ID NO: 327876 - RNA, 19 nt, Artificial Sequence
  Description of Artificial Sequence: Synthetic oligonucleotide
  Antisense Strand to SEQ ID NO: 327875
uaaguccuugacuuacacu

SEQ ID NO: 327877 - RNA, 19 nt, Artificial Sequence
  Description of Artificial Sequence: Synthetic oligonucleotide
  Sense Strand Starting at position 116 of SEQ ID NO: 318516
cuuaguugacacugcauaa

SEQ ID NO: 327878 - RNA, 19 nt, Artificial Sequence
  Description of Artificial Sequence: Synthetic oligonucleotide
  Antisense Strand to SEQ ID NO: 327877
uuaugcagugucaacuaag

SEQ ID NO: 327879 - RNA, 19 nt, Artificial Sequence
  Description of Artificial Sequence: Synthetic oligonucleotide
  Sense Strand Starting at position 116 of SEQ ID NO: 318520
guugacacugcauaaauaa

SEQ ID NO: 327880 - RNA, 19 nt, Artificial Sequence
  Description of Artificial Sequence: Synthetic oligonucleotide
  Antisense Strand to SEQ ID NO: 327879
uuauuuaugcagugucaac

SEQ ID NO: 327881 - RNA, 19 nt, Artificial Sequence
  Description of Artificial Sequence: Synthetic oligonucleotide
  Sense Strand Starting at position 116 of SEQ ID NO: 318564
ucuaaauuaugguugagau

SEQ ID NO: 327882 - RNA, 19 nt, Artificial Sequence
  Description of Artificial Sequence: Synthetic oligonucleotide
  Antisense Strand to SEQ ID NO: 327881
aucucaaccauaauuuaga

SEQ ID NO: 327883 - RNA, 19 nt, Artificial Sequence
  Description of Artificial Sequence: Synthetic oligonucleotide
  Sense Strand Starting at position 116 of SEQ ID NO: 318565
cuaaauuaugguugagauu

SEQ ID NO: 327884 - RNA, 19 nt, Artificial Sequence
  Description of Artificial Sequence: Synthetic oligonucleotide
  Antisense Strand to SEQ ID NO: 327883
aaucucaaccauaauuuag

SEQ ID NO: 327885 - RNA, 19 nt, Artificial Sequence
  Description of Artificial Sequence: Synthetic oligonucleotide
  Sense Strand Starting at position 116 of SEQ ID NO: 318782
accucuuauuuggaagaau

SEQ ID NO: 327886 - RNA, 19 nt, Artificial Sequence
  Description of Artificial Sequence: Synthetic oligonucleotide
  Antisense Strand to SEQ ID NO: 327885
auucuuccaaauaagaggu

SEQ ID NO: 327887 - RNA, 19 nt, Artificial Sequence
  Description of Artificial Sequence: Synthetic oligonucleotide
  Sense Strand Starting at position 116 of SEQ ID NO: 318793
ggaagaaugcuuuagggca

SEQ ID NO: 327888 - RNA, 19 nt, Artificial Sequence
  Description of Artificial Sequence: Synthetic oligonucleotide
  Antisense Strand to SEQ ID NO: 327887
ugcccuaaagcauucuucc

SEQ ID NO: 327889 - RNA, 19 nt, Artificial Sequence
  Description of Artificial Sequence: Synthetic oligonucleotide
  Sense Strand Starting at position 116 of SEQ ID NO: 318801
gcuuuagggcauuaauacu

SEQ ID NO: 327890 - RNA, 19 nt, Artificial Sequence
  Description of Artificial Sequence: Synthetic oligonucleotide
  Antisense Strand to SEQ ID NO: 327889
aguauuaaugcccuaaagc

SEQ ID NO: 327891 - RNA, 19 nt, Artificial Sequence
  Description of Artificial Sequence: Synthetic oligonucleotide
  Sense Strand Starting at position 116 of SEQ ID NO: 318807
gggcauuaauacuauauuu

SEQ ID NO: 327892 - RNA, 19 nt, Artificial Sequence
  Description of Artificial Sequence: Synthetic oligonucleotide
  Antisense Strand to SEQ ID NO: 327891
aaauauaguauuaaugccc

SEQ ID NO: 327893 - RNA, 19 nt, Artificial Sequence
  Description of Artificial Sequence: Synthetic oligonucleotide
  Sense Strand Starting at position 116 of SEQ ID NO: 318888
uugaauguccuuugaguaa

SEQ ID NO: 327894 - RNA, 19 nt, Artificial Sequence
  Description of Artificial Sequence: Synthetic oligonucleotide
  Antisense Strand to SEQ ID NO: 327893
uuacucaaaggacauucaa

SEQ ID NO: 327895 - RNA, 19 nt, Artificial Sequence
  Description of Artificial Sequence: Synthetic oligonucleotide
  Sense Strand Starting at position 116 of SEQ ID NO: 318899
uugaguaaccagcagguau

SEQ ID NO: 327896 - RNA, 19 nt, Artificial Sequence
  Description of Artificial Sequence: Synthetic oligonucleotide
  Antisense Strand to SEQ ID NO: 327895
auaccugcugguuacucaa

SEQ ID NO: 327897 - RNA, 19 nt, Artificial Sequence
  Description of Artificial Sequence: Synthetic oligonucleotide
  Sense Strand Starting at position 116 of SEQ ID NO: 318901
gaguaaccagcagguauau

SEQ ID NO: 327898 - RNA, 19 nt, Artificial Sequence
  Description of Artificial Sequence: Synthetic oligonucleotide
  Antisense Strand to SEQ ID NO: 327897
auauaccugcugguuacuc

SEQ ID NO: 327899 - RNA, 19 nt, Artificial Sequence
  Description of Artificial Sequence: Synthetic oligonucleotide
  Sense Strand Starting at position 116 of SEQ ID NO: 319090
gugauugagucaucuauug

SEQ ID NO: 327900 - RNA, 19 nt, Artificial Sequence
  Description of Artificial Sequence: Synthetic oligonucleotide
  Antisense Strand to SEQ ID NO: 327899
caauagaugacucaaucac

SEQ ID NO: 327901 - RNA, 19 nt, Artificial Sequence
  Description of Artificial Sequence: Synthetic oligonucleotide
  Sense Strand Starting at position 116 of SEQ ID NO: 319102
ucuauugcugcagaucgaa

SEQ ID NO: 327902 - RNA, 19 nt, Artificial Sequence
  Description of Artificial Sequence: Synthetic oligonucleotide
  Antisense Strand to SEQ ID NO: 327901
uucgaucugcagcaauaga

SEQ ID NO: 327903 - RNA, 19 nt, Artificial Sequence
  Description of Artificial Sequence: Synthetic oligonucleotide
  Sense Strand Starting at position 116 of SEQ ID NO: 319208
ugauuuggcucacucguau

SEQ ID NO: 327904 - RNA, 19 nt, Artificial Sequence
  Description of Artificial Sequence: Synthetic oligonucleotide
  Antisense Strand to SEQ ID NO: 327903
auacgagugagccaaauca

SEQ ID NO: 327905 - RNA, 19 nt, Artificial Sequence
  Description of Artificial Sequence: Synthetic oligonucleotide
  Sense Strand Starting at position 116 of SEQ ID NO: 319214
ggcucacucguauagauac

SEQ ID NO: 327906 - RNA, 19 nt, Artificial Sequence
  Description of Artificial Sequence: Synthetic oligonucleotide
  Antisense Strand to SEQ ID NO: 327905
guaucuauacgagugagcc

SEQ ID NO: 327907 - RNA, 19 nt, Artificial Sequence
  Description of Artificial Sequence: Synthetic oligonucleotide
  Sense Strand Starting at position 117 of SEQ ID NO: 315364
uccaauucugauggaugua

SEQ ID NO: 327908 - RNA, 19 nt, Artificial Sequence
  Description of Artificial Sequence: Synthetic oligonucleotide
  Antisense Strand to SEQ ID NO: 327907
uacauccaucagaauugga

SEQ ID NO: 327909 - RNA, 19 nt, Artificial Sequence
  Description of Artificial Sequence: Synthetic oligonucleotide
  Sense Strand Starting at position 117 of SEQ ID NO: 315367
aauucugauggauguacuu

SEQ ID NO: 327910 - RNA, 19 nt, Artificial Sequence
  Description of Artificial Sequence: Synthetic oligonucleotide
  Antisense Strand to SEQ ID NO: 327909
aaguacauccaucagaauu

SEQ ID NO: 327911 - RNA, 19 nt, Artificial Sequence
  Description of Artificial Sequence: Synthetic oligonucleotide
  Sense Strand Starting at position 117 of SEQ ID NO: 315509
ggguguagucaagagucga

SEQ ID NO: 327912 - RNA, 19 nt, Artificial Sequence
  Description of Artificial Sequence: Synthetic oligonucleotide
  Antisense Strand to SEQ ID NO: 327911
ucgacucuugacuacaccc

SEQ ID NO: 327913 - RNA, 19 nt, Artificial Sequence
  Description of Artificial Sequence: Synthetic oligonucleotide
  Sense Strand Starting at position 117 of SEQ ID NO: 315548
ccuauaugguauccaagca

SEQ ID NO: 327914 - RNA, 19 nt, Artificial Sequence
  Description of Artificial Sequence: Synthetic oligonucleotide
  Antisense Strand to SEQ ID NO: 327913
ugcuuggauaccauauagg

SEQ ID NO: 327915 - RNA, 19 nt, Artificial Sequence
  Description of Artificial Sequence: Synthetic oligonucleotide
  Sense Strand Starting at position 117 of SEQ ID NO: 315708
guaacucgccgaaagcguu

SEQ ID NO: 327916 - RNA, 19 nt, Artificial Sequence
  Description of Artificial Sequence: Synthetic oligonucleotide
  Antisense Strand to SEQ ID NO: 327915
aacgcuuucggcgaguuac

SEQ ID NO: 327917 - RNA, 19 nt, Artificial Sequence
  Description of Artificial Sequence: Synthetic oligonucleotide
  Sense Strand Starting at position 117 of SEQ ID NO: 315715
gccgaaagcguucucaggu

SEQ ID NO: 327918 - RNA, 19 nt, Artificial Sequence
  Description of Artificial Sequence: Synthetic oligonucleotide
  Antisense Strand to SEQ ID NO: 327917
accugagaacgcuuucggc

SEQ ID NO: 327919 - RNA, 19 nt, Artificial Sequence
  Description of Artificial Sequence: Synthetic oligonucleotide
  Sense Strand Starting at position 117 of SEQ ID NO: 316235
gcgcguucccaccugaagu

SEQ ID NO: 327920 - RNA, 19 nt, Artificial Sequence
  Description of Artificial Sequence: Synthetic oligonucleotide
  Antisense Strand to SEQ ID NO: 327919
acuucaggugggaacgcgc

SEQ ID NO: 327921 - RNA, 19 nt, Artificial Sequence
  Description of Artificial Sequence: Synthetic oligonucleotide
  Sense Strand Starting at position 117 of SEQ ID NO: 316552
uuuagcgauccggaaagga

SEQ ID NO: 327922 - RNA, 19 nt, Artificial Sequence
  Description of Artificial Sequence: Synthetic oligonucleotide
  Antisense Strand to SEQ ID NO: 327921
uccuuuccggaucgcuaaa

SEQ ID NO: 327923 - RNA, 19 nt, Artificial Sequence
  Description of Artificial Sequence: Synthetic oligonucleotide
  Sense Strand Starting at position 117 of SEQ ID NO: 316936
ugccgcuguccguuucuaa

SEQ ID NO: 327924 - RNA, 19 nt, Artificial Sequence
  Description of Artificial Sequence: Synthetic oligonucleotide
  Antisense Strand to SEQ ID NO: 327923
uuagaaacggacagcggca

SEQ ID NO: 327925 - RNA, 19 nt, Artificial Sequence
  Description of Artificial Sequence: Synthetic oligonucleotide
  Sense Strand Starting at position 117 of SEQ ID NO: 316937
gccgcuguccguuucuaaa

SEQ ID NO: 327926 - RNA, 19 nt, Artificial Sequence
  Description of Artificial Sequence: Synthetic oligonucleotide
  Antisense Strand to SEQ ID NO: 327925
uuuagaaacggacagcggc

SEQ ID NO: 327927 - RNA, 19 nt, Artificial Sequence
  Description of Artificial Sequence: Synthetic oligonucleotide
  Sense Strand Starting at position 117 of SEQ ID NO: 317374
uguucuugucuguagauga

SEQ ID NO: 327928 - RNA, 19 nt, Artificial Sequence
  Description of Artificial Sequence: Synthetic oligonucleotide
  Antisense Strand to SEQ ID NO: 327927
ucaucuacagacaagaaca

SEQ ID NO: 327929 - RNA, 19 nt, Artificial Sequence
  Description of Artificial Sequence: Synthetic oligonucleotide
  Sense Strand Starting at position 117 of SEQ ID NO: 317379
uugucuguagaugagaauu

SEQ ID NO: 327930 - RNA, 19 nt, Artificial Sequence
  Description of Artificial Sequence: Synthetic oligonucleotide
  Antisense Strand to SEQ ID NO: 327929
aauucucaucuacagacaa

SEQ ID NO: 327931 - RNA, 19 nt, Artificial Sequence
  Description of Artificial Sequence: Synthetic oligonucleotide
  Sense Strand Starting at position 117 of SEQ ID NO: 317426
guuaauugcgaucacuuac

SEQ ID NO: 327932 - RNA, 19 nt, Artificial Sequence
  Description of Artificial Sequence: Synthetic oligonucleotide
  Antisense Strand to SEQ ID NO: 327931
guaagugaucgcaauuaac

SEQ ID NO: 327933 - RNA, 19 nt, Artificial Sequence
  Description of Artificial Sequence: Synthetic oligonucleotide
  Sense Strand Starting at position 117 of SEQ ID NO: 317432
ugcgaucacuuacucaaau

SEQ ID NO: 327934 - RNA, 19 nt, Artificial Sequence
  Description of Artificial Sequence: Synthetic oligonucleotide
  Antisense Strand to SEQ ID NO: 327933
auuugaguaagugaucgca

SEQ ID NO: 327935 - RNA, 19 nt, Artificial Sequence
  Description of Artificial Sequence: Synthetic oligonucleotide
  Sense Strand Starting at position 117 of SEQ ID NO: 317433
gcgaucacuuacucaaaug

SEQ ID NO: 327936 - RNA, 19 nt, Artificial Sequence
  Description of Artificial Sequence: Synthetic oligonucleotide
  Antisense Strand to SEQ ID NO: 327935
cauuugaguaagugaucgc

SEQ ID NO: 327937 - RNA, 19 nt, Artificial Sequence
  Description of Artificial Sequence: Synthetic oligonucleotide
  Sense Strand Starting at position 117 of SEQ ID NO: 317473
acaugaauguccucuuuga

SEQ ID NO: 327938 - RNA, 19 nt, Artificial Sequence
  Description of Artificial Sequence: Synthetic oligonucleotide
  Antisense Strand to SEQ ID NO: 327937
ucaaagaggacauucaugu

SEQ ID NO: 327939 - RNA, 19 nt, Artificial Sequence
  Description of Artificial Sequence: Synthetic oligonucleotide
  Sense Strand Starting at position 117 of SEQ ID NO: 317480
uguccucuuugagcuauuu

SEQ ID NO: 327940 - RNA, 19 nt, Artificial Sequence
  Description of Artificial Sequence: Synthetic oligonucleotide
  Antisense Strand to SEQ ID NO: 327939
aaauagcucaaagaggaca

SEQ ID NO: 327941 - RNA, 19 nt, Artificial Sequence
  Description of Artificial Sequence: Synthetic oligonucleotide
  Sense Strand Starting at position 117 of SEQ ID NO: 317551
acuucuacucaacgagaga

SEQ ID NO: 327942 - RNA, 19 nt, Artificial Sequence
  Description of Artificial Sequence: Synthetic oligonucleotide
  Antisense Strand to SEQ ID NO: 327941
ucucucguugaguagaagu

SEQ ID NO: 327943 - RNA, 19 nt, Artificial Sequence
  Description of Artificial Sequence: Synthetic oligonucleotide
  Sense Strand Starting at position 117 of SEQ ID NO: 317584
ccuggaugcgcuugauuuc

SEQ ID NO: 327944 - RNA, 19 nt, Artificial Sequence
  Description of Artificial Sequence: Synthetic oligonucleotide
  Antisense Strand to SEQ ID NO: 327943
gaaaucaagcgcauccagg

SEQ ID NO: 327945 - RNA, 19 nt, Artificial Sequence
  Description of Artificial Sequence: Synthetic oligonucleotide
  Sense Strand Starting at position 117 of SEQ ID NO: 317784
gaguuaaauguaugauugu

SEQ ID NO: 327946 - RNA, 19 nt, Artificial Sequence
  Description of Artificial Sequence: Synthetic oligonucleotide
  Antisense Strand to SEQ ID NO: 327945
acaaucauacauuuaacuc

SEQ ID NO: 327947 - RNA, 19 nt, Artificial Sequence
  Description of Artificial Sequence: Synthetic oligonucleotide
  Sense Strand Starting at position 117 of SEQ ID NO: 317787
uuaaauguaugauugucga

SEQ ID NO: 327948 - RNA, 19 nt, Artificial Sequence
  Description of Artificial Sequence: Synthetic oligonucleotide
  Antisense Strand to SEQ ID NO: 327947
ucgacaaucauacauuuaa

SEQ ID NO: 327949 - RNA, 19 nt, Artificial Sequence
  Description of Artificial Sequence: Synthetic oligonucleotide
  Sense Strand Starting at position 117 of SEQ ID NO: 317790
aauguaugauugucgaauc

SEQ ID NO: 327950 - RNA, 19 nt, Artificial Sequence
  Description of Artificial Sequence: Synthetic oligonucleotide
  Antisense Strand to SEQ ID NO: 327949
gauucgacaaucauacauu

SEQ ID NO: 327951 - RNA, 19 nt, Artificial Sequence
  Description of Artificial Sequence: Synthetic oligonucleotide
  Sense Strand Starting at position 117 of SEQ ID NO: 318147
uuacaugugugauuugcaa

SEQ ID NO: 327952 - RNA, 19 nt, Artificial Sequence
  Description of Artificial Sequence: Synthetic oligonucleotide
  Antisense Strand to SEQ ID NO: 327951
uugcaaaucacacauguaa

SEQ ID NO: 327953 - RNA, 19 nt, Artificial Sequence
  Description of Artificial Sequence: Synthetic oligonucleotide
  Sense Strand Starting at position 117 of SEQ ID NO: 318294
uguauaucugugcaaauau

SEQ ID NO: 327954 - RNA, 19 nt, Artificial Sequence
  Description of Artificial Sequence: Synthetic oligonucleotide
  Antisense Strand to SEQ ID NO: 327953
auauuugcacagauauaca

SEQ ID NO: 327955 - RNA, 19 nt, Artificial Sequence
  Description of Artificial Sequence: Synthetic oligonucleotide
  Sense Strand Starting at position 117 of SEQ ID NO: 318365
guauacauauguuccacau

SEQ ID NO: 327956 - RNA, 19 nt, Artificial Sequence
  Description of Artificial Sequence: Synthetic oligonucleotide
  Antisense Strand to SEQ ID NO: 327955
auguggaacauauguauac

SEQ ID NO: 327957 - RNA, 19 nt, Artificial Sequence
  Description of Artificial Sequence: Synthetic oligonucleotide
  Sense Strand Starting at position 117 of SEQ ID NO: 318528
uuggaaauacgaugcaagu

SEQ ID NO: 327958 - RNA, 19 nt, Artificial Sequence
  Description of Artificial Sequence: Synthetic oligonucleotide
  Antisense Strand to SEQ ID NO: 327957
acuugcaucguauuuccaa

SEQ ID NO: 327959 - RNA, 19 nt, Artificial Sequence
  Description of Artificial Sequence: Synthetic oligonucleotide
  Sense Strand Starting at position 117 of SEQ ID NO: 318530
ggaaauacgaugcaaguuu

SEQ ID NO: 327960 - RNA, 19 nt, Artificial Sequence
  Description of Artificial Sequence: Synthetic oligonucleotide
  Antisense Strand to SEQ ID NO: 327959
aaacuugcaucguauuucc

SEQ ID NO: 327961 - RNA, 19 nt, Artificial Sequence
  Description of Artificial Sequence: Synthetic oligonucleotide
  Sense Strand Starting at position 117 of SEQ ID NO: 318598
ggucaaguaguccagaaug

SEQ ID NO: 327962 - RNA, 19 nt, Artificial Sequence
  Description of Artificial Sequence: Synthetic oligonucleotide
  Antisense Strand to SEQ ID NO: 327961
cauucuggacuacuugacc

SEQ ID NO: 327963 - RNA, 19 nt, Artificial Sequence
  Description of Artificial Sequence: Synthetic oligonucleotide
  Sense Strand Starting at position 117 of SEQ ID NO: 318640
ucagaucacacaugcgaga

SEQ ID NO: 327964 - RNA, 19 nt, Artificial Sequence
  Description of Artificial Sequence: Synthetic oligonucleotide
  Antisense Strand to SEQ ID NO: 327963
ucucgcaugugugaucuga

SEQ ID NO: 327965 - RNA, 19 nt, Artificial Sequence
  Description of Artificial Sequence: Synthetic oligonucleotide
  Sense Strand Starting at position 117 of SEQ ID NO: 318742
aaugacagauuugauggua

SEQ ID NO: 327966 - RNA, 19 nt, Artificial Sequence
  Description of Artificial Sequence: Synthetic oligonucleotide
  Antisense Strand to SEQ ID NO: 327965
uaccaucaaaucugucauu

SEQ ID NO: 327967 - RNA, 19 nt, Artificial Sequence
  Description of Artificial Sequence: Synthetic oligonucleotide
  Sense Strand Starting at position 117 of SEQ ID NO: 318747
cagauuugaugguauugau

SEQ ID NO: 327968 - RNA, 19 nt, Artificial Sequence
  Description of Artificial Sequence: Synthetic oligonucleotide
  Antisense Strand to SEQ ID NO: 327967
aucaauaccaucaaaucug

SEQ ID NO: 327969 - RNA, 19 nt, Artificial Sequence
  Description of Artificial Sequence: Synthetic oligonucleotide
  Sense Strand Starting at position 117 of SEQ ID NO: 318754
gaugguauugauggugcua

SEQ ID NO: 327970 - RNA, 19 nt, Artificial Sequence
  Description of Artificial Sequence: Synthetic oligonucleotide
  Antisense Strand to SEQ ID NO: 327969
uagcaccaucaauaccauc

SEQ ID NO: 327971 - RNA, 19 nt, Artificial Sequence
  Description of Artificial Sequence: Synthetic oligonucleotide
  Sense Strand Starting at position 117 of SEQ ID NO: 318808
gauauugagauguguuaga

SEQ ID NO: 327972 - RNA, 19 nt, Artificial Sequence
  Description of Artificial Sequence: Synthetic oligonucleotide
  Antisense Strand to SEQ ID NO: 327971
ucuaacacaucucaauauc

SEQ ID NO: 327973 - RNA, 19 nt, Artificial Sequence
  Description of Artificial Sequence: Synthetic oligonucleotide
  Sense Strand Starting at position 117 of SEQ ID NO: 318923
cagagagcccugugauuag

SEQ ID NO: 327974 - RNA, 19 nt, Artificial Sequence
  Description of Artificial Sequence: Synthetic oligonucleotide
  Antisense Strand to SEQ ID NO: 327973
cuaaucacagggcucucug

SEQ ID NO: 327975 - RNA, 19 nt, Artificial Sequence
  Description of Artificial Sequence: Synthetic oligonucleotide
  Sense Strand Starting at position 117 of SEQ ID NO: 319022
guagcagauuuaggagaga

SEQ ID NO: 327976 - RNA, 19 nt, Artificial Sequence
  Description of Artificial Sequence: Synthetic oligonucleotide
  Antisense Strand to SEQ ID NO: 327975
ucucuccuaaaucugcuac

SEQ ID NO: 327977 - RNA, 19 nt, Artificial Sequence
  Description of Artificial Sequence: Synthetic oligonucleotide
  Sense Strand Starting at position 117 of SEQ ID NO: 319035
gagagaugaucagagagua

SEQ ID NO: 327978 - RNA, 19 nt, Artificial Sequence
  Description of Artificial Sequence: Synthetic oligonucleotide
  Antisense Strand to SEQ ID NO: 327977
uacucucugaucaucucuc

SEQ ID NO: 327979 - RNA, 19 nt, Artificial Sequence
  Description of Artificial Sequence: Synthetic oligonucleotide
  Sense Strand Starting at position 117 of SEQ ID NO: 319047
gagaguaaggcacaugcau

SEQ ID NO: 327980 - RNA, 19 nt, Artificial Sequence
  Description of Artificial Sequence: Synthetic oligonucleotide
  Antisense Strand to SEQ ID NO: 327979
augcaugugccuuacucuc

SEQ ID NO: 327981 - RNA, 19 nt, Artificial Sequence
  Description of Artificial Sequence: Synthetic oligonucleotide
  Sense Strand Starting at position 117 of SEQ ID NO: 319084
gagacuaaacccugaguac

SEQ ID NO: 327982 - RNA, 19 nt, Artificial Sequence
  Description of Artificial Sequence: Synthetic oligonucleotide
  Antisense Strand to SEQ ID NO: 327981
guacucaggguuuagucuc

SEQ ID NO: 327983 - RNA, 19 nt, Artificial Sequence
  Description of Artificial Sequence: Synthetic oligonucleotide
  Sense Strand Starting at position 117 of SEQ ID NO: 319142
ggaagaggccuguguuacu

SEQ ID NO: 327984 - RNA, 19 nt, Artificial Sequence
  Description of Artificial Sequence: Synthetic oligonucleotide
  Antisense Strand to SEQ ID NO: 327983
aguaacacaggccucuucc

SEQ ID NO: 327985 - RNA, 19 nt, Artificial Sequence
  Description of Artificial Sequence: Synthetic oligonucleotide
  Sense Strand Starting at position 117 of SEQ ID NO: 319190
aaccgaguggcuuaacaca

SEQ ID NO: 327986 - RNA, 19 nt, Artificial Sequence
  Description of Artificial Sequence: Synthetic oligonucleotide
  Antisense Strand to SEQ ID NO: 327985
uguguuaagccacucgguu

SEQ ID NO: 327987 - RNA, 19 nt, Artificial Sequence
  Description of Artificial Sequence: Synthetic oligonucleotide
  Sense Strand Starting at position 118 of SEQ ID NO: 315253
agaggcuguuaguaaucuu

SEQ ID NO: 327988 - RNA, 19 nt, Artificial Sequence
  Description of Artificial Sequence: Synthetic oligonucleotide
  Antisense Strand to SEQ ID NO: 327987
aagauuacuaacagccucu

SEQ ID NO: 327989 - RNA, 19 nt, Artificial Sequence
  Description of Artificial Sequence: Synthetic oligonucleotide
  Sense Strand Starting at position 118 of SEQ ID NO: 315285
cacuguggucuguguuuga

SEQ ID NO: 327990 - RNA, 19 nt, Artificial Sequence
  Description of Artificial Sequence: Synthetic oligonucleotide
  Antisense Strand to SEQ ID NO: 327989
ucaaacacagaccacagug

SEQ ID NO: 327991 - RNA, 19 nt, Artificial Sequence
  Description of Artificial Sequence: Synthetic oligonucleotide
  Sense Strand Starting at position 118 of SEQ ID NO: 315288
uguggucuguguuugaaau

SEQ ID NO: 327992 - RNA, 19 nt, Artificial Sequence
  Description of Artificial Sequence: Synthetic oligonucleotide
  Antisense Strand to SEQ ID NO: 327991
auuucaaacacagaccaca

SEQ ID NO: 327993 - RNA, 19 nt, Artificial Sequence
  Description of Artificial Sequence: Synthetic oligonucleotide
  Sense Strand Starting at position 118 of SEQ ID NO: 315773
cugauuugcuuuggauguu

SEQ ID NO: 327994 - RNA, 19 nt, Artificial Sequence
  Description of Artificial Sequence: Synthetic oligonucleotide
  Antisense Strand to SEQ ID NO: 327993
aacauccaaagcaaaucag

SEQ ID NO: 327995 - RNA, 19 nt, Artificial Sequence
  Description of Artificial Sequence: Synthetic oligonucleotide
  Sense Strand Starting at position 118 of SEQ ID NO: 315782
uuuggauguuuccacugaa

SEQ ID NO: 327996 - RNA, 19 nt, Artificial Sequence
  Description of Artificial Sequence: Synthetic oligonucleotide
  Antisense Strand to SEQ ID NO: 327995
uucaguggaaacauccaaa

SEQ ID NO: 327997 - RNA, 19 nt, Artificial Sequence
  Description of Artificial Sequence: Synthetic oligonucleotide
  Sense Strand Starting at position 118 of SEQ ID NO: 315785
ggauguuuccacugaauaa

SEQ ID NO: 327998 - RNA, 19 nt, Artificial Sequence
  Description of Artificial Sequence: Synthetic oligonucleotide
  Antisense Strand to SEQ ID NO: 327997
uuauucaguggaaacaucc

SEQ ID NO: 327999 - RNA, 19 nt, Artificial Sequence
  Description of Artificial Sequence: Synthetic oligonucleotide
  Sense Strand Starting at position 118 of SEQ ID NO: 315815
agagaagguuaguucccaa

SEQ ID NO: 328000 - RNA, 19 nt, Artificial Sequence
  Description of Artificial Sequence: Synthetic oligonucleotide
  Antisense Strand to SEQ ID NO: 327999
uugggaacuaaccuucucu

SEQ ID NO: 328001 - RNA, 19 nt, Artificial Sequence
  Description of Artificial Sequence: Synthetic oligonucleotide
  Sense Strand Starting at position 118 of SEQ ID NO: 315839
uugcaugcaucucuggaaa

SEQ ID NO: 328002 - RNA, 19 nt, Artificial Sequence
  Description of Artificial Sequence: Synthetic oligonucleotide
  Antisense Strand to SEQ ID NO: 328001
uuuccagagaugcaugcaa

SEQ ID NO: 328003 - RNA, 19 nt, Artificial Sequence
  Description of Artificial Sequence: Synthetic oligonucleotide
  Sense Strand Starting at position 118 of SEQ ID NO: 315867
uuacuauuagcucggcuua

SEQ ID NO: 328004 - RNA, 19 nt, Artificial Sequence
  Description of Artificial Sequence: Synthetic oligonucleotide
  Antisense Strand to SEQ ID NO: 328003
uaagccgagcuaauaguaa

SEQ ID NO: 328005 - RNA, 19 nt, Artificial Sequence
  Description of Artificial Sequence: Synthetic oligonucleotide
  Sense Strand Starting at position 118 of SEQ ID NO: 315869
acuauuagcucggcuuaaa

SEQ ID NO: 328006 - RNA, 19 nt, Artificial Sequence
  Description of Artificial Sequence: Synthetic oligonucleotide
  Antisense Strand to SEQ ID NO: 328005
uuuaagccgagcuaauagu

SEQ ID NO: 328007 - RNA, 19 nt, Artificial Sequence
  Description of Artificial Sequence: Synthetic oligonucleotide
  Sense Strand Starting at position 118 of SEQ ID NO: 315872
auuagcucggcuuaaagua

SEQ ID NO: 328008 - RNA, 19 nt, Artificial Sequence
  Description of Artificial Sequence: Synthetic oligonucleotide
  Antisense Strand to SEQ ID NO: 328007
uacuuuaagccgagcuaau

SEQ ID NO: 328009 - RNA, 19 nt, Artificial Sequence
  Description of Artificial Sequence: Synthetic oligonucleotide
  Sense Strand Starting at position 118 of SEQ ID NO: 315879
cggcuuaaaguagauacua

SEQ ID NO: 328010 - RNA, 19 nt, Artificial Sequence
  Description of Artificial Sequence: Synthetic oligonucleotide
  Antisense Strand to SEQ ID NO: 328009
uaguaucuacuuuaagccg

SEQ ID NO: 328011 - RNA, 19 nt, Artificial Sequence
  Description of Artificial Sequence: Synthetic oligonucleotide
  Sense Strand Starting at position 118 of SEQ ID NO: 315970
cccuuagauuauguaguca

SEQ ID NO: 328012 - RNA, 19 nt, Artificial Sequence
  Description of Artificial Sequence: Synthetic oligonucleotide
  Antisense Strand to SEQ ID NO: 328011
ugacuacauaaucuaaggg

SEQ ID NO: 328013 - RNA, 19 nt, Artificial Sequence
  Description of Artificial Sequence: Synthetic oligonucleotide
  Sense Strand Starting at position 118 of SEQ ID NO: 316045
gcuauagguagacgaaagu

SEQ ID NO: 328014 - RNA, 19 nt, Artificial Sequence
  Description of Artificial Sequence: Synthetic oligonucleotide
  Antisense Strand to SEQ ID NO: 328013
acuuucgucuaccuauagc

SEQ ID NO: 328015 - RNA, 19 nt, Artificial Sequence
  Description of Artificial Sequence: Synthetic oligonucleotide
  Sense Strand Starting at position 118 of SEQ ID NO: 316054
agacgaaaguuauugcaau

SEQ ID NO: 328016 - RNA, 19 nt, Artificial Sequence
  Description of Artificial Sequence: Synthetic oligonucleotide
  Antisense Strand to SEQ ID NO: 328015
auugcaauaacuuucgucu

SEQ ID NO: 328017 - RNA, 19 nt, Artificial Sequence
  Description of Artificial Sequence: Synthetic oligonucleotide
  Sense Strand Starting at position 118 of SEQ ID NO: 316545
gaugcagaguccuuuggac

SEQ ID NO: 328018 - RNA, 19 nt, Artificial Sequence
  Description of Artificial Sequence: Synthetic oligonucleotide
  Antisense Strand to SEQ ID NO: 328017
guccaaaggacucugcauc

SEQ ID NO: 328019 - RNA, 19 nt, Artificial Sequence
  Description of Artificial Sequence: Synthetic oligonucleotide
  Sense Strand Starting at position 118 of SEQ ID NO: 316547
ugcagaguccuuuggacuu

SEQ ID NO: 328020 - RNA, 19 nt, Artificial Sequence
  Description of Artificial Sequence: Synthetic oligonucleotide
  Antisense Strand to SEQ ID NO: 328019
aaguccaaaggacucugca

SEQ ID NO: 328021 - RNA, 19 nt, Artificial Sequence
  Description of Artificial Sequence: Synthetic oligonucleotide
  Sense Strand Starting at position 118 of SEQ ID NO: 316597
gcccuuaucuaauggaaga

SEQ ID NO: 328022 - RNA, 19 nt, Artificial Sequence
  Description of Artificial Sequence: Synthetic oligonucleotide
  Antisense Strand to SEQ ID NO: 328021
ucuuccauuagauaagggc

SEQ ID NO: 328023 - RNA, 19 nt, Artificial Sequence
  Description of Artificial Sequence: Synthetic oligonucleotide
  Sense Strand Starting at position 118 of SEQ ID NO: 316740
ggugucagcugaucaguuu

SEQ ID NO: 328024 - RNA, 19 nt, Artificial Sequence
  Description of Artificial Sequence: Synthetic oligonucleotide
  Antisense Strand to SEQ ID NO: 328023
aaacugaucagcugacacc

SEQ ID NO: 328025 - RNA, 19 nt, Artificial Sequence
  Description of Artificial Sequence: Synthetic oligonucleotide
  Sense Strand Starting at position 118 of SEQ ID NO: 317418
gccucuggguggcuuuaaa

SEQ ID NO: 328026 - RNA, 19 nt, Artificial Sequence
  Description of Artificial Sequence: Synthetic oligonucleotide
  Antisense Strand to SEQ ID NO: 328025
uuuaaagccacccagaggc

SEQ ID NO: 328027 - RNA, 19 nt, Artificial Sequence
  Description of Artificial Sequence: Synthetic oligonucleotide
  Sense Strand Starting at position 118 of SEQ ID NO: 317542
gugggaaacugagacuuua

SEQ ID NO: 328028 - RNA, 19 nt, Artificial Sequence
  Description of Artificial Sequence: Synthetic oligonucleotide
  Antisense Strand to SEQ ID NO: 328027
uaaagucucaguuucccac

SEQ ID NO: 328029 - RNA, 19 nt, Artificial Sequence
  Description of Artificial Sequence: Synthetic oligonucleotide
  Sense Strand Starting at position 118 of SEQ ID NO: 317553
agacuuuagagaggcuaau

SEQ ID NO: 328030 - RNA, 19 nt, Artificial Sequence
  Description of Artificial Sequence: Synthetic oligonucleotide
  Antisense Strand to SEQ ID NO: 328029
auuagccucucuaaagucu

SEQ ID NO: 328031 - RNA, 19 nt, Artificial Sequence
  Description of Artificial Sequence: Synthetic oligonucleotide
  Sense Strand Starting at position 118 of SEQ ID NO: 317574
acuuaaucacccugcgaga

SEQ ID NO: 328032 - RNA, 19 nt, Artificial Sequence
  Description of Artificial Sequence: Synthetic oligonucleotide
  Antisense Strand to SEQ ID NO: 328031
ucucgcagggugauuaagu

SEQ ID NO: 328033 - RNA, 19 nt, Artificial Sequence
  Description of Artificial Sequence: Synthetic oligonucleotide
  Sense Strand Starting at position 118 of SEQ ID NO: 317576
uuaaucacccugcgagauu

SEQ ID NO: 328034 - RNA, 19 nt, Artificial Sequence
  Description of Artificial Sequence: Synthetic oligonucleotide
  Antisense Strand to SEQ ID NO: 328033
aaucucgcagggugauuaa

SEQ ID NO: 328035 - RNA, 19 nt, Artificial Sequence
  Description of Artificial Sequence: Synthetic oligonucleotide
  Sense Strand Starting at position 118 of SEQ ID NO: 317646
uguugcaggucugagaaua

SEQ ID NO: 328036 - RNA, 19 nt, Artificial Sequence
  Description of Artificial Sequence: Synthetic oligonucleotide
  Antisense Strand to SEQ ID NO: 328035
uauucucagaccugcaaca

SEQ ID NO: 328037 - RNA, 19 nt, Artificial Sequence
  Description of Artificial Sequence: Synthetic oligonucleotide
  Sense Strand Starting at position 118 of SEQ ID NO: 317734
cacuaaagauuugagugaa

SEQ ID NO: 328038 - RNA, 19 nt, Artificial Sequence
  Description of Artificial Sequence: Synthetic oligonucleotide
  Antisense Strand to SEQ ID NO: 328037
uucacucaaaucuuuagug

SEQ ID NO: 328039 - RNA, 19 nt, Artificial Sequence
  Description of Artificial Sequence: Synthetic oligonucleotide
  Sense Strand Starting at position 118 of SEQ ID NO: 317769
uguuuaggcagucaggaua

SEQ ID NO: 328040 - RNA, 19 nt, Artificial Sequence
  Description of Artificial Sequence: Synthetic oligonucleotide
  Antisense Strand to SEQ ID NO: 328039
uauccugacugccuaaaca

SEQ ID NO: 328041 - RNA, 19 nt, Artificial Sequence
  Description of Artificial Sequence: Synthetic oligonucleotide
  Sense Strand Starting at position 118 of SEQ ID NO: 317777
cagucaggauagcuagauu

SEQ ID NO: 328042 - RNA, 19 nt, Artificial Sequence
  Description of Artificial Sequence: Synthetic oligonucleotide
  Antisense Strand to SEQ ID NO: 328041
aaucuagcuauccugacug

SEQ ID NO: 328043 - RNA, 19 nt, Artificial Sequence
  Description of Artificial Sequence: Synthetic oligonucleotide
  Sense Strand Starting at position 118 of SEQ ID NO: 317785
auagcuagauucucuaaug

SEQ ID NO: 328044 - RNA, 19 nt, Artificial Sequence
  Description of Artificial Sequence: Synthetic oligonucleotide
  Antisense Strand to SEQ ID NO: 328043
cauuagagaaucuagcuau

SEQ ID NO: 328045 - RNA, 19 nt, Artificial Sequence
  Description of Artificial Sequence: Synthetic oligonucleotide
  Sense Strand Starting at position 118 of SEQ ID NO: 317829
aguaguagauucuccaaga

SEQ ID NO: 328046 - RNA, 19 nt, Artificial Sequence
  Description of Artificial Sequence: Synthetic oligonucleotide
  Antisense Strand to SEQ ID NO: 328045
ucuuggagaaucuacuacu

SEQ ID NO: 328047 - RNA, 19 nt, Artificial Sequence
  Description of Artificial Sequence: Synthetic oligonucleotide
  Sense Strand Starting at position 118 of SEQ ID NO: 317830
guaguagauucuccaagaa

SEQ ID NO: 328048 - RNA, 19 nt, Artificial Sequence
  Description of Artificial Sequence: Synthetic oligonucleotide
  Antisense Strand to SEQ ID NO: 328047
uucuuggagaaucuacuac

SEQ ID NO: 328049 - RNA, 19 nt, Artificial Sequence
  Description of Artificial Sequence: Synthetic oligonucleotide
  Sense Strand Starting at position 118 of SEQ ID NO: 317921
caggaaaucugaggcuaua

SEQ ID NO: 328050 - RNA, 19 nt, Artificial Sequence
  Description of Artificial Sequence: Synthetic oligonucleotide
  Antisense Strand to SEQ ID NO: 328049
uauagccucagauuuccug

SEQ ID NO: 328051 - RNA, 19 nt, Artificial Sequence
  Description of Artificial Sequence: Synthetic oligonucleotide
  Sense Strand Starting at position 118 of SEQ ID NO: 318025
ggucaacacugcuccugaa

SEQ ID NO: 328052 - RNA, 19 nt, Artificial Sequence
  Description of Artificial Sequence: Synthetic oligonucleotide
  Antisense Strand to SEQ ID NO: 328051
uucaggagcaguguugacc

SEQ ID NO: 328053 - RNA, 19 nt, Artificial Sequence
  Description of Artificial Sequence: Synthetic oligonucleotide
  Sense Strand Starting at position 118 of SEQ ID NO: 318070
uuguguucccuuuguaaca

SEQ ID NO: 328054 - RNA, 19 nt, Artificial Sequence
  Description of Artificial Sequence: Synthetic oligonucleotide
  Antisense Strand to SEQ ID NO: 328053
uguuacaaagggaacacaa

SEQ ID NO: 328055 - RNA, 19 nt, Artificial Sequence
  Description of Artificial Sequence: Synthetic oligonucleotide
  Sense Strand Starting at position 118 of SEQ ID NO: 318071
uguguucccuuuguaacau

SEQ ID NO: 328056 - RNA, 19 nt, Artificial Sequence
  Description of Artificial Sequence: Synthetic oligonucleotide
  Antisense Strand to SEQ ID NO: 328055
auguuacaaagggaacaca

SEQ ID NO: 328057 - RNA, 19 nt, Artificial Sequence
  Description of Artificial Sequence: Synthetic oligonucleotide
  Sense Strand Starting at position 118 of SEQ ID NO: 318151
guuauacaaucaguuacuu

SEQ ID NO: 328058 - RNA, 19 nt, Artificial Sequence
  Description of Artificial Sequence: Synthetic oligonucleotide
  Antisense Strand to SEQ ID NO: 328057
aaguaacugauuguauaac

SEQ ID NO: 328059 - RNA, 19 nt, Artificial Sequence
  Description of Artificial Sequence: Synthetic oligonucleotide
  Sense Strand Starting at position 118 of SEQ ID NO: 318185
ccaggucuugagcauauga

SEQ ID NO: 328060 - RNA, 19 nt, Artificial Sequence
  Description of Artificial Sequence: Synthetic oligonucleotide
  Antisense Strand to SEQ ID NO: 328059
ucauaugcucaagaccugg

SEQ ID NO: 328061 - RNA, 19 nt, Artificial Sequence
  Description of Artificial Sequence: Synthetic oligonucleotide
  Sense Strand Starting at position 118 of SEQ ID NO: 318187
aggucuugagcauaugaug

SEQ ID NO: 328062 - RNA, 19 nt, Artificial Sequence
  Description of Artificial Sequence: Synthetic oligonucleotide
  Antisense Strand to SEQ ID NO: 328061
caucauaugcucaagaccu

SEQ ID NO: 328063 - RNA, 19 nt, Artificial Sequence
  Description of Artificial Sequence: Synthetic oligonucleotide
  Sense Strand Starting at position 118 of SEQ ID NO: 318198
auaugaugccuggaagcau

SEQ ID NO: 328064 - RNA, 19 nt, Artificial Sequence
  Description of Artificial Sequence: Synthetic oligonucleotide
  Antisense Strand to SEQ ID NO: 328063
augcuuccaggcaucauau

SEQ ID NO: 328065 - RNA, 19 nt, Artificial Sequence
  Description of Artificial Sequence: Synthetic oligonucleotide
  Sense Strand Starting at position 118 of SEQ ID NO: 318910
ccgucugagaggugaagaa

SEQ ID NO: 328066 - RNA, 19 nt, Artificial Sequence
  Description of Artificial Sequence: Synthetic oligonucleotide
  Antisense Strand to SEQ ID NO: 328065
uucuucaccucucagacgg

SEQ ID NO: 328067 - RNA, 19 nt, Artificial Sequence
  Description of Artificial Sequence: Synthetic oligonucleotide
  Sense Strand Starting at position 119 of SEQ ID NO: 315288
cagagcaggucagucauau

SEQ ID NO: 328068 - RNA, 19 nt, Artificial Sequence
  Description of Artificial Sequence: Synthetic oligonucleotide
  Antisense Strand to SEQ ID NO: 328067
auaugacugaccugcucug

SEQ ID NO: 328069 - RNA, 19 nt, Artificial Sequence
  Description of Artificial Sequence: Synthetic oligonucleotide
  Sense Strand Starting at position 119 of SEQ ID NO: 315384
cuggauaucugaggacaca

SEQ ID NO: 328070 - RNA, 19 nt, Artificial Sequence
  Description of Artificial Sequence: Synthetic oligonucleotide
  Antisense Strand to SEQ ID NO: 328069
uguguccucagauauccag

SEQ ID NO: 328071 - RNA, 19 nt, Artificial Sequence
  Description of Artificial Sequence: Synthetic oligonucleotide
  Sense Strand Starting at position 119 of SEQ ID NO: 315434
agcuguucccuuuaaugaa

SEQ ID NO: 328072 - RNA, 19 nt, Artificial Sequence
  Description of Artificial Sequence: Synthetic oligonucleotide
  Antisense Strand to SEQ ID NO: 328071
uucauuaaagggaacagcu

SEQ ID NO: 328073 - RNA, 19 nt, Artificial Sequence
  Description of Artificial Sequence: Synthetic oligonucleotide
  Sense Strand Starting at position 119 of SEQ ID NO: 315465
uucguucugccagaggauu

SEQ ID NO: 328074 - RNA, 19 nt, Artificial Sequence
  Description of Artificial Sequence: Synthetic oligonucleotide
  Antisense Strand to SEQ ID NO: 328073
aauccucuggcagaacgaa

SEQ ID NO: 328075 - RNA, 19 nt, Artificial Sequence
  Description of Artificial Sequence: Synthetic oligonucleotide
  Sense Strand Starting at position 119 of SEQ ID NO: 315609
gggcaaagaacauguuauu

SEQ ID NO: 328076 - RNA, 19 nt, Artificial Sequence
  Description of Artificial Sequence: Synthetic oligonucleotide
  Antisense Strand to SEQ ID NO: 328075
aauaacauguucuuugccc

SEQ ID NO: 328077 - RNA, 19 nt, Artificial Sequence
  Description of Artificial Sequence: Synthetic oligonucleotide
  Sense Strand Starting at position 119 of SEQ ID NO: 315638
ucaucaaucacggacguau

SEQ ID NO: 328078 - RNA, 19 nt, Artificial Sequence
  Description of Artificial Sequence: Synthetic oligonucleotide
  Antisense Strand to SEQ ID NO: 328077
auacguccgugauugauga

SEQ ID NO: 328079 - RNA, 19 nt, Artificial Sequence
  Description of Artificial Sequence: Synthetic oligonucleotide
  Sense Strand Starting at position 119 of SEQ ID NO: 315649
ggacguaucauccaccaag

SEQ ID NO: 328080 - RNA, 19 nt, Artificial Sequence
  Description of Artificial Sequence: Synthetic oligonucleotide
  Antisense Strand to SEQ ID NO: 328079
cuugguggaugauacgucc

SEQ ID NO: 328081 - RNA, 19 nt, Artificial Sequence
  Description of Artificial Sequence: Synthetic oligonucleotide
  Sense Strand Starting at position 119 of SEQ ID NO: 315652
cguaucauccaccaaggua

SEQ ID NO: 328082 - RNA, 19 nt, Artificial Sequence
  Description of Artificial Sequence: Synthetic oligonucleotide
  Antisense Strand to SEQ ID NO: 328081
uaccuugguggaugauacg

SEQ ID NO: 328083 - RNA, 19 nt, Artificial Sequence
  Description of Artificial Sequence: Synthetic oligonucleotide
  Sense Strand Starting at position 119 of SEQ ID NO: 315692
cgcucuucgauccauuuga

SEQ ID NO: 328084 - RNA, 19 nt, Artificial Sequence
  Description of Artificial Sequence: Synthetic oligonucleotide
  Antisense Strand to SEQ ID NO: 328083
ucaaauggaucgaagagcg

SEQ ID NO: 328085 - RNA, 19 nt, Artificial Sequence
  Description of Artificial Sequence: Synthetic oligonucleotide
  Sense Strand Starting at position 119 of SEQ ID NO: 315941
agcauaagccucugacugu

SEQ ID NO: 328086 - RNA, 19 nt, Artificial Sequence
  Description of Artificial Sequence: Synthetic oligonucleotide
  Antisense Strand to SEQ ID NO: 328085
acagucagaggcuuaugcu

SEQ ID NO: 328087 - RNA, 19 nt, Artificial Sequence
  Description of Artificial Sequence: Synthetic oligonucleotide
  Sense Strand Starting at position 119 of SEQ ID NO: 315985
ccuuaugaagucuauaguu

SEQ ID NO: 328088 - RNA, 19 nt, Artificial Sequence
  Description of Artificial Sequence: Synthetic oligonucleotide
  Antisense Strand to SEQ ID NO: 328087
aacuauagacuucauaagg

SEQ ID NO: 328089 - RNA, 19 nt, Artificial Sequence
  Description of Artificial Sequence: Synthetic oligonucleotide
  Sense Strand Starting at position 119 of SEQ ID NO: 315987
uuaugaagucuauaguucu

SEQ ID NO: 328090 - RNA, 19 nt, Artificial Sequence
  Description of Artificial Sequence: Synthetic oligonucleotide
  Antisense Strand to SEQ ID NO: 328089
agaacuauagacuucauaa

SEQ ID NO: 328091 - RNA, 19 nt, Artificial Sequence
  Description of Artificial Sequence: Synthetic oligonucleotide
  Sense Strand Starting at position 119 of SEQ ID NO: 315995
ucuauaguucuggguaaga

SEQ ID NO: 328092 - RNA, 19 nt, Artificial Sequence
  Description of Artificial Sequence: Synthetic oligonucleotide
  Antisense Strand to SEQ ID NO: 328091
ucuuacccagaacuauaga

SEQ ID NO: 328093 - RNA, 19 nt, Artificial Sequence
  Description of Artificial Sequence: Synthetic oligonucleotide
  Sense Strand Starting at position 119 of SEQ ID NO: 316314
acaggaugacuuuguguca

SEQ ID NO: 328094 - RNA, 19 nt, Artificial Sequence
  Description of Artificial Sequence: Synthetic oligonucleotide
  Antisense Strand to SEQ ID NO: 328093
ugacacaaagucauccugu

SEQ ID NO: 328095 - RNA, 19 nt, Artificial Sequence
  Description of Artificial Sequence: Synthetic oligonucleotide
  Sense Strand Starting at position 119 of SEQ ID NO: 316317
ggaugacuuugugucagga

SEQ ID NO: 328096 - RNA, 19 nt, Artificial Sequence
  Description of Artificial Sequence: Synthetic oligonucleotide
  Antisense Strand to SEQ ID NO: 328095
uccugacacaaagucaucc

SEQ ID NO: 328097 - RNA, 19 nt, Artificial Sequence
  Description of Artificial Sequence: Synthetic oligonucleotide
  Sense Strand Starting at position 119 of SEQ ID NO: 316494
uaaggaaaguuugggagaa

SEQ ID NO: 328098 - RNA, 19 nt, Artificial Sequence
  Description of Artificial Sequence: Synthetic oligonucleotide
  Antisense Strand to SEQ ID NO: 328097
uucucccaaacuuuccuua

SEQ ID NO: 328099 - RNA, 19 nt, Artificial Sequence
  Description of Artificial Sequence: Synthetic oligonucleotide
  Sense Strand Starting at position 119 of SEQ ID NO: 316513
aagaaaguaucaguuugau

SEQ ID NO: 328100 - RNA, 19 nt, Artificial Sequence
  Description of Artificial Sequence: Synthetic oligonucleotide
  Antisense Strand to SEQ ID NO: 328099
aucaaacugauacuuucuu

SEQ ID NO: 328101 - RNA, 19 nt, Artificial Sequence
  Description of Artificial Sequence: Synthetic oligonucleotide
  Sense Strand Starting at position 119 of SEQ ID NO: 316516
aaaguaucaguuugaucag

SEQ ID NO: 328102 - RNA, 19 nt, Artificial Sequence
  Description of Artificial Sequence: Synthetic oligonucleotide
  Antisense Strand to SEQ ID NO: 328101
cugaucaaacugauacuuu

SEQ ID NO: 328103 - RNA, 19 nt, Artificial Sequence
  Description of Artificial Sequence: Synthetic oligonucleotide
  Sense Strand Starting at position 119 of SEQ ID NO: 316519
guaucaguuugaucaggag

SEQ ID NO: 328104 - RNA, 19 nt, Artificial Sequence
  Description of Artificial Sequence: Synthetic oligonucleotide
  Antisense Strand to SEQ ID NO: 328103
cuccugaucaaacugauac

SEQ ID NO: 328105 - RNA, 19 nt, Artificial Sequence
  Description of Artificial Sequence: Synthetic oligonucleotide
  Sense Strand Starting at position 119 of SEQ ID NO: 316559
ugcugcuuucugugagauu

SEQ ID NO: 328106 - RNA, 19 nt, Artificial Sequence
  Description of Artificial Sequence: Synthetic oligonucleotide
  Antisense Strand to SEQ ID NO: 328105
aaucucacagaaagcagca

SEQ ID NO: 328107 - RNA, 19 nt, Artificial Sequence
  Description of Artificial Sequence: Synthetic oligonucleotide
  Sense Strand Starting at position 119 of SEQ ID NO: 316637
cccagcacucuggguguaa

SEQ ID NO: 328108 - RNA, 19 nt, Artificial Sequence
  Description of Artificial Sequence: Synthetic oligonucleotide
  Antisense Strand to SEQ ID NO: 328107
uuacacccagagugcuggg

SEQ ID NO: 328109 - RNA, 19 nt, Artificial Sequence
  Description of Artificial Sequence: Synthetic oligonucleotide
  Sense Strand Starting at position 119 of SEQ ID NO: 316688
gacauuugcucugaagguc

SEQ ID NO: 328110 - RNA, 19 nt, Artificial Sequence
  Description of Artificial Sequence: Synthetic oligonucleotide
  Antisense Strand to SEQ ID NO: 328109
gaccuucagagcaaauguc

SEQ ID NO: 328111 - RNA, 19 nt, Artificial Sequence
  Description of Artificial Sequence: Synthetic oligonucleotide
  Sense Strand Starting at position 119 of SEQ ID NO: 316844
cgaaaucuuccacgagcag

SEQ ID NO: 328112 - RNA, 19 nt, Artificial Sequence
  Description of Artificial Sequence: Synthetic oligonucleotide
  Antisense Strand to SEQ ID NO: 328111
cugcucguggaagauuucg

SEQ ID NO: 328113 - RNA, 19 nt, Artificial Sequence
  Description of Artificial Sequence: Synthetic oligonucleotide
  Sense Strand Starting at position 119 of SEQ ID NO: 318533
aucagaugucauugcuucu

SEQ ID NO: 328114 - RNA, 19 nt, Artificial Sequence
  Description of Artificial Sequence: Synthetic oligonucleotide
  Antisense Strand to SEQ ID NO: 328113
agaagcaaugacaucugau

SEQ ID NO: 328115 - RNA, 19 nt, Artificial Sequence
  Description of Artificial Sequence: Synthetic oligonucleotide
  Sense Strand Starting at position 119 of SEQ ID NO: 318536
agaugucauugcuucugca

SEQ ID NO: 328116 - RNA, 19 nt, Artificial Sequence
  Description of Artificial Sequence: Synthetic oligonucleotide
  Antisense Strand to SEQ ID NO: 328115
ugcagaagcaaugacaucu

SEQ ID NO: 328117 - RNA, 19 nt, Artificial Sequence
  Description of Artificial Sequence: Synthetic oligonucleotide
  Sense Strand Starting at position 119 of SEQ ID NO: 318550
cugcaacuccuggguuaga

SEQ ID NO: 328118 - RNA, 19 nt, Artificial Sequence
  Description of Artificial Sequence: Synthetic oligonucleotide
  Antisense Strand to SEQ ID NO: 328117
ucuaacccaggaguugcag

SEQ ID NO: 328119 - RNA, 19 nt, Artificial Sequence
  Description of Artificial Sequence: Synthetic oligonucleotide
  Sense Strand Starting at position 119 of SEQ ID NO: 318609
ggcuuugguuucuugaaca

SEQ ID NO: 328120 - RNA, 19 nt, Artificial Sequence
  Description of Artificial Sequence: Synthetic oligonucleotide
  Antisense Strand to SEQ ID NO: 328119
uguucaagaaaccaaagcc

SEQ ID NO: 328121 - RNA, 19 nt, Artificial Sequence
  Description of Artificial Sequence: Synthetic oligonucleotide
  Sense Strand Starting at position 119 of SEQ ID NO: 318614
ugguuucuugaacaguaau

SEQ ID NO: 328122 - RNA, 19 nt, Artificial Sequence
  Description of Artificial Sequence: Synthetic oligonucleotide
  Antisense Strand to SEQ ID NO: 328121
auuacuguucaagaaacca

SEQ ID NO: 328123 - RNA, 19 nt, Artificial Sequence
  Description of Artificial Sequence: Synthetic oligonucleotide
  Sense Strand Starting at position 119 of SEQ ID NO: 318626
caguaauuuccucagucgu

SEQ ID NO: 328124 - RNA, 19 nt, Artificial Sequence
  Description of Artificial Sequence: Synthetic oligonucleotide
  Antisense Strand to SEQ ID NO: 328123
acgacugaggaaauuacug

SEQ ID NO: 328125 - RNA, 19 nt, Artificial Sequence
  Description of Artificial Sequence: Synthetic oligonucleotide
  Sense Strand Starting at position 119 of SEQ ID NO: 318652
caugcagaauaguuuaaag

SEQ ID NO: 328126 - RNA, 19 nt, Artificial Sequence
  Description of Artificial Sequence: Synthetic oligonucleotide
  Antisense Strand to SEQ ID NO: 328125
cuuuaaacuauucugcaug

SEQ ID NO: 328127 - RNA, 19 nt, Artificial Sequence
  Description of Artificial Sequence: Synthetic oligonucleotide
  Sense Strand Starting at position 119 of SEQ ID NO: 318654
ugcagaauaguuuaaaguc

SEQ ID NO: 328128 - RNA, 19 nt, Artificial Sequence
  Description of Artificial Sequence: Synthetic oligonucleotide
  Antisense Strand to SEQ ID NO: 328127
gacuuuaaacuauucugca

SEQ ID NO: 328129 - RNA, 19 nt, Artificial Sequence
  Description of Artificial Sequence: Synthetic oligonucleotide
  Sense Strand Starting at position 119 of SEQ ID NO: 318662
aguuuaaagucccugaaga

SEQ ID NO: 328130 - RNA, 19 nt, Artificial Sequence
  Description of Artificial Sequence: Synthetic oligonucleotide
  Antisense Strand to SEQ ID NO: 328129
ucuucagggacuuuaaacu

SEQ ID NO: 328131 - RNA, 19 nt, Artificial Sequence
  Description of Artificial Sequence: Synthetic oligonucleotide
  Sense Strand Starting at position 119 of SEQ ID NO: 318663
guuuaaagucccugaagau

SEQ ID NO: 328132 - RNA, 19 nt, Artificial Sequence
  Description of Artificial Sequence: Synthetic oligonucleotide
  Antisense Strand to SEQ ID NO: 328131
aucuucagggacuuuaaac

SEQ ID NO: 328133 - RNA, 19 nt, Artificial Sequence
  Description of Artificial Sequence: Synthetic oligonucleotide
  Sense Strand Starting at position 119 of SEQ ID NO: 318672
cccugaagauauucccgau

SEQ ID NO: 328134 - RNA, 19 nt, Artificial Sequence
  Description of Artificial Sequence: Synthetic oligonucleotide
  Antisense Strand to SEQ ID NO: 328133
aucgggaauaucuucaggg

SEQ ID NO: 328135 - RNA, 19 nt, Artificial Sequence
  Description of Artificial Sequence: Synthetic oligonucleotide
  Sense Strand Starting at position 119 of SEQ ID NO: 318856
cccguuaaccagugaaacu

SEQ ID NO: 328136 - RNA, 19 nt, Artificial Sequence
  Description of Artificial Sequence: Synthetic oligonucleotide
  Antisense Strand to SEQ ID NO: 328135
aguuucacugguuaacggg

SEQ ID NO: 328137 - RNA, 19 nt, Artificial Sequence
  Description of Artificial Sequence: Synthetic oligonucleotide
  Sense Strand Starting at position 119 of SEQ ID NO: 318857
ccguuaaccagugaaacug

SEQ ID NO: 328138 - RNA, 19 nt, Artificial Sequence
  Description of Artificial Sequence: Synthetic oligonucleotide
  Antisense Strand to SEQ ID NO: 328137
caguuucacugguuaacgg

SEQ ID NO: 328139 - RNA, 19 nt, Artificial Sequence
  Description of Artificial Sequence: Synthetic oligonucleotide
  Sense Strand Starting at position 119 of SEQ ID NO: 318888
acaguuuguuuacuaauga

SEQ ID NO: 328140 - RNA, 19 nt, Artificial Sequence
  Description of Artificial Sequence: Synthetic oligonucleotide
  Antisense Strand to SEQ ID NO: 328139
ucauuaguaaacaaacugu

SEQ ID NO: 328141 - RNA, 19 nt, Artificial Sequence
  Description of Artificial Sequence: Synthetic oligonucleotide
  Sense Strand Starting at position 119 of SEQ ID NO: 318919
gccggaguuggcugacauu

SEQ ID NO: 328142 - RNA, 19 nt, Artificial Sequence
  Description of Artificial Sequence: Synthetic oligonucleotide
  Antisense Strand to SEQ ID NO: 328141
aaugucagccaacuccggc

SEQ ID NO: 328143 - RNA, 19 nt, Artificial Sequence
  Description of Artificial Sequence: Synthetic oligonucleotide
  Sense Strand Starting at position 119 of SEQ ID NO: 318925
guuggcugacauuggaaau

SEQ ID NO: 328144 - RNA, 19 nt, Artificial Sequence
  Description of Artificial Sequence: Synthetic oligonucleotide
  Antisense Strand to SEQ ID NO: 328143
auuuccaaugucagccaac

SEQ ID NO: 328145 - RNA, 19 nt, Artificial Sequence
  Description of Artificial Sequence: Synthetic oligonucleotide
  Sense Strand Starting at position 119 of SEQ ID NO: 318926
uuggcugacauuggaaaua

SEQ ID NO: 328146 - RNA, 19 nt, Artificial Sequence
  Description of Artificial Sequence: Synthetic oligonucleotide
  Antisense Strand to SEQ ID NO: 328145
uauuuccaaugucagccaa

SEQ ID NO: 328147 - RNA, 19 nt, Artificial Sequence
  Description of Artificial Sequence: Synthetic oligonucleotide
  Sense Strand Starting at position 120 of SEQ ID NO: 315236
gagaacuggacgugucauu

SEQ ID NO: 328148 - RNA, 19 nt, Artificial Sequence
  Description of Artificial Sequence: Synthetic oligonucleotide
  Antisense Strand to SEQ ID NO: 328147
aaugacacguccaguucuc

SEQ ID NO: 328149 - RNA, 19 nt, Artificial Sequence
  Description of Artificial Sequence: Synthetic oligonucleotide
  Sense Strand Starting at position 120 of SEQ ID NO: 315286
gccaaugaccauuagcaga

SEQ ID NO: 328150 - RNA, 19 nt, Artificial Sequence
  Description of Artificial Sequence: Synthetic oligonucleotide
  Antisense Strand to SEQ ID NO: 328149
ucugcuaauggucauuggc

SEQ ID NO: 328151 - RNA, 19 nt, Artificial Sequence
  Description of Artificial Sequence: Synthetic oligonucleotide
  Sense Strand Starting at position 120 of SEQ ID NO: 315642
acauaaacguguuccagau

SEQ ID NO: 328152 - RNA, 19 nt, Artificial Sequence
  Description of Artificial Sequence: Synthetic oligonucleotide
  Antisense Strand to SEQ ID NO: 328151
aucuggaacacguuuaugu

SEQ ID NO: 328153 - RNA, 19 nt, Artificial Sequence
  Description of Artificial Sequence: Synthetic oligonucleotide
  Sense Strand Starting at position 120 of SEQ ID NO: 315694
ucggguucggucucaguua

SEQ ID NO: 328154 - RNA, 19 nt, Artificial Sequence
  Description of Artificial Sequence: Synthetic oligonucleotide
  Antisense Strand to SEQ ID NO: 328153
uaacugagaccgaacccga

SEQ ID NO: 328155 - RNA, 19 nt, Artificial Sequence
  Description of Artificial Sequence: Synthetic oligonucleotide
  Sense Strand Starting at position 120 of SEQ ID NO: 315696
ggguucggucucaguuaug

SEQ ID NO: 328156 - RNA, 19 nt, Artificial Sequence
  Description of Artificial Sequence: Synthetic oligonucleotide
  Antisense Strand to SEQ ID NO: 328155
cauaacugagaccgaaccc

SEQ ID NO: 328157 - RNA, 19 nt, Artificial Sequence
  Description of Artificial Sequence: Synthetic oligonucleotide
  Sense Strand Starting at position 120 of SEQ ID NO: 315699
uucggucucaguuauguua

SEQ ID NO: 328158 - RNA, 19 nt, Artificial Sequence
  Description of Artificial Sequence: Synthetic oligonucleotide
  Antisense Strand to SEQ ID NO: 328157
uaacauaacugagaccgaa

SEQ ID NO: 328159 - RNA, 19 nt, Artificial Sequence
  Description of Artificial Sequence: Synthetic oligonucleotide
  Sense Strand Starting at position 120 of SEQ ID NO: 315806
ccucgagucugauuucugu

SEQ ID NO: 328160 - RNA, 19 nt, Artificial Sequence
  Description of Artificial Sequence: Synthetic oligonucleotide
  Antisense Strand to SEQ ID NO: 328159
acagaaaucagacucgagg

SEQ ID NO: 328161 - RNA, 19 nt, Artificial Sequence
  Description of Artificial Sequence: Synthetic oligonucleotide
  Sense Strand Starting at position 120 of SEQ ID NO: 315809
cgagucugauuucuguaau

SEQ ID NO: 328162 - RNA, 19 nt, Artificial Sequence
  Description of Artificial Sequence: Synthetic oligonucleotide
  Antisense Strand to SEQ ID NO: 328161
auuacagaaaucagacucg

SEQ ID NO: 328163 - RNA, 19 nt, Artificial Sequence
  Description of Artificial Sequence: Synthetic oligonucleotide
  Sense Strand Starting at position 120 of SEQ ID NO: 315819
uucuguaauuuacuagcga

SEQ ID NO: 328164 - RNA, 19 nt, Artificial Sequence
  Description of Artificial Sequence: Synthetic oligonucleotide
  Antisense Strand to SEQ ID NO: 328163
ucgcuaguaaauuacagaa

SEQ ID NO: 328165 - RNA, 19 nt, Artificial Sequence
  Description of Artificial Sequence: Synthetic oligonucleotide
  Sense Strand Starting at position 120 of SEQ ID NO: 315838
cccggaucgcagcaaauaa

SEQ ID NO: 328166 - RNA, 19 nt, Artificial Sequence
  Description of Artificial Sequence: Synthetic oligonucleotide
  Antisense Strand to SEQ ID NO: 328165
uuauuugcugcgauccggg

SEQ ID NO: 328167 - RNA, 19 nt, Artificial Sequence
  Description of Artificial Sequence: Synthetic oligonucleotide
  Sense Strand Starting at position 120 of SEQ ID NO: 315848
agcaaauaacaguguaaca

SEQ ID NO: 328168 - RNA, 19 nt, Artificial Sequence
  Description of Artificial Sequence: Synthetic oligonucleotide
  Antisense Strand to SEQ ID NO: 328167
uguuacacuguuauuugcu

SEQ ID NO: 328169 - RNA, 19 nt, Artificial Sequence
  Description of Artificial Sequence: Synthetic oligonucleotide
  Sense Strand Starting at position 120 of SEQ ID NO: 315864
acacgaguguggcuuaaga

SEQ ID NO: 328170 - RNA, 19 nt, Artificial Sequence
  Description of Artificial Sequence: Synthetic oligonucleotide
  Antisense Strand to SEQ ID NO: 328169
ucuuaagccacacucgugu

SEQ ID NO: 328171 - RNA, 19 nt, Artificial Sequence
  Description of Artificial Sequence: Synthetic oligonucleotide
  Sense Strand Starting at position 120 of SEQ ID NO: 315891
gagcucuuucuagaggcau

SEQ ID NO: 328172 - RNA, 19 nt, Artificial Sequence
  Description of Artificial Sequence: Synthetic oligonucleotide
  Antisense Strand to SEQ ID NO: 328171
augccucuagaaagagcuc

SEQ ID NO: 328173 - RNA, 19 nt, Artificial Sequence
  Description of Artificial Sequence: Synthetic oligonucleotide
  Sense Strand Starting at position 120 of SEQ ID NO: 315923
ggauaaaggaucugcaagu

SEQ ID NO: 328174 - RNA, 19 nt, Artificial Sequence
  Description of Artificial Sequence: Synthetic oligonucleotide
  Antisense Strand to SEQ ID NO: 328173
acuugcagauccuuuaucc

SEQ ID NO: 328175 - RNA, 19 nt, Artificial Sequence
  Description of Artificial Sequence: Synthetic oligonucleotide
  Sense Strand Starting at position 120 of SEQ ID NO: 315924
gauaaaggaucugcaaguu

SEQ ID NO: 328176 - RNA, 19 nt, Artificial Sequence
  Description of Artificial Sequence: Synthetic oligonucleotide
  Antisense Strand to SEQ ID NO: 328175
aacuugcagauccuuuauc

SEQ ID NO: 328177 - RNA, 19 nt, Artificial Sequence
  Description of Artificial Sequence: Synthetic oligonucleotide
  Sense Strand Starting at position 120 of SEQ ID NO: 315958
caggcaaagccguaacuua

SEQ ID NO: 328178 - RNA, 19 nt, Artificial Sequence
  Description of Artificial Sequence: Synthetic oligonucleotide
  Antisense Strand to SEQ ID NO: 328177
uaaguuacggcuuugccug

SEQ ID NO: 328179 - RNA, 19 nt, Artificial Sequence
  Description of Artificial Sequence: Synthetic oligonucleotide
  Sense Strand Starting at position 120 of SEQ ID NO: 316518
uacuuucgccgagaugaag

SEQ ID NO: 328180 - RNA, 19 nt, Artificial Sequence
  Description of Artificial Sequence: Synthetic oligonucleotide
  Antisense Strand to SEQ ID NO: 328179
cuucaucucggcgaaagua

SEQ ID NO: 328181 - RNA, 19 nt, Artificial Sequence
  Description of Artificial Sequence: Synthetic oligonucleotide
  Sense Strand Starting at position 120 of SEQ ID NO: 316993
cucgcaagugaguaggaaa

SEQ ID NO: 328182 - RNA, 19 nt, Artificial Sequence
  Description of Artificial Sequence: Synthetic oligonucleotide
  Antisense Strand to SEQ ID NO: 328181
uuuccuacucacuugcgag

SEQ ID NO: 328183 - RNA, 19 nt, Artificial Sequence
  Description of Artificial Sequence: Synthetic oligonucleotide
  Sense Strand Starting at position 120 of SEQ ID NO: 317462
aguugcaaggcuugaaacu

SEQ ID NO: 328184 - RNA, 19 nt, Artificial Sequence
  Description of Artificial Sequence: Synthetic oligonucleotide
  Antisense Strand to SEQ ID NO: 328183
aguuucaagccuugcaacu

SEQ ID NO: 328185 - RNA, 19 nt, Artificial Sequence
  Description of Artificial Sequence: Synthetic oligonucleotide
  Sense Strand Starting at position 120 of SEQ ID NO: 317586
gccugcauuguguuacgau

SEQ ID NO: 328186 - RNA, 19 nt, Artificial Sequence
  Description of Artificial Sequence: Synthetic oligonucleotide
  Antisense Strand to SEQ ID NO: 328185
aucguaacacaaugcaggc

SEQ ID NO: 328187 - RNA, 19 nt, Artificial Sequence
  Description of Artificial Sequence: Synthetic oligonucleotide
  Sense Strand Starting at position 120 of SEQ ID NO: 317665
uugucaauggguuagcuau

SEQ ID NO: 328188 - RNA, 19 nt, Artificial Sequence
  Description of Artificial Sequence: Synthetic oligonucleotide
  Antisense Strand to SEQ ID NO: 328187
auagcuaacccauugacaa

SEQ ID NO: 328189 - RNA, 19 nt, Artificial Sequence
  Description of Artificial Sequence: Synthetic oligonucleotide
  Sense Strand Starting at position 120 of SEQ ID NO: 317721
acucuaaugcauugagguu

SEQ ID NO: 328190 - RNA, 19 nt, Artificial Sequence
  Description of Artificial Sequence: Synthetic oligonucleotide
  Antisense Strand to SEQ ID NO: 328189
aaccucaaugcauuagagu

SEQ ID NO: 328191 - RNA, 19 nt, Artificial Sequence
  Description of Artificial Sequence: Synthetic oligonucleotide
  Sense Strand Starting at position 120 of SEQ ID NO: 317747
ccucauucguagguagauu

SEQ ID NO: 328192 - RNA, 19 nt, Artificial Sequence
  Description of Artificial Sequence: Synthetic oligonucleotide
  Antisense Strand to SEQ ID NO: 328191
aaucuaccuacgaaugagg

SEQ ID NO: 328193 - RNA, 19 nt, Artificial Sequence
  Description of Artificial Sequence: Synthetic oligonucleotide
  Sense Strand Starting at position 120 of SEQ ID NO: 317894
auggaagauuggcuauuga

SEQ ID NO: 328194 - RNA, 19 nt, Artificial Sequence
  Description of Artificial Sequence: Synthetic oligonucleotide
  Antisense Strand to SEQ ID NO: 328193
ucaauagccaaucuuccau

SEQ ID NO: 328195 - RNA, 19 nt, Artificial Sequence
  Description of Artificial Sequence: Synthetic oligonucleotide
  Sense Strand Starting at position 120 of SEQ ID NO: 318011
ucaugugaacaucauaugu

SEQ ID NO: 328196 - RNA, 19 nt, Artificial Sequence
  Description of Artificial Sequence: Synthetic oligonucleotide
  Antisense Strand to SEQ ID NO: 328195
acauaugauguucacauga

SEQ ID NO: 328197 - RNA, 19 nt, Artificial Sequence
  Description of Artificial Sequence: Synthetic oligonucleotide
  Sense Strand Starting at position 120 of SEQ ID NO: 318022
ucauauguugcaugacuuu

SEQ ID NO: 328198 - RNA, 19 nt, Artificial Sequence
  Description of Artificial Sequence: Synthetic oligonucleotide
  Antisense Strand to SEQ ID NO: 328197
aaagucaugcaacauauga

SEQ ID NO: 328199 - RNA, 19 nt, Artificial Sequence
  Description of Artificial Sequence: Synthetic oligonucleotide
  Sense Strand Starting at position 120 of SEQ ID NO: 318057
caggacuggucuuucugau

SEQ ID NO: 328200 - RNA, 19 nt, Artificial Sequence
  Description of Artificial Sequence: Synthetic oligonucleotide
  Antisense Strand to SEQ ID NO: 328199
aucagaaagaccaguccug

SEQ ID NO: 328201 - RNA, 19 nt, Artificial Sequence
  Description of Artificial Sequence: Synthetic oligonucleotide
  Sense Strand Starting at position 120 of SEQ ID NO: 318100
aagauuauaugagacaguu

SEQ ID NO: 328202 - RNA, 19 nt, Artificial Sequence
  Description of Artificial Sequence: Synthetic oligonucleotide
  Antisense Strand to SEQ ID NO: 328201
aacugucucauauaaucuu

SEQ ID NO: 328203 - RNA, 19 nt, Artificial Sequence
  Description of Artificial Sequence: Synthetic oligonucleotide
  Sense Strand Starting at position 120 of SEQ ID NO: 318149
agaagucaaagcuggaaau

SEQ ID NO: 328204 - RNA, 19 nt, Artificial Sequence
  Description of Artificial Sequence: Synthetic oligonucleotide
  Antisense Strand to SEQ ID NO: 328203
auuuccagcuuugacuucu

SEQ ID NO: 328205 - RNA, 19 nt, Artificial Sequence
  Description of Artificial Sequence: Synthetic oligonucleotide
  Sense Strand Starting at position 120 of SEQ ID NO: 318208
agcaaucuugagcaaguua

SEQ ID NO: 328206 - RNA, 19 nt, Artificial Sequence
  Description of Artificial Sequence: Synthetic oligonucleotide
  Antisense Strand to SEQ ID NO: 328205
uaacuugcucaagauugcu

SEQ ID NO: 328207 - RNA, 19 nt, Artificial Sequence
  Description of Artificial Sequence: Synthetic oligonucleotide
  Sense Strand Starting at position 120 of SEQ ID NO: 318326
ugugucaggcauuaucuua

SEQ ID NO: 328208 - RNA, 19 nt, Artificial Sequence
  Description of Artificial Sequence: Synthetic oligonucleotide
  Antisense Strand to SEQ ID NO: 328207
uaagauaaugccugacaca

SEQ ID NO: 328209 - RNA, 19 nt, Artificial Sequence
  Description of Artificial Sequence: Synthetic oligonucleotide
  Sense Strand Starting at position 120 of SEQ ID NO: 318334
gcauuaucuuaggccuaga

SEQ ID NO: 328210 - RNA, 19 nt, Artificial Sequence
  Description of Artificial Sequence: Synthetic oligonucleotide
  Antisense Strand to SEQ ID NO: 328209
ucuaggccuaagauaaugc

SEQ ID NO: 328211 - RNA, 19 nt, Artificial Sequence
  Description of Artificial Sequence: Synthetic oligonucleotide
  Sense Strand Starting at position 120 of SEQ ID NO: 318337
uuaucuuaggccuagaugu

SEQ ID NO: 328212 - RNA, 19 nt, Artificial Sequence
  Description of Artificial Sequence: Synthetic oligonucleotide
  Antisense Strand to SEQ ID NO: 328211
acaucuaggccuaagauaa

SEQ ID NO: 328213 - RNA, 19 nt, Artificial Sequence
  Description of Artificial Sequence: Synthetic oligonucleotide
  Sense Strand Starting at position 120 of SEQ ID NO: 318339
aucuuaggccuagauguuu

SEQ ID NO: 328214 - RNA, 19 nt, Artificial Sequence
  Description of Artificial Sequence: Synthetic oligonucleotide
  Antisense Strand to SEQ ID NO: 328213
aaacaucuaggccuaagau

SEQ ID NO: 328215 - RNA, 19 nt, Artificial Sequence
  Description of Artificial Sequence: Synthetic oligonucleotide
  Sense Strand Starting at position 120 of SEQ ID NO: 318383
guuggugaauuauucucaa

SEQ ID NO: 328216 - RNA, 19 nt, Artificial Sequence
  Description of Artificial Sequence: Synthetic oligonucleotide
  Antisense Strand to SEQ ID NO: 328215
uugagaauaauucaccaac

SEQ ID NO: 328217 - RNA, 19 nt, Artificial Sequence
  Description of Artificial Sequence: Synthetic oligonucleotide
  Sense Strand Starting at position 120 of SEQ ID NO: 318386
ggugaauuauucucaaaua

SEQ ID NO: 328218 - RNA, 19 nt, Artificial Sequence
  Description of Artificial Sequence: Synthetic oligonucleotide
  Antisense Strand to SEQ ID NO: 328217
uauuugagaauaauucacc

SEQ ID NO: 328219 - RNA, 19 nt, Artificial Sequence
  Description of Artificial Sequence: Synthetic oligonucleotide
  Sense Strand Starting at position 120 of SEQ ID NO: 318446
cuagguaaguagcuuuaaa

SEQ ID NO: 328220 - RNA, 19 nt, Artificial Sequence
  Description of Artificial Sequence: Synthetic oligonucleotide
  Antisense Strand to SEQ ID NO: 328219
uuuaaagcuacuuaccuag

SEQ ID NO: 328221 - RNA, 19 nt, Artificial Sequence
  Description of Artificial Sequence: Synthetic oligonucleotide
  Sense Strand Starting at position 120 of SEQ ID NO: 318582
ugagcacuccuguguaaga

SEQ ID NO: 328222 - RNA, 19 nt, Artificial Sequence
  Description of Artificial Sequence: Synthetic oligonucleotide
  Antisense Strand to SEQ ID NO: 328221
ucuuacacaggagugcuca

SEQ ID NO: 328223 - RNA, 19 nt, Artificial Sequence
  Description of Artificial Sequence: Synthetic oligonucleotide
  Sense Strand Starting at position 120 of SEQ ID NO: 318583
gagcacuccuguguaagag

SEQ ID NO: 328224 - RNA, 19 nt, Artificial Sequence
  Description of Artificial Sequence: Synthetic oligonucleotide
  Antisense Strand to SEQ ID NO: 328223
cucuuacacaggagugcuc

SEQ ID NO: 328225 - RNA, 19 nt, Artificial Sequence
  Description of Artificial Sequence: Synthetic oligonucleotide
  Sense Strand Starting at position 120 of SEQ ID NO: 318750
gauggagucuaacccugua

SEQ ID NO: 328226 - RNA, 19 nt, Artificial Sequence
  Description of Artificial Sequence: Synthetic oligonucleotide
  Antisense Strand to SEQ ID NO: 328225
uacaggguuagacuccauc

SEQ ID NO: 328227 - RNA, 19 nt, Artificial Sequence
  Description of Artificial Sequence: Synthetic oligonucleotide
  Sense Strand Starting at position 121 of SEQ ID NO: 315345
caacgacgucuuuauauca

SEQ ID NO: 328228 - RNA, 19 nt, Artificial Sequence
  Description of Artificial Sequence: Synthetic oligonucleotide
  Antisense Strand to SEQ ID NO: 328227
ugauauaaagacgucguug

SEQ ID NO: 328229 - RNA, 19 nt, Artificial Sequence
  Description of Artificial Sequence: Synthetic oligonucleotide
  Sense Strand Starting at position 121 of SEQ ID NO: 315430
agacuacaucacugucuuu

SEQ ID NO: 328230 - RNA, 19 nt, Artificial Sequence
  Description of Artificial Sequence: Synthetic oligonucleotide
  Antisense Strand to SEQ ID NO: 328229
aaagacagugauguagucu

SEQ ID NO: 328231 - RNA, 19 nt, Artificial Sequence
  Description of Artificial Sequence: Synthetic oligonucleotide
  Sense Strand Starting at position 121 of SEQ ID NO: 315598
uuucuugagucuucucuga

SEQ ID NO: 328232 - RNA, 19 nt, Artificial Sequence
  Description of Artificial Sequence: Synthetic oligonucleotide
  Antisense Strand to SEQ ID NO: 328231
ucagagaagacucaagaaa

SEQ ID NO: 328233 - RNA, 19 nt, Artificial Sequence
  Description of Artificial Sequence: Synthetic oligonucleotide
  Sense Strand Starting at position 121 of SEQ ID NO: 315709
gcaagaaaccaucgaaaug

SEQ ID NO: 328234 - RNA, 19 nt, Artificial Sequence
  Description of Artificial Sequence: Synthetic oligonucleotide
  Antisense Strand to SEQ ID NO: 328233
cauuucgaugguuucuugc

SEQ ID NO: 328235 - RNA, 19 nt, Artificial Sequence
  Description of Artificial Sequence: Synthetic oligonucleotide
  Sense Strand Starting at position 121 of SEQ ID NO: 315804
augugacuuguuuagcuau

SEQ ID NO: 328236 - RNA, 19 nt, Artificial Sequence
  Description of Artificial Sequence: Synthetic oligonucleotide
  Antisense Strand to SEQ ID NO: 328235
auagcuaaacaagucacau

SEQ ID NO: 328237 - RNA, 19 nt, Artificial Sequence
  Description of Artificial Sequence: Synthetic oligonucleotide
  Sense Strand Starting at position 121 of SEQ ID NO: 315807
ugacuuguuuagcuauuag

SEQ ID NO: 328238 - RNA, 19 nt, Artificial Sequence
  Description of Artificial Sequence: Synthetic oligonucleotide
  Antisense Strand to SEQ ID NO: 328237
cuaauagcuaaacaaguca

SEQ ID NO: 328239 - RNA, 19 nt, Artificial Sequence
  Description of Artificial Sequence: Synthetic oligonucleotide
  Sense Strand Starting at position 121 of SEQ ID NO: 315819
cuauuaguagcuuauguuu

SEQ ID NO: 328240 - RNA, 19 nt, Artificial Sequence
  Description of Artificial Sequence: Synthetic oligonucleotide
  Antisense Strand to SEQ ID NO: 328239
aaacauaagcuacuaauag

SEQ ID NO: 328241 - RNA, 19 nt, Artificial Sequence
  Description of Artificial Sequence: Synthetic oligonucleotide
  Sense Strand Starting at position 121 of SEQ ID NO: 316091
aguaaacugucauuguauu

SEQ ID NO: 328242 - RNA, 19 nt, Artificial Sequence
  Description of Artificial Sequence: Synthetic oligonucleotide
  Antisense Strand to SEQ ID NO: 328241
aauacaaugacaguuuacu

SEQ ID NO: 328243 - RNA, 19 nt, Artificial Sequence
  Description of Artificial Sequence: Synthetic oligonucleotide
  Sense Strand Starting at position 121 of SEQ ID NO: 316092
guaaacugucauuguauuu

SEQ ID NO: 328244 - RNA, 19 nt, Artificial Sequence
  Description of Artificial Sequence: Synthetic oligonucleotide
  Antisense Strand to SEQ ID NO: 328243
aaauacaaugacaguuuac

SEQ ID NO: 328245 - RNA, 19 nt, Artificial Sequence
  Description of Artificial Sequence: Synthetic oligonucleotide
  Sense Strand Starting at position 121 of SEQ ID NO: 316164
aggagcuccuaauugaguu

SEQ ID NO: 328246 - RNA, 19 nt, Artificial Sequence
  Description of Artificial Sequence: Synthetic oligonucleotide
  Antisense Strand to SEQ ID NO: 328245
aacucaauuaggagcuccu

SEQ ID NO: 328247 - RNA, 19 nt, Artificial Sequence
  Description of Artificial Sequence: Synthetic oligonucleotide
  Sense Strand Starting at position 121 of SEQ ID NO: 316165
ggagcuccuaauugaguuu

SEQ ID NO: 328248 - RNA, 19 nt, Artificial Sequence
  Description of Artificial Sequence: Synthetic oligonucleotide
  Antisense Strand to SEQ ID NO: 328247
aaacucaauuaggagcucc

SEQ ID NO: 328249 - RNA, 19 nt, Artificial Sequence
  Description of Artificial Sequence: Synthetic oligonucleotide
  Sense Strand Starting at position 121 of SEQ ID NO: 316795
auaucacagugauuccaca

SEQ ID NO: 328250 - RNA, 19 nt, Artificial Sequence
  Description of Artificial Sequence: Synthetic oligonucleotide
  Antisense Strand to SEQ ID NO: 328249
uguggaaucacugugauau

SEQ ID NO: 328251 - RNA, 19 nt, Artificial Sequence
  Description of Artificial Sequence: Synthetic oligonucleotide
  Sense Strand Starting at position 121 of SEQ ID NO: 316889
ccugaauaauaggaagauu

SEQ ID NO: 328252 - RNA, 19 nt, Artificial Sequence
  Description of Artificial Sequence: Synthetic oligonucleotide
  Antisense Strand to SEQ ID NO: 328251
aaucuuccuauuauucagg

SEQ ID NO: 328253 - RNA, 19 nt, Artificial Sequence
  Description of Artificial Sequence: Synthetic oligonucleotide
  Sense Strand Starting at position 121 of SEQ ID NO: 316897
auaggaagauuugaugcau

SEQ ID NO: 328254 - RNA, 19 nt, Artificial Sequence
  Description of Artificial Sequence: Synthetic oligonucleotide
  Antisense Strand to SEQ ID NO: 328253
augcaucaaaucuuccuau

SEQ ID NO: 328255 - RNA, 19 nt, Artificial Sequence
  Description of Artificial Sequence: Synthetic oligonucleotide
  Sense Strand Starting at position 121 of SEQ ID NO: 317023
cagaaugagcuuuacagua

SEQ ID NO: 328256 - RNA, 19 nt, Artificial Sequence
  Description of Artificial Sequence: Synthetic oligonucleotide
  Antisense Strand to SEQ ID NO: 328255
uacuguaaagcucauucug

SEQ ID NO: 328257 - RNA, 19 nt, Artificial Sequence
  Description of Artificial Sequence: Synthetic oligonucleotide
  Sense Strand Starting at position 121 of SEQ ID NO: 317051
ucuacacgaagguguaaau

SEQ ID NO: 328258 - RNA, 19 nt, Artificial Sequence
  Description of Artificial Sequence: Synthetic oligonucleotide
  Antisense Strand to SEQ ID NO: 328257
auuuacaccuucguguaga

SEQ ID NO: 328259 - RNA, 19 nt, Artificial Sequence
  Description of Artificial Sequence: Synthetic oligonucleotide
  Sense Strand Starting at position 121 of SEQ ID NO: 317082
acccgauucucugcaacaa

SEQ ID NO: 328260 - RNA, 19 nt, Artificial Sequence
  Description of Artificial Sequence: Synthetic oligonucleotide
  Antisense Strand to SEQ ID NO: 328259
uuguugcagagaaucgggu

SEQ ID NO: 328261 - RNA, 19 nt, Artificial Sequence
  Description of Artificial Sequence: Synthetic oligonucleotide
  Sense Strand Starting at position 121 of SEQ ID NO: 317083
cccgauucucugcaacaaa

SEQ ID NO: 328262 - RNA, 19 nt, Artificial Sequence
  Description of Artificial Sequence: Synthetic oligonucleotide
  Antisense Strand to SEQ ID NO: 328261
uuuguugcagagaaucggg

SEQ ID NO: 328263 - RNA, 19 nt, Artificial Sequence
  Description of Artificial Sequence: Synthetic oligonucleotide
  Sense Strand Starting at position 121 of SEQ ID NO: 317107
caaaguuugcaaggaguga

SEQ ID NO: 328264 - RNA, 19 nt, Artificial Sequence
  Description of Artificial Sequence: Synthetic oligonucleotide
  Antisense Strand to SEQ ID NO: 328263
ucacuccuugcaaacuuug

SEQ ID NO: 328265 - RNA, 19 nt, Artificial Sequence
  Description of Artificial Sequence: Synthetic oligonucleotide
  Sense Strand Starting at position 121 of SEQ ID NO: 317181
auuggacugcacugacauu

SEQ ID NO: 328266 - RNA, 19 nt, Artificial Sequence
  Description of Artificial Sequence: Synthetic oligonucleotide
  Antisense Strand to SEQ ID NO: 328265
aaugucagugcaguccaau

SEQ ID NO: 328267 - RNA, 19 nt, Artificial Sequence
  Description of Artificial Sequence: Synthetic oligonucleotide
  Sense Strand Starting at position 121 of SEQ ID NO: 317201
aguguuacugaauguaaca

SEQ ID NO: 328268 - RNA, 19 nt, Artificial Sequence
  Description of Artificial Sequence: Synthetic oligonucleotide
  Antisense Strand to SEQ ID NO: 328267
uguuacauucaguaacacu

SEQ ID NO: 328269 - RNA, 19 nt, Artificial Sequence
  Description of Artificial Sequence: Synthetic oligonucleotide
  Sense Strand Starting at position 121 of SEQ ID NO: 317288
guauaaaugcaauagugau

SEQ ID NO: 328270 - RNA, 19 nt, Artificial Sequence
  Description of Artificial Sequence: Synthetic oligonucleotide
  Antisense Strand to SEQ ID NO: 328269
aucacuauugcauuuauac

SEQ ID NO: 328271 - RNA, 19 nt, Artificial Sequence
  Description of Artificial Sequence: Synthetic oligonucleotide
  Sense Strand Starting at position 121 of SEQ ID NO: 317478
acauauuuccuaugcuugu

SEQ ID NO: 328272 - RNA, 19 nt, Artificial Sequence
  Description of Artificial Sequence: Synthetic oligonucleotide
  Antisense Strand to SEQ ID NO: 328271
acaagcauaggaaauaugu

SEQ ID NO: 328273 - RNA, 19 nt, Artificial Sequence
  Description of Artificial Sequence: Synthetic oligonucleotide
  Sense Strand Starting at position 121 of SEQ ID NO: 317482
auuuccuaugcuugucuua

SEQ ID NO: 328274 - RNA, 19 nt, Artificial Sequence
  Description of Artificial Sequence: Synthetic oligonucleotide
  Antisense Strand to SEQ ID NO: 328273
uaagacaagcauaggaaau

SEQ ID NO: 328275 - RNA, 19 nt, Artificial Sequence
  Description of Artificial Sequence: Synthetic oligonucleotide
  Sense Strand Starting at position 121 of SEQ ID NO: 317509
agacguauacaucauucua

SEQ ID NO: 328276 - RNA, 19 nt, Artificial Sequence
  Description of Artificial Sequence: Synthetic oligonucleotide
  Antisense Strand to SEQ ID NO: 328275
uagaaugauguauacgucu

SEQ ID NO: 328277 - RNA, 19 nt, Artificial Sequence
  Description of Artificial Sequence: Synthetic oligonucleotide
  Sense Strand Starting at position 121 of SEQ ID NO: 317625
agauauaagcuaugcaaau

SEQ ID NO: 328278 - RNA, 19 nt, Artificial Sequence
  Description of Artificial Sequence: Synthetic oligonucleotide
  Antisense Strand to SEQ ID NO: 328277
auuugcauagcuuauaucu

SEQ ID NO: 328279 - RNA, 19 nt, Artificial Sequence
  Description of Artificial Sequence: Synthetic oligonucleotide
  Sense Strand Starting at position 121 of SEQ ID NO: 317657
cuauuaacugaauggaugu

SEQ ID NO: 328280 - RNA, 19 nt, Artificial Sequence
  Description of Artificial Sequence: Synthetic oligonucleotide
  Antisense Strand to SEQ ID NO: 328279
acauccauucaguuaauag

SEQ ID NO: 328281 - RNA, 19 nt, Artificial Sequence
  Description of Artificial Sequence: Synthetic oligonucleotide
  Sense Strand Starting at position 121 of SEQ ID NO: 317664
cugaauggaugucucugau

SEQ ID NO: 328282 - RNA, 19 nt, Artificial Sequence
  Description of Artificial Sequence: Synthetic oligonucleotide
  Antisense Strand to SEQ ID NO: 328281
aucagagacauccauucag

SEQ ID NO: 328283 - RNA, 19 nt, Artificial Sequence
  Description of Artificial Sequence: Synthetic oligonucleotide
  Sense Strand Starting at position 121 of SEQ ID NO: 317667
aauggaugucucugauaug

SEQ ID NO: 328284 - RNA, 19 nt, Artificial Sequence
  Description of Artificial Sequence: Synthetic oligonucleotide
  Antisense Strand to SEQ ID NO: 328283
cauaucagagacauccauu

SEQ ID NO: 328285 - RNA, 19 nt, Artificial Sequence
  Description of Artificial Sequence: Synthetic oligonucleotide
  Sense Strand Starting at position 121 of SEQ ID NO: 317677
ucugauauguaucuccuuu

SEQ ID NO: 328286 - RNA, 19 nt, Artificial Sequence
  Description of Artificial Sequence: Synthetic oligonucleotide
  Antisense Strand to SEQ ID NO: 328285
aaaggagauacauaucaga

SEQ ID NO: 328287 - RNA, 19 nt, Artificial Sequence
  Description of Artificial Sequence: Synthetic oligonucleotide
  Sense Strand Starting at position 121 of SEQ ID NO: 317772
ggcagucauacaugaugag

SEQ ID NO: 328288 - RNA, 19 nt, Artificial Sequence
  Description of Artificial Sequence: Synthetic oligonucleotide
  Antisense Strand to SEQ ID NO: 328287
cucaucauguaugacugcc

SEQ ID NO: 328289 - RNA, 19 nt, Artificial Sequence
  Description of Artificial Sequence: Synthetic oligonucleotide
  Sense Strand Starting at position 121 of SEQ ID NO: 317880
gcacaugcucuggagaaua

SEQ ID NO: 328290 - RNA, 19 nt, Artificial Sequence
  Description of Artificial Sequence: Synthetic oligonucleotide
  Antisense Strand to SEQ ID NO: 328289
uauucuccagagcaugugc

SEQ ID NO: 328291 - RNA, 19 nt, Artificial Sequence
  Description of Artificial Sequence: Synthetic oligonucleotide
  Sense Strand Starting at position 121 of SEQ ID NO: 318006
ucuuaaucuucuguaagug

SEQ ID NO: 328292 - RNA, 19 nt, Artificial Sequence
  Description of Artificial Sequence: Synthetic oligonucleotide
  Antisense Strand to SEQ ID NO: 328291
cacuuacagaagauuaaga

SEQ ID NO: 328293 - RNA, 19 nt, Artificial Sequence
  Description of Artificial Sequence: Synthetic oligonucleotide
  Sense Strand Starting at position 121 of SEQ ID NO: 318007
cuuaaucuucuguaaguga

SEQ ID NO: 328294 - RNA, 19 nt, Artificial Sequence
  Description of Artificial Sequence: Synthetic oligonucleotide
  Antisense Strand to SEQ ID NO: 328293
ucacuuacagaagauuaag

SEQ ID NO: 328295 - RNA, 19 nt, Artificial Sequence
  Description of Artificial Sequence: Synthetic oligonucleotide
  Sense Strand Starting at position 121 of SEQ ID NO: 318053
gugggcuuucuauggacua

SEQ ID NO: 328296 - RNA, 19 nt, Artificial Sequence
  Description of Artificial Sequence: Synthetic oligonucleotide
  Antisense Strand to SEQ ID NO: 328295
uaguccauagaaagcccac

SEQ ID NO: 328297 - RNA, 19 nt, Artificial Sequence
  Description of Artificial Sequence: Synthetic oligonucleotide
  Sense Strand Starting at position 121 of SEQ ID NO: 318514
auaacaaguuaguuacaca

SEQ ID NO: 328298 - RNA, 19 nt, Artificial Sequence
  Description of Artificial Sequence: Synthetic oligonucleotide
  Antisense Strand to SEQ ID NO: 328297
uguguaacuaacuuguuau

SEQ ID NO: 328299 - RNA, 19 nt, Artificial Sequence
  Description of Artificial Sequence: Synthetic oligonucleotide
  Sense Strand Starting at position 121 of SEQ ID NO: 318817
cuucaucgugggugacaga

SEQ ID NO: 328300 - RNA, 19 nt, Artificial Sequence
  Description of Artificial Sequence: Synthetic oligonucleotide
  Antisense Strand to SEQ ID NO: 328299
ucugucacccacgaugaag

SEQ ID NO: 328301 - RNA, 19 nt, Artificial Sequence
  Description of Artificial Sequence: Synthetic oligonucleotide
  Sense Strand Starting at position 121 of SEQ ID NO: 318970
ugauguuccacaugagagu

SEQ ID NO: 328302 - RNA, 19 nt, Artificial Sequence
  Description of Artificial Sequence: Synthetic oligonucleotide
  Antisense Strand to SEQ ID NO: 328301
acucucauguggaacauca

SEQ ID NO: 328303 - RNA, 19 nt, Artificial Sequence
  Description of Artificial Sequence: Synthetic oligonucleotide
  Sense Strand Starting at position 121 of SEQ ID NO: 318971
gauguuccacaugagaguu

SEQ ID NO: 328304 - RNA, 19 nt, Artificial Sequence
  Description of Artificial Sequence: Synthetic oligonucleotide
  Antisense Strand to SEQ ID NO: 328303
aacucucauguggaacauc

SEQ ID NO: 328305 - RNA, 19 nt, Artificial Sequence
  Description of Artificial Sequence: Synthetic oligonucleotide
  Sense Strand Starting at position 121 of SEQ ID NO: 319091
uaucaaacgcggcaauuau

SEQ ID NO: 328306 - RNA, 19 nt, Artificial Sequence
  Description of Artificial Sequence: Synthetic oligonucleotide
  Antisense Strand to SEQ ID NO: 328305
auaauugccgcguuugaua

SEQ ID NO: 328307 - RNA, 19 nt, Artificial Sequence
  Description of Artificial Sequence: Synthetic oligonucleotide
  Sense Strand Starting at position 122 of SEQ ID NO: 315310
acuguuaggcuuuagaguu

SEQ ID NO: 328308 - RNA, 19 nt, Artificial Sequence
  Description of Artificial Sequence: Synthetic oligonucleotide
  Antisense Strand to SEQ ID NO: 328307
aacucuaaagccuaacagu

SEQ ID NO: 328309 - RNA, 19 nt, Artificial Sequence
  Description of Artificial Sequence: Synthetic oligonucleotide
  Sense Strand Starting at position 122 of SEQ ID NO: 315357
cauauuguuggugaacauu

SEQ ID NO: 328310 - RNA, 19 nt, Artificial Sequence
  Description of Artificial Sequence: Synthetic oligonucleotide
  Antisense Strand to SEQ ID NO: 328309
aauguucaccaacaauaug

SEQ ID NO: 328311 - RNA, 19 nt, Artificial Sequence
  Description of Artificial Sequence: Synthetic oligonucleotide
  Sense Strand Starting at position 122 of SEQ ID NO: 315368
ugaacauuagcuggcuaaa

SEQ ID NO: 328312 - RNA, 19 nt, Artificial Sequence
  Description of Artificial Sequence: Synthetic oligonucleotide
  Antisense Strand to SEQ ID NO: 328311
uuuagccagcuaauguuca

SEQ ID NO: 328313 - RNA, 19 nt, Artificial Sequence
  Description of Artificial Sequence: Synthetic oligonucleotide
  Sense Strand Starting at position 122 of SEQ ID NO: 315371
acauuagcuggcuaaauua

SEQ ID NO: 328314 - RNA, 19 nt, Artificial Sequence
  Description of Artificial Sequence: Synthetic oligonucleotide
  Antisense Strand to SEQ ID NO: 328313
uaauuuagccagcuaaugu

SEQ ID NO: 328315 - RNA, 19 nt, Artificial Sequence
  Description of Artificial Sequence: Synthetic oligonucleotide
  Sense Strand Starting at position 122 of SEQ ID NO: 315412
aaugauugaccaugcaagu

SEQ ID NO: 328316 - RNA, 19 nt, Artificial Sequence
  Description of Artificial Sequence: Synthetic oligonucleotide
  Antisense Strand to SEQ ID NO: 328315
acuugcauggucaaucauu

SEQ ID NO: 328317 - RNA, 19 nt, Artificial Sequence
  Description of Artificial Sequence: Synthetic oligonucleotide
  Sense Strand Starting at position 122 of SEQ ID NO: 315440
gucuaauacagaggugaag

SEQ ID NO: 328318 - RNA, 19 nt, Artificial Sequence
  Description of Artificial Sequence: Synthetic oligonucleotide
  Antisense Strand to SEQ ID NO: 328317
cuucaccucuguauuagac

SEQ ID NO: 328319 - RNA, 19 nt, Artificial Sequence
  Description of Artificial Sequence: Synthetic oligonucleotide
  Sense Strand Starting at position 122 of SEQ ID NO: 315462
gaggacuaggagugaugua

SEQ ID NO: 328320 - RNA, 19 nt, Artificial Sequence
  Description of Artificial Sequence: Synthetic oligonucleotide
  Antisense Strand to SEQ ID NO: 328319
uacaucacuccuaguccuc

SEQ ID NO: 328321 - RNA, 19 nt, Artificial Sequence
  Description of Artificial Sequence: Synthetic oligonucleotide
  Sense Strand Starting at position 122 of SEQ ID NO: 315471
gagugauguagagggaacu

SEQ ID NO: 328322 - RNA, 19 nt, Artificial Sequence
  Description of Artificial Sequence: Synthetic oligonucleotide
  Antisense Strand to SEQ ID NO: 328321
aguucccucuacaucacuc

SEQ ID NO: 328323 - RNA, 19 nt, Artificial Sequence
  Description of Artificial Sequence: Synthetic oligonucleotide
  Sense Strand Starting at position 122 of SEQ ID NO: 315477
uguagagggaacugguuau

SEQ ID NO: 328324 - RNA, 19 nt, Artificial Sequence
  Description of Artificial Sequence: Synthetic oligonucleotide
  Antisense Strand to SEQ ID NO: 328323
auaaccaguucccucuaca

SEQ ID NO: 328325 - RNA, 19 nt, Artificial Sequence
  Description of Artificial Sequence: Synthetic oligonucleotide
  Sense Strand Starting at position 122 of SEQ ID NO: 315535
acacauguauuggcaaauu

SEQ ID NO: 328326 - RNA, 19 nt, Artificial Sequence
  Description of Artificial Sequence: Synthetic oligonucleotide
  Antisense Strand to SEQ ID NO: 328325
aauuugccaauacaugugu

SEQ ID NO: 328327 - RNA, 19 nt, Artificial Sequence
  Description of Artificial Sequence: Synthetic oligonucleotide
  Sense Strand Starting at position 122 of SEQ ID NO: 315688
auguaagauuguccacuau

SEQ ID NO: 328328 - RNA, 19 nt, Artificial Sequence
  Description of Artificial Sequence: Synthetic oligonucleotide
  Antisense Strand to SEQ ID NO: 328327
auaguggacaaucuuacau

SEQ ID NO: 328329 - RNA, 19 nt, Artificial Sequence
  Description of Artificial Sequence: Synthetic oligonucleotide
  Sense Strand Starting at position 122 of SEQ ID NO: 315955
gccacuagaguuuauggga

SEQ ID NO: 328330 - RNA, 19 nt, Artificial Sequence
  Description of Artificial Sequence: Synthetic oligonucleotide
  Antisense Strand to SEQ ID NO: 328329
ucccauaaacucuaguggc

SEQ ID NO: 328331 - RNA, 19 nt, Artificial Sequence
  Description of Artificial Sequence: Synthetic oligonucleotide
  Sense Strand Starting at position 122 of SEQ ID NO: 315992
ugguucugucaacauuaac

SEQ ID NO: 328332 - RNA, 19 nt, Artificial Sequence
  Description of Artificial Sequence: Synthetic oligonucleotide
  Antisense Strand to SEQ ID NO: 328331
guuaauguugacagaacca

SEQ ID NO: 328333 - RNA, 19 nt, Artificial Sequence
  Description of Artificial Sequence: Synthetic oligonucleotide
  Sense Strand Starting at position 122 of SEQ ID NO: 316084
uagaaugauuccgcaagga

SEQ ID NO: 328334 - RNA, 19 nt, Artificial Sequence
  Description of Artificial Sequence: Synthetic oligonucleotide
  Antisense Strand to SEQ ID NO: 328333
uccuugcggaaucauucua

SEQ ID NO: 328335 - RNA, 19 nt, Artificial Sequence
  Description of Artificial Sequence: Synthetic oligonucleotide
  Sense Strand Starting at position 122 of SEQ ID NO: 316108
gggccaauaucuuuauccu

SEQ ID NO: 328336 - RNA, 19 nt, Artificial Sequence
  Description of Artificial Sequence: Synthetic oligonucleotide
  Antisense Strand to SEQ ID NO: 328335
aggauaaagauauuggccc

SEQ ID NO: 328337 - RNA, 19 nt, Artificial Sequence
  Description of Artificial Sequence: Synthetic oligonucleotide
  Sense Strand Starting at position 122 of SEQ ID NO: 316135
uggcgaugaaacugagacu

SEQ ID NO: 328338 - RNA, 19 nt, Artificial Sequence
  Description of Artificial Sequence: Synthetic oligonucleotide
  Antisense Strand to SEQ ID NO: 328337
agucucaguuucaucgcca

SEQ ID NO: 328339 - RNA, 19 nt, Artificial Sequence
  Description of Artificial Sequence: Synthetic oligonucleotide
  Sense Strand Starting at position 122 of SEQ ID NO: 316166
uggcuugcucaagacaaac

SEQ ID NO: 328340 - RNA, 19 nt, Artificial Sequence
  Description of Artificial Sequence: Synthetic oligonucleotide
  Antisense Strand to SEQ ID NO: 328339
guuugucuugagcaagcca

SEQ ID NO: 328341 - RNA, 19 nt, Artificial Sequence
  Description of Artificial Sequence: Synthetic oligonucleotide
  Sense Strand Starting at position 122 of SEQ ID NO: 316523
gaucaaaugugggcugcaa

SEQ ID NO: 328342 - RNA, 19 nt, Artificial Sequence
  Description of Artificial Sequence: Synthetic oligonucleotide
  Antisense Strand to SEQ ID NO: 328341
uugcagcccacauuugauc

SEQ ID NO: 328343 - RNA, 19 nt, Artificial Sequence
  Description of Artificial Sequence: Synthetic oligonucleotide
  Sense Strand Starting at position 122 of SEQ ID NO: 316679
ggucuucuggcucaaauuc

SEQ ID NO: 328344 - RNA, 19 nt, Artificial Sequence
  Description of Artificial Sequence: Synthetic oligonucleotide
  Antisense Strand to SEQ ID NO: 328343
gaauuugagccagaagacc

SEQ ID NO: 328345 - RNA, 19 nt, Artificial Sequence
  Description of Artificial Sequence: Synthetic oligonucleotide
  Sense Strand Starting at position 122 of SEQ ID NO: 316746
cacccugaugugggugaau

SEQ ID NO: 328346 - RNA, 19 nt, Artificial Sequence
  Description of Artificial Sequence: Synthetic oligonucleotide
  Antisense Strand to SEQ ID NO: 328345
auucacccacaucagggug

SEQ ID NO: 328347 - RNA, 19 nt, Artificial Sequence
  Description of Artificial Sequence: Synthetic oligonucleotide
  Sense Strand Starting at position 122 of SEQ ID NO: 316748
cccugaugugggugaaucu

SEQ ID NO: 328348 - RNA, 19 nt, Artificial Sequence
  Description of Artificial Sequence: Synthetic oligonucleotide
  Antisense Strand to SEQ ID NO: 328347
agauucacccacaucaggg

SEQ ID NO: 328349 - RNA, 19 nt, Artificial Sequence
  Description of Artificial Sequence: Synthetic oligonucleotide
  Sense Strand Starting at position 122 of SEQ ID NO: 316815
ugcugagucuuaccaaaug

SEQ ID NO: 328350 - RNA, 19 nt, Artificial Sequence
  Description of Artificial Sequence: Synthetic oligonucleotide
  Antisense Strand to SEQ ID NO: 328349
cauuugguaagacucagca

SEQ ID NO: 328351 - RNA, 19 nt, Artificial Sequence
  Description of Artificial Sequence: Synthetic oligonucleotide
  Sense Strand Starting at position 122 of SEQ ID NO: 316845
augagagguuuccuugagu

SEQ ID NO: 328352 - RNA, 19 nt, Artificial Sequence
  Description of Artificial Sequence: Synthetic oligonucleotide
  Antisense Strand to SEQ ID NO: 328351
acucaaggaaaccucucau

SEQ ID NO: 328353 - RNA, 19 nt, Artificial Sequence
  Description of Artificial Sequence: Synthetic oligonucleotide
  Sense Strand Starting at position 122 of SEQ ID NO: 316848
agagguuuccuugagucug

SEQ ID NO: 328354 - RNA, 19 nt, Artificial Sequence
  Description of Artificial Sequence: Synthetic oligonucleotide
  Antisense Strand to SEQ ID NO: 328353
cagacucaaggaaaccucu

SEQ ID NO: 328355 - RNA, 19 nt, Artificial Sequence
  Description of Artificial Sequence: Synthetic oligonucleotide
  Sense Strand Starting at position 122 of SEQ ID NO: 316858
uugagucuguaaccaaaca

SEQ ID NO: 328356 - RNA, 19 nt, Artificial Sequence
  Description of Artificial Sequence: Synthetic oligonucleotide
  Antisense Strand to SEQ ID NO: 328355
uguuugguuacagacucaa

SEQ ID NO: 328357 - RNA, 19 nt, Artificial Sequence
  Description of Artificial Sequence: Synthetic oligonucleotide
  Sense Strand Starting at position 122 of SEQ ID NO: 316879
cugacauuucucugugguc

SEQ ID NO: 328358 - RNA, 19 nt, Artificial Sequence
  Description of Artificial Sequence: Synthetic oligonucleotide
  Antisense Strand to SEQ ID NO: 328357
gaccacagagaaaugucag

SEQ ID NO: 328359 - RNA, 19 nt, Artificial Sequence
  Description of Artificial Sequence: Synthetic oligonucleotide
  Sense Strand Starting at position 122 of SEQ ID NO: 317058
uagacuaacucggucuuua

SEQ ID NO: 328360 - RNA, 19 nt, Artificial Sequence
  Description of Artificial Sequence: Synthetic oligonucleotide
  Antisense Strand to SEQ ID NO: 328359
uaaagaccgaguuagucua

SEQ ID NO: 328361 - RNA, 19 nt, Artificial Sequence
  Description of Artificial Sequence: Synthetic oligonucleotide
  Sense Strand Starting at position 122 of SEQ ID NO: 317305
ggcaaugacucacuccaga

SEQ ID NO: 328362 - RNA, 19 nt, Artificial Sequence
  Description of Artificial Sequence: Synthetic oligonucleotide
  Antisense Strand to SEQ ID NO: 328361
ucuggagugagucauugcc

SEQ ID NO: 328363 - RNA, 19 nt, Artificial Sequence
  Description of Artificial Sequence: Synthetic oligonucleotide
  Sense Strand Starting at position 122 of SEQ ID NO: 317316
acuccagaugcggauugaa

SEQ ID NO: 328364 - RNA, 19 nt, Artificial Sequence
  Description of Artificial Sequence: Synthetic oligonucleotide
  Antisense Strand to SEQ ID NO: 328363
uucaauccgcaucuggagu

SEQ ID NO: 328365 - RNA, 19 nt, Artificial Sequence
  Description of Artificial Sequence: Synthetic oligonucleotide
  Sense Strand Starting at position 122 of SEQ ID NO: 317571
accagcauuugguuuguau

SEQ ID NO: 328366 - RNA, 19 nt, Artificial Sequence
  Description of Artificial Sequence: Synthetic oligonucleotide
  Antisense Strand to SEQ ID NO: 328365
auacaaaccaaaugcuggu

SEQ ID NO: 328367 - RNA, 19 nt, Artificial Sequence
  Description of Artificial Sequence: Synthetic oligonucleotide
  Sense Strand Starting at position 122 of SEQ ID NO: 317810
cagggcugucaaugagaaa

SEQ ID NO: 328368 - RNA, 19 nt, Artificial Sequence
  Description of Artificial Sequence: Synthetic oligonucleotide
  Antisense Strand to SEQ ID NO: 328367
uuucucauugacagcccug

SEQ ID NO: 328369 - RNA, 19 nt, Artificial Sequence
  Description of Artificial Sequence: Synthetic oligonucleotide
  Sense Strand Starting at position 122 of SEQ ID NO: 317954
ggcgcuuuccuugugcaua

SEQ ID NO: 328370 - RNA, 19 nt, Artificial Sequence
  Description of Artificial Sequence: Synthetic oligonucleotide
  Antisense Strand to SEQ ID NO: 328369
uaugcacaaggaaagcgcc

SEQ ID NO: 328371 - RNA, 19 nt, Artificial Sequence
  Description of Artificial Sequence: Synthetic oligonucleotide
  Sense Strand Starting at position 122 of SEQ ID NO: 318009
agagcuuuccauugaagaa

SEQ ID NO: 328372 - RNA, 19 nt, Artificial Sequence
  Description of Artificial Sequence: Synthetic oligonucleotide
  Antisense Strand to SEQ ID NO: 328371
uucuucaauggaaagcucu

SEQ ID NO: 328373 - RNA, 19 nt, Artificial Sequence
  Description of Artificial Sequence: Synthetic oligonucleotide
  Sense Strand Starting at position 122 of SEQ ID NO: 318641
aguaacuuuccaggaagcu

SEQ ID NO: 328374 - RNA, 19 nt, Artificial Sequence
  Description of Artificial Sequence: Synthetic oligonucleotide
  Antisense Strand to SEQ ID NO: 328373
agcuuccuggaaaguuacu

SEQ ID NO: 328375 - RNA, 19 nt, Artificial Sequence
  Description of Artificial Sequence: Synthetic oligonucleotide
  Sense Strand Starting at position 122 of SEQ ID NO: 318642
guaacuuuccaggaagcug

SEQ ID NO: 328376 - RNA, 19 nt, Artificial Sequence
  Description of Artificial Sequence: Synthetic oligonucleotide
  Antisense Strand to SEQ ID NO: 328375
cagcuuccuggaaaguuac

SEQ ID NO: 328377 - RNA, 19 nt, Artificial Sequence
  Description of Artificial Sequence: Synthetic oligonucleotide
  Sense Strand Starting at position 122 of SEQ ID NO: 318917
ggcucauaucgagacuuua

SEQ ID NO: 328378 - RNA, 19 nt, Artificial Sequence
  Description of Artificial Sequence: Synthetic oligonucleotide
  Antisense Strand to SEQ ID NO: 328377
uaaagucucgauaugagcc

SEQ ID NO: 328379 - RNA, 19 nt, Artificial Sequence
  Description of Artificial Sequence: Synthetic oligonucleotide
  Sense Strand Starting at position 122 of SEQ ID NO: 319012
gggaauguuugagcgagac

SEQ ID NO: 328380 - RNA, 19 nt, Artificial Sequence
  Description of Artificial Sequence: Synthetic oligonucleotide
  Antisense Strand to SEQ ID NO: 328379
gucucgcucaaacauuccc

SEQ ID NO: 328381 - RNA, 19 nt, Artificial Sequence
  Description of Artificial Sequence: Synthetic oligonucleotide
  Sense Strand Starting at position 122 of SEQ ID NO: 319014
gaauguuugagcgagacuu

SEQ ID NO: 328382 - RNA, 19 nt, Artificial Sequence
  Description of Artificial Sequence: Synthetic oligonucleotide
  Antisense Strand to SEQ ID NO: 328381
aagucucgcucaaacauuc

SEQ ID NO: 328383 - RNA, 19 nt, Artificial Sequence
  Description of Artificial Sequence: Synthetic oligonucleotide
  Sense Strand Starting at position 122 of SEQ ID NO: 319016
auguuugagcgagacuuca

SEQ ID NO: 328384 - RNA, 19 nt, Artificial Sequence
  Description of Artificial Sequence: Synthetic oligonucleotide
  Antisense Strand to SEQ ID NO: 328383
ugaagucucgcucaaacau

SEQ ID NO: 328385 - RNA, 19 nt, Artificial Sequence
  Description of Artificial Sequence: Synthetic oligonucleotide
  Sense Strand Starting at position 122 of SEQ ID NO: 319169
gcccaaagucuuuagaaca

SEQ ID NO: 328386 - RNA, 19 nt, Artificial Sequence
  Description of Artificial Sequence: Synthetic oligonucleotide
  Antisense Strand to SEQ ID NO: 328385
uguucuaaagacuuugggc

SEQ ID NO: 328387 - RNA, 19 nt, Artificial Sequence
  Description of Artificial Sequence: Synthetic oligonucleotide
  Sense Strand Starting at position 123 of SEQ ID NO: 315381
caugaagaaucagcuaguu

SEQ ID NO: 328388 - RNA, 19 nt, Artificial Sequence
  Description of Artificial Sequence: Synthetic oligonucleotide
  Antisense Strand to SEQ ID NO: 328387
aacuagcugauucuucaug

SEQ ID NO: 328389 - RNA, 19 nt, Artificial Sequence
  Description of Artificial Sequence: Synthetic oligonucleotide
  Sense Strand Starting at position 123 of SEQ ID NO: 315943
uccggagacgauuaagguu

SEQ ID NO: 328390 - RNA, 19 nt, Artificial Sequence
  Description of Artificial Sequence: Synthetic oligonucleotide
  Antisense Strand to SEQ ID NO: 328389
aaccuuaaucgucuccgga

SEQ ID NO: 328391 - RNA, 19 nt, Artificial Sequence
  Description of Artificial Sequence: Synthetic oligonucleotide
  Sense Strand Starting at position 123 of SEQ ID NO: 315949
gacgauuaagguugagaag

SEQ ID NO: 328392 - RNA, 19 nt, Artificial Sequence
  Description of Artificial Sequence: Synthetic oligonucleotide
  Antisense Strand to SEQ ID NO: 328391
cuucucaaccuuaaucguc

SEQ ID NO: 328393 - RNA, 19 nt, Artificial Sequence
  Description of Artificial Sequence: Synthetic oligonucleotide
  Sense Strand Starting at position 123 of SEQ ID NO: 316052
uccuguuaguccuccagaa

SEQ ID NO: 328394 - RNA, 19 nt, Artificial Sequence
  Description of Artificial Sequence: Synthetic oligonucleotide
  Antisense Strand to SEQ ID NO: 328393
uucuggaggacuaacagga

SEQ ID NO: 328395 - RNA, 19 nt, Artificial Sequence
  Description of Artificial Sequence: Synthetic oligonucleotide
  Sense Strand Starting at position 123 of SEQ ID NO: 316081
gcuugccacagguaucaga

SEQ ID NO: 328396 - RNA, 19 nt, Artificial Sequence
  Description of Artificial Sequence: Synthetic oligonucleotide
  Antisense Strand to SEQ ID NO: 328395
ucugauaccuguggcaagc

SEQ ID NO: 328397 - RNA, 19 nt, Artificial Sequence
  Description of Artificial Sequence: Synthetic oligonucleotide
  Sense Strand Starting at position 123 of SEQ ID NO: 316336
guauguugcaauggagaga

SEQ ID NO: 328398 - RNA, 19 nt, Artificial Sequence
  Description of Artificial Sequence: Synthetic oligonucleotide
  Antisense Strand to SEQ ID NO: 328397
ucucuccauugcaacauac

SEQ ID NO: 328399 - RNA, 19 nt, Artificial Sequence
  Description of Artificial Sequence: Synthetic oligonucleotide
  Sense Strand Starting at position 123 of SEQ ID NO: 316777
aguaauaccuaugugguua

SEQ ID NO: 328400 - RNA, 19 nt, Artificial Sequence
  Description of Artificial Sequence: Synthetic oligonucleotide
  Antisense Strand to SEQ ID NO: 328399
uaaccacauagguauuacu

SEQ ID NO: 328401 - RNA, 19 nt, Artificial Sequence
  Description of Artificial Sequence: Synthetic oligonucleotide
  Sense Strand Starting at position 123 of SEQ ID NO: 316781
auaccuaugugguuauaaa

SEQ ID NO: 328402 - RNA, 19 nt, Artificial Sequence
  Description of Artificial Sequence: Synthetic oligonucleotide
  Antisense Strand to SEQ ID NO: 328401
uuuauaaccacauagguau

SEQ ID NO: 328403 - RNA, 19 nt, Artificial Sequence
  Description of Artificial Sequence: Synthetic oligonucleotide
  Sense Strand Starting at position 123 of SEQ ID NO: 316900
acuguuaggcuuuagaguu

SEQ ID NO: 328404 - RNA, 19 nt, Artificial Sequence
  Description of Artificial Sequence: Synthetic oligonucleotide
  Antisense Strand to SEQ ID NO: 328403
aacucuaaagccuaacagu

SEQ ID NO: 328405 - RNA, 19 nt, Artificial Sequence
  Description of Artificial Sequence: Synthetic oligonucleotide
  Sense Strand Starting at position 123 of SEQ ID NO: 316947
cauauuguuggugaacauu

SEQ ID NO: 328406 - RNA, 19 nt, Artificial Sequence
  Description of Artificial Sequence: Synthetic oligonucleotide
  Antisense Strand to SEQ ID NO: 328405
aauguucaccaacaauaug

SEQ ID NO: 328407 - RNA, 19 nt, Artificial Sequence
  Description of Artificial Sequence: Synthetic oligonucleotide
  Sense Strand Starting at position 123 of SEQ ID NO: 316958
ugaacauuagcuggcuaaa

SEQ ID NO: 328408 - RNA, 19 nt, Artificial Sequence
  Description of Artificial Sequence: Synthetic oligonucleotide
  Antisense Strand to SEQ ID NO: 328407
uuuagccagcuaauguuca

SEQ ID NO: 328409 - RNA, 19 nt, Artificial Sequence
  Description of Artificial Sequence: Synthetic oligonucleotide
  Sense Strand Starting at position 123 of SEQ ID NO: 316961
acauuagcuggcuaaauua

SEQ ID NO: 328410 - RNA, 19 nt, Artificial Sequence
  Description of Artificial Sequence: Synthetic oligonucleotide
  Antisense Strand to SEQ ID NO: 328409
uaauuuagccagcuaaugu

SEQ ID NO: 328411 - RNA, 19 nt, Artificial Sequence
  Description of Artificial Sequence: Synthetic oligonucleotide
  Sense Strand Starting at position 123 of SEQ ID NO: 317002
aaugauugaccaugcaagu

SEQ ID NO: 328412 - RNA, 19 nt, Artificial Sequence
  Description of Artificial Sequence: Synthetic oligonucleotide
  Antisense Strand to SEQ ID NO: 328411
acuugcauggucaaucauu

SEQ ID NO: 328413 - RNA, 19 nt, Artificial Sequence
  Description of Artificial Sequence: Synthetic oligonucleotide
  Sense Strand Starting at position 123 of SEQ ID NO: 317030
gucuaauacagaggugaag

SEQ ID NO: 328414 - RNA, 19 nt, Artificial Sequence
  Description of Artificial Sequence: Synthetic oligonucleotide
  Antisense Strand to SEQ ID NO: 328413
cuucaccucuguauuagac

SEQ ID NO: 328415 - RNA, 19 nt, Artificial Sequence
  Description of Artificial Sequence: Synthetic oligonucleotide
  Sense Strand Starting at position 123 of SEQ ID NO: 317052
gaggacuaggagugaugua

SEQ ID NO: 328416 - RNA, 19 nt, Artificial Sequence
  Description of Artificial Sequence: Synthetic oligonucleotide
  Antisense Strand to SEQ ID NO: 328415
uacaucacuccuaguccuc

SEQ ID NO: 328417 - RNA, 19 nt, Artificial Sequence
  Description of Artificial Sequence: Synthetic oligonucleotide
  Sense Strand Starting at position 123 of SEQ ID NO: 317061
gagugauguagagggaacu

SEQ ID NO: 328418 - RNA, 19 nt, Artificial Sequence
  Description of Artificial Sequence: Synthetic oligonucleotide
  Antisense Strand to SEQ ID NO: 328417
aguucccucuacaucacuc

SEQ ID NO: 328419 - RNA, 19 nt, Artificial Sequence
  Description of Artificial Sequence: Synthetic oligonucleotide
  Sense Strand Starting at position 123 of SEQ ID NO: 317067
uguagagggaacugguuau

SEQ ID NO: 328420 - RNA, 19 nt, Artificial Sequence
  Description of Artificial Sequence: Synthetic oligonucleotide
  Antisense Strand to SEQ ID NO: 328419
auaaccaguucccucuaca

SEQ ID NO: 328421 - RNA, 19 nt, Artificial Sequence
  Description of Artificial Sequence: Synthetic oligonucleotide
  Sense Strand Starting at position 123 of SEQ ID NO: 317125
acacauguauuggcaaauu

SEQ ID NO: 328422 - RNA, 19 nt, Artificial Sequence
  Description of Artificial Sequence: Synthetic oligonucleotide
  Antisense Strand to SEQ ID NO: 328421
aauuugccaauacaugugu

SEQ ID NO: 328423 - RNA, 19 nt, Artificial Sequence
  Description of Artificial Sequence: Synthetic oligonucleotide
  Sense Strand Starting at position 123 of SEQ ID NO: 317278
auguaagauuguccacuau

SEQ ID NO: 328424 - RNA, 19 nt, Artificial Sequence
  Description of Artificial Sequence: Synthetic oligonucleotide
  Antisense Strand to SEQ ID NO: 328423
auaguggacaaucuuacau

SEQ ID NO: 328425 - RNA, 19 nt, Artificial Sequence
  Description of Artificial Sequence: Synthetic oligonucleotide
  Sense Strand Starting at position 123 of SEQ ID NO: 317545
gccacuagaguuuauggga

SEQ ID NO: 328426 - RNA, 19 nt, Artificial Sequence
  Description of Artificial Sequence: Synthetic oligonucleotide
  Antisense Strand to SEQ ID NO: 328425
ucccauaaacucuaguggc

SEQ ID NO: 328427 - RNA, 19 nt, Artificial Sequence
  Description of Artificial Sequence: Synthetic oligonucleotide
  Sense Strand Starting at position 123 of SEQ ID NO: 317582
ugguucugucaacauuaac

SEQ ID NO: 328428 - RNA, 19 nt, Artificial Sequence
  Description of Artificial Sequence: Synthetic oligonucleotide
  Antisense Strand to SEQ ID NO: 328427
guuaauguugacagaacca

SEQ ID NO: 328429 - RNA, 19 nt, Artificial Sequence
  Description of Artificial Sequence: Synthetic oligonucleotide
  Sense Strand Starting at position 123 of SEQ ID NO: 317674
uagaaugauuccgcaagga

SEQ ID NO: 328430 - RNA, 19 nt, Artificial Sequence
  Description of Artificial Sequence: Synthetic oligonucleotide
  Antisense Strand to SEQ ID NO: 328429
uccuugcggaaucauucua

SEQ ID NO: 328431 - RNA, 19 nt, Artificial Sequence
  Description of Artificial Sequence: Synthetic oligonucleotide
  Sense Strand Starting at position 123 of SEQ ID NO: 317698
gggccaauaucuuuauccu

SEQ ID NO: 328432 - RNA, 19 nt, Artificial Sequence
  Description of Artificial Sequence: Synthetic oligonucleotide
  Antisense Strand to SEQ ID NO: 328431
aggauaaagauauuggccc

SEQ ID NO: 328433 - RNA, 19 nt, Artificial Sequence
  Description of Artificial Sequence: Synthetic oligonucleotide
  Sense Strand Starting at position 123 of SEQ ID NO: 317725
uggcgaugaaacugagacu

SEQ ID NO: 328434 - RNA, 19 nt, Artificial Sequence
  Description of Artificial Sequence: Synthetic oligonucleotide
  Antisense Strand to SEQ ID NO: 328433
agucucaguuucaucgcca

SEQ ID NO: 328435 - RNA, 19 nt, Artificial Sequence
  Description of Artificial Sequence: Synthetic oligonucleotide
  Sense Strand Starting at position 123 of SEQ ID NO: 317756
uggcuugcucaagacaaac

SEQ ID NO: 328436 - RNA, 19 nt, Artificial Sequence
  Description of Artificial Sequence: Synthetic oligonucleotide
  Antisense Strand to SEQ ID NO: 328435
guuugucuugagcaagcca

SEQ ID NO: 328437 - RNA, 19 nt, Artificial Sequence
  Description of Artificial Sequence: Synthetic oligonucleotide
  Sense Strand Starting at position 123 of SEQ ID NO: 317843
agaugucaugucuacguau

SEQ ID NO: 328438 - RNA, 19 nt, Artificial Sequence
  Description of Artificial Sequence: Synthetic oligonucleotide
  Antisense Strand to SEQ ID NO: 328437
auacguagacaugacaucu

SEQ ID NO: 328439 - RNA, 19 nt, Artificial Sequence
  Description of Artificial Sequence: Synthetic oligonucleotide
  Sense Strand Starting at position 123 of SEQ ID NO: 318113
gaucaaaugugggcugcaa

SEQ ID NO: 328440 - RNA, 19 nt, Artificial Sequence
  Description of Artificial Sequence: Synthetic oligonucleotide
  Antisense Strand to SEQ ID NO: 328439
uugcagcccacauuugauc

SEQ ID NO: 328441 - RNA, 19 nt, Artificial Sequence
  Description of Artificial Sequence: Synthetic oligonucleotide
  Sense Strand Starting at position 123 of SEQ ID NO: 318269
ggucuucuggcucaaauuc

SEQ ID NO: 328442 - RNA, 19 nt, Artificial Sequence
  Description of Artificial Sequence: Synthetic oligonucleotide
  Antisense Strand to SEQ ID NO: 328441
gaauuugagccagaagacc

SEQ ID NO: 328443 - RNA, 19 nt, Artificial Sequence
  Description of Artificial Sequence: Synthetic oligonucleotide
  Sense Strand Starting at position 123 of SEQ ID NO: 318336
cacccugaugugggugaau

SEQ ID NO: 328444 - RNA, 19 nt, Artificial Sequence
  Description of Artificial Sequence: Synthetic oligonucleotide
  Antisense Strand to SEQ ID NO: 328443
auucacccacaucagggug

SEQ ID NO: 328445 - RNA, 19 nt, Artificial Sequence
  Description of Artificial Sequence: Synthetic oligonucleotide
  Sense Strand Starting at position 123 of SEQ ID NO: 318338
cccugaugugggugaaucu

SEQ ID NO: 328446 - RNA, 19 nt, Artificial Sequence
  Description of Artificial Sequence: Synthetic oligonucleotide
  Antisense Strand to SEQ ID NO: 328445
agauucacccacaucaggg

SEQ ID NO: 328447 - RNA, 19 nt, Artificial Sequence
  Description of Artificial Sequence: Synthetic oligonucleotide
  Sense Strand Starting at position 123 of SEQ ID NO: 318405
ugcugagucuuaccaaaug

SEQ ID NO: 328448 - RNA, 19 nt, Artificial Sequence
  Description of Artificial Sequence: Synthetic oligonucleotide
  Antisense Strand to SEQ ID NO: 328447
cauuugguaagacucagca

SEQ ID NO: 328449 - RNA, 19 nt, Artificial Sequence
  Description of Artificial Sequence: Synthetic oligonucleotide
  Sense Strand Starting at position 123 of SEQ ID NO: 318435
augagagguuuccuugagu

SEQ ID NO: 328450 - RNA, 19 nt, Artificial Sequence
  Description of Artificial Sequence: Synthetic oligonucleotide
  Antisense Strand to SEQ ID NO: 328449
acucaaggaaaccucucau

SEQ ID NO: 328451 - RNA, 19 nt, Artificial Sequence
  Description of Artificial Sequence: Synthetic oligonucleotide
  Sense Strand Starting at position 123 of SEQ ID NO: 318438
agagguuuccuugagucug

SEQ ID NO: 328452 - RNA, 19 nt, Artificial Sequence
  Description of Artificial Sequence: Synthetic oligonucleotide
  Antisense Strand to SEQ ID NO: 328451
cagacucaaggaaaccucu

SEQ ID NO: 328453 - RNA, 19 nt, Artificial Sequence
  Description of Artificial Sequence: Synthetic oligonucleotide
  Sense Strand Starting at position 123 of SEQ ID NO: 318448
uugagucuguaaccaaaca

SEQ ID NO: 328454 - RNA, 19 nt, Artificial Sequence
  Description of Artificial Sequence: Synthetic oligonucleotide
  Antisense Strand to SEQ ID NO: 328453
uguuugguuacagacucaa

SEQ ID NO: 328455 - RNA, 19 nt, Artificial Sequence
  Description of Artificial Sequence: Synthetic oligonucleotide
  Sense Strand Starting at position 123 of SEQ ID NO: 318469
cugacauuucucugugguc

SEQ ID NO: 328456 - RNA, 19 nt, Artificial Sequence
  Description of Artificial Sequence: Synthetic oligonucleotide
  Antisense Strand to SEQ ID NO: 328455
gaccacagagaaaugucag

SEQ ID NO: 328457 - RNA, 19 nt, Artificial Sequence
  Description of Artificial Sequence: Synthetic oligonucleotide
  Sense Strand Starting at position 123 of SEQ ID NO: 318648
uagacuaacucggucuuua

SEQ ID NO: 328458 - RNA, 19 nt, Artificial Sequence
  Description of Artificial Sequence: Synthetic oligonucleotide
  Antisense Strand to SEQ ID NO: 328457
uaaagaccgaguuagucua

SEQ ID NO: 328459 - RNA, 19 nt, Artificial Sequence
  Description of Artificial Sequence: Synthetic oligonucleotide
  Sense Strand Starting at position 123 of SEQ ID NO: 318652
cuaacucggucuuuaccaa

SEQ ID NO: 328460 - RNA, 19 nt, Artificial Sequence
  Description of Artificial Sequence: Synthetic oligonucleotide
  Antisense Strand to SEQ ID NO: 328459
uugguaaagaccgaguuag

SEQ ID NO: 328461 - RNA, 19 nt, Artificial Sequence
  Description of Artificial Sequence: Synthetic oligonucleotide
  Sense Strand Starting at position 123 of SEQ ID NO: 318895
ggcaaugacucacuccaga

SEQ ID NO: 328462 - RNA, 19 nt, Artificial Sequence
  Description of Artificial Sequence: Synthetic oligonucleotide
  Antisense Strand to SEQ ID NO: 328461
ucuggagugagucauugcc

SEQ ID NO: 328463 - RNA, 19 nt, Artificial Sequence
  Description of Artificial Sequence: Synthetic oligonucleotide
  Sense Strand Starting at position 123 of SEQ ID NO: 318906
acuccagaugcggauugaa

SEQ ID NO: 328464 - RNA, 19 nt, Artificial Sequence
  Description of Artificial Sequence: Synthetic oligonucleotide
  Antisense Strand to SEQ ID NO: 328463
uucaauccgcaucuggagu

SEQ ID NO: 328465 - RNA, 19 nt, Artificial Sequence
  Description of Artificial Sequence: Synthetic oligonucleotide
  Sense Strand Starting at position 123 of SEQ ID NO: 319161
accagcauuugguuuguau

SEQ ID NO: 328466 - RNA, 19 nt, Artificial Sequence
  Description of Artificial Sequence: Synthetic oligonucleotide
  Antisense Strand to SEQ ID NO: 328465
auacaaaccaaaugcuggu

SEQ ID NO: 328467 - RNA, 19 nt, Artificial Sequence
  Description of Artificial Sequence: Synthetic oligonucleotide
  Sense Strand Starting at position 124 of SEQ ID NO: 315339
ucuuacucccucgaggaga

SEQ ID NO: 328468 - RNA, 19 nt, Artificial Sequence
  Description of Artificial Sequence: Synthetic oligonucleotide
  Antisense Strand to SEQ ID NO: 328467
ucuccucgagggaguaaga

SEQ ID NO: 328469 - RNA, 19 nt, Artificial Sequence
  Description of Artificial Sequence: Synthetic oligonucleotide
  Sense Strand Starting at position 124 of SEQ ID NO: 315553
agguaaggaccucgggaau

SEQ ID NO: 328470 - RNA, 19 nt, Artificial Sequence
  Description of Artificial Sequence: Synthetic oligonucleotide
  Antisense Strand to SEQ ID NO: 328469
auucccgagguccuuaccu

SEQ ID NO: 328471 - RNA, 19 nt, Artificial Sequence
  Description of Artificial Sequence: Synthetic oligonucleotide
  Sense Strand Starting at position 124 of SEQ ID NO: 315620
gagcuugcaccaugggaaa

SEQ ID NO: 328472 - RNA, 19 nt, Artificial Sequence
  Description of Artificial Sequence: Synthetic oligonucleotide
  Antisense Strand to SEQ ID NO: 328471
uuucccauggugcaagcuc

SEQ ID NO: 328473 - RNA, 19 nt, Artificial Sequence
  Description of Artificial Sequence: Synthetic oligonucleotide
  Sense Strand Starting at position 124 of SEQ ID NO: 316030
acggcucugaaaggaaaua

SEQ ID NO: 328474 - RNA, 19 nt, Artificial Sequence
  Description of Artificial Sequence: Synthetic oligonucleotide
  Antisense Strand to SEQ ID NO: 328473
uauuuccuuucagagccgu

SEQ ID NO: 328475 - RNA, 19 nt, Artificial Sequence
  Description of Artificial Sequence: Synthetic oligonucleotide
  Sense Strand Starting at position 124 of SEQ ID NO: 316660
uauccuauggugggagaga

SEQ ID NO: 328476 - RNA, 19 nt, Artificial Sequence
  Description of Artificial Sequence: Synthetic oligonucleotide
  Antisense Strand to SEQ ID NO: 328475
ucucucccaccauaggaua

SEQ ID NO: 328477 - RNA, 19 nt, Artificial Sequence
  Description of Artificial Sequence: Synthetic oligonucleotide
  Sense Strand Starting at position 124 of SEQ ID NO: 316681
ugggacuaaucuucggcau

SEQ ID NO: 328478 - RNA, 19 nt, Artificial Sequence
  Description of Artificial Sequence: Synthetic oligonucleotide
  Antisense Strand to SEQ ID NO: 328477
augccgaagauuaguccca

SEQ ID NO: 328479 - RNA, 19 nt, Artificial Sequence
  Description of Artificial Sequence: Synthetic oligonucleotide
  Sense Strand Starting at position 124 of SEQ ID NO: 316682
gggacuaaucuucggcauu

SEQ ID NO: 328480 - RNA, 19 nt, Artificial Sequence
  Description of Artificial Sequence: Synthetic oligonucleotide
  Antisense Strand to SEQ ID NO: 328479
aaugccgaagauuaguccc

SEQ ID NO: 328481 - RNA, 19 nt, Artificial Sequence
  Description of Artificial Sequence: Synthetic oligonucleotide
  Sense Strand Starting at position 124 of SEQ ID NO: 316928
cggccuuuccuagaaacuu

SEQ ID NO: 328482 - RNA, 19 nt, Artificial Sequence
  Description of Artificial Sequence: Synthetic oligonucleotide
  Antisense Strand to SEQ ID NO: 328481
aaguuucuaggaaaggccg

SEQ ID NO: 328483 - RNA, 19 nt, Artificial Sequence
  Description of Artificial Sequence: Synthetic oligonucleotide
  Sense Strand Starting at position 124 of SEQ ID NO: 316989
agagcucaauucucggaau

SEQ ID NO: 328484 - RNA, 19 nt, Artificial Sequence
  Description of Artificial Sequence: Synthetic oligonucleotide
  Antisense Strand to SEQ ID NO: 328483
auuccgagaauugagcucu

SEQ ID NO: 328485 - RNA, 19 nt, Artificial Sequence
  Description of Artificial Sequence: Synthetic oligonucleotide
  Sense Strand Starting at position 124 of SEQ ID NO: 317128
ggcauauuucgagguccuc

SEQ ID NO: 328486 - RNA, 19 nt, Artificial Sequence
  Description of Artificial Sequence: Synthetic oligonucleotide
  Antisense Strand to SEQ ID NO: 328485
gaggaccucgaaauaugcc

SEQ ID NO: 328487 - RNA, 19 nt, Artificial Sequence
  Description of Artificial Sequence: Synthetic oligonucleotide
  Sense Strand Starting at position 124 of SEQ ID NO: 317311
cuggaauucugagaacuaa

SEQ ID NO: 328488 - RNA, 19 nt, Artificial Sequence
  Description of Artificial Sequence: Synthetic oligonucleotide
  Antisense Strand to SEQ ID NO: 328487
uuaguucucagaauuccag

SEQ ID NO: 328489 - RNA, 19 nt, Artificial Sequence
  Description of Artificial Sequence: Synthetic oligonucleotide
  Sense Strand Starting at position 124 of SEQ ID NO: 317326
cuaauuugcuauucgguga

SEQ ID NO: 328490 - RNA, 19 nt, Artificial Sequence
  Description of Artificial Sequence: Synthetic oligonucleotide
  Antisense Strand to SEQ ID NO: 328489
ucaccgaauagcaaauuag

SEQ ID NO: 328491 - RNA, 19 nt, Artificial Sequence
  Description of Artificial Sequence: Synthetic oligonucleotide
  Sense Strand Starting at position 124 of SEQ ID NO: 317329
auuugcuauucggugacau

SEQ ID NO: 328492 - RNA, 19 nt, Artificial Sequence
  Description of Artificial Sequence: Synthetic oligonucleotide
  Antisense Strand to SEQ ID NO: 328491
augucaccgaauagcaaau

SEQ ID NO: 328493 - RNA, 19 nt, Artificial Sequence
  Description of Artificial Sequence: Synthetic oligonucleotide
  Sense Strand Starting at position 124 of SEQ ID NO: 317331
uugcuauucggugacauaa

SEQ ID NO: 328494 - RNA, 19 nt, Artificial Sequence
  Description of Artificial Sequence: Synthetic oligonucleotide
  Antisense Strand to SEQ ID NO: 328493
uuaugucaccgaauagcaa

SEQ ID NO: 328495 - RNA, 19 nt, Artificial Sequence
  Description of Artificial Sequence: Synthetic oligonucleotide
  Sense Strand Starting at position 124 of SEQ ID NO: 317746
ugugguguuacguaaauca

SEQ ID NO: 328496 - RNA, 19 nt, Artificial Sequence
  Description of Artificial Sequence: Synthetic oligonucleotide
  Antisense Strand to SEQ ID NO: 328495
ugauuuacguaacaccaca

SEQ ID NO: 328497 - RNA, 19 nt, Artificial Sequence
  Description of Artificial Sequence: Synthetic oligonucleotide
  Sense Strand Starting at position 124 of SEQ ID NO: 318024
guuuguuucuuuccaggac

SEQ ID NO: 328498 - RNA, 19 nt, Artificial Sequence
  Description of Artificial Sequence: Synthetic oligonucleotide
  Antisense Strand to SEQ ID NO: 328497
guccuggaaagaaacaaac

SEQ ID NO: 328499 - RNA, 19 nt, Artificial Sequence
  Description of Artificial Sequence: Synthetic oligonucleotide
  Sense Strand Starting at position 124 of SEQ ID NO: 318028
guuucuuuccaggacagca

SEQ ID NO: 328500 - RNA, 19 nt, Artificial Sequence
  Description of Artificial Sequence: Synthetic oligonucleotide
  Antisense Strand to SEQ ID NO: 328499
ugcuguccuggaaagaaac

SEQ ID NO: 328501 - RNA, 19 nt, Artificial Sequence
  Description of Artificial Sequence: Synthetic oligonucleotide
  Sense Strand Starting at position 124 of SEQ ID NO: 318042
cagcaagugguggguuuaa

SEQ ID NO: 328502 - RNA, 19 nt, Artificial Sequence
  Description of Artificial Sequence: Synthetic oligonucleotide
  Antisense Strand to SEQ ID NO: 328501
uuaaacccaccacuugcug

SEQ ID NO: 328503 - RNA, 19 nt, Artificial Sequence
  Description of Artificial Sequence: Synthetic oligonucleotide
  Sense Strand Starting at position 124 of SEQ ID NO: 318052
uggguuuaaucuguuauug

SEQ ID NO: 328504 - RNA, 19 nt, Artificial Sequence
  Description of Artificial Sequence: Synthetic oligonucleotide
  Antisense Strand to SEQ ID NO: 328503
caauaacagauuaaaccca

SEQ ID NO: 328505 - RNA, 19 nt, Artificial Sequence
  Description of Artificial Sequence: Synthetic oligonucleotide
  Sense Strand Starting at position 124 of SEQ ID NO: 318070
guugacucuugggaaauuu

SEQ ID NO: 328506 - RNA, 19 nt, Artificial Sequence
  Description of Artificial Sequence: Synthetic oligonucleotide
  Antisense Strand to SEQ ID NO: 328505
aaauuucccaagagucaac

SEQ ID NO: 328507 - RNA, 19 nt, Artificial Sequence
  Description of Artificial Sequence: Synthetic oligonucleotide
  Sense Strand Starting at position 124 of SEQ ID NO: 318231
cguuucaaggucguuguaa

SEQ ID NO: 328508 - RNA, 19 nt, Artificial Sequence
  Description of Artificial Sequence: Synthetic oligonucleotide
  Antisense Strand to SEQ ID NO: 328507
uuacaacgaccuugaaacg

SEQ ID NO: 328509 - RNA, 19 nt, Artificial Sequence
  Description of Artificial Sequence: Synthetic oligonucleotide
  Sense Strand Starting at position 124 of SEQ ID NO: 318260
ucagucuguguuuaagaga

SEQ ID NO: 328510 - RNA, 19 nt, Artificial Sequence
  Description of Artificial Sequence: Synthetic oligonucleotide
  Antisense Strand to SEQ ID NO: 328509
ucucuuaaacacagacuga

SEQ ID NO: 328511 - RNA, 19 nt, Artificial Sequence
  Description of Artificial Sequence: Synthetic oligonucleotide
  Sense Strand Starting at position 124 of SEQ ID NO: 318535
gcugcuaguuuccuuauuu

SEQ ID NO: 328512 - RNA, 19 nt, Artificial Sequence
  Description of Artificial Sequence: Synthetic oligonucleotide
  Antisense Strand to SEQ ID NO: 328511
aaauaaggaaacuagcagc

SEQ ID NO: 328513 - RNA, 19 nt, Artificial Sequence
  Description of Artificial Sequence: Synthetic oligonucleotide
  Sense Strand Starting at position 124 of SEQ ID NO: 318536
cugcuaguuuccuuauuua

SEQ ID NO: 328514 - RNA, 19 nt, Artificial Sequence
  Description of Artificial Sequence: Synthetic oligonucleotide
  Antisense Strand to SEQ ID NO: 328513
uaaauaaggaaacuagcag

SEQ ID NO: 328515 - RNA, 19 nt, Artificial Sequence
  Description of Artificial Sequence: Synthetic oligonucleotide
  Sense Strand Starting at position 124 of SEQ ID NO: 318599
gggagacucuuguuucuuu

SEQ ID NO: 328516 - RNA, 19 nt, Artificial Sequence
  Description of Artificial Sequence: Synthetic oligonucleotide
  Antisense Strand to SEQ ID NO: 328515
aaagaaacaagagucuccc

SEQ ID NO: 328517 - RNA, 19 nt, Artificial Sequence
  Description of Artificial Sequence: Synthetic oligonucleotide
  Sense Strand Starting at position 124 of SEQ ID NO: 318727
cugagccuuggcuaugaga

SEQ ID NO: 328518 - RNA, 19 nt, Artificial Sequence
  Description of Artificial Sequence: Synthetic oligonucleotide
  Antisense Strand to SEQ ID NO: 328517
ucucauagccaaggcucag

SEQ ID NO: 328519 - RNA, 19 nt, Artificial Sequence
  Description of Artificial Sequence: Synthetic oligonucleotide
  Sense Strand Starting at position 124 of SEQ ID NO: 318729
gagccuuggcuaugagagu

SEQ ID NO: 328520 - RNA, 19 nt, Artificial Sequence
  Description of Artificial Sequence: Synthetic oligonucleotide
  Antisense Strand to SEQ ID NO: 328519
acucucauagccaaggcuc

SEQ ID NO: 328521 - RNA, 19 nt, Artificial Sequence
  Description of Artificial Sequence: Synthetic oligonucleotide
  Sense Strand Starting at position 124 of SEQ ID NO: 318740
augagaguccuucaagcga

SEQ ID NO: 328522 - RNA, 19 nt, Artificial Sequence
  Description of Artificial Sequence: Synthetic oligonucleotide
  Antisense Strand to SEQ ID NO: 328521
ucgcuugaaggacucucau

SEQ ID NO: 328523 - RNA, 19 nt, Artificial Sequence
  Description of Artificial Sequence: Synthetic oligonucleotide
  Sense Strand Starting at position 124 of SEQ ID NO: 318751
ucaagcgacuuauuaaauu

SEQ ID NO: 328524 - RNA, 19 nt, Artificial Sequence
  Description of Artificial Sequence: Synthetic oligonucleotide
  Antisense Strand to SEQ ID NO: 328523
aauuuaauaagucgcuuga

SEQ ID NO: 328525 - RNA, 19 nt, Artificial Sequence
  Description of Artificial Sequence: Synthetic oligonucleotide
  Sense Strand Starting at position 124 of SEQ ID NO: 318799
ucucgucacuuguuaauuu

SEQ ID NO: 328526 - RNA, 19 nt, Artificial Sequence
  Description of Artificial Sequence: Synthetic oligonucleotide
  Antisense Strand to SEQ ID NO: 328525
aaauuaacaagugacgaga

SEQ ID NO: 328527 - RNA, 19 nt, Artificial Sequence
  Description of Artificial Sequence: Synthetic oligonucleotide
  Sense Strand Starting at position 124 of SEQ ID NO: 318867
gguuuauaauggaggagug

SEQ ID NO: 328528 - RNA, 19 nt, Artificial Sequence
  Description of Artificial Sequence: Synthetic oligonucleotide
  Antisense Strand to SEQ ID NO: 328527
cacuccuccauuauaaacc

SEQ ID NO: 328529 - RNA, 19 nt, Artificial Sequence
  Description of Artificial Sequence: Synthetic oligonucleotide
  Sense Strand Starting at position 124 of SEQ ID NO: 318868
guuuauaauggaggaguga

SEQ ID NO: 328530 - RNA, 19 nt, Artificial Sequence
  Description of Artificial Sequence: Synthetic oligonucleotide
  Antisense Strand to SEQ ID NO: 328529
ucacuccuccauuauaaac

SEQ ID NO: 328531 - RNA, 19 nt, Artificial Sequence
  Description of Artificial Sequence: Synthetic oligonucleotide
  Sense Strand Starting at position 124 of SEQ ID NO: 318882
agugaucagagcugugaaa

SEQ ID NO: 328532 - RNA, 19 nt, Artificial Sequence
  Description of Artificial Sequence: Synthetic oligonucleotide
  Antisense Strand to SEQ ID NO: 328531
uuucacagcucugaucacu

SEQ ID NO: 328533 - RNA, 19 nt, Artificial Sequence
  Description of Artificial Sequence: Synthetic oligonucleotide
  Sense Strand Starting at position 124 of SEQ ID NO: 318884
ugaucagagcugugaaaga

SEQ ID NO: 328534 - RNA, 19 nt, Artificial Sequence
  Description of Artificial Sequence: Synthetic oligonucleotide
  Antisense Strand to SEQ ID NO: 328533
ucuuucacagcucugauca

SEQ ID NO: 328535 - RNA, 19 nt, Artificial Sequence
  Description of Artificial Sequence: Synthetic oligonucleotide
  Sense Strand Starting at position 124 of SEQ ID NO: 318939
uugacagucccguaagaag

SEQ ID NO: 328536 - RNA, 19 nt, Artificial Sequence
  Description of Artificial Sequence: Synthetic oligonucleotide
  Antisense Strand to SEQ ID NO: 328535
cuucuuacgggacugucaa

SEQ ID NO: 328537 - RNA, 19 nt, Artificial Sequence
  Description of Artificial Sequence: Synthetic oligonucleotide
  Sense Strand Starting at position 124 of SEQ ID NO: 319058
gugcaaagagguugauuau

SEQ ID NO: 328538 - RNA, 19 nt, Artificial Sequence
  Description of Artificial Sequence: Synthetic oligonucleotide
  Antisense Strand to SEQ ID NO: 328537
auaaucaaccucuuugcac

SEQ ID NO: 328539 - RNA, 19 nt, Artificial Sequence
  Description of Artificial Sequence: Synthetic oligonucleotide
  Sense Strand Starting at position 124 of SEQ ID NO: 319059
ugcaaagagguugauuauu

SEQ ID NO: 328540 - RNA, 19 nt, Artificial Sequence
  Description of Artificial Sequence: Synthetic oligonucleotide
  Antisense Strand to SEQ ID NO: 328539
aauaaucaaccucuuugca

SEQ ID NO: 328541 - RNA, 19 nt, Artificial Sequence
  Description of Artificial Sequence: Synthetic oligonucleotide
  Sense Strand Starting at position 124 of SEQ ID NO: 319096
uuaggaaauaugcguuaaa

SEQ ID NO: 328542 - RNA, 19 nt, Artificial Sequence
  Description of Artificial Sequence: Synthetic oligonucleotide
  Antisense Strand to SEQ ID NO: 328541
uuuaacgcauauuuccuaa

SEQ ID NO: 328543 - RNA, 19 nt, Artificial Sequence
  Description of Artificial Sequence: Synthetic oligonucleotide
  Sense Strand Starting at position 124 of SEQ ID NO: 319097
uaggaaauaugcguuaaag

SEQ ID NO: 328544 - RNA, 19 nt, Artificial Sequence
  Description of Artificial Sequence: Synthetic oligonucleotide
  Antisense Strand to SEQ ID NO: 328543
cuuuaacgcauauuuccua

SEQ ID NO: 328545 - RNA, 19 nt, Artificial Sequence
  Description of Artificial Sequence: Synthetic oligonucleotide
  Sense Strand Starting at position 124 of SEQ ID NO: 319099
ggaaauaugcguuaaagug

SEQ ID NO: 328546 - RNA, 19 nt, Artificial Sequence
  Description of Artificial Sequence: Synthetic oligonucleotide
  Antisense Strand to SEQ ID NO: 328545
cacuuuaacgcauauuucc

SEQ ID NO: 328547 - RNA, 19 nt, Artificial Sequence
  Description of Artificial Sequence: Synthetic oligonucleotide
  Sense Strand Starting at position 125 of SEQ ID NO: 315514
ggucguauucgagggauuu

SEQ ID NO: 328548 - RNA, 19 nt, Artificial Sequence
  Description of Artificial Sequence: Synthetic oligonucleotide
  Antisense Strand to SEQ ID NO: 328547
aaaucccucgaauacgacc

SEQ ID NO: 328549 - RNA, 19 nt, Artificial Sequence
  Description of Artificial Sequence: Synthetic oligonucleotide
  Sense Strand Starting at position 125 of SEQ ID NO: 315515
gucguauucgagggauuuc

SEQ ID NO: 328550 - RNA, 19 nt, Artificial Sequence
  Description of Artificial Sequence: Synthetic oligonucleotide
  Antisense Strand to SEQ ID NO: 328549
gaaaucccucgaauacgac

SEQ ID NO: 328551 - RNA, 19 nt, Artificial Sequence
  Description of Artificial Sequence: Synthetic oligonucleotide
  Sense Strand Starting at position 125 of SEQ ID NO: 315626
ucuucuugcuccuccgaau

SEQ ID NO: 328552 - RNA, 19 nt, Artificial Sequence
  Description of Artificial Sequence: Synthetic oligonucleotide
  Antisense Strand to SEQ ID NO: 328551
auucggaggagcaagaaga

SEQ ID NO: 328553 - RNA, 19 nt, Artificial Sequence
  Description of Artificial Sequence: Synthetic oligonucleotide
  Sense Strand Starting at position 125 of SEQ ID NO: 315639
ccgaauauuuauuguguga

SEQ ID NO: 328554 - RNA, 19 nt, Artificial Sequence
  Description of Artificial Sequence: Synthetic oligonucleotide
  Antisense Strand to SEQ ID NO: 328553
ucacacaauaaauauucgg

SEQ ID NO: 328555 - RNA, 19 nt, Artificial Sequence
  Description of Artificial Sequence: Synthetic oligonucleotide
  Sense Strand Starting at position 125 of SEQ ID NO: 315641
gaauauuuauugugugacg

SEQ ID NO: 328556 - RNA, 19 nt, Artificial Sequence
  Description of Artificial Sequence: Synthetic oligonucleotide
  Antisense Strand to SEQ ID NO: 328555
cgucacacaauaaauauuc

SEQ ID NO: 328557 - RNA, 19 nt, Artificial Sequence
  Description of Artificial Sequence: Synthetic oligonucleotide
  Sense Strand Starting at position 125 of SEQ ID NO: 315670
aguagaggcucuguaaaug

SEQ ID NO: 328558 - RNA, 19 nt, Artificial Sequence
  Description of Artificial Sequence: Synthetic oligonucleotide
  Antisense Strand to SEQ ID NO: 328557
cauuuacagagccucuacu

SEQ ID NO: 328559 - RNA, 19 nt, Artificial Sequence
  Description of Artificial Sequence: Synthetic oligonucleotide
  Sense Strand Starting at position 125 of SEQ ID NO: 315675
aggcucuguaaauguguau

SEQ ID NO: 328560 - RNA, 19 nt, Artificial Sequence
  Description of Artificial Sequence: Synthetic oligonucleotide
  Antisense Strand to SEQ ID NO: 328559
auacacauuuacagagccu

SEQ ID NO: 328561 - RNA, 19 nt, Artificial Sequence
  Description of Artificial Sequence: Synthetic oligonucleotide
  Sense Strand Starting at position 125 of SEQ ID NO: 315678
cucuguaaauguguauuga

SEQ ID NO: 328562 - RNA, 19 nt, Artificial Sequence
  Description of Artificial Sequence: Synthetic oligonucleotide
  Antisense Strand to SEQ ID NO: 328561
ucaauacacauuuacagag

SEQ ID NO: 328563 - RNA, 19 nt, Artificial Sequence
  Description of Artificial Sequence: Synthetic oligonucleotide
  Sense Strand Starting at position 125 of SEQ ID NO: 315686
auguguauugagugaauau

SEQ ID NO: 328564 - RNA, 19 nt, Artificial Sequence
  Description of Artificial Sequence: Synthetic oligonucleotide
  Antisense Strand to SEQ ID NO: 328563
auauucacucaauacacau

SEQ ID NO: 328565 - RNA, 19 nt, Artificial Sequence
  Description of Artificial Sequence: Synthetic oligonucleotide
  Sense Strand Starting at position 125 of SEQ ID NO: 315687
uguguauugagugaauaug

SEQ ID NO: 328566 - RNA, 19 nt, Artificial Sequence
  Description of Artificial Sequence: Synthetic oligonucleotide
  Antisense Strand to SEQ ID NO: 328565
cauauucacucaauacaca

SEQ ID NO: 328567 - RNA, 19 nt, Artificial Sequence
  Description of Artificial Sequence: Synthetic oligonucleotide
  Sense Strand Starting at position 125 of SEQ ID NO: 315781
acgccucuuguagaaagaa

SEQ ID NO: 328568 - RNA, 19 nt, Artificial Sequence
  Description of Artificial Sequence: Synthetic oligonucleotide
  Antisense Strand to SEQ ID NO: 328567
uucuuucuacaagaggcgu

SEQ ID NO: 328569 - RNA, 19 nt, Artificial Sequence
  Description of Artificial Sequence: Synthetic oligonucleotide
  Sense Strand Starting at position 125 of SEQ ID NO: 315812
ggacauuugcagcgucaca

SEQ ID NO: 328570 - RNA, 19 nt, Artificial Sequence
  Description of Artificial Sequence: Synthetic oligonucleotide
  Antisense Strand to SEQ ID NO: 328569
ugugacgcugcaaaugucc

SEQ ID NO: 328571 - RNA, 19 nt, Artificial Sequence
  Description of Artificial Sequence: Synthetic oligonucleotide
  Sense Strand Starting at position 125 of SEQ ID NO: 315873
ugaaauaugugcuucugca

SEQ ID NO: 328572 - RNA, 19 nt, Artificial Sequence
  Description of Artificial Sequence: Synthetic oligonucleotide
  Antisense Strand to SEQ ID NO: 328571
ugcagaagcacauauuuca

SEQ ID NO: 328573 - RNA, 19 nt, Artificial Sequence
  Description of Artificial Sequence: Synthetic oligonucleotide
  Sense Strand Starting at position 125 of SEQ ID NO: 316250
cuucccauugguugagaca

SEQ ID NO: 328574 - RNA, 19 nt, Artificial Sequence
  Description of Artificial Sequence: Synthetic oligonucleotide
  Antisense Strand to SEQ ID NO: 328573
ugucucaaccaaugggaag

SEQ ID NO: 328575 - RNA, 19 nt, Artificial Sequence
  Description of Artificial Sequence: Synthetic oligonucleotide
  Sense Strand Starting at position 125 of SEQ ID NO: 316532
gggagauucggucgggaag

SEQ ID NO: 328576 - RNA, 19 nt, Artificial Sequence
  Description of Artificial Sequence: Synthetic oligonucleotide
  Antisense Strand to SEQ ID NO: 328575
cuucccgaccgaaucuccc

SEQ ID NO: 328577 - RNA, 19 nt, Artificial Sequence
  Description of Artificial Sequence: Synthetic oligonucleotide
  Sense Strand Starting at position 125 of SEQ ID NO: 316756
cuggcacauuauuccgaau

SEQ ID NO: 328578 - RNA, 19 nt, Artificial Sequence
  Description of Artificial Sequence: Synthetic oligonucleotide
  Antisense Strand to SEQ ID NO: 328577
auucggaauaaugugccag

SEQ ID NO: 328579 - RNA, 19 nt, Artificial Sequence
  Description of Artificial Sequence: Synthetic oligonucleotide
  Sense Strand Starting at position 125 of SEQ ID NO: 316758
ggcacauuauuccgaauaa

SEQ ID NO: 328580 - RNA, 19 nt, Artificial Sequence
  Description of Artificial Sequence: Synthetic oligonucleotide
  Antisense Strand to SEQ ID NO: 328579
uuauucggaauaaugugcc

SEQ ID NO: 328581 - RNA, 19 nt, Artificial Sequence
  Description of Artificial Sequence: Synthetic oligonucleotide
  Sense Strand Starting at position 125 of SEQ ID NO: 316759
gcacauuauuccgaauaau

SEQ ID NO: 328582 - RNA, 19 nt, Artificial Sequence
  Description of Artificial Sequence: Synthetic oligonucleotide
  Antisense Strand to SEQ ID NO: 328581
auuauucggaauaaugugc

SEQ ID NO: 328583 - RNA, 19 nt, Artificial Sequence
  Description of Artificial Sequence: Synthetic oligonucleotide
  Sense Strand Starting at position 125 of SEQ ID NO: 317504
cgcuccuugaagugaggaa

SEQ ID NO: 328584 - RNA, 19 nt, Artificial Sequence
  Description of Artificial Sequence: Synthetic oligonucleotide
  Antisense Strand to SEQ ID NO: 328583
uuccucacuucaaggagcg

SEQ ID NO: 328585 - RNA, 19 nt, Artificial Sequence
  Description of Artificial Sequence: Synthetic oligonucleotide
  Sense Strand Starting at position 125 of SEQ ID NO: 317557
gugcguguugcugucuuua

SEQ ID NO: 328586 - RNA, 19 nt, Artificial Sequence
  Description of Artificial Sequence: Synthetic oligonucleotide
  Antisense Strand to SEQ ID NO: 328585
uaaagacagcaacacgcac

SEQ ID NO: 328587 - RNA, 19 nt, Artificial Sequence
  Description of Artificial Sequence: Synthetic oligonucleotide
  Sense Strand Starting at position 125 of SEQ ID NO: 317559
gcguguugcugucuuuaga

SEQ ID NO: 328588 - RNA, 19 nt, Artificial Sequence
  Description of Artificial Sequence: Synthetic oligonucleotide
  Antisense Strand to SEQ ID NO: 328587
ucuaaagacagcaacacgc

SEQ ID NO: 328589 - RNA, 19 nt, Artificial Sequence
  Description of Artificial Sequence: Synthetic oligonucleotide
  Sense Strand Starting at position 125 of SEQ ID NO: 317560
cguguugcugucuuuagag

SEQ ID NO: 328590 - RNA, 19 nt, Artificial Sequence
  Description of Artificial Sequence: Synthetic oligonucleotide
  Antisense Strand to SEQ ID NO: 328589
cucuaaagacagcaacacg

SEQ ID NO: 328591 - RNA, 19 nt, Artificial Sequence
  Description of Artificial Sequence: Synthetic oligonucleotide
  Sense Strand Starting at position 125 of SEQ ID NO: 317572
uuuagagcucauuaggguu

SEQ ID NO: 328592 - RNA, 19 nt, Artificial Sequence
  Description of Artificial Sequence: Synthetic oligonucleotide
  Antisense Strand to SEQ ID NO: 328591
aacccuaaugagcucuaaa

SEQ ID NO: 328593 - RNA, 19 nt, Artificial Sequence
  Description of Artificial Sequence: Synthetic oligonucleotide
  Sense Strand Starting at position 125 of SEQ ID NO: 317895
gacagagugcuccgucuca

SEQ ID NO: 328594 - RNA, 19 nt, Artificial Sequence
  Description of Artificial Sequence: Synthetic oligonucleotide
  Antisense Strand to SEQ ID NO: 328593
ugagacggagcacucuguc

SEQ ID NO: 328595 - RNA, 19 nt, Artificial Sequence
  Description of Artificial Sequence: Synthetic oligonucleotide
  Sense Strand Starting at position 125 of SEQ ID NO: 318008
ggccaucggccacagauaa

SEQ ID NO: 328596 - RNA, 19 nt, Artificial Sequence
  Description of Artificial Sequence: Synthetic oligonucleotide
  Antisense Strand to SEQ ID NO: 328595
uuaucuguggccgauggcc

SEQ ID NO: 328597 - RNA, 19 nt, Artificial Sequence
  Description of Artificial Sequence: Synthetic oligonucleotide
  Sense Strand Starting at position 125 of SEQ ID NO: 318125
cacauuaguggcgaagcua

SEQ ID NO: 328598 - RNA, 19 nt, Artificial Sequence
  Description of Artificial Sequence: Synthetic oligonucleotide
  Antisense Strand to SEQ ID NO: 328597
uagcuucgccacuaaugug

SEQ ID NO: 328599 - RNA, 19 nt, Artificial Sequence
  Description of Artificial Sequence: Synthetic oligonucleotide
  Sense Strand Starting at position 125 of SEQ ID NO: 318310
ucgaaagaaugcgaccauu

SEQ ID NO: 328600 - RNA, 19 nt, Artificial Sequence
  Description of Artificial Sequence: Synthetic oligonucleotide
  Antisense Strand to SEQ ID NO: 328599
aauggucgcauucuuucga

SEQ ID NO: 328601 - RNA, 19 nt, Artificial Sequence
  Description of Artificial Sequence: Synthetic oligonucleotide
  Sense Strand Starting at position 125 of SEQ ID NO: 318490
aggacuuccugaggccauu

SEQ ID NO: 328602 - RNA, 19 nt, Artificial Sequence
  Description of Artificial Sequence: Synthetic oligonucleotide
  Antisense Strand to SEQ ID NO: 328601
aauggccucaggaaguccu

SEQ ID NO: 328603 - RNA, 19 nt, Artificial Sequence
  Description of Artificial Sequence: Synthetic oligonucleotide
  Sense Strand Starting at position 125 of SEQ ID NO: 318513
uugcgugcauucuuaacuu

SEQ ID NO: 328604 - RNA, 19 nt, Artificial Sequence
  Description of Artificial Sequence: Synthetic oligonucleotide
  Antisense Strand to SEQ ID NO: 328603
aaguuaagaaugcacgcaa

SEQ ID NO: 328605 - RNA, 19 nt, Artificial Sequence
  Description of Artificial Sequence: Synthetic oligonucleotide
  Sense Strand Starting at position 125 of SEQ ID NO: 318578
ucacaacuauguuuaggua

SEQ ID NO: 328606 - RNA, 19 nt, Artificial Sequence
  Description of Artificial Sequence: Synthetic oligonucleotide
  Antisense Strand to SEQ ID NO: 328605
uaccuaaacauaguuguga

SEQ ID NO: 328607 - RNA, 19 nt, Artificial Sequence
  Description of Artificial Sequence: Synthetic oligonucleotide
  Sense Strand Starting at position 125 of SEQ ID NO: 318581
caacuauguuuagguaaag

SEQ ID NO: 328608 - RNA, 19 nt, Artificial Sequence
  Description of Artificial Sequence: Synthetic oligonucleotide
  Antisense Strand to SEQ ID NO: 328607
cuuuaccuaaacauaguug

SEQ ID NO: 328609 - RNA, 19 nt, Artificial Sequence
  Description of Artificial Sequence: Synthetic oligonucleotide
  Sense Strand Starting at position 125 of SEQ ID NO: 318582
aacuauguuuagguaaagu

SEQ ID NO: 328610 - RNA, 19 nt, Artificial Sequence
  Description of Artificial Sequence: Synthetic oligonucleotide
  Antisense Strand to SEQ ID NO: 328609
acuuuaccuaaacauaguu

SEQ ID NO: 328611 - RNA, 19 nt, Artificial Sequence
  Description of Artificial Sequence: Synthetic oligonucleotide
  Sense Strand Starting at position 125 of SEQ ID NO: 318670
gagggaaguacuggcauga

SEQ ID NO: 328612 - RNA, 19 nt, Artificial Sequence
  Description of Artificial Sequence: Synthetic oligonucleotide
  Antisense Strand to SEQ ID NO: 328611
ucaugccaguacuucccuc

SEQ ID NO: 328613 - RNA, 19 nt, Artificial Sequence
  Description of Artificial Sequence: Synthetic oligonucleotide
  Sense Strand Starting at position 125 of SEQ ID NO: 318674
gaaguacuggcaugaugaa

SEQ ID NO: 328614 - RNA, 19 nt, Artificial Sequence
  Description of Artificial Sequence: Synthetic oligonucleotide
  Antisense Strand to SEQ ID NO: 328613
uucaucaugccaguacuuc

SEQ ID NO: 328615 - RNA, 19 nt, Artificial Sequence
  Description of Artificial Sequence: Synthetic oligonucleotide
  Sense Strand Starting at position 125 of SEQ ID NO: 318828
cguaguggaugcuuguaau

SEQ ID NO: 328616 - RNA, 19 nt, Artificial Sequence
  Description of Artificial Sequence: Synthetic oligonucleotide
  Antisense Strand to SEQ ID NO: 328615
auuacaagcauccacuacg

SEQ ID NO: 328617 - RNA, 19 nt, Artificial Sequence
  Description of Artificial Sequence: Synthetic oligonucleotide
  Sense Strand Starting at position 125 of SEQ ID NO: 318999
cuguccauucugugagcuu

SEQ ID NO: 328618 - RNA, 19 nt, Artificial Sequence
  Description of Artificial Sequence: Synthetic oligonucleotide
  Antisense Strand to SEQ ID NO: 328617
aagcucacagaauggacag

SEQ ID NO: 328619 - RNA, 19 nt, Artificial Sequence
  Description of Artificial Sequence: Synthetic oligonucleotide
  Sense Strand Starting at position 125 of SEQ ID NO: 319153
cagugacgguguuucagaa

SEQ ID NO: 328620 - RNA, 19 nt, Artificial Sequence
  Description of Artificial Sequence: Synthetic oligonucleotide
  Antisense Strand to SEQ ID NO: 328619
uucugaaacaccgucacug

SEQ ID NO: 328621 - RNA, 19 nt, Artificial Sequence
  Description of Artificial Sequence: Synthetic oligonucleotide
  Sense Strand Starting at position 125 of SEQ ID NO: 319166
ucagaacauuaggcauaua

SEQ ID NO: 328622 - RNA, 19 nt, Artificial Sequence
  Description of Artificial Sequence: Synthetic oligonucleotide
  Antisense Strand to SEQ ID NO: 328621
uauaugccuaauguucuga

SEQ ID NO: 328623 - RNA, 19 nt, Artificial Sequence
  Description of Artificial Sequence: Synthetic oligonucleotide
  Sense Strand Starting at position 125 of SEQ ID NO: 319182
auaguaccacaggguuaaa

SEQ ID NO: 328624 - RNA, 19 nt, Artificial Sequence
  Description of Artificial Sequence: Synthetic oligonucleotide
  Antisense Strand to SEQ ID NO: 328623
uuuaacccugugguacuau

SEQ ID NO: 328625 - RNA, 19 nt, Artificial Sequence
  Description of Artificial Sequence: Synthetic oligonucleotide
  Sense Strand Starting at position 125 of SEQ ID NO: 319218
aaauuacgccuugaggauu

SEQ ID NO: 328626 - RNA, 19 nt, Artificial Sequence
  Description of Artificial Sequence: Synthetic oligonucleotide
  Antisense Strand to SEQ ID NO: 328625
aauccucaaggcguaauuu

SEQ ID NO: 328627 - RNA, 19 nt, Artificial Sequence
  Description of Artificial Sequence: Synthetic oligonucleotide
  Sense Strand Starting at position 126 of SEQ ID NO: 315639
ugccuuuaucagcaauaag

SEQ ID NO: 328628 - RNA, 19 nt, Artificial Sequence
  Description of Artificial Sequence: Synthetic oligonucleotide
  Antisense Strand to SEQ ID NO: 328627
cuuauugcugauaaaggca

SEQ ID NO: 328629 - RNA, 19 nt, Artificial Sequence
  Description of Artificial Sequence: Synthetic oligonucleotide
  Sense Strand Starting at position 126 of SEQ ID NO: 315684
uugaaagauggccaagcau

SEQ ID NO: 328630 - RNA, 19 nt, Artificial Sequence
  Description of Artificial Sequence: Synthetic oligonucleotide
  Antisense Strand to SEQ ID NO: 328629
augcuuggccaucuuucaa

SEQ ID NO: 328631 - RNA, 19 nt, Artificial Sequence
  Description of Artificial Sequence: Synthetic oligonucleotide
  Sense Strand Starting at position 126 of SEQ ID NO: 315844
caggccaggucuccauaau

SEQ ID NO: 328632 - RNA, 19 nt, Artificial Sequence
  Description of Artificial Sequence: Synthetic oligonucleotide
  Antisense Strand to SEQ ID NO: 328631
auuauggagaccuggccug

SEQ ID NO: 328633 - RNA, 19 nt, Artificial Sequence
  Description of Artificial Sequence: Synthetic oligonucleotide
  Sense Strand Starting at position 126 of SEQ ID NO: 315845
aggccaggucuccauaaug

SEQ ID NO: 328634 - RNA, 19 nt, Artificial Sequence
  Description of Artificial Sequence: Synthetic oligonucleotide
  Antisense Strand to SEQ ID NO: 328633
cauuauggagaccuggccu

SEQ ID NO: 328635 - RNA, 19 nt, Artificial Sequence
  Description of Artificial Sequence: Synthetic oligonucleotide
  Sense Strand Starting at position 126 of SEQ ID NO: 315938
gcaucagugcccuauacaa

SEQ ID NO: 328636 - RNA, 19 nt, Artificial Sequence
  Description of Artificial Sequence: Synthetic oligonucleotide
  Antisense Strand to SEQ ID NO: 328635
uuguauagggcacugaugc

SEQ ID NO: 328637 - RNA, 19 nt, Artificial Sequence
  Description of Artificial Sequence: Synthetic oligonucleotide
  Sense Strand Starting at position 126 of SEQ ID NO: 316210
aaaugaauuuacgaaggcu

SEQ ID NO: 328638 - RNA, 19 nt, Artificial Sequence
  Description of Artificial Sequence: Synthetic oligonucleotide
  Antisense Strand to SEQ ID NO: 328637
agccuucguaaauucauuu

SEQ ID NO: 328639 - RNA, 19 nt, Artificial Sequence
  Description of Artificial Sequence: Synthetic oligonucleotide
  Sense Strand Starting at position 126 of SEQ ID NO: 316277
guuaaucacuuacuuaugu

SEQ ID NO: 328640 - RNA, 19 nt, Artificial Sequence
  Description of Artificial Sequence: Synthetic oligonucleotide
  Antisense Strand to SEQ ID NO: 328639
acauaaguaagugauuaac

SEQ ID NO: 328641 - RNA, 19 nt, Artificial Sequence
  Description of Artificial Sequence: Synthetic oligonucleotide
  Sense Strand Starting at position 126 of SEQ ID NO: 316284
acuuacuuaugucuuuaga

SEQ ID NO: 328642 - RNA, 19 nt, Artificial Sequence
  Description of Artificial Sequence: Synthetic oligonucleotide
  Antisense Strand to SEQ ID NO: 328641
ucuaaagacauaaguaagu

SEQ ID NO: 328643 - RNA, 19 nt, Artificial Sequence
  Description of Artificial Sequence: Synthetic oligonucleotide
  Sense Strand Starting at position 126 of SEQ ID NO: 316455
auuacugggccgcaagaau

SEQ ID NO: 328644 - RNA, 19 nt, Artificial Sequence
  Description of Artificial Sequence: Synthetic oligonucleotide
  Antisense Strand to SEQ ID NO: 328643
auucuugcggcccaguaau

SEQ ID NO: 328645 - RNA, 19 nt, Artificial Sequence
  Description of Artificial Sequence: Synthetic oligonucleotide
  Sense Strand Starting at position 126 of SEQ ID NO: 316510
ugaggugugccugacuaua

SEQ ID NO: 328646 - RNA, 19 nt, Artificial Sequence
  Description of Artificial Sequence: Synthetic oligonucleotide
  Antisense Strand to SEQ ID NO: 328645
uauagucaggcacaccuca

SEQ ID NO: 328647 - RNA, 19 nt, Artificial Sequence
  Description of Artificial Sequence: Synthetic oligonucleotide
  Sense Strand Starting at position 126 of SEQ ID NO: 316512
aggugugccugacuauagu

SEQ ID NO: 328648 - RNA, 19 nt, Artificial Sequence
  Description of Artificial Sequence: Synthetic oligonucleotide
  Antisense Strand to SEQ ID NO: 328647
acuauagucaggcacaccu

SEQ ID NO: 328649 - RNA, 19 nt, Artificial Sequence
  Description of Artificial Sequence: Synthetic oligonucleotide
  Sense Strand Starting at position 126 of SEQ ID NO: 317150
ccagccggauccucuuaau

SEQ ID NO: 328650 - RNA, 19 nt, Artificial Sequence
  Description of Artificial Sequence: Synthetic oligonucleotide
  Antisense Strand to SEQ ID NO: 328649
auuaagaggauccggcugg

SEQ ID NO: 328651 - RNA, 19 nt, Artificial Sequence
  Description of Artificial Sequence: Synthetic oligonucleotide
  Sense Strand Starting at position 126 of SEQ ID NO: 317212
aggcuuucuguguauucuu

SEQ ID NO: 328652 - RNA, 19 nt, Artificial Sequence
  Description of Artificial Sequence: Synthetic oligonucleotide
  Antisense Strand to SEQ ID NO: 328651
aagaauacacagaaagccu

SEQ ID NO: 328653 - RNA, 19 nt, Artificial Sequence
  Description of Artificial Sequence: Synthetic oligonucleotide
  Sense Strand Starting at position 126 of SEQ ID NO: 317238
uugccuuuagcugagaaug

SEQ ID NO: 328654 - RNA, 19 nt, Artificial Sequence
  Description of Artificial Sequence: Synthetic oligonucleotide
  Antisense Strand to SEQ ID NO: 328653
cauucucagcuaaaggcaa

SEQ ID NO: 328655 - RNA, 19 nt, Artificial Sequence
  Description of Artificial Sequence: Synthetic oligonucleotide
  Sense Strand Starting at position 126 of SEQ ID NO: 317243
uuuagcugagaauggaaau

SEQ ID NO: 328656 - RNA, 19 nt, Artificial Sequence
  Description of Artificial Sequence: Synthetic oligonucleotide
  Antisense Strand to SEQ ID NO: 328655
auuuccauucucagcuaaa

SEQ ID NO: 328657 - RNA, 19 nt, Artificial Sequence
  Description of Artificial Sequence: Synthetic oligonucleotide
  Sense Strand Starting at position 126 of SEQ ID NO: 317262
ucucacauaugugugacaa

SEQ ID NO: 328658 - RNA, 19 nt, Artificial Sequence
  Description of Artificial Sequence: Synthetic oligonucleotide
  Antisense Strand to SEQ ID NO: 328657
uugucacacauaugugaga

SEQ ID NO: 328659 - RNA, 19 nt, Artificial Sequence
  Description of Artificial Sequence: Synthetic oligonucleotide
  Sense Strand Starting at position 126 of SEQ ID NO: 317263
cucacauaugugugacaag

SEQ ID NO: 328660 - RNA, 19 nt, Artificial Sequence
  Description of Artificial Sequence: Synthetic oligonucleotide
  Antisense Strand to SEQ ID NO: 328659
cuugucacacauaugugag

SEQ ID NO: 328661 - RNA, 19 nt, Artificial Sequence
  Description of Artificial Sequence: Synthetic oligonucleotide
  Sense Strand Starting at position 126 of SEQ ID NO: 317427
gaugcugcugcuuaggaau

SEQ ID NO: 328662 - RNA, 19 nt, Artificial Sequence
  Description of Artificial Sequence: Synthetic oligonucleotide
  Antisense Strand to SEQ ID NO: 328661
auuccuaagcagcagcauc

SEQ ID NO: 328663 - RNA, 19 nt, Artificial Sequence
  Description of Artificial Sequence: Synthetic oligonucleotide
  Sense Strand Starting at position 126 of SEQ ID NO: 317433
gcugcuuaggaauacauua

SEQ ID NO: 328664 - RNA, 19 nt, Artificial Sequence
  Description of Artificial Sequence: Synthetic oligonucleotide
  Antisense Strand to SEQ ID NO: 328663
uaauguauuccuaagcagc

SEQ ID NO: 328665 - RNA, 19 nt, Artificial Sequence
  Description of Artificial Sequence: Synthetic oligonucleotide
  Sense Strand Starting at position 126 of SEQ ID NO: 317565
cagagacugcccugagcau

SEQ ID NO: 328666 - RNA, 19 nt, Artificial Sequence
  Description of Artificial Sequence: Synthetic oligonucleotide
  Antisense Strand to SEQ ID NO: 328665
augcucagggcagucucug

SEQ ID NO: 328667 - RNA, 19 nt, Artificial Sequence
  Description of Artificial Sequence: Synthetic oligonucleotide
  Sense Strand Starting at position 126 of SEQ ID NO: 317566
agagacugcccugagcaua

SEQ ID NO: 328668 - RNA, 19 nt, Artificial Sequence
  Description of Artificial Sequence: Synthetic oligonucleotide
  Antisense Strand to SEQ ID NO: 328667
uaugcucagggcagucucu

SEQ ID NO: 328669 - RNA, 19 nt, Artificial Sequence
  Description of Artificial Sequence: Synthetic oligonucleotide
  Sense Strand Starting at position 126 of SEQ ID NO: 317674
ggaguuacaguuugaaucu

SEQ ID NO: 328670 - RNA, 19 nt, Artificial Sequence
  Description of Artificial Sequence: Synthetic oligonucleotide
  Antisense Strand to SEQ ID NO: 328669
agauucaaacuguaacucc

SEQ ID NO: 328671 - RNA, 19 nt, Artificial Sequence
  Description of Artificial Sequence: Synthetic oligonucleotide
  Sense Strand Starting at position 126 of SEQ ID NO: 317684
uuugaaucugaaggcagau

SEQ ID NO: 328672 - RNA, 19 nt, Artificial Sequence
  Description of Artificial Sequence: Synthetic oligonucleotide
  Antisense Strand to SEQ ID NO: 328671
aucugccuucagauucaaa

SEQ ID NO: 328673 - RNA, 19 nt, Artificial Sequence
  Description of Artificial Sequence: Synthetic oligonucleotide
  Sense Strand Starting at position 126 of SEQ ID NO: 317734
gaaugucacaguggaggua

SEQ ID NO: 328674 - RNA, 19 nt, Artificial Sequence
  Description of Artificial Sequence: Synthetic oligonucleotide
  Antisense Strand to SEQ ID NO: 328673
uaccuccacugugacauuc

SEQ ID NO: 328675 - RNA, 19 nt, Artificial Sequence
  Description of Artificial Sequence: Synthetic oligonucleotide
  Sense Strand Starting at position 126 of SEQ ID NO: 317890
gaggguucuggucaccuca

SEQ ID NO: 328676 - RNA, 19 nt, Artificial Sequence
  Description of Artificial Sequence: Synthetic oligonucleotide
  Antisense Strand to SEQ ID NO: 328675
ugaggugaccagaacccuc

SEQ ID NO: 328677 - RNA, 19 nt, Artificial Sequence
  Description of Artificial Sequence: Synthetic oligonucleotide
  Sense Strand Starting at position 126 of SEQ ID NO: 318025
ccagaacuguaauugucau

SEQ ID NO: 328678 - RNA, 19 nt, Artificial Sequence
  Description of Artificial Sequence: Synthetic oligonucleotide
  Antisense Strand to SEQ ID NO: 328677
augacaauuacaguucugg

SEQ ID NO: 328679 - RNA, 19 nt, Artificial Sequence
  Description of Artificial Sequence: Synthetic oligonucleotide
  Sense Strand Starting at position 126 of SEQ ID NO: 318083
gcguauagcaccuuuguuu

SEQ ID NO: 328680 - RNA, 19 nt, Artificial Sequence
  Description of Artificial Sequence: Synthetic oligonucleotide
  Antisense Strand to SEQ ID NO: 328679
aaacaaaggugcuauacgc

SEQ ID NO: 328681 - RNA, 19 nt, Artificial Sequence
  Description of Artificial Sequence: Synthetic oligonucleotide
  Sense Strand Starting at position 126 of SEQ ID NO: 318112
cguauucauuuaucgugua

SEQ ID NO: 328682 - RNA, 19 nt, Artificial Sequence
  Description of Artificial Sequence: Synthetic oligonucleotide
  Antisense Strand to SEQ ID NO: 328681
uacacgauaaaugaauacg

SEQ ID NO: 328683 - RNA, 19 nt, Artificial Sequence
  Description of Artificial Sequence: Synthetic oligonucleotide
  Sense Strand Starting at position 126 of SEQ ID NO: 318195
guuacaggaucucaaauaa

SEQ ID NO: 328684 - RNA, 19 nt, Artificial Sequence
  Description of Artificial Sequence: Synthetic oligonucleotide
  Antisense Strand to SEQ ID NO: 328683
uuauuugagauccuguaac

SEQ ID NO: 328685 - RNA, 19 nt, Artificial Sequence
  Description of Artificial Sequence: Synthetic oligonucleotide
  Sense Strand Starting at position 126 of SEQ ID NO: 318289
gacgcacuccugugauaca

SEQ ID NO: 328686 - RNA, 19 nt, Artificial Sequence
  Description of Artificial Sequence: Synthetic oligonucleotide
  Antisense Strand to SEQ ID NO: 328685
uguaucacaggagugcguc

SEQ ID NO: 328687 - RNA, 19 nt, Artificial Sequence
  Description of Artificial Sequence: Synthetic oligonucleotide
  Sense Strand Starting at position 126 of SEQ ID NO: 318413
auugguucccuccggaaag

SEQ ID NO: 328688 - RNA, 19 nt, Artificial Sequence
  Description of Artificial Sequence: Synthetic oligonucleotide
  Antisense Strand to SEQ ID NO: 328687
cuuuccggagggaaccaau

SEQ ID NO: 328689 - RNA, 19 nt, Artificial Sequence
  Description of Artificial Sequence: Synthetic oligonucleotide
  Sense Strand Starting at position 126 of SEQ ID NO: 318686
uuuguauccucuucuggga

SEQ ID NO: 328690 - RNA, 19 nt, Artificial Sequence
  Description of Artificial Sequence: Synthetic oligonucleotide
  Antisense Strand to SEQ ID NO: 328689
ucccagaagaggauacaaa

SEQ ID NO: 328691 - RNA, 19 nt, Artificial Sequence
  Description of Artificial Sequence: Synthetic oligonucleotide
  Sense Strand Starting at position 126 of SEQ ID NO: 318708
ggauuagugcaguaggaug

SEQ ID NO: 328692 - RNA, 19 nt, Artificial Sequence
  Description of Artificial Sequence: Synthetic oligonucleotide
  Antisense Strand to SEQ ID NO: 328691
cauccuacugcacuaaucc

SEQ ID NO: 328693 - RNA, 19 nt, Artificial Sequence
  Description of Artificial Sequence: Synthetic oligonucleotide
  Sense Strand Starting at position 126 of SEQ ID NO: 318728
aguuguagcaaggauaguu

SEQ ID NO: 328694 - RNA, 19 nt, Artificial Sequence
  Description of Artificial Sequence: Synthetic oligonucleotide
  Antisense Strand to SEQ ID NO: 328693
aacuauccuugcuacaacu

SEQ ID NO: 328695 - RNA, 19 nt, Artificial Sequence
  Description of Artificial Sequence: Synthetic oligonucleotide
  Sense Strand Starting at position 126 of SEQ ID NO: 318737
aaggauaguugugucaugu

SEQ ID NO: 328696 - RNA, 19 nt, Artificial Sequence
  Description of Artificial Sequence: Synthetic oligonucleotide
  Antisense Strand to SEQ ID NO: 328695
acaugacacaacuauccuu

SEQ ID NO: 328697 - RNA, 19 nt, Artificial Sequence
  Description of Artificial Sequence: Synthetic oligonucleotide
  Sense Strand Starting at position 126 of SEQ ID NO: 318771
ucuuguuauugucuuuacu

SEQ ID NO: 328698 - RNA, 19 nt, Artificial Sequence
  Description of Artificial Sequence: Synthetic oligonucleotide
  Antisense Strand to SEQ ID NO: 328697
aguaaagacaauaacaaga

SEQ ID NO: 328699 - RNA, 19 nt, Artificial Sequence
  Description of Artificial Sequence: Synthetic oligonucleotide
  Sense Strand Starting at position 126 of SEQ ID NO: 318774
uguuauugucuuuacuuga

SEQ ID NO: 328700 - RNA, 19 nt, Artificial Sequence
  Description of Artificial Sequence: Synthetic oligonucleotide
  Antisense Strand to SEQ ID NO: 328699
ucaaguaaagacaauaaca

SEQ ID NO: 328701 - RNA, 19 nt, Artificial Sequence
  Description of Artificial Sequence: Synthetic oligonucleotide
  Sense Strand Starting at position 126 of SEQ ID NO: 318784
uuuacuugaaggugaagua

SEQ ID NO: 328702 - RNA, 19 nt, Artificial Sequence
  Description of Artificial Sequence: Synthetic oligonucleotide
  Antisense Strand to SEQ ID NO: 328701
uacuucaccuucaaguaaa

SEQ ID NO: 328703 - RNA, 19 nt, Artificial Sequence
  Description of Artificial Sequence: Synthetic oligonucleotide
  Sense Strand Starting at position 126 of SEQ ID NO: 318812
gagagauguguggguccca

SEQ ID NO: 328704 - RNA, 19 nt, Artificial Sequence
  Description of Artificial Sequence: Synthetic oligonucleotide
  Antisense Strand to SEQ ID NO: 328703
ugggacccacacaucucuc

SEQ ID NO: 328705 - RNA, 19 nt, Artificial Sequence
  Description of Artificial Sequence: Synthetic oligonucleotide
  Sense Strand Starting at position 126 of SEQ ID NO: 318967
cggcucaguacccagauau

SEQ ID NO: 328706 - RNA, 19 nt, Artificial Sequence
  Description of Artificial Sequence: Synthetic oligonucleotide
  Antisense Strand to SEQ ID NO: 328705
auaucuggguacugagccg

SEQ ID NO: 328707 - RNA, 19 nt, Artificial Sequence
  Description of Artificial Sequence: Synthetic oligonucleotide
  Sense Strand Starting at position 127 of SEQ ID NO: 315607
ccagcugagagguguaaug

SEQ ID NO: 328708 - RNA, 19 nt, Artificial Sequence
  Description of Artificial Sequence: Synthetic oligonucleotide
  Antisense Strand to SEQ ID NO: 328707
cauuacaccucucagcugg

SEQ ID NO: 328709 - RNA, 19 nt, Artificial Sequence
  Description of Artificial Sequence: Synthetic oligonucleotide
  Sense Strand Starting at position 127 of SEQ ID NO: 315684
ccagacuccgcagaaauca

SEQ ID NO: 328710 - RNA, 19 nt, Artificial Sequence
  Description of Artificial Sequence: Synthetic oligonucleotide
  Antisense Strand to SEQ ID NO: 328709
ugauuucugcggagucugg

SEQ ID NO: 328711 - RNA, 19 nt, Artificial Sequence
  Description of Artificial Sequence: Synthetic oligonucleotide
  Sense Strand Starting at position 127 of SEQ ID NO: 315875
agugcuugauagccauaua

SEQ ID NO: 328712 - RNA, 19 nt, Artificial Sequence
  Description of Artificial Sequence: Synthetic oligonucleotide
  Antisense Strand to SEQ ID NO: 328711
uauauggcuaucaagcacu

SEQ ID NO: 328713 - RNA, 19 nt, Artificial Sequence
  Description of Artificial Sequence: Synthetic oligonucleotide
  Sense Strand Starting at position 127 of SEQ ID NO: 315878
gcuugauagccauauaugg

SEQ ID NO: 328714 - RNA, 19 nt, Artificial Sequence
  Description of Artificial Sequence: Synthetic oligonucleotide
  Antisense Strand to SEQ ID NO: 328713
ccauauauggcuaucaagc

SEQ ID NO: 328715 - RNA, 19 nt, Artificial Sequence
  Description of Artificial Sequence: Synthetic oligonucleotide
  Sense Strand Starting at position 127 of SEQ ID NO: 315950
cgcagaaagcucuacuuga

SEQ ID NO: 328716 - RNA, 19 nt, Artificial Sequence
  Description of Artificial Sequence: Synthetic oligonucleotide
  Antisense Strand to SEQ ID NO: 328715
ucaaguagagcuuucugcg

SEQ ID NO: 328717 - RNA, 19 nt, Artificial Sequence
  Description of Artificial Sequence: Synthetic oligonucleotide
  Sense Strand Starting at position 127 of SEQ ID NO: 315958
gcucuacuugaauguaaau

SEQ ID NO: 328718 - RNA, 19 nt, Artificial Sequence
  Description of Artificial Sequence: Synthetic oligonucleotide
  Antisense Strand to SEQ ID NO: 328717
auuuacauucaaguagagc

SEQ ID NO: 328719 - RNA, 19 nt, Artificial Sequence
  Description of Artificial Sequence: Synthetic oligonucleotide
  Sense Strand Starting at position 127 of SEQ ID NO: 316105
gucaauuaccaauguaguu

SEQ ID NO: 328720 - RNA, 19 nt, Artificial Sequence
  Description of Artificial Sequence: Synthetic oligonucleotide
  Antisense Strand to SEQ ID NO: 328719
aacuacauugguaauugac

SEQ ID NO: 328721 - RNA, 19 nt, Artificial Sequence
  Description of Artificial Sequence: Synthetic oligonucleotide
  Sense Strand Starting at position 127 of SEQ ID NO: 316211
gguauuugauuggauaaua

SEQ ID NO: 328722 - RNA, 19 nt, Artificial Sequence
  Description of Artificial Sequence: Synthetic oligonucleotide
  Antisense Strand to SEQ ID NO: 328721
uauuauccaaucaaauacc

SEQ ID NO: 328723 - RNA, 19 nt, Artificial Sequence
  Description of Artificial Sequence: Synthetic oligonucleotide
  Sense Strand Starting at position 127 of SEQ ID NO: 316219
auuggauaauagcuguaaa

SEQ ID NO: 328724 - RNA, 19 nt, Artificial Sequence
  Description of Artificial Sequence: Synthetic oligonucleotide
  Antisense Strand to SEQ ID NO: 328723
uuuacagcuauuauccaau

SEQ ID NO: 328725 - RNA, 19 nt, Artificial Sequence
  Description of Artificial Sequence: Synthetic oligonucleotide
  Sense Strand Starting at position 127 of SEQ ID NO: 316349
cuuugaagucuugggcaaa

SEQ ID NO: 328726 - RNA, 19 nt, Artificial Sequence
  Description of Artificial Sequence: Synthetic oligonucleotide
  Antisense Strand to SEQ ID NO: 328725
uuugcccaagacuucaaag

SEQ ID NO: 328727 - RNA, 19 nt, Artificial Sequence
  Description of Artificial Sequence: Synthetic oligonucleotide
  Sense Strand Starting at position 127 of SEQ ID NO: 316352
ugaagucuugggcaaauua

SEQ ID NO: 328728 - RNA, 19 nt, Artificial Sequence
  Description of Artificial Sequence: Synthetic oligonucleotide
  Antisense Strand to SEQ ID NO: 328727
uaauuugcccaagacuuca

SEQ ID NO: 328729 - RNA, 19 nt, Artificial Sequence
  Description of Artificial Sequence: Synthetic oligonucleotide
  Sense Strand Starting at position 127 of SEQ ID NO: 316398
gcaaucagugaaugaucca

SEQ ID NO: 328730 - RNA, 19 nt, Artificial Sequence
  Description of Artificial Sequence: Synthetic oligonucleotide
  Antisense Strand to SEQ ID NO: 328729
uggaucauucacugauugc

SEQ ID NO: 328731 - RNA, 19 nt, Artificial Sequence
  Description of Artificial Sequence: Synthetic oligonucleotide
  Sense Strand Starting at position 127 of SEQ ID NO: 316485
ccuaguaaaccucgguaaa

SEQ ID NO: 328732 - RNA, 19 nt, Artificial Sequence
  Description of Artificial Sequence: Synthetic oligonucleotide
  Antisense Strand to SEQ ID NO: 328731
uuuaccgagguuuacuagg

SEQ ID NO: 328733 - RNA, 19 nt, Artificial Sequence
  Description of Artificial Sequence: Synthetic oligonucleotide
  Sense Strand Starting at position 127 of SEQ ID NO: 316513
uguuguuaucauuaccauu

SEQ ID NO: 328734 - RNA, 19 nt, Artificial Sequence
  Description of Artificial Sequence: Synthetic oligonucleotide
  Antisense Strand to SEQ ID NO: 328733
aaugguaaugauaacaaca

SEQ ID NO: 328735 - RNA, 19 nt, Artificial Sequence
  Description of Artificial Sequence: Synthetic oligonucleotide
  Sense Strand Starting at position 127 of SEQ ID NO: 316551
ggauuauggucaguuucuc

SEQ ID NO: 328736 - RNA, 19 nt, Artificial Sequence
  Description of Artificial Sequence: Synthetic oligonucleotide
  Antisense Strand to SEQ ID NO: 328735
gagaaacugaccauaaucc

SEQ ID NO: 328737 - RNA, 19 nt, Artificial Sequence
  Description of Artificial Sequence: Synthetic oligonucleotide
  Sense Strand Starting at position 127 of SEQ ID NO: 317285
uuccaugaguuuccaucau

SEQ ID NO: 328738 - RNA, 19 nt, Artificial Sequence
  Description of Artificial Sequence: Synthetic oligonucleotide
  Antisense Strand to SEQ ID NO: 328737
augauggaaacucauggaa

SEQ ID NO: 328739 - RNA, 19 nt, Artificial Sequence
  Description of Artificial Sequence: Synthetic oligonucleotide
  Sense Strand Starting at position 127 of SEQ ID NO: 317643
ggcacaugugaaugugaac

SEQ ID NO: 328740 - RNA, 19 nt, Artificial Sequence
  Description of Artificial Sequence: Synthetic oligonucleotide
  Antisense Strand to SEQ ID NO: 328739
guucacauucacaugugcc

SEQ ID NO: 328741 - RNA, 19 nt, Artificial Sequence
  Description of Artificial Sequence: Synthetic oligonucleotide
  Sense Strand Starting at position 127 of SEQ ID NO: 317870
ggaccucacugucugaaca

SEQ ID NO: 328742 - RNA, 19 nt, Artificial Sequence
  Description of Artificial Sequence: Synthetic oligonucleotide
  Antisense Strand to SEQ ID NO: 328741
uguucagacagugaggucc

SEQ ID NO: 328743 - RNA, 19 nt, Artificial Sequence
  Description of Artificial Sequence: Synthetic oligonucleotide
  Sense Strand Starting at position 127 of SEQ ID NO: 317980
gcuucuccaucuguuggaa

SEQ ID NO: 328744 - RNA, 19 nt, Artificial Sequence
  Description of Artificial Sequence: Synthetic oligonucleotide
  Antisense Strand to SEQ ID NO: 328743
uuccaacagauggagaagc

SEQ ID NO: 328745 - RNA, 19 nt, Artificial Sequence
  Description of Artificial Sequence: Synthetic oligonucleotide
  Sense Strand Starting at position 127 of SEQ ID NO: 318306
gggagucaaucucuaguga

SEQ ID NO: 328746 - RNA, 19 nt, Artificial Sequence
  Description of Artificial Sequence: Synthetic oligonucleotide
  Antisense Strand to SEQ ID NO: 328745
ucacuagagauugacuccc

SEQ ID NO: 328747 - RNA, 19 nt, Artificial Sequence
  Description of Artificial Sequence: Synthetic oligonucleotide
  Sense Strand Starting at position 127 of SEQ ID NO: 318314
aucucuagugaguagcaga

SEQ ID NO: 328748 - RNA, 19 nt, Artificial Sequence
  Description of Artificial Sequence: Synthetic oligonucleotide
  Antisense Strand to SEQ ID NO: 328747
ucugcuacucacuagagau

SEQ ID NO: 328749 - RNA, 19 nt, Artificial Sequence
  Description of Artificial Sequence: Synthetic oligonucleotide
  Sense Strand Starting at position 127 of SEQ ID NO: 318348
gcaugaauccuaugguuua

SEQ ID NO: 328750 - RNA, 19 nt, Artificial Sequence
  Description of Artificial Sequence: Synthetic oligonucleotide
  Antisense Strand to SEQ ID NO: 328749
uaaaccauaggauucaugc

SEQ ID NO: 328751 - RNA, 19 nt, Artificial Sequence
  Description of Artificial Sequence: Synthetic oligonucleotide
  Sense Strand Starting at position 127 of SEQ ID NO: 318361
gguuuauuucguggaauuc

SEQ ID NO: 328752 - RNA, 19 nt, Artificial Sequence
  Description of Artificial Sequence: Synthetic oligonucleotide
  Antisense Strand to SEQ ID NO: 328751
gaauuccacgaaauaaacc

SEQ ID NO: 328753 - RNA, 19 nt, Artificial Sequence
  Description of Artificial Sequence: Synthetic oligonucleotide
  Sense Strand Starting at position 127 of SEQ ID NO: 318514
caaugacuugcccaagguu

SEQ ID NO: 328754 - RNA, 19 nt, Artificial Sequence
  Description of Artificial Sequence: Synthetic oligonucleotide
  Antisense Strand to SEQ ID NO: 328753
aaccuugggcaagucauug

SEQ ID NO: 328755 - RNA, 19 nt, Artificial Sequence
  Description of Artificial Sequence: Synthetic oligonucleotide
  Sense Strand Starting at position 127 of SEQ ID NO: 318527
aagguucuauguccagaaa

SEQ ID NO: 328756 - RNA, 19 nt, Artificial Sequence
  Description of Artificial Sequence: Synthetic oligonucleotide
  Antisense Strand to SEQ ID NO: 328755
uuucuggacauagaaccuu

SEQ ID NO: 328757 - RNA, 19 nt, Artificial Sequence
  Description of Artificial Sequence: Synthetic oligonucleotide
  Sense Strand Starting at position 127 of SEQ ID NO: 318530
guucuauguccagaaagua

SEQ ID NO: 328758 - RNA, 19 nt, Artificial Sequence
  Description of Artificial Sequence: Synthetic oligonucleotide
  Antisense Strand to SEQ ID NO: 328757
uacuuucuggacauagaac

SEQ ID NO: 328759 - RNA, 19 nt, Artificial Sequence
  Description of Artificial Sequence: Synthetic oligonucleotide
  Sense Strand Starting at position 127 of SEQ ID NO: 318796
auaucaguguuggcuauuu

SEQ ID NO: 328760 - RNA, 19 nt, Artificial Sequence
  Description of Artificial Sequence: Synthetic oligonucleotide
  Antisense Strand to SEQ ID NO: 328759
aaauagccaacacugauau

SEQ ID NO: 328761 - RNA, 19 nt, Artificial Sequence
  Description of Artificial Sequence: Synthetic oligonucleotide
  Sense Strand Starting at position 127 of SEQ ID NO: 318852
gccaguaguguccuuguuu

SEQ ID NO: 328762 - RNA, 19 nt, Artificial Sequence
  Description of Artificial Sequence: Synthetic oligonucleotide
  Antisense Strand to SEQ ID NO: 328761
aaacaaggacacuacuggc

SEQ ID NO: 328763 - RNA, 19 nt, Artificial Sequence
  Description of Artificial Sequence: Synthetic oligonucleotide
  Sense Strand Starting at position 127 of SEQ ID NO: 318882
gcauuaaugcugugaacac

SEQ ID NO: 328764 - RNA, 19 nt, Artificial Sequence
  Description of Artificial Sequence: Synthetic oligonucleotide
  Antisense Strand to SEQ ID NO: 328763
guguucacagcauuaaugc

SEQ ID NO: 328765 - RNA, 19 nt, Artificial Sequence
  Description of Artificial Sequence: Synthetic oligonucleotide
  Sense Strand Starting at position 127 of SEQ ID NO: 318950
gccuccuauacggaugaca

SEQ ID NO: 328766 - RNA, 19 nt, Artificial Sequence
  Description of Artificial Sequence: Synthetic oligonucleotide
  Antisense Strand to SEQ ID NO: 328765
ugucauccguauaggaggc

SEQ ID NO: 328767 - RNA, 19 nt, Artificial Sequence
  Description of Artificial Sequence: Synthetic oligonucleotide
  Sense Strand Starting at position 127 of SEQ ID NO: 318952
cuccuauacggaugacacu

SEQ ID NO: 328768 - RNA, 19 nt, Artificial Sequence
  Description of Artificial Sequence: Synthetic oligonucleotide
  Antisense Strand to SEQ ID NO: 328767
agugucauccguauaggag

SEQ ID NO: 328769 - RNA, 19 nt, Artificial Sequence
  Description of Artificial Sequence: Synthetic oligonucleotide
  Sense Strand Starting at position 127 of SEQ ID NO: 318961
ggaugacacugacuugguu

SEQ ID NO: 328770 - RNA, 19 nt, Artificial Sequence
  Description of Artificial Sequence: Synthetic oligonucleotide
  Antisense Strand to SEQ ID NO: 328769
aaccaagucagugucaucc

SEQ ID NO: 328771 - RNA, 19 nt, Artificial Sequence
  Description of Artificial Sequence: Synthetic oligonucleotide
  Sense Strand Starting at position 127 of SEQ ID NO: 318978
uucugaggaucugcauuau

SEQ ID NO: 328772 - RNA, 19 nt, Artificial Sequence
  Description of Artificial Sequence: Synthetic oligonucleotide
  Antisense Strand to SEQ ID NO: 328771
auaaugcagauccucagaa

SEQ ID NO: 328773 - RNA, 19 nt, Artificial Sequence
  Description of Artificial Sequence: Synthetic oligonucleotide
  Sense Strand Starting at position 127 of SEQ ID NO: 318984
ggaucugcauuauugugaa

SEQ ID NO: 328774 - RNA, 19 nt, Artificial Sequence
  Description of Artificial Sequence: Synthetic oligonucleotide
  Antisense Strand to SEQ ID NO: 328773
uucacaauaaugcagaucc

SEQ ID NO: 328775 - RNA, 19 nt, Artificial Sequence
  Description of Artificial Sequence: Synthetic oligonucleotide
  Sense Strand Starting at position 127 of SEQ ID NO: 318997
ugugaauuccaagauguau

SEQ ID NO: 328776 - RNA, 19 nt, Artificial Sequence
  Description of Artificial Sequence: Synthetic oligonucleotide
  Antisense Strand to SEQ ID NO: 328775
auacaucuuggaauucaca

SEQ ID NO: 328777 - RNA, 19 nt, Artificial Sequence
  Description of Artificial Sequence: Synthetic oligonucleotide
  Sense Strand Starting at position 127 of SEQ ID NO: 319008
agauguauuguccaaggcu

SEQ ID NO: 328778 - RNA, 19 nt, Artificial Sequence
  Description of Artificial Sequence: Synthetic oligonucleotide
  Antisense Strand to SEQ ID NO: 328777
agccuuggacaauacaucu

SEQ ID NO: 328779 - RNA, 19 nt, Artificial Sequence
  Description of Artificial Sequence: Synthetic oligonucleotide
  Sense Strand Starting at position 127 of SEQ ID NO: 319011
uguauuguccaaggcugaa

SEQ ID NO: 328780 - RNA, 19 nt, Artificial Sequence
  Description of Artificial Sequence: Synthetic oligonucleotide
  Antisense Strand to SEQ ID NO: 328779
uucagccuuggacaauaca

SEQ ID NO: 328781 - RNA, 19 nt, Artificial Sequence
  Description of Artificial Sequence: Synthetic oligonucleotide
  Sense Strand Starting at position 127 of SEQ ID NO: 319038
ucaggcuacugauuaaguu

SEQ ID NO: 328782 - RNA, 19 nt, Artificial Sequence
  Description of Artificial Sequence: Synthetic oligonucleotide
  Antisense Strand to SEQ ID NO: 328781
aacuuaaucaguagccuga

SEQ ID NO: 328783 - RNA, 19 nt, Artificial Sequence
  Description of Artificial Sequence: Synthetic oligonucleotide
  Sense Strand Starting at position 127 of SEQ ID NO: 319050
uuaaguugugcacaaaugu

SEQ ID NO: 328784 - RNA, 19 nt, Artificial Sequence
  Description of Artificial Sequence: Synthetic oligonucleotide
  Antisense Strand to SEQ ID NO: 328783
acauuugugcacaacuuaa

SEQ ID NO: 328785 - RNA, 19 nt, Artificial Sequence
  Description of Artificial Sequence: Synthetic oligonucleotide
  Sense Strand Starting at position 127 of SEQ ID NO: 319084
uguuauucucuacagaaug

SEQ ID NO: 328786 - RNA, 19 nt, Artificial Sequence
  Description of Artificial Sequence: Synthetic oligonucleotide
  Antisense Strand to SEQ ID NO: 328785
cauucuguagagaauaaca

SEQ ID NO: 328787 - RNA, 19 nt, Artificial Sequence
  Description of Artificial Sequence: Synthetic oligonucleotide
  Sense Strand Starting at position 128 of SEQ ID NO: 315269
gagccuuagucagcgguga

SEQ ID NO: 328788 - RNA, 19 nt, Artificial Sequence
  Description of Artificial Sequence: Synthetic oligonucleotide
  Antisense Strand to SEQ ID NO: 328787
ucaccgcugacuaaggcuc

SEQ ID NO: 328789 - RNA, 19 nt, Artificial Sequence
  Description of Artificial Sequence: Synthetic oligonucleotide
  Sense Strand Starting at position 128 of SEQ ID NO: 315281
gcggugaggucagagaagu

SEQ ID NO: 328790 - RNA, 19 nt, Artificial Sequence
  Description of Artificial Sequence: Synthetic oligonucleotide
  Antisense Strand to SEQ ID NO: 328789
acuucucugaccucaccgc

SEQ ID NO: 328791 - RNA, 19 nt, Artificial Sequence
  Description of Artificial Sequence: Synthetic oligonucleotide
  Sense Strand Starting at position 128 of SEQ ID NO: 315308
ugggacauuuauuagcaau

SEQ ID NO: 328792 - RNA, 19 nt, Artificial Sequence
  Description of Artificial Sequence: Synthetic oligonucleotide
  Antisense Strand to SEQ ID NO: 328791
auugcuaauaaauguccca

SEQ ID NO: 328793 - RNA, 19 nt, Artificial Sequence
  Description of Artificial Sequence: Synthetic oligonucleotide
  Sense Strand Starting at position 128 of SEQ ID NO: 315354
ggaauaguguuuccugguu

SEQ ID NO: 328794 - RNA, 19 nt, Artificial Sequence
  Description of Artificial Sequence: Synthetic oligonucleotide
  Antisense Strand to SEQ ID NO: 328793
aaccaggaaacacuauucc

SEQ ID NO: 328795 - RNA, 19 nt, Artificial Sequence
  Description of Artificial Sequence: Synthetic oligonucleotide
  Sense Strand Starting at position 128 of SEQ ID NO: 315741
uuuguuccucccgaaauac

SEQ ID NO: 328796 - RNA, 19 nt, Artificial Sequence
  Description of Artificial Sequence: Synthetic oligonucleotide
  Antisense Strand to SEQ ID NO: 328795
guauuucgggaggaacaaa

SEQ ID NO: 328797 - RNA, 19 nt, Artificial Sequence
  Description of Artificial Sequence: Synthetic oligonucleotide
  Sense Strand Starting at position 128 of SEQ ID NO: 315806
gagggcuacugucaagaaa

SEQ ID NO: 328798 - RNA, 19 nt, Artificial Sequence
  Description of Artificial Sequence: Synthetic oligonucleotide
  Antisense Strand to SEQ ID NO: 328797
uuucuugacaguagcccuc

SEQ ID NO: 328799 - RNA, 19 nt, Artificial Sequence
  Description of Artificial Sequence: Synthetic oligonucleotide
  Sense Strand Starting at position 128 of SEQ ID NO: 315927
guguguuucuuggcguguu

SEQ ID NO: 328800 - RNA, 19 nt, Artificial Sequence
  Description of Artificial Sequence: Synthetic oligonucleotide
  Antisense Strand to SEQ ID NO: 328799
aacacgccaagaaacacac

SEQ ID NO: 328801 - RNA, 19 nt, Artificial Sequence
  Description of Artificial Sequence: Synthetic oligonucleotide
  Sense Strand Starting at position 128 of SEQ ID NO: 315937
uggcguguuccuuuaagug

SEQ ID NO: 328802 - RNA, 19 nt, Artificial Sequence
  Description of Artificial Sequence: Synthetic oligonucleotide
  Antisense Strand to SEQ ID NO: 328801
cacuuaaaggaacacgcca

SEQ ID NO: 328803 - RNA, 19 nt, Artificial Sequence
  Description of Artificial Sequence: Synthetic oligonucleotide
  Sense Strand Starting at position 128 of SEQ ID NO: 315941
guguuccuuuaagugagaa

SEQ ID NO: 328804 - RNA, 19 nt, Artificial Sequence
  Description of Artificial Sequence: Synthetic oligonucleotide
  Antisense Strand to SEQ ID NO: 328803
uucucacuuaaaggaacac

SEQ ID NO: 328805 - RNA, 19 nt, Artificial Sequence
  Description of Artificial Sequence: Synthetic oligonucleotide
  Sense Strand Starting at position 128 of SEQ ID NO: 316062
uugcaugagucagccagaa

SEQ ID NO: 328806 - RNA, 19 nt, Artificial Sequence
  Description of Artificial Sequence: Synthetic oligonucleotide
  Antisense Strand to SEQ ID NO: 328805
uucuggcugacucaugcaa

SEQ ID NO: 328807 - RNA, 19 nt, Artificial Sequence
  Description of Artificial Sequence: Synthetic oligonucleotide
  Sense Strand Starting at position 128 of SEQ ID NO: 316230
ucucacuuacuguaaguuu

SEQ ID NO: 328808 - RNA, 19 nt, Artificial Sequence
  Description of Artificial Sequence: Synthetic oligonucleotide
  Antisense Strand to SEQ ID NO: 328807
aaacuuacaguaagugaga

SEQ ID NO: 328809 - RNA, 19 nt, Artificial Sequence
  Description of Artificial Sequence: Synthetic oligonucleotide
  Sense Strand Starting at position 128 of SEQ ID NO: 316335
auuuguaggucuccugcaa

SEQ ID NO: 328810 - RNA, 19 nt, Artificial Sequence
  Description of Artificial Sequence: Synthetic oligonucleotide
  Antisense Strand to SEQ ID NO: 328809
uugcaggagaccuacaaau

SEQ ID NO: 328811 - RNA, 19 nt, Artificial Sequence
  Description of Artificial Sequence: Synthetic oligonucleotide
  Sense Strand Starting at position 128 of SEQ ID NO: 316737
ggcguucugccgggcaaga

SEQ ID NO: 328812 - RNA, 19 nt, Artificial Sequence
  Description of Artificial Sequence: Synthetic oligonucleotide
  Antisense Strand to SEQ ID NO: 328811
ucuugcccggcagaacgcc

SEQ ID NO: 328813 - RNA, 19 nt, Artificial Sequence
  Description of Artificial Sequence: Synthetic oligonucleotide
  Sense Strand Starting at position 128 of SEQ ID NO: 316738
gcguucugccgggcaagaa

SEQ ID NO: 328814 - RNA, 19 nt, Artificial Sequence
  Description of Artificial Sequence: Synthetic oligonucleotide
  Antisense Strand to SEQ ID NO: 328813
uucuugcccggcagaacgc

SEQ ID NO: 328815 - RNA, 19 nt, Artificial Sequence
  Description of Artificial Sequence: Synthetic oligonucleotide
  Sense Strand Starting at position 128 of SEQ ID NO: 317287
gggcaagccgaggaguaau

SEQ ID NO: 328816 - RNA, 19 nt, Artificial Sequence
  Description of Artificial Sequence: Synthetic oligonucleotide
  Antisense Strand to SEQ ID NO: 328815
auuacuccucggcuugccc

SEQ ID NO: 328817 - RNA, 19 nt, Artificial Sequence
  Description of Artificial Sequence: Synthetic oligonucleotide
  Sense Strand Starting at position 128 of SEQ ID NO: 317347
guuggagcuacguguucua

SEQ ID NO: 328818 - RNA, 19 nt, Artificial Sequence
  Description of Artificial Sequence: Synthetic oligonucleotide
  Antisense Strand to SEQ ID NO: 328817
uagaacacguagcuccaac

SEQ ID NO: 328819 - RNA, 19 nt, Artificial Sequence
  Description of Artificial Sequence: Synthetic oligonucleotide
  Sense Strand Starting at position 128 of SEQ ID NO: 317357
cguguucuacccugugacu

SEQ ID NO: 328820 - RNA, 19 nt, Artificial Sequence
  Description of Artificial Sequence: Synthetic oligonucleotide
  Antisense Strand to SEQ ID NO: 328819
agucacaggguagaacacg

SEQ ID NO: 328821 - RNA, 19 nt, Artificial Sequence
  Description of Artificial Sequence: Synthetic oligonucleotide
  Sense Strand Starting at position 128 of SEQ ID NO: 317441
acaugagucucacguguug

SEQ ID NO: 328822 - RNA, 19 nt, Artificial Sequence
  Description of Artificial Sequence: Synthetic oligonucleotide
  Antisense Strand to SEQ ID NO: 328821
caacacgugagacucaugu

SEQ ID NO: 328823 - RNA, 19 nt, Artificial Sequence
  Description of Artificial Sequence: Synthetic oligonucleotide
  Sense Strand Starting at position 128 of SEQ ID NO: 317443
augagucucacguguugga

SEQ ID NO: 328824 - RNA, 19 nt, Artificial Sequence
  Description of Artificial Sequence: Synthetic oligonucleotide
  Antisense Strand to SEQ ID NO: 328823
uccaacacgugagacucau

SEQ ID NO: 328825 - RNA, 19 nt, Artificial Sequence
  Description of Artificial Sequence: Synthetic oligonucleotide
  Sense Strand Starting at position 128 of SEQ ID NO: 317446
agucucacguguuggacaa

SEQ ID NO: 328826 - RNA, 19 nt, Artificial Sequence
  Description of Artificial Sequence: Synthetic oligonucleotide
  Antisense Strand to SEQ ID NO: 328825
uuguccaacacgugagacu

SEQ ID NO: 328827 - RNA, 19 nt, Artificial Sequence
  Description of Artificial Sequence: Synthetic oligonucleotide
  Sense Strand Starting at position 128 of SEQ ID NO: 318157
cagucaagcgcagaaagau

SEQ ID NO: 328828 - RNA, 19 nt, Artificial Sequence
  Description of Artificial Sequence: Synthetic oligonucleotide
  Antisense Strand to SEQ ID NO: 328827
aucuuucugcgcuugacug

SEQ ID NO: 328829 - RNA, 19 nt, Artificial Sequence
  Description of Artificial Sequence: Synthetic oligonucleotide
  Sense Strand Starting at position 128 of SEQ ID NO: 318502
ccgccuguuacagggaaau

SEQ ID NO: 328830 - RNA, 19 nt, Artificial Sequence
  Description of Artificial Sequence: Synthetic oligonucleotide
  Antisense Strand to SEQ ID NO: 328829
auuucccuguaacaggcgg

SEQ ID NO: 328831 - RNA, 19 nt, Artificial Sequence
  Description of Artificial Sequence: Synthetic oligonucleotide
  Sense Strand Starting at position 128 of SEQ ID NO: 318504
gccuguuacagggaaaucu

SEQ ID NO: 328832 - RNA, 19 nt, Artificial Sequence
  Description of Artificial Sequence: Synthetic oligonucleotide
  Antisense Strand to SEQ ID NO: 328831
agauuucccuguaacaggc

SEQ ID NO: 328833 - RNA, 19 nt, Artificial Sequence
  Description of Artificial Sequence: Synthetic oligonucleotide
  Sense Strand Starting at position 128 of SEQ ID NO: 318514
gggaaaucuuagcaaucau

SEQ ID NO: 328834 - RNA, 19 nt, Artificial Sequence
  Description of Artificial Sequence: Synthetic oligonucleotide
  Antisense Strand to SEQ ID NO: 328833
augauugcuaagauuuccc

SEQ ID NO: 328835 - RNA, 19 nt, Artificial Sequence
  Description of Artificial Sequence: Synthetic oligonucleotide
  Sense Strand Starting at position 128 of SEQ ID NO: 318576
gcugcacuaguugaugaau

SEQ ID NO: 328836 - RNA, 19 nt, Artificial Sequence
  Description of Artificial Sequence: Synthetic oligonucleotide
  Antisense Strand to SEQ ID NO: 328835
auucaucaacuagugcagc

SEQ ID NO: 328837 - RNA, 19 nt, Artificial Sequence
  Description of Artificial Sequence: Synthetic oligonucleotide
  Sense Strand Starting at position 128 of SEQ ID NO: 318599
cacggauccugcccuugaa

SEQ ID NO: 328838 - RNA, 19 nt, Artificial Sequence
  Description of Artificial Sequence: Synthetic oligonucleotide
  Antisense Strand to SEQ ID NO: 328837
uucaagggcaggauccgug

SEQ ID NO: 328839 - RNA, 19 nt, Artificial Sequence
  Description of Artificial Sequence: Synthetic oligonucleotide
  Sense Strand Starting at position 128 of SEQ ID NO: 318602
ggauccugcccuugaacuu

SEQ ID NO: 328840 - RNA, 19 nt, Artificial Sequence
  Description of Artificial Sequence: Synthetic oligonucleotide
  Antisense Strand to SEQ ID NO: 328839
aaguucaagggcaggaucc

SEQ ID NO: 328841 - RNA, 19 nt, Artificial Sequence
  Description of Artificial Sequence: Synthetic oligonucleotide
  Sense Strand Starting at position 128 of SEQ ID NO: 318638
agguuaaauugagcaauaa

SEQ ID NO: 328842 - RNA, 19 nt, Artificial Sequence
  Description of Artificial Sequence: Synthetic oligonucleotide
  Antisense Strand to SEQ ID NO: 328841
uuauugcucaauuuaaccu

SEQ ID NO: 328843 - RNA, 19 nt, Artificial Sequence
  Description of Artificial Sequence: Synthetic oligonucleotide
  Sense Strand Starting at position 128 of SEQ ID NO: 318716
augagaacuuguguugcuu

SEQ ID NO: 328844 - RNA, 19 nt, Artificial Sequence
  Description of Artificial Sequence: Synthetic oligonucleotide
  Antisense Strand to SEQ ID NO: 328843
aagcaacacaaguucucau

SEQ ID NO: 328845 - RNA, 19 nt, Artificial Sequence
  Description of Artificial Sequence: Synthetic oligonucleotide
  Sense Strand Starting at position 128 of SEQ ID NO: 318763
cgagaugccuagguagaga

SEQ ID NO: 328846 - RNA, 19 nt, Artificial Sequence
  Description of Artificial Sequence: Synthetic oligonucleotide
  Antisense Strand to SEQ ID NO: 328845
ucucuaccuaggcaucucg

SEQ ID NO: 328847 - RNA, 19 nt, Artificial Sequence
  Description of Artificial Sequence: Synthetic oligonucleotide
  Sense Strand Starting at position 128 of SEQ ID NO: 318978
cgcugauacagucagagga

SEQ ID NO: 328848 - RNA, 19 nt, Artificial Sequence
  Description of Artificial Sequence: Synthetic oligonucleotide
  Antisense Strand to SEQ ID NO: 328847
uccucugacuguaucagcg

SEQ ID NO: 328849 - RNA, 19 nt, Artificial Sequence
  Description of Artificial Sequence: Synthetic oligonucleotide
  Sense Strand Starting at position 128 of SEQ ID NO: 319004
aguggaaacucaugacuaa

SEQ ID NO: 328850 - RNA, 19 nt, Artificial Sequence
  Description of Artificial Sequence: Synthetic oligonucleotide
  Antisense Strand to SEQ ID NO: 328849
uuagucaugaguuuccacu

SEQ ID NO: 328851 - RNA, 19 nt, Artificial Sequence
  Description of Artificial Sequence: Synthetic oligonucleotide
  Sense Strand Starting at position 128 of SEQ ID NO: 319081
ggaguugagagaugacugu

SEQ ID NO: 328852 - RNA, 19 nt, Artificial Sequence
  Description of Artificial Sequence: Synthetic oligonucleotide
  Antisense Strand to SEQ ID NO: 328851
acagucaucucucaacucc

SEQ ID NO: 328853 - RNA, 19 nt, Artificial Sequence
  Description of Artificial Sequence: Synthetic oligonucleotide
  Sense Strand Starting at position 129 of SEQ ID NO: 315254
aguggcuuugccgaaauuu

SEQ ID NO: 328854 - RNA, 19 nt, Artificial Sequence
  Description of Artificial Sequence: Synthetic oligonucleotide
  Antisense Strand to SEQ ID NO: 328853
aaauuucggcaaagccacu

SEQ ID NO: 328855 - RNA, 19 nt, Artificial Sequence
  Description of Artificial Sequence: Synthetic oligonucleotide
  Sense Strand Starting at position 129 of SEQ ID NO: 315416
gaaaccauguuguugaaga

SEQ ID NO: 328856 - RNA, 19 nt, Artificial Sequence
  Description of Artificial Sequence: Synthetic oligonucleotide
  Antisense Strand to SEQ ID NO: 328855
ucuucaacaacaugguuuc

SEQ ID NO: 328857 - RNA, 19 nt, Artificial Sequence
  Description of Artificial Sequence: Synthetic oligonucleotide
  Sense Strand Starting at position 129 of SEQ ID NO: 315535
agaguuggcucaccaauua

SEQ ID NO: 328858 - RNA, 19 nt, Artificial Sequence
  Description of Artificial Sequence: Synthetic oligonucleotide
  Antisense Strand to SEQ ID NO: 328857
uaauuggugagccaacucu

SEQ ID NO: 328859 - RNA, 19 nt, Artificial Sequence
  Description of Artificial Sequence: Synthetic oligonucleotide
  Sense Strand Starting at position 129 of SEQ ID NO: 315682
acaacugcucccuagcgaa

SEQ ID NO: 328860 - RNA, 19 nt, Artificial Sequence
  Description of Artificial Sequence: Synthetic oligonucleotide
  Antisense Strand to SEQ ID NO: 328859
uucgcuagggagcaguugu

SEQ ID NO: 328861 - RNA, 19 nt, Artificial Sequence
  Description of Artificial Sequence: Synthetic oligonucleotide
  Sense Strand Starting at position 129 of SEQ ID NO: 315695
agcgaaugucucuugcagu

SEQ ID NO: 328862 - RNA, 19 nt, Artificial Sequence
  Description of Artificial Sequence: Synthetic oligonucleotide
  Antisense Strand to SEQ ID NO: 328861
acugcaagagacauucgcu

SEQ ID NO: 328863 - RNA, 19 nt, Artificial Sequence
  Description of Artificial Sequence: Synthetic oligonucleotide
  Sense Strand Starting at position 129 of SEQ ID NO: 315702
gucucuugcagugaagcau

SEQ ID NO: 328864 - RNA, 19 nt, Artificial Sequence
  Description of Artificial Sequence: Synthetic oligonucleotide
  Antisense Strand to SEQ ID NO: 328863
augcuucacugcaagagac

SEQ ID NO: 328865 - RNA, 19 nt, Artificial Sequence
  Description of Artificial Sequence: Synthetic oligonucleotide
  Sense Strand Starting at position 129 of SEQ ID NO: 315713
ugaagcauuucugaaguau

SEQ ID NO: 328866 - RNA, 19 nt, Artificial Sequence
  Description of Artificial Sequence: Synthetic oligonucleotide
  Antisense Strand to SEQ ID NO: 328865
auacuucagaaaugcuuca

SEQ ID NO: 328867 - RNA, 19 nt, Artificial Sequence
  Description of Artificial Sequence: Synthetic oligonucleotide
  Sense Strand Starting at position 129 of SEQ ID NO: 315763
ggucucaauccucaggcuu

SEQ ID NO: 328868 - RNA, 19 nt, Artificial Sequence
  Description of Artificial Sequence: Synthetic oligonucleotide
  Antisense Strand to SEQ ID NO: 328867
aagccugaggauugagacc

SEQ ID NO: 328869 - RNA, 19 nt, Artificial Sequence
  Description of Artificial Sequence: Synthetic oligonucleotide
  Sense Strand Starting at position 129 of SEQ ID NO: 315849
aggacagugucagcaaagu

SEQ ID NO: 328870 - RNA, 19 nt, Artificial Sequence
  Description of Artificial Sequence: Synthetic oligonucleotide
  Antisense Strand to SEQ ID NO: 328869
acuuugcugacacuguccu

SEQ ID NO: 328871 - RNA, 19 nt, Artificial Sequence
  Description of Artificial Sequence: Synthetic oligonucleotide
  Sense Strand Starting at position 129 of SEQ ID NO: 316014
agaagcuucugggucucaa

SEQ ID NO: 328872 - RNA, 19 nt, Artificial Sequence
  Description of Artificial Sequence: Synthetic oligonucleotide
  Antisense Strand to SEQ ID NO: 328871
uugagacccagaagcuucu

SEQ ID NO: 328873 - RNA, 19 nt, Artificial Sequence
  Description of Artificial Sequence: Synthetic oligonucleotide
  Sense Strand Starting at position 129 of SEQ ID NO: 316025
ggucucaauuaugagacca

SEQ ID NO: 328874 - RNA, 19 nt, Artificial Sequence
  Description of Artificial Sequence: Synthetic oligonucleotide
  Antisense Strand to SEQ ID NO: 328873
uggucucauaauugagacc

SEQ ID NO: 328875 - RNA, 19 nt, Artificial Sequence
  Description of Artificial Sequence: Synthetic oligonucleotide
  Sense Strand Starting at position 129 of SEQ ID NO: 316068
ucagaaauguuucugggaa

SEQ ID NO: 328876 - RNA, 19 nt, Artificial Sequence
  Description of Artificial Sequence: Synthetic oligonucleotide
  Antisense Strand to SEQ ID NO: 328875
uucccagaaacauuucuga

SEQ ID NO: 328877 - RNA, 19 nt, Artificial Sequence
  Description of Artificial Sequence: Synthetic oligonucleotide
  Sense Strand Starting at position 129 of SEQ ID NO: 316072
aaauguuucugggaaaccu

SEQ ID NO: 328878 - RNA, 19 nt, Artificial Sequence
  Description of Artificial Sequence: Synthetic oligonucleotide
  Antisense Strand to SEQ ID NO: 328877
agguuucccagaaacauuu

SEQ ID NO: 328879 - RNA, 19 nt, Artificial Sequence
  Description of Artificial Sequence: Synthetic oligonucleotide
  Sense Strand Starting at position 129 of SEQ ID NO: 316147
acaggucacccagauguau

SEQ ID NO: 328880 - RNA, 19 nt, Artificial Sequence
  Description of Artificial Sequence: Synthetic oligonucleotide
  Antisense Strand to SEQ ID NO: 328879
auacaucugggugaccugu

SEQ ID NO: 328881 - RNA, 19 nt, Artificial Sequence
  Description of Artificial Sequence: Synthetic oligonucleotide
  Sense Strand Starting at position 129 of SEQ ID NO: 316188
agcccaagacugugguuua

SEQ ID NO: 328882 - RNA, 19 nt, Artificial Sequence
  Description of Artificial Sequence: Synthetic oligonucleotide
  Antisense Strand to SEQ ID NO: 328881
uaaaccacagucuugggcu

SEQ ID NO: 328883 - RNA, 19 nt, Artificial Sequence
  Description of Artificial Sequence: Synthetic oligonucleotide
  Sense Strand Starting at position 129 of SEQ ID NO: 316191
ccaagacugugguuuaaua

SEQ ID NO: 328884 - RNA, 19 nt, Artificial Sequence
  Description of Artificial Sequence: Synthetic oligonucleotide
  Antisense Strand to SEQ ID NO: 328883
uauuaaaccacagucuugg

SEQ ID NO: 328885 - RNA, 19 nt, Artificial Sequence
  Description of Artificial Sequence: Synthetic oligonucleotide
  Sense Strand Starting at position 129 of SEQ ID NO: 316214
ccaugcugcccuuaagaaa

SEQ ID NO: 328886 - RNA, 19 nt, Artificial Sequence
  Description of Artificial Sequence: Synthetic oligonucleotide
  Antisense Strand to SEQ ID NO: 328885
uuucuuaagggcagcaugg

SEQ ID NO: 328887 - RNA, 19 nt, Artificial Sequence
  Description of Artificial Sequence: Synthetic oligonucleotide
  Sense Strand Starting at position 129 of SEQ ID NO: 316251
gcuguaaccaaagggauga

SEQ ID NO: 328888 - RNA, 19 nt, Artificial Sequence
  Description of Artificial Sequence: Synthetic oligonucleotide
  Antisense Strand to SEQ ID NO: 328887
ucaucccuuugguuacagc

SEQ ID NO: 328889 - RNA, 19 nt, Artificial Sequence
  Description of Artificial Sequence: Synthetic oligonucleotide
  Sense Strand Starting at position 129 of SEQ ID NO: 316300
uuaagacccagucguggaa

SEQ ID NO: 328890 - RNA, 19 nt, Artificial Sequence
  Description of Artificial Sequence: Synthetic oligonucleotide
  Antisense Strand to SEQ ID NO: 328889
uuccacgacugggucuuaa

SEQ ID NO: 328891 - RNA, 19 nt, Artificial Sequence
  Description of Artificial Sequence: Synthetic oligonucleotide
  Sense Strand Starting at position 129 of SEQ ID NO: 316303
agacccagucguggaauaa

SEQ ID NO: 328892 - RNA, 19 nt, Artificial Sequence
  Description of Artificial Sequence: Synthetic oligonucleotide
  Antisense Strand to SEQ ID NO: 328891
uuauuccacgacugggucu

SEQ ID NO: 328893 - RNA, 19 nt, Artificial Sequence
  Description of Artificial Sequence: Synthetic oligonucleotide
  Sense Strand Starting at position 129 of SEQ ID NO: 316304
gacccagucguggaauaaa

SEQ ID NO: 328894 - RNA, 19 nt, Artificial Sequence
  Description of Artificial Sequence: Synthetic oligonucleotide
  Antisense Strand to SEQ ID NO: 328893
uuuauuccacgacuggguc

SEQ ID NO: 328895 - RNA, 19 nt, Artificial Sequence
  Description of Artificial Sequence: Synthetic oligonucleotide
  Sense Strand Starting at position 129 of SEQ ID NO: 316307
ccagucguggaauaaauca

SEQ ID NO: 328896 - RNA, 19 nt, Artificial Sequence
  Description of Artificial Sequence: Synthetic oligonucleotide
  Antisense Strand to SEQ ID NO: 328895
ugauuuauuccacgacugg

SEQ ID NO: 328897 - RNA, 19 nt, Artificial Sequence
  Description of Artificial Sequence: Synthetic oligonucleotide
  Sense Strand Starting at position 129 of SEQ ID NO: 316314
uggaauaaaucagaaaugu

SEQ ID NO: 328898 - RNA, 19 nt, Artificial Sequence
  Description of Artificial Sequence: Synthetic oligonucleotide
  Antisense Strand to SEQ ID NO: 328897
acauuucugauuuauucca

SEQ ID NO: 328899 - RNA, 19 nt, Artificial Sequence
  Description of Artificial Sequence: Synthetic oligonucleotide
  Sense Strand Starting at position 129 of SEQ ID NO: 316323
ucagaaaugucugcacacu

SEQ ID NO: 328900 - RNA, 19 nt, Artificial Sequence
  Description of Artificial Sequence: Synthetic oligonucleotide
  Antisense Strand to SEQ ID NO: 328899
agugugcagacauuucuga

SEQ ID NO: 328901 - RNA, 19 nt, Artificial Sequence
  Description of Artificial Sequence: Synthetic oligonucleotide
  Sense Strand Starting at position 129 of SEQ ID NO: 316324
cagaaaugucugcacacug

SEQ ID NO: 328902 - RNA, 19 nt, Artificial Sequence
  Description of Artificial Sequence: Synthetic oligonucleotide
  Antisense Strand to SEQ ID NO: 328901
cagugugcagacauuucug

SEQ ID NO: 328903 - RNA, 19 nt, Artificial Sequence
  Description of Artificial Sequence: Synthetic oligonucleotide
  Sense Strand Starting at position 129 of SEQ ID NO: 316379
uaccgaguucuggacaaca

SEQ ID NO: 328904 - RNA, 19 nt, Artificial Sequence
  Description of Artificial Sequence: Synthetic oligonucleotide
  Antisense Strand to SEQ ID NO: 328903
uguuguccagaacucggua

SEQ ID NO: 328905 - RNA, 19 nt, Artificial Sequence
  Description of Artificial Sequence: Synthetic oligonucleotide
  Sense Strand Starting at position 129 of SEQ ID NO: 316493
gagguaacucugggucaaa

SEQ ID NO: 328906 - RNA, 19 nt, Artificial Sequence
  Description of Artificial Sequence: Synthetic oligonucleotide
  Antisense Strand to SEQ ID NO: 328905
uuugacccagaguuaccuc

SEQ ID NO: 328907 - RNA, 19 nt, Artificial Sequence
  Description of Artificial Sequence: Synthetic oligonucleotide
  Sense Strand Starting at position 129 of SEQ ID NO: 316603
cuggugugugguuucggua

SEQ ID NO: 328908 - RNA, 19 nt, Artificial Sequence
  Description of Artificial Sequence: Synthetic oligonucleotide
  Antisense Strand to SEQ ID NO: 328907
uaccgaaaccacacaccag

SEQ ID NO: 328909 - RNA, 19 nt, Artificial Sequence
  Description of Artificial Sequence: Synthetic oligonucleotide
  Sense Strand Starting at position 129 of SEQ ID NO: 316604
uggugugugguuucgguau

SEQ ID NO: 328910 - RNA, 19 nt, Artificial Sequence
  Description of Artificial Sequence: Synthetic oligonucleotide
  Antisense Strand to SEQ ID NO: 328909
auaccgaaaccacacacca

SEQ ID NO: 328911 - RNA, 19 nt, Artificial Sequence
  Description of Artificial Sequence: Synthetic oligonucleotide
  Sense Strand Starting at position 129 of SEQ ID NO: 316617
cgguauucuuagcucuacu

SEQ ID NO: 328912 - RNA, 19 nt, Artificial Sequence
  Description of Artificial Sequence: Synthetic oligonucleotide
  Antisense Strand to SEQ ID NO: 328911
aguagagcuaagaauaccg

SEQ ID NO: 328913 - RNA, 19 nt, Artificial Sequence
  Description of Artificial Sequence: Synthetic oligonucleotide
  Sense Strand Starting at position 129 of SEQ ID NO: 317237
gagugacucuacgcauuug

SEQ ID NO: 328914 - RNA, 19 nt, Artificial Sequence
  Description of Artificial Sequence: Synthetic oligonucleotide
  Antisense Strand to SEQ ID NO: 328913
caaaugcguagagucacuc

SEQ ID NO: 328915 - RNA, 19 nt, Artificial Sequence
  Description of Artificial Sequence: Synthetic oligonucleotide
  Sense Strand Starting at position 129 of SEQ ID NO: 318142
ggucccuccauauggaaga

SEQ ID NO: 328916 - RNA, 19 nt, Artificial Sequence
  Description of Artificial Sequence: Synthetic oligonucleotide
  Antisense Strand to SEQ ID NO: 328915
ucuuccauauggagggacc

SEQ ID NO: 328917 - RNA, 19 nt, Artificial Sequence
  Description of Artificial Sequence: Synthetic oligonucleotide
  Sense Strand Starting at position 129 of SEQ ID NO: 318541
cgccuagucucuuccaaga

SEQ ID NO: 328918 - RNA, 19 nt, Artificial Sequence
  Description of Artificial Sequence: Synthetic oligonucleotide
  Antisense Strand to SEQ ID NO: 328917
ucuuggaagagacuaggcg

SEQ ID NO: 328919 - RNA, 19 nt, Artificial Sequence
  Description of Artificial Sequence: Synthetic oligonucleotide
  Sense Strand Starting at position 129 of SEQ ID NO: 318602
gacaaacuguuggauaaau

SEQ ID NO: 328920 - RNA, 19 nt, Artificial Sequence
  Description of Artificial Sequence: Synthetic oligonucleotide
  Antisense Strand to SEQ ID NO: 328919
auuuauccaacaguuuguc

SEQ ID NO: 328921 - RNA, 19 nt, Artificial Sequence
  Description of Artificial Sequence: Synthetic oligonucleotide
  Sense Strand Starting at position 129 of SEQ ID NO: 318975
cuggaaggcuugcuaaauc

SEQ ID NO: 328922 - RNA, 19 nt, Artificial Sequence
  Description of Artificial Sequence: Synthetic oligonucleotide
  Antisense Strand to SEQ ID NO: 328921
gauuuagcaagccuuccag

SEQ ID NO: 328923 - RNA, 19 nt, Artificial Sequence
  Description of Artificial Sequence: Synthetic oligonucleotide
  Sense Strand Starting at position 129 of SEQ ID NO: 319030
guagguggaccugggaauu

SEQ ID NO: 328924 - RNA, 19 nt, Artificial Sequence
  Description of Artificial Sequence: Synthetic oligonucleotide
  Antisense Strand to SEQ ID NO: 328923
aauucccagguccaccuac

SEQ ID NO: 328925 - RNA, 19 nt, Artificial Sequence
  Description of Artificial Sequence: Synthetic oligonucleotide
  Sense Strand Starting at position 129 of SEQ ID NO: 319140
uguugaguugguggcaaau

SEQ ID NO: 328926 - RNA, 19 nt, Artificial Sequence
  Description of Artificial Sequence: Synthetic oligonucleotide
  Antisense Strand to SEQ ID NO: 328925
auuugccaccaacucaaca

SEQ ID NO: 328927 - RNA, 19 nt, Artificial Sequence
  Description of Artificial Sequence: Synthetic oligonucleotide
  Sense Strand Starting at position 129 of SEQ ID NO: 319191
acagguugugagcggucau

SEQ ID NO: 328928 - RNA, 19 nt, Artificial Sequence
  Description of Artificial Sequence: Synthetic oligonucleotide
  Antisense Strand to SEQ ID NO: 328927
augaccgcucacaaccugu

SEQ ID NO: 328929 - RNA, 19 nt, Artificial Sequence
  Description of Artificial Sequence: Synthetic oligonucleotide
  Sense Strand Starting at position 129 of SEQ ID NO: 319201
agcggucauccauuccgua

SEQ ID NO: 328930 - RNA, 19 nt, Artificial Sequence
  Description of Artificial Sequence: Synthetic oligonucleotide
  Antisense Strand to SEQ ID NO: 328929
uacggaauggaugaccgcu

SEQ ID NO: 328931 - RNA, 19 nt, Artificial Sequence
  Description of Artificial Sequence: Synthetic oligonucleotide
  Sense Strand Starting at position 129 of SEQ ID NO: 319202
gcggucauccauuccguau

SEQ ID NO: 328932 - RNA, 19 nt, Artificial Sequence
  Description of Artificial Sequence: Synthetic oligonucleotide
  Antisense Strand to SEQ ID NO: 328931
auacggaauggaugaccgc

SEQ ID NO: 328933 - RNA, 19 nt, Artificial Sequence
  Description of Artificial Sequence: Synthetic oligonucleotide
  Sense Strand Starting at position 130 of SEQ ID NO: 315268
uuaagacccagucguggaa

SEQ ID NO: 328934 - RNA, 19 nt, Artificial Sequence
  Description of Artificial Sequence: Synthetic oligonucleotide
  Antisense Strand to SEQ ID NO: 328933
uuccacgacugggucuuaa

SEQ ID NO: 328935 - RNA, 19 nt, Artificial Sequence
  Description of Artificial Sequence: Synthetic oligonucleotide
  Sense Strand Starting at position 130 of SEQ ID NO: 315270
aagacccagucguggaaua

SEQ ID NO: 328936 - RNA, 19 nt, Artificial Sequence
  Description of Artificial Sequence: Synthetic oligonucleotide
  Antisense Strand to SEQ ID NO: 328935
uauuccacgacugggucuu

SEQ ID NO: 328937 - RNA, 19 nt, Artificial Sequence
  Description of Artificial Sequence: Synthetic oligonucleotide
  Sense Strand Starting at position 130 of SEQ ID NO: 315271
agacccagucguggaauaa

SEQ ID NO: 328938 - RNA, 19 nt, Artificial Sequence
  Description of Artificial Sequence: Synthetic oligonucleotide
  Antisense Strand to SEQ ID NO: 328937
uuauuccacgacugggucu

SEQ ID NO: 328939 - RNA, 19 nt, Artificial Sequence
  Description of Artificial Sequence: Synthetic oligonucleotide
  Sense Strand Starting at position 130 of SEQ ID NO: 315272
gacccagucguggaauaaa

SEQ ID NO: 328940 - RNA, 19 nt, Artificial Sequence
  Description of Artificial Sequence: Synthetic oligonucleotide
  Antisense Strand to SEQ ID NO: 328939
uuuauuccacgacuggguc

SEQ ID NO: 328941 - RNA, 19 nt, Artificial Sequence
  Description of Artificial Sequence: Synthetic oligonucleotide
  Sense Strand Starting at position 130 of SEQ ID NO: 315275
ccagucguggaauaaauca

SEQ ID NO: 328942 - RNA, 19 nt, Artificial Sequence
  Description of Artificial Sequence: Synthetic oligonucleotide
  Antisense Strand to SEQ ID NO: 328941
ugauuuauuccacgacugg

SEQ ID NO: 328943 - RNA, 19 nt, Artificial Sequence
  Description of Artificial Sequence: Synthetic oligonucleotide
  Sense Strand Starting at position 130 of SEQ ID NO: 315282
uggaauaaaucagaaaugu

SEQ ID NO: 328944 - RNA, 19 nt, Artificial Sequence
  Description of Artificial Sequence: Synthetic oligonucleotide
  Antisense Strand to SEQ ID NO: 328943
acauuucugauuuauucca

SEQ ID NO: 328945 - RNA, 19 nt, Artificial Sequence
  Description of Artificial Sequence: Synthetic oligonucleotide
  Sense Strand Starting at position 130 of SEQ ID NO: 315291
ucagaaaugucugcacacu

SEQ ID NO: 328946 - RNA, 19 nt, Artificial Sequence
  Description of Artificial Sequence: Synthetic oligonucleotide
  Antisense Strand to SEQ ID NO: 328945
agugugcagacauuucuga

SEQ ID NO: 328947 - RNA, 19 nt, Artificial Sequence
  Description of Artificial Sequence: Synthetic oligonucleotide
  Sense Strand Starting at position 130 of SEQ ID NO: 315292
cagaaaugucugcacacug

SEQ ID NO: 328948 - RNA, 19 nt, Artificial Sequence
  Description of Artificial Sequence: Synthetic oligonucleotide
  Antisense Strand to SEQ ID NO: 328947
cagugugcagacauuucug

SEQ ID NO: 328949 - RNA, 19 nt, Artificial Sequence
  Description of Artificial Sequence: Synthetic oligonucleotide
  Sense Strand Starting at position 130 of SEQ ID NO: 315347
uaccgaguucuggacaaca

SEQ ID NO: 328950 - RNA, 19 nt, Artificial Sequence
  Description of Artificial Sequence: Synthetic oligonucleotide
  Antisense Strand to SEQ ID NO: 328949
uguuguccagaacucggua

SEQ ID NO: 328951 - RNA, 19 nt, Artificial Sequence
  Description of Artificial Sequence: Synthetic oligonucleotide
  Sense Strand Starting at position 130 of SEQ ID NO: 315460
agagguaacucugggucaa

SEQ ID NO: 328952 - RNA, 19 nt, Artificial Sequence
  Description of Artificial Sequence: Synthetic oligonucleotide
  Antisense Strand to SEQ ID NO: 328951
uugacccagaguuaccucu

SEQ ID NO: 328953 - RNA, 19 nt, Artificial Sequence
  Description of Artificial Sequence: Synthetic oligonucleotide
  Sense Strand Starting at position 130 of SEQ ID NO: 315461
gagguaacucugggucaaa

SEQ ID NO: 328954 - RNA, 19 nt, Artificial Sequence
  Description of Artificial Sequence: Synthetic oligonucleotide
  Antisense Strand to SEQ ID NO: 328953
uuugacccagaguuaccuc

SEQ ID NO: 328955 - RNA, 19 nt, Artificial Sequence
  Description of Artificial Sequence: Synthetic oligonucleotide
  Sense Strand Starting at position 130 of SEQ ID NO: 315571
cuggugugugguuucggua

SEQ ID NO: 328956 - RNA, 19 nt, Artificial Sequence
  Description of Artificial Sequence: Synthetic oligonucleotide
  Antisense Strand to SEQ ID NO: 328955
uaccgaaaccacacaccag

SEQ ID NO: 328957 - RNA, 19 nt, Artificial Sequence
  Description of Artificial Sequence: Synthetic oligonucleotide
  Sense Strand Starting at position 130 of SEQ ID NO: 315572
uggugugugguuucgguau

SEQ ID NO: 328958 - RNA, 19 nt, Artificial Sequence
  Description of Artificial Sequence: Synthetic oligonucleotide
  Antisense Strand to SEQ ID NO: 328957
auaccgaaaccacacacca

SEQ ID NO: 328959 - RNA, 19 nt, Artificial Sequence
  Description of Artificial Sequence: Synthetic oligonucleotide
  Sense Strand Starting at position 130 of SEQ ID NO: 315585
cgguauucuuagcucuacu

SEQ ID NO: 328960 - RNA, 19 nt, Artificial Sequence
  Description of Artificial Sequence: Synthetic oligonucleotide
  Antisense Strand to SEQ ID NO: 328959
aguagagcuaagaauaccg

SEQ ID NO: 328961 - RNA, 19 nt, Artificial Sequence
  Description of Artificial Sequence: Synthetic oligonucleotide
  Sense Strand Starting at position 130 of SEQ ID NO: 315858
ucccacugguuccagagau

SEQ ID NO: 328962 - RNA, 19 nt, Artificial Sequence
  Description of Artificial Sequence: Synthetic oligonucleotide
  Antisense Strand to SEQ ID NO: 328961
aucucuggaaccaguggga

SEQ ID NO: 328963 - RNA, 19 nt, Artificial Sequence
  Description of Artificial Sequence: Synthetic oligonucleotide
  Sense Strand Starting at position 130 of SEQ ID NO: 316205
gagugacucuacgcauuug

SEQ ID NO: 328964 - RNA, 19 nt, Artificial Sequence
  Description of Artificial Sequence: Synthetic oligonucleotide
  Antisense Strand to SEQ ID NO: 328963
caaaugcguagagucacuc

SEQ ID NO: 328965 - RNA, 19 nt, Artificial Sequence
  Description of Artificial Sequence: Synthetic oligonucleotide
  Sense Strand Starting at position 130 of SEQ ID NO: 317110
ggucccuccauauggaaga

SEQ ID NO: 328966 - RNA, 19 nt, Artificial Sequence
  Description of Artificial Sequence: Synthetic oligonucleotide
  Antisense Strand to SEQ ID NO: 328965
ucuuccauauggagggacc

SEQ ID NO: 328967 - RNA, 19 nt, Artificial Sequence
  Description of Artificial Sequence: Synthetic oligonucleotide
  Sense Strand Starting at position 130 of SEQ ID NO: 317509
cgccuagucucuuccaaga

SEQ ID NO: 328968 - RNA, 19 nt, Artificial Sequence
  Description of Artificial Sequence: Synthetic oligonucleotide
  Antisense Strand to SEQ ID NO: 328967
ucuuggaagagacuaggcg

SEQ ID NO: 328969 - RNA, 19 nt, Artificial Sequence
  Description of Artificial Sequence: Synthetic oligonucleotide
  Sense Strand Starting at position 130 of SEQ ID NO: 317570
gacaaacuguuggauaaau

SEQ ID NO: 328970 - RNA, 19 nt, Artificial Sequence
  Description of Artificial Sequence: Synthetic oligonucleotide
  Antisense Strand to SEQ ID NO: 328969
auuuauccaacaguuuguc

SEQ ID NO: 328971 - RNA, 19 nt, Artificial Sequence
  Description of Artificial Sequence: Synthetic oligonucleotide
  Sense Strand Starting at position 130 of SEQ ID NO: 317839
guuaguuaccuaugcgugu

SEQ ID NO: 328972 - RNA, 19 nt, Artificial Sequence
  Description of Artificial Sequence: Synthetic oligonucleotide
  Antisense Strand to SEQ ID NO: 328971
acacgcauagguaacuaac

SEQ ID NO: 328973 - RNA, 19 nt, Artificial Sequence
  Description of Artificial Sequence: Synthetic oligonucleotide
  Sense Strand Starting at position 130 of SEQ ID NO: 317843
guuaccuaugcguguguau

SEQ ID NO: 328974 - RNA, 19 nt, Artificial Sequence
  Description of Artificial Sequence: Synthetic oligonucleotide
  Antisense Strand to SEQ ID NO: 328973
auacacacgcauagguaac

SEQ ID NO: 328975 - RNA, 19 nt, Artificial Sequence
  Description of Artificial Sequence: Synthetic oligonucleotide
  Sense Strand Starting at position 130 of SEQ ID NO: 317943
cuggaaggcuugcuaaauc

SEQ ID NO: 328976 - RNA, 19 nt, Artificial Sequence
  Description of Artificial Sequence: Synthetic oligonucleotide
  Antisense Strand to SEQ ID NO: 328975
gauuuagcaagccuuccag

SEQ ID NO: 328977 - RNA, 19 nt, Artificial Sequence
  Description of Artificial Sequence: Synthetic oligonucleotide
  Sense Strand Starting at position 130 of SEQ ID NO: 317998
guagguggaccugggaauu

SEQ ID NO: 328978 - RNA, 19 nt, Artificial Sequence
  Description of Artificial Sequence: Synthetic oligonucleotide
  Antisense Strand to SEQ ID NO: 328977
aauucccagguccaccuac

SEQ ID NO: 328979 - RNA, 19 nt, Artificial Sequence
  Description of Artificial Sequence: Synthetic oligonucleotide
  Sense Strand Starting at position 130 of SEQ ID NO: 318108
uguugaguugguggcaaau

SEQ ID NO: 328980 - RNA, 19 nt, Artificial Sequence
  Description of Artificial Sequence: Synthetic oligonucleotide
  Antisense Strand to SEQ ID NO: 328979
auuugccaccaacucaaca

SEQ ID NO: 328981 - RNA, 19 nt, Artificial Sequence
  Description of Artificial Sequence: Synthetic oligonucleotide
  Sense Strand Starting at position 130 of SEQ ID NO: 318159
acagguugugagcggucau

SEQ ID NO: 328982 - RNA, 19 nt, Artificial Sequence
  Description of Artificial Sequence: Synthetic oligonucleotide
  Antisense Strand to SEQ ID NO: 328981
augaccgcucacaaccugu

SEQ ID NO: 328983 - RNA, 19 nt, Artificial Sequence
  Description of Artificial Sequence: Synthetic oligonucleotide
  Sense Strand Starting at position 130 of SEQ ID NO: 318169
agcggucauccauuccgua

SEQ ID NO: 328984 - RNA, 19 nt, Artificial Sequence
  Description of Artificial Sequence: Synthetic oligonucleotide
  Antisense Strand to SEQ ID NO: 328983
uacggaauggaugaccgcu

SEQ ID NO: 328985 - RNA, 19 nt, Artificial Sequence
  Description of Artificial Sequence: Synthetic oligonucleotide
  Sense Strand Starting at position 130 of SEQ ID NO: 318170
gcggucauccauuccguau

SEQ ID NO: 328986 - RNA, 19 nt, Artificial Sequence
  Description of Artificial Sequence: Synthetic oligonucleotide
  Antisense Strand to SEQ ID NO: 328985
auacggaauggaugaccgc

SEQ ID NO: 328987 - RNA, 19 nt, Artificial Sequence
  Description of Artificial Sequence: Synthetic oligonucleotide
  Sense Strand Starting at position 130 of SEQ ID NO: 318239
uaaagugaacugggaguuu

SEQ ID NO: 328988 - RNA, 19 nt, Artificial Sequence
  Description of Artificial Sequence: Synthetic oligonucleotide
  Antisense Strand to SEQ ID NO: 328987
aaacucccaguucacuuua

SEQ ID NO: 328989 - RNA, 19 nt, Artificial Sequence
  Description of Artificial Sequence: Synthetic oligonucleotide
  Sense Strand Starting at position 130 of SEQ ID NO: 318270
ugaggaagcuguccuggaa

SEQ ID NO: 328990 - RNA, 19 nt, Artificial Sequence
  Description of Artificial Sequence: Synthetic oligonucleotide
  Antisense Strand to SEQ ID NO: 328989
uuccaggacagcuuccuca

SEQ ID NO: 328991 - RNA, 19 nt, Artificial Sequence
  Description of Artificial Sequence: Synthetic oligonucleotide
  Sense Strand Starting at position 130 of SEQ ID NO: 318273
ggaagcuguccuggaaaua

SEQ ID NO: 328992 - RNA, 19 nt, Artificial Sequence
  Description of Artificial Sequence: Synthetic oligonucleotide
  Antisense Strand to SEQ ID NO: 328991
uauuuccaggacagcuucc

SEQ ID NO: 328993 - RNA, 19 nt, Artificial Sequence
  Description of Artificial Sequence: Synthetic oligonucleotide
  Sense Strand Starting at position 130 of SEQ ID NO: 318373
cacugugacuuuggaaagu

SEQ ID NO: 328994 - RNA, 19 nt, Artificial Sequence
  Description of Artificial Sequence: Synthetic oligonucleotide
  Antisense Strand to SEQ ID NO: 328993
acuuuccaaagucacagug

SEQ ID NO: 328995 - RNA, 19 nt, Artificial Sequence
  Description of Artificial Sequence: Synthetic oligonucleotide
  Sense Strand Starting at position 130 of SEQ ID NO: 318560
gccuccugaauucgagaga

SEQ ID NO: 328996 - RNA, 19 nt, Artificial Sequence
  Description of Artificial Sequence: Synthetic oligonucleotide
  Antisense Strand to SEQ ID NO: 328995
ucucucgaauucaggaggc

SEQ ID NO: 328997 - RNA, 19 nt, Artificial Sequence
  Description of Artificial Sequence: Synthetic oligonucleotide
  Sense Strand Starting at position 130 of SEQ ID NO: 318561
ccuccugaauucgagagau

SEQ ID NO: 328998 - RNA, 19 nt, Artificial Sequence
  Description of Artificial Sequence: Synthetic oligonucleotide
  Antisense Strand to SEQ ID NO: 328997
aucucucgaauucaggagg

SEQ ID NO: 328999 - RNA, 19 nt, Artificial Sequence
  Description of Artificial Sequence: Synthetic oligonucleotide
  Sense Strand Starting at position 130 of SEQ ID NO: 318571
ucgagagauucuccagugu

SEQ ID NO: 329000 - RNA, 19 nt, Artificial Sequence
  Description of Artificial Sequence: Synthetic oligonucleotide
  Antisense Strand to SEQ ID NO: 328999
acacuggagaaucucucga

SEQ ID NO: 329001 - RNA, 19 nt, Artificial Sequence
  Description of Artificial Sequence: Synthetic oligonucleotide
  Sense Strand Starting at position 130 of SEQ ID NO: 318795
uguuucuugucaguaaaca

SEQ ID NO: 329002 - RNA, 19 nt, Artificial Sequence
  Description of Artificial Sequence: Synthetic oligonucleotide
  Antisense Strand to SEQ ID NO: 329001
uguuuacugacaagaaaca

SEQ ID NO: 329003 - RNA, 19 nt, Artificial Sequence
  Description of Artificial Sequence: Synthetic oligonucleotide
  Sense Strand Starting at position 130 of SEQ ID NO: 318796
guuucuugucaguaaacau

SEQ ID NO: 329004 - RNA, 19 nt, Artificial Sequence
  Description of Artificial Sequence: Synthetic oligonucleotide
  Antisense Strand to SEQ ID NO: 329003
auguuuacugacaagaaac

SEQ ID NO: 329005 - RNA, 19 nt, Artificial Sequence
  Description of Artificial Sequence: Synthetic oligonucleotide
  Sense Strand Starting at position 130 of SEQ ID NO: 318987
cuggauucuuaggcauguu

SEQ ID NO: 329006 - RNA, 19 nt, Artificial Sequence
  Description of Artificial Sequence: Synthetic oligonucleotide
  Antisense Strand to SEQ ID NO: 329005
aacaugccuaagaauccag

SEQ ID NO: 329007 - RNA, 19 nt, Artificial Sequence
  Description of Artificial Sequence: Synthetic oligonucleotide
  Sense Strand Starting at position 130 of SEQ ID NO: 319179
ucuuuccagucauugacua

SEQ ID NO: 329008 - RNA, 19 nt, Artificial Sequence
  Description of Artificial Sequence: Synthetic oligonucleotide
  Antisense Strand to SEQ ID NO: 329007
uagucaaugacuggaaaga

SEQ ID NO: 329009 - RNA, 19 nt, Artificial Sequence
  Description of Artificial Sequence: Synthetic oligonucleotide
  Sense Strand Starting at position 130 of SEQ ID NO: 319180
cuuuccagucauugacuau

SEQ ID NO: 329010 - RNA, 19 nt, Artificial Sequence
  Description of Artificial Sequence: Synthetic oligonucleotide
  Antisense Strand to SEQ ID NO: 329009
auagucaaugacuggaaag

SEQ ID NO: 329011 - RNA, 19 nt, Artificial Sequence
  Description of Artificial Sequence: Synthetic oligonucleotide
  Sense Strand Starting at position 130 of SEQ ID NO: 319183
uccagucauugacuauauu

SEQ ID NO: 329012 - RNA, 19 nt, Artificial Sequence
  Description of Artificial Sequence: Synthetic oligonucleotide
  Antisense Strand to SEQ ID NO: 329011
aauauagucaaugacugga

SEQ ID NO: 329013 - RNA, 19 nt, Artificial Sequence
  Description of Artificial Sequence: Synthetic oligonucleotide
  Sense Strand Starting at position 131 of SEQ ID NO: 315517
gucuuuacucucuaucuga

SEQ ID NO: 329014 - RNA, 19 nt, Artificial Sequence
  Description of Artificial Sequence: Synthetic oligonucleotide
  Antisense Strand to SEQ ID NO: 329013
ucagauagagaguaaagac

SEQ ID NO: 329015 - RNA, 19 nt, Artificial Sequence
  Description of Artificial Sequence: Synthetic oligonucleotide
  Sense Strand Starting at position 131 of SEQ ID NO: 315579
gcugauaucuccuugccua

SEQ ID NO: 329016 - RNA, 19 nt, Artificial Sequence
  Description of Artificial Sequence: Synthetic oligonucleotide
  Antisense Strand to SEQ ID NO: 329015
uaggcaaggagauaucagc

SEQ ID NO: 329017 - RNA, 19 nt, Artificial Sequence
  Description of Artificial Sequence: Synthetic oligonucleotide
  Sense Strand Starting at position 131 of SEQ ID NO: 315809
gagauaggaucuggucaug

SEQ ID NO: 329018 - RNA, 19 nt, Artificial Sequence
  Description of Artificial Sequence: Synthetic oligonucleotide
  Antisense Strand to SEQ ID NO: 329017
caugaccagauccuaucuc

SEQ ID NO: 329019 - RNA, 19 nt, Artificial Sequence
  Description of Artificial Sequence: Synthetic oligonucleotide
  Sense Strand Starting at position 131 of SEQ ID NO: 315914
ugaacucagccacgauuau

SEQ ID NO: 329020 - RNA, 19 nt, Artificial Sequence
  Description of Artificial Sequence: Synthetic oligonucleotide
  Antisense Strand to SEQ ID NO: 329019
auaaucguggcugaguuca

SEQ ID NO: 329021 - RNA, 19 nt, Artificial Sequence
  Description of Artificial Sequence: Synthetic oligonucleotide
  Sense Strand Starting at position 131 of SEQ ID NO: 315923
ccacgauuauaguccuaaa

SEQ ID NO: 329022 - RNA, 19 nt, Artificial Sequence
  Description of Artificial Sequence: Synthetic oligonucleotide
  Antisense Strand to SEQ ID NO: 329021
uuuaggacuauaaucgugg

SEQ ID NO: 329023 - RNA, 19 nt, Artificial Sequence
  Description of Artificial Sequence: Synthetic oligonucleotide
  Sense Strand Starting at position 131 of SEQ ID NO: 315976
ugcucuucuuuguccugaa

SEQ ID NO: 329024 - RNA, 19 nt, Artificial Sequence
  Description of Artificial Sequence: Synthetic oligonucleotide
  Antisense Strand to SEQ ID NO: 329023
uucaggacaaagaagagca

SEQ ID NO: 329025 - RNA, 19 nt, Artificial Sequence
  Description of Artificial Sequence: Synthetic oligonucleotide
  Sense Strand Starting at position 131 of SEQ ID NO: 315985
uuguccugaaguugucauu

SEQ ID NO: 329026 - RNA, 19 nt, Artificial Sequence
  Description of Artificial Sequence: Synthetic oligonucleotide
  Antisense Strand to SEQ ID NO: 329025
aaugacaacuucaggacaa

SEQ ID NO: 329027 - RNA, 19 nt, Artificial Sequence
  Description of Artificial Sequence: Synthetic oligonucleotide
  Sense Strand Starting at position 131 of SEQ ID NO: 316023
aacuucuuugaauguagga

SEQ ID NO: 329028 - RNA, 19 nt, Artificial Sequence
  Description of Artificial Sequence: Synthetic oligonucleotide
  Antisense Strand to SEQ ID NO: 329027
uccuacauucaaagaaguu

SEQ ID NO: 329029 - RNA, 19 nt, Artificial Sequence
  Description of Artificial Sequence: Synthetic oligonucleotide
  Sense Strand Starting at position 131 of SEQ ID NO: 316063
cccacuaugccuuaagaga

SEQ ID NO: 329030 - RNA, 19 nt, Artificial Sequence
  Description of Artificial Sequence: Synthetic oligonucleotide
  Antisense Strand to SEQ ID NO: 329029
ucucuuaaggcauaguggg

SEQ ID NO: 329031 - RNA, 19 nt, Artificial Sequence
  Description of Artificial Sequence: Synthetic oligonucleotide
  Sense Strand Starting at position 131 of SEQ ID NO: 316110
cgcugaugcuuucugacaa

SEQ ID NO: 329032 - RNA, 19 nt, Artificial Sequence
  Description of Artificial Sequence: Synthetic oligonucleotide
  Antisense Strand to SEQ ID NO: 329031
uugucagaaagcaucagcg

SEQ ID NO: 329033 - RNA, 19 nt, Artificial Sequence
  Description of Artificial Sequence: Synthetic oligonucleotide
  Sense Strand Starting at position 131 of SEQ ID NO: 316159
ggccaucaguccuuuaguu

SEQ ID NO: 329034 - RNA, 19 nt, Artificial Sequence
  Description of Artificial Sequence: Synthetic oligonucleotide
  Antisense Strand to SEQ ID NO: 329033
aacuaaaggacugauggcc

SEQ ID NO: 329035 - RNA, 19 nt, Artificial Sequence
  Description of Artificial Sequence: Synthetic oligonucleotide
  Sense Strand Starting at position 131 of SEQ ID NO: 316161
ccaucaguccuuuaguuag

SEQ ID NO: 329036 - RNA, 19 nt, Artificial Sequence
  Description of Artificial Sequence: Synthetic oligonucleotide
  Antisense Strand to SEQ ID NO: 329035
cuaacuaaaggacugaugg

SEQ ID NO: 329037 - RNA, 19 nt, Artificial Sequence
  Description of Artificial Sequence: Synthetic oligonucleotide
  Sense Strand Starting at position 131 of SEQ ID NO: 316164
ucaguccuuuaguuagaga

SEQ ID NO: 329038 - RNA, 19 nt, Artificial Sequence
  Description of Artificial Sequence: Synthetic oligonucleotide
  Antisense Strand to SEQ ID NO: 329037
ucucuaacuaaaggacuga

SEQ ID NO: 329039 - RNA, 19 nt, Artificial Sequence
  Description of Artificial Sequence: Synthetic oligonucleotide
  Sense Strand Starting at position 131 of SEQ ID NO: 316209
guacacuagucccuauauc

SEQ ID NO: 329040 - RNA, 19 nt, Artificial Sequence
  Description of Artificial Sequence: Synthetic oligonucleotide
  Antisense Strand to SEQ ID NO: 329039
gauauagggacuaguguac

SEQ ID NO: 329041 - RNA, 19 nt, Artificial Sequence
  Description of Artificial Sequence: Synthetic oligonucleotide
  Sense Strand Starting at position 131 of SEQ ID NO: 316255
gugccaaguucuguuaaac

SEQ ID NO: 329042 - RNA, 19 nt, Artificial Sequence
  Description of Artificial Sequence: Synthetic oligonucleotide
  Antisense Strand to SEQ ID NO: 329041
guuuaacagaacuuggcac

SEQ ID NO: 329043 - RNA, 19 nt, Artificial Sequence
  Description of Artificial Sequence: Synthetic oligonucleotide
  Sense Strand Starting at position 131 of SEQ ID NO: 316267
guuaaacacuuggagaaga

SEQ ID NO: 329044 - RNA, 19 nt, Artificial Sequence
  Description of Artificial Sequence: Synthetic oligonucleotide
  Antisense Strand to SEQ ID NO: 329043
ucuucuccaaguguuuaac

SEQ ID NO: 329045 - RNA, 19 nt, Artificial Sequence
  Description of Artificial Sequence: Synthetic oligonucleotide
  Sense Strand Starting at position 131 of SEQ ID NO: 316351
ggccaugccuaggaaagau

SEQ ID NO: 329046 - RNA, 19 nt, Artificial Sequence
  Description of Artificial Sequence: Synthetic oligonucleotide
  Antisense Strand to SEQ ID NO: 329045
aucuuuccuaggcauggcc

SEQ ID NO: 329047 - RNA, 19 nt, Artificial Sequence
  Description of Artificial Sequence: Synthetic oligonucleotide
  Sense Strand Starting at position 131 of SEQ ID NO: 316360
uaggaaagauucugguaaa

SEQ ID NO: 329048 - RNA, 19 nt, Artificial Sequence
  Description of Artificial Sequence: Synthetic oligonucleotide
  Antisense Strand to SEQ ID NO: 329047
uuuaccagaaucuuuccua

SEQ ID NO: 329049 - RNA, 19 nt, Artificial Sequence
  Description of Artificial Sequence: Synthetic oligonucleotide
  Sense Strand Starting at position 131 of SEQ ID NO: 316361
aggaaagauucugguaaag

SEQ ID NO: 329050 - RNA, 19 nt, Artificial Sequence
  Description of Artificial Sequence: Synthetic oligonucleotide
  Antisense Strand to SEQ ID NO: 329049
cuuuaccagaaucuuuccu

SEQ ID NO: 329051 - RNA, 19 nt, Artificial Sequence
  Description of Artificial Sequence: Synthetic oligonucleotide
  Sense Strand Starting at position 131 of SEQ ID NO: 316363
gaaagauucugguaaagau

SEQ ID NO: 329052 - RNA, 19 nt, Artificial Sequence
  Description of Artificial Sequence: Synthetic oligonucleotide
  Antisense Strand to SEQ ID NO: 329051
aucuuuaccagaaucuuuc

SEQ ID NO: 329053 - RNA, 19 nt, Artificial Sequence
  Description of Artificial Sequence: Synthetic oligonucleotide
  Sense Strand Starting at position 131 of SEQ ID NO: 316378
agauaucuuucugcugaag

SEQ ID NO: 329054 - RNA, 19 nt, Artificial Sequence
  Description of Artificial Sequence: Synthetic oligonucleotide
  Antisense Strand to SEQ ID NO: 329053
cuucagcagaaagauaucu

SEQ ID NO: 329055 - RNA, 19 nt, Artificial Sequence
  Description of Artificial Sequence: Synthetic oligonucleotide
  Sense Strand Starting at position 131 of SEQ ID NO: 316406
cuguguuagcucugaggaa

SEQ ID NO: 329056 - RNA, 19 nt, Artificial Sequence
  Description of Artificial Sequence: Synthetic oligonucleotide
  Antisense Strand to SEQ ID NO: 329055
uuccucagagcuaacacag

SEQ ID NO: 329057 - RNA, 19 nt, Artificial Sequence
  Description of Artificial Sequence: Synthetic oligonucleotide
  Sense Strand Starting at position 131 of SEQ ID NO: 316480
gaggacuuccaagguccua

SEQ ID NO: 329058 - RNA, 19 nt, Artificial Sequence
  Description of Artificial Sequence: Synthetic oligonucleotide
  Antisense Strand to SEQ ID NO: 329057
uaggaccuuggaaguccuc

SEQ ID NO: 329059 - RNA, 19 nt, Artificial Sequence
  Description of Artificial Sequence: Synthetic oligonucleotide
  Sense Strand Starting at position 131 of SEQ ID NO: 316485
cuuccaagguccuacaaga

SEQ ID NO: 329060 - RNA, 19 nt, Artificial Sequence
  Description of Artificial Sequence: Synthetic oligonucleotide
  Antisense Strand to SEQ ID NO: 329059
ucuuguaggaccuuggaag

SEQ ID NO: 329061 - RNA, 19 nt, Artificial Sequence
  Description of Artificial Sequence: Synthetic oligonucleotide
  Sense Strand Starting at position 131 of SEQ ID NO: 316696
ugcucacuuugagugcaaa

SEQ ID NO: 329062 - RNA, 19 nt, Artificial Sequence
  Description of Artificial Sequence: Synthetic oligonucleotide
  Antisense Strand to SEQ ID NO: 329061
uuugcacucaaagugagca

SEQ ID NO: 329063 - RNA, 19 nt, Artificial Sequence
  Description of Artificial Sequence: Synthetic oligonucleotide
  Sense Strand Starting at position 131 of SEQ ID NO: 316795
gccugacgcgucuaggaga

SEQ ID NO: 329064 - RNA, 19 nt, Artificial Sequence
  Description of Artificial Sequence: Synthetic oligonucleotide
  Antisense Strand to SEQ ID NO: 329063
ucuccuagacgcgucaggc

SEQ ID NO: 329065 - RNA, 19 nt, Artificial Sequence
  Description of Artificial Sequence: Synthetic oligonucleotide
  Sense Strand Starting at position 131 of SEQ ID NO: 317063
gaccgaacgaguugagaaa

SEQ ID NO: 329066 - RNA, 19 nt, Artificial Sequence
  Description of Artificial Sequence: Synthetic oligonucleotide
  Antisense Strand to SEQ ID NO: 329065
uuucucaacucguucgguc

SEQ ID NO: 329067 - RNA, 19 nt, Artificial Sequence
  Description of Artificial Sequence: Synthetic oligonucleotide
  Sense Strand Starting at position 131 of SEQ ID NO: 317280
ccacgaauucucgggcacu

SEQ ID NO: 329068 - RNA, 19 nt, Artificial Sequence
  Description of Artificial Sequence: Synthetic oligonucleotide
  Antisense Strand to SEQ ID NO: 329067
agugcccgagaauucgugg

SEQ ID NO: 329069 - RNA, 19 nt, Artificial Sequence
  Description of Artificial Sequence: Synthetic oligonucleotide
  Sense Strand Starting at position 131 of SEQ ID NO: 317297
cuaugauaggccugugcaa

SEQ ID NO: 329070 - RNA, 19 nt, Artificial Sequence
  Description of Artificial Sequence: Synthetic oligonucleotide
  Antisense Strand to SEQ ID NO: 329069
uugcacaggccuaucauag

SEQ ID NO: 329071 - RNA, 19 nt, Artificial Sequence
  Description of Artificial Sequence: Synthetic oligonucleotide
  Sense Strand Starting at position 131 of SEQ ID NO: 317491
augggcacagucgauuaaa

SEQ ID NO: 329072 - RNA, 19 nt, Artificial Sequence
  Description of Artificial Sequence: Synthetic oligonucleotide
  Antisense Strand to SEQ ID NO: 329071
uuuaaucgacugugcccau

SEQ ID NO: 329073 - RNA, 19 nt, Artificial Sequence
  Description of Artificial Sequence: Synthetic oligonucleotide
  Sense Strand Starting at position 131 of SEQ ID NO: 317494
ggcacagucgauuaaauca

SEQ ID NO: 329074 - RNA, 19 nt, Artificial Sequence
  Description of Artificial Sequence: Synthetic oligonucleotide
  Antisense Strand to SEQ ID NO: 329073
ugauuuaaucgacugugcc

SEQ ID NO: 329075 - RNA, 19 nt, Artificial Sequence
  Description of Artificial Sequence: Synthetic oligonucleotide
  Sense Strand Starting at position 131 of SEQ ID NO: 318171
cgaacugacaggugaucua

SEQ ID NO: 329076 - RNA, 19 nt, Artificial Sequence
  Description of Artificial Sequence: Synthetic oligonucleotide
  Antisense Strand to SEQ ID NO: 329075
uagaucaccugucaguucg

SEQ ID NO: 329077 - RNA, 19 nt, Artificial Sequence
  Description of Artificial Sequence: Synthetic oligonucleotide
  Sense Strand Starting at position 131 of SEQ ID NO: 318241
cggccuauuaugcagucau

SEQ ID NO: 329078 - RNA, 19 nt, Artificial Sequence
  Description of Artificial Sequence: Synthetic oligonucleotide
  Antisense Strand to SEQ ID NO: 329077
augacugcauaauaggccg

SEQ ID NO: 329079 - RNA, 19 nt, Artificial Sequence
  Description of Artificial Sequence: Synthetic oligonucleotide
  Sense Strand Starting at position 131 of SEQ ID NO: 318375
aagacagaguuucucuguu

SEQ ID NO: 329080 - RNA, 19 nt, Artificial Sequence
  Description of Artificial Sequence: Synthetic oligonucleotide
  Antisense Strand to SEQ ID NO: 329079
aacagagaaacucugucuu

SEQ ID NO: 329081 - RNA, 19 nt, Artificial Sequence
  Description of Artificial Sequence: Synthetic oligonucleotide
  Sense Strand Starting at position 131 of SEQ ID NO: 318377
gacagaguuucucuguuaa

SEQ ID NO: 329082 - RNA, 19 nt, Artificial Sequence
  Description of Artificial Sequence: Synthetic oligonucleotide
  Antisense Strand to SEQ ID NO: 329081
uuaacagagaaacucuguc

SEQ ID NO: 329083 - RNA, 19 nt, Artificial Sequence
  Description of Artificial Sequence: Synthetic oligonucleotide
  Sense Strand Starting at position 131 of SEQ ID NO: 318379
cagaguuucucuguuaaug

SEQ ID NO: 329084 - RNA, 19 nt, Artificial Sequence
  Description of Artificial Sequence: Synthetic oligonucleotide
  Antisense Strand to SEQ ID NO: 329083
cauuaacagagaaacucug

SEQ ID NO: 329085 - RNA, 19 nt, Artificial Sequence
  Description of Artificial Sequence: Synthetic oligonucleotide
  Sense Strand Starting at position 131 of SEQ ID NO: 318688
aaauguauguuugaggaca

SEQ ID NO: 329086 - RNA, 19 nt, Artificial Sequence
  Description of Artificial Sequence: Synthetic oligonucleotide
  Antisense Strand to SEQ ID NO: 329085
uguccucaaacauacauuu

SEQ ID NO: 329087 - RNA, 19 nt, Artificial Sequence
  Description of Artificial Sequence: Synthetic oligonucleotide
  Sense Strand Starting at position 131 of SEQ ID NO: 318726
gucacuaucugcuuugcua

SEQ ID NO: 329088 - RNA, 19 nt, Artificial Sequence
  Description of Artificial Sequence: Synthetic oligonucleotide
  Antisense Strand to SEQ ID NO: 329087
uagcaaagcagauagugac

SEQ ID NO: 329089 - RNA, 19 nt, Artificial Sequence
  Description of Artificial Sequence: Synthetic oligonucleotide
  Sense Strand Starting at position 131 of SEQ ID NO: 318740
ugcuaagguaguggaauau

SEQ ID NO: 329090 - RNA, 19 nt, Artificial Sequence
  Description of Artificial Sequence: Synthetic oligonucleotide
  Antisense Strand to SEQ ID NO: 329089
auauuccacuaccuuagca

SEQ ID NO: 329091 - RNA, 19 nt, Artificial Sequence
  Description of Artificial Sequence: Synthetic oligonucleotide
  Sense Strand Starting at position 131 of SEQ ID NO: 318780
agggaauacuuacaaucug

SEQ ID NO: 329092 - RNA, 19 nt, Artificial Sequence
  Description of Artificial Sequence: Synthetic oligonucleotide
  Antisense Strand to SEQ ID NO: 329091
cagauuguaaguauucccu

SEQ ID NO: 329093 - RNA, 19 nt, Artificial Sequence
  Description of Artificial Sequence: Synthetic oligonucleotide
  Sense Strand Starting at position 132 of SEQ ID NO: 315288
uugccauucccugaauguu

SEQ ID NO: 329094 - RNA, 19 nt, Artificial Sequence
  Description of Artificial Sequence: Synthetic oligonucleotide
  Antisense Strand to SEQ ID NO: 329093
aacauucagggaauggcaa

SEQ ID NO: 329095 - RNA, 19 nt, Artificial Sequence
  Description of Artificial Sequence: Synthetic oligonucleotide
  Sense Strand Starting at position 132 of SEQ ID NO: 315340
uggaaugcccuccauacuu

SEQ ID NO: 329096 - RNA, 19 nt, Artificial Sequence
  Description of Artificial Sequence: Synthetic oligonucleotide
  Antisense Strand to SEQ ID NO: 329095
aaguauggagggcauucca

SEQ ID NO: 329097 - RNA, 19 nt, Artificial Sequence
  Description of Artificial Sequence: Synthetic oligonucleotide
  Sense Strand Starting at position 132 of SEQ ID NO: 315667
ggaugaaggccauguagaa

SEQ ID NO: 329098 - RNA, 19 nt, Artificial Sequence
  Description of Artificial Sequence: Synthetic oligonucleotide
  Antisense Strand to SEQ ID NO: 329097
uucuacauggccuucaucc

SEQ ID NO: 329099 - RNA, 19 nt, Artificial Sequence
  Description of Artificial Sequence: Synthetic oligonucleotide
  Sense Strand Starting at position 132 of SEQ ID NO: 315717
guuggacuccugcagaaau

SEQ ID NO: 329100 - RNA, 19 nt, Artificial Sequence
  Description of Artificial Sequence: Synthetic oligonucleotide
  Antisense Strand to SEQ ID NO: 329099
auuucugcaggaguccaac

SEQ ID NO: 329101 - RNA, 19 nt, Artificial Sequence
  Description of Artificial Sequence: Synthetic oligonucleotide
  Sense Strand Starting at position 132 of SEQ ID NO: 315727
ugcagaaaucacuggauca

SEQ ID NO: 329102 - RNA, 19 nt, Artificial Sequence
  Description of Artificial Sequence: Synthetic oligonucleotide
  Antisense Strand to SEQ ID NO: 329101
ugauccagugauuucugca

SEQ ID NO: 329103 - RNA, 19 nt, Artificial Sequence
  Description of Artificial Sequence: Synthetic oligonucleotide
  Sense Strand Starting at position 132 of SEQ ID NO: 315805
ggagauguacugugaaaca

SEQ ID NO: 329104 - RNA, 19 nt, Artificial Sequence
  Description of Artificial Sequence: Synthetic oligonucleotide
  Antisense Strand to SEQ ID NO: 329103
uguuucacaguacaucucc

SEQ ID NO: 329105 - RNA, 19 nt, Artificial Sequence
  Description of Artificial Sequence: Synthetic oligonucleotide
  Sense Strand Starting at position 132 of SEQ ID NO: 316005
ccaacauuccugggugagu

SEQ ID NO: 329106 - RNA, 19 nt, Artificial Sequence
  Description of Artificial Sequence: Synthetic oligonucleotide
  Antisense Strand to SEQ ID NO: 329105
acucacccaggaauguugg

SEQ ID NO: 329107 - RNA, 19 nt, Artificial Sequence
  Description of Artificial Sequence: Synthetic oligonucleotide
  Sense Strand Starting at position 132 of SEQ ID NO: 316151
ucaugagcucccugacaaa

SEQ ID NO: 329108 - RNA, 19 nt, Artificial Sequence
  Description of Artificial Sequence: Synthetic oligonucleotide
  Antisense Strand to SEQ ID NO: 329107
uuugucagggagcucauga

SEQ ID NO: 329109 - RNA, 19 nt, Artificial Sequence
  Description of Artificial Sequence: Synthetic oligonucleotide
  Sense Strand Starting at position 132 of SEQ ID NO: 316367
ccgggugaaugguucccaa

SEQ ID NO: 329110 - RNA, 19 nt, Artificial Sequence
  Description of Artificial Sequence: Synthetic oligonucleotide
  Antisense Strand to SEQ ID NO: 329109
uugggaaccauucacccgg

SEQ ID NO: 329111 - RNA, 19 nt, Artificial Sequence
  Description of Artificial Sequence: Synthetic oligonucleotide
  Sense Strand Starting at position 132 of SEQ ID NO: 317382
ccaucuuagaguggaguuu

SEQ ID NO: 329112 - RNA, 19 nt, Artificial Sequence
  Description of Artificial Sequence: Synthetic oligonucleotide
  Antisense Strand to SEQ ID NO: 329111
aaacuccacucuaagaugg

SEQ ID NO: 329113 - RNA, 19 nt, Artificial Sequence
  Description of Artificial Sequence: Synthetic oligonucleotide
  Sense Strand Starting at position 132 of SEQ ID NO: 317581
ggccuuggucucggaggaa

SEQ ID NO: 329114 - RNA, 19 nt, Artificial Sequence
  Description of Artificial Sequence: Synthetic oligonucleotide
  Antisense Strand to SEQ ID NO: 329113
uuccuccgagaccaaggcc

SEQ ID NO: 329115 - RNA, 19 nt, Artificial Sequence
  Description of Artificial Sequence: Synthetic oligonucleotide
  Sense Strand Starting at position 132 of SEQ ID NO: 317820
aagaguacucgcgagagaa

SEQ ID NO: 329116 - RNA, 19 nt, Artificial Sequence
  Description of Artificial Sequence: Synthetic oligonucleotide
  Antisense Strand to SEQ ID NO: 329115
uucucucgcgaguacucuu

SEQ ID NO: 329117 - RNA, 19 nt, Artificial Sequence
  Description of Artificial Sequence: Synthetic oligonucleotide
  Sense Strand Starting at position 132 of SEQ ID NO: 317822
gaguacucgcgagagaaag

SEQ ID NO: 329118 - RNA, 19 nt, Artificial Sequence
  Description of Artificial Sequence: Synthetic oligonucleotide
  Antisense Strand to SEQ ID NO: 329117
cuuucucucgcgaguacuc

SEQ ID NO: 329119 - RNA, 19 nt, Artificial Sequence
  Description of Artificial Sequence: Synthetic oligonucleotide
  Sense Strand Starting at position 132 of SEQ ID NO: 317850
uuggaugagccuggaaagu

SEQ ID NO: 329120 - RNA, 19 nt, Artificial Sequence
  Description of Artificial Sequence: Synthetic oligonucleotide
  Antisense Strand to SEQ ID NO: 329119
acuuuccaggcucauccaa

SEQ ID NO: 329121 - RNA, 19 nt, Artificial Sequence
  Description of Artificial Sequence: Synthetic oligonucleotide
  Sense Strand Starting at position 132 of SEQ ID NO: 318051
aagguaugggucugagaga

SEQ ID NO: 329122 - RNA, 19 nt, Artificial Sequence
  Description of Artificial Sequence: Synthetic oligonucleotide
  Antisense Strand to SEQ ID NO: 329121
ucucucagacccauaccuu

SEQ ID NO: 329123 - RNA, 19 nt, Artificial Sequence
  Description of Artificial Sequence: Synthetic oligonucleotide
  Sense Strand Starting at position 132 of SEQ ID NO: 318109
cugguaaagcggugggaaa

SEQ ID NO: 329124 - RNA, 19 nt, Artificial Sequence
  Description of Artificial Sequence: Synthetic oligonucleotide
  Antisense Strand to SEQ ID NO: 329123
uuucccaccgcuuuaccag

SEQ ID NO: 329125 - RNA, 19 nt, Artificial Sequence
  Description of Artificial Sequence: Synthetic oligonucleotide
  Sense Strand Starting at position 132 of SEQ ID NO: 318110
ugguaaagcggugggaaau

SEQ ID NO: 329126 - RNA, 19 nt, Artificial Sequence
  Description of Artificial Sequence: Synthetic oligonucleotide
  Antisense Strand to SEQ ID NO: 329125
auuucccaccgcuuuacca

SEQ ID NO: 329127 - RNA, 19 nt, Artificial Sequence
  Description of Artificial Sequence: Synthetic oligonucleotide
  Sense Strand Starting at position 132 of SEQ ID NO: 318119
ggugggaaaucuguggguu

SEQ ID NO: 329128 - RNA, 19 nt, Artificial Sequence
  Description of Artificial Sequence: Synthetic oligonucleotide
  Antisense Strand to SEQ ID NO: 329127
aacccacagauuucccacc

SEQ ID NO: 329129 - RNA, 19 nt, Artificial Sequence
  Description of Artificial Sequence: Synthetic oligonucleotide
  Sense Strand Starting at position 132 of SEQ ID NO: 318120
gugggaaaucuguggguug

SEQ ID NO: 329130 - RNA, 19 nt, Artificial Sequence
  Description of Artificial Sequence: Synthetic oligonucleotide
  Antisense Strand to SEQ ID NO: 329129
caacccacagauuucccac

SEQ ID NO: 329131 - RNA, 19 nt, Artificial Sequence
  Description of Artificial Sequence: Synthetic oligonucleotide
  Sense Strand Starting at position 132 of SEQ ID NO: 318123
ggaaaucuguggguuggca

SEQ ID NO: 329132 - RNA, 19 nt, Artificial Sequence
  Description of Artificial Sequence: Synthetic oligonucleotide
  Antisense Strand to SEQ ID NO: 329131
ugccaacccacagauuucc

SEQ ID NO: 329133 - RNA, 19 nt, Artificial Sequence
  Description of Artificial Sequence: Synthetic oligonucleotide
  Sense Strand Starting at position 132 of SEQ ID NO: 318153
cggguugcugauuggaaca

SEQ ID NO: 329134 - RNA, 19 nt, Artificial Sequence
  Description of Artificial Sequence: Synthetic oligonucleotide
  Antisense Strand to SEQ ID NO: 329133
uguuccaaucagcaacccg

SEQ ID NO: 329135 - RNA, 19 nt, Artificial Sequence
  Description of Artificial Sequence: Synthetic oligonucleotide
  Sense Strand Starting at position 132 of SEQ ID NO: 318283
uuguuaguucuugaggguu

SEQ ID NO: 329136 - RNA, 19 nt, Artificial Sequence
  Description of Artificial Sequence: Synthetic oligonucleotide
  Antisense Strand to SEQ ID NO: 329135
aacccucaagaacuaacaa

SEQ ID NO: 329137 - RNA, 19 nt, Artificial Sequence
  Description of Artificial Sequence: Synthetic oligonucleotide
  Sense Strand Starting at position 132 of SEQ ID NO: 318504
caggaagagguuugcugau

SEQ ID NO: 329138 - RNA, 19 nt, Artificial Sequence
  Description of Artificial Sequence: Synthetic oligonucleotide
  Antisense Strand to SEQ ID NO: 329137
aucagcaaaccucuuccug

SEQ ID NO: 329139 - RNA, 19 nt, Artificial Sequence
  Description of Artificial Sequence: Synthetic oligonucleotide
  Sense Strand Starting at position 132 of SEQ ID NO: 318506
ggaagagguuugcugauua

SEQ ID NO: 329140 - RNA, 19 nt, Artificial Sequence
  Description of Artificial Sequence: Synthetic oligonucleotide
  Antisense Strand to SEQ ID NO: 329139
uaaucagcaaaccucuucc

SEQ ID NO: 329141 - RNA, 19 nt, Artificial Sequence
  Description of Artificial Sequence: Synthetic oligonucleotide
  Sense Strand Starting at position 132 of SEQ ID NO: 318510
gagguuugcugauuaagau

SEQ ID NO: 329142 - RNA, 19 nt, Artificial Sequence
  Description of Artificial Sequence: Synthetic oligonucleotide
  Antisense Strand to SEQ ID NO: 329141
aucuuaaucagcaaaccuc

SEQ ID NO: 329143 - RNA, 19 nt, Artificial Sequence
  Description of Artificial Sequence: Synthetic oligonucleotide
  Sense Strand Starting at position 132 of SEQ ID NO: 318511
agguuugcugauuaagauc

SEQ ID NO: 329144 - RNA, 19 nt, Artificial Sequence
  Description of Artificial Sequence: Synthetic oligonucleotide
  Antisense Strand to SEQ ID NO: 329143
gaucuuaaucagcaaaccu

SEQ ID NO: 329145 - RNA, 19 nt, Artificial Sequence
  Description of Artificial Sequence: Synthetic oligonucleotide
  Sense Strand Starting at position 132 of SEQ ID NO: 318589
guuuccuuauggguaaagu

SEQ ID NO: 329146 - RNA, 19 nt, Artificial Sequence
  Description of Artificial Sequence: Synthetic oligonucleotide
  Antisense Strand to SEQ ID NO: 329145
acuuuacccauaaggaaac

SEQ ID NO: 329147 - RNA, 19 nt, Artificial Sequence
  Description of Artificial Sequence: Synthetic oligonucleotide
  Sense Strand Starting at position 132 of SEQ ID NO: 318655
ugagaugaugcuuguaaau

SEQ ID NO: 329148 - RNA, 19 nt, Artificial Sequence
  Description of Artificial Sequence: Synthetic oligonucleotide
  Antisense Strand to SEQ ID NO: 329147
auuuacaagcaucaucuca

SEQ ID NO: 329149 - RNA, 19 nt, Artificial Sequence
  Description of Artificial Sequence: Synthetic oligonucleotide
  Sense Strand Starting at position 132 of SEQ ID NO: 318685
cgguuugacauguagugaa

SEQ ID NO: 329150 - RNA, 19 nt, Artificial Sequence
  Description of Artificial Sequence: Synthetic oligonucleotide
  Antisense Strand to SEQ ID NO: 329149
uucacuacaugucaaaccg

SEQ ID NO: 329151 - RNA, 19 nt, Artificial Sequence
  Description of Artificial Sequence: Synthetic oligonucleotide
  Sense Strand Starting at position 132 of SEQ ID NO: 318689
uugacauguagugaauguu

SEQ ID NO: 329152 - RNA, 19 nt, Artificial Sequence
  Description of Artificial Sequence: Synthetic oligonucleotide
  Antisense Strand to SEQ ID NO: 329151
aacauucacuacaugucaa

SEQ ID NO: 329153 - RNA, 19 nt, Artificial Sequence
  Description of Artificial Sequence: Synthetic oligonucleotide
  Sense Strand Starting at position 132 of SEQ ID NO: 318781
aguuaucuccuuuaguggu

SEQ ID NO: 329154 - RNA, 19 nt, Artificial Sequence
  Description of Artificial Sequence: Synthetic oligonucleotide
  Antisense Strand to SEQ ID NO: 329153
accacuaaaggagauaacu

SEQ ID NO: 329155 - RNA, 19 nt, Artificial Sequence
  Description of Artificial Sequence: Synthetic oligonucleotide
  Sense Strand Starting at position 132 of SEQ ID NO: 318787
cuccuuuaguggucaggaa

SEQ ID NO: 329156 - RNA, 19 nt, Artificial Sequence
  Description of Artificial Sequence: Synthetic oligonucleotide
  Antisense Strand to SEQ ID NO: 329155
uuccugaccacuaaaggag

SEQ ID NO: 329157 - RNA, 19 nt, Artificial Sequence
  Description of Artificial Sequence: Synthetic oligonucleotide
  Sense Strand Starting at position 132 of SEQ ID NO: 318788
uccuuuaguggucaggaau

SEQ ID NO: 329158 - RNA, 19 nt, Artificial Sequence
  Description of Artificial Sequence: Synthetic oligonucleotide
  Antisense Strand to SEQ ID NO: 329157
auuccugaccacuaaagga

SEQ ID NO: 329159 - RNA, 19 nt, Artificial Sequence
  Description of Artificial Sequence: Synthetic oligonucleotide
  Sense Strand Starting at position 132 of SEQ ID NO: 318800
caggaauucguuugagaau

SEQ ID NO: 329160 - RNA, 19 nt, Artificial Sequence
  Description of Artificial Sequence: Synthetic oligonucleotide
  Antisense Strand to SEQ ID NO: 329159
auucucaaacgaauuccug

SEQ ID NO: 329161 - RNA, 19 nt, Artificial Sequence
  Description of Artificial Sequence: Synthetic oligonucleotide
  Sense Strand Starting at position 132 of SEQ ID NO: 318809
guuugagaaucugcugaga

SEQ ID NO: 329162 - RNA, 19 nt, Artificial Sequence
  Description of Artificial Sequence: Synthetic oligonucleotide
  Antisense Strand to SEQ ID NO: 329161
ucucagcagauucucaaac

SEQ ID NO: 329163 - RNA, 19 nt, Artificial Sequence
  Description of Artificial Sequence: Synthetic oligonucleotide
  Sense Strand Starting at position 132 of SEQ ID NO: 318831
augggucguguguaggauu

SEQ ID NO: 329164 - RNA, 19 nt, Artificial Sequence
  Description of Artificial Sequence: Synthetic oligonucleotide
  Antisense Strand to SEQ ID NO: 329163
aauccuacacacgacccau

SEQ ID NO: 329165 - RNA, 19 nt, Artificial Sequence
  Description of Artificial Sequence: Synthetic oligonucleotide
  Sense Strand Starting at position 132 of SEQ ID NO: 318838
guguguaggauucggauuu

SEQ ID NO: 329166 - RNA, 19 nt, Artificial Sequence
  Description of Artificial Sequence: Synthetic oligonucleotide
  Antisense Strand to SEQ ID NO: 329165
aaauccgaauccuacacac

SEQ ID NO: 329167 - RNA, 19 nt, Artificial Sequence
  Description of Artificial Sequence: Synthetic oligonucleotide
  Sense Strand Starting at position 132 of SEQ ID NO: 318885
ggccucucuccugaggaaa

SEQ ID NO: 329168 - RNA, 19 nt, Artificial Sequence
  Description of Artificial Sequence: Synthetic oligonucleotide
  Antisense Strand to SEQ ID NO: 329167
uuuccucaggagagaggcc

SEQ ID NO: 329169 - RNA, 19 nt, Artificial Sequence
  Description of Artificial Sequence: Synthetic oligonucleotide
  Sense Strand Starting at position 132 of SEQ ID NO: 318921
uuauuaaggucuuugaaga

SEQ ID NO: 329170 - RNA, 19 nt, Artificial Sequence
  Description of Artificial Sequence: Synthetic oligonucleotide
  Antisense Strand to SEQ ID NO: 329169
ucuucaaagaccuuaauaa

SEQ ID NO: 329171 - RNA, 19 nt, Artificial Sequence
  Description of Artificial Sequence: Synthetic oligonucleotide
  Sense Strand Starting at position 132 of SEQ ID NO: 318929
gucuuugaagaauguauga

SEQ ID NO: 329172 - RNA, 19 nt, Artificial Sequence
  Description of Artificial Sequence: Synthetic oligonucleotide
  Antisense Strand to SEQ ID NO: 329171
ucauacauucuucaaagac

SEQ ID NO: 329173 - RNA, 19 nt, Artificial Sequence
  Description of Artificial Sequence: Synthetic oligonucleotide
  Sense Strand Starting at position 133 of SEQ ID NO: 315335
gcauaugagcaauagacau

SEQ ID NO: 329174 - RNA, 19 nt, Artificial Sequence
  Description of Artificial Sequence: Synthetic oligonucleotide
  Antisense Strand to SEQ ID NO: 329173
augucuauugcucauaugc

SEQ ID NO: 329175 - RNA, 19 nt, Artificial Sequence
  Description of Artificial Sequence: Synthetic oligonucleotide
  Sense Strand Starting at position 133 of SEQ ID NO: 315404
augauuggcucugcaacau

SEQ ID NO: 329176 - RNA, 19 nt, Artificial Sequence
  Description of Artificial Sequence: Synthetic oligonucleotide
  Antisense Strand to SEQ ID NO: 329175
auguugcagagccaaucau

SEQ ID NO: 329177 - RNA, 19 nt, Artificial Sequence
  Description of Artificial Sequence: Synthetic oligonucleotide
  Sense Strand Starting at position 133 of SEQ ID NO: 315446
ccuguuugguuaucagaag

SEQ ID NO: 329178 - RNA, 19 nt, Artificial Sequence
  Description of Artificial Sequence: Synthetic oligonucleotide
  Antisense Strand to SEQ ID NO: 329177
cuucugauaaccaaacagg

SEQ ID NO: 329179 - RNA, 19 nt, Artificial Sequence
  Description of Artificial Sequence: Synthetic oligonucleotide
  Sense Strand Starting at position 133 of SEQ ID NO: 315494
ucucaauaacaagguguuu

SEQ ID NO: 329180 - RNA, 19 nt, Artificial Sequence
  Description of Artificial Sequence: Synthetic oligonucleotide
  Antisense Strand to SEQ ID NO: 329179
aaacaccuuguuauugaga

SEQ ID NO: 329181 - RNA, 19 nt, Artificial Sequence
  Description of Artificial Sequence: Synthetic oligonucleotide
  Sense Strand Starting at position 133 of SEQ ID NO: 315528
gaagcuuucccuuggaagg

SEQ ID NO: 329182 - RNA, 19 nt, Artificial Sequence
  Description of Artificial Sequence: Synthetic oligonucleotide
  Antisense Strand to SEQ ID NO: 329181
ccuuccaagggaaagcuuc

SEQ ID NO: 329183 - RNA, 19 nt, Artificial Sequence
  Description of Artificial Sequence: Synthetic oligonucleotide
  Sense Strand Starting at position 133 of SEQ ID NO: 315529
aagcuuucccuuggaagga

SEQ ID NO: 329184 - RNA, 19 nt, Artificial Sequence
  Description of Artificial Sequence: Synthetic oligonucleotide
  Antisense Strand to SEQ ID NO: 329183
uccuuccaagggaaagcuu

SEQ ID NO: 329185 - RNA, 19 nt, Artificial Sequence
  Description of Artificial Sequence: Synthetic oligonucleotide
  Sense Strand Starting at position 133 of SEQ ID NO: 315760
cauuacuguuaguugucua

SEQ ID NO: 329186 - RNA, 19 nt, Artificial Sequence
  Description of Artificial Sequence: Synthetic oligonucleotide
  Antisense Strand to SEQ ID NO: 329185
uagacaacuaacaguaaug

SEQ ID NO: 329187 - RNA, 19 nt, Artificial Sequence
  Description of Artificial Sequence: Synthetic oligonucleotide
  Sense Strand Starting at position 133 of SEQ ID NO: 315763
uacuguuaguugucuaaga

SEQ ID NO: 329188 - RNA, 19 nt, Artificial Sequence
  Description of Artificial Sequence: Synthetic oligonucleotide
  Antisense Strand to SEQ ID NO: 329187
ucuuagacaacuaacagua

SEQ ID NO: 329189 - RNA, 19 nt, Artificial Sequence
  Description of Artificial Sequence: Synthetic oligonucleotide
  Sense Strand Starting at position 133 of SEQ ID NO: 315764
acuguuaguugucuaagaa

SEQ ID NO: 329190 - RNA, 19 nt, Artificial Sequence
  Description of Artificial Sequence: Synthetic oligonucleotide
  Antisense Strand to SEQ ID NO: 329189
uucuuagacaacuaacagu

SEQ ID NO: 329191 - RNA, 19 nt, Artificial Sequence
  Description of Artificial Sequence: Synthetic oligonucleotide
  Sense Strand Starting at position 133 of SEQ ID NO: 315765
cuguuaguugucuaagaaa

SEQ ID NO: 329192 - RNA, 19 nt, Artificial Sequence
  Description of Artificial Sequence: Synthetic oligonucleotide
  Antisense Strand to SEQ ID NO: 329191
uuucuuagacaacuaacag

SEQ ID NO: 329193 - RNA, 19 nt, Artificial Sequence
  Description of Artificial Sequence: Synthetic oligonucleotide
  Sense Strand Starting at position 133 of SEQ ID NO: 316028
ucagucuacugacuuauua

SEQ ID NO: 329194 - RNA, 19 nt, Artificial Sequence
  Description of Artificial Sequence: Synthetic oligonucleotide
  Antisense Strand to SEQ ID NO: 329193
uaauaagucaguagacuga

SEQ ID NO: 329195 - RNA, 19 nt, Artificial Sequence
  Description of Artificial Sequence: Synthetic oligonucleotide
  Sense Strand Starting at position 133 of SEQ ID NO: 316149
auauguucuguuuaaagca

SEQ ID NO: 329196 - RNA, 19 nt, Artificial Sequence
  Description of Artificial Sequence: Synthetic oligonucleotide
  Antisense Strand to SEQ ID NO: 329195
ugcuuuaaacagaacauau

SEQ ID NO: 329197 - RNA, 19 nt, Artificial Sequence
  Description of Artificial Sequence: Synthetic oligonucleotide
  Sense Strand Starting at position 133 of SEQ ID NO: 316187
uuuccacugguuugaucua

SEQ ID NO: 329198 - RNA, 19 nt, Artificial Sequence
  Description of Artificial Sequence: Synthetic oligonucleotide
  Antisense Strand to SEQ ID NO: 329197
uagaucaaaccaguggaaa

SEQ ID NO: 329199 - RNA, 19 nt, Artificial Sequence
  Description of Artificial Sequence: Synthetic oligonucleotide
  Sense Strand Starting at position 133 of SEQ ID NO: 316232
ggugcuggaugacucaaua

SEQ ID NO: 329200 - RNA, 19 nt, Artificial Sequence
  Description of Artificial Sequence: Synthetic oligonucleotide
  Antisense Strand to SEQ ID NO: 329199
uauugagucauccagcacc

SEQ ID NO: 329201 - RNA, 19 nt, Artificial Sequence
  Description of Artificial Sequence: Synthetic oligonucleotide
  Sense Strand Starting at position 133 of SEQ ID NO: 316276
uucccuaaaccuuggugaa

SEQ ID NO: 329202 - RNA, 19 nt, Artificial Sequence
  Description of Artificial Sequence: Synthetic oligonucleotide
  Antisense Strand to SEQ ID NO: 329201
uucaccaagguuuagggaa

SEQ ID NO: 329203 - RNA, 19 nt, Artificial Sequence
  Description of Artificial Sequence: Synthetic oligonucleotide
  Sense Strand Starting at position 133 of SEQ ID NO: 316277
ucccuaaaccuuggugaaa

SEQ ID NO: 329204 - RNA, 19 nt, Artificial Sequence
  Description of Artificial Sequence: Synthetic oligonucleotide
  Antisense Strand to SEQ ID NO: 329203
uuucaccaagguuuaggga

SEQ ID NO: 329205 - RNA, 19 nt, Artificial Sequence
  Description of Artificial Sequence: Synthetic oligonucleotide
  Sense Strand Starting at position 133 of SEQ ID NO: 316278
cccuaaaccuuggugaaag

SEQ ID NO: 329206 - RNA, 19 nt, Artificial Sequence
  Description of Artificial Sequence: Synthetic oligonucleotide
  Antisense Strand to SEQ ID NO: 329205
cuuucaccaagguuuaggg

SEQ ID NO: 329207 - RNA, 19 nt, Artificial Sequence
  Description of Artificial Sequence: Synthetic oligonucleotide
  Sense Strand Starting at position 133 of SEQ ID NO: 316289
ggugaaagcacaugauccu

SEQ ID NO: 329208 - RNA, 19 nt, Artificial Sequence
  Description of Artificial Sequence: Synthetic oligonucleotide
  Antisense Strand to SEQ ID NO: 329207
aggaucaugugcuuucacc

SEQ ID NO: 329209 - RNA, 19 nt, Artificial Sequence
  Description of Artificial Sequence: Synthetic oligonucleotide
  Sense Strand Starting at position 133 of SEQ ID NO: 316290
gugaaagcacaugauccua

SEQ ID NO: 329210 - RNA, 19 nt, Artificial Sequence
  Description of Artificial Sequence: Synthetic oligonucleotide
  Antisense Strand to SEQ ID NO: 329209
uaggaucaugugcuuucac

SEQ ID NO: 329211 - RNA, 19 nt, Artificial Sequence
  Description of Artificial Sequence: Synthetic oligonucleotide
  Sense Strand Starting at position 133 of SEQ ID NO: 316308
auuaguauuguugggccua

SEQ ID NO: 329212 - RNA, 19 nt, Artificial Sequence
  Description of Artificial Sequence: Synthetic oligonucleotide
  Antisense Strand to SEQ ID NO: 329211
uaggcccaacaauacuaau

SEQ ID NO: 329213 - RNA, 19 nt, Artificial Sequence
  Description of Artificial Sequence: Synthetic oligonucleotide
  Sense Strand Starting at position 133 of SEQ ID NO: 316310
uaguauuguugggccuaaa

SEQ ID NO: 329214 - RNA, 19 nt, Artificial Sequence
  Description of Artificial Sequence: Synthetic oligonucleotide
  Antisense Strand to SEQ ID NO: 329213
uuuaggcccaacaauacua

SEQ ID NO: 329215 - RNA, 19 nt, Artificial Sequence
  Description of Artificial Sequence: Synthetic oligonucleotide
  Sense Strand Starting at position 133 of SEQ ID NO: 316313
uauuguugggccuaaauaa

SEQ ID NO: 329216 - RNA, 19 nt, Artificial Sequence
  Description of Artificial Sequence: Synthetic oligonucleotide
  Antisense Strand to SEQ ID NO: 329215
uuauuuaggcccaacaaua

SEQ ID NO: 329217 - RNA, 19 nt, Artificial Sequence
  Description of Artificial Sequence: Synthetic oligonucleotide
  Sense Strand Starting at position 133 of SEQ ID NO: 317518
cucggugaacucgagagua

SEQ ID NO: 329218 - RNA, 19 nt, Artificial Sequence
  Description of Artificial Sequence: Synthetic oligonucleotide
  Antisense Strand to SEQ ID NO: 329217
uacucucgaguucaccgag

SEQ ID NO: 329219 - RNA, 19 nt, Artificial Sequence
  Description of Artificial Sequence: Synthetic oligonucleotide
  Sense Strand Starting at position 133 of SEQ ID NO: 317613
acccgagaauggccucaaa

SEQ ID NO: 329220 - RNA, 19 nt, Artificial Sequence
  Description of Artificial Sequence: Synthetic oligonucleotide
  Antisense Strand to SEQ ID NO: 329219
uuugaggccauucucgggu

SEQ ID NO: 329221 - RNA, 19 nt, Artificial Sequence
  Description of Artificial Sequence: Synthetic oligonucleotide
  Sense Strand Starting at position 133 of SEQ ID NO: 317765
ccuuuauccagauggcgau

SEQ ID NO: 329222 - RNA, 19 nt, Artificial Sequence
  Description of Artificial Sequence: Synthetic oligonucleotide
  Antisense Strand to SEQ ID NO: 329221
aucgccaucuggauaaagg

SEQ ID NO: 329223 - RNA, 19 nt, Artificial Sequence
  Description of Artificial Sequence: Synthetic oligonucleotide
  Sense Strand Starting at position 133 of SEQ ID NO: 317984
cugcauuacccugagagcu

SEQ ID NO: 329224 - RNA, 19 nt, Artificial Sequence
  Description of Artificial Sequence: Synthetic oligonucleotide
  Antisense Strand to SEQ ID NO: 329223
agcucucaggguaaugcag

SEQ ID NO: 329225 - RNA, 19 nt, Artificial Sequence
  Description of Artificial Sequence: Synthetic oligonucleotide
  Sense Strand Starting at position 133 of SEQ ID NO: 318093
uguacuuuccugugggaga

SEQ ID NO: 329226 - RNA, 19 nt, Artificial Sequence
  Description of Artificial Sequence: Synthetic oligonucleotide
  Antisense Strand to SEQ ID NO: 329225
ucucccacaggaaaguaca

SEQ ID NO: 329227 - RNA, 19 nt, Artificial Sequence
  Description of Artificial Sequence: Synthetic oligonucleotide
  Sense Strand Starting at position 133 of SEQ ID NO: 318095
uacuuuccugugggagaau

SEQ ID NO: 329228 - RNA, 19 nt, Artificial Sequence
  Description of Artificial Sequence: Synthetic oligonucleotide
  Antisense Strand to SEQ ID NO: 329227
auucucccacaggaaagua

SEQ ID NO: 329229 - RNA, 19 nt, Artificial Sequence
  Description of Artificial Sequence: Synthetic oligonucleotide
  Sense Strand Starting at position 133 of SEQ ID NO: 318108
gagaauauuuccuaggagc

SEQ ID NO: 329230 - RNA, 19 nt, Artificial Sequence
  Description of Artificial Sequence: Synthetic oligonucleotide
  Antisense Strand to SEQ ID NO: 329229
gcuccuaggaaauauucuc

SEQ ID NO: 329231 - RNA, 19 nt, Artificial Sequence
  Description of Artificial Sequence: Synthetic oligonucleotide
  Sense Strand Starting at position 133 of SEQ ID NO: 318155
aaaucaugacuguguagaa

SEQ ID NO: 329232 - RNA, 19 nt, Artificial Sequence
  Description of Artificial Sequence: Synthetic oligonucleotide
  Antisense Strand to SEQ ID NO: 329231
uucuacacagucaugauuu

SEQ ID NO: 329233 - RNA, 19 nt, Artificial Sequence
  Description of Artificial Sequence: Synthetic oligonucleotide
  Sense Strand Starting at position 133 of SEQ ID NO: 318156
aaucaugacuguguagaaa

SEQ ID NO: 329234 - RNA, 19 nt, Artificial Sequence
  Description of Artificial Sequence: Synthetic oligonucleotide
  Antisense Strand to SEQ ID NO: 329233
uuucuacacagucaugauu

SEQ ID NO: 329235 - RNA, 19 nt, Artificial Sequence
  Description of Artificial Sequence: Synthetic oligonucleotide
  Sense Strand Starting at position 133 of SEQ ID NO: 318167
uguagaaaggcgugaguaa

SEQ ID NO: 329236 - RNA, 19 nt, Artificial Sequence
  Description of Artificial Sequence: Synthetic oligonucleotide
  Antisense Strand to SEQ ID NO: 329235
uuacucacgccuuucuaca

SEQ ID NO: 329237 - RNA, 19 nt, Artificial Sequence
  Description of Artificial Sequence: Synthetic oligonucleotide
  Sense Strand Starting at position 133 of SEQ ID NO: 318537
ccucucuuccugcagauga

SEQ ID NO: 329238 - RNA, 19 nt, Artificial Sequence
  Description of Artificial Sequence: Synthetic oligonucleotide
  Antisense Strand to SEQ ID NO: 329237
ucaucugcaggaagagagg

SEQ ID NO: 329239 - RNA, 19 nt, Artificial Sequence
  Description of Artificial Sequence: Synthetic oligonucleotide
  Sense Strand Starting at position 133 of SEQ ID NO: 318606
gugaguggugacuacaugu

SEQ ID NO: 329240 - RNA, 19 nt, Artificial Sequence
  Description of Artificial Sequence: Synthetic oligonucleotide
  Antisense Strand to SEQ ID NO: 329239
acauguagucaccacucac

SEQ ID NO: 329241 - RNA, 19 nt, Artificial Sequence
  Description of Artificial Sequence: Synthetic oligonucleotide
  Sense Strand Starting at position 133 of SEQ ID NO: 318721
guuagaaucuuaguagcuc

SEQ ID NO: 329242 - RNA, 19 nt, Artificial Sequence
  Description of Artificial Sequence: Synthetic oligonucleotide
  Antisense Strand to SEQ ID NO: 329241
gagcuacuaagauucuaac

SEQ ID NO: 329243 - RNA, 19 nt, Artificial Sequence
  Description of Artificial Sequence: Synthetic oligonucleotide
  Sense Strand Starting at position 133 of SEQ ID NO: 318729
cuuaguagcuccucgaaua

SEQ ID NO: 329244 - RNA, 19 nt, Artificial Sequence
  Description of Artificial Sequence: Synthetic oligonucleotide
  Antisense Strand to SEQ ID NO: 329243
uauucgaggagcuacuaag

SEQ ID NO: 329245 - RNA, 19 nt, Artificial Sequence
  Description of Artificial Sequence: Synthetic oligonucleotide
  Sense Strand Starting at position 133 of SEQ ID NO: 318730
uuaguagcuccucgaauau

SEQ ID NO: 329246 - RNA, 19 nt, Artificial Sequence
  Description of Artificial Sequence: Synthetic oligonucleotide
  Antisense Strand to SEQ ID NO: 329245
auauucgaggagcuacuaa

SEQ ID NO: 329247 - RNA, 19 nt, Artificial Sequence
  Description of Artificial Sequence: Synthetic oligonucleotide
  Sense Strand Starting at position 133 of SEQ ID NO: 318761
ggguagaguggcugaugua

SEQ ID NO: 329248 - RNA, 19 nt, Artificial Sequence
  Description of Artificial Sequence: Synthetic oligonucleotide
  Antisense Strand to SEQ ID NO: 329247
uacaucagccacucuaccc

SEQ ID NO: 329249 - RNA, 19 nt, Artificial Sequence
  Description of Artificial Sequence: Synthetic oligonucleotide
  Sense Strand Starting at position 133 of SEQ ID NO: 319166
aguugucucccuggugaug

SEQ ID NO: 329250 - RNA, 19 nt, Artificial Sequence
  Description of Artificial Sequence: Synthetic oligonucleotide
  Antisense Strand to SEQ ID NO: 329249
caucaccagggagacaacu

SEQ ID NO: 329251 - RNA, 19 nt, Artificial Sequence
  Description of Artificial Sequence: Synthetic oligonucleotide
  Sense Strand Starting at position 133 of SEQ ID NO: 319196
ggcggucuugugccauaua

SEQ ID NO: 329252 - RNA, 19 nt, Artificial Sequence
  Description of Artificial Sequence: Synthetic oligonucleotide
  Antisense Strand to SEQ ID NO: 329251
uauauggcacaagaccgcc

SEQ ID NO: 329253 - RNA, 19 nt, Artificial Sequence
  Description of Artificial Sequence: Synthetic oligonucleotide
  Sense Strand Starting at position 134 of SEQ ID NO: 316430
uuauguuuauugucacuga

SEQ ID NO: 329254 - RNA, 19 nt, Artificial Sequence
  Description of Artificial Sequence: Synthetic oligonucleotide
  Antisense Strand to SEQ ID NO: 329253
ucagugacaauaaacauaa

SEQ ID NO: 329255 - RNA, 19 nt, Artificial Sequence
  Description of Artificial Sequence: Synthetic oligonucleotide
  Sense Strand Starting at position 134 of SEQ ID NO: 316434
guuuauugucacugagcag

SEQ ID NO: 329256 - RNA, 19 nt, Artificial Sequence
  Description of Artificial Sequence: Synthetic oligonucleotide
  Antisense Strand to SEQ ID NO: 329255
cugcucagugacaauaaac

SEQ ID NO: 329257 - RNA, 19 nt, Artificial Sequence
  Description of Artificial Sequence: Synthetic oligonucleotide
  Sense Strand Starting at position 134 of SEQ ID NO: 316456
gucuaaugacuccaaggca

SEQ ID NO: 329258 - RNA, 19 nt, Artificial Sequence
  Description of Artificial Sequence: Synthetic oligonucleotide
  Antisense Strand to SEQ ID NO: 329257
ugccuuggagucauuagac

SEQ ID NO: 329259 - RNA, 19 nt, Artificial Sequence
  Description of Artificial Sequence: Synthetic oligonucleotide
  Sense Strand Starting at position 134 of SEQ ID NO: 316481
ucagauauugcacauugca

SEQ ID NO: 329260 - RNA, 19 nt, Artificial Sequence
  Description of Artificial Sequence: Synthetic oligonucleotide
  Antisense Strand to SEQ ID NO: 329259
ugcaaugugcaauaucuga

SEQ ID NO: 329261 - RNA, 19 nt, Artificial Sequence
  Description of Artificial Sequence: Synthetic oligonucleotide
  Sense Strand Starting at position 134 of SEQ ID NO: 316583
acgccauaguuccuaauuu

SEQ ID NO: 329262 - RNA, 19 nt, Artificial Sequence
  Description of Artificial Sequence: Synthetic oligonucleotide
  Antisense Strand to SEQ ID NO: 329261
aaauuaggaacuauggcgu

SEQ ID NO: 329263 - RNA, 19 nt, Artificial Sequence
  Description of Artificial Sequence: Synthetic oligonucleotide
  Sense Strand Starting at position 134 of SEQ ID NO: 316605
aaagauauuagcggagagu

SEQ ID NO: 329264 - RNA, 19 nt, Artificial Sequence
  Description of Artificial Sequence: Synthetic oligonucleotide
  Antisense Strand to SEQ ID NO: 329263
acucuccgcuaauaucuuu

SEQ ID NO: 329265 - RNA, 19 nt, Artificial Sequence
  Description of Artificial Sequence: Synthetic oligonucleotide
  Sense Strand Starting at position 134 of SEQ ID NO: 316608
gauauuagcggagaguaau

SEQ ID NO: 329266 - RNA, 19 nt, Artificial Sequence
  Description of Artificial Sequence: Synthetic oligonucleotide
  Antisense Strand to SEQ ID NO: 329265
auuacucuccgcuaauauc

SEQ ID NO: 329267 - RNA, 19 nt, Artificial Sequence
  Description of Artificial Sequence: Synthetic oligonucleotide
  Sense Strand Starting at position 134 of SEQ ID NO: 316616
cggagaguaauauggauua

SEQ ID NO: 329268 - RNA, 19 nt, Artificial Sequence
  Description of Artificial Sequence: Synthetic oligonucleotide
  Antisense Strand to SEQ ID NO: 329267
uaauccauauuacucuccg

SEQ ID NO: 329269 - RNA, 19 nt, Artificial Sequence
  Description of Artificial Sequence: Synthetic oligonucleotide
  Sense Strand Starting at position 134 of SEQ ID NO: 317655
uguugucuuggagacgagu

SEQ ID NO: 329270 - RNA, 19 nt, Artificial Sequence
  Description of Artificial Sequence: Synthetic oligonucleotide
  Antisense Strand to SEQ ID NO: 329269
acucgucuccaagacaaca

SEQ ID NO: 329271 - RNA, 19 nt, Artificial Sequence
  Description of Artificial Sequence: Synthetic oligonucleotide
  Sense Strand Starting at position 134 of SEQ ID NO: 317825
gaccgaaaucgccauugcu

SEQ ID NO: 329272 - RNA, 19 nt, Artificial Sequence
  Description of Artificial Sequence: Synthetic oligonucleotide
  Antisense Strand to SEQ ID NO: 329271
agcaauggcgauuucgguc

SEQ ID NO: 329273 - RNA, 19 nt, Artificial Sequence
  Description of Artificial Sequence: Synthetic oligonucleotide
  Sense Strand Starting at position 134 of SEQ ID NO: 317912
cugaaugcguuacugggaa

SEQ ID NO: 329274 - RNA, 19 nt, Artificial Sequence
  Description of Artificial Sequence: Synthetic oligonucleotide
  Antisense Strand to SEQ ID NO: 329273
uucccaguaacgcauucag

SEQ ID NO: 329275 - RNA, 19 nt, Artificial Sequence
  Description of Artificial Sequence: Synthetic oligonucleotide
  Sense Strand Starting at position 134 of SEQ ID NO: 317935
caguaauagcgguagguau

SEQ ID NO: 329276 - RNA, 19 nt, Artificial Sequence
  Description of Artificial Sequence: Synthetic oligonucleotide
  Antisense Strand to SEQ ID NO: 329275
auaccuaccgcuauuacug

SEQ ID NO: 329277 - RNA, 19 nt, Artificial Sequence
  Description of Artificial Sequence: Synthetic oligonucleotide
  Sense Strand Starting at position 134 of SEQ ID NO: 318118
aggguuugaacccacguau

SEQ ID NO: 329278 - RNA, 19 nt, Artificial Sequence
  Description of Artificial Sequence: Synthetic oligonucleotide
  Antisense Strand to SEQ ID NO: 329277
auacguggguucaaacccu

SEQ ID NO: 329279 - RNA, 19 nt, Artificial Sequence
  Description of Artificial Sequence: Synthetic oligonucleotide
  Sense Strand Starting at position 134 of SEQ ID NO: 318145
ugaguccauucucuuacua

SEQ ID NO: 329280 - RNA, 19 nt, Artificial Sequence
  Description of Artificial Sequence: Synthetic oligonucleotide
  Antisense Strand to SEQ ID NO: 329279
uaguaagagaauggacuca

SEQ ID NO: 329281 - RNA, 19 nt, Artificial Sequence
  Description of Artificial Sequence: Synthetic oligonucleotide
  Sense Strand Starting at position 134 of SEQ ID NO: 318168
acuguaugucaugauugga

SEQ ID NO: 329282 - RNA, 19 nt, Artificial Sequence
  Description of Artificial Sequence: Synthetic oligonucleotide
  Antisense Strand to SEQ ID NO: 329281
uccaaucaugacauacagu

SEQ ID NO: 329283 - RNA, 19 nt, Artificial Sequence
  Description of Artificial Sequence: Synthetic oligonucleotide
  Sense Strand Starting at position 134 of SEQ ID NO: 318171
guaugucaugauuggaaug

SEQ ID NO: 329284 - RNA, 19 nt, Artificial Sequence
  Description of Artificial Sequence: Synthetic oligonucleotide
  Antisense Strand to SEQ ID NO: 329283
cauuccaaucaugacauac

SEQ ID NO: 329285 - RNA, 19 nt, Artificial Sequence
  Description of Artificial Sequence: Synthetic oligonucleotide
  Sense Strand Starting at position 134 of SEQ ID NO: 318190
gacaguuuaugaguaaagu

SEQ ID NO: 329286 - RNA, 19 nt, Artificial Sequence
  Description of Artificial Sequence: Synthetic oligonucleotide
  Antisense Strand to SEQ ID NO: 329285
acuuuacucauaaacuguc

SEQ ID NO: 329287 - RNA, 19 nt, Artificial Sequence
  Description of Artificial Sequence: Synthetic oligonucleotide
  Sense Strand Starting at position 134 of SEQ ID NO: 318191
acaguuuaugaguaaaguc

SEQ ID NO: 329288 - RNA, 19 nt, Artificial Sequence
  Description of Artificial Sequence: Synthetic oligonucleotide
  Antisense Strand to SEQ ID NO: 329287
gacuuuacucauaaacugu

SEQ ID NO: 329289 - RNA, 19 nt, Artificial Sequence
  Description of Artificial Sequence: Synthetic oligonucleotide
  Sense Strand Starting at position 134 of SEQ ID NO: 318198
augaguaaagucugacuuc

SEQ ID NO: 329290 - RNA, 19 nt, Artificial Sequence
  Description of Artificial Sequence: Synthetic oligonucleotide
  Antisense Strand to SEQ ID NO: 329289
gaagucagacuuuacucau

SEQ ID NO: 329291 - RNA, 19 nt, Artificial Sequence
  Description of Artificial Sequence: Synthetic oligonucleotide
  Sense Strand Starting at position 134 of SEQ ID NO: 318224
ggcuacaagcuccauuaga

SEQ ID NO: 329292 - RNA, 19 nt, Artificial Sequence
  Description of Artificial Sequence: Synthetic oligonucleotide
  Antisense Strand to SEQ ID NO: 329291
ucuaauggagcuuguagcc

SEQ ID NO: 329293 - RNA, 19 nt, Artificial Sequence
  Description of Artificial Sequence: Synthetic oligonucleotide
  Sense Strand Starting at position 134 of SEQ ID NO: 318232
gcuccauuagagcagggau

SEQ ID NO: 329294 - RNA, 19 nt, Artificial Sequence
  Description of Artificial Sequence: Synthetic oligonucleotide
  Antisense Strand to SEQ ID NO: 329293
aucccugcucuaauggagc

SEQ ID NO: 329295 - RNA, 19 nt, Artificial Sequence
  Description of Artificial Sequence: Synthetic oligonucleotide
  Sense Strand Starting at position 134 of SEQ ID NO: 318234
uccauuagagcagggauau

SEQ ID NO: 329296 - RNA, 19 nt, Artificial Sequence
  Description of Artificial Sequence: Synthetic oligonucleotide
  Antisense Strand to SEQ ID NO: 329295
auaucccugcucuaaugga

SEQ ID NO: 329297 - RNA, 19 nt, Artificial Sequence
  Description of Artificial Sequence: Synthetic oligonucleotide
  Sense Strand Starting at position 134 of SEQ ID NO: 318235
ccauuagagcagggauauu

SEQ ID NO: 329298 - RNA, 19 nt, Artificial Sequence
  Description of Artificial Sequence: Synthetic oligonucleotide
  Antisense Strand to SEQ ID NO: 329297
aauaucccugcucuaaugg

SEQ ID NO: 329299 - RNA, 19 nt, Artificial Sequence
  Description of Artificial Sequence: Synthetic oligonucleotide
  Sense Strand Starting at position 134 of SEQ ID NO: 318387
ggauaucacaaaugguagu

SEQ ID NO: 329300 - RNA, 19 nt, Artificial Sequence
  Description of Artificial Sequence: Synthetic oligonucleotide
  Antisense Strand to SEQ ID NO: 329299
acuaccauuugugauaucc

SEQ ID NO: 329301 - RNA, 19 nt, Artificial Sequence
  Description of Artificial Sequence: Synthetic oligonucleotide
  Sense Strand Starting at position 134 of SEQ ID NO: 318398
augguagugccuugaugga

SEQ ID NO: 329302 - RNA, 19 nt, Artificial Sequence
  Description of Artificial Sequence: Synthetic oligonucleotide
  Antisense Strand to SEQ ID NO: 329301
uccaucaaggcacuaccau

SEQ ID NO: 329303 - RNA, 19 nt, Artificial Sequence
  Description of Artificial Sequence: Synthetic oligonucleotide
  Sense Strand Starting at position 134 of SEQ ID NO: 318628
uccagcugaggcuaaauau

SEQ ID NO: 329304 - RNA, 19 nt, Artificial Sequence
  Description of Artificial Sequence: Synthetic oligonucleotide
  Antisense Strand to SEQ ID NO: 329303
auauuuagccucagcugga

SEQ ID NO: 329305 - RNA, 19 nt, Artificial Sequence
  Description of Artificial Sequence: Synthetic oligonucleotide
  Sense Strand Starting at position 134 of SEQ ID NO: 318637
ggcuaaauauuccugcuuu

SEQ ID NO: 329306 - RNA, 19 nt, Artificial Sequence
  Description of Artificial Sequence: Synthetic oligonucleotide
  Antisense Strand to SEQ ID NO: 329305
aaagcaggaauauuuagcc

SEQ ID NO: 329307 - RNA, 19 nt, Artificial Sequence
  Description of Artificial Sequence: Synthetic oligonucleotide
  Sense Strand Starting at position 134 of SEQ ID NO: 318781
uuuguuauaucaccacagu

SEQ ID NO: 329308 - RNA, 19 nt, Artificial Sequence
  Description of Artificial Sequence: Synthetic oligonucleotide
  Antisense Strand to SEQ ID NO: 329307
acuguggugauauaacaaa

SEQ ID NO: 329309 - RNA, 19 nt, Artificial Sequence
  Description of Artificial Sequence: Synthetic oligonucleotide
  Sense Strand Starting at position 134 of SEQ ID NO: 318825
ugguguagaugcuuaauau

SEQ ID NO: 329310 - RNA, 19 nt, Artificial Sequence
  Description of Artificial Sequence: Synthetic oligonucleotide
  Antisense Strand to SEQ ID NO: 329309
auauuaagcaucuacacca

SEQ ID NO: 329311 - RNA, 19 nt, Artificial Sequence
  Description of Artificial Sequence: Synthetic oligonucleotide
  Sense Strand Starting at position 134 of SEQ ID NO: 318826
gguguagaugcuuaauauu

SEQ ID NO: 329312 - RNA, 19 nt, Artificial Sequence
  Description of Artificial Sequence: Synthetic oligonucleotide
  Antisense Strand to SEQ ID NO: 329311
aauauuaagcaucuacacc

SEQ ID NO: 329313 - RNA, 19 nt, Artificial Sequence
  Description of Artificial Sequence: Synthetic oligonucleotide
  Sense Strand Starting at position 134 of SEQ ID NO: 318866
ugacauucuuuauugaaug

SEQ ID NO: 329314 - RNA, 19 nt, Artificial Sequence
  Description of Artificial Sequence: Synthetic oligonucleotide
  Antisense Strand to SEQ ID NO: 329313
cauucaauaaagaauguca

SEQ ID NO: 329315 - RNA, 19 nt, Artificial Sequence
  Description of Artificial Sequence: Synthetic oligonucleotide
  Sense Strand Starting at position 134 of SEQ ID NO: 318911
aucuacaagguuugagauu

SEQ ID NO: 329316 - RNA, 19 nt, Artificial Sequence
  Description of Artificial Sequence: Synthetic oligonucleotide
  Antisense Strand to SEQ ID NO: 329315
aaucucaaaccuuguagau

SEQ ID NO: 329317 - RNA, 19 nt, Artificial Sequence
  Description of Artificial Sequence: Synthetic oligonucleotide
  Sense Strand Starting at position 134 of SEQ ID NO: 318912
ucuacaagguuugagauuu

SEQ ID NO: 329318 - RNA, 19 nt, Artificial Sequence
  Description of Artificial Sequence: Synthetic oligonucleotide
  Antisense Strand to SEQ ID NO: 329317
aaaucucaaaccuuguaga

SEQ ID NO: 329319 - RNA, 19 nt, Artificial Sequence
  Description of Artificial Sequence: Synthetic oligonucleotide
  Sense Strand Starting at position 134 of SEQ ID NO: 318983
uuuacuugucuuuguuaga

SEQ ID NO: 329320 - RNA, 19 nt, Artificial Sequence
  Description of Artificial Sequence: Synthetic oligonucleotide
  Antisense Strand to SEQ ID NO: 329319
ucuaacaaagacaaguaaa

SEQ ID NO: 329321 - RNA, 19 nt, Artificial Sequence
  Description of Artificial Sequence: Synthetic oligonucleotide
  Sense Strand Starting at position 134 of SEQ ID NO: 318984
uuacuugucuuuguuagaa

SEQ ID NO: 329322 - RNA, 19 nt, Artificial Sequence
  Description of Artificial Sequence: Synthetic oligonucleotide
  Antisense Strand to SEQ ID NO: 329321
uucuaacaaagacaaguaa

SEQ ID NO: 329323 - RNA, 19 nt, Artificial Sequence
  Description of Artificial Sequence: Synthetic oligonucleotide
  Sense Strand Starting at position 134 of SEQ ID NO: 319035
ugaagcuauugaccuauga

SEQ ID NO: 329324 - RNA, 19 nt, Artificial Sequence
  Description of Artificial Sequence: Synthetic oligonucleotide
  Antisense Strand to SEQ ID NO: 329323
ucauaggucaauagcuuca

SEQ ID NO: 329325 - RNA, 19 nt, Artificial Sequence
  Description of Artificial Sequence: Synthetic oligonucleotide
  Sense Strand Starting at position 134 of SEQ ID NO: 319141
uauacuaaggauugugcua

SEQ ID NO: 329326 - RNA, 19 nt, Artificial Sequence
  Description of Artificial Sequence: Synthetic oligonucleotide
  Antisense Strand to SEQ ID NO: 329325
uagcacaauccuuaguaua

SEQ ID NO: 329327 - RNA, 19 nt, Artificial Sequence
  Description of Artificial Sequence: Synthetic oligonucleotide
  Sense Strand Starting at position 134 of SEQ ID NO: 319190
aggagugagguuuagucuu

SEQ ID NO: 329328 - RNA, 19 nt, Artificial Sequence
  Description of Artificial Sequence: Synthetic oligonucleotide
  Antisense Strand to SEQ ID NO: 329327
aagacuaaaccucacuccu

SEQ ID NO: 329329 - RNA, 19 nt, Artificial Sequence
  Description of Artificial Sequence: Synthetic oligonucleotide
  Sense Strand Starting at position 134 of SEQ ID NO: 319192
gagugagguuuagucuuga

SEQ ID NO: 329330 - RNA, 19 nt, Artificial Sequence
  Description of Artificial Sequence: Synthetic oligonucleotide
  Antisense Strand to SEQ ID NO: 329329
ucaagacuaaaccucacuc

SEQ ID NO: 329331 - RNA, 19 nt, Artificial Sequence
  Description of Artificial Sequence: Synthetic oligonucleotide
  Sense Strand Starting at position 134 of SEQ ID NO: 319197
agguuuagucuugaucuuc

SEQ ID NO: 329332 - RNA, 19 nt, Artificial Sequence
  Description of Artificial Sequence: Synthetic oligonucleotide
  Antisense Strand to SEQ ID NO: 329331
gaagaucaagacuaaaccu

SEQ ID NO: 329333 - RNA, 19 nt, Artificial Sequence
  Description of Artificial Sequence: Synthetic oligonucleotide
  Sense Strand Starting at position 135 of SEQ ID NO: 316037
uuauguuuauugucacuga

SEQ ID NO: 329334 - RNA, 19 nt, Artificial Sequence
  Description of Artificial Sequence: Synthetic oligonucleotide
  Antisense Strand to SEQ ID NO: 329333
ucagugacaauaaacauaa

SEQ ID NO: 329335 - RNA, 19 nt, Artificial Sequence
  Description of Artificial Sequence: Synthetic oligonucleotide
  Sense Strand Starting at position 135 of SEQ ID NO: 316063
gucuaaugacuccaaggca

SEQ ID NO: 329336 - RNA, 19 nt, Artificial Sequence
  Description of Artificial Sequence: Synthetic oligonucleotide
  Antisense Strand to SEQ ID NO: 329335
ugccuuggagucauuagac

SEQ ID NO: 329337 - RNA, 19 nt, Artificial Sequence
  Description of Artificial Sequence: Synthetic oligonucleotide
  Sense Strand Starting at position 135 of SEQ ID NO: 316088
ucagauauugcacauugca

SEQ ID NO: 329338 - RNA, 19 nt, Artificial Sequence
  Description of Artificial Sequence: Synthetic oligonucleotide
  Antisense Strand to SEQ ID NO: 329337
ugcaaugugcaauaucuga

SEQ ID NO: 329339 - RNA, 19 nt, Artificial Sequence
  Description of Artificial Sequence: Synthetic oligonucleotide
  Sense Strand Starting at position 135 of SEQ ID NO: 316190
acgccauaguuccuaauuu

SEQ ID NO: 329340 - RNA, 19 nt, Artificial Sequence
  Description of Artificial Sequence: Synthetic oligonucleotide
  Antisense Strand to SEQ ID NO: 329339
aaauuaggaacuauggcgu

SEQ ID NO: 329341 - RNA, 19 nt, Artificial Sequence
  Description of Artificial Sequence: Synthetic oligonucleotide
  Sense Strand Starting at position 135 of SEQ ID NO: 316212
aaagauauuagcggagagu

SEQ ID NO: 329342 - RNA, 19 nt, Artificial Sequence
  Description of Artificial Sequence: Synthetic oligonucleotide
  Antisense Strand to SEQ ID NO: 329341
acucuccgcuaauaucuuu

SEQ ID NO: 329343 - RNA, 19 nt, Artificial Sequence
  Description of Artificial Sequence: Synthetic oligonucleotide
  Sense Strand Starting at position 135 of SEQ ID NO: 316215
gauauuagcggagaguaau

SEQ ID NO: 329344 - RNA, 19 nt, Artificial Sequence
  Description of Artificial Sequence: Synthetic oligonucleotide
  Antisense Strand to SEQ ID NO: 329343
auuacucuccgcuaauauc

SEQ ID NO: 329345 - RNA, 19 nt, Artificial Sequence
  Description of Artificial Sequence: Synthetic oligonucleotide
  Sense Strand Starting at position 135 of SEQ ID NO: 316223
cggagaguaauauggauua

SEQ ID NO: 329346 - RNA, 19 nt, Artificial Sequence
  Description of Artificial Sequence: Synthetic oligonucleotide
  Antisense Strand to SEQ ID NO: 329345
uaauccauauuacucuccg

SEQ ID NO: 329347 - RNA, 19 nt, Artificial Sequence
  Description of Artificial Sequence: Synthetic oligonucleotide
  Sense Strand Starting at position 135 of SEQ ID NO: 317262
uguugucuuggagacgagu

SEQ ID NO: 329348 - RNA, 19 nt, Artificial Sequence
  Description of Artificial Sequence: Synthetic oligonucleotide
  Antisense Strand to SEQ ID NO: 329347
acucgucuccaagacaaca

SEQ ID NO: 329349 - RNA, 19 nt, Artificial Sequence
  Description of Artificial Sequence: Synthetic oligonucleotide
  Sense Strand Starting at position 135 of SEQ ID NO: 317519
cugaaugcguuacugggaa

SEQ ID NO: 329350 - RNA, 19 nt, Artificial Sequence
  Description of Artificial Sequence: Synthetic oligonucleotide
  Antisense Strand to SEQ ID NO: 329349
uucccaguaacgcauucag

SEQ ID NO: 329351 - RNA, 19 nt, Artificial Sequence
  Description of Artificial Sequence: Synthetic oligonucleotide
  Sense Strand Starting at position 135 of SEQ ID NO: 317542
caguaauagcgguagguau

SEQ ID NO: 329352 - RNA, 19 nt, Artificial Sequence
  Description of Artificial Sequence: Synthetic oligonucleotide
  Antisense Strand to SEQ ID NO: 329351
auaccuaccgcuauuacug

SEQ ID NO: 329353 - RNA, 19 nt, Artificial Sequence
  Description of Artificial Sequence: Synthetic oligonucleotide
  Sense Strand Starting at position 135 of SEQ ID NO: 317725
aggguuugaacccacguau

SEQ ID NO: 329354 - RNA, 19 nt, Artificial Sequence
  Description of Artificial Sequence: Synthetic oligonucleotide
  Antisense Strand to SEQ ID NO: 329353
auacguggguucaaacccu

SEQ ID NO: 329355 - RNA, 19 nt, Artificial Sequence
  Description of Artificial Sequence: Synthetic oligonucleotide
  Sense Strand Starting at position 135 of SEQ ID NO: 317752
ugaguccauucucuuacua

SEQ ID NO: 329356 - RNA, 19 nt, Artificial Sequence
  Description of Artificial Sequence: Synthetic oligonucleotide
  Antisense Strand to SEQ ID NO: 329355
uaguaagagaauggacuca

SEQ ID NO: 329357 - RNA, 19 nt, Artificial Sequence
  Description of Artificial Sequence: Synthetic oligonucleotide
  Sense Strand Starting at position 135 of SEQ ID NO: 317775
acuguaugucaugauugga

SEQ ID NO: 329358 - RNA, 19 nt, Artificial Sequence
  Description of Artificial Sequence: Synthetic oligonucleotide
  Antisense Strand to SEQ ID NO: 329357
uccaaucaugacauacagu

SEQ ID NO: 329359 - RNA, 19 nt, Artificial Sequence
  Description of Artificial Sequence: Synthetic oligonucleotide
  Sense Strand Starting at position 135 of SEQ ID NO: 317778
guaugucaugauuggaaug

SEQ ID NO: 329360 - RNA, 19 nt, Artificial Sequence
  Description of Artificial Sequence: Synthetic oligonucleotide
  Antisense Strand to SEQ ID NO: 329359
cauuccaaucaugacauac

SEQ ID NO: 329361 - RNA, 19 nt, Artificial Sequence
  Description of Artificial Sequence: Synthetic oligonucleotide
  Sense Strand Starting at position 135 of SEQ ID NO: 317797
gacaguuuaugaguaaagu

SEQ ID NO: 329362 - RNA, 19 nt, Artificial Sequence
  Description of Artificial Sequence: Synthetic oligonucleotide
  Antisense Strand to SEQ ID NO: 329361
acuuuacucauaaacuguc

SEQ ID NO: 329363 - RNA, 19 nt, Artificial Sequence
  Description of Artificial Sequence: Synthetic oligonucleotide
  Sense Strand Starting at position 135 of SEQ ID NO: 317798
acaguuuaugaguaaaguc

SEQ ID NO: 329364 - RNA, 19 nt, Artificial Sequence
  Description of Artificial Sequence: Synthetic oligonucleotide
  Antisense Strand to SEQ ID NO: 329363
gacuuuacucauaaacugu

SEQ ID NO: 329365 - RNA, 19 nt, Artificial Sequence
  Description of Artificial Sequence: Synthetic oligonucleotide
  Sense Strand Starting at position 135 of SEQ ID NO: 317805
augaguaaagucugacuuc

SEQ ID NO: 329366 - RNA, 19 nt, Artificial Sequence
  Description of Artificial Sequence: Synthetic oligonucleotide
  Antisense Strand to SEQ ID NO: 329365
gaagucagacuuuacucau

SEQ ID NO: 329367 - RNA, 19 nt, Artificial Sequence
  Description of Artificial Sequence: Synthetic oligonucleotide
  Sense Strand Starting at position 135 of SEQ ID NO: 317831
ggcuacaagcuccauuaga

SEQ ID NO: 329368 - RNA, 19 nt, Artificial Sequence
  Description of Artificial Sequence: Synthetic oligonucleotide
  Antisense Strand to SEQ ID NO: 329367
ucuaauggagcuuguagcc

SEQ ID NO: 329369 - RNA, 19 nt, Artificial Sequence
  Description of Artificial Sequence: Synthetic oligonucleotide
  Sense Strand Starting at position 135 of SEQ ID NO: 317839
gcuccauuagagcagggau

SEQ ID NO: 329370 - RNA, 19 nt, Artificial Sequence
  Description of Artificial Sequence: Synthetic oligonucleotide
  Antisense Strand to SEQ ID NO: 329369
aucccugcucuaauggagc

SEQ ID NO: 329371 - RNA, 19 nt, Artificial Sequence
  Description of Artificial Sequence: Synthetic oligonucleotide
  Sense Strand Starting at position 135 of SEQ ID NO: 317841
uccauuagagcagggauau

SEQ ID NO: 329372 - RNA, 19 nt, Artificial Sequence
  Description of Artificial Sequence: Synthetic oligonucleotide
  Antisense Strand to SEQ ID NO: 329371
auaucccugcucuaaugga

SEQ ID NO: 329373 - RNA, 19 nt, Artificial Sequence
  Description of Artificial Sequence: Synthetic oligonucleotide
  Sense Strand Starting at position 135 of SEQ ID NO: 317842
ccauuagagcagggauauu

SEQ ID NO: 329374 - RNA, 19 nt, Artificial Sequence
  Description of Artificial Sequence: Synthetic oligonucleotide
  Antisense Strand to SEQ ID NO: 329373
aauaucccugcucuaaugg

SEQ ID NO: 329375 - RNA, 19 nt, Artificial Sequence
  Description of Artificial Sequence: Synthetic oligonucleotide
  Sense Strand Starting at position 135 of SEQ ID NO: 317994
ggauaucacaaaugguagu

SEQ ID NO: 329376 - RNA, 19 nt, Artificial Sequence
  Description of Artificial Sequence: Synthetic oligonucleotide
  Antisense Strand to SEQ ID NO: 329375
acuaccauuugugauaucc

SEQ ID NO: 329377 - RNA, 19 nt, Artificial Sequence
  Description of Artificial Sequence: Synthetic oligonucleotide
  Sense Strand Starting at position 135 of SEQ ID NO: 318235
uccagcugaggcuaaauau

SEQ ID NO: 329378 - RNA, 19 nt, Artificial Sequence
  Description of Artificial Sequence: Synthetic oligonucleotide
  Antisense Strand to SEQ ID NO: 329377
auauuuagccucagcugga

SEQ ID NO: 329379 - RNA, 19 nt, Artificial Sequence
  Description of Artificial Sequence: Synthetic oligonucleotide
  Sense Strand Starting at position 135 of SEQ ID NO: 318388
uuuguuauaucaccacagu

SEQ ID NO: 329380 - RNA, 19 nt, Artificial Sequence
  Description of Artificial Sequence: Synthetic oligonucleotide
  Antisense Strand to SEQ ID NO: 329379
acuguggugauauaacaaa

SEQ ID NO: 329381 - RNA, 19 nt, Artificial Sequence
  Description of Artificial Sequence: Synthetic oligonucleotide
  Sense Strand Starting at position 135 of SEQ ID NO: 318433
gguguagaugcuuaauauu

SEQ ID NO: 329382 - RNA, 19 nt, Artificial Sequence
  Description of Artificial Sequence: Synthetic oligonucleotide
  Antisense Strand to SEQ ID NO: 329381
aauauuaagcaucuacacc

SEQ ID NO: 329383 - RNA, 19 nt, Artificial Sequence
  Description of Artificial Sequence: Synthetic oligonucleotide
  Sense Strand Starting at position 135 of SEQ ID NO: 318473
ugacauucuuuauugaaug

SEQ ID NO: 329384 - RNA, 19 nt, Artificial Sequence
  Description of Artificial Sequence: Synthetic oligonucleotide
  Antisense Strand to SEQ ID NO: 329383
cauucaauaaagaauguca

SEQ ID NO: 329385 - RNA, 19 nt, Artificial Sequence
  Description of Artificial Sequence: Synthetic oligonucleotide
  Sense Strand Starting at position 135 of SEQ ID NO: 318518
aucuacaagguuugagauu

SEQ ID NO: 329386 - RNA, 19 nt, Artificial Sequence
  Description of Artificial Sequence: Synthetic oligonucleotide
  Antisense Strand to SEQ ID NO: 329385
aaucucaaaccuuguagau

SEQ ID NO: 329387 - RNA, 19 nt, Artificial Sequence
  Description of Artificial Sequence: Synthetic oligonucleotide
  Sense Strand Starting at position 135 of SEQ ID NO: 318519
ucuacaagguuugagauuu

SEQ ID NO: 329388 - RNA, 19 nt, Artificial Sequence
  Description of Artificial Sequence: Synthetic oligonucleotide
  Antisense Strand to SEQ ID NO: 329387
aaaucucaaaccuuguaga

SEQ ID NO: 329389 - RNA, 19 nt, Artificial Sequence
  Description of Artificial Sequence: Synthetic oligonucleotide
  Sense Strand Starting at position 135 of SEQ ID NO: 318591
uuacuugucuuuguuagaa

SEQ ID NO: 329390 - RNA, 19 nt, Artificial Sequence
  Description of Artificial Sequence: Synthetic oligonucleotide
  Antisense Strand to SEQ ID NO: 329389
uucuaacaaagacaaguaa

SEQ ID NO: 329391 - RNA, 19 nt, Artificial Sequence
  Description of Artificial Sequence: Synthetic oligonucleotide
  Sense Strand Starting at position 135 of SEQ ID NO: 318642
ugaagcuauugaccuauga

SEQ ID NO: 329392 - RNA, 19 nt, Artificial Sequence
  Description of Artificial Sequence: Synthetic oligonucleotide
  Antisense Strand to SEQ ID NO: 329391
ucauaggucaauagcuuca

SEQ ID NO: 329393 - RNA, 19 nt, Artificial Sequence
  Description of Artificial Sequence: Synthetic oligonucleotide
  Sense Strand Starting at position 135 of SEQ ID NO: 318748
uauacuaaggauugugcua

SEQ ID NO: 329394 - RNA, 19 nt, Artificial Sequence
  Description of Artificial Sequence: Synthetic oligonucleotide
  Antisense Strand to SEQ ID NO: 329393
uagcacaauccuuaguaua

SEQ ID NO: 329395 - RNA, 19 nt, Artificial Sequence
  Description of Artificial Sequence: Synthetic oligonucleotide
  Sense Strand Starting at position 135 of SEQ ID NO: 318797
aggagugagguuuagucuu

SEQ ID NO: 329396 - RNA, 19 nt, Artificial Sequence
  Description of Artificial Sequence: Synthetic oligonucleotide
  Antisense Strand to SEQ ID NO: 329395
aagacuaaaccucacuccu

SEQ ID NO: 329397 - RNA, 19 nt, Artificial Sequence
  Description of Artificial Sequence: Synthetic oligonucleotide
  Sense Strand Starting at position 135 of SEQ ID NO: 318799
gagugagguuuagucuuga

SEQ ID NO: 329398 - RNA, 19 nt, Artificial Sequence
  Description of Artificial Sequence: Synthetic oligonucleotide
  Antisense Strand to SEQ ID NO: 329397
ucaagacuaaaccucacuc

SEQ ID NO: 329399 - RNA, 19 nt, Artificial Sequence
  Description of Artificial Sequence: Synthetic oligonucleotide
  Sense Strand Starting at position 135 of SEQ ID NO: 318804
agguuuagucuugaucuuc

SEQ ID NO: 329400 - RNA, 19 nt, Artificial Sequence
  Description of Artificial Sequence: Synthetic oligonucleotide
  Antisense Strand to SEQ ID NO: 329399
gaagaucaagacuaaaccu

SEQ ID NO: 329401 - RNA, 19 nt, Artificial Sequence
  Description of Artificial Sequence: Synthetic oligonucleotide
  Sense Strand Starting at position 135 of SEQ ID NO: 318826
uugaucaguccuggaaggu

SEQ ID NO: 329402 - RNA, 19 nt, Artificial Sequence
  Description of Artificial Sequence: Synthetic oligonucleotide
  Antisense Strand to SEQ ID NO: 329401
accuuccaggacugaucaa

SEQ ID NO: 329403 - RNA, 19 nt, Artificial Sequence
  Description of Artificial Sequence: Synthetic oligonucleotide
  Sense Strand Starting at position 135 of SEQ ID NO: 318913
ggugacugguucucuuuga

SEQ ID NO: 329404 - RNA, 19 nt, Artificial Sequence
  Description of Artificial Sequence: Synthetic oligonucleotide
  Antisense Strand to SEQ ID NO: 329403
ucaaagagaaccagucacc

SEQ ID NO: 329405 - RNA, 19 nt, Artificial Sequence
  Description of Artificial Sequence: Synthetic oligonucleotide
  Sense Strand Starting at position 135 of SEQ ID NO: 318917
acugguucucuuugaggac

SEQ ID NO: 329406 - RNA, 19 nt, Artificial Sequence
  Description of Artificial Sequence: Synthetic oligonucleotide
  Antisense Strand to SEQ ID NO: 329405
guccucaaagagaaccagu

SEQ ID NO: 329407 - RNA, 19 nt, Artificial Sequence
  Description of Artificial Sequence: Synthetic oligonucleotide
  Sense Strand Starting at position 135 of SEQ ID NO: 318936
agagaagauugccuguaga

SEQ ID NO: 329408 - RNA, 19 nt, Artificial Sequence
  Description of Artificial Sequence: Synthetic oligonucleotide
  Antisense Strand to SEQ ID NO: 329407
ucuacaggcaaucuucucu

SEQ ID NO: 329409 - RNA, 19 nt, Artificial Sequence
  Description of Artificial Sequence: Synthetic oligonucleotide
  Sense Strand Starting at position 135 of SEQ ID NO: 318939
gaagauugccuguagaggu

SEQ ID NO: 329410 - RNA, 19 nt, Artificial Sequence
  Description of Artificial Sequence: Synthetic oligonucleotide
  Antisense Strand to SEQ ID NO: 329409
accucuacaggcaaucuuc

SEQ ID NO: 329411 - RNA, 19 nt, Artificial Sequence
  Description of Artificial Sequence: Synthetic oligonucleotide
  Sense Strand Starting at position 135 of SEQ ID NO: 319208
gcaggaggauuacucaagu

SEQ ID NO: 329412 - RNA, 19 nt, Artificial Sequence
  Description of Artificial Sequence: Synthetic oligonucleotide
  Antisense Strand to SEQ ID NO: 329411
acuugaguaauccuccugc

SEQ ID NO: 329413 - RNA, 19 nt, Artificial Sequence
  Description of Artificial Sequence: Synthetic oligonucleotide
  Sense Strand Starting at position 136 of SEQ ID NO: 315311
gcaugaucuggcugugaga

SEQ ID NO: 329414 - RNA, 19 nt, Artificial Sequence
  Description of Artificial Sequence: Synthetic oligonucleotide
  Antisense Strand to SEQ ID NO: 329413
ucucacagccagaucaugc

SEQ ID NO: 329415 - RNA, 19 nt, Artificial Sequence
  Description of Artificial Sequence: Synthetic oligonucleotide
  Sense Strand Starting at position 136 of SEQ ID NO: 315313
augaucuggcugugagaua

SEQ ID NO: 329416 - RNA, 19 nt, Artificial Sequence
  Description of Artificial Sequence: Synthetic oligonucleotide
  Antisense Strand to SEQ ID NO: 329415
uaucucacagccagaucau

SEQ ID NO: 329417 - RNA, 19 nt, Artificial Sequence
  Description of Artificial Sequence: Synthetic oligonucleotide
  Sense Strand Starting at position 136 of SEQ ID NO: 316654
uuauguuuauugucacuga

SEQ ID NO: 329418 - RNA, 19 nt, Artificial Sequence
  Description of Artificial Sequence: Synthetic oligonucleotide
  Antisense Strand to SEQ ID NO: 329417
ucagugacaauaaacauaa

SEQ ID NO: 329419 - RNA, 19 nt, Artificial Sequence
  Description of Artificial Sequence: Synthetic oligonucleotide
  Sense Strand Starting at position 136 of SEQ ID NO: 316657
uguuuauugucacugagca

SEQ ID NO: 329420 - RNA, 19 nt, Artificial Sequence
  Description of Artificial Sequence: Synthetic oligonucleotide
  Antisense Strand to SEQ ID NO: 329419
ugcucagugacaauaaaca

SEQ ID NO: 329421 - RNA, 19 nt, Artificial Sequence
  Description of Artificial Sequence: Synthetic oligonucleotide
  Sense Strand Starting at position 136 of SEQ ID NO: 316658
guuuauugucacugagcag

SEQ ID NO: 329422 - RNA, 19 nt, Artificial Sequence
  Description of Artificial Sequence: Synthetic oligonucleotide
  Antisense Strand to SEQ ID NO: 329421
cugcucagugacaauaaac

SEQ ID NO: 329423 - RNA, 19 nt, Artificial Sequence
  Description of Artificial Sequence: Synthetic oligonucleotide
  Sense Strand Starting at position 136 of SEQ ID NO: 316680
gucuaaugacuccaaggca

SEQ ID NO: 329424 - RNA, 19 nt, Artificial Sequence
  Description of Artificial Sequence: Synthetic oligonucleotide
  Antisense Strand to SEQ ID NO: 329423
ugccuuggagucauuagac

SEQ ID NO: 329425 - RNA, 19 nt, Artificial Sequence
  Description of Artificial Sequence: Synthetic oligonucleotide
  Sense Strand Starting at position 136 of SEQ ID NO: 316705
ucagauauugcacauugca

SEQ ID NO: 329426 - RNA, 19 nt, Artificial Sequence
  Description of Artificial Sequence: Synthetic oligonucleotide
  Antisense Strand to SEQ ID NO: 329425
ugcaaugugcaauaucuga

SEQ ID NO: 329427 - RNA, 19 nt, Artificial Sequence
  Description of Artificial Sequence: Synthetic oligonucleotide
  Sense Strand Starting at position 136 of SEQ ID NO: 316807
acgccauaguuccuaauuu

SEQ ID NO: 329428 - RNA, 19 nt, Artificial Sequence
  Description of Artificial Sequence: Synthetic oligonucleotide
  Antisense Strand to SEQ ID NO: 329427
aaauuaggaacuauggcgu

SEQ ID NO: 329429 - RNA, 19 nt, Artificial Sequence
  Description of Artificial Sequence: Synthetic oligonucleotide
  Sense Strand Starting at position 136 of SEQ ID NO: 316829
aaagauauuagcggagagu

SEQ ID NO: 329430 - RNA, 19 nt, Artificial Sequence
  Description of Artificial Sequence: Synthetic oligonucleotide
  Antisense Strand to SEQ ID NO: 329429
acucuccgcuaauaucuuu

SEQ ID NO: 329431 - RNA, 19 nt, Artificial Sequence
  Description of Artificial Sequence: Synthetic oligonucleotide
  Sense Strand Starting at position 136 of SEQ ID NO: 316832
gauauuagcggagaguaau

SEQ ID NO: 329432 - RNA, 19 nt, Artificial Sequence
  Description of Artificial Sequence: Synthetic oligonucleotide
  Antisense Strand to SEQ ID NO: 329431
auuacucuccgcuaauauc

SEQ ID NO: 329433 - RNA, 19 nt, Artificial Sequence
  Description of Artificial Sequence: Synthetic oligonucleotide
  Sense Strand Starting at position 136 of SEQ ID NO: 316840
cggagaguaauauggauua

SEQ ID NO: 329434 - RNA, 19 nt, Artificial Sequence
  Description of Artificial Sequence: Synthetic oligonucleotide
  Antisense Strand to SEQ ID NO: 329433
uaauccauauuacucuccg

SEQ ID NO: 329435 - RNA, 19 nt, Artificial Sequence
  Description of Artificial Sequence: Synthetic oligonucleotide
  Sense Strand Starting at position 136 of SEQ ID NO: 317879
uguugucuuggagacgagu

SEQ ID NO: 329436 - RNA, 19 nt, Artificial Sequence
  Description of Artificial Sequence: Synthetic oligonucleotide
  Antisense Strand to SEQ ID NO: 329435
acucgucuccaagacaaca

SEQ ID NO: 329437 - RNA, 19 nt, Artificial Sequence
  Description of Artificial Sequence: Synthetic oligonucleotide
  Sense Strand Starting at position 136 of SEQ ID NO: 318049
gaccgaaaucgccauugcu

SEQ ID NO: 329438 - RNA, 19 nt, Artificial Sequence
  Description of Artificial Sequence: Synthetic oligonucleotide
  Antisense Strand to SEQ ID NO: 329437
agcaauggcgauuucgguc

SEQ ID NO: 329439 - RNA, 19 nt, Artificial Sequence
  Description of Artificial Sequence: Synthetic oligonucleotide
  Sense Strand Starting at position 136 of SEQ ID NO: 318136
cugaaugcguuacugggaa

SEQ ID NO: 329440 - RNA, 19 nt, Artificial Sequence
  Description of Artificial Sequence: Synthetic oligonucleotide
  Antisense Strand to SEQ ID NO: 329439
uucccaguaacgcauucag

SEQ ID NO: 329441 - RNA, 19 nt, Artificial Sequence
  Description of Artificial Sequence: Synthetic oligonucleotide
  Sense Strand Starting at position 136 of SEQ ID NO: 318159
caguaauagcgguagguau

SEQ ID NO: 329442 - RNA, 19 nt, Artificial Sequence
  Description of Artificial Sequence: Synthetic oligonucleotide
  Antisense Strand to SEQ ID NO: 329441
auaccuaccgcuauuacug

SEQ ID NO: 329443 - RNA, 19 nt, Artificial Sequence
  Description of Artificial Sequence: Synthetic oligonucleotide
  Sense Strand Starting at position 136 of SEQ ID NO: 318342
aggguuugaacccacguau

SEQ ID NO: 329444 - RNA, 19 nt, Artificial Sequence
  Description of Artificial Sequence: Synthetic oligonucleotide
  Antisense Strand to SEQ ID NO: 329443
auacguggguucaaacccu

SEQ ID NO: 329445 - RNA, 19 nt, Artificial Sequence
  Description of Artificial Sequence: Synthetic oligonucleotide
  Sense Strand Starting at position 136 of SEQ ID NO: 318353
ccacguauucugggucuga

SEQ ID NO: 329446 - RNA, 19 nt, Artificial Sequence
  Description of Artificial Sequence: Synthetic oligonucleotide
  Antisense Strand to SEQ ID NO: 329445
ucagacccagaauacgugg

SEQ ID NO: 329447 - RNA, 19 nt, Artificial Sequence
  Description of Artificial Sequence: Synthetic oligonucleotide
  Sense Strand Starting at position 136 of SEQ ID NO: 318369
ugaguccauucucuuacua

SEQ ID NO: 329448 - RNA, 19 nt, Artificial Sequence
  Description of Artificial Sequence: Synthetic oligonucleotide
  Antisense Strand to SEQ ID NO: 329447
uaguaagagaauggacuca

SEQ ID NO: 329449 - RNA, 19 nt, Artificial Sequence
  Description of Artificial Sequence: Synthetic oligonucleotide
  Sense Strand Starting at position 136 of SEQ ID NO: 318392
acuguaugucaugauugga

SEQ ID NO: 329450 - RNA, 19 nt, Artificial Sequence
  Description of Artificial Sequence: Synthetic oligonucleotide
  Antisense Strand to SEQ ID NO: 329449
uccaaucaugacauacagu

SEQ ID NO: 329451 - RNA, 19 nt, Artificial Sequence
  Description of Artificial Sequence: Synthetic oligonucleotide
  Sense Strand Starting at position 136 of SEQ ID NO: 318395
guaugucaugauuggaaug

SEQ ID NO: 329452 - RNA, 19 nt, Artificial Sequence
  Description of Artificial Sequence: Synthetic oligonucleotide
  Antisense Strand to SEQ ID NO: 329451
cauuccaaucaugacauac

SEQ ID NO: 329453 - RNA, 19 nt, Artificial Sequence
  Description of Artificial Sequence: Synthetic oligonucleotide
  Sense Strand Starting at position 136 of SEQ ID NO: 318414
gacaguuuaugaguaaagu

SEQ ID NO: 329454 - RNA, 19 nt, Artificial Sequence
  Description of Artificial Sequence: Synthetic oligonucleotide
  Antisense Strand to SEQ ID NO: 329453
acuuuacucauaaacuguc

SEQ ID NO: 329455 - RNA, 19 nt, Artificial Sequence
  Description of Artificial Sequence: Synthetic oligonucleotide
  Sense Strand Starting at position 136 of SEQ ID NO: 318415
acaguuuaugaguaaaguc

SEQ ID NO: 329456 - RNA, 19 nt, Artificial Sequence
  Description of Artificial Sequence: Synthetic oligonucleotide
  Antisense Strand to SEQ ID NO: 329455
gacuuuacucauaaacugu

SEQ ID NO: 329457 - RNA, 19 nt, Artificial Sequence
  Description of Artificial Sequence: Synthetic oligonucleotide
  Sense Strand Starting at position 136 of SEQ ID NO: 318422
augaguaaagucugacuuc

SEQ ID NO: 329458 - RNA, 19 nt, Artificial Sequence
  Description of Artificial Sequence: Synthetic oligonucleotide
  Antisense Strand to SEQ ID NO: 329457
gaagucagacuuuacucau

SEQ ID NO: 329459 - RNA, 19 nt, Artificial Sequence
  Description of Artificial Sequence: Synthetic oligonucleotide
  Sense Strand Starting at position 136 of SEQ ID NO: 318448
ggcuacaagcuccauuaga

SEQ ID NO: 329460 - RNA, 19 nt, Artificial Sequence
  Description of Artificial Sequence: Synthetic oligonucleotide
  Antisense Strand to SEQ ID NO: 329459
ucuaauggagcuuguagcc

SEQ ID NO: 329461 - RNA, 19 nt, Artificial Sequence
  Description of Artificial Sequence: Synthetic oligonucleotide
  Sense Strand Starting at position 136 of SEQ ID NO: 318456
gcuccauuagagcagggau

SEQ ID NO: 329462 - RNA, 19 nt, Artificial Sequence
  Description of Artificial Sequence: Synthetic oligonucleotide
  Antisense Strand to SEQ ID NO: 329461
aucccugcucuaauggagc

SEQ ID NO: 329463 - RNA, 19 nt, Artificial Sequence
  Description of Artificial Sequence: Synthetic oligonucleotide
  Sense Strand Starting at position 136 of SEQ ID NO: 318458
uccauuagagcagggauau

SEQ ID NO: 329464 - RNA, 19 nt, Artificial Sequence
  Description of Artificial Sequence: Synthetic oligonucleotide
  Antisense Strand to SEQ ID NO: 329463
auaucccugcucuaaugga

SEQ ID NO: 329465 - RNA, 19 nt, Artificial Sequence
  Description of Artificial Sequence: Synthetic oligonucleotide
  Sense Strand Starting at position 136 of SEQ ID NO: 318459
ccauuagagcagggauauu

SEQ ID NO: 329466 - RNA, 19 nt, Artificial Sequence
  Description of Artificial Sequence: Synthetic oligonucleotide
  Antisense Strand to SEQ ID NO: 329465
aauaucccugcucuaaugg

SEQ ID NO: 329467 - RNA, 19 nt, Artificial Sequence
  Description of Artificial Sequence: Synthetic oligonucleotide
  Sense Strand Starting at position 136 of SEQ ID NO: 318605
gguggaggauaucacaaau

SEQ ID NO: 329468 - RNA, 19 nt, Artificial Sequence
  Description of Artificial Sequence: Synthetic oligonucleotide
  Antisense Strand to SEQ ID NO: 329467
auuugugauauccuccacc

SEQ ID NO: 329469 - RNA, 19 nt, Artificial Sequence
  Description of Artificial Sequence: Synthetic oligonucleotide
  Sense Strand Starting at position 136 of SEQ ID NO: 318611
ggauaucacaaaugguagu

SEQ ID NO: 329470 - RNA, 19 nt, Artificial Sequence
  Description of Artificial Sequence: Synthetic oligonucleotide
  Antisense Strand to SEQ ID NO: 329469
acuaccauuugugauaucc

SEQ ID NO: 329471 - RNA, 19 nt, Artificial Sequence
  Description of Artificial Sequence: Synthetic oligonucleotide
  Sense Strand Starting at position 136 of SEQ ID NO: 318622
augguagugccuugaugga

SEQ ID NO: 329472 - RNA, 19 nt, Artificial Sequence
  Description of Artificial Sequence: Synthetic oligonucleotide
  Antisense Strand to SEQ ID NO: 329471
uccaucaaggcacuaccau

SEQ ID NO: 329473 - RNA, 19 nt, Artificial Sequence
  Description of Artificial Sequence: Synthetic oligonucleotide
  Sense Strand Starting at position 136 of SEQ ID NO: 318852
uccagcugaggcuaaauau

SEQ ID NO: 329474 - RNA, 19 nt, Artificial Sequence
  Description of Artificial Sequence: Synthetic oligonucleotide
  Antisense Strand to SEQ ID NO: 329473
auauuuagccucagcugga

SEQ ID NO: 329475 - RNA, 19 nt, Artificial Sequence
  Description of Artificial Sequence: Synthetic oligonucleotide
  Sense Strand Starting at position 136 of SEQ ID NO: 318861
ggcuaaauauuccugcuuu

SEQ ID NO: 329476 - RNA, 19 nt, Artificial Sequence
  Description of Artificial Sequence: Synthetic oligonucleotide
  Antisense Strand to SEQ ID NO: 329475
aaagcaggaauauuuagcc

SEQ ID NO: 329477 - RNA, 19 nt, Artificial Sequence
  Description of Artificial Sequence: Synthetic oligonucleotide
  Sense Strand Starting at position 136 of SEQ ID NO: 319005
uuuguuauaucaccacagu

SEQ ID NO: 329478 - RNA, 19 nt, Artificial Sequence
  Description of Artificial Sequence: Synthetic oligonucleotide
  Antisense Strand to SEQ ID NO: 329477
acuguggugauauaacaaa

SEQ ID NO: 329479 - RNA, 19 nt, Artificial Sequence
  Description of Artificial Sequence: Synthetic oligonucleotide
  Sense Strand Starting at position 136 of SEQ ID NO: 319049
ugguguagaugcuuaauau

SEQ ID NO: 329480 - RNA, 19 nt, Artificial Sequence
  Description of Artificial Sequence: Synthetic oligonucleotide
  Antisense Strand to SEQ ID NO: 329479
auauuaagcaucuacacca

SEQ ID NO: 329481 - RNA, 19 nt, Artificial Sequence
  Description of Artificial Sequence: Synthetic oligonucleotide
  Sense Strand Starting at position 136 of SEQ ID NO: 319050
gguguagaugcuuaauauu

SEQ ID NO: 329482 - RNA, 19 nt, Artificial Sequence
  Description of Artificial Sequence: Synthetic oligonucleotide
  Antisense Strand to SEQ ID NO: 329481
aauauuaagcaucuacacc

SEQ ID NO: 329483 - RNA, 19 nt, Artificial Sequence
  Description of Artificial Sequence: Synthetic oligonucleotide
  Sense Strand Starting at position 136 of SEQ ID NO: 319090
ugacauucuuuauugaaug

SEQ ID NO: 329484 - RNA, 19 nt, Artificial Sequence
  Description of Artificial Sequence: Synthetic oligonucleotide
  Antisense Strand to SEQ ID NO: 329483
cauucaauaaagaauguca

SEQ ID NO: 329485 - RNA, 19 nt, Artificial Sequence
  Description of Artificial Sequence: Synthetic oligonucleotide
  Sense Strand Starting at position 136 of SEQ ID NO: 319135
aucuacaagguuugagauu

SEQ ID NO: 329486 - RNA, 19 nt, Artificial Sequence
  Description of Artificial Sequence: Synthetic oligonucleotide
  Antisense Strand to SEQ ID NO: 329485
aaucucaaaccuuguagau

SEQ ID NO: 329487 - RNA, 19 nt, Artificial Sequence
  Description of Artificial Sequence: Synthetic oligonucleotide
  Sense Strand Starting at position 136 of SEQ ID NO: 319136
ucuacaagguuugagauuu

SEQ ID NO: 329488 - RNA, 19 nt, Artificial Sequence
  Description of Artificial Sequence: Synthetic oligonucleotide
  Antisense Strand to SEQ ID NO: 329487
aaaucucaaaccuuguaga

SEQ ID NO: 329489 - RNA, 19 nt, Artificial Sequence
  Description of Artificial Sequence: Synthetic oligonucleotide
  Sense Strand Starting at position 136 of SEQ ID NO: 319207
uuuacuugucuuuguuaga

SEQ ID NO: 329490 - RNA, 19 nt, Artificial Sequence
  Description of Artificial Sequence: Synthetic oligonucleotide
  Antisense Strand to SEQ ID NO: 329489
ucuaacaaagacaaguaaa

SEQ ID NO: 329491 - RNA, 19 nt, Artificial Sequence
  Description of Artificial Sequence: Synthetic oligonucleotide
  Sense Strand Starting at position 136 of SEQ ID NO: 319208
uuacuugucuuuguuagaa

SEQ ID NO: 329492 - RNA, 19 nt, Artificial Sequence
  Description of Artificial Sequence: Synthetic oligonucleotide
  Antisense Strand to SEQ ID NO: 329491
uucuaacaaagacaaguaa

SEQ ID NO: 329493 - RNA, 19 nt, Artificial Sequence
  Description of Artificial Sequence: Synthetic oligonucleotide
  Sense Strand Starting at position 137 of SEQ ID NO: 315353
acauaaagauguuugagua

SEQ ID NO: 329494 - RNA, 19 nt, Artificial Sequence
  Description of Artificial Sequence: Synthetic oligonucleotide
  Antisense Strand to SEQ ID NO: 329493
uacucaaacaucuuuaugu

SEQ ID NO: 329495 - RNA, 19 nt, Artificial Sequence
  Description of Artificial Sequence: Synthetic oligonucleotide
  Sense Strand Starting at position 137 of SEQ ID NO: 315354
cauaaagauguuugaguaa

SEQ ID NO: 329496 - RNA, 19 nt, Artificial Sequence
  Description of Artificial Sequence: Synthetic oligonucleotide
  Antisense Strand to SEQ ID NO: 329495
uuacucaaacaucuuuaug

SEQ ID NO: 329497 - RNA, 19 nt, Artificial Sequence
  Description of Artificial Sequence: Synthetic oligonucleotide
  Sense Strand Starting at position 137 of SEQ ID NO: 315357
aaagauguuugaguaacua

SEQ ID NO: 329498 - RNA, 19 nt, Artificial Sequence
  Description of Artificial Sequence: Synthetic oligonucleotide
  Antisense Strand to SEQ ID NO: 329497
uaguuacucaaacaucuuu

SEQ ID NO: 329499 - RNA, 19 nt, Artificial Sequence
  Description of Artificial Sequence: Synthetic oligonucleotide
  Sense Strand Starting at position 137 of SEQ ID NO: 315529
ugugcuuguagggaauaau

SEQ ID NO: 329500 - RNA, 19 nt, Artificial Sequence
  Description of Artificial Sequence: Synthetic oligonucleotide
  Antisense Strand to SEQ ID NO: 329499
auuauucccuacaagcaca

SEQ ID NO: 329501 - RNA, 19 nt, Artificial Sequence
  Description of Artificial Sequence: Synthetic oligonucleotide
  Sense Strand Starting at position 137 of SEQ ID NO: 315538
agggaauaauaagacagaa

SEQ ID NO: 329502 - RNA, 19 nt, Artificial Sequence
  Description of Artificial Sequence: Synthetic oligonucleotide
  Antisense Strand to SEQ ID NO: 329501
uucugucuuauuauucccu

SEQ ID NO: 329503 - RNA, 19 nt, Artificial Sequence
  Description of Artificial Sequence: Synthetic oligonucleotide
  Sense Strand Starting at position 137 of SEQ ID NO: 315853
gaguguugcagugcucagu

SEQ ID NO: 329504 - RNA, 19 nt, Artificial Sequence
  Description of Artificial Sequence: Synthetic oligonucleotide
  Antisense Strand to SEQ ID NO: 329503
acugagcacugcaacacuc

SEQ ID NO: 329505 - RNA, 19 nt, Artificial Sequence
  Description of Artificial Sequence: Synthetic oligonucleotide
  Sense Strand Starting at position 137 of SEQ ID NO: 316178
gauaauauguggguuccua

SEQ ID NO: 329506 - RNA, 19 nt, Artificial Sequence
  Description of Artificial Sequence: Synthetic oligonucleotide
  Antisense Strand to SEQ ID NO: 329505
uaggaacccacauauuauc

SEQ ID NO: 329507 - RNA, 19 nt, Artificial Sequence
  Description of Artificial Sequence: Synthetic oligonucleotide
  Sense Strand Starting at position 137 of SEQ ID NO: 316507
agauauguauaauuccgau

SEQ ID NO: 329508 - RNA, 19 nt, Artificial Sequence
  Description of Artificial Sequence: Synthetic oligonucleotide
  Antisense Strand to SEQ ID NO: 329507
aucggaauuauacauaucu

SEQ ID NO: 329509 - RNA, 19 nt, Artificial Sequence
  Description of Artificial Sequence: Synthetic oligonucleotide
  Sense Strand Starting at position 137 of SEQ ID NO: 316521
ccgauuauccaacaacugu

SEQ ID NO: 329510 - RNA, 19 nt, Artificial Sequence
  Description of Artificial Sequence: Synthetic oligonucleotide
  Antisense Strand to SEQ ID NO: 329509
acaguuguuggauaaucgg

SEQ ID NO: 329511 - RNA, 19 nt, Artificial Sequence
  Description of Artificial Sequence: Synthetic oligonucleotide
  Sense Strand Starting at position 137 of SEQ ID NO: 316744
uaugauuaggcaggugaau

SEQ ID NO: 329512 - RNA, 19 nt, Artificial Sequence
  Description of Artificial Sequence: Synthetic oligonucleotide
  Antisense Strand to SEQ ID NO: 329511
auucaccugccuaaucaua

SEQ ID NO: 329513 - RNA, 19 nt, Artificial Sequence
  Description of Artificial Sequence: Synthetic oligonucleotide
  Sense Strand Starting at position 137 of SEQ ID NO: 316746
ugauuaggcaggugaauac

SEQ ID NO: 329514 - RNA, 19 nt, Artificial Sequence
  Description of Artificial Sequence: Synthetic oligonucleotide
  Antisense Strand to SEQ ID NO: 329513
guauucaccugccuaauca

SEQ ID NO: 329515 - RNA, 19 nt, Artificial Sequence
  Description of Artificial Sequence: Synthetic oligonucleotide
  Sense Strand Starting at position 137 of SEQ ID NO: 316755
aggugaauacuauguucua

SEQ ID NO: 329516 - RNA, 19 nt, Artificial Sequence
  Description of Artificial Sequence: Synthetic oligonucleotide
  Antisense Strand to SEQ ID NO: 329515
uagaacauaguauucaccu

SEQ ID NO: 329517 - RNA, 19 nt, Artificial Sequence
  Description of Artificial Sequence: Synthetic oligonucleotide
  Sense Strand Starting at position 137 of SEQ ID NO: 316756
ggugaauacuauguucuaa

SEQ ID NO: 329518 - RNA, 19 nt, Artificial Sequence
  Description of Artificial Sequence: Synthetic oligonucleotide
  Antisense Strand to SEQ ID NO: 329517
uuagaacauaguauucacc

SEQ ID NO: 329519 - RNA, 19 nt, Artificial Sequence
  Description of Artificial Sequence: Synthetic oligonucleotide
  Sense Strand Starting at position 137 of SEQ ID NO: 316879
gggagaauguugccuccaa

SEQ ID NO: 329520 - RNA, 19 nt, Artificial Sequence
  Description of Artificial Sequence: Synthetic oligonucleotide
  Antisense Strand to SEQ ID NO: 329519
uuggaggcaacauucuccc

SEQ ID NO: 329521 - RNA, 19 nt, Artificial Sequence
  Description of Artificial Sequence: Synthetic oligonucleotide
  Sense Strand Starting at position 137 of SEQ ID NO: 316880
ggagaauguugccuccaag

SEQ ID NO: 329522 - RNA, 19 nt, Artificial Sequence
  Description of Artificial Sequence: Synthetic oligonucleotide
  Antisense Strand to SEQ ID NO: 329521
cuuggaggcaacauucucc

SEQ ID NO: 329523 - RNA, 19 nt, Artificial Sequence
  Description of Artificial Sequence: Synthetic oligonucleotide
  Sense Strand Starting at position 137 of SEQ ID NO: 316883
gaauguugccuccaagacc

SEQ ID NO: 329524 - RNA, 19 nt, Artificial Sequence
  Description of Artificial Sequence: Synthetic oligonucleotide
  Antisense Strand to SEQ ID NO: 329523
ggucuuggaggcaacauuc

SEQ ID NO: 329525 - RNA, 19 nt, Artificial Sequence
  Description of Artificial Sequence: Synthetic oligonucleotide
  Sense Strand Starting at position 137 of SEQ ID NO: 316942
uaccauggauguuccagau

SEQ ID NO: 329526 - RNA, 19 nt, Artificial Sequence
  Description of Artificial Sequence: Synthetic oligonucleotide
  Antisense Strand to SEQ ID NO: 329525
aucuggaacauccauggua

SEQ ID NO: 329527 - RNA, 19 nt, Artificial Sequence
  Description of Artificial Sequence: Synthetic oligonucleotide
  Sense Strand Starting at position 137 of SEQ ID NO: 316952
guuccagauguccagauau

SEQ ID NO: 329528 - RNA, 19 nt, Artificial Sequence
  Description of Artificial Sequence: Synthetic oligonucleotide
  Antisense Strand to SEQ ID NO: 329527
auaucuggacaucuggaac

SEQ ID NO: 329529 - RNA, 19 nt, Artificial Sequence
  Description of Artificial Sequence: Synthetic oligonucleotide
  Sense Strand Starting at position 137 of SEQ ID NO: 316960
uguccagauaugggauuaa

SEQ ID NO: 329530 - RNA, 19 nt, Artificial Sequence
  Description of Artificial Sequence: Synthetic oligonucleotide
  Antisense Strand to SEQ ID NO: 329529
uuaaucccauaucuggaca

SEQ ID NO: 329531 - RNA, 19 nt, Artificial Sequence
  Description of Artificial Sequence: Synthetic oligonucleotide
  Sense Strand Starting at position 137 of SEQ ID NO: 317037
ugcacauaucagugaugga

SEQ ID NO: 329532 - RNA, 19 nt, Artificial Sequence
  Description of Artificial Sequence: Synthetic oligonucleotide
  Antisense Strand to SEQ ID NO: 329531
uccaucacugauaugugca

SEQ ID NO: 329533 - RNA, 19 nt, Artificial Sequence
  Description of Artificial Sequence: Synthetic oligonucleotide
  Sense Strand Starting at position 137 of SEQ ID NO: 317190
uaggaagagccuggaugau

SEQ ID NO: 329534 - RNA, 19 nt, Artificial Sequence
  Description of Artificial Sequence: Synthetic oligonucleotide
  Antisense Strand to SEQ ID NO: 329533
aucauccaggcucuuccua

SEQ ID NO: 329535 - RNA, 19 nt, Artificial Sequence
  Description of Artificial Sequence: Synthetic oligonucleotide
  Sense Strand Starting at position 137 of SEQ ID NO: 317226
acagaaagacgauguggua

SEQ ID NO: 329536 - RNA, 19 nt, Artificial Sequence
  Description of Artificial Sequence: Synthetic oligonucleotide
  Antisense Strand to SEQ ID NO: 329535
uaccacaucgucuuucugu

SEQ ID NO: 329537 - RNA, 19 nt, Artificial Sequence
  Description of Artificial Sequence: Synthetic oligonucleotide
  Sense Strand Starting at position 137 of SEQ ID NO: 317518
gauagcuugugauuaugaa

SEQ ID NO: 329538 - RNA, 19 nt, Artificial Sequence
  Description of Artificial Sequence: Synthetic oligonucleotide
  Antisense Strand to SEQ ID NO: 329537
uucauaaucacaagcuauc

SEQ ID NO: 329539 - RNA, 19 nt, Artificial Sequence
  Description of Artificial Sequence: Synthetic oligonucleotide
  Sense Strand Starting at position 137 of SEQ ID NO: 317519
auagcuugugauuaugaaa

SEQ ID NO: 329540 - RNA, 19 nt, Artificial Sequence
  Description of Artificial Sequence: Synthetic oligonucleotide
  Antisense Strand to SEQ ID NO: 329539
uuucauaaucacaagcuau

SEQ ID NO: 329541 - RNA, 19 nt, Artificial Sequence
  Description of Artificial Sequence: Synthetic oligonucleotide
  Sense Strand Starting at position 137 of SEQ ID NO: 317590
guaagaugaggaugcuuau

SEQ ID NO: 329542 - RNA, 19 nt, Artificial Sequence
  Description of Artificial Sequence: Synthetic oligonucleotide
  Antisense Strand to SEQ ID NO: 329541
auaagcauccucaucuuac

SEQ ID NO: 329543 - RNA, 19 nt, Artificial Sequence
  Description of Artificial Sequence: Synthetic oligonucleotide
  Sense Strand Starting at position 137 of SEQ ID NO: 317593
agaugaggaugcuuauugu

SEQ ID NO: 329544 - RNA, 19 nt, Artificial Sequence
  Description of Artificial Sequence: Synthetic oligonucleotide
  Antisense Strand to SEQ ID NO: 329543
acaauaagcauccucaucu

SEQ ID NO: 329545 - RNA, 19 nt, Artificial Sequence
  Description of Artificial Sequence: Synthetic oligonucleotide
  Sense Strand Starting at position 137 of SEQ ID NO: 317699
cuuuaaucuguggauacau

SEQ ID NO: 329546 - RNA, 19 nt, Artificial Sequence
  Description of Artificial Sequence: Synthetic oligonucleotide
  Antisense Strand to SEQ ID NO: 329545
auguauccacagauuaaag

SEQ ID NO: 329547 - RNA, 19 nt, Artificial Sequence
  Description of Artificial Sequence: Synthetic oligonucleotide
  Sense Strand Starting at position 137 of SEQ ID NO: 317738
auuaauauuggcuacaugu

SEQ ID NO: 329548 - RNA, 19 nt, Artificial Sequence
  Description of Artificial Sequence: Synthetic oligonucleotide
  Antisense Strand to SEQ ID NO: 329547
acauguagccaauauuaau

SEQ ID NO: 329549 - RNA, 19 nt, Artificial Sequence
  Description of Artificial Sequence: Synthetic oligonucleotide
  Sense Strand Starting at position 137 of SEQ ID NO: 317841
guuguugucucgaugaagu

SEQ ID NO: 329550 - RNA, 19 nt, Artificial Sequence
  Description of Artificial Sequence: Synthetic oligonucleotide
  Antisense Strand to SEQ ID NO: 329549
acuucaucgagacaacaac

SEQ ID NO: 329551 - RNA, 19 nt, Artificial Sequence
  Description of Artificial Sequence: Synthetic oligonucleotide
  Sense Strand Starting at position 137 of SEQ ID NO: 318030
ggcauuagugaucauugac

SEQ ID NO: 329552 - RNA, 19 nt, Artificial Sequence
  Description of Artificial Sequence: Synthetic oligonucleotide
  Antisense Strand to SEQ ID NO: 329551
gucaaugaucacuaaugcc

SEQ ID NO: 329553 - RNA, 19 nt, Artificial Sequence
  Description of Artificial Sequence: Synthetic oligonucleotide
  Sense Strand Starting at position 137 of SEQ ID NO: 318033
auuagugaucauugacaga

SEQ ID NO: 329554 - RNA, 19 nt, Artificial Sequence
  Description of Artificial Sequence: Synthetic oligonucleotide
  Antisense Strand to SEQ ID NO: 329553
ucugucaaugaucacuaau

SEQ ID NO: 329555 - RNA, 19 nt, Artificial Sequence
  Description of Artificial Sequence: Synthetic oligonucleotide
  Sense Strand Starting at position 137 of SEQ ID NO: 318043
auugacagaagucgauuau

SEQ ID NO: 329556 - RNA, 19 nt, Artificial Sequence
  Description of Artificial Sequence: Synthetic oligonucleotide
  Antisense Strand to SEQ ID NO: 329555
auaaucgacuucugucaau

SEQ ID NO: 329557 - RNA, 19 nt, Artificial Sequence
  Description of Artificial Sequence: Synthetic oligonucleotide
  Sense Strand Starting at position 137 of SEQ ID NO: 318277
ucaaauagacaaugugcua

SEQ ID NO: 329558 - RNA, 19 nt, Artificial Sequence
  Description of Artificial Sequence: Synthetic oligonucleotide
  Antisense Strand to SEQ ID NO: 329557
uagcacauugucuauuuga

SEQ ID NO: 329559 - RNA, 19 nt, Artificial Sequence
  Description of Artificial Sequence: Synthetic oligonucleotide
  Sense Strand Starting at position 137 of SEQ ID NO: 318308
aaugaugaaugaguugcua

SEQ ID NO: 329560 - RNA, 19 nt, Artificial Sequence
  Description of Artificial Sequence: Synthetic oligonucleotide
  Antisense Strand to SEQ ID NO: 329559
uagcaacucauucaucauu

SEQ ID NO: 329561 - RNA, 19 nt, Artificial Sequence
  Description of Artificial Sequence: Synthetic oligonucleotide
  Sense Strand Starting at position 137 of SEQ ID NO: 318602
uggcuuauggguuacauaa

SEQ ID NO: 329562 - RNA, 19 nt, Artificial Sequence
  Description of Artificial Sequence: Synthetic oligonucleotide
  Antisense Strand to SEQ ID NO: 329561
uuauguaacccauaagcca

SEQ ID NO: 329563 - RNA, 19 nt, Artificial Sequence
  Description of Artificial Sequence: Synthetic oligonucleotide
  Sense Strand Starting at position 137 of SEQ ID NO: 318703
aguccaugcuaauuagaca

SEQ ID NO: 329564 - RNA, 19 nt, Artificial Sequence
  Description of Artificial Sequence: Synthetic oligonucleotide
  Antisense Strand to SEQ ID NO: 329563
ugucuaauuagcauggacu

SEQ ID NO: 329565 - RNA, 19 nt, Artificial Sequence
  Description of Artificial Sequence: Synthetic oligonucleotide
  Sense Strand Starting at position 137 of SEQ ID NO: 318871
uccugucuucguucuaguu

SEQ ID NO: 329566 - RNA, 19 nt, Artificial Sequence
  Description of Artificial Sequence: Synthetic oligonucleotide
  Antisense Strand to SEQ ID NO: 329565
aacuagaacgaagacagga

SEQ ID NO: 329567 - RNA, 19 nt, Artificial Sequence
  Description of Artificial Sequence: Synthetic oligonucleotide
  Sense Strand Starting at position 137 of SEQ ID NO: 318872
ccugucuucguucuaguua

SEQ ID NO: 329568 - RNA, 19 nt, Artificial Sequence
  Description of Artificial Sequence: Synthetic oligonucleotide
  Antisense Strand to SEQ ID NO: 329567
uaacuagaacgaagacagg

SEQ ID NO: 329569 - RNA, 19 nt, Artificial Sequence
  Description of Artificial Sequence: Synthetic oligonucleotide
  Sense Strand Starting at position 137 of SEQ ID NO: 318926
agaaauuaauuagcucagu

SEQ ID NO: 329570 - RNA, 19 nt, Artificial Sequence
  Description of Artificial Sequence: Synthetic oligonucleotide
  Antisense Strand to SEQ ID NO: 329569
acugagcuaauuaauuucu

SEQ ID NO: 329571 - RNA, 19 nt, Artificial Sequence
  Description of Artificial Sequence: Synthetic oligonucleotide
  Sense Strand Starting at position 137 of SEQ ID NO: 319070
aagcgauggcauuacauau

SEQ ID NO: 329572 - RNA, 19 nt, Artificial Sequence
  Description of Artificial Sequence: Synthetic oligonucleotide
  Antisense Strand to SEQ ID NO: 329571
auauguaaugccaucgcuu

SEQ ID NO: 329573 - RNA, 19 nt, Artificial Sequence
  Description of Artificial Sequence: Synthetic oligonucleotide
  Sense Strand Starting at position 138 of SEQ ID NO: 315323
gcaugagagcauuaaacca

SEQ ID NO: 329574 - RNA, 19 nt, Artificial Sequence
  Description of Artificial Sequence: Synthetic oligonucleotide
  Antisense Strand to SEQ ID NO: 329573
ugguuuaaugcucucaugc

SEQ ID NO: 329575 - RNA, 19 nt, Artificial Sequence
  Description of Artificial Sequence: Synthetic oligonucleotide
  Sense Strand Starting at position 138 of SEQ ID NO: 315347
aggaccugugacuguauau

SEQ ID NO: 329576 - RNA, 19 nt, Artificial Sequence
  Description of Artificial Sequence: Synthetic oligonucleotide
  Antisense Strand to SEQ ID NO: 329575
auauacagucacagguccu

SEQ ID NO: 329577 - RNA, 19 nt, Artificial Sequence
  Description of Artificial Sequence: Synthetic oligonucleotide
  Sense Strand Starting at position 138 of SEQ ID NO: 315605
agucauccuguguauacaa

SEQ ID NO: 329578 - RNA, 19 nt, Artificial Sequence
  Description of Artificial Sequence: Synthetic oligonucleotide
  Antisense Strand to SEQ ID NO: 329577
uuguauacacaggaugacu

SEQ ID NO: 329579 - RNA, 19 nt, Artificial Sequence
  Description of Artificial Sequence: Synthetic oligonucleotide
  Sense Strand Starting at position 138 of SEQ ID NO: 315607
ucauccuguguauacaaua

SEQ ID NO: 329580 - RNA, 19 nt, Artificial Sequence
  Description of Artificial Sequence: Synthetic oligonucleotide
  Antisense Strand to SEQ ID NO: 329579
uauuguauacacaggauga

SEQ ID NO: 329581 - RNA, 19 nt, Artificial Sequence
  Description of Artificial Sequence: Synthetic oligonucleotide
  Sense Strand Starting at position 138 of SEQ ID NO: 315832
auccauugguucucucaga

SEQ ID NO: 329582 - RNA, 19 nt, Artificial Sequence
  Description of Artificial Sequence: Synthetic oligonucleotide
  Antisense Strand to SEQ ID NO: 329581
ucugagagaaccaauggau

SEQ ID NO: 329583 - RNA, 19 nt, Artificial Sequence
  Description of Artificial Sequence: Synthetic oligonucleotide
  Sense Strand Starting at position 138 of SEQ ID NO: 315833
uccauugguucucucagaa

SEQ ID NO: 329584 - RNA, 19 nt, Artificial Sequence
  Description of Artificial Sequence: Synthetic oligonucleotide
  Antisense Strand to SEQ ID NO: 329583
uucugagagaaccaaugga

SEQ ID NO: 329585 - RNA, 19 nt, Artificial Sequence
  Description of Artificial Sequence: Synthetic oligonucleotide
  Sense Strand Starting at position 138 of SEQ ID NO: 315975
auugucuucucuuucuaga

SEQ ID NO: 329586 - RNA, 19 nt, Artificial Sequence
  Description of Artificial Sequence: Synthetic oligonucleotide
  Antisense Strand to SEQ ID NO: 329585
ucuagaaagagaagacaau

SEQ ID NO: 329587 - RNA, 19 nt, Artificial Sequence
  Description of Artificial Sequence: Synthetic oligonucleotide
  Sense Strand Starting at position 138 of SEQ ID NO: 316181
aggucuuuccuuuauugga

SEQ ID NO: 329588 - RNA, 19 nt, Artificial Sequence
  Description of Artificial Sequence: Synthetic oligonucleotide
  Antisense Strand to SEQ ID NO: 329587
uccaauaaaggaaagaccu

SEQ ID NO: 329589 - RNA, 19 nt, Artificial Sequence
  Description of Artificial Sequence: Synthetic oligonucleotide
  Sense Strand Starting at position 138 of SEQ ID NO: 316478
aagugcuugcccuaaggga

SEQ ID NO: 329590 - RNA, 19 nt, Artificial Sequence
  Description of Artificial Sequence: Synthetic oligonucleotide
  Antisense Strand to SEQ ID NO: 329589
ucccuuagggcaagcacuu

SEQ ID NO: 329591 - RNA, 19 nt, Artificial Sequence
  Description of Artificial Sequence: Synthetic oligonucleotide
  Sense Strand Starting at position 138 of SEQ ID NO: 316578
uugucuaaagauugacaca

SEQ ID NO: 329592 - RNA, 19 nt, Artificial Sequence
  Description of Artificial Sequence: Synthetic oligonucleotide
  Antisense Strand to SEQ ID NO: 329591
ugugucaaucuuuagacaa

SEQ ID NO: 329593 - RNA, 19 nt, Artificial Sequence
  Description of Artificial Sequence: Synthetic oligonucleotide
  Sense Strand Starting at position 138 of SEQ ID NO: 317446
aagugagaccugcauaugu

SEQ ID NO: 329594 - RNA, 19 nt, Artificial Sequence
  Description of Artificial Sequence: Synthetic oligonucleotide
  Antisense Strand to SEQ ID NO: 329593
acauaugcaggucucacuu

SEQ ID NO: 329595 - RNA, 19 nt, Artificial Sequence
  Description of Artificial Sequence: Synthetic oligonucleotide
  Sense Strand Starting at position 138 of SEQ ID NO: 317448
gugagaccugcauauguug

SEQ ID NO: 329596 - RNA, 19 nt, Artificial Sequence
  Description of Artificial Sequence: Synthetic oligonucleotide
  Antisense Strand to SEQ ID NO: 329595
caacauaugcaggucucac

SEQ ID NO: 329597 - RNA, 19 nt, Artificial Sequence
  Description of Artificial Sequence: Synthetic oligonucleotide
  Sense Strand Starting at position 138 of SEQ ID NO: 317451
agaccugcauauguugaaa

SEQ ID NO: 329598 - RNA, 19 nt, Artificial Sequence
  Description of Artificial Sequence: Synthetic oligonucleotide
  Antisense Strand to SEQ ID NO: 329597
uuucaacauaugcaggucu

SEQ ID NO: 329599 - RNA, 19 nt, Artificial Sequence
  Description of Artificial Sequence: Synthetic oligonucleotide
  Sense Strand Starting at position 138 of SEQ ID NO: 317480
gagugaagcuggguucuua

SEQ ID NO: 329600 - RNA, 19 nt, Artificial Sequence
  Description of Artificial Sequence: Synthetic oligonucleotide
  Antisense Strand to SEQ ID NO: 329599
uaagaacccagcuucacuc

SEQ ID NO: 329601 - RNA, 19 nt, Artificial Sequence
  Description of Artificial Sequence: Synthetic oligonucleotide
  Sense Strand Starting at position 138 of SEQ ID NO: 317618
ucguccugggcgucuuaua

SEQ ID NO: 329602 - RNA, 19 nt, Artificial Sequence
  Description of Artificial Sequence: Synthetic oligonucleotide
  Antisense Strand to SEQ ID NO: 329601
uauaagacgcccaggacga

SEQ ID NO: 329603 - RNA, 19 nt, Artificial Sequence
  Description of Artificial Sequence: Synthetic oligonucleotide
  Sense Strand Starting at position 138 of SEQ ID NO: 317675
gguagacccuguguugaca

SEQ ID NO: 329604 - RNA, 19 nt, Artificial Sequence
  Description of Artificial Sequence: Synthetic oligonucleotide
  Antisense Strand to SEQ ID NO: 329603
ugucaacacagggucuacc

SEQ ID NO: 329605 - RNA, 19 nt, Artificial Sequence
  Description of Artificial Sequence: Synthetic oligonucleotide
  Sense Strand Starting at position 138 of SEQ ID NO: 317694
guaguauugcuugaucaug

SEQ ID NO: 329606 - RNA, 19 nt, Artificial Sequence
  Description of Artificial Sequence: Synthetic oligonucleotide
  Antisense Strand to SEQ ID NO: 329605
caugaucaagcaauacuac

SEQ ID NO: 329607 - RNA, 19 nt, Artificial Sequence
  Description of Artificial Sequence: Synthetic oligonucleotide
  Sense Strand Starting at position 138 of SEQ ID NO: 317738
cgacauauuuacguugguu

SEQ ID NO: 329608 - RNA, 19 nt, Artificial Sequence
  Description of Artificial Sequence: Synthetic oligonucleotide
  Antisense Strand to SEQ ID NO: 329607
aaccaacguaaauaugucg

SEQ ID NO: 329609 - RNA, 19 nt, Artificial Sequence
  Description of Artificial Sequence: Synthetic oligonucleotide
  Sense Strand Starting at position 138 of SEQ ID NO: 317740
acauauuuacguugguuau

SEQ ID NO: 329610 - RNA, 19 nt, Artificial Sequence
  Description of Artificial Sequence: Synthetic oligonucleotide
  Antisense Strand to SEQ ID NO: 329609
auaaccaacguaaauaugu

SEQ ID NO: 329611 - RNA, 19 nt, Artificial Sequence
  Description of Artificial Sequence: Synthetic oligonucleotide
  Sense Strand Starting at position 138 of SEQ ID NO: 317741
cauauuuacguugguuauc

SEQ ID NO: 329612 - RNA, 19 nt, Artificial Sequence
  Description of Artificial Sequence: Synthetic oligonucleotide
  Antisense Strand to SEQ ID NO: 329611
gauaaccaacguaaauaug

SEQ ID NO: 329613 - RNA, 19 nt, Artificial Sequence
  Description of Artificial Sequence: Synthetic oligonucleotide
  Sense Strand Starting at position 138 of SEQ ID NO: 317781
cugugaaaugggcacauua

SEQ ID NO: 329614 - RNA, 19 nt, Artificial Sequence
  Description of Artificial Sequence: Synthetic oligonucleotide
  Antisense Strand to SEQ ID NO: 329613
uaaugugcccauuucacag

SEQ ID NO: 329615 - RNA, 19 nt, Artificial Sequence
  Description of Artificial Sequence: Synthetic oligonucleotide
  Sense Strand Starting at position 138 of SEQ ID NO: 317819
gagacaagcuugguuguua

SEQ ID NO: 329616 - RNA, 19 nt, Artificial Sequence
  Description of Artificial Sequence: Synthetic oligonucleotide
  Antisense Strand to SEQ ID NO: 329615
uaacaaccaagcuugucuc

SEQ ID NO: 329617 - RNA, 19 nt, Artificial Sequence
  Description of Artificial Sequence: Synthetic oligonucleotide
  Sense Strand Starting at position 138 of SEQ ID NO: 317820
agacaagcuugguuguuaa

SEQ ID NO: 329618 - RNA, 19 nt, Artificial Sequence
  Description of Artificial Sequence: Synthetic oligonucleotide
  Antisense Strand to SEQ ID NO: 329617
uuaacaaccaagcuugucu

SEQ ID NO: 329619 - RNA, 19 nt, Artificial Sequence
  Description of Artificial Sequence: Synthetic oligonucleotide
  Sense Strand Starting at position 138 of SEQ ID NO: 317823
caagcuugguuguuaauuu

SEQ ID NO: 329620 - RNA, 19 nt, Artificial Sequence
  Description of Artificial Sequence: Synthetic oligonucleotide
  Antisense Strand to SEQ ID NO: 329619
aaauuaacaaccaagcuug

SEQ ID NO: 329621 - RNA, 19 nt, Artificial Sequence
  Description of Artificial Sequence: Synthetic oligonucleotide
  Sense Strand Starting at position 138 of SEQ ID NO: 317864
cuguaaagugcguuucuua

SEQ ID NO: 329622 - RNA, 19 nt, Artificial Sequence
  Description of Artificial Sequence: Synthetic oligonucleotide
  Antisense Strand to SEQ ID NO: 329621
uaagaaacgcacuuuacag

SEQ ID NO: 329623 - RNA, 19 nt, Artificial Sequence
  Description of Artificial Sequence: Synthetic oligonucleotide
  Sense Strand Starting at position 138 of SEQ ID NO: 317913
gugucaguccucuaauaua

SEQ ID NO: 329624 - RNA, 19 nt, Artificial Sequence
  Description of Artificial Sequence: Synthetic oligonucleotide
  Antisense Strand to SEQ ID NO: 329623
uauauuagaggacugacac

SEQ ID NO: 329625 - RNA, 19 nt, Artificial Sequence
  Description of Artificial Sequence: Synthetic oligonucleotide
  Sense Strand Starting at position 138 of SEQ ID NO: 318041
uuucuccucguagaauauu

SEQ ID NO: 329626 - RNA, 19 nt, Artificial Sequence
  Description of Artificial Sequence: Synthetic oligonucleotide
  Antisense Strand to SEQ ID NO: 329625
aauauucuacgaggagaaa

SEQ ID NO: 329627 - RNA, 19 nt, Artificial Sequence
  Description of Artificial Sequence: Synthetic oligonucleotide
  Sense Strand Starting at position 138 of SEQ ID NO: 318082
ucaggacuucugcacuuaa

SEQ ID NO: 329628 - RNA, 19 nt, Artificial Sequence
  Description of Artificial Sequence: Synthetic oligonucleotide
  Antisense Strand to SEQ ID NO: 329627
uuaagugcagaaguccuga

SEQ ID NO: 329629 - RNA, 19 nt, Artificial Sequence
  Description of Artificial Sequence: Synthetic oligonucleotide
  Sense Strand Starting at position 138 of SEQ ID NO: 318252
uccguaacacaguaacauu

SEQ ID NO: 329630 - RNA, 19 nt, Artificial Sequence
  Description of Artificial Sequence: Synthetic oligonucleotide
  Antisense Strand to SEQ ID NO: 329629
aauguuacuguguuacgga

SEQ ID NO: 329631 - RNA, 19 nt, Artificial Sequence
  Description of Artificial Sequence: Synthetic oligonucleotide
  Sense Strand Starting at position 138 of SEQ ID NO: 318271
gcauauauuguguaaucac

SEQ ID NO: 329632 - RNA, 19 nt, Artificial Sequence
  Description of Artificial Sequence: Synthetic oligonucleotide
  Antisense Strand to SEQ ID NO: 329631
gugauuacacaauauaugc

SEQ ID NO: 329633 - RNA, 19 nt, Artificial Sequence
  Description of Artificial Sequence: Synthetic oligonucleotide
  Sense Strand Starting at position 138 of SEQ ID NO: 318436
ugaaauaauuccucccguu

SEQ ID NO: 329634 - RNA, 19 nt, Artificial Sequence
  Description of Artificial Sequence: Synthetic oligonucleotide
  Antisense Strand to SEQ ID NO: 329633
aacgggaggaauuauuuca

SEQ ID NO: 329635 - RNA, 19 nt, Artificial Sequence
  Description of Artificial Sequence: Synthetic oligonucleotide
  Sense Strand Starting at position 138 of SEQ ID NO: 318564
uccucuguucuaggaauga

SEQ ID NO: 329636 - RNA, 19 nt, Artificial Sequence
  Description of Artificial Sequence: Synthetic oligonucleotide
  Antisense Strand to SEQ ID NO: 329635
ucauuccuagaacagagga

SEQ ID NO: 329637 - RNA, 19 nt, Artificial Sequence
  Description of Artificial Sequence: Synthetic oligonucleotide
  Sense Strand Starting at position 138 of SEQ ID NO: 318568
cuguucuaggaaugaaaua

SEQ ID NO: 329638 - RNA, 19 nt, Artificial Sequence
  Description of Artificial Sequence: Synthetic oligonucleotide
  Antisense Strand to SEQ ID NO: 329637
uauuucauuccuagaacag

SEQ ID NO: 329639 - RNA, 19 nt, Artificial Sequence
  Description of Artificial Sequence: Synthetic oligonucleotide
  Sense Strand Starting at position 138 of SEQ ID NO: 318705
auuuguauguugcuugaca

SEQ ID NO: 329640 - RNA, 19 nt, Artificial Sequence
  Description of Artificial Sequence: Synthetic oligonucleotide
  Antisense Strand to SEQ ID NO: 329639
ugucaagcaacauacaaau

SEQ ID NO: 329641 - RNA, 19 nt, Artificial Sequence
  Description of Artificial Sequence: Synthetic oligonucleotide
  Sense Strand Starting at position 138 of SEQ ID NO: 318950
caauaaaggugguuacuuu

SEQ ID NO: 329642 - RNA, 19 nt, Artificial Sequence
  Description of Artificial Sequence: Synthetic oligonucleotide
  Antisense Strand to SEQ ID NO: 329641
aaaguaaccaccuuuauug

SEQ ID NO: 329643 - RNA, 19 nt, Artificial Sequence
  Description of Artificial Sequence: Synthetic oligonucleotide
  Sense Strand Starting at position 138 of SEQ ID NO: 318961
guuacuuucuacuuaaagg

SEQ ID NO: 329644 - RNA, 19 nt, Artificial Sequence
  Description of Artificial Sequence: Synthetic oligonucleotide
  Antisense Strand to SEQ ID NO: 329643
ccuuuaaguagaaaguaac

SEQ ID NO: 329645 - RNA, 19 nt, Artificial Sequence
  Description of Artificial Sequence: Synthetic oligonucleotide
  Sense Strand Starting at position 138 of SEQ ID NO: 318970
uacuuaaaggucugugaua

SEQ ID NO: 329646 - RNA, 19 nt, Artificial Sequence
  Description of Artificial Sequence: Synthetic oligonucleotide
  Antisense Strand to SEQ ID NO: 329645
uaucacagaccuuuaagua

SEQ ID NO: 329647 - RNA, 19 nt, Artificial Sequence
  Description of Artificial Sequence: Synthetic oligonucleotide
  Sense Strand Starting at position 138 of SEQ ID NO: 318971
acuuaaaggucugugauag

SEQ ID NO: 329648 - RNA, 19 nt, Artificial Sequence
  Description of Artificial Sequence: Synthetic oligonucleotide
  Antisense Strand to SEQ ID NO: 329647
cuaucacagaccuuuaagu

SEQ ID NO: 329649 - RNA, 19 nt, Artificial Sequence
  Description of Artificial Sequence: Synthetic oligonucleotide
  Sense Strand Starting at position 138 of SEQ ID NO: 319018
ugauccuuucugugagaca

SEQ ID NO: 329650 - RNA, 19 nt, Artificial Sequence
  Description of Artificial Sequence: Synthetic oligonucleotide
  Antisense Strand to SEQ ID NO: 329649
ugucucacagaaaggauca

SEQ ID NO: 329651 - RNA, 19 nt, Artificial Sequence
  Description of Artificial Sequence: Synthetic oligonucleotide
  Sense Strand Starting at position 138 of SEQ ID NO: 319109
uuuggauacuuucuggagu

SEQ ID NO: 329652 - RNA, 19 nt, Artificial Sequence
  Description of Artificial Sequence: Synthetic oligonucleotide
  Antisense Strand to SEQ ID NO: 329651
acuccagaaaguauccaaa

SEQ ID NO: 329653 - RNA, 19 nt, Artificial Sequence
  Description of Artificial Sequence: Synthetic oligonucleotide
  Sense Strand Starting at position 139 of SEQ ID NO: 315255
aacgucugguaauuaauua

SEQ ID NO: 329654 - RNA, 19 nt, Artificial Sequence
  Description of Artificial Sequence: Synthetic oligonucleotide
  Antisense Strand to SEQ ID NO: 329653
uaauuaauuaccagacguu

SEQ ID NO: 329655 - RNA, 19 nt, Artificial Sequence
  Description of Artificial Sequence: Synthetic oligonucleotide
  Sense Strand Starting at position 139 of SEQ ID NO: 315393
gcaugagagcauuaaacca

SEQ ID NO: 329656 - RNA, 19 nt, Artificial Sequence
  Description of Artificial Sequence: Synthetic oligonucleotide
  Antisense Strand to SEQ ID NO: 329655
ugguuuaaugcucucaugc

SEQ ID NO: 329657 - RNA, 19 nt, Artificial Sequence
  Description of Artificial Sequence: Synthetic oligonucleotide
  Sense Strand Starting at position 139 of SEQ ID NO: 315417
aggaccugugacuguauau

SEQ ID NO: 329658 - RNA, 19 nt, Artificial Sequence
  Description of Artificial Sequence: Synthetic oligonucleotide
  Antisense Strand to SEQ ID NO: 329657
auauacagucacagguccu

SEQ ID NO: 329659 - RNA, 19 nt, Artificial Sequence
  Description of Artificial Sequence: Synthetic oligonucleotide
  Sense Strand Starting at position 139 of SEQ ID NO: 315675
agucauccuguguauacaa

SEQ ID NO: 329660 - RNA, 19 nt, Artificial Sequence
  Description of Artificial Sequence: Synthetic oligonucleotide
  Antisense Strand to SEQ ID NO: 329659
uuguauacacaggaugacu

SEQ ID NO: 329661 - RNA, 19 nt, Artificial Sequence
  Description of Artificial Sequence: Synthetic oligonucleotide
  Sense Strand Starting at position 139 of SEQ ID NO: 315677
ucauccuguguauacaaua

SEQ ID NO: 329662 - RNA, 19 nt, Artificial Sequence
  Description of Artificial Sequence: Synthetic oligonucleotide
  Antisense Strand to SEQ ID NO: 329661
uauuguauacacaggauga

SEQ ID NO: 329663 - RNA, 19 nt, Artificial Sequence
  Description of Artificial Sequence: Synthetic oligonucleotide
  Sense Strand Starting at position 139 of SEQ ID NO: 315902
auccauugguucucucaga

SEQ ID NO: 329664 - RNA, 19 nt, Artificial Sequence
  Description of Artificial Sequence: Synthetic oligonucleotide
  Antisense Strand to SEQ ID NO: 329663
ucugagagaaccaauggau

SEQ ID NO: 329665 - RNA, 19 nt, Artificial Sequence
  Description of Artificial Sequence: Synthetic oligonucleotide
  Sense Strand Starting at position 139 of SEQ ID NO: 315903
uccauugguucucucagaa

SEQ ID NO: 329666 - RNA, 19 nt, Artificial Sequence
  Description of Artificial Sequence: Synthetic oligonucleotide
  Antisense Strand to SEQ ID NO: 329665
uucugagagaaccaaugga

SEQ ID NO: 329667 - RNA, 19 nt, Artificial Sequence
  Description of Artificial Sequence: Synthetic oligonucleotide
  Sense Strand Starting at position 139 of SEQ ID NO: 316045
auugucuucucuuucuaga

SEQ ID NO: 329668 - RNA, 19 nt, Artificial Sequence
  Description of Artificial Sequence: Synthetic oligonucleotide
  Antisense Strand to SEQ ID NO: 329667
ucuagaaagagaagacaau

SEQ ID NO: 329669 - RNA, 19 nt, Artificial Sequence
  Description of Artificial Sequence: Synthetic oligonucleotide
  Sense Strand Starting at position 139 of SEQ ID NO: 316251
aggucuuuccuuuauugga

SEQ ID NO: 329670 - RNA, 19 nt, Artificial Sequence
  Description of Artificial Sequence: Synthetic oligonucleotide
  Antisense Strand to SEQ ID NO: 329669
uccaauaaaggaaagaccu

SEQ ID NO: 329671 - RNA, 19 nt, Artificial Sequence
  Description of Artificial Sequence: Synthetic oligonucleotide
  Sense Strand Starting at position 139 of SEQ ID NO: 316548
aagugcuugcccuaaggga

SEQ ID NO: 329672 - RNA, 19 nt, Artificial Sequence
  Description of Artificial Sequence: Synthetic oligonucleotide
  Antisense Strand to SEQ ID NO: 329671
ucccuuagggcaagcacuu

SEQ ID NO: 329673 - RNA, 19 nt, Artificial Sequence
  Description of Artificial Sequence: Synthetic oligonucleotide
  Sense Strand Starting at position 139 of SEQ ID NO: 316648
uugucuaaagauugacaca

SEQ ID NO: 329674 - RNA, 19 nt, Artificial Sequence
  Description of Artificial Sequence: Synthetic oligonucleotide
  Antisense Strand to SEQ ID NO: 329673
ugugucaaucuuuagacaa

SEQ ID NO: 329675 - RNA, 19 nt, Artificial Sequence
  Description of Artificial Sequence: Synthetic oligonucleotide
  Sense Strand Starting at position 139 of SEQ ID NO: 317516
aagugagaccugcauaugu

SEQ ID NO: 329676 - RNA, 19 nt, Artificial Sequence
  Description of Artificial Sequence: Synthetic oligonucleotide
  Antisense Strand to SEQ ID NO: 329675
acauaugcaggucucacuu

SEQ ID NO: 329677 - RNA, 19 nt, Artificial Sequence
  Description of Artificial Sequence: Synthetic oligonucleotide
  Sense Strand Starting at position 139 of SEQ ID NO: 317518
gugagaccugcauauguug

SEQ ID NO: 329678 - RNA, 19 nt, Artificial Sequence
  Description of Artificial Sequence: Synthetic oligonucleotide
  Antisense Strand to SEQ ID NO: 329677
caacauaugcaggucucac

SEQ ID NO: 329679 - RNA, 19 nt, Artificial Sequence
  Description of Artificial Sequence: Synthetic oligonucleotide
  Sense Strand Starting at position 139 of SEQ ID NO: 317521
agaccugcauauguugaaa

SEQ ID NO: 329680 - RNA, 19 nt, Artificial Sequence
  Description of Artificial Sequence: Synthetic oligonucleotide
  Antisense Strand to SEQ ID NO: 329679
uuucaacauaugcaggucu

SEQ ID NO: 329681 - RNA, 19 nt, Artificial Sequence
  Description of Artificial Sequence: Synthetic oligonucleotide
  Sense Strand Starting at position 139 of SEQ ID NO: 317688
ucguccugggcgucuuaua

SEQ ID NO: 329682 - RNA, 19 nt, Artificial Sequence
  Description of Artificial Sequence: Synthetic oligonucleotide
  Antisense Strand to SEQ ID NO: 329681
uauaagacgcccaggacga

SEQ ID NO: 329683 - RNA, 19 nt, Artificial Sequence
  Description of Artificial Sequence: Synthetic oligonucleotide
  Sense Strand Starting at position 139 of SEQ ID NO: 317745
gguagacccuguguugaca

SEQ ID NO: 329684 - RNA, 19 nt, Artificial Sequence
  Description of Artificial Sequence: Synthetic oligonucleotide
  Antisense Strand to SEQ ID NO: 329683
ugucaacacagggucuacc

SEQ ID NO: 329685 - RNA, 19 nt, Artificial Sequence
  Description of Artificial Sequence: Synthetic oligonucleotide
  Sense Strand Starting at position 139 of SEQ ID NO: 317764
guaguauugcuugaucaug

SEQ ID NO: 329686 - RNA, 19 nt, Artificial Sequence
  Description of Artificial Sequence: Synthetic oligonucleotide
  Antisense Strand to SEQ ID NO: 329685
caugaucaagcaauacuac

SEQ ID NO: 329687 - RNA, 19 nt, Artificial Sequence
  Description of Artificial Sequence: Synthetic oligonucleotide
  Sense Strand Starting at position 139 of SEQ ID NO: 317808
cgacauauuuacguugguu

SEQ ID NO: 329688 - RNA, 19 nt, Artificial Sequence
  Description of Artificial Sequence: Synthetic oligonucleotide
  Antisense Strand to SEQ ID NO: 329687
aaccaacguaaauaugucg

SEQ ID NO: 329689 - RNA, 19 nt, Artificial Sequence
  Description of Artificial Sequence: Synthetic oligonucleotide
  Sense Strand Starting at position 139 of SEQ ID NO: 317810
acauauuuacguugguuau

SEQ ID NO: 329690 - RNA, 19 nt, Artificial Sequence
  Description of Artificial Sequence: Synthetic oligonucleotide
  Antisense Strand to SEQ ID NO: 329689
auaaccaacguaaauaugu

SEQ ID NO: 329691 - RNA, 19 nt, Artificial Sequence
  Description of Artificial Sequence: Synthetic oligonucleotide
  Sense Strand Starting at position 139 of SEQ ID NO: 317811
cauauuuacguugguuauc

SEQ ID NO: 329692 - RNA, 19 nt, Artificial Sequence
  Description of Artificial Sequence: Synthetic oligonucleotide
  Antisense Strand to SEQ ID NO: 329691
gauaaccaacguaaauaug

SEQ ID NO: 329693 - RNA, 19 nt, Artificial Sequence
  Description of Artificial Sequence: Synthetic oligonucleotide
  Sense Strand Starting at position 139 of SEQ ID NO: 317851
cugugaaaugggcacauua

SEQ ID NO: 329694 - RNA, 19 nt, Artificial Sequence
  Description of Artificial Sequence: Synthetic oligonucleotide
  Antisense Strand to SEQ ID NO: 329693
uaaugugcccauuucacag

SEQ ID NO: 329695 - RNA, 19 nt, Artificial Sequence
  Description of Artificial Sequence: Synthetic oligonucleotide
  Sense Strand Starting at position 139 of SEQ ID NO: 317889
gagacaagcuugguuguua

SEQ ID NO: 329696 - RNA, 19 nt, Artificial Sequence
  Description of Artificial Sequence: Synthetic oligonucleotide
  Antisense Strand to SEQ ID NO: 329695
uaacaaccaagcuugucuc

SEQ ID NO: 329697 - RNA, 19 nt, Artificial Sequence
  Description of Artificial Sequence: Synthetic oligonucleotide
  Sense Strand Starting at position 139 of SEQ ID NO: 317890
agacaagcuugguuguuaa

SEQ ID NO: 329698 - RNA, 19 nt, Artificial Sequence
  Description of Artificial Sequence: Synthetic oligonucleotide
  Antisense Strand to SEQ ID NO: 329697
uuaacaaccaagcuugucu

SEQ ID NO: 329699 - RNA, 19 nt, Artificial Sequence
  Description of Artificial Sequence: Synthetic oligonucleotide
  Sense Strand Starting at position 139 of SEQ ID NO: 317893
caagcuugguuguuaauuu

SEQ ID NO: 329700 - RNA, 19 nt, Artificial Sequence
  Description of Artificial Sequence: Synthetic oligonucleotide
  Antisense Strand to SEQ ID NO: 329699
aaauuaacaaccaagcuug

SEQ ID NO: 329701 - RNA, 19 nt, Artificial Sequence
  Description of Artificial Sequence: Synthetic oligonucleotide
  Sense Strand Starting at position 139 of SEQ ID NO: 317934
cuguaaagugcguuucuua

SEQ ID NO: 329702 - RNA, 19 nt, Artificial Sequence
  Description of Artificial Sequence: Synthetic oligonucleotide
  Antisense Strand to SEQ ID NO: 329701
uaagaaacgcacuuuacag

SEQ ID NO: 329703 - RNA, 19 nt, Artificial Sequence
  Description of Artificial Sequence: Synthetic oligonucleotide
  Sense Strand Starting at position 139 of SEQ ID NO: 317983
gugucaguccucuaauaua

SEQ ID NO: 329704 - RNA, 19 nt, Artificial Sequence
  Description of Artificial Sequence: Synthetic oligonucleotide
  Antisense Strand to SEQ ID NO: 329703
uauauuagaggacugacac

SEQ ID NO: 329705 - RNA, 19 nt, Artificial Sequence
  Description of Artificial Sequence: Synthetic oligonucleotide
  Sense Strand Starting at position 139 of SEQ ID NO: 318111
uuucuccucguagaauauu

SEQ ID NO: 329706 - RNA, 19 nt, Artificial Sequence
  Description of Artificial Sequence: Synthetic oligonucleotide
  Antisense Strand to SEQ ID NO: 329705
aauauucuacgaggagaaa

SEQ ID NO: 329707 - RNA, 19 nt, Artificial Sequence
  Description of Artificial Sequence: Synthetic oligonucleotide
  Sense Strand Starting at position 139 of SEQ ID NO: 318152
ucaggacuucugcacuuaa

SEQ ID NO: 329708 - RNA, 19 nt, Artificial Sequence
  Description of Artificial Sequence: Synthetic oligonucleotide
  Antisense Strand to SEQ ID NO: 329707
uuaagugcagaaguccuga

SEQ ID NO: 329709 - RNA, 19 nt, Artificial Sequence
  Description of Artificial Sequence: Synthetic oligonucleotide
  Sense Strand Starting at position 139 of SEQ ID NO: 318322
uccguaacacaguaacauu

SEQ ID NO: 329710 - RNA, 19 nt, Artificial Sequence
  Description of Artificial Sequence: Synthetic oligonucleotide
  Antisense Strand to SEQ ID NO: 329709
aauguuacuguguuacgga

SEQ ID NO: 329711 - RNA, 19 nt, Artificial Sequence
  Description of Artificial Sequence: Synthetic oligonucleotide
  Sense Strand Starting at position 139 of SEQ ID NO: 318341
gcauauauuguguaaucac

SEQ ID NO: 329712 - RNA, 19 nt, Artificial Sequence
  Description of Artificial Sequence: Synthetic oligonucleotide
  Antisense Strand to SEQ ID NO: 329711
gugauuacacaauauaugc

SEQ ID NO: 329713 - RNA, 19 nt, Artificial Sequence
  Description of Artificial Sequence: Synthetic oligonucleotide
  Sense Strand Starting at position 139 of SEQ ID NO: 318506
ugaaauaauuccucccguu

SEQ ID NO: 329714 - RNA, 19 nt, Artificial Sequence
  Description of Artificial Sequence: Synthetic oligonucleotide
  Antisense Strand to SEQ ID NO: 329713
aacgggaggaauuauuuca

SEQ ID NO: 329715 - RNA, 19 nt, Artificial Sequence
  Description of Artificial Sequence: Synthetic oligonucleotide
  Sense Strand Starting at position 139 of SEQ ID NO: 318634
uccucuguucuaggaauga

SEQ ID NO: 329716 - RNA, 19 nt, Artificial Sequence
  Description of Artificial Sequence: Synthetic oligonucleotide
  Antisense Strand to SEQ ID NO: 329715
ucauuccuagaacagagga

SEQ ID NO: 329717 - RNA, 19 nt, Artificial Sequence
  Description of Artificial Sequence: Synthetic oligonucleotide
  Sense Strand Starting at position 139 of SEQ ID NO: 318638
cuguucuaggaaugaaaua

SEQ ID NO: 329718 - RNA, 19 nt, Artificial Sequence
  Description of Artificial Sequence: Synthetic oligonucleotide
  Antisense Strand to SEQ ID NO: 329717
uauuucauuccuagaacag

SEQ ID NO: 329719 - RNA, 19 nt, Artificial Sequence
  Description of Artificial Sequence: Synthetic oligonucleotide
  Sense Strand Starting at position 139 of SEQ ID NO: 318775
auuuguauguugcuugaca

SEQ ID NO: 329720 - RNA, 19 nt, Artificial Sequence
  Description of Artificial Sequence: Synthetic oligonucleotide
  Antisense Strand to SEQ ID NO: 329719
ugucaagcaacauacaaau

SEQ ID NO: 329721 - RNA, 19 nt, Artificial Sequence
  Description of Artificial Sequence: Synthetic oligonucleotide
  Sense Strand Starting at position 139 of SEQ ID NO: 319020
caauaaaggugguuacuuu

SEQ ID NO: 329722 - RNA, 19 nt, Artificial Sequence
  Description of Artificial Sequence: Synthetic oligonucleotide
  Antisense Strand to SEQ ID NO: 329721
aaaguaaccaccuuuauug

SEQ ID NO: 329723 - RNA, 19 nt, Artificial Sequence
  Description of Artificial Sequence: Synthetic oligonucleotide
  Sense Strand Starting at position 139 of SEQ ID NO: 319031
guuacuuucuacuuaaagg

SEQ ID NO: 329724 - RNA, 19 nt, Artificial Sequence
  Description of Artificial Sequence: Synthetic oligonucleotide
  Antisense Strand to SEQ ID NO: 329723
ccuuuaaguagaaaguaac

SEQ ID NO: 329725 - RNA, 19 nt, Artificial Sequence
  Description of Artificial Sequence: Synthetic oligonucleotide
  Sense Strand Starting at position 139 of SEQ ID NO: 319040
uacuuaaaggucugugaua

SEQ ID NO: 329726 - RNA, 19 nt, Artificial Sequence
  Description of Artificial Sequence: Synthetic oligonucleotide
  Antisense Strand to SEQ ID NO: 329725
uaucacagaccuuuaagua

SEQ ID NO: 329727 - RNA, 19 nt, Artificial Sequence
  Description of Artificial Sequence: Synthetic oligonucleotide
  Sense Strand Starting at position 139 of SEQ ID NO: 319041
acuuaaaggucugugauag

SEQ ID NO: 329728 - RNA, 19 nt, Artificial Sequence
  Description of Artificial Sequence: Synthetic oligonucleotide
  Antisense Strand to SEQ ID NO: 329727
cuaucacagaccuuuaagu

SEQ ID NO: 329729 - RNA, 19 nt, Artificial Sequence
  Description of Artificial Sequence: Synthetic oligonucleotide
  Sense Strand Starting at position 139 of SEQ ID NO: 319088
ugauccuuucugugagaca

SEQ ID NO: 329730 - RNA, 19 nt, Artificial Sequence
  Description of Artificial Sequence: Synthetic oligonucleotide
  Antisense Strand to SEQ ID NO: 329729
ugucucacagaaaggauca

SEQ ID NO: 329731 - RNA, 19 nt, Artificial Sequence
  Description of Artificial Sequence: Synthetic oligonucleotide
  Sense Strand Starting at position 139 of SEQ ID NO: 319179
uuuggauacuuucuggagu

SEQ ID NO: 329732 - RNA, 19 nt, Artificial Sequence
  Description of Artificial Sequence: Synthetic oligonucleotide
  Antisense Strand to SEQ ID NO: 329731
acuccagaaaguauccaaa

SEQ ID NO: 329733 - RNA, 19 nt, Artificial Sequence
  Description of Artificial Sequence: Synthetic oligonucleotide
  Sense Strand Starting at position 140 of SEQ ID NO: 315328
ggaaaucauuaagagaaca

SEQ ID NO: 329734 - RNA, 19 nt, Artificial Sequence
  Description of Artificial Sequence: Synthetic oligonucleotide
  Antisense Strand to SEQ ID NO: 329733
uguucucuuaaugauuucc

SEQ ID NO: 329735 - RNA, 19 nt, Artificial Sequence
  Description of Artificial Sequence: Synthetic oligonucleotide
  Sense Strand Starting at position 140 of SEQ ID NO: 315365
guaucuuugcauugcauuu

SEQ ID NO: 329736 - RNA, 19 nt, Artificial Sequence
  Description of Artificial Sequence: Synthetic oligonucleotide
  Antisense Strand to SEQ ID NO: 329735
aaaugcaaugcaaagauac

SEQ ID NO: 329737 - RNA, 19 nt, Artificial Sequence
  Description of Artificial Sequence: Synthetic oligonucleotide
  Sense Strand Starting at position 140 of SEQ ID NO: 315420
cugucagucauuuggugua

SEQ ID NO: 329738 - RNA, 19 nt, Artificial Sequence
  Description of Artificial Sequence: Synthetic oligonucleotide
  Antisense Strand to SEQ ID NO: 329737
uacaccaaaugacugacag

SEQ ID NO: 329739 - RNA, 19 nt, Artificial Sequence
  Description of Artificial Sequence: Synthetic oligonucleotide
  Sense Strand Starting at position 140 of SEQ ID NO: 315422
gucagucauuugguguaca

SEQ ID NO: 329740 - RNA, 19 nt, Artificial Sequence
  Description of Artificial Sequence: Synthetic oligonucleotide
  Antisense Strand to SEQ ID NO: 329739
uguacaccaaaugacugac

SEQ ID NO: 329741 - RNA, 19 nt, Artificial Sequence
  Description of Artificial Sequence: Synthetic oligonucleotide
  Sense Strand Starting at position 140 of SEQ ID NO: 315446
gccucauguguacacuuaa

SEQ ID NO: 329742 - RNA, 19 nt, Artificial Sequence
  Description of Artificial Sequence: Synthetic oligonucleotide
  Antisense Strand to SEQ ID NO: 329741
uuaaguguacacaugaggc

SEQ ID NO: 329743 - RNA, 19 nt, Artificial Sequence
  Description of Artificial Sequence: Synthetic oligonucleotide
  Sense Strand Starting at position 140 of SEQ ID NO: 315490
gucacaacauguguaauaa

SEQ ID NO: 329744 - RNA, 19 nt, Artificial Sequence
  Description of Artificial Sequence: Synthetic oligonucleotide
  Antisense Strand to SEQ ID NO: 329743
uuauuacacauguugugac

SEQ ID NO: 329745 - RNA, 19 nt, Artificial Sequence
  Description of Artificial Sequence: Synthetic oligonucleotide
  Sense Strand Starting at position 140 of SEQ ID NO: 315646
guaacuggaaaucguauua

SEQ ID NO: 329746 - RNA, 19 nt, Artificial Sequence
  Description of Artificial Sequence: Synthetic oligonucleotide
  Antisense Strand to SEQ ID NO: 329745
uaauacgauuuccaguuac

SEQ ID NO: 329747 - RNA, 19 nt, Artificial Sequence
  Description of Artificial Sequence: Synthetic oligonucleotide
  Sense Strand Starting at position 140 of SEQ ID NO: 315651
uggaaaucguauuauuuga

SEQ ID NO: 329748 - RNA, 19 nt, Artificial Sequence
  Description of Artificial Sequence: Synthetic oligonucleotide
  Antisense Strand to SEQ ID NO: 329747
ucaaauaauacgauuucca

SEQ ID NO: 329749 - RNA, 19 nt, Artificial Sequence
  Description of Artificial Sequence: Synthetic oligonucleotide
  Sense Strand Starting at position 140 of SEQ ID NO: 315693
gaugcuuccuagucugaaa

SEQ ID NO: 329750 - RNA, 19 nt, Artificial Sequence
  Description of Artificial Sequence: Synthetic oligonucleotide
  Antisense Strand to SEQ ID NO: 329749
uuucagacuaggaagcauc

SEQ ID NO: 329751 - RNA, 19 nt, Artificial Sequence
  Description of Artificial Sequence: Synthetic oligonucleotide
  Sense Strand Starting at position 140 of SEQ ID NO: 315868
ggguagugaguuggugaau

SEQ ID NO: 329752 - RNA, 19 nt, Artificial Sequence
  Description of Artificial Sequence: Synthetic oligonucleotide
  Antisense Strand to SEQ ID NO: 329751
auucaccaacucacuaccc

SEQ ID NO: 329753 - RNA, 19 nt, Artificial Sequence
  Description of Artificial Sequence: Synthetic oligonucleotide
  Sense Strand Starting at position 140 of SEQ ID NO: 315937
gaagauuaaucuguaaagu

SEQ ID NO: 329754 - RNA, 19 nt, Artificial Sequence
  Description of Artificial Sequence: Synthetic oligonucleotide
  Antisense Strand to SEQ ID NO: 329753
acuuuacagauuaaucuuc

SEQ ID NO: 329755 - RNA, 19 nt, Artificial Sequence
  Description of Artificial Sequence: Synthetic oligonucleotide
  Sense Strand Starting at position 140 of SEQ ID NO: 315946
ucuguaaaguguguaggaa

SEQ ID NO: 329756 - RNA, 19 nt, Artificial Sequence
  Description of Artificial Sequence: Synthetic oligonucleotide
  Antisense Strand to SEQ ID NO: 329755
uuccuacacacuuuacaga

SEQ ID NO: 329757 - RNA, 19 nt, Artificial Sequence
  Description of Artificial Sequence: Synthetic oligonucleotide
  Sense Strand Starting at position 140 of SEQ ID NO: 315971
augggauaaucuguaaagu

SEQ ID NO: 329758 - RNA, 19 nt, Artificial Sequence
  Description of Artificial Sequence: Synthetic oligonucleotide
  Antisense Strand to SEQ ID NO: 329757
acuuuacagauuaucccau

SEQ ID NO: 329759 - RNA, 19 nt, Artificial Sequence
  Description of Artificial Sequence: Synthetic oligonucleotide
  Sense Strand Starting at position 140 of SEQ ID NO: 315986
aaguguguaggauggauau

SEQ ID NO: 329760 - RNA, 19 nt, Artificial Sequence
  Description of Artificial Sequence: Synthetic oligonucleotide
  Antisense Strand to SEQ ID NO: 329759
auauccauccuacacacuu

SEQ ID NO: 329761 - RNA, 19 nt, Artificial Sequence
  Description of Artificial Sequence: Synthetic oligonucleotide
  Sense Strand Starting at position 140 of SEQ ID NO: 315988
guguguaggauggauauau

SEQ ID NO: 329762 - RNA, 19 nt, Artificial Sequence
  Description of Artificial Sequence: Synthetic oligonucleotide
  Antisense Strand to SEQ ID NO: 329761
auauauccauccuacacac

SEQ ID NO: 329763 - RNA, 19 nt, Artificial Sequence
  Description of Artificial Sequence: Synthetic oligonucleotide
  Sense Strand Starting at position 140 of SEQ ID NO: 316111
uuaguuugucucuagugaa

SEQ ID NO: 329764 - RNA, 19 nt, Artificial Sequence
  Description of Artificial Sequence: Synthetic oligonucleotide
  Antisense Strand to SEQ ID NO: 329763
uucacuagagacaaacuaa

SEQ ID NO: 329765 - RNA, 19 nt, Artificial Sequence
  Description of Artificial Sequence: Synthetic oligonucleotide
  Sense Strand Starting at position 140 of SEQ ID NO: 316347
auuugaaagugagaucagu

SEQ ID NO: 329766 - RNA, 19 nt, Artificial Sequence
  Description of Artificial Sequence: Synthetic oligonucleotide
  Antisense Strand to SEQ ID NO: 329765
acugaucucacuuucaaau

SEQ ID NO: 329767 - RNA, 19 nt, Artificial Sequence
  Description of Artificial Sequence: Synthetic oligonucleotide
  Sense Strand Starting at position 140 of SEQ ID NO: 316353
aagugagaucagugaggca

SEQ ID NO: 329768 - RNA, 19 nt, Artificial Sequence
  Description of Artificial Sequence: Synthetic oligonucleotide
  Antisense Strand to SEQ ID NO: 329767
ugccucacugaucucacuu

SEQ ID NO: 329769 - RNA, 19 nt, Artificial Sequence
  Description of Artificial Sequence: Synthetic oligonucleotide
  Sense Strand Starting at position 140 of SEQ ID NO: 317349
cccagucaucuguauauug

SEQ ID NO: 329770 - RNA, 19 nt, Artificial Sequence
  Description of Artificial Sequence: Synthetic oligonucleotide
  Antisense Strand to SEQ ID NO: 329769
caauauacagaugacuggg

SEQ ID NO: 329771 - RNA, 19 nt, Artificial Sequence
  Description of Artificial Sequence: Synthetic oligonucleotide
  Sense Strand Starting at position 140 of SEQ ID NO: 317351
cagucaucuguauauuggu

SEQ ID NO: 329772 - RNA, 19 nt, Artificial Sequence
  Description of Artificial Sequence: Synthetic oligonucleotide
  Antisense Strand to SEQ ID NO: 329771
accaauauacagaugacug

SEQ ID NO: 329773 - RNA, 19 nt, Artificial Sequence
  Description of Artificial Sequence: Synthetic oligonucleotide
  Sense Strand Starting at position 140 of SEQ ID NO: 317357
ucuguauauugguuaccaa

SEQ ID NO: 329774 - RNA, 19 nt, Artificial Sequence
  Description of Artificial Sequence: Synthetic oligonucleotide
  Antisense Strand to SEQ ID NO: 329773
uugguaaccaauauacaga

SEQ ID NO: 329775 - RNA, 19 nt, Artificial Sequence
  Description of Artificial Sequence: Synthetic oligonucleotide
  Sense Strand Starting at position 140 of SEQ ID NO: 317375
acacguggccgcguagaau

SEQ ID NO: 329776 - RNA, 19 nt, Artificial Sequence
  Description of Artificial Sequence: Synthetic oligonucleotide
  Antisense Strand to SEQ ID NO: 329775
auucuacgcggccacgugu

SEQ ID NO: 329777 - RNA, 19 nt, Artificial Sequence
  Description of Artificial Sequence: Synthetic oligonucleotide
  Sense Strand Starting at position 140 of SEQ ID NO: 317439
cugagaaugcgaugaggaa

SEQ ID NO: 329778 - RNA, 19 nt, Artificial Sequence
  Description of Artificial Sequence: Synthetic oligonucleotide
  Antisense Strand to SEQ ID NO: 329777
uuccucaucgcauucucag

SEQ ID NO: 329779 - RNA, 19 nt, Artificial Sequence
  Description of Artificial Sequence: Synthetic oligonucleotide
  Sense Strand Starting at position 140 of SEQ ID NO: 317625
aaugaagagguuugugcaa

SEQ ID NO: 329780 - RNA, 19 nt, Artificial Sequence
  Description of Artificial Sequence: Synthetic oligonucleotide
  Antisense Strand to SEQ ID NO: 329779
uugcacaaaccucuucauu

SEQ ID NO: 329781 - RNA, 19 nt, Artificial Sequence
  Description of Artificial Sequence: Synthetic oligonucleotide
  Sense Strand Starting at position 140 of SEQ ID NO: 317646
uguggaauuuguagcgaag

SEQ ID NO: 329782 - RNA, 19 nt, Artificial Sequence
  Description of Artificial Sequence: Synthetic oligonucleotide
  Antisense Strand to SEQ ID NO: 329781
cuucgcuacaaauuccaca

SEQ ID NO: 329783 - RNA, 19 nt, Artificial Sequence
  Description of Artificial Sequence: Synthetic oligonucleotide
  Sense Strand Starting at position 140 of SEQ ID NO: 317690
aaggaaggcuccuuuaugu

SEQ ID NO: 329784 - RNA, 19 nt, Artificial Sequence
  Description of Artificial Sequence: Synthetic oligonucleotide
  Antisense Strand to SEQ ID NO: 329783
acauaaaggagccuuccuu

SEQ ID NO: 329785 - RNA, 19 nt, Artificial Sequence
  Description of Artificial Sequence: Synthetic oligonucleotide
  Sense Strand Starting at position 140 of SEQ ID NO: 317747
uuggaagacaccugucagu

SEQ ID NO: 329786 - RNA, 19 nt, Artificial Sequence
  Description of Artificial Sequence: Synthetic oligonucleotide
  Antisense Strand to SEQ ID NO: 329785
acugacaggugucuuccaa

SEQ ID NO: 329787 - RNA, 19 nt, Artificial Sequence
  Description of Artificial Sequence: Synthetic oligonucleotide
  Sense Strand Starting at position 140 of SEQ ID NO: 317776
uuugucagucuccaagaca

SEQ ID NO: 329788 - RNA, 19 nt, Artificial Sequence
  Description of Artificial Sequence: Synthetic oligonucleotide
  Antisense Strand to SEQ ID NO: 329787
ugucuuggagacugacaaa

SEQ ID NO: 329789 - RNA, 19 nt, Artificial Sequence
  Description of Artificial Sequence: Synthetic oligonucleotide
  Sense Strand Starting at position 140 of SEQ ID NO: 317811
ucuagugauccuuaccuca

SEQ ID NO: 329790 - RNA, 19 nt, Artificial Sequence
  Description of Artificial Sequence: Synthetic oligonucleotide
  Antisense Strand to SEQ ID NO: 329789
ugagguaaggaucacuaga

SEQ ID NO: 329791 - RNA, 19 nt, Artificial Sequence
  Description of Artificial Sequence: Synthetic oligonucleotide
  Sense Strand Starting at position 140 of SEQ ID NO: 317814
agugauccuuaccucauua

SEQ ID NO: 329792 - RNA, 19 nt, Artificial Sequence
  Description of Artificial Sequence: Synthetic oligonucleotide
  Antisense Strand to SEQ ID NO: 329791
uaaugagguaaggaucacu

SEQ ID NO: 329793 - RNA, 19 nt, Artificial Sequence
  Description of Artificial Sequence: Synthetic oligonucleotide
  Sense Strand Starting at position 140 of SEQ ID NO: 318161
gcagucuuacuuuauugaa

SEQ ID NO: 329794 - RNA, 19 nt, Artificial Sequence
  Description of Artificial Sequence: Synthetic oligonucleotide
  Antisense Strand to SEQ ID NO: 329793
uucaauaaaguaagacugc

SEQ ID NO: 329795 - RNA, 19 nt, Artificial Sequence
  Description of Artificial Sequence: Synthetic oligonucleotide
  Sense Strand Starting at position 140 of SEQ ID NO: 318230
ugggucauccucggaaaca

SEQ ID NO: 329796 - RNA, 19 nt, Artificial Sequence
  Description of Artificial Sequence: Synthetic oligonucleotide
  Antisense Strand to SEQ ID NO: 329795
uguuuccgaggaugaccca

SEQ ID NO: 329797 - RNA, 19 nt, Artificial Sequence
  Description of Artificial Sequence: Synthetic oligonucleotide
  Sense Strand Starting at position 140 of SEQ ID NO: 318284
ggguaauucuuccuaaaca

SEQ ID NO: 329798 - RNA, 19 nt, Artificial Sequence
  Description of Artificial Sequence: Synthetic oligonucleotide
  Antisense Strand to SEQ ID NO: 329797
uguuuaggaagaauuaccc

SEQ ID NO: 329799 - RNA, 19 nt, Artificial Sequence
  Description of Artificial Sequence: Synthetic oligonucleotide
  Sense Strand Starting at position 140 of SEQ ID NO: 318422
gcuugaaauaaguagaagu

SEQ ID NO: 329800 - RNA, 19 nt, Artificial Sequence
  Description of Artificial Sequence: Synthetic oligonucleotide
  Antisense Strand to SEQ ID NO: 329799
acuucuacuuauuucaagc

SEQ ID NO: 329801 - RNA, 19 nt, Artificial Sequence
  Description of Artificial Sequence: Synthetic oligonucleotide
  Sense Strand Starting at position 140 of SEQ ID NO: 318682
acacccuugugauuacauu

SEQ ID NO: 329802 - RNA, 19 nt, Artificial Sequence
  Description of Artificial Sequence: Synthetic oligonucleotide
  Antisense Strand to SEQ ID NO: 329801
aauguaaucacaagggugu

SEQ ID NO: 329803 - RNA, 19 nt, Artificial Sequence
  Description of Artificial Sequence: Synthetic oligonucleotide
  Sense Strand Starting at position 140 of SEQ ID NO: 318820
agauacuggugcuuggaga

SEQ ID NO: 329804 - RNA, 19 nt, Artificial Sequence
  Description of Artificial Sequence: Synthetic oligonucleotide
  Antisense Strand to SEQ ID NO: 329803
ucuccaagcaccaguaucu

SEQ ID NO: 329805 - RNA, 19 nt, Artificial Sequence
  Description of Artificial Sequence: Synthetic oligonucleotide
  Sense Strand Starting at position 140 of SEQ ID NO: 318849
uuuauucgauuugaccaaa

SEQ ID NO: 329806 - RNA, 19 nt, Artificial Sequence
  Description of Artificial Sequence: Synthetic oligonucleotide
  Antisense Strand to SEQ ID NO: 329805
uuuggucaaaucgaauaaa

SEQ ID NO: 329807 - RNA, 19 nt, Artificial Sequence
  Description of Artificial Sequence: Synthetic oligonucleotide
  Sense Strand Starting at position 140 of SEQ ID NO: 318881
agagcaagaucucucagau

SEQ ID NO: 329808 - RNA, 19 nt, Artificial Sequence
  Description of Artificial Sequence: Synthetic oligonucleotide
  Antisense Strand to SEQ ID NO: 329807
aucugagagaucuugcucu

SEQ ID NO: 329809 - RNA, 19 nt, Artificial Sequence
  Description of Artificial Sequence: Synthetic oligonucleotide
  Sense Strand Starting at position 140 of SEQ ID NO: 318982
gucuguguuucuuccauuu

SEQ ID NO: 329810 - RNA, 19 nt, Artificial Sequence
  Description of Artificial Sequence: Synthetic oligonucleotide
  Antisense Strand to SEQ ID NO: 329809
aaauggaagaaacacagac

SEQ ID NO: 329811 - RNA, 19 nt, Artificial Sequence
  Description of Artificial Sequence: Synthetic oligonucleotide
  Sense Strand Starting at position 140 of SEQ ID NO: 319081
uucuuaugacccugaaguu

SEQ ID NO: 329812 - RNA, 19 nt, Artificial Sequence
  Description of Artificial Sequence: Synthetic oligonucleotide
  Antisense Strand to SEQ ID NO: 329811
aacuucagggucauaagaa

SEQ ID NO: 329813 - RNA, 19 nt, Artificial Sequence
  Description of Artificial Sequence: Synthetic oligonucleotide
  Sense Strand Starting at position 141 of SEQ ID NO: 315262
agccaccuccuuggauaaa

SEQ ID NO: 329814 - RNA, 19 nt, Artificial Sequence
  Description of Artificial Sequence: Synthetic oligonucleotide
  Antisense Strand to SEQ ID NO: 329813
uuuauccaaggagguggcu

SEQ ID NO: 329815 - RNA, 19 nt, Artificial Sequence
  Description of Artificial Sequence: Synthetic oligonucleotide
  Sense Strand Starting at position 141 of SEQ ID NO: 315344
gggcucaguagugagauga

SEQ ID NO: 329816 - RNA, 19 nt, Artificial Sequence
  Description of Artificial Sequence: Synthetic oligonucleotide
  Antisense Strand to SEQ ID NO: 329815
ucaucucacuacugagccc

SEQ ID NO: 329817 - RNA, 19 nt, Artificial Sequence
  Description of Artificial Sequence: Synthetic oligonucleotide
  Sense Strand Starting at position 141 of SEQ ID NO: 315348
ucaguagugagaugaaguc

SEQ ID NO: 329818 - RNA, 19 nt, Artificial Sequence
  Description of Artificial Sequence: Synthetic oligonucleotide
  Antisense Strand to SEQ ID NO: 329817
gacuucaucucacuacuga

SEQ ID NO: 329819 - RNA, 19 nt, Artificial Sequence
  Description of Artificial Sequence: Synthetic oligonucleotide
  Sense Strand Starting at position 141 of SEQ ID NO: 315358
gaugaagucucucuagguu

SEQ ID NO: 329820 - RNA, 19 nt, Artificial Sequence
  Description of Artificial Sequence: Synthetic oligonucleotide
  Antisense Strand to SEQ ID NO: 329819
aaccuagagagacuucauc

SEQ ID NO: 329821 - RNA, 19 nt, Artificial Sequence
  Description of Artificial Sequence: Synthetic oligonucleotide
  Sense Strand Starting at position 141 of SEQ ID NO: 315367
ucucuagguucugaaagca

SEQ ID NO: 329822 - RNA, 19 nt, Artificial Sequence
  Description of Artificial Sequence: Synthetic oligonucleotide
  Antisense Strand to SEQ ID NO: 329821
ugcuuucagaaccuagaga

SEQ ID NO: 329823 - RNA, 19 nt, Artificial Sequence
  Description of Artificial Sequence: Synthetic oligonucleotide
  Sense Strand Starting at position 141 of SEQ ID NO: 315393
gguaaagguuugagggcaa

SEQ ID NO: 329824 - RNA, 19 nt, Artificial Sequence
  Description of Artificial Sequence: Synthetic oligonucleotide
  Antisense Strand to SEQ ID NO: 329823
uugcccucaaaccuuuacc

SEQ ID NO: 329825 - RNA, 19 nt, Artificial Sequence
  Description of Artificial Sequence: Synthetic oligonucleotide
  Sense Strand Starting at position 141 of SEQ ID NO: 315417
aggguaaguucaggagaca

SEQ ID NO: 329826 - RNA, 19 nt, Artificial Sequence
  Description of Artificial Sequence: Synthetic oligonucleotide
  Antisense Strand to SEQ ID NO: 329825
ugucuccugaacuuacccu

SEQ ID NO: 329827 - RNA, 19 nt, Artificial Sequence
  Description of Artificial Sequence: Synthetic oligonucleotide
  Sense Strand Starting at position 141 of SEQ ID NO: 315439
ggacacauacuuuacguau

SEQ ID NO: 329828 - RNA, 19 nt, Artificial Sequence
  Description of Artificial Sequence: Synthetic oligonucleotide
  Antisense Strand to SEQ ID NO: 329827
auacguaaaguaugugucc

SEQ ID NO: 329829 - RNA, 19 nt, Artificial Sequence
  Description of Artificial Sequence: Synthetic oligonucleotide
  Sense Strand Starting at position 141 of SEQ ID NO: 315502
cucugucugugggugagau

SEQ ID NO: 329830 - RNA, 19 nt, Artificial Sequence
  Description of Artificial Sequence: Synthetic oligonucleotide
  Antisense Strand to SEQ ID NO: 329829
aucucacccacagacagag

SEQ ID NO: 329831 - RNA, 19 nt, Artificial Sequence
  Description of Artificial Sequence: Synthetic oligonucleotide
  Sense Strand Starting at position 141 of SEQ ID NO: 315514
gugagaugaucauagugau

SEQ ID NO: 329832 - RNA, 19 nt, Artificial Sequence
  Description of Artificial Sequence: Synthetic oligonucleotide
  Antisense Strand to SEQ ID NO: 329831
aucacuaugaucaucucac

SEQ ID NO: 329833 - RNA, 19 nt, Artificial Sequence
  Description of Artificial Sequence: Synthetic oligonucleotide
  Sense Strand Starting at position 141 of SEQ ID NO: 315517
agaugaucauagugaucaa

SEQ ID NO: 329834 - RNA, 19 nt, Artificial Sequence
  Description of Artificial Sequence: Synthetic oligonucleotide
  Antisense Strand to SEQ ID NO: 329833
uugaucacuaugaucaucu

SEQ ID NO: 329835 - RNA, 19 nt, Artificial Sequence
  Description of Artificial Sequence: Synthetic oligonucleotide
  Sense Strand Starting at position 141 of SEQ ID NO: 315723
gaaacacuugcccaagagu

SEQ ID NO: 329836 - RNA, 19 nt, Artificial Sequence
  Description of Artificial Sequence: Synthetic oligonucleotide
  Antisense Strand to SEQ ID NO: 329835
acucuugggcaaguguuuc

SEQ ID NO: 329837 - RNA, 19 nt, Artificial Sequence
  Description of Artificial Sequence: Synthetic oligonucleotide
  Sense Strand Starting at position 141 of SEQ ID NO: 315740
gucagacaggccugucuuu

SEQ ID NO: 329838 - RNA, 19 nt, Artificial Sequence
  Description of Artificial Sequence: Synthetic oligonucleotide
  Antisense Strand to SEQ ID NO: 329837
aaagacaggccugucugac

SEQ ID NO: 329839 - RNA, 19 nt, Artificial Sequence
  Description of Artificial Sequence: Synthetic oligonucleotide
  Sense Strand Starting at position 141 of SEQ ID NO: 315782
uagugaucccuagaaaguc

SEQ ID NO: 329840 - RNA, 19 nt, Artificial Sequence
  Description of Artificial Sequence: Synthetic oligonucleotide
  Antisense Strand to SEQ ID NO: 329839
gacuuucuagggaucacua

SEQ ID NO: 329841 - RNA, 19 nt, Artificial Sequence
  Description of Artificial Sequence: Synthetic oligonucleotide
  Sense Strand Starting at position 141 of SEQ ID NO: 315941
guaagcauccacuacaugu

SEQ ID NO: 329842 - RNA, 19 nt, Artificial Sequence
  Description of Artificial Sequence: Synthetic oligonucleotide
  Antisense Strand to SEQ ID NO: 329841
acauguaguggaugcuuac

SEQ ID NO: 329843 - RNA, 19 nt, Artificial Sequence
  Description of Artificial Sequence: Synthetic oligonucleotide
  Sense Strand Starting at position 141 of SEQ ID NO: 315948
uccacuacauguuagauuu

SEQ ID NO: 329844 - RNA, 19 nt, Artificial Sequence
  Description of Artificial Sequence: Synthetic oligonucleotide
  Antisense Strand to SEQ ID NO: 329843
aaaucuaacauguagugga

SEQ ID NO: 329845 - RNA, 19 nt, Artificial Sequence
  Description of Artificial Sequence: Synthetic oligonucleotide
  Sense Strand Starting at position 141 of SEQ ID NO: 316024
cacuguaugguccagacua

SEQ ID NO: 329846 - RNA, 19 nt, Artificial Sequence
  Description of Artificial Sequence: Synthetic oligonucleotide
  Antisense Strand to SEQ ID NO: 329845
uagucuggaccauacagug

SEQ ID NO: 329847 - RNA, 19 nt, Artificial Sequence
  Description of Artificial Sequence: Synthetic oligonucleotide
  Sense Strand Starting at position 141 of SEQ ID NO: 316026
cuguaugguccagacuaug

SEQ ID NO: 329848 - RNA, 19 nt, Artificial Sequence
  Description of Artificial Sequence: Synthetic oligonucleotide
  Antisense Strand to SEQ ID NO: 329847
cauagucuggaccauacag

SEQ ID NO: 329849 - RNA, 19 nt, Artificial Sequence
  Description of Artificial Sequence: Synthetic oligonucleotide
  Sense Strand Starting at position 141 of SEQ ID NO: 316231
ggugccuucucuuccuuua

SEQ ID NO: 329850 - RNA, 19 nt, Artificial Sequence
  Description of Artificial Sequence: Synthetic oligonucleotide
  Antisense Strand to SEQ ID NO: 329849
uaaaggaagagaaggcacc

SEQ ID NO: 329851 - RNA, 19 nt, Artificial Sequence
  Description of Artificial Sequence: Synthetic oligonucleotide
  Sense Strand Starting at position 141 of SEQ ID NO: 316290
ugcagagggcccugguuaa

SEQ ID NO: 329852 - RNA, 19 nt, Artificial Sequence
  Description of Artificial Sequence: Synthetic oligonucleotide
  Antisense Strand to SEQ ID NO: 329851
uuaaccagggcccucugca

SEQ ID NO: 329853 - RNA, 19 nt, Artificial Sequence
  Description of Artificial Sequence: Synthetic oligonucleotide
  Sense Strand Starting at position 141 of SEQ ID NO: 316449
gcgugugugagauguguaa

SEQ ID NO: 329854 - RNA, 19 nt, Artificial Sequence
  Description of Artificial Sequence: Synthetic oligonucleotide
  Antisense Strand to SEQ ID NO: 329853
uuacacaucucacacacgc

SEQ ID NO: 329855 - RNA, 19 nt, Artificial Sequence
  Description of Artificial Sequence: Synthetic oligonucleotide
  Sense Strand Starting at position 141 of SEQ ID NO: 316451
gugugugagauguguaaac

SEQ ID NO: 329856 - RNA, 19 nt, Artificial Sequence
  Description of Artificial Sequence: Synthetic oligonucleotide
  Antisense Strand to SEQ ID NO: 329855
guuuacacaucucacacac

SEQ ID NO: 329857 - RNA, 19 nt, Artificial Sequence
  Description of Artificial Sequence: Synthetic oligonucleotide
  Sense Strand Starting at position 141 of SEQ ID NO: 316453
gugugagauguguaaacac

SEQ ID NO: 329858 - RNA, 19 nt, Artificial Sequence
  Description of Artificial Sequence: Synthetic oligonucleotide
  Antisense Strand to SEQ ID NO: 329857
guguuuacacaucucacac

SEQ ID NO: 329859 - RNA, 19 nt, Artificial Sequence
  Description of Artificial Sequence: Synthetic oligonucleotide
  Sense Strand Starting at position 141 of SEQ ID NO: 316472
cucugauggucccugagga

SEQ ID NO: 329860 - RNA, 19 nt, Artificial Sequence
  Description of Artificial Sequence: Synthetic oligonucleotide
  Antisense Strand to SEQ ID NO: 329859
uccucagggaccaucagag

SEQ ID NO: 329861 - RNA, 19 nt, Artificial Sequence
  Description of Artificial Sequence: Synthetic oligonucleotide
  Sense Strand Starting at position 141 of SEQ ID NO: 317532
cugacuuugugaccuugaa

SEQ ID NO: 329862 - RNA, 19 nt, Artificial Sequence
  Description of Artificial Sequence: Synthetic oligonucleotide
  Antisense Strand to SEQ ID NO: 329861
uucaaggucacaaagucag

SEQ ID NO: 329863 - RNA, 19 nt, Artificial Sequence
  Description of Artificial Sequence: Synthetic oligonucleotide
  Sense Strand Starting at position 141 of SEQ ID NO: 317608
gaggguucuagacgaagau

SEQ ID NO: 329864 - RNA, 19 nt, Artificial Sequence
  Description of Artificial Sequence: Synthetic oligonucleotide
  Antisense Strand to SEQ ID NO: 329863
aucuucgucuagaacccuc

SEQ ID NO: 329865 - RNA, 19 nt, Artificial Sequence
  Description of Artificial Sequence: Synthetic oligonucleotide
  Sense Strand Starting at position 141 of SEQ ID NO: 317629
ggaaucuucgucuacagaa

SEQ ID NO: 329866 - RNA, 19 nt, Artificial Sequence
  Description of Artificial Sequence: Synthetic oligonucleotide
  Antisense Strand to SEQ ID NO: 329865
uucuguagacgaagauucc

SEQ ID NO: 329867 - RNA, 19 nt, Artificial Sequence
  Description of Artificial Sequence: Synthetic oligonucleotide
  Sense Strand Starting at position 141 of SEQ ID NO: 317631
aaucuucgucuacagaagu

SEQ ID NO: 329868 - RNA, 19 nt, Artificial Sequence
  Description of Artificial Sequence: Synthetic oligonucleotide
  Antisense Strand to SEQ ID NO: 329867
acuucuguagacgaagauu

SEQ ID NO: 329869 - RNA, 19 nt, Artificial Sequence
  Description of Artificial Sequence: Synthetic oligonucleotide
  Sense Strand Starting at position 141 of SEQ ID NO: 317729
gcaugaucagcucagggaa

SEQ ID NO: 329870 - RNA, 19 nt, Artificial Sequence
  Description of Artificial Sequence: Synthetic oligonucleotide
  Antisense Strand to SEQ ID NO: 329869
uucccugagcugaucaugc

SEQ ID NO: 329871 - RNA, 19 nt, Artificial Sequence
  Description of Artificial Sequence: Synthetic oligonucleotide
  Sense Strand Starting at position 141 of SEQ ID NO: 317859
agggaaacagcauguuuaa

SEQ ID NO: 329872 - RNA, 19 nt, Artificial Sequence
  Description of Artificial Sequence: Synthetic oligonucleotide
  Antisense Strand to SEQ ID NO: 329871
uuaaacaugcuguuucccu

SEQ ID NO: 329873 - RNA, 19 nt, Artificial Sequence
  Description of Artificial Sequence: Synthetic oligonucleotide
  Sense Strand Starting at position 141 of SEQ ID NO: 318015
cagaauuagccggucgugu

SEQ ID NO: 329874 - RNA, 19 nt, Artificial Sequence
  Description of Artificial Sequence: Synthetic oligonucleotide
  Antisense Strand to SEQ ID NO: 329873
acacgaccggcuaauucug

SEQ ID NO: 329875 - RNA, 19 nt, Artificial Sequence
  Description of Artificial Sequence: Synthetic oligonucleotide
  Sense Strand Starting at position 141 of SEQ ID NO: 318207
aguaguuaacaguguucua

SEQ ID NO: 329876 - RNA, 19 nt, Artificial Sequence
  Description of Artificial Sequence: Synthetic oligonucleotide
  Antisense Strand to SEQ ID NO: 329875
uagaacacuguuaacuacu

SEQ ID NO: 329877 - RNA, 19 nt, Artificial Sequence
  Description of Artificial Sequence: Synthetic oligonucleotide
  Sense Strand Starting at position 141 of SEQ ID NO: 318210
aguuaacaguguucuaguu

SEQ ID NO: 329878 - RNA, 19 nt, Artificial Sequence
  Description of Artificial Sequence: Synthetic oligonucleotide
  Antisense Strand to SEQ ID NO: 329877
aacuagaacacuguuaacu

SEQ ID NO: 329879 - RNA, 19 nt, Artificial Sequence
  Description of Artificial Sequence: Synthetic oligonucleotide
  Sense Strand Starting at position 141 of SEQ ID NO: 318212
uuaacaguguucuaguuaa

SEQ ID NO: 329880 - RNA, 19 nt, Artificial Sequence
  Description of Artificial Sequence: Synthetic oligonucleotide
  Antisense Strand to SEQ ID NO: 329879
uuaacuagaacacuguuaa

SEQ ID NO: 329881 - RNA, 19 nt, Artificial Sequence
  Description of Artificial Sequence: Synthetic oligonucleotide
  Sense Strand Starting at position 141 of SEQ ID NO: 318246
gggagauguugacaagaca

SEQ ID NO: 329882 - RNA, 19 nt, Artificial Sequence
  Description of Artificial Sequence: Synthetic oligonucleotide
  Antisense Strand to SEQ ID NO: 329881
ugucuugucaacaucuccc

SEQ ID NO: 329883 - RNA, 19 nt, Artificial Sequence
  Description of Artificial Sequence: Synthetic oligonucleotide
  Sense Strand Starting at position 141 of SEQ ID NO: 318272
cgagacgcugccgaguauu

SEQ ID NO: 329884 - RNA, 19 nt, Artificial Sequence
  Description of Artificial Sequence: Synthetic oligonucleotide
  Antisense Strand to SEQ ID NO: 329883
aauacucggcagcgucucg

SEQ ID NO: 329885 - RNA, 19 nt, Artificial Sequence
  Description of Artificial Sequence: Synthetic oligonucleotide
  Sense Strand Starting at position 141 of SEQ ID NO: 318333
aggaguugccaauagaguc

SEQ ID NO: 329886 - RNA, 19 nt, Artificial Sequence
  Description of Artificial Sequence: Synthetic oligonucleotide
  Antisense Strand to SEQ ID NO: 329885
gacucuauuggcaacuccu

SEQ ID NO: 329887 - RNA, 19 nt, Artificial Sequence
  Description of Artificial Sequence: Synthetic oligonucleotide
  Sense Strand Starting at position 141 of SEQ ID NO: 319129
ggccucaucugggucguua

SEQ ID NO: 329888 - RNA, 19 nt, Artificial Sequence
  Description of Artificial Sequence: Synthetic oligonucleotide
  Antisense Strand to SEQ ID NO: 329887
uaacgacccagaugaggcc

SEQ ID NO: 329889 - RNA, 19 nt, Artificial Sequence
  Description of Artificial Sequence: Synthetic oligonucleotide
  Sense Strand Starting at position 141 of SEQ ID NO: 319133
ucaucugggucguuaacaa

SEQ ID NO: 329890 - RNA, 19 nt, Artificial Sequence
  Description of Artificial Sequence: Synthetic oligonucleotide
  Antisense Strand to SEQ ID NO: 329889
uuguuaacgacccagauga

SEQ ID NO: 329891 - RNA, 19 nt, Artificial Sequence
  Description of Artificial Sequence: Synthetic oligonucleotide
  Sense Strand Starting at position 141 of SEQ ID NO: 319160
guagcugugagggaguuua

SEQ ID NO: 329892 - RNA, 19 nt, Artificial Sequence
  Description of Artificial Sequence: Synthetic oligonucleotide
  Antisense Strand to SEQ ID NO: 329891
uaaacucccucacagcuac

SEQ ID NO: 329893 - RNA, 19 nt, Artificial Sequence
  Description of Artificial Sequence: Synthetic oligonucleotide
  Sense Strand Starting at position 142 of SEQ ID NO: 315898
ucaucugggucguuaacaa

SEQ ID NO: 329894 - RNA, 19 nt, Artificial Sequence
  Description of Artificial Sequence: Synthetic oligonucleotide
  Antisense Strand to SEQ ID NO: 329893
uuguuaacgacccagauga

SEQ ID NO: 329895 - RNA, 19 nt, Artificial Sequence
  Description of Artificial Sequence: Synthetic oligonucleotide
  Sense Strand Starting at position 142 of SEQ ID NO: 315925
guagcugugagggaguuua

SEQ ID NO: 329896 - RNA, 19 nt, Artificial Sequence
  Description of Artificial Sequence: Synthetic oligonucleotide
  Antisense Strand to SEQ ID NO: 329895
uaaacucccucacagcuac

SEQ ID NO: 329897 - RNA, 19 nt, Artificial Sequence
  Description of Artificial Sequence: Synthetic oligonucleotide
  Sense Strand Starting at position 142 of SEQ ID NO: 316355
gacaguuucuaccugagug

SEQ ID NO: 329898 - RNA, 19 nt, Artificial Sequence
  Description of Artificial Sequence: Synthetic oligonucleotide
  Antisense Strand to SEQ ID NO: 329897
cacucagguagaaacuguc

SEQ ID NO: 329899 - RNA, 19 nt, Artificial Sequence
  Description of Artificial Sequence: Synthetic oligonucleotide
  Sense Strand Starting at position 142 of SEQ ID NO: 316403
cccuacuuguaucugaaga

SEQ ID NO: 329900 - RNA, 19 nt, Artificial Sequence
  Description of Artificial Sequence: Synthetic oligonucleotide
  Antisense Strand to SEQ ID NO: 329899
ucuucagauacaaguaggg

SEQ ID NO: 329901 - RNA, 19 nt, Artificial Sequence
  Description of Artificial Sequence: Synthetic oligonucleotide
  Sense Strand Starting at position 142 of SEQ ID NO: 316429
cuuagcaggugcuuaauaa

SEQ ID NO: 329902 - RNA, 19 nt, Artificial Sequence
  Description of Artificial Sequence: Synthetic oligonucleotide
  Antisense Strand to SEQ ID NO: 329901
uuauuaagcaccugcuaag

SEQ ID NO: 329903 - RNA, 19 nt, Artificial Sequence
  Description of Artificial Sequence: Synthetic oligonucleotide
  Sense Strand Starting at position 142 of SEQ ID NO: 316502
caguuaaacuugcuuguga

SEQ ID NO: 329904 - RNA, 19 nt, Artificial Sequence
  Description of Artificial Sequence: Synthetic oligonucleotide
  Antisense Strand to SEQ ID NO: 329903
ucacaagcaaguuuaacug

SEQ ID NO: 329905 - RNA, 19 nt, Artificial Sequence
  Description of Artificial Sequence: Synthetic oligonucleotide
  Sense Strand Starting at position 142 of SEQ ID NO: 316565
gcugaugucccggauuaua

SEQ ID NO: 329906 - RNA, 19 nt, Artificial Sequence
  Description of Artificial Sequence: Synthetic oligonucleotide
  Antisense Strand to SEQ ID NO: 329905
uauaauccgggacaucagc

SEQ ID NO: 329907 - RNA, 19 nt, Artificial Sequence
  Description of Artificial Sequence: Synthetic oligonucleotide
  Sense Strand Starting at position 142 of SEQ ID NO: 316573
cccggauuauagguuaaau

SEQ ID NO: 329908 - RNA, 19 nt, Artificial Sequence
  Description of Artificial Sequence: Synthetic oligonucleotide
  Antisense Strand to SEQ ID NO: 329907
auuuaaccuauaauccggg

SEQ ID NO: 329909 - RNA, 19 nt, Artificial Sequence
  Description of Artificial Sequence: Synthetic oligonucleotide
  Sense Strand Starting at position 142 of SEQ ID NO: 316583
agguuaaauuaggaggaaa

SEQ ID NO: 329910 - RNA, 19 nt, Artificial Sequence
  Description of Artificial Sequence: Synthetic oligonucleotide
  Antisense Strand to SEQ ID NO: 329909
uuuccuccuaauuuaaccu

SEQ ID NO: 329911 - RNA, 19 nt, Artificial Sequence
  Description of Artificial Sequence: Synthetic oligonucleotide
  Sense Strand Starting at position 142 of SEQ ID NO: 316610
auguacauccaugacagua

SEQ ID NO: 329912 - RNA, 19 nt, Artificial Sequence
  Description of Artificial Sequence: Synthetic oligonucleotide
  Antisense Strand to SEQ ID NO: 329911
uacugucauggauguacau

SEQ ID NO: 329913 - RNA, 19 nt, Artificial Sequence
  Description of Artificial Sequence: Synthetic oligonucleotide
  Sense Strand Starting at position 142 of SEQ ID NO: 316679
cuuguaacaucaguuaaga

SEQ ID NO: 329914 - RNA, 19 nt, Artificial Sequence
  Description of Artificial Sequence: Synthetic oligonucleotide
  Antisense Strand to SEQ ID NO: 329913
ucuuaacugauguuacaag

SEQ ID NO: 329915 - RNA, 19 nt, Artificial Sequence
  Description of Artificial Sequence: Synthetic oligonucleotide
  Sense Strand Starting at position 142 of SEQ ID NO: 316735
cucccaggccuuggauauu

SEQ ID NO: 329916 - RNA, 19 nt, Artificial Sequence
  Description of Artificial Sequence: Synthetic oligonucleotide
  Antisense Strand to SEQ ID NO: 329915
aauauccaaggccugggag

SEQ ID NO: 329917 - RNA, 19 nt, Artificial Sequence
  Description of Artificial Sequence: Synthetic oligonucleotide
  Sense Strand Starting at position 142 of SEQ ID NO: 316914
acccguuuauuagcagaga

SEQ ID NO: 329918 - RNA, 19 nt, Artificial Sequence
  Description of Artificial Sequence: Synthetic oligonucleotide
  Antisense Strand to SEQ ID NO: 329917
ucucugcuaauaaacgggu

SEQ ID NO: 329919 - RNA, 19 nt, Artificial Sequence
  Description of Artificial Sequence: Synthetic oligonucleotide
  Sense Strand Starting at position 142 of SEQ ID NO: 316999
ugaucaaauagguggguaa

SEQ ID NO: 329920 - RNA, 19 nt, Artificial Sequence
  Description of Artificial Sequence: Synthetic oligonucleotide
  Antisense Strand to SEQ ID NO: 329919
uuacccaccuauuugauca

SEQ ID NO: 329921 - RNA, 19 nt, Artificial Sequence
  Description of Artificial Sequence: Synthetic oligonucleotide
  Sense Strand Starting at position 142 of SEQ ID NO: 317068
aggcaauguauugguagaa

SEQ ID NO: 329922 - RNA, 19 nt, Artificial Sequence
  Description of Artificial Sequence: Synthetic oligonucleotide
  Antisense Strand to SEQ ID NO: 329921
uucuaccaauacauugccu

SEQ ID NO: 329923 - RNA, 19 nt, Artificial Sequence
  Description of Artificial Sequence: Synthetic oligonucleotide
  Sense Strand Starting at position 142 of SEQ ID NO: 317069
ggcaauguauugguagaag

SEQ ID NO: 329924 - RNA, 19 nt, Artificial Sequence
  Description of Artificial Sequence: Synthetic oligonucleotide
  Antisense Strand to SEQ ID NO: 329923
cuucuaccaauacauugcc

SEQ ID NO: 329925 - RNA, 19 nt, Artificial Sequence
  Description of Artificial Sequence: Synthetic oligonucleotide
  Sense Strand Starting at position 142 of SEQ ID NO: 317545
aguuuaguguugucaagag

SEQ ID NO: 329926 - RNA, 19 nt, Artificial Sequence
  Description of Artificial Sequence: Synthetic oligonucleotide
  Antisense Strand to SEQ ID NO: 329925
cucuugacaacacuaaacu

SEQ ID NO: 329927 - RNA, 19 nt, Artificial Sequence
  Description of Artificial Sequence: Synthetic oligonucleotide
  Sense Strand Starting at position 142 of SEQ ID NO: 317549
uaguguugucaagaggaca

SEQ ID NO: 329928 - RNA, 19 nt, Artificial Sequence
  Description of Artificial Sequence: Synthetic oligonucleotide
  Antisense Strand to SEQ ID NO: 329927
uguccucuugacaacacua

SEQ ID NO: 329929 - RNA, 19 nt, Artificial Sequence
  Description of Artificial Sequence: Synthetic oligonucleotide
  Sense Strand Starting at position 142 of SEQ ID NO: 317684
cuguaacaguuuguuggau

SEQ ID NO: 329930 - RNA, 19 nt, Artificial Sequence
  Description of Artificial Sequence: Synthetic oligonucleotide
  Antisense Strand to SEQ ID NO: 329929
auccaacaaacuguuacag

SEQ ID NO: 329931 - RNA, 19 nt, Artificial Sequence
  Description of Artificial Sequence: Synthetic oligonucleotide
  Sense Strand Starting at position 142 of SEQ ID NO: 317721
cuaaguguucugggauaga

SEQ ID NO: 329932 - RNA, 19 nt, Artificial Sequence
  Description of Artificial Sequence: Synthetic oligonucleotide
  Antisense Strand to SEQ ID NO: 329931
ucuaucccagaacacuuag

SEQ ID NO: 329933 - RNA, 19 nt, Artificial Sequence
  Description of Artificial Sequence: Synthetic oligonucleotide
  Sense Strand Starting at position 142 of SEQ ID NO: 317724
aguguucugggauagacac

SEQ ID NO: 329934 - RNA, 19 nt, Artificial Sequence
  Description of Artificial Sequence: Synthetic oligonucleotide
  Antisense Strand to SEQ ID NO: 329933
gugucuaucccagaacacu

SEQ ID NO: 329935 - RNA, 19 nt, Artificial Sequence
  Description of Artificial Sequence: Synthetic oligonucleotide
  Sense Strand Starting at position 142 of SEQ ID NO: 318036
ggauguguucagggagcag

SEQ ID NO: 329936 - RNA, 19 nt, Artificial Sequence
  Description of Artificial Sequence: Synthetic oligonucleotide
  Antisense Strand to SEQ ID NO: 329935
cugcucccugaacacaucc

SEQ ID NO: 329937 - RNA, 19 nt, Artificial Sequence
  Description of Artificial Sequence: Synthetic oligonucleotide
  Sense Strand Starting at position 142 of SEQ ID NO: 318281
cuagcucugucccugauga

SEQ ID NO: 329938 - RNA, 19 nt, Artificial Sequence
  Description of Artificial Sequence: Synthetic oligonucleotide
  Antisense Strand to SEQ ID NO: 329937
ucaucagggacagagcuag

SEQ ID NO: 329939 - RNA, 19 nt, Artificial Sequence
  Description of Artificial Sequence: Synthetic oligonucleotide
  Sense Strand Starting at position 142 of SEQ ID NO: 318524
gacagugccuuucuagaca

SEQ ID NO: 329940 - RNA, 19 nt, Artificial Sequence
  Description of Artificial Sequence: Synthetic oligonucleotide
  Antisense Strand to SEQ ID NO: 329939
ugucuagaaaggcacuguc

SEQ ID NO: 329941 - RNA, 19 nt, Artificial Sequence
  Description of Artificial Sequence: Synthetic oligonucleotide
  Sense Strand Starting at position 142 of SEQ ID NO: 318527
agugccuuucuagacaugu

SEQ ID NO: 329942 - RNA, 19 nt, Artificial Sequence
  Description of Artificial Sequence: Synthetic oligonucleotide
  Antisense Strand to SEQ ID NO: 329941
acaugucuagaaaggcacu

SEQ ID NO: 329943 - RNA, 19 nt, Artificial Sequence
  Description of Artificial Sequence: Synthetic oligonucleotide
  Sense Strand Starting at position 142 of SEQ ID NO: 318544
guauuuccucucugacugu

SEQ ID NO: 329944 - RNA, 19 nt, Artificial Sequence
  Description of Artificial Sequence: Synthetic oligonucleotide
  Antisense Strand to SEQ ID NO: 329943
acagucagagaggaaauac

SEQ ID NO: 329945 - RNA, 19 nt, Artificial Sequence
  Description of Artificial Sequence: Synthetic oligonucleotide
  Sense Strand Starting at position 142 of SEQ ID NO: 318603
cuugacuguuauguuccaa

SEQ ID NO: 329946 - RNA, 19 nt, Artificial Sequence
  Description of Artificial Sequence: Synthetic oligonucleotide
  Antisense Strand to SEQ ID NO: 329945
uuggaacauaacagucaag

SEQ ID NO: 329947 - RNA, 19 nt, Artificial Sequence
  Description of Artificial Sequence: Synthetic oligonucleotide
  Sense Strand Starting at position 142 of SEQ ID NO: 318652
ggcccagagugccucaaau

SEQ ID NO: 329948 - RNA, 19 nt, Artificial Sequence
  Description of Artificial Sequence: Synthetic oligonucleotide
  Antisense Strand to SEQ ID NO: 329947
auuugaggcacucugggcc

SEQ ID NO: 329949 - RNA, 19 nt, Artificial Sequence
  Description of Artificial Sequence: Synthetic oligonucleotide
  Sense Strand Starting at position 142 of SEQ ID NO: 318654
cccagagugccucaaauag

SEQ ID NO: 329950 - RNA, 19 nt, Artificial Sequence
  Description of Artificial Sequence: Synthetic oligonucleotide
  Antisense Strand to SEQ ID NO: 329949
cuauuugaggcacucuggg

SEQ ID NO: 329951 - RNA, 19 nt, Artificial Sequence
  Description of Artificial Sequence: Synthetic oligonucleotide
  Sense Strand Starting at position 142 of SEQ ID NO: 318699
gccauuucucugggagcca

SEQ ID NO: 329952 - RNA, 19 nt, Artificial Sequence
  Description of Artificial Sequence: Synthetic oligonucleotide
  Antisense Strand to SEQ ID NO: 329951
uggcucccagagaaauggc

SEQ ID NO: 329953 - RNA, 19 nt, Artificial Sequence
  Description of Artificial Sequence: Synthetic oligonucleotide
  Sense Strand Starting at position 142 of SEQ ID NO: 318700
ccauuucucugggagccau

SEQ ID NO: 329954 - RNA, 19 nt, Artificial Sequence
  Description of Artificial Sequence: Synthetic oligonucleotide
  Antisense Strand to SEQ ID NO: 329953
auggcucccagagaaaugg

SEQ ID NO: 329955 - RNA, 19 nt, Artificial Sequence
  Description of Artificial Sequence: Synthetic oligonucleotide
  Sense Strand Starting at position 142 of SEQ ID NO: 318759
gcagcuucucaggaggcau

SEQ ID NO: 329956 - RNA, 19 nt, Artificial Sequence
  Description of Artificial Sequence: Synthetic oligonucleotide
  Antisense Strand to SEQ ID NO: 329955
augccuccugagaagcugc

SEQ ID NO: 329957 - RNA, 19 nt, Artificial Sequence
  Description of Artificial Sequence: Synthetic oligonucleotide
  Sense Strand Starting at position 142 of SEQ ID NO: 318927
ucuacugacuggucuggua

SEQ ID NO: 329958 - RNA, 19 nt, Artificial Sequence
  Description of Artificial Sequence: Synthetic oligonucleotide
  Antisense Strand to SEQ ID NO: 329957
uaccagaccagucaguaga

SEQ ID NO: 329959 - RNA, 19 nt, Artificial Sequence
  Description of Artificial Sequence: Synthetic oligonucleotide
  Sense Strand Starting at position 142 of SEQ ID NO: 318929
uacugacuggucugguaau

SEQ ID NO: 329960 - RNA, 19 nt, Artificial Sequence
  Description of Artificial Sequence: Synthetic oligonucleotide
  Antisense Strand to SEQ ID NO: 329959
auuaccagaccagucagua

SEQ ID NO: 329961 - RNA, 19 nt, Artificial Sequence
  Description of Artificial Sequence: Synthetic oligonucleotide
  Sense Strand Starting at position 142 of SEQ ID NO: 318952
uguguugucccucaaauua

SEQ ID NO: 329962 - RNA, 19 nt, Artificial Sequence
  Description of Artificial Sequence: Synthetic oligonucleotide
  Antisense Strand to SEQ ID NO: 329961
uaauuugagggacaacaca

SEQ ID NO: 329963 - RNA, 19 nt, Artificial Sequence
  Description of Artificial Sequence: Synthetic oligonucleotide
  Sense Strand Starting at position 142 of SEQ ID NO: 318998
guguuaucccuugguaagg

SEQ ID NO: 329964 - RNA, 19 nt, Artificial Sequence
  Description of Artificial Sequence: Synthetic oligonucleotide
  Antisense Strand to SEQ ID NO: 329963
ccuuaccaagggauaacac

SEQ ID NO: 329965 - RNA, 19 nt, Artificial Sequence
  Description of Artificial Sequence: Synthetic oligonucleotide
  Sense Strand Starting at position 142 of SEQ ID NO: 319166
gaaggaguguuucuagaaa

SEQ ID NO: 329966 - RNA, 19 nt, Artificial Sequence
  Description of Artificial Sequence: Synthetic oligonucleotide
  Antisense Strand to SEQ ID NO: 329965
uuucuagaaacacuccuuc

SEQ ID NO: 329967 - RNA, 19 nt, Artificial Sequence
  Description of Artificial Sequence: Synthetic oligonucleotide
  Sense Strand Starting at position 142 of SEQ ID NO: 319196
acaaacauuucugggaaag

SEQ ID NO: 329968 - RNA, 19 nt, Artificial Sequence
  Description of Artificial Sequence: Synthetic oligonucleotide
  Antisense Strand to SEQ ID NO: 329967
cuuucccagaaauguuugu

SEQ ID NO: 329969 - RNA, 19 nt, Artificial Sequence
  Description of Artificial Sequence: Synthetic oligonucleotide
  Sense Strand Starting at position 142 of SEQ ID NO: 319198
aaacauuucugggaaaggu

SEQ ID NO: 329970 - RNA, 19 nt, Artificial Sequence
  Description of Artificial Sequence: Synthetic oligonucleotide
  Antisense Strand to SEQ ID NO: 329969
accuuucccagaaauguuu

SEQ ID NO: 329971 - RNA, 19 nt, Artificial Sequence
  Description of Artificial Sequence: Synthetic oligonucleotide
  Sense Strand Starting at position 142 of SEQ ID NO: 319208
gggaaagguuaguucccau

SEQ ID NO: 329972 - RNA, 19 nt, Artificial Sequence
  Description of Artificial Sequence: Synthetic oligonucleotide
  Antisense Strand to SEQ ID NO: 329971
augggaacuaaccuuuccc

SEQ ID NO: 329973 - RNA, 19 nt, Artificial Sequence
  Description of Artificial Sequence: Synthetic oligonucleotide
  Sense Strand Starting at position 143 of SEQ ID NO: 315252
gcaauuugugagcaggcau

SEQ ID NO: 329974 - RNA, 19 nt, Artificial Sequence
  Description of Artificial Sequence: Synthetic oligonucleotide
  Antisense Strand to SEQ ID NO: 329973
augccugcucacaaauugc

SEQ ID NO: 329975 - RNA, 19 nt, Artificial Sequence
  Description of Artificial Sequence: Synthetic oligonucleotide
  Sense Strand Starting at position 143 of SEQ ID NO: 315395
gacagaugcuuggcagaga

SEQ ID NO: 329976 - RNA, 19 nt, Artificial Sequence
  Description of Artificial Sequence: Synthetic oligonucleotide
  Antisense Strand to SEQ ID NO: 329975
ucucugccaagcaucuguc

SEQ ID NO: 329977 - RNA, 19 nt, Artificial Sequence
  Description of Artificial Sequence: Synthetic oligonucleotide
  Sense Strand Starting at position 143 of SEQ ID NO: 315419
aaagaagggcucugcuaga

SEQ ID NO: 329978 - RNA, 19 nt, Artificial Sequence
  Description of Artificial Sequence: Synthetic oligonucleotide
  Antisense Strand to SEQ ID NO: 329977
ucuagcagagcccuucuuu

SEQ ID NO: 329979 - RNA, 19 nt, Artificial Sequence
  Description of Artificial Sequence: Synthetic oligonucleotide
  Sense Strand Starting at position 143 of SEQ ID NO: 315424
agggcucugcuagagagaa

SEQ ID NO: 329980 - RNA, 19 nt, Artificial Sequence
  Description of Artificial Sequence: Synthetic oligonucleotide
  Antisense Strand to SEQ ID NO: 329979
uucucucuagcagagcccu

SEQ ID NO: 329981 - RNA, 19 nt, Artificial Sequence
  Description of Artificial Sequence: Synthetic oligonucleotide
  Sense Strand Starting at position 143 of SEQ ID NO: 315426
ggcucugcuagagagaagu

SEQ ID NO: 329982 - RNA, 19 nt, Artificial Sequence
  Description of Artificial Sequence: Synthetic oligonucleotide
  Antisense Strand to SEQ ID NO: 329981
acuucucucuagcagagcc

SEQ ID NO: 329983 - RNA, 19 nt, Artificial Sequence
  Description of Artificial Sequence: Synthetic oligonucleotide
  Sense Strand Starting at position 143 of SEQ ID NO: 315478
acauaagauugagcuuaac

SEQ ID NO: 329984 - RNA, 19 nt, Artificial Sequence
  Description of Artificial Sequence: Synthetic oligonucleotide
  Antisense Strand to SEQ ID NO: 329983
guuaagcucaaucuuaugu

SEQ ID NO: 329985 - RNA, 19 nt, Artificial Sequence
  Description of Artificial Sequence: Synthetic oligonucleotide
  Sense Strand Starting at position 143 of SEQ ID NO: 315500
augagaagccaagguuuaa

SEQ ID NO: 329986 - RNA, 19 nt, Artificial Sequence
  Description of Artificial Sequence: Synthetic oligonucleotide
  Antisense Strand to SEQ ID NO: 329985
uuaaaccuuggcuucucau

SEQ ID NO: 329987 - RNA, 19 nt, Artificial Sequence
  Description of Artificial Sequence: Synthetic oligonucleotide
  Sense Strand Starting at position 143 of SEQ ID NO: 315553
guggauucucaaggagauu

SEQ ID NO: 329988 - RNA, 19 nt, Artificial Sequence
  Description of Artificial Sequence: Synthetic oligonucleotide
  Antisense Strand to SEQ ID NO: 329987
aaucuccuugagaauccac

SEQ ID NO: 329989 - RNA, 19 nt, Artificial Sequence
  Description of Artificial Sequence: Synthetic oligonucleotide
  Sense Strand Starting at position 143 of SEQ ID NO: 315719
cagggaaguuaucuguaua

SEQ ID NO: 329990 - RNA, 19 nt, Artificial Sequence
  Description of Artificial Sequence: Synthetic oligonucleotide
  Antisense Strand to SEQ ID NO: 329989
uauacagauaacuucccug

SEQ ID NO: 329991 - RNA, 19 nt, Artificial Sequence
  Description of Artificial Sequence: Synthetic oligonucleotide
  Sense Strand Starting at position 143 of SEQ ID NO: 315720
agggaaguuaucuguauaa

SEQ ID NO: 329992 - RNA, 19 nt, Artificial Sequence
  Description of Artificial Sequence: Synthetic oligonucleotide
  Antisense Strand to SEQ ID NO: 329991
uuauacagauaacuucccu

SEQ ID NO: 329993 - RNA, 19 nt, Artificial Sequence
  Description of Artificial Sequence: Synthetic oligonucleotide
  Sense Strand Starting at position 143 of SEQ ID NO: 315732
uguauaaagaucgauguuu

SEQ ID NO: 329994 - RNA, 19 nt, Artificial Sequence
  Description of Artificial Sequence: Synthetic oligonucleotide
  Antisense Strand to SEQ ID NO: 329993
aaacaucgaucuuuauaca

SEQ ID NO: 329995 - RNA, 19 nt, Artificial Sequence
  Description of Artificial Sequence: Synthetic oligonucleotide
  Sense Strand Starting at position 143 of SEQ ID NO: 315900
uguauacacugauuacaca

SEQ ID NO: 329996 - RNA, 19 nt, Artificial Sequence
  Description of Artificial Sequence: Synthetic oligonucleotide
  Antisense Strand to SEQ ID NO: 329995
uguguaaucaguguauaca

SEQ ID NO: 329997 - RNA, 19 nt, Artificial Sequence
  Description of Artificial Sequence: Synthetic oligonucleotide
  Sense Strand Starting at position 143 of SEQ ID NO: 315922
cauggaaaccugugcagau

SEQ ID NO: 329998 - RNA, 19 nt, Artificial Sequence
  Description of Artificial Sequence: Synthetic oligonucleotide
  Antisense Strand to SEQ ID NO: 329997
aucugcacagguuuccaug

SEQ ID NO: 329999 - RNA, 19 nt, Artificial Sequence
  Description of Artificial Sequence: Synthetic oligonucleotide
  Sense Strand Starting at position 143 of SEQ ID NO: 315926
gaaaccugugcagaucaua

SEQ ID NO: 330000 - RNA, 19 nt, Artificial Sequence
  Description of Artificial Sequence: Synthetic oligonucleotide
  Antisense Strand to SEQ ID NO: 329999
uaugaucugcacagguuuc

SEQ ID NO: 330001 - RNA, 19 nt, Artificial Sequence
  Description of Artificial Sequence: Synthetic oligonucleotide
  Sense Strand Starting at position 143 of SEQ ID NO: 316679
guuucaauugaggguggaa

SEQ ID NO: 330002 - RNA, 19 nt, Artificial Sequence
  Description of Artificial Sequence: Synthetic oligonucleotide
  Antisense Strand to SEQ ID NO: 330001
uuccacccucaauugaaac

SEQ ID NO: 330003 - RNA, 19 nt, Artificial Sequence
  Description of Artificial Sequence: Synthetic oligonucleotide
  Sense Strand Starting at position 143 of SEQ ID NO: 316738
acacacuuacuaugaguga

SEQ ID NO: 330004 - RNA, 19 nt, Artificial Sequence
  Description of Artificial Sequence: Synthetic oligonucleotide
  Antisense Strand to SEQ ID NO: 330003
ucacucauaguaagugugu

SEQ ID NO: 330005 - RNA, 19 nt, Artificial Sequence
  Description of Artificial Sequence: Synthetic oligonucleotide
  Sense Strand Starting at position 143 of SEQ ID NO: 316742
acuuacuaugagugacuau

SEQ ID NO: 330006 - RNA, 19 nt, Artificial Sequence
  Description of Artificial Sequence: Synthetic oligonucleotide
  Antisense Strand to SEQ ID NO: 330005
auagucacucauaguaagu

SEQ ID NO: 330007 - RNA, 19 nt, Artificial Sequence
  Description of Artificial Sequence: Synthetic oligonucleotide
  Sense Strand Starting at position 143 of SEQ ID NO: 317315
acaucacaagucuggcaaa

SEQ ID NO: 330008 - RNA, 19 nt, Artificial Sequence
  Description of Artificial Sequence: Synthetic oligonucleotide
  Antisense Strand to SEQ ID NO: 330007
uuugccagacuugugaugu

SEQ ID NO: 330009 - RNA, 19 nt, Artificial Sequence
  Description of Artificial Sequence: Synthetic oligonucleotide
  Sense Strand Starting at position 143 of SEQ ID NO: 317366
uauggaucugaauguucuu

SEQ ID NO: 330010 - RNA, 19 nt, Artificial Sequence
  Description of Artificial Sequence: Synthetic oligonucleotide
  Antisense Strand to SEQ ID NO: 330009
aagaacauucagauccaua

SEQ ID NO: 330011 - RNA, 19 nt, Artificial Sequence
  Description of Artificial Sequence: Synthetic oligonucleotide
  Sense Strand Starting at position 143 of SEQ ID NO: 317371
aucugaauguucuuuggga

SEQ ID NO: 330012 - RNA, 19 nt, Artificial Sequence
  Description of Artificial Sequence: Synthetic oligonucleotide
  Antisense Strand to SEQ ID NO: 330011
ucccaaagaacauucagau

SEQ ID NO: 330013 - RNA, 19 nt, Artificial Sequence
  Description of Artificial Sequence: Synthetic oligonucleotide
  Sense Strand Starting at position 143 of SEQ ID NO: 317372
ucugaauguucuuugggaa

SEQ ID NO: 330014 - RNA, 19 nt, Artificial Sequence
  Description of Artificial Sequence: Synthetic oligonucleotide
  Antisense Strand to SEQ ID NO: 330013
uucccaaagaacauucaga

SEQ ID NO: 330015 - RNA, 19 nt, Artificial Sequence
  Description of Artificial Sequence: Synthetic oligonucleotide
  Sense Strand Starting at position 143 of SEQ ID NO: 317373
cugaauguucuuugggaau

SEQ ID NO: 330016 - RNA, 19 nt, Artificial Sequence
  Description of Artificial Sequence: Synthetic oligonucleotide
  Antisense Strand to SEQ ID NO: 330015
auucccaaagaacauucag

SEQ ID NO: 330017 - RNA, 19 nt, Artificial Sequence
  Description of Artificial Sequence: Synthetic oligonucleotide
  Sense Strand Starting at position 143 of SEQ ID NO: 317384
uugggaauucugcagcaaa

SEQ ID NO: 330018 - RNA, 19 nt, Artificial Sequence
  Description of Artificial Sequence: Synthetic oligonucleotide
  Antisense Strand to SEQ ID NO: 330017
uuugcugcagaauucccaa

SEQ ID NO: 330019 - RNA, 19 nt, Artificial Sequence
  Description of Artificial Sequence: Synthetic oligonucleotide
  Sense Strand Starting at position 143 of SEQ ID NO: 317387
ggaauucugcagcaaauaa

SEQ ID NO: 330020 - RNA, 19 nt, Artificial Sequence
  Description of Artificial Sequence: Synthetic oligonucleotide
  Antisense Strand to SEQ ID NO: 330019
uuauuugcugcagaauucc

SEQ ID NO: 330021 - RNA, 19 nt, Artificial Sequence
  Description of Artificial Sequence: Synthetic oligonucleotide
  Sense Strand Starting at position 143 of SEQ ID NO: 317462
gagagauuacaaugaacgu

SEQ ID NO: 330022 - RNA, 19 nt, Artificial Sequence
  Description of Artificial Sequence: Synthetic oligonucleotide
  Antisense Strand to SEQ ID NO: 330021
acguucauuguaaucucuc

SEQ ID NO: 330023 - RNA, 19 nt, Artificial Sequence
  Description of Artificial Sequence: Synthetic oligonucleotide
  Sense Strand Starting at position 143 of SEQ ID NO: 317524
ucuacaaaggcaugaauga

SEQ ID NO: 330024 - RNA, 19 nt, Artificial Sequence
  Description of Artificial Sequence: Synthetic oligonucleotide
  Antisense Strand to SEQ ID NO: 330023
ucauucaugccuuuguaga

SEQ ID NO: 330025 - RNA, 19 nt, Artificial Sequence
  Description of Artificial Sequence: Synthetic oligonucleotide
  Sense Strand Starting at position 143 of SEQ ID NO: 317857
auguuuaacuaucuuugga

SEQ ID NO: 330026 - RNA, 19 nt, Artificial Sequence
  Description of Artificial Sequence: Synthetic oligonucleotide
  Antisense Strand to SEQ ID NO: 330025
uccaaagauaguuaaacau

SEQ ID NO: 330027 - RNA, 19 nt, Artificial Sequence
  Description of Artificial Sequence: Synthetic oligonucleotide
  Sense Strand Starting at position 143 of SEQ ID NO: 317859
guuuaacuaucuuuggaac

SEQ ID NO: 330028 - RNA, 19 nt, Artificial Sequence
  Description of Artificial Sequence: Synthetic oligonucleotide
  Antisense Strand to SEQ ID NO: 330027
guuccaaagauaguuaaac

SEQ ID NO: 330029 - RNA, 19 nt, Artificial Sequence
  Description of Artificial Sequence: Synthetic oligonucleotide
  Sense Strand Starting at position 143 of SEQ ID NO: 317933
gaucaaguauuccugauga

SEQ ID NO: 330030 - RNA, 19 nt, Artificial Sequence
  Description of Artificial Sequence: Synthetic oligonucleotide
  Antisense Strand to SEQ ID NO: 330029
ucaucaggaauacuugauc

SEQ ID NO: 330031 - RNA, 19 nt, Artificial Sequence
  Description of Artificial Sequence: Synthetic oligonucleotide
  Sense Strand Starting at position 143 of SEQ ID NO: 317938
aguauuccugaugaaacgu

SEQ ID NO: 330032 - RNA, 19 nt, Artificial Sequence
  Description of Artificial Sequence: Synthetic oligonucleotide
  Antisense Strand to SEQ ID NO: 330031
acguuucaucaggaauacu

SEQ ID NO: 330033 - RNA, 19 nt, Artificial Sequence
  Description of Artificial Sequence: Synthetic oligonucleotide
  Sense Strand Starting at position 143 of SEQ ID NO: 317979
ccagauacacagugaguuu

SEQ ID NO: 330034 - RNA, 19 nt, Artificial Sequence
  Description of Artificial Sequence: Synthetic oligonucleotide
  Antisense Strand to SEQ ID NO: 330033
aaacucacuguguaucugg

SEQ ID NO: 330035 - RNA, 19 nt, Artificial Sequence
  Description of Artificial Sequence: Synthetic oligonucleotide
  Sense Strand Starting at position 143 of SEQ ID NO: 317999
gaauucuuagugugaagaa

SEQ ID NO: 330036 - RNA, 19 nt, Artificial Sequence
  Description of Artificial Sequence: Synthetic oligonucleotide
  Antisense Strand to SEQ ID NO: 330035
uucuucacacuaagaauuc

SEQ ID NO: 330037 - RNA, 19 nt, Artificial Sequence
  Description of Artificial Sequence: Synthetic oligonucleotide
  Sense Strand Starting at position 143 of SEQ ID NO: 318043
gcauauauugaguacauau

SEQ ID NO: 330038 - RNA, 19 nt, Artificial Sequence
  Description of Artificial Sequence: Synthetic oligonucleotide
  Antisense Strand to SEQ ID NO: 330037
auauguacucaauauaugc

SEQ ID NO: 330039 - RNA, 19 nt, Artificial Sequence
  Description of Artificial Sequence: Synthetic oligonucleotide
  Sense Strand Starting at position 143 of SEQ ID NO: 318070
uuuggauaugcugaguuaa

SEQ ID NO: 330040 - RNA, 19 nt, Artificial Sequence
  Description of Artificial Sequence: Synthetic oligonucleotide
  Antisense Strand to SEQ ID NO: 330039
uuaacucagcauauccaaa

SEQ ID NO: 330041 - RNA, 19 nt, Artificial Sequence
  Description of Artificial Sequence: Synthetic oligonucleotide
  Sense Strand Starting at position 143 of SEQ ID NO: 318072
uggauaugcugaguuaaau

SEQ ID NO: 330042 - RNA, 19 nt, Artificial Sequence
  Description of Artificial Sequence: Synthetic oligonucleotide
  Antisense Strand to SEQ ID NO: 330041
auuuaacucagcauaucca

SEQ ID NO: 330043 - RNA, 19 nt, Artificial Sequence
  Description of Artificial Sequence: Synthetic oligonucleotide
  Sense Strand Starting at position 143 of SEQ ID NO: 318115
uaaauaugguugcuagaaa

SEQ ID NO: 330044 - RNA, 19 nt, Artificial Sequence
  Description of Artificial Sequence: Synthetic oligonucleotide
  Antisense Strand to SEQ ID NO: 330043
uuucuagcaaccauauuua

SEQ ID NO: 330045 - RNA, 19 nt, Artificial Sequence
  Description of Artificial Sequence: Synthetic oligonucleotide
  Sense Strand Starting at position 143 of SEQ ID NO: 318299
aggcaugcgccacagauuu

SEQ ID NO: 330046 - RNA, 19 nt, Artificial Sequence
  Description of Artificial Sequence: Synthetic oligonucleotide
  Antisense Strand to SEQ ID NO: 330045
aaaucuguggcgcaugccu

SEQ ID NO: 330047 - RNA, 19 nt, Artificial Sequence
  Description of Artificial Sequence: Synthetic oligonucleotide
  Sense Strand Starting at position 143 of SEQ ID NO: 318301
gcaugcgccacagauuuau

SEQ ID NO: 330048 - RNA, 19 nt, Artificial Sequence
  Description of Artificial Sequence: Synthetic oligonucleotide
  Antisense Strand to SEQ ID NO: 330047
auaaaucuguggcgcaugc

SEQ ID NO: 330049 - RNA, 19 nt, Artificial Sequence
  Description of Artificial Sequence: Synthetic oligonucleotide
  Sense Strand Starting at position 143 of SEQ ID NO: 318322
uuuauuucuguuggagugu

SEQ ID NO: 330050 - RNA, 19 nt, Artificial Sequence
  Description of Artificial Sequence: Synthetic oligonucleotide
  Antisense Strand to SEQ ID NO: 330049
acacuccaacagaaauaaa

SEQ ID NO: 330051 - RNA, 19 nt, Artificial Sequence
  Description of Artificial Sequence: Synthetic oligonucleotide
  Sense Strand Starting at position 143 of SEQ ID NO: 318350
agaguauggagcugacauu

SEQ ID NO: 330052 - RNA, 19 nt, Artificial Sequence
  Description of Artificial Sequence: Synthetic oligonucleotide
  Antisense Strand to SEQ ID NO: 330051
aaugucagcuccauacucu

SEQ ID NO: 330053 - RNA, 19 nt, Artificial Sequence
  Description of Artificial Sequence: Synthetic oligonucleotide
  Sense Strand Starting at position 144 of SEQ ID NO: 315678
auccgaugaugucuggaga

SEQ ID NO: 330054 - RNA, 19 nt, Artificial Sequence
  Description of Artificial Sequence: Synthetic oligonucleotide
  Antisense Strand to SEQ ID NO: 330053
ucuccagacaucaucggau

SEQ ID NO: 330055 - RNA, 19 nt, Artificial Sequence
  Description of Artificial Sequence: Synthetic oligonucleotide
  Sense Strand Starting at position 144 of SEQ ID NO: 315773
aagacugcucggcagugau

SEQ ID NO: 330056 - RNA, 19 nt, Artificial Sequence
  Description of Artificial Sequence: Synthetic oligonucleotide
  Antisense Strand to SEQ ID NO: 330055
aucacugccgagcagucuu

SEQ ID NO: 330057 - RNA, 19 nt, Artificial Sequence
  Description of Artificial Sequence: Synthetic oligonucleotide
  Sense Strand Starting at position 144 of SEQ ID NO: 315961
cugucugugagccagaaca

SEQ ID NO: 330058 - RNA, 19 nt, Artificial Sequence
  Description of Artificial Sequence: Synthetic oligonucleotide
  Antisense Strand to SEQ ID NO: 330057
uguucuggcucacagacag

SEQ ID NO: 330059 - RNA, 19 nt, Artificial Sequence
  Description of Artificial Sequence: Synthetic oligonucleotide
  Sense Strand Starting at position 144 of SEQ ID NO: 315963
gucugugagccagaacaca

SEQ ID NO: 330060 - RNA, 19 nt, Artificial Sequence
  Description of Artificial Sequence: Synthetic oligonucleotide
  Antisense Strand to SEQ ID NO: 330059
uguguucuggcucacagac

SEQ ID NO: 330061 - RNA, 19 nt, Artificial Sequence
  Description of Artificial Sequence: Synthetic oligonucleotide
  Sense Strand Starting at position 144 of SEQ ID NO: 316140
ugacuugcccacuagucua

SEQ ID NO: 330062 - RNA, 19 nt, Artificial Sequence
  Description of Artificial Sequence: Synthetic oligonucleotide
  Antisense Strand to SEQ ID NO: 330061
uagacuagugggcaaguca

SEQ ID NO: 330063 - RNA, 19 nt, Artificial Sequence
  Description of Artificial Sequence: Synthetic oligonucleotide
  Sense Strand Starting at position 144 of SEQ ID NO: 316498
ccugauggagaacguauua

SEQ ID NO: 330064 - RNA, 19 nt, Artificial Sequence
  Description of Artificial Sequence: Synthetic oligonucleotide
  Antisense Strand to SEQ ID NO: 330063
uaauacguucuccaucagg

SEQ ID NO: 330065 - RNA, 19 nt, Artificial Sequence
  Description of Artificial Sequence: Synthetic oligonucleotide
  Sense Strand Starting at position 144 of SEQ ID NO: 316672
gcagcauuaccacaggaau

SEQ ID NO: 330066 - RNA, 19 nt, Artificial Sequence
  Description of Artificial Sequence: Synthetic oligonucleotide
  Antisense Strand to SEQ ID NO: 330065
auuccugugguaaugcugc

SEQ ID NO: 330067 - RNA, 19 nt, Artificial Sequence
  Description of Artificial Sequence: Synthetic oligonucleotide
  Sense Strand Starting at position 144 of SEQ ID NO: 316949
ggcagcuaccuugaauucu

SEQ ID NO: 330068 - RNA, 19 nt, Artificial Sequence
  Description of Artificial Sequence: Synthetic oligonucleotide
  Antisense Strand to SEQ ID NO: 330067
agaauucaagguagcugcc

SEQ ID NO: 330069 - RNA, 19 nt, Artificial Sequence
  Description of Artificial Sequence: Synthetic oligonucleotide
  Sense Strand Starting at position 144 of SEQ ID NO: 316961
gaauucuggcagugacgau

SEQ ID NO: 330070 - RNA, 19 nt, Artificial Sequence
  Description of Artificial Sequence: Synthetic oligonucleotide
  Antisense Strand to SEQ ID NO: 330069
aucgucacugccagaauuc

SEQ ID NO: 330071 - RNA, 19 nt, Artificial Sequence
  Description of Artificial Sequence: Synthetic oligonucleotide
  Sense Strand Starting at position 144 of SEQ ID NO: 317010
gcuccuauccagcaagaug

SEQ ID NO: 330072 - RNA, 19 nt, Artificial Sequence
  Description of Artificial Sequence: Synthetic oligonucleotide
  Antisense Strand to SEQ ID NO: 330071
caucuugcuggauaggagc

SEQ ID NO: 330073 - RNA, 19 nt, Artificial Sequence
  Description of Artificial Sequence: Synthetic oligonucleotide
  Sense Strand Starting at position 144 of SEQ ID NO: 317279
agcccuugaggucacaauu

SEQ ID NO: 330074 - RNA, 19 nt, Artificial Sequence
  Description of Artificial Sequence: Synthetic oligonucleotide
  Antisense Strand to SEQ ID NO: 330073
aauugugaccucaagggcu

SEQ ID NO: 330075 - RNA, 19 nt, Artificial Sequence
  Description of Artificial Sequence: Synthetic oligonucleotide
  Sense Strand Starting at position 144 of SEQ ID NO: 317289
gucacaauuggugacauca

SEQ ID NO: 330076 - RNA, 19 nt, Artificial Sequence
  Description of Artificial Sequence: Synthetic oligonucleotide
  Antisense Strand to SEQ ID NO: 330075
ugaugucaccaauugugac

SEQ ID NO: 330077 - RNA, 19 nt, Artificial Sequence
  Description of Artificial Sequence: Synthetic oligonucleotide
  Sense Strand Starting at position 144 of SEQ ID NO: 317767
ccaucugugaacggaggua

SEQ ID NO: 330078 - RNA, 19 nt, Artificial Sequence
  Description of Artificial Sequence: Synthetic oligonucleotide
  Antisense Strand to SEQ ID NO: 330077
uaccuccguucacagaugg

SEQ ID NO: 330079 - RNA, 19 nt, Artificial Sequence
  Description of Artificial Sequence: Synthetic oligonucleotide
  Sense Strand Starting at position 144 of SEQ ID NO: 317801
uuccaauucgaaugcuuua

SEQ ID NO: 330080 - RNA, 19 nt, Artificial Sequence
  Description of Artificial Sequence: Synthetic oligonucleotide
  Antisense Strand to SEQ ID NO: 330079
uaaagcauucgaauuggaa

SEQ ID NO: 330081 - RNA, 19 nt, Artificial Sequence
  Description of Artificial Sequence: Synthetic oligonucleotide
  Sense Strand Starting at position 144 of SEQ ID NO: 317899
ugucuccuucuugaucuua

SEQ ID NO: 330082 - RNA, 19 nt, Artificial Sequence
  Description of Artificial Sequence: Synthetic oligonucleotide
  Antisense Strand to SEQ ID NO: 330081
uaagaucaagaaggagaca

SEQ ID NO: 330083 - RNA, 19 nt, Artificial Sequence
  Description of Artificial Sequence: Synthetic oligonucleotide
  Sense Strand Starting at position 144 of SEQ ID NO: 317971
uuggauauauugccuuuau

SEQ ID NO: 330084 - RNA, 19 nt, Artificial Sequence
  Description of Artificial Sequence: Synthetic oligonucleotide
  Antisense Strand to SEQ ID NO: 330083
auaaaggcaauauauccaa

SEQ ID NO: 330085 - RNA, 19 nt, Artificial Sequence
  Description of Artificial Sequence: Synthetic oligonucleotide
  Sense Strand Starting at position 144 of SEQ ID NO: 317972
uggauauauugccuuuauc

SEQ ID NO: 330086 - RNA, 19 nt, Artificial Sequence
  Description of Artificial Sequence: Synthetic oligonucleotide
  Antisense Strand to SEQ ID NO: 330085
gauaaaggcaauauaucca

SEQ ID NO: 330087 - RNA, 19 nt, Artificial Sequence
  Description of Artificial Sequence: Synthetic oligonucleotide
  Sense Strand Starting at position 144 of SEQ ID NO: 317991
auguuaaggaguugagugu

SEQ ID NO: 330088 - RNA, 19 nt, Artificial Sequence
  Description of Artificial Sequence: Synthetic oligonucleotide
  Antisense Strand to SEQ ID NO: 330087
acacucaacuccuuaacau

SEQ ID NO: 330089 - RNA, 19 nt, Artificial Sequence
  Description of Artificial Sequence: Synthetic oligonucleotide
  Sense Strand Starting at position 144 of SEQ ID NO: 318097
uguaguguaguacauugau

SEQ ID NO: 330090 - RNA, 19 nt, Artificial Sequence
  Description of Artificial Sequence: Synthetic oligonucleotide
  Antisense Strand to SEQ ID NO: 330089
aucaauguacuacacuaca

SEQ ID NO: 330091 - RNA, 19 nt, Artificial Sequence
  Description of Artificial Sequence: Synthetic oligonucleotide
  Sense Strand Starting at position 144 of SEQ ID NO: 318100
aguguaguacauugauauu

SEQ ID NO: 330092 - RNA, 19 nt, Artificial Sequence
  Description of Artificial Sequence: Synthetic oligonucleotide
  Antisense Strand to SEQ ID NO: 330091
aauaucaauguacuacacu

SEQ ID NO: 330093 - RNA, 19 nt, Artificial Sequence
  Description of Artificial Sequence: Synthetic oligonucleotide
  Sense Strand Starting at position 144 of SEQ ID NO: 318138
ccuuacauucuagggauaa

SEQ ID NO: 330094 - RNA, 19 nt, Artificial Sequence
  Description of Artificial Sequence: Synthetic oligonucleotide
  Antisense Strand to SEQ ID NO: 330093
uuaucccuagaauguaagg

SEQ ID NO: 330095 - RNA, 19 nt, Artificial Sequence
  Description of Artificial Sequence: Synthetic oligonucleotide
  Sense Strand Starting at position 144 of SEQ ID NO: 318164
uuguuaauaguguguaaca

SEQ ID NO: 330096 - RNA, 19 nt, Artificial Sequence
  Description of Artificial Sequence: Synthetic oligonucleotide
  Antisense Strand to SEQ ID NO: 330095
uguuacacacuauuaacaa

SEQ ID NO: 330097 - RNA, 19 nt, Artificial Sequence
  Description of Artificial Sequence: Synthetic oligonucleotide
  Sense Strand Starting at position 144 of SEQ ID NO: 318166
guuaauaguguguaacacu

SEQ ID NO: 330098 - RNA, 19 nt, Artificial Sequence
  Description of Artificial Sequence: Synthetic oligonucleotide
  Antisense Strand to SEQ ID NO: 330097
aguguuacacacuauuaac

SEQ ID NO: 330099 - RNA, 19 nt, Artificial Sequence
  Description of Artificial Sequence: Synthetic oligonucleotide
  Sense Strand Starting at position 144 of SEQ ID NO: 318281
agggucuuugucugacuuu

SEQ ID NO: 330100 - RNA, 19 nt, Artificial Sequence
  Description of Artificial Sequence: Synthetic oligonucleotide
  Antisense Strand to SEQ ID NO: 330099
aaagucagacaaagacccu

SEQ ID NO: 330101 - RNA, 19 nt, Artificial Sequence
  Description of Artificial Sequence: Synthetic oligonucleotide
  Sense Strand Starting at position 144 of SEQ ID NO: 318307
gggcaaugcuggccucaca

SEQ ID NO: 330102 - RNA, 19 nt, Artificial Sequence
  Description of Artificial Sequence: Synthetic oligonucleotide
  Antisense Strand to SEQ ID NO: 330101
ugugaggccagcauugccc

SEQ ID NO: 330103 - RNA, 19 nt, Artificial Sequence
  Description of Artificial Sequence: Synthetic oligonucleotide
  Sense Strand Starting at position 144 of SEQ ID NO: 318385
auguauguucuuuaguaag

SEQ ID NO: 330104 - RNA, 19 nt, Artificial Sequence
  Description of Artificial Sequence: Synthetic oligonucleotide
  Antisense Strand to SEQ ID NO: 330103
cuuacuaaagaacauacau

SEQ ID NO: 330105 - RNA, 19 nt, Artificial Sequence
  Description of Artificial Sequence: Synthetic oligonucleotide
  Sense Strand Starting at position 144 of SEQ ID NO: 318387
guauguucuuuaguaagug

SEQ ID NO: 330106 - RNA, 19 nt, Artificial Sequence
  Description of Artificial Sequence: Synthetic oligonucleotide
  Antisense Strand to SEQ ID NO: 330105
cacuuacuaaagaacauac

SEQ ID NO: 330107 - RNA, 19 nt, Artificial Sequence
  Description of Artificial Sequence: Synthetic oligonucleotide
  Sense Strand Starting at position 144 of SEQ ID NO: 318396
uuaguaaguguuuguuaga

SEQ ID NO: 330108 - RNA, 19 nt, Artificial Sequence
  Description of Artificial Sequence: Synthetic oligonucleotide
  Antisense Strand to SEQ ID NO: 330107
ucuaacaaacacuuacuaa

SEQ ID NO: 330109 - RNA, 19 nt, Artificial Sequence
  Description of Artificial Sequence: Synthetic oligonucleotide
  Sense Strand Starting at position 144 of SEQ ID NO: 318397
uaguaaguguuuguuagaa

SEQ ID NO: 330110 - RNA, 19 nt, Artificial Sequence
  Description of Artificial Sequence: Synthetic oligonucleotide
  Antisense Strand to SEQ ID NO: 330109
uucuaacaaacacuuacua

SEQ ID NO: 330111 - RNA, 19 nt, Artificial Sequence
  Description of Artificial Sequence: Synthetic oligonucleotide
  Sense Strand Starting at position 144 of SEQ ID NO: 318409
guuagaauucacgagugau

SEQ ID NO: 330112 - RNA, 19 nt, Artificial Sequence
  Description of Artificial Sequence: Synthetic oligonucleotide
  Antisense Strand to SEQ ID NO: 330111
aucacucgugaauucuaac

SEQ ID NO: 330113 - RNA, 19 nt, Artificial Sequence
  Description of Artificial Sequence: Synthetic oligonucleotide
  Sense Strand Starting at position 144 of SEQ ID NO: 318422
agugauaucauguggccca

SEQ ID NO: 330114 - RNA, 19 nt, Artificial Sequence
  Description of Artificial Sequence: Synthetic oligonucleotide
  Antisense Strand to SEQ ID NO: 330113
ugggccacaugauaucacu

SEQ ID NO: 330115 - RNA, 19 nt, Artificial Sequence
  Description of Artificial Sequence: Synthetic oligonucleotide
  Sense Strand Starting at position 144 of SEQ ID NO: 318466
ucucuuuacuaguuaugag

SEQ ID NO: 330116 - RNA, 19 nt, Artificial Sequence
  Description of Artificial Sequence: Synthetic oligonucleotide
  Antisense Strand to SEQ ID NO: 330115
cucauaacuaguaaagaga

SEQ ID NO: 330117 - RNA, 19 nt, Artificial Sequence
  Description of Artificial Sequence: Synthetic oligonucleotide
  Sense Strand Starting at position 144 of SEQ ID NO: 318628
ucuguauggucaguaguaa

SEQ ID NO: 330118 - RNA, 19 nt, Artificial Sequence
  Description of Artificial Sequence: Synthetic oligonucleotide
  Antisense Strand to SEQ ID NO: 330117
uuacuacugaccauacaga

SEQ ID NO: 330119 - RNA, 19 nt, Artificial Sequence
  Description of Artificial Sequence: Synthetic oligonucleotide
  Sense Strand Starting at position 144 of SEQ ID NO: 318629
cuguauggucaguaguaau

SEQ ID NO: 330120 - RNA, 19 nt, Artificial Sequence
  Description of Artificial Sequence: Synthetic oligonucleotide
  Antisense Strand to SEQ ID NO: 330119
auuacuacugaccauacag

SEQ ID NO: 330121 - RNA, 19 nt, Artificial Sequence
  Description of Artificial Sequence: Synthetic oligonucleotide
  Sense Strand Starting at position 144 of SEQ ID NO: 318835
cuggauuuagucugcucuu

SEQ ID NO: 330122 - RNA, 19 nt, Artificial Sequence
  Description of Artificial Sequence: Synthetic oligonucleotide
  Antisense Strand to SEQ ID NO: 330121
aagagcagacuaaauccag

SEQ ID NO: 330123 - RNA, 19 nt, Artificial Sequence
  Description of Artificial Sequence: Synthetic oligonucleotide
  Sense Strand Starting at position 144 of SEQ ID NO: 318838
gauuuagucugcucuucgu

SEQ ID NO: 330124 - RNA, 19 nt, Artificial Sequence
  Description of Artificial Sequence: Synthetic oligonucleotide
  Antisense Strand to SEQ ID NO: 330123
acgaagagcagacuaaauc

SEQ ID NO: 330125 - RNA, 19 nt, Artificial Sequence
  Description of Artificial Sequence: Synthetic oligonucleotide
  Sense Strand Starting at position 144 of SEQ ID NO: 318865
uccuuaaauuguguaguua

SEQ ID NO: 330126 - RNA, 19 nt, Artificial Sequence
  Description of Artificial Sequence: Synthetic oligonucleotide
  Antisense Strand to SEQ ID NO: 330125
uaacuacacaauuuaagga

SEQ ID NO: 330127 - RNA, 19 nt, Artificial Sequence
  Description of Artificial Sequence: Synthetic oligonucleotide
  Sense Strand Starting at position 144 of SEQ ID NO: 318866
ccuuaaauuguguaguuag

SEQ ID NO: 330128 - RNA, 19 nt, Artificial Sequence
  Description of Artificial Sequence: Synthetic oligonucleotide
  Antisense Strand to SEQ ID NO: 330127
cuaacuacacaauuuaagg

SEQ ID NO: 330129 - RNA, 19 nt, Artificial Sequence
  Description of Artificial Sequence: Synthetic oligonucleotide
  Sense Strand Starting at position 144 of SEQ ID NO: 318869
uaaauuguguaguuagauc

SEQ ID NO: 330130 - RNA, 19 nt, Artificial Sequence
  Description of Artificial Sequence: Synthetic oligonucleotide
  Antisense Strand to SEQ ID NO: 330129
gaucuaacuacacaauuua

SEQ ID NO: 330131 - RNA, 19 nt, Artificial Sequence
  Description of Artificial Sequence: Synthetic oligonucleotide
  Sense Strand Starting at position 144 of SEQ ID NO: 318886
ucauuaauuugggauccuu

SEQ ID NO: 330132 - RNA, 19 nt, Artificial Sequence
  Description of Artificial Sequence: Synthetic oligonucleotide
  Antisense Strand to SEQ ID NO: 330131
aaggaucccaaauuaauga

SEQ ID NO: 330133 - RNA, 19 nt, Artificial Sequence
  Description of Artificial Sequence: Synthetic oligonucleotide
  Sense Strand Starting at position 145 of SEQ ID NO: 315252
gggccuaggaauugucauu

SEQ ID NO: 330134 - RNA, 19 nt, Artificial Sequence
  Description of Artificial Sequence: Synthetic oligonucleotide
  Antisense Strand to SEQ ID NO: 330133
aaugacaauuccuaggccc

SEQ ID NO: 330135 - RNA, 19 nt, Artificial Sequence
  Description of Artificial Sequence: Synthetic oligonucleotide
  Sense Strand Starting at position 145 of SEQ ID NO: 315257
uaggaauugucauuaucag

SEQ ID NO: 330136 - RNA, 19 nt, Artificial Sequence
  Description of Artificial Sequence: Synthetic oligonucleotide
  Antisense Strand to SEQ ID NO: 330135
cugauaaugacaauuccua

SEQ ID NO: 330137 - RNA, 19 nt, Artificial Sequence
  Description of Artificial Sequence: Synthetic oligonucleotide
  Sense Strand Starting at position 145 of SEQ ID NO: 315258
aggaauugucauuaucagu

SEQ ID NO: 330138 - RNA, 19 nt, Artificial Sequence
  Description of Artificial Sequence: Synthetic oligonucleotide
  Antisense Strand to SEQ ID NO: 330137
acugauaaugacaauuccu

SEQ ID NO: 330139 - RNA, 19 nt, Artificial Sequence
  Description of Artificial Sequence: Synthetic oligonucleotide
  Sense Strand Starting at position 145 of SEQ ID NO: 315263
uugucauuaucagugaaac

SEQ ID NO: 330140 - RNA, 19 nt, Artificial Sequence
  Description of Artificial Sequence: Synthetic oligonucleotide
  Antisense Strand to SEQ ID NO: 330139
guuucacugauaaugacaa

SEQ ID NO: 330141 - RNA, 19 nt, Artificial Sequence
  Description of Artificial Sequence: Synthetic oligonucleotide
  Sense Strand Starting at position 145 of SEQ ID NO: 315264
ugucauuaucagugaaacc

SEQ ID NO: 330142 - RNA, 19 nt, Artificial Sequence
  Description of Artificial Sequence: Synthetic oligonucleotide
  Antisense Strand to SEQ ID NO: 330141
gguuucacugauaaugaca

SEQ ID NO: 330143 - RNA, 19 nt, Artificial Sequence
  Description of Artificial Sequence: Synthetic oligonucleotide
  Sense Strand Starting at position 145 of SEQ ID NO: 315333
aagagagacuuggauaauc

SEQ ID NO: 330144 - RNA, 19 nt, Artificial Sequence
  Description of Artificial Sequence: Synthetic oligonucleotide
  Antisense Strand to SEQ ID NO: 330143
gauuauccaagucucucuu

SEQ ID NO: 330145 - RNA, 19 nt, Artificial Sequence
  Description of Artificial Sequence: Synthetic oligonucleotide
  Sense Strand Starting at position 145 of SEQ ID NO: 315341
cuuggauaauccuccaggu

SEQ ID NO: 330146 - RNA, 19 nt, Artificial Sequence
  Description of Artificial Sequence: Synthetic oligonucleotide
  Antisense Strand to SEQ ID NO: 330145
accuggaggauuauccaag

SEQ ID NO: 330147 - RNA, 19 nt, Artificial Sequence
  Description of Artificial Sequence: Synthetic oligonucleotide
  Sense Strand Starting at position 145 of SEQ ID NO: 315343
uggauaauccuccaggucu

SEQ ID NO: 330148 - RNA, 19 nt, Artificial Sequence
  Description of Artificial Sequence: Synthetic oligonucleotide
  Antisense Strand to SEQ ID NO: 330147
agaccuggaggauuaucca

SEQ ID NO: 330149 - RNA, 19 nt, Artificial Sequence
  Description of Artificial Sequence: Synthetic oligonucleotide
  Sense Strand Starting at position 145 of SEQ ID NO: 315357
ggucuccaggugcaauaua

SEQ ID NO: 330150 - RNA, 19 nt, Artificial Sequence
  Description of Artificial Sequence: Synthetic oligonucleotide
  Antisense Strand to SEQ ID NO: 330149
uauauugcaccuggagacc

SEQ ID NO: 330151 - RNA, 19 nt, Artificial Sequence
  Description of Artificial Sequence: Synthetic oligonucleotide
  Sense Strand Starting at position 145 of SEQ ID NO: 315381
ccucauguccugggaggua

SEQ ID NO: 330152 - RNA, 19 nt, Artificial Sequence
  Description of Artificial Sequence: Synthetic oligonucleotide
  Antisense Strand to SEQ ID NO: 330151
uaccucccaggacaugagg

SEQ ID NO: 330153 - RNA, 19 nt, Artificial Sequence
  Description of Artificial Sequence: Synthetic oligonucleotide
  Sense Strand Starting at position 145 of SEQ ID NO: 315442
agggaugucuaaucaacuc

SEQ ID NO: 330154 - RNA, 19 nt, Artificial Sequence
  Description of Artificial Sequence: Synthetic oligonucleotide
  Antisense Strand to SEQ ID NO: 330153
gaguugauuagacaucccu

SEQ ID NO: 330155 - RNA, 19 nt, Artificial Sequence
  Description of Artificial Sequence: Synthetic oligonucleotide
  Sense Strand Starting at position 145 of SEQ ID NO: 315465
uucccuucuccugguagaa

SEQ ID NO: 330156 - RNA, 19 nt, Artificial Sequence
  Description of Artificial Sequence: Synthetic oligonucleotide
  Antisense Strand to SEQ ID NO: 330155
uucuaccaggagaagggaa

SEQ ID NO: 330157 - RNA, 19 nt, Artificial Sequence
  Description of Artificial Sequence: Synthetic oligonucleotide
  Sense Strand Starting at position 145 of SEQ ID NO: 315515
gaguuaguugcagaacuag

SEQ ID NO: 330158 - RNA, 19 nt, Artificial Sequence
  Description of Artificial Sequence: Synthetic oligonucleotide
  Antisense Strand to SEQ ID NO: 330157
cuaguucugcaacuaacuc

SEQ ID NO: 330159 - RNA, 19 nt, Artificial Sequence
  Description of Artificial Sequence: Synthetic oligonucleotide
  Sense Strand Starting at position 145 of SEQ ID NO: 315540
aaaugcagguuuccugaau

SEQ ID NO: 330160 - RNA, 19 nt, Artificial Sequence
  Description of Artificial Sequence: Synthetic oligonucleotide
  Antisense Strand to SEQ ID NO: 330159
auucaggaaaccugcauuu

SEQ ID NO: 330161 - RNA, 19 nt, Artificial Sequence
  Description of Artificial Sequence: Synthetic oligonucleotide
  Sense Strand Starting at position 145 of SEQ ID NO: 315552
ccugaauccugguuuauua

SEQ ID NO: 330162 - RNA, 19 nt, Artificial Sequence
  Description of Artificial Sequence: Synthetic oligonucleotide
  Antisense Strand to SEQ ID NO: 330161
uaauaaaccaggauucagg

SEQ ID NO: 330163 - RNA, 19 nt, Artificial Sequence
  Description of Artificial Sequence: Synthetic oligonucleotide
  Sense Strand Starting at position 145 of SEQ ID NO: 315554
ugaauccugguuuauuaau

SEQ ID NO: 330164 - RNA, 19 nt, Artificial Sequence
  Description of Artificial Sequence: Synthetic oligonucleotide
  Antisense Strand to SEQ ID NO: 330163
auuaauaaaccaggauuca

SEQ ID NO: 330165 - RNA, 19 nt, Artificial Sequence
  Description of Artificial Sequence: Synthetic oligonucleotide
  Sense Strand Starting at position 145 of SEQ ID NO: 315679
ggguuuauucuuuauccuu

SEQ ID NO: 330166 - RNA, 19 nt, Artificial Sequence
  Description of Artificial Sequence: Synthetic oligonucleotide
  Antisense Strand to SEQ ID NO: 330165
aaggauaaagaauaaaccc

SEQ ID NO: 330167 - RNA, 19 nt, Artificial Sequence
  Description of Artificial Sequence: Synthetic oligonucleotide
  Sense Strand Starting at position 145 of SEQ ID NO: 315760
ugaucucccagguagguau

SEQ ID NO: 330168 - RNA, 19 nt, Artificial Sequence
  Description of Artificial Sequence: Synthetic oligonucleotide
  Antisense Strand to SEQ ID NO: 330167
auaccuaccugggagauca

SEQ ID NO: 330169 - RNA, 19 nt, Artificial Sequence
  Description of Artificial Sequence: Synthetic oligonucleotide
  Sense Strand Starting at position 145 of SEQ ID NO: 317743
cuggauuagacaugugauc

SEQ ID NO: 330170 - RNA, 19 nt, Artificial Sequence
  Description of Artificial Sequence: Synthetic oligonucleotide
  Antisense Strand to SEQ ID NO: 330169
gaucacaugucuaauccag

SEQ ID NO: 330171 - RNA, 19 nt, Artificial Sequence
  Description of Artificial Sequence: Synthetic oligonucleotide
  Sense Strand Starting at position 145 of SEQ ID NO: 317745
ggauuagacaugugaucug

SEQ ID NO: 330172 - RNA, 19 nt, Artificial Sequence
  Description of Artificial Sequence: Synthetic oligonucleotide
  Antisense Strand to SEQ ID NO: 330171
cagaucacaugucuaaucc

SEQ ID NO: 330173 - RNA, 19 nt, Artificial Sequence
  Description of Artificial Sequence: Synthetic oligonucleotide
  Sense Strand Starting at position 145 of SEQ ID NO: 317796
cagugagaauggguucuaa

SEQ ID NO: 330174 - RNA, 19 nt, Artificial Sequence
  Description of Artificial Sequence: Synthetic oligonucleotide
  Antisense Strand to SEQ ID NO: 330173
uuagaacccauucucacug

SEQ ID NO: 330175 - RNA, 19 nt, Artificial Sequence
  Description of Artificial Sequence: Synthetic oligonucleotide
  Sense Strand Starting at position 145 of SEQ ID NO: 317821
accaucuaguggucuuaca

SEQ ID NO: 330176 - RNA, 19 nt, Artificial Sequence
  Description of Artificial Sequence: Synthetic oligonucleotide
  Antisense Strand to SEQ ID NO: 330175
uguaagaccacuagauggu

SEQ ID NO: 330177 - RNA, 19 nt, Artificial Sequence
  Description of Artificial Sequence: Synthetic oligonucleotide
  Sense Strand Starting at position 145 of SEQ ID NO: 318092
uuacuuugaccuugcaaag

SEQ ID NO: 330178 - RNA, 19 nt, Artificial Sequence
  Description of Artificial Sequence: Synthetic oligonucleotide
  Antisense Strand to SEQ ID NO: 330177
cuuugcaaggucaaaguaa

SEQ ID NO: 330179 - RNA, 19 nt, Artificial Sequence
  Description of Artificial Sequence: Synthetic oligonucleotide
  Sense Strand Starting at position 145 of SEQ ID NO: 318102
cuugcaaagccugaaauca

SEQ ID NO: 330180 - RNA, 19 nt, Artificial Sequence
  Description of Artificial Sequence: Synthetic oligonucleotide
  Antisense Strand to SEQ ID NO: 330179
ugauuucaggcuuugcaag

SEQ ID NO: 330181 - RNA, 19 nt, Artificial Sequence
  Description of Artificial Sequence: Synthetic oligonucleotide
  Sense Strand Starting at position 145 of SEQ ID NO: 318110
gccugaaaucacugaggca

SEQ ID NO: 330182 - RNA, 19 nt, Artificial Sequence
  Description of Artificial Sequence: Synthetic oligonucleotide
  Antisense Strand to SEQ ID NO: 330181
ugccucagugauuucaggc

SEQ ID NO: 330183 - RNA, 19 nt, Artificial Sequence
  Description of Artificial Sequence: Synthetic oligonucleotide
  Sense Strand Starting at position 145 of SEQ ID NO: 318155
gauauuccuuuaguaggga

SEQ ID NO: 330184 - RNA, 19 nt, Artificial Sequence
  Description of Artificial Sequence: Synthetic oligonucleotide
  Antisense Strand to SEQ ID NO: 330183
ucccuacuaaaggaauauc

SEQ ID NO: 330185 - RNA, 19 nt, Artificial Sequence
  Description of Artificial Sequence: Synthetic oligonucleotide
  Sense Strand Starting at position 145 of SEQ ID NO: 318310
uguaacagugccuagaaca

SEQ ID NO: 330186 - RNA, 19 nt, Artificial Sequence
  Description of Artificial Sequence: Synthetic oligonucleotide
  Antisense Strand to SEQ ID NO: 330185
uguucuaggcacuguuaca

SEQ ID NO: 330187 - RNA, 19 nt, Artificial Sequence
  Description of Artificial Sequence: Synthetic oligonucleotide
  Sense Strand Starting at position 145 of SEQ ID NO: 318339
ucaagaagugcuuguugaa

SEQ ID NO: 330188 - RNA, 19 nt, Artificial Sequence
  Description of Artificial Sequence: Synthetic oligonucleotide
  Antisense Strand to SEQ ID NO: 330187
uucaacaagcacuucuuga

SEQ ID NO: 330189 - RNA, 19 nt, Artificial Sequence
  Description of Artificial Sequence: Synthetic oligonucleotide
  Sense Strand Starting at position 145 of SEQ ID NO: 318351
uguugaaugucacuuuaug

SEQ ID NO: 330190 - RNA, 19 nt, Artificial Sequence
  Description of Artificial Sequence: Synthetic oligonucleotide
  Antisense Strand to SEQ ID NO: 330189
cauaaagugacauucaaca

SEQ ID NO: 330191 - RNA, 19 nt, Artificial Sequence
  Description of Artificial Sequence: Synthetic oligonucleotide
  Sense Strand Starting at position 145 of SEQ ID NO: 318397
gcaugacaccauuggauac

SEQ ID NO: 330192 - RNA, 19 nt, Artificial Sequence
  Description of Artificial Sequence: Synthetic oligonucleotide
  Antisense Strand to SEQ ID NO: 330191
guauccaauggugucaugc

SEQ ID NO: 330193 - RNA, 19 nt, Artificial Sequence
  Description of Artificial Sequence: Synthetic oligonucleotide
  Sense Strand Starting at position 145 of SEQ ID NO: 318410
ggauacuguguuuagagua

SEQ ID NO: 330194 - RNA, 19 nt, Artificial Sequence
  Description of Artificial Sequence: Synthetic oligonucleotide
  Antisense Strand to SEQ ID NO: 330193
uacucuaaacacaguaucc

SEQ ID NO: 330195 - RNA, 19 nt, Artificial Sequence
  Description of Artificial Sequence: Synthetic oligonucleotide
  Sense Strand Starting at position 145 of SEQ ID NO: 318590
ugauguuuauccuucugga

SEQ ID NO: 330196 - RNA, 19 nt, Artificial Sequence
  Description of Artificial Sequence: Synthetic oligonucleotide
  Antisense Strand to SEQ ID NO: 330195
uccagaaggauaaacauca

SEQ ID NO: 330197 - RNA, 19 nt, Artificial Sequence
  Description of Artificial Sequence: Synthetic oligonucleotide
  Sense Strand Starting at position 145 of SEQ ID NO: 318631
ugucuauaucuauagguau

SEQ ID NO: 330198 - RNA, 19 nt, Artificial Sequence
  Description of Artificial Sequence: Synthetic oligonucleotide
  Antisense Strand to SEQ ID NO: 330197
auaccuauagauauagaca

SEQ ID NO: 330199 - RNA, 19 nt, Artificial Sequence
  Description of Artificial Sequence: Synthetic oligonucleotide
  Sense Strand Starting at position 145 of SEQ ID NO: 318634
cuauaucuauagguaugua

SEQ ID NO: 330200 - RNA, 19 nt, Artificial Sequence
  Description of Artificial Sequence: Synthetic oligonucleotide
  Antisense Strand to SEQ ID NO: 330199
uacauaccuauagauauag

SEQ ID NO: 330201 - RNA, 19 nt, Artificial Sequence
  Description of Artificial Sequence: Synthetic oligonucleotide
  Sense Strand Starting at position 145 of SEQ ID NO: 318859
guuuccaaauauguaugaa

SEQ ID NO: 330202 - RNA, 19 nt, Artificial Sequence
  Description of Artificial Sequence: Synthetic oligonucleotide
  Antisense Strand to SEQ ID NO: 330201
uucauacauauuuggaaac

SEQ ID NO: 330203 - RNA, 19 nt, Artificial Sequence
  Description of Artificial Sequence: Synthetic oligonucleotide
  Sense Strand Starting at position 145 of SEQ ID NO: 319024
aagaauguguauuugcuuu

SEQ ID NO: 330204 - RNA, 19 nt, Artificial Sequence
  Description of Artificial Sequence: Synthetic oligonucleotide
  Antisense Strand to SEQ ID NO: 330203
aaagcaaauacacauucuu

SEQ ID NO: 330205 - RNA, 19 nt, Artificial Sequence
  Description of Artificial Sequence: Synthetic oligonucleotide
  Sense Strand Starting at position 145 of SEQ ID NO: 319071
uaggucuaauuggucaaua

SEQ ID NO: 330206 - RNA, 19 nt, Artificial Sequence
  Description of Artificial Sequence: Synthetic oligonucleotide
  Antisense Strand to SEQ ID NO: 330205
uauugaccaauuagaccua

SEQ ID NO: 330207 - RNA, 19 nt, Artificial Sequence
  Description of Artificial Sequence: Synthetic oligonucleotide
  Sense Strand Starting at position 145 of SEQ ID NO: 319072
aggucuaauuggucaauag

SEQ ID NO: 330208 - RNA, 19 nt, Artificial Sequence
  Description of Artificial Sequence: Synthetic oligonucleotide
  Antisense Strand to SEQ ID NO: 330207
cuauugaccaauuagaccu

SEQ ID NO: 330209 - RNA, 19 nt, Artificial Sequence
  Description of Artificial Sequence: Synthetic oligonucleotide
  Sense Strand Starting at position 145 of SEQ ID NO: 319073
ggucuaauuggucaauagu

SEQ ID NO: 330210 - RNA, 19 nt, Artificial Sequence
  Description of Artificial Sequence: Synthetic oligonucleotide
  Antisense Strand to SEQ ID NO: 330209
acuauugaccaauuagacc

SEQ ID NO: 330211 - RNA, 19 nt, Artificial Sequence
  Description of Artificial Sequence: Synthetic oligonucleotide
  Sense Strand Starting at position 145 of SEQ ID NO: 319076
cuaauuggucaauaguguu

SEQ ID NO: 330212 - RNA, 19 nt, Artificial Sequence
  Description of Artificial Sequence: Synthetic oligonucleotide
  Antisense Strand to SEQ ID NO: 330211
aacacuauugaccaauuag

SEQ ID NO: 330213 - RNA, 19 nt, Artificial Sequence
  Description of Artificial Sequence: Synthetic oligonucleotide
  Sense Strand Starting at position 146 of SEQ ID NO: 315484
uguagagcauuugcaaagu

SEQ ID NO: 330214 - RNA, 19 nt, Artificial Sequence
  Description of Artificial Sequence: Synthetic oligonucleotide
  Antisense Strand to SEQ ID NO: 330213
acuuugcaaaugcucuaca

SEQ ID NO: 330215 - RNA, 19 nt, Artificial Sequence
  Description of Artificial Sequence: Synthetic oligonucleotide
  Sense Strand Starting at position 146 of SEQ ID NO: 315536
aguuaaugauuccuucuga

SEQ ID NO: 330216 - RNA, 19 nt, Artificial Sequence
  Description of Artificial Sequence: Synthetic oligonucleotide
  Antisense Strand to SEQ ID NO: 330215
ucagaaggaaucauuaacu

SEQ ID NO: 330217 - RNA, 19 nt, Artificial Sequence
  Description of Artificial Sequence: Synthetic oligonucleotide
  Sense Strand Starting at position 146 of SEQ ID NO: 315537
guuaaugauuccuucugaa

SEQ ID NO: 330218 - RNA, 19 nt, Artificial Sequence
  Description of Artificial Sequence: Synthetic oligonucleotide
  Antisense Strand to SEQ ID NO: 330217
uucagaaggaaucauuaac

SEQ ID NO: 330219 - RNA, 19 nt, Artificial Sequence
  Description of Artificial Sequence: Synthetic oligonucleotide
  Sense Strand Starting at position 146 of SEQ ID NO: 315709
uuucucacuugcucugaga

SEQ ID NO: 330220 - RNA, 19 nt, Artificial Sequence
  Description of Artificial Sequence: Synthetic oligonucleotide
  Antisense Strand to SEQ ID NO: 330219
ucucagagcaagugagaaa

SEQ ID NO: 330221 - RNA, 19 nt, Artificial Sequence
  Description of Artificial Sequence: Synthetic oligonucleotide
  Sense Strand Starting at position 146 of SEQ ID NO: 315711
ucucacuugcucugagaug

SEQ ID NO: 330222 - RNA, 19 nt, Artificial Sequence
  Description of Artificial Sequence: Synthetic oligonucleotide
  Antisense Strand to SEQ ID NO: 330221
caucucagagcaagugaga

SEQ ID NO: 330223 - RNA, 19 nt, Artificial Sequence
  Description of Artificial Sequence: Synthetic oligonucleotide
  Sense Strand Starting at position 146 of SEQ ID NO: 315747
uuuaaaugcuacuuaaggu

SEQ ID NO: 330224 - RNA, 19 nt, Artificial Sequence
  Description of Artificial Sequence: Synthetic oligonucleotide
  Antisense Strand to SEQ ID NO: 330223
accuuaaguagcauuuaaa

SEQ ID NO: 330225 - RNA, 19 nt, Artificial Sequence
  Description of Artificial Sequence: Synthetic oligonucleotide
  Sense Strand Starting at position 146 of SEQ ID NO: 315761
aagguuuaugcaggucauu

SEQ ID NO: 330226 - RNA, 19 nt, Artificial Sequence
  Description of Artificial Sequence: Synthetic oligonucleotide
  Antisense Strand to SEQ ID NO: 330225
aaugaccugcauaaaccuu

SEQ ID NO: 330227 - RNA, 19 nt, Artificial Sequence
  Description of Artificial Sequence: Synthetic oligonucleotide
  Sense Strand Starting at position 146 of SEQ ID NO: 315773
ggucauucccaauguucua

SEQ ID NO: 330228 - RNA, 19 nt, Artificial Sequence
  Description of Artificial Sequence: Synthetic oligonucleotide
  Antisense Strand to SEQ ID NO: 330227
uagaacauugggaaugacc

SEQ ID NO: 330229 - RNA, 19 nt, Artificial Sequence
  Description of Artificial Sequence: Synthetic oligonucleotide
  Sense Strand Starting at position 146 of SEQ ID NO: 315851
cuacaauucugcuuagaag

SEQ ID NO: 330230 - RNA, 19 nt, Artificial Sequence
  Description of Artificial Sequence: Synthetic oligonucleotide
  Antisense Strand to SEQ ID NO: 330229
cuucuaagcagaauuguag

SEQ ID NO: 330231 - RNA, 19 nt, Artificial Sequence
  Description of Artificial Sequence: Synthetic oligonucleotide
  Sense Strand Starting at position 146 of SEQ ID NO: 315860
ugcuuagaagucuaauaau

SEQ ID NO: 330232 - RNA, 19 nt, Artificial Sequence
  Description of Artificial Sequence: Synthetic oligonucleotide
  Antisense Strand to SEQ ID NO: 330231
auuauuagacuucuaagca

SEQ ID NO: 330233 - RNA, 19 nt, Artificial Sequence
  Description of Artificial Sequence: Synthetic oligonucleotide
  Sense Strand Starting at position 146 of SEQ ID NO: 316034
accacaauucugugucuua

SEQ ID NO: 330234 - RNA, 19 nt, Artificial Sequence
  Description of Artificial Sequence: Synthetic oligonucleotide
  Antisense Strand to SEQ ID NO: 330233
uaagacacagaauuguggu

SEQ ID NO: 330235 - RNA, 19 nt, Artificial Sequence
  Description of Artificial Sequence: Synthetic oligonucleotide
  Sense Strand Starting at position 146 of SEQ ID NO: 316035
ccacaauucugugucuuag

SEQ ID NO: 330236 - RNA, 19 nt, Artificial Sequence
  Description of Artificial Sequence: Synthetic oligonucleotide
  Antisense Strand to SEQ ID NO: 330235
cuaagacacagaauugugg

SEQ ID NO: 330237 - RNA, 19 nt, Artificial Sequence
  Description of Artificial Sequence: Synthetic oligonucleotide
  Sense Strand Starting at position 146 of SEQ ID NO: 316676
agaggaauaccgugucccu

SEQ ID NO: 330238 - RNA, 19 nt, Artificial Sequence
  Description of Artificial Sequence: Synthetic oligonucleotide
  Antisense Strand to SEQ ID NO: 330237
agggacacgguauuccucu

SEQ ID NO: 330239 - RNA, 19 nt, Artificial Sequence
  Description of Artificial Sequence: Synthetic oligonucleotide
  Sense Strand Starting at position 146 of SEQ ID NO: 316679
ggaauaccgugucccuaaa

SEQ ID NO: 330240 - RNA, 19 nt, Artificial Sequence
  Description of Artificial Sequence: Synthetic oligonucleotide
  Antisense Strand to SEQ ID NO: 330239
uuuagggacacgguauucc

SEQ ID NO: 330241 - RNA, 19 nt, Artificial Sequence
  Description of Artificial Sequence: Synthetic oligonucleotide
  Sense Strand Starting at position 146 of SEQ ID NO: 316876
ccagaacaguccuuguaau

SEQ ID NO: 330242 - RNA, 19 nt, Artificial Sequence
  Description of Artificial Sequence: Synthetic oligonucleotide
  Antisense Strand to SEQ ID NO: 330241
auuacaaggacuguucugg

SEQ ID NO: 330243 - RNA, 19 nt, Artificial Sequence
  Description of Artificial Sequence: Synthetic oligonucleotide
  Sense Strand Starting at position 146 of SEQ ID NO: 317403
gggugauuccacgaugcag

SEQ ID NO: 330244 - RNA, 19 nt, Artificial Sequence
  Description of Artificial Sequence: Synthetic oligonucleotide
  Antisense Strand to SEQ ID NO: 330243
cugcaucguggaaucaccc

SEQ ID NO: 330245 - RNA, 19 nt, Artificial Sequence
  Description of Artificial Sequence: Synthetic oligonucleotide
  Sense Strand Starting at position 146 of SEQ ID NO: 317405
gugauuccacgaugcagga

SEQ ID NO: 330246 - RNA, 19 nt, Artificial Sequence
  Description of Artificial Sequence: Synthetic oligonucleotide
  Antisense Strand to SEQ ID NO: 330245
uccugcaucguggaaucac

SEQ ID NO: 330247 - RNA, 19 nt, Artificial Sequence
  Description of Artificial Sequence: Synthetic oligonucleotide
  Sense Strand Starting at position 146 of SEQ ID NO: 317418
gcaggagaucucugagcag

SEQ ID NO: 330248 - RNA, 19 nt, Artificial Sequence
  Description of Artificial Sequence: Synthetic oligonucleotide
  Antisense Strand to SEQ ID NO: 330247
cugcucagagaucuccugc

SEQ ID NO: 330249 - RNA, 19 nt, Artificial Sequence
  Description of Artificial Sequence: Synthetic oligonucleotide
  Sense Strand Starting at position 146 of SEQ ID NO: 317447
gcugaagcauucccuauca

SEQ ID NO: 330250 - RNA, 19 nt, Artificial Sequence
  Description of Artificial Sequence: Synthetic oligonucleotide
  Antisense Strand to SEQ ID NO: 330249
ugauagggaaugcuucagc

SEQ ID NO: 330251 - RNA, 19 nt, Artificial Sequence
  Description of Artificial Sequence: Synthetic oligonucleotide
  Sense Strand Starting at position 146 of SEQ ID NO: 317449
ugaagcauucccuaucaag

SEQ ID NO: 330252 - RNA, 19 nt, Artificial Sequence
  Description of Artificial Sequence: Synthetic oligonucleotide
  Antisense Strand to SEQ ID NO: 330251
cuugauagggaaugcuuca

SEQ ID NO: 330253 - RNA, 19 nt, Artificial Sequence
  Description of Artificial Sequence: Synthetic oligonucleotide
  Sense Strand Starting at position 146 of SEQ ID NO: 317471
guaggaugauugucagcug

SEQ ID NO: 330254 - RNA, 19 nt, Artificial Sequence
  Description of Artificial Sequence: Synthetic oligonucleotide
  Antisense Strand to SEQ ID NO: 330253
cagcugacaaucauccuac

SEQ ID NO: 330255 - RNA, 19 nt, Artificial Sequence
  Description of Artificial Sequence: Synthetic oligonucleotide
  Sense Strand Starting at position 146 of SEQ ID NO: 317474
ggaugauugucagcuggug

SEQ ID NO: 330256 - RNA, 19 nt, Artificial Sequence
  Description of Artificial Sequence: Synthetic oligonucleotide
  Antisense Strand to SEQ ID NO: 330255
caccagcugacaaucaucc

SEQ ID NO: 330257 - RNA, 19 nt, Artificial Sequence
  Description of Artificial Sequence: Synthetic oligonucleotide
  Sense Strand Starting at position 146 of SEQ ID NO: 317614
cgaccuguccuugaaaccu

SEQ ID NO: 330258 - RNA, 19 nt, Artificial Sequence
  Description of Artificial Sequence: Synthetic oligonucleotide
  Antisense Strand to SEQ ID NO: 330257
agguuucaaggacaggucg

SEQ ID NO: 330259 - RNA, 19 nt, Artificial Sequence
  Description of Artificial Sequence: Synthetic oligonucleotide
  Sense Strand Starting at position 146 of SEQ ID NO: 317701
ugcucuaaaucuuugagcu

SEQ ID NO: 330260 - RNA, 19 nt, Artificial Sequence
  Description of Artificial Sequence: Synthetic oligonucleotide
  Antisense Strand to SEQ ID NO: 330259
agcucaaagauuuagagca

SEQ ID NO: 330261 - RNA, 19 nt, Artificial Sequence
  Description of Artificial Sequence: Synthetic oligonucleotide
  Sense Strand Starting at position 146 of SEQ ID NO: 317702
gcucuaaaucuuugagcug

SEQ ID NO: 330262 - RNA, 19 nt, Artificial Sequence
  Description of Artificial Sequence: Synthetic oligonucleotide
  Antisense Strand to SEQ ID NO: 330261
cagcucaaagauuuagagc

SEQ ID NO: 330263 - RNA, 19 nt, Artificial Sequence
  Description of Artificial Sequence: Synthetic oligonucleotide
  Sense Strand Starting at position 146 of SEQ ID NO: 317705
cuaaaucuuugagcuguua

SEQ ID NO: 330264 - RNA, 19 nt, Artificial Sequence
  Description of Artificial Sequence: Synthetic oligonucleotide
  Antisense Strand to SEQ ID NO: 330263
uaacagcucaaagauuuag

SEQ ID NO: 330265 - RNA, 19 nt, Artificial Sequence
  Description of Artificial Sequence: Synthetic oligonucleotide
  Sense Strand Starting at position 146 of SEQ ID NO: 317764
gauacagagcagugcaaau

SEQ ID NO: 330266 - RNA, 19 nt, Artificial Sequence
  Description of Artificial Sequence: Synthetic oligonucleotide
  Antisense Strand to SEQ ID NO: 330265
auuugcacugcucuguauc

SEQ ID NO: 330267 - RNA, 19 nt, Artificial Sequence
  Description of Artificial Sequence: Synthetic oligonucleotide
  Sense Strand Starting at position 146 of SEQ ID NO: 318250
ggguauugccugcaugaaa

SEQ ID NO: 330268 - RNA, 19 nt, Artificial Sequence
  Description of Artificial Sequence: Synthetic oligonucleotide
  Antisense Strand to SEQ ID NO: 330267
uuucaugcaggcaauaccc

SEQ ID NO: 330269 - RNA, 19 nt, Artificial Sequence
  Description of Artificial Sequence: Synthetic oligonucleotide
  Sense Strand Starting at position 146 of SEQ ID NO: 318262
caugaaauguggcuacuga

SEQ ID NO: 330270 - RNA, 19 nt, Artificial Sequence
  Description of Artificial Sequence: Synthetic oligonucleotide
  Antisense Strand to SEQ ID NO: 330269
ucaguagccacauuucaug

SEQ ID NO: 330271 - RNA, 19 nt, Artificial Sequence
  Description of Artificial Sequence: Synthetic oligonucleotide
  Sense Strand Starting at position 146 of SEQ ID NO: 318342
ggcuauuauauuggagagu

SEQ ID NO: 330272 - RNA, 19 nt, Artificial Sequence
  Description of Artificial Sequence: Synthetic oligonucleotide
  Antisense Strand to SEQ ID NO: 330271
acucuccaauauaauagcc

SEQ ID NO: 330273 - RNA, 19 nt, Artificial Sequence
  Description of Artificial Sequence: Synthetic oligonucleotide
  Sense Strand Starting at position 146 of SEQ ID NO: 318345
uauuauauuggagagugca

SEQ ID NO: 330274 - RNA, 19 nt, Artificial Sequence
  Description of Artificial Sequence: Synthetic oligonucleotide
  Antisense Strand to SEQ ID NO: 330273
ugcacucuccaauauaaua

SEQ ID NO: 330275 - RNA, 19 nt, Artificial Sequence
  Description of Artificial Sequence: Synthetic oligonucleotide
  Sense Strand Starting at position 146 of SEQ ID NO: 318348
uauauuggagagugcaauu

SEQ ID NO: 330276 - RNA, 19 nt, Artificial Sequence
  Description of Artificial Sequence: Synthetic oligonucleotide
  Antisense Strand to SEQ ID NO: 330275
aauugcacucuccaauaua

SEQ ID NO: 330277 - RNA, 19 nt, Artificial Sequence
  Description of Artificial Sequence: Synthetic oligonucleotide
  Sense Strand Starting at position 146 of SEQ ID NO: 318466
gguggcuucaaggagugua

SEQ ID NO: 330278 - RNA, 19 nt, Artificial Sequence
  Description of Artificial Sequence: Synthetic oligonucleotide
  Antisense Strand to SEQ ID NO: 330277
uacacuccuugaagccacc

SEQ ID NO: 330279 - RNA, 19 nt, Artificial Sequence
  Description of Artificial Sequence: Synthetic oligonucleotide
  Sense Strand Starting at position 146 of SEQ ID NO: 318478
gaguguauugucucugugu

SEQ ID NO: 330280 - RNA, 19 nt, Artificial Sequence
  Description of Artificial Sequence: Synthetic oligonucleotide
  Antisense Strand to SEQ ID NO: 330279
acacagagacaauacacuc

SEQ ID NO: 330281 - RNA, 19 nt, Artificial Sequence
  Description of Artificial Sequence: Synthetic oligonucleotide
  Sense Strand Starting at position 146 of SEQ ID NO: 318829
guaaauaagaaucguugac

SEQ ID NO: 330282 - RNA, 19 nt, Artificial Sequence
  Description of Artificial Sequence: Synthetic oligonucleotide
  Antisense Strand to SEQ ID NO: 330281
gucaacgauucuuauuuac

SEQ ID NO: 330283 - RNA, 19 nt, Artificial Sequence
  Description of Artificial Sequence: Synthetic oligonucleotide
  Sense Strand Starting at position 146 of SEQ ID NO: 318833
auaagaaucguugacacuu

SEQ ID NO: 330284 - RNA, 19 nt, Artificial Sequence
  Description of Artificial Sequence: Synthetic oligonucleotide
  Antisense Strand to SEQ ID NO: 330283
aagugucaacgauucuuau

SEQ ID NO: 330285 - RNA, 19 nt, Artificial Sequence
  Description of Artificial Sequence: Synthetic oligonucleotide
  Sense Strand Starting at position 146 of SEQ ID NO: 318859
gcuugcuaugcgccaggua

SEQ ID NO: 330286 - RNA, 19 nt, Artificial Sequence
  Description of Artificial Sequence: Synthetic oligonucleotide
  Antisense Strand to SEQ ID NO: 330285
uaccuggcgcauagcaagc

SEQ ID NO: 330287 - RNA, 19 nt, Artificial Sequence
  Description of Artificial Sequence: Synthetic oligonucleotide
  Sense Strand Starting at position 146 of SEQ ID NO: 318927
ucaugagguaggcacuauu

SEQ ID NO: 330288 - RNA, 19 nt, Artificial Sequence
  Description of Artificial Sequence: Synthetic oligonucleotide
  Antisense Strand to SEQ ID NO: 330287
aauagugccuaccucauga

SEQ ID NO: 330289 - RNA, 19 nt, Artificial Sequence
  Description of Artificial Sequence: Synthetic oligonucleotide
  Sense Strand Starting at position 146 of SEQ ID NO: 318970
guaugcacagaaugauuaa

SEQ ID NO: 330290 - RNA, 19 nt, Artificial Sequence
  Description of Artificial Sequence: Synthetic oligonucleotide
  Antisense Strand to SEQ ID NO: 330289
uuaaucauucugugcauac

SEQ ID NO: 330291 - RNA, 19 nt, Artificial Sequence
  Description of Artificial Sequence: Synthetic oligonucleotide
  Sense Strand Starting at position 146 of SEQ ID NO: 319017
agugauaaacugggauguu

SEQ ID NO: 330292 - RNA, 19 nt, Artificial Sequence
  Description of Artificial Sequence: Synthetic oligonucleotide
  Antisense Strand to SEQ ID NO: 330291
aacaucccaguuuaucacu

SEQ ID NO: 330293 - RNA, 19 nt, Artificial Sequence
  Description of Artificial Sequence: Synthetic oligonucleotide
  Sense Strand Starting at position 147 of SEQ ID NO: 315236
uugagagaguuuguuacca

SEQ ID NO: 330294 - RNA, 19 nt, Artificial Sequence
  Description of Artificial Sequence: Synthetic oligonucleotide
  Antisense Strand to SEQ ID NO: 330293
ugguaacaaacucucucaa

SEQ ID NO: 330295 - RNA, 19 nt, Artificial Sequence
  Description of Artificial Sequence: Synthetic oligonucleotide
  Sense Strand Starting at position 147 of SEQ ID NO: 315238
gagagaguuuguuaccagu

SEQ ID NO: 330296 - RNA, 19 nt, Artificial Sequence
  Description of Artificial Sequence: Synthetic oligonucleotide
  Antisense Strand to SEQ ID NO: 330295
acugguaacaaacucucuc

SEQ ID NO: 330297 - RNA, 19 nt, Artificial Sequence
  Description of Artificial Sequence: Synthetic oligonucleotide
  Sense Strand Starting at position 147 of SEQ ID NO: 315240
gagaguuuguuaccaguag

SEQ ID NO: 330298 - RNA, 19 nt, Artificial Sequence
  Description of Artificial Sequence: Synthetic oligonucleotide
  Antisense Strand to SEQ ID NO: 330297
cuacugguaacaaacucuc

SEQ ID NO: 330299 - RNA, 19 nt, Artificial Sequence
  Description of Artificial Sequence: Synthetic oligonucleotide
  Sense Strand Starting at position 147 of SEQ ID NO: 315241
agaguuuguuaccaguaga

SEQ ID NO: 330300 - RNA, 19 nt, Artificial Sequence
  Description of Artificial Sequence: Synthetic oligonucleotide
  Antisense Strand to SEQ ID NO: 330299
ucuacugguaacaaacucu

SEQ ID NO: 330301 - RNA, 19 nt, Artificial Sequence
  Description of Artificial Sequence: Synthetic oligonucleotide
  Sense Strand Starting at position 147 of SEQ ID NO: 315244
guuuguuaccaguagaccu

SEQ ID NO: 330302 - RNA, 19 nt, Artificial Sequence
  Description of Artificial Sequence: Synthetic oligonucleotide
  Antisense Strand to SEQ ID NO: 330301
aggucuacugguaacaaac

SEQ ID NO: 330303 - RNA, 19 nt, Artificial Sequence
  Description of Artificial Sequence: Synthetic oligonucleotide
  Sense Strand Starting at position 147 of SEQ ID NO: 315283
agaagcucuucugacagaa

SEQ ID NO: 330304 - RNA, 19 nt, Artificial Sequence
  Description of Artificial Sequence: Synthetic oligonucleotide
  Antisense Strand to SEQ ID NO: 330303
uucugucagaagagcuucu

SEQ ID NO: 330305 - RNA, 19 nt, Artificial Sequence
  Description of Artificial Sequence: Synthetic oligonucleotide
  Sense Strand Starting at position 147 of SEQ ID NO: 315703
cugaauugaucugacagau

SEQ ID NO: 330306 - RNA, 19 nt, Artificial Sequence
  Description of Artificial Sequence: Synthetic oligonucleotide
  Antisense Strand to SEQ ID NO: 330305
aucugucagaucaauucag

SEQ ID NO: 330307 - RNA, 19 nt, Artificial Sequence
  Description of Artificial Sequence: Synthetic oligonucleotide
  Sense Strand Starting at position 147 of SEQ ID NO: 315784
accaauuguccucaacgca

SEQ ID NO: 330308 - RNA, 19 nt, Artificial Sequence
  Description of Artificial Sequence: Synthetic oligonucleotide
  Antisense Strand to SEQ ID NO: 330307
ugcguugaggacaauuggu

SEQ ID NO: 330309 - RNA, 19 nt, Artificial Sequence
  Description of Artificial Sequence: Synthetic oligonucleotide
  Sense Strand Starting at position 147 of SEQ ID NO: 315792
uccucaacgcaagaauaua

SEQ ID NO: 330310 - RNA, 19 nt, Artificial Sequence
  Description of Artificial Sequence: Synthetic oligonucleotide
  Antisense Strand to SEQ ID NO: 330309
uauauucuugcguugagga

SEQ ID NO: 330311 - RNA, 19 nt, Artificial Sequence
  Description of Artificial Sequence: Synthetic oligonucleotide
  Sense Strand Starting at position 147 of SEQ ID NO: 315862
aaaccaggugagugauuau

SEQ ID NO: 330312 - RNA, 19 nt, Artificial Sequence
  Description of Artificial Sequence: Synthetic oligonucleotide
  Antisense Strand to SEQ ID NO: 330311
auaaucacucaccugguuu

SEQ ID NO: 330313 - RNA, 19 nt, Artificial Sequence
  Description of Artificial Sequence: Synthetic oligonucleotide
  Sense Strand Starting at position 147 of SEQ ID NO: 315865
ccaggugagugauuauagu

SEQ ID NO: 330314 - RNA, 19 nt, Artificial Sequence
  Description of Artificial Sequence: Synthetic oligonucleotide
  Antisense Strand to SEQ ID NO: 330313
acuauaaucacucaccugg

SEQ ID NO: 330315 - RNA, 19 nt, Artificial Sequence
  Description of Artificial Sequence: Synthetic oligonucleotide
  Sense Strand Starting at position 147 of SEQ ID NO: 315936
acagucuugaguuggcuau

SEQ ID NO: 330316 - RNA, 19 nt, Artificial Sequence
  Description of Artificial Sequence: Synthetic oligonucleotide
  Antisense Strand to SEQ ID NO: 330315
auagccaacucaagacugu

SEQ ID NO: 330317 - RNA, 19 nt, Artificial Sequence
  Description of Artificial Sequence: Synthetic oligonucleotide
  Sense Strand Starting at position 147 of SEQ ID NO: 315940
ucuugaguuggcuaugcca

SEQ ID NO: 330318 - RNA, 19 nt, Artificial Sequence
  Description of Artificial Sequence: Synthetic oligonucleotide
  Antisense Strand to SEQ ID NO: 330317
uggcauagccaacucaaga

SEQ ID NO: 330319 - RNA, 19 nt, Artificial Sequence
  Description of Artificial Sequence: Synthetic oligonucleotide
  Sense Strand Starting at position 147 of SEQ ID NO: 315942
uugaguuggcuaugccauu

SEQ ID NO: 330320 - RNA, 19 nt, Artificial Sequence
  Description of Artificial Sequence: Synthetic oligonucleotide
  Antisense Strand to SEQ ID NO: 330319
aauggcauagccaacucaa

SEQ ID NO: 330321 - RNA, 19 nt, Artificial Sequence
  Description of Artificial Sequence: Synthetic oligonucleotide
  Sense Strand Starting at position 147 of SEQ ID NO: 315995
gagagauaaucugcacuug

SEQ ID NO: 330322 - RNA, 19 nt, Artificial Sequence
  Description of Artificial Sequence: Synthetic oligonucleotide
  Antisense Strand to SEQ ID NO: 330321
caagugcagauuaucucuc

SEQ ID NO: 330323 - RNA, 19 nt, Artificial Sequence
  Description of Artificial Sequence: Synthetic oligonucleotide
  Sense Strand Starting at position 147 of SEQ ID NO: 316182
uggcaagucuugccaccau

SEQ ID NO: 330324 - RNA, 19 nt, Artificial Sequence
  Description of Artificial Sequence: Synthetic oligonucleotide
  Antisense Strand to SEQ ID NO: 330323
augguggcaagacuugcca

SEQ ID NO: 330325 - RNA, 19 nt, Artificial Sequence
  Description of Artificial Sequence: Synthetic oligonucleotide
  Sense Strand Starting at position 147 of SEQ ID NO: 316398
cuggcagcucugggaaaga

SEQ ID NO: 330326 - RNA, 19 nt, Artificial Sequence
  Description of Artificial Sequence: Synthetic oligonucleotide
  Antisense Strand to SEQ ID NO: 330325
ucuuucccagagcugccag

SEQ ID NO: 330327 - RNA, 19 nt, Artificial Sequence
  Description of Artificial Sequence: Synthetic oligonucleotide
  Sense Strand Starting at position 147 of SEQ ID NO: 316547
gcccuagcuccuggauaau

SEQ ID NO: 330328 - RNA, 19 nt, Artificial Sequence
  Description of Artificial Sequence: Synthetic oligonucleotide
  Antisense Strand to SEQ ID NO: 330327
auuauccaggagcuagggc

SEQ ID NO: 330329 - RNA, 19 nt, Artificial Sequence
  Description of Artificial Sequence: Synthetic oligonucleotide
  Sense Strand Starting at position 147 of SEQ ID NO: 316550
cuagcuccuggauaauauu

SEQ ID NO: 330330 - RNA, 19 nt, Artificial Sequence
  Description of Artificial Sequence: Synthetic oligonucleotide
  Antisense Strand to SEQ ID NO: 330329
aauauuauccaggagcuag

SEQ ID NO: 330331 - RNA, 19 nt, Artificial Sequence
  Description of Artificial Sequence: Synthetic oligonucleotide
  Sense Strand Starting at position 147 of SEQ ID NO: 316559
ggauaauauuccuagauac

SEQ ID NO: 330332 - RNA, 19 nt, Artificial Sequence
  Description of Artificial Sequence: Synthetic oligonucleotide
  Antisense Strand to SEQ ID NO: 330331
guaucuaggaauauuaucc

SEQ ID NO: 330333 - RNA, 19 nt, Artificial Sequence
  Description of Artificial Sequence: Synthetic oligonucleotide
  Sense Strand Starting at position 147 of SEQ ID NO: 316570
cuagauacucccuggacca

SEQ ID NO: 330334 - RNA, 19 nt, Artificial Sequence
  Description of Artificial Sequence: Synthetic oligonucleotide
  Antisense Strand to SEQ ID NO: 330333
ugguccagggaguaucuag

SEQ ID NO: 330335 - RNA, 19 nt, Artificial Sequence
  Description of Artificial Sequence: Synthetic oligonucleotide
  Sense Strand Starting at position 147 of SEQ ID NO: 316920
ggaugauauuucuggaccu

SEQ ID NO: 330336 - RNA, 19 nt, Artificial Sequence
  Description of Artificial Sequence: Synthetic oligonucleotide
  Antisense Strand to SEQ ID NO: 330335
agguccagaaauaucaucc

SEQ ID NO: 330337 - RNA, 19 nt, Artificial Sequence
  Description of Artificial Sequence: Synthetic oligonucleotide
  Sense Strand Starting at position 147 of SEQ ID NO: 316921
gaugauauuucuggaccug

SEQ ID NO: 330338 - RNA, 19 nt, Artificial Sequence
  Description of Artificial Sequence: Synthetic oligonucleotide
  Antisense Strand to SEQ ID NO: 330337
cagguccagaaauaucauc

SEQ ID NO: 330339 - RNA, 19 nt, Artificial Sequence
  Description of Artificial Sequence: Synthetic oligonucleotide
  Sense Strand Starting at position 147 of SEQ ID NO: 316972
gggagaguccuaggucuag

SEQ ID NO: 330340 - RNA, 19 nt, Artificial Sequence
  Description of Artificial Sequence: Synthetic oligonucleotide
  Antisense Strand to SEQ ID NO: 330339
cuagaccuaggacucuccc

SEQ ID NO: 330341 - RNA, 19 nt, Artificial Sequence
  Description of Artificial Sequence: Synthetic oligonucleotide
  Sense Strand Starting at position 147 of SEQ ID NO: 316978
guccuaggucuagaagcau

SEQ ID NO: 330342 - RNA, 19 nt, Artificial Sequence
  Description of Artificial Sequence: Synthetic oligonucleotide
  Antisense Strand to SEQ ID NO: 330341
augcuucuagaccuaggac

SEQ ID NO: 330343 - RNA, 19 nt, Artificial Sequence
  Description of Artificial Sequence: Synthetic oligonucleotide
  Sense Strand Starting at position 147 of SEQ ID NO: 317054
gcaguacucaccugggaca

SEQ ID NO: 330344 - RNA, 19 nt, Artificial Sequence
  Description of Artificial Sequence: Synthetic oligonucleotide
  Antisense Strand to SEQ ID NO: 330343
ugucccaggugaguacugc

SEQ ID NO: 330345 - RNA, 19 nt, Artificial Sequence
  Description of Artificial Sequence: Synthetic oligonucleotide
  Sense Strand Starting at position 147 of SEQ ID NO: 317055
caguacucaccugggacaa

SEQ ID NO: 330346 - RNA, 19 nt, Artificial Sequence
  Description of Artificial Sequence: Synthetic oligonucleotide
  Antisense Strand to SEQ ID NO: 330345
uugucccaggugaguacug

SEQ ID NO: 330347 - RNA, 19 nt, Artificial Sequence
  Description of Artificial Sequence: Synthetic oligonucleotide
  Sense Strand Starting at position 147 of SEQ ID NO: 317056
aguacucaccugggacaau

SEQ ID NO: 330348 - RNA, 19 nt, Artificial Sequence
  Description of Artificial Sequence: Synthetic oligonucleotide
  Antisense Strand to SEQ ID NO: 330347
auugucccaggugaguacu

SEQ ID NO: 330349 - RNA, 19 nt, Artificial Sequence
  Description of Artificial Sequence: Synthetic oligonucleotide
  Sense Strand Starting at position 147 of SEQ ID NO: 317333
uacugagggccuugauuga

SEQ ID NO: 330350 - RNA, 19 nt, Artificial Sequence
  Description of Artificial Sequence: Synthetic oligonucleotide
  Antisense Strand to SEQ ID NO: 330349
ucaaucaaggcccucagua

SEQ ID NO: 330351 - RNA, 19 nt, Artificial Sequence
  Description of Artificial Sequence: Synthetic oligonucleotide
  Sense Strand Starting at position 147 of SEQ ID NO: 317340
ggccuugauugagacccau

SEQ ID NO: 330352 - RNA, 19 nt, Artificial Sequence
  Description of Artificial Sequence: Synthetic oligonucleotide
  Antisense Strand to SEQ ID NO: 330351
augggucucaaucaaggcc

SEQ ID NO: 330353 - RNA, 19 nt, Artificial Sequence
  Description of Artificial Sequence: Synthetic oligonucleotide
  Sense Strand Starting at position 147 of SEQ ID NO: 317510
cugguaauccagugaaucu

SEQ ID NO: 330354 - RNA, 19 nt, Artificial Sequence
  Description of Artificial Sequence: Synthetic oligonucleotide
  Antisense Strand to SEQ ID NO: 330353
agauucacuggauuaccag

SEQ ID NO: 330355 - RNA, 19 nt, Artificial Sequence
  Description of Artificial Sequence: Synthetic oligonucleotide
  Sense Strand Starting at position 147 of SEQ ID NO: 317517
uccagugaaucuuuccaga

SEQ ID NO: 330356 - RNA, 19 nt, Artificial Sequence
  Description of Artificial Sequence: Synthetic oligonucleotide
  Antisense Strand to SEQ ID NO: 330355
ucuggaaagauucacugga

SEQ ID NO: 330357 - RNA, 19 nt, Artificial Sequence
  Description of Artificial Sequence: Synthetic oligonucleotide
  Sense Strand Starting at position 147 of SEQ ID NO: 317520
agugaaucuuuccagaucu

SEQ ID NO: 330358 - RNA, 19 nt, Artificial Sequence
  Description of Artificial Sequence: Synthetic oligonucleotide
  Antisense Strand to SEQ ID NO: 330357
agaucuggaaagauucacu

SEQ ID NO: 330359 - RNA, 19 nt, Artificial Sequence
  Description of Artificial Sequence: Synthetic oligonucleotide
  Sense Strand Starting at position 147 of SEQ ID NO: 317615
uacagauauggcugcuaug

SEQ ID NO: 330360 - RNA, 19 nt, Artificial Sequence
  Description of Artificial Sequence: Synthetic oligonucleotide
  Antisense Strand to SEQ ID NO: 330359
cauagcagccauaucugua

SEQ ID NO: 330361 - RNA, 19 nt, Artificial Sequence
  Description of Artificial Sequence: Synthetic oligonucleotide
  Sense Strand Starting at position 147 of SEQ ID NO: 317674
ccuggaaagucuucugaag

SEQ ID NO: 330362 - RNA, 19 nt, Artificial Sequence
  Description of Artificial Sequence: Synthetic oligonucleotide
  Antisense Strand to SEQ ID NO: 330361
cuucagaagacuuuccagg

SEQ ID NO: 330363 - RNA, 19 nt, Artificial Sequence
  Description of Artificial Sequence: Synthetic oligonucleotide
  Sense Strand Starting at position 147 of SEQ ID NO: 317676
uggaaagucuucugaagaa

SEQ ID NO: 330364 - RNA, 19 nt, Artificial Sequence
  Description of Artificial Sequence: Synthetic oligonucleotide
  Antisense Strand to SEQ ID NO: 330363
uucuucagaagacuuucca

SEQ ID NO: 330365 - RNA, 19 nt, Artificial Sequence
  Description of Artificial Sequence: Synthetic oligonucleotide
  Sense Strand Starting at position 147 of SEQ ID NO: 317710
agccuagauuucgaagacu

SEQ ID NO: 330366 - RNA, 19 nt, Artificial Sequence
  Description of Artificial Sequence: Synthetic oligonucleotide
  Antisense Strand to SEQ ID NO: 330365
agucuucgaaaucuaggcu

SEQ ID NO: 330367 - RNA, 19 nt, Artificial Sequence
  Description of Artificial Sequence: Synthetic oligonucleotide
  Sense Strand Starting at position 147 of SEQ ID NO: 318032
agaauaauauaucagaguc

SEQ ID NO: 330368 - RNA, 19 nt, Artificial Sequence
  Description of Artificial Sequence: Synthetic oligonucleotide
  Antisense Strand to SEQ ID NO: 330367
gacucugauauauuauucu

SEQ ID NO: 330369 - RNA, 19 nt, Artificial Sequence
  Description of Artificial Sequence: Synthetic oligonucleotide
  Sense Strand Starting at position 147 of SEQ ID NO: 318472
aaugaagcaugcuuagaag

SEQ ID NO: 330370 - RNA, 19 nt, Artificial Sequence
  Description of Artificial Sequence: Synthetic oligonucleotide
  Antisense Strand to SEQ ID NO: 330369
cuucuaagcaugcuucauu

SEQ ID NO: 330371 - RNA, 19 nt, Artificial Sequence
  Description of Artificial Sequence: Synthetic oligonucleotide
  Sense Strand Starting at position 147 of SEQ ID NO: 318475
gaagcaugcuuagaagauc

SEQ ID NO: 330372 - RNA, 19 nt, Artificial Sequence
  Description of Artificial Sequence: Synthetic oligonucleotide
  Antisense Strand to SEQ ID NO: 330371
gaucuucuaagcaugcuuc

SEQ ID NO: 330373 - RNA, 19 nt, Artificial Sequence
  Description of Artificial Sequence: Synthetic oligonucleotide
  Sense Strand Starting at position 148 of SEQ ID NO: 315327
aagggagucuuaucauaua

SEQ ID NO: 330374 - RNA, 19 nt, Artificial Sequence
  Description of Artificial Sequence: Synthetic oligonucleotide
  Antisense Strand to SEQ ID NO: 330373
uauaugauaagacucccuu

SEQ ID NO: 330375 - RNA, 19 nt, Artificial Sequence
  Description of Artificial Sequence: Synthetic oligonucleotide
  Sense Strand Starting at position 148 of SEQ ID NO: 315399
acuguuggccaaggucaua

SEQ ID NO: 330376 - RNA, 19 nt, Artificial Sequence
  Description of Artificial Sequence: Synthetic oligonucleotide
  Antisense Strand to SEQ ID NO: 330375
uaugaccuuggccaacagu

SEQ ID NO: 330377 - RNA, 19 nt, Artificial Sequence
  Description of Artificial Sequence: Synthetic oligonucleotide
  Sense Strand Starting at position 148 of SEQ ID NO: 315581
uuaaucagugcacaggauu

SEQ ID NO: 330378 - RNA, 19 nt, Artificial Sequence
  Description of Artificial Sequence: Synthetic oligonucleotide
  Antisense Strand to SEQ ID NO: 330377
aauccugugcacugauuaa

SEQ ID NO: 330379 - RNA, 19 nt, Artificial Sequence
  Description of Artificial Sequence: Synthetic oligonucleotide
  Sense Strand Starting at position 148 of SEQ ID NO: 315696
uucuauaaagccugucuga

SEQ ID NO: 330380 - RNA, 19 nt, Artificial Sequence
  Description of Artificial Sequence: Synthetic oligonucleotide
  Antisense Strand to SEQ ID NO: 330379
ucagacaggcuuuauagaa

SEQ ID NO: 330381 - RNA, 19 nt, Artificial Sequence
  Description of Artificial Sequence: Synthetic oligonucleotide
  Sense Strand Starting at position 148 of SEQ ID NO: 315786
ccacuacugcugggaauga

SEQ ID NO: 330382 - RNA, 19 nt, Artificial Sequence
  Description of Artificial Sequence: Synthetic oligonucleotide
  Antisense Strand to SEQ ID NO: 330381
ucauucccagcaguagugg

SEQ ID NO: 330383 - RNA, 19 nt, Artificial Sequence
  Description of Artificial Sequence: Synthetic oligonucleotide
  Sense Strand Starting at position 148 of SEQ ID NO: 315905
gacgacuugcuuugaccaa

SEQ ID NO: 330384 - RNA, 19 nt, Artificial Sequence
  Description of Artificial Sequence: Synthetic oligonucleotide
  Antisense Strand to SEQ ID NO: 330383
uuggucaaagcaagucguc

SEQ ID NO: 330385 - RNA, 19 nt, Artificial Sequence
  Description of Artificial Sequence: Synthetic oligonucleotide
  Sense Strand Starting at position 148 of SEQ ID NO: 315928
auguaauagaugugaugga

SEQ ID NO: 330386 - RNA, 19 nt, Artificial Sequence
  Description of Artificial Sequence: Synthetic oligonucleotide
  Antisense Strand to SEQ ID NO: 330385
uccaucacaucuauuacau

SEQ ID NO: 330387 - RNA, 19 nt, Artificial Sequence
  Description of Artificial Sequence: Synthetic oligonucleotide
  Sense Strand Starting at position 148 of SEQ ID NO: 315932
aauagaugugauggaguuu

SEQ ID NO: 330388 - RNA, 19 nt, Artificial Sequence
  Description of Artificial Sequence: Synthetic oligonucleotide
  Antisense Strand to SEQ ID NO: 330387
aaacuccaucacaucuauu

SEQ ID NO: 330389 - RNA, 19 nt, Artificial Sequence
  Description of Artificial Sequence: Synthetic oligonucleotide
  Sense Strand Starting at position 148 of SEQ ID NO: 315958
gagcuuaggccucaauaag

SEQ ID NO: 330390 - RNA, 19 nt, Artificial Sequence
  Description of Artificial Sequence: Synthetic oligonucleotide
  Antisense Strand to SEQ ID NO: 330389
cuuauugaggccuaagcuc

SEQ ID NO: 330391 - RNA, 19 nt, Artificial Sequence
  Description of Artificial Sequence: Synthetic oligonucleotide
  Sense Strand Starting at position 148 of SEQ ID NO: 316200
acagaauugugagcccaua

SEQ ID NO: 330392 - RNA, 19 nt, Artificial Sequence
  Description of Artificial Sequence: Synthetic oligonucleotide
  Antisense Strand to SEQ ID NO: 330391
uaugggcucacaauucugu

SEQ ID NO: 330393 - RNA, 19 nt, Artificial Sequence
  Description of Artificial Sequence: Synthetic oligonucleotide
  Sense Strand Starting at position 148 of SEQ ID NO: 316292
cagugacuauugguuuaca

SEQ ID NO: 330394 - RNA, 19 nt, Artificial Sequence
  Description of Artificial Sequence: Synthetic oligonucleotide
  Antisense Strand to SEQ ID NO: 330393
uguaaaccaauagucacug

SEQ ID NO: 330395 - RNA, 19 nt, Artificial Sequence
  Description of Artificial Sequence: Synthetic oligonucleotide
  Sense Strand Starting at position 148 of SEQ ID NO: 316293
agugacuauugguuuacaa

SEQ ID NO: 330396 - RNA, 19 nt, Artificial Sequence
  Description of Artificial Sequence: Synthetic oligonucleotide
  Antisense Strand to SEQ ID NO: 330395
uuguaaaccaauagucacu

SEQ ID NO: 330397 - RNA, 19 nt, Artificial Sequence
  Description of Artificial Sequence: Synthetic oligonucleotide
  Sense Strand Starting at position 148 of SEQ ID NO: 316326
agaauuacucagugagacu

SEQ ID NO: 330398 - RNA, 19 nt, Artificial Sequence
  Description of Artificial Sequence: Synthetic oligonucleotide
  Antisense Strand to SEQ ID NO: 330397
agucucacugaguaauucu

SEQ ID NO: 330399 - RNA, 19 nt, Artificial Sequence
  Description of Artificial Sequence: Synthetic oligonucleotide
  Sense Strand Starting at position 148 of SEQ ID NO: 316359
uuggcauugguacaauaga

SEQ ID NO: 330400 - RNA, 19 nt, Artificial Sequence
  Description of Artificial Sequence: Synthetic oligonucleotide
  Antisense Strand to SEQ ID NO: 330399
ucuauuguaccaaugccaa

SEQ ID NO: 330401 - RNA, 19 nt, Artificial Sequence
  Description of Artificial Sequence: Synthetic oligonucleotide
  Sense Strand Starting at position 148 of SEQ ID NO: 316440
cgggaguaugcucagaggu

SEQ ID NO: 330402 - RNA, 19 nt, Artificial Sequence
  Description of Artificial Sequence: Synthetic oligonucleotide
  Antisense Strand to SEQ ID NO: 330401
accucugagcauacucccg

SEQ ID NO: 330403 - RNA, 19 nt, Artificial Sequence
  Description of Artificial Sequence: Synthetic oligonucleotide
  Sense Strand Starting at position 148 of SEQ ID NO: 316548
augggucucuggagaggua

SEQ ID NO: 330404 - RNA, 19 nt, Artificial Sequence
  Description of Artificial Sequence: Synthetic oligonucleotide
  Antisense Strand to SEQ ID NO: 330403
uaccucuccagagacccau

SEQ ID NO: 330405 - RNA, 19 nt, Artificial Sequence
  Description of Artificial Sequence: Synthetic oligonucleotide
  Sense Strand Starting at position 148 of SEQ ID NO: 316564
guaauuaggccaugaugac

SEQ ID NO: 330406 - RNA, 19 nt, Artificial Sequence
  Description of Artificial Sequence: Synthetic oligonucleotide
  Antisense Strand to SEQ ID NO: 330405
gucaucauggccuaauuac

SEQ ID NO: 330407 - RNA, 19 nt, Artificial Sequence
  Description of Artificial Sequence: Synthetic oligonucleotide
  Sense Strand Starting at position 148 of SEQ ID NO: 316573
ccaugaugacucugacuuc

SEQ ID NO: 330408 - RNA, 19 nt, Artificial Sequence
  Description of Artificial Sequence: Synthetic oligonucleotide
  Antisense Strand to SEQ ID NO: 330407
gaagucagagucaucaugg

SEQ ID NO: 330409 - RNA, 19 nt, Artificial Sequence
  Description of Artificial Sequence: Synthetic oligonucleotide
  Sense Strand Starting at position 148 of SEQ ID NO: 316598
gaauuaaugccaugauugu

SEQ ID NO: 330410 - RNA, 19 nt, Artificial Sequence
  Description of Artificial Sequence: Synthetic oligonucleotide
  Antisense Strand to SEQ ID NO: 330409
acaaucauggcauuaauuc

SEQ ID NO: 330411 - RNA, 19 nt, Artificial Sequence
  Description of Artificial Sequence: Synthetic oligonucleotide
  Sense Strand Starting at position 148 of SEQ ID NO: 316625
guuaauuaucaugggaaug

SEQ ID NO: 330412 - RNA, 19 nt, Artificial Sequence
  Description of Artificial Sequence: Synthetic oligonucleotide
  Antisense Strand to SEQ ID NO: 330411
cauucccaugauaauuaac

SEQ ID NO: 330413 - RNA, 19 nt, Artificial Sequence
  Description of Artificial Sequence: Synthetic oligonucleotide
  Sense Strand Starting at position 148 of SEQ ID NO: 317252
auagaaaugugcccagaua

SEQ ID NO: 330414 - RNA, 19 nt, Artificial Sequence
  Description of Artificial Sequence: Synthetic oligonucleotide
  Antisense Strand to SEQ ID NO: 330413
uaucugggcacauuucuau

SEQ ID NO: 330415 - RNA, 19 nt, Artificial Sequence
  Description of Artificial Sequence: Synthetic oligonucleotide
  Sense Strand Starting at position 148 of SEQ ID NO: 317477
auaccauauggcgaugacu

SEQ ID NO: 330416 - RNA, 19 nt, Artificial Sequence
  Description of Artificial Sequence: Synthetic oligonucleotide
  Antisense Strand to SEQ ID NO: 330415
agucaucgccauaugguau

SEQ ID NO: 330417 - RNA, 19 nt, Artificial Sequence
  Description of Artificial Sequence: Synthetic oligonucleotide
  Sense Strand Starting at position 148 of SEQ ID NO: 317521
acaggaaauugaguuugca

SEQ ID NO: 330418 - RNA, 19 nt, Artificial Sequence
  Description of Artificial Sequence: Synthetic oligonucleotide
  Antisense Strand to SEQ ID NO: 330417
ugcaaacucaauuuccugu

SEQ ID NO: 330419 - RNA, 19 nt, Artificial Sequence
  Description of Artificial Sequence: Synthetic oligonucleotide
  Sense Strand Starting at position 148 of SEQ ID NO: 317531
gaguuugcacagcaagagu

SEQ ID NO: 330420 - RNA, 19 nt, Artificial Sequence
  Description of Artificial Sequence: Synthetic oligonucleotide
  Antisense Strand to SEQ ID NO: 330419
acucuugcugugcaaacuc

SEQ ID NO: 330421 - RNA, 19 nt, Artificial Sequence
  Description of Artificial Sequence: Synthetic oligonucleotide
  Sense Strand Starting at position 148 of SEQ ID NO: 317563
uuuguaagauagucaaaga

SEQ ID NO: 330422 - RNA, 19 nt, Artificial Sequence
  Description of Artificial Sequence: Synthetic oligonucleotide
  Antisense Strand to SEQ ID NO: 330421
ucuuugacuaucuuacaaa

SEQ ID NO: 330423 - RNA, 19 nt, Artificial Sequence
  Description of Artificial Sequence: Synthetic oligonucleotide
  Sense Strand Starting at position 148 of SEQ ID NO: 317900
aaugucauauuugagcaga

SEQ ID NO: 330424 - RNA, 19 nt, Artificial Sequence
  Description of Artificial Sequence: Synthetic oligonucleotide
  Antisense Strand to SEQ ID NO: 330423
ucugcucaaauaugacauu

SEQ ID NO: 330425 - RNA, 19 nt, Artificial Sequence
  Description of Artificial Sequence: Synthetic oligonucleotide
  Sense Strand Starting at position 148 of SEQ ID NO: 317910
uugagcagauaucugacaa

SEQ ID NO: 330426 - RNA, 19 nt, Artificial Sequence
  Description of Artificial Sequence: Synthetic oligonucleotide
  Antisense Strand to SEQ ID NO: 330425
uugucagauaucugcucaa

SEQ ID NO: 330427 - RNA, 19 nt, Artificial Sequence
  Description of Artificial Sequence: Synthetic oligonucleotide
  Sense Strand Starting at position 148 of SEQ ID NO: 318037
agaguaguguggcugagua

SEQ ID NO: 330428 - RNA, 19 nt, Artificial Sequence
  Description of Artificial Sequence: Synthetic oligonucleotide
  Antisense Strand to SEQ ID NO: 330427
uacucagccacacuacucu

SEQ ID NO: 330429 - RNA, 19 nt, Artificial Sequence
  Description of Artificial Sequence: Synthetic oligonucleotide
  Sense Strand Starting at position 148 of SEQ ID NO: 318047
ggcugaguagugggagcaa

SEQ ID NO: 330430 - RNA, 19 nt, Artificial Sequence
  Description of Artificial Sequence: Synthetic oligonucleotide
  Antisense Strand to SEQ ID NO: 330429
uugcucccacuacucagcc

SEQ ID NO: 330431 - RNA, 19 nt, Artificial Sequence
  Description of Artificial Sequence: Synthetic oligonucleotide
  Sense Strand Starting at position 148 of SEQ ID NO: 318199
cucuuacuggcacauugau

SEQ ID NO: 330432 - RNA, 19 nt, Artificial Sequence
  Description of Artificial Sequence: Synthetic oligonucleotide
  Antisense Strand to SEQ ID NO: 330431
aucaaugugccaguaagag

SEQ ID NO: 330433 - RNA, 19 nt, Artificial Sequence
  Description of Artificial Sequence: Synthetic oligonucleotide
  Sense Strand Starting at position 148 of SEQ ID NO: 318384
gguggauugaaaugugcag

SEQ ID NO: 330434 - RNA, 19 nt, Artificial Sequence
  Description of Artificial Sequence: Synthetic oligonucleotide
  Antisense Strand to SEQ ID NO: 330433
cugcacauuucaauccacc

SEQ ID NO: 330435 - RNA, 19 nt, Artificial Sequence
  Description of Artificial Sequence: Synthetic oligonucleotide
  Sense Strand Starting at position 148 of SEQ ID NO: 318657
gcaggaggauugcuuuaua

SEQ ID NO: 330436 - RNA, 19 nt, Artificial Sequence
  Description of Artificial Sequence: Synthetic oligonucleotide
  Antisense Strand to SEQ ID NO: 330435
uauaaagcaauccuccugc

SEQ ID NO: 330437 - RNA, 19 nt, Artificial Sequence
  Description of Artificial Sequence: Synthetic oligonucleotide
  Sense Strand Starting at position 148 of SEQ ID NO: 318667
ugcuuuauaccaggaguuu

SEQ ID NO: 330438 - RNA, 19 nt, Artificial Sequence
  Description of Artificial Sequence: Synthetic oligonucleotide
  Antisense Strand to SEQ ID NO: 330437
aaacuccugguauaaagca

SEQ ID NO: 330439 - RNA, 19 nt, Artificial Sequence
  Description of Artificial Sequence: Synthetic oligonucleotide
  Sense Strand Starting at position 148 of SEQ ID NO: 318668
gcuuuauaccaggaguuua

SEQ ID NO: 330440 - RNA, 19 nt, Artificial Sequence
  Description of Artificial Sequence: Synthetic oligonucleotide
  Antisense Strand to SEQ ID NO: 330439
uaaacuccugguauaaagc

SEQ ID NO: 330441 - RNA, 19 nt, Artificial Sequence
  Description of Artificial Sequence: Synthetic oligonucleotide
  Sense Strand Starting at position 148 of SEQ ID NO: 318816
ggaguucaaggaugcauua

SEQ ID NO: 330442 - RNA, 19 nt, Artificial Sequence
  Description of Artificial Sequence: Synthetic oligonucleotide
  Antisense Strand to SEQ ID NO: 330441
uaaugcauccuugaacucc

SEQ ID NO: 330443 - RNA, 19 nt, Artificial Sequence
  Description of Artificial Sequence: Synthetic oligonucleotide
  Sense Strand Starting at position 148 of SEQ ID NO: 319107
gcaacuugagcugacugau

SEQ ID NO: 330444 - RNA, 19 nt, Artificial Sequence
  Description of Artificial Sequence: Synthetic oligonucleotide
  Antisense Strand to SEQ ID NO: 330443
aucagucagcucaaguugc

SEQ ID NO: 330445 - RNA, 19 nt, Artificial Sequence
  Description of Artificial Sequence: Synthetic oligonucleotide
  Sense Strand Starting at position 148 of SEQ ID NO: 319110
acuugagcugacugauaaa

SEQ ID NO: 330446 - RNA, 19 nt, Artificial Sequence
  Description of Artificial Sequence: Synthetic oligonucleotide
  Antisense Strand to SEQ ID NO: 330445
uuuaucagucagcucaagu

SEQ ID NO: 330447 - RNA, 19 nt, Artificial Sequence
  Description of Artificial Sequence: Synthetic oligonucleotide
  Sense Strand Starting at position 148 of SEQ ID NO: 319191
cucugagcuggagauguau

SEQ ID NO: 330448 - RNA, 19 nt, Artificial Sequence
  Description of Artificial Sequence: Synthetic oligonucleotide
  Antisense Strand to SEQ ID NO: 330447
auacaucuccagcucagag

SEQ ID NO: 330449 - RNA, 19 nt, Artificial Sequence
  Description of Artificial Sequence: Synthetic oligonucleotide
  Sense Strand Starting at position 148 of SEQ ID NO: 319202
agauguauagcugggaguu

SEQ ID NO: 330450 - RNA, 19 nt, Artificial Sequence
  Description of Artificial Sequence: Synthetic oligonucleotide
  Antisense Strand to SEQ ID NO: 330449
aacucccagcuauacaucu

SEQ ID NO: 330451 - RNA, 19 nt, Artificial Sequence
  Description of Artificial Sequence: Synthetic oligonucleotide
  Sense Strand Starting at position 148 of SEQ ID NO: 319203
gauguauagcugggaguug

SEQ ID NO: 330452 - RNA, 19 nt, Artificial Sequence
  Description of Artificial Sequence: Synthetic oligonucleotide
  Antisense Strand to SEQ ID NO: 330451
caacucccagcuauacauc

SEQ ID NO: 330453 - RNA, 19 nt, Artificial Sequence
  Description of Artificial Sequence: Synthetic oligonucleotide
  Sense Strand Starting at position 149 of SEQ ID NO: 315421
agcaguuguggaggacuga

SEQ ID NO: 330454 - RNA, 19 nt, Artificial Sequence
  Description of Artificial Sequence: Synthetic oligonucleotide
  Antisense Strand to SEQ ID NO: 330453
ucaguccuccacaacugcu

SEQ ID NO: 330455 - RNA, 19 nt, Artificial Sequence
  Description of Artificial Sequence: Synthetic oligonucleotide
  Sense Strand Starting at position 149 of SEQ ID NO: 315453
uugguaaacugauuaagug

SEQ ID NO: 330456 - RNA, 19 nt, Artificial Sequence
  Description of Artificial Sequence: Synthetic oligonucleotide
  Antisense Strand to SEQ ID NO: 330455
cacuuaaucaguuuaccaa

SEQ ID NO: 330457 - RNA, 19 nt, Artificial Sequence
  Description of Artificial Sequence: Synthetic oligonucleotide
  Sense Strand Starting at position 149 of SEQ ID NO: 315576
aagguugugacaugacaga

SEQ ID NO: 330458 - RNA, 19 nt, Artificial Sequence
  Description of Artificial Sequence: Synthetic oligonucleotide
  Antisense Strand to SEQ ID NO: 330457
ucugucaugucacaaccuu

SEQ ID NO: 330459 - RNA, 19 nt, Artificial Sequence
  Description of Artificial Sequence: Synthetic oligonucleotide
  Sense Strand Starting at position 149 of SEQ ID NO: 315639
ccaaguuugccauaagaac

SEQ ID NO: 330460 - RNA, 19 nt, Artificial Sequence
  Description of Artificial Sequence: Synthetic oligonucleotide
  Antisense Strand to SEQ ID NO: 330459
guucuuauggcaaacuugg

SEQ ID NO: 330461 - RNA, 19 nt, Artificial Sequence
  Description of Artificial Sequence: Synthetic oligonucleotide
  Sense Strand Starting at position 149 of SEQ ID NO: 315805
agucauccagccugaauca

SEQ ID NO: 330462 - RNA, 19 nt, Artificial Sequence
  Description of Artificial Sequence: Synthetic oligonucleotide
  Antisense Strand to SEQ ID NO: 330461
ugauucaggcuggaugacu

SEQ ID NO: 330463 - RNA, 19 nt, Artificial Sequence
  Description of Artificial Sequence: Synthetic oligonucleotide
  Sense Strand Starting at position 149 of SEQ ID NO: 315860
guuauaagccacugaauuc

SEQ ID NO: 330464 - RNA, 19 nt, Artificial Sequence
  Description of Artificial Sequence: Synthetic oligonucleotide
  Antisense Strand to SEQ ID NO: 330463
gaauucaguggcuuauaac

SEQ ID NO: 330465 - RNA, 19 nt, Artificial Sequence
  Description of Artificial Sequence: Synthetic oligonucleotide
  Sense Strand Starting at position 149 of SEQ ID NO: 315900
ggcaauagaucacugagac

SEQ ID NO: 330466 - RNA, 19 nt, Artificial Sequence
  Description of Artificial Sequence: Synthetic oligonucleotide
  Antisense Strand to SEQ ID NO: 330465
gucucagugaucuauugcc

SEQ ID NO: 330467 - RNA, 19 nt, Artificial Sequence
  Description of Artificial Sequence: Synthetic oligonucleotide
  Sense Strand Starting at position 149 of SEQ ID NO: 315901
gcaauagaucacugagacg

SEQ ID NO: 330468 - RNA, 19 nt, Artificial Sequence
  Description of Artificial Sequence: Synthetic oligonucleotide
  Antisense Strand to SEQ ID NO: 330467
cgucucagugaucuauugc

SEQ ID NO: 330469 - RNA, 19 nt, Artificial Sequence
  Description of Artificial Sequence: Synthetic oligonucleotide
  Sense Strand Starting at position 149 of SEQ ID NO: 315973
ccaggcauucugggagaau

SEQ ID NO: 330470 - RNA, 19 nt, Artificial Sequence
  Description of Artificial Sequence: Synthetic oligonucleotide
  Antisense Strand to SEQ ID NO: 330469
auucucccagaaugccugg

SEQ ID NO: 330471 - RNA, 19 nt, Artificial Sequence
  Description of Artificial Sequence: Synthetic oligonucleotide
  Sense Strand Starting at position 149 of SEQ ID NO: 316082
cagagauucgcccaagauc

SEQ ID NO: 330472 - RNA, 19 nt, Artificial Sequence
  Description of Artificial Sequence: Synthetic oligonucleotide
  Antisense Strand to SEQ ID NO: 330471
gaucuugggcgaaucucug

SEQ ID NO: 330473 - RNA, 19 nt, Artificial Sequence
  Description of Artificial Sequence: Synthetic oligonucleotide
  Sense Strand Starting at position 149 of SEQ ID NO: 316253
gcugacacauccuugaaag

SEQ ID NO: 330474 - RNA, 19 nt, Artificial Sequence
  Description of Artificial Sequence: Synthetic oligonucleotide
  Antisense Strand to SEQ ID NO: 330473
cuuucaaggaugugucagc

SEQ ID NO: 330475 - RNA, 19 nt, Artificial Sequence
  Description of Artificial Sequence: Synthetic oligonucleotide
  Sense Strand Starting at position 149 of SEQ ID NO: 316382
cugggauccauguguggau

SEQ ID NO: 330476 - RNA, 19 nt, Artificial Sequence
  Description of Artificial Sequence: Synthetic oligonucleotide
  Antisense Strand to SEQ ID NO: 330475
auccacacauggaucccag

SEQ ID NO: 330477 - RNA, 19 nt, Artificial Sequence
  Description of Artificial Sequence: Synthetic oligonucleotide
  Sense Strand Starting at position 149 of SEQ ID NO: 316394
uguggaucugcucaguaag

SEQ ID NO: 330478 - RNA, 19 nt, Artificial Sequence
  Description of Artificial Sequence: Synthetic oligonucleotide
  Antisense Strand to SEQ ID NO: 330477
cuuacugagcagauccaca

SEQ ID NO: 330479 - RNA, 19 nt, Artificial Sequence
  Description of Artificial Sequence: Synthetic oligonucleotide
  Sense Strand Starting at position 149 of SEQ ID NO: 316396
uggaucugcucaguaagaa

SEQ ID NO: 330480 - RNA, 19 nt, Artificial Sequence
  Description of Artificial Sequence: Synthetic oligonucleotide
  Antisense Strand to SEQ ID NO: 330479
uucuuacugagcagaucca

SEQ ID NO: 330481 - RNA, 19 nt, Artificial Sequence
  Description of Artificial Sequence: Synthetic oligonucleotide
  Sense Strand Starting at position 149 of SEQ ID NO: 316397
ggaucugcucaguaagaac

SEQ ID NO: 330482 - RNA, 19 nt, Artificial Sequence
  Description of Artificial Sequence: Synthetic oligonucleotide
  Antisense Strand to SEQ ID NO: 330481
guucuuacugagcagaucc

SEQ ID NO: 330483 - RNA, 19 nt, Artificial Sequence
  Description of Artificial Sequence: Synthetic oligonucleotide
  Sense Strand Starting at position 149 of SEQ ID NO: 316639
cagcuugagcaauggaaca

SEQ ID NO: 330484 - RNA, 19 nt, Artificial Sequence
  Description of Artificial Sequence: Synthetic oligonucleotide
  Antisense Strand to SEQ ID NO: 330483
uguuccauugcucaagcug

SEQ ID NO: 330485 - RNA, 19 nt, Artificial Sequence
  Description of Artificial Sequence: Synthetic oligonucleotide
  Sense Strand Starting at position 149 of SEQ ID NO: 317224
ucucaaugaucaguuaggu

SEQ ID NO: 330486 - RNA, 19 nt, Artificial Sequence
  Description of Artificial Sequence: Synthetic oligonucleotide
  Antisense Strand to SEQ ID NO: 330485
accuaacugaucauugaga

SEQ ID NO: 330487 - RNA, 19 nt, Artificial Sequence
  Description of Artificial Sequence: Synthetic oligonucleotide
  Sense Strand Starting at position 149 of SEQ ID NO: 317292
uguuaagguuucuuccaga

SEQ ID NO: 330488 - RNA, 19 nt, Artificial Sequence
  Description of Artificial Sequence: Synthetic oligonucleotide
  Antisense Strand to SEQ ID NO: 330487
ucuggaagaaaccuuaaca

SEQ ID NO: 330489 - RNA, 19 nt, Artificial Sequence
  Description of Artificial Sequence: Synthetic oligonucleotide
  Sense Strand Starting at position 149 of SEQ ID NO: 317297
agguuucuuccagauuguu

SEQ ID NO: 330490 - RNA, 19 nt, Artificial Sequence
  Description of Artificial Sequence: Synthetic oligonucleotide
  Antisense Strand to SEQ ID NO: 330489
aacaaucuggaagaaaccu

SEQ ID NO: 330491 - RNA, 19 nt, Artificial Sequence
  Description of Artificial Sequence: Synthetic oligonucleotide
  Sense Strand Starting at position 149 of SEQ ID NO: 317342
aucuuauuugugugucugu

SEQ ID NO: 330492 - RNA, 19 nt, Artificial Sequence
  Description of Artificial Sequence: Synthetic oligonucleotide
  Antisense Strand to SEQ ID NO: 330491
acagacacacaaauaagau

SEQ ID NO: 330493 - RNA, 19 nt, Artificial Sequence
  Description of Artificial Sequence: Synthetic oligonucleotide
  Sense Strand Starting at position 149 of SEQ ID NO: 317428
cagggugauucuccaugga

SEQ ID NO: 330494 - RNA, 19 nt, Artificial Sequence
  Description of Artificial Sequence: Synthetic oligonucleotide
  Antisense Strand to SEQ ID NO: 330493
uccauggagaaucacccug

SEQ ID NO: 330495 - RNA, 19 nt, Artificial Sequence
  Description of Artificial Sequence: Synthetic oligonucleotide
  Sense Strand Starting at position 149 of SEQ ID NO: 317431
ggugauucuccauggaagu

SEQ ID NO: 330496 - RNA, 19 nt, Artificial Sequence
  Description of Artificial Sequence: Synthetic oligonucleotide
  Antisense Strand to SEQ ID NO: 330495
acuuccauggagaaucacc

SEQ ID NO: 330497 - RNA, 19 nt, Artificial Sequence
  Description of Artificial Sequence: Synthetic oligonucleotide
  Sense Strand Starting at position 149 of SEQ ID NO: 317432
gugauucuccauggaaguu

SEQ ID NO: 330498 - RNA, 19 nt, Artificial Sequence
  Description of Artificial Sequence: Synthetic oligonucleotide
  Antisense Strand to SEQ ID NO: 330497
aacuuccauggagaaucac

SEQ ID NO: 330499 - RNA, 19 nt, Artificial Sequence
  Description of Artificial Sequence: Synthetic oligonucleotide
  Sense Strand Starting at position 149 of SEQ ID NO: 317461
gggauaugcaggcaucuuu

SEQ ID NO: 330500 - RNA, 19 nt, Artificial Sequence
  Description of Artificial Sequence: Synthetic oligonucleotide
  Antisense Strand to SEQ ID NO: 330499
aaagaugccugcauauccc

SEQ ID NO: 330501 - RNA, 19 nt, Artificial Sequence
  Description of Artificial Sequence: Synthetic oligonucleotide
  Sense Strand Starting at position 149 of SEQ ID NO: 317550
gaguuccugcaugacuuua

SEQ ID NO: 330502 - RNA, 19 nt, Artificial Sequence
  Description of Artificial Sequence: Synthetic oligonucleotide
  Antisense Strand to SEQ ID NO: 330501
uaaagucaugcaggaacuc

SEQ ID NO: 330503 - RNA, 19 nt, Artificial Sequence
  Description of Artificial Sequence: Synthetic oligonucleotide
  Sense Strand Starting at position 149 of SEQ ID NO: 317747
uuacuucugguuuaaugga

SEQ ID NO: 330504 - RNA, 19 nt, Artificial Sequence
  Description of Artificial Sequence: Synthetic oligonucleotide
  Antisense Strand to SEQ ID NO: 330503
uccauuaaaccagaaguaa

SEQ ID NO: 330505 - RNA, 19 nt, Artificial Sequence
  Description of Artificial Sequence: Synthetic oligonucleotide
  Sense Strand Starting at position 149 of SEQ ID NO: 317754
ugguuuaauggauggacca

SEQ ID NO: 330506 - RNA, 19 nt, Artificial Sequence
  Description of Artificial Sequence: Synthetic oligonucleotide
  Antisense Strand to SEQ ID NO: 330505
ugguccauccauuaaacca

SEQ ID NO: 330507 - RNA, 19 nt, Artificial Sequence
  Description of Artificial Sequence: Synthetic oligonucleotide
  Sense Strand Starting at position 149 of SEQ ID NO: 318106
guugguugugaauaauagu

SEQ ID NO: 330508 - RNA, 19 nt, Artificial Sequence
  Description of Artificial Sequence: Synthetic oligonucleotide
  Antisense Strand to SEQ ID NO: 330507
acuauuauucacaaccaac

SEQ ID NO: 330509 - RNA, 19 nt, Artificial Sequence
  Description of Artificial Sequence: Synthetic oligonucleotide
  Sense Strand Starting at position 149 of SEQ ID NO: 318112
ugugaauaauaguuacgga

SEQ ID NO: 330510 - RNA, 19 nt, Artificial Sequence
  Description of Artificial Sequence: Synthetic oligonucleotide
  Antisense Strand to SEQ ID NO: 330509
uccguaacuauuauucaca

SEQ ID NO: 330511 - RNA, 19 nt, Artificial Sequence
  Description of Artificial Sequence: Synthetic oligonucleotide
  Sense Strand Starting at position 149 of SEQ ID NO: 318242
guuagacccagugguuaag

SEQ ID NO: 330512 - RNA, 19 nt, Artificial Sequence
  Description of Artificial Sequence: Synthetic oligonucleotide
  Antisense Strand to SEQ ID NO: 330511
cuuaaccacugggucuaac

SEQ ID NO: 330513 - RNA, 19 nt, Artificial Sequence
  Description of Artificial Sequence: Synthetic oligonucleotide
  Sense Strand Starting at position 149 of SEQ ID NO: 318306
uguguauucucauugaaua

SEQ ID NO: 330514 - RNA, 19 nt, Artificial Sequence
  Description of Artificial Sequence: Synthetic oligonucleotide
  Antisense Strand to SEQ ID NO: 330513
uauucaaugagaauacaca

SEQ ID NO: 330515 - RNA, 19 nt, Artificial Sequence
  Description of Artificial Sequence: Synthetic oligonucleotide
  Sense Strand Starting at position 149 of SEQ ID NO: 318307
guguauucucauugaauac

SEQ ID NO: 330516 - RNA, 19 nt, Artificial Sequence
  Description of Artificial Sequence: Synthetic oligonucleotide
  Antisense Strand to SEQ ID NO: 330515
guauucaaugagaauacac

SEQ ID NO: 330517 - RNA, 19 nt, Artificial Sequence
  Description of Artificial Sequence: Synthetic oligonucleotide
  Sense Strand Starting at position 149 of SEQ ID NO: 318387
uggauuaucccaggguaau

SEQ ID NO: 330518 - RNA, 19 nt, Artificial Sequence
  Description of Artificial Sequence: Synthetic oligonucleotide
  Antisense Strand to SEQ ID NO: 330517
auuacccugggauaaucca

SEQ ID NO: 330519 - RNA, 19 nt, Artificial Sequence
  Description of Artificial Sequence: Synthetic oligonucleotide
  Sense Strand Starting at position 149 of SEQ ID NO: 318388
ggauuaucccaggguaaug

SEQ ID NO: 330520 - RNA, 19 nt, Artificial Sequence
  Description of Artificial Sequence: Synthetic oligonucleotide
  Antisense Strand to SEQ ID NO: 330519
cauuacccugggauaaucc

SEQ ID NO: 330521 - RNA, 19 nt, Artificial Sequence
  Description of Artificial Sequence: Synthetic oligonucleotide
  Sense Strand Starting at position 149 of SEQ ID NO: 318474
uggcuuuaggcucaggaaa

SEQ ID NO: 330522 - RNA, 19 nt, Artificial Sequence
  Description of Artificial Sequence: Synthetic oligonucleotide
  Antisense Strand to SEQ ID NO: 330521
uuuccugagccuaaagcca

SEQ ID NO: 330523 - RNA, 19 nt, Artificial Sequence
  Description of Artificial Sequence: Synthetic oligonucleotide
  Sense Strand Starting at position 149 of SEQ ID NO: 318589
ccaagugaucauuagcuuu

SEQ ID NO: 330524 - RNA, 19 nt, Artificial Sequence
  Description of Artificial Sequence: Synthetic oligonucleotide
  Antisense Strand to SEQ ID NO: 330523
aaagcuaaugaucacuugg

SEQ ID NO: 330525 - RNA, 19 nt, Artificial Sequence
  Description of Artificial Sequence: Synthetic oligonucleotide
  Sense Strand Starting at position 149 of SEQ ID NO: 318724
aggaaauccugcucucaag

SEQ ID NO: 330526 - RNA, 19 nt, Artificial Sequence
  Description of Artificial Sequence: Synthetic oligonucleotide
  Antisense Strand to SEQ ID NO: 330525
cuugagagcaggauuuccu

SEQ ID NO: 330527 - RNA, 19 nt, Artificial Sequence
  Description of Artificial Sequence: Synthetic oligonucleotide
  Sense Strand Starting at position 149 of SEQ ID NO: 318744
caggacagugugugagaaa

SEQ ID NO: 330528 - RNA, 19 nt, Artificial Sequence
  Description of Artificial Sequence: Synthetic oligonucleotide
  Antisense Strand to SEQ ID NO: 330527
uuucucacacacuguccug

SEQ ID NO: 330529 - RNA, 19 nt, Artificial Sequence
  Description of Artificial Sequence: Synthetic oligonucleotide
  Sense Strand Starting at position 149 of SEQ ID NO: 318942
ugaccauagucauuagcau

SEQ ID NO: 330530 - RNA, 19 nt, Artificial Sequence
  Description of Artificial Sequence: Synthetic oligonucleotide
  Antisense Strand to SEQ ID NO: 330529
augcuaaugacuaugguca

SEQ ID NO: 330531 - RNA, 19 nt, Artificial Sequence
  Description of Artificial Sequence: Synthetic oligonucleotide
  Sense Strand Starting at position 149 of SEQ ID NO: 319178
cuuagagguagaugcuauu

SEQ ID NO: 330532 - RNA, 19 nt, Artificial Sequence
  Description of Artificial Sequence: Synthetic oligonucleotide
  Antisense Strand to SEQ ID NO: 330531
aauagcaucuaccucuaag

SEQ ID NO: 330533 - RNA, 19 nt, Artificial Sequence
  Description of Artificial Sequence: Synthetic oligonucleotide
  Sense Strand Starting at position 150 of SEQ ID NO: 315294
uguggaauggcaugauuau

SEQ ID NO: 330534 - RNA, 19 nt, Artificial Sequence
  Description of Artificial Sequence: Synthetic oligonucleotide
  Antisense Strand to SEQ ID NO: 330533
auaaucaugccauuccaca

SEQ ID NO: 330535 - RNA, 19 nt, Artificial Sequence
  Description of Artificial Sequence: Synthetic oligonucleotide
  Sense Strand Starting at position 150 of SEQ ID NO: 315295
guggaauggcaugauuauu

SEQ ID NO: 330536 - RNA, 19 nt, Artificial Sequence
  Description of Artificial Sequence: Synthetic oligonucleotide
  Antisense Strand to SEQ ID NO: 330535
aauaaucaugccauuccac

SEQ ID NO: 330537 - RNA, 19 nt, Artificial Sequence
  Description of Artificial Sequence: Synthetic oligonucleotide
  Sense Strand Starting at position 150 of SEQ ID NO: 315344
ggagcaaauguauguaaag

SEQ ID NO: 330538 - RNA, 19 nt, Artificial Sequence
  Description of Artificial Sequence: Synthetic oligonucleotide
  Antisense Strand to SEQ ID NO: 330537
cuuuacauacauuugcucc

SEQ ID NO: 330539 - RNA, 19 nt, Artificial Sequence
  Description of Artificial Sequence: Synthetic oligonucleotide
  Sense Strand Starting at position 150 of SEQ ID NO: 315353
guauguaaagcgcuucgga

SEQ ID NO: 330540 - RNA, 19 nt, Artificial Sequence
  Description of Artificial Sequence: Synthetic oligonucleotide
  Antisense Strand to SEQ ID NO: 330539
uccgaagcgcuuuacauac

SEQ ID NO: 330541 - RNA, 19 nt, Artificial Sequence
  Description of Artificial Sequence: Synthetic oligonucleotide
  Sense Strand Starting at position 150 of SEQ ID NO: 315757
gacugagacuuucugacuc

SEQ ID NO: 330542 - RNA, 19 nt, Artificial Sequence
  Description of Artificial Sequence: Synthetic oligonucleotide
  Antisense Strand to SEQ ID NO: 330541
gagucagaaagucucaguc

SEQ ID NO: 330543 - RNA, 19 nt, Artificial Sequence
  Description of Artificial Sequence: Synthetic oligonucleotide
  Sense Strand Starting at position 150 of SEQ ID NO: 316041
gguacucugagcuaggaau

SEQ ID NO: 330544 - RNA, 19 nt, Artificial Sequence
  Description of Artificial Sequence: Synthetic oligonucleotide
  Antisense Strand to SEQ ID NO: 330543
auuccuagcucagaguacc

SEQ ID NO: 330545 - RNA, 19 nt, Artificial Sequence
  Description of Artificial Sequence: Synthetic oligonucleotide
  Sense Strand Starting at position 150 of SEQ ID NO: 316479
gucuuagcucuggauuaua

SEQ ID NO: 330546 - RNA, 19 nt, Artificial Sequence
  Description of Artificial Sequence: Synthetic oligonucleotide
  Antisense Strand to SEQ ID NO: 330545
uauaauccagagcuaagac

SEQ ID NO: 330547 - RNA, 19 nt, Artificial Sequence
  Description of Artificial Sequence: Synthetic oligonucleotide
  Sense Strand Starting at position 150 of SEQ ID NO: 316489
uggauuauauguccuugaa

SEQ ID NO: 330548 - RNA, 19 nt, Artificial Sequence
  Description of Artificial Sequence: Synthetic oligonucleotide
  Antisense Strand to SEQ ID NO: 330547
uucaaggacauauaaucca

SEQ ID NO: 330549 - RNA, 19 nt, Artificial Sequence
  Description of Artificial Sequence: Synthetic oligonucleotide
  Sense Strand Starting at position 150 of SEQ ID NO: 316491
gauuauauguccuugaagg

SEQ ID NO: 330550 - RNA, 19 nt, Artificial Sequence
  Description of Artificial Sequence: Synthetic oligonucleotide
  Antisense Strand to SEQ ID NO: 330549
ccuucaaggacauauaauc

SEQ ID NO: 330551 - RNA, 19 nt, Artificial Sequence
  Description of Artificial Sequence: Synthetic oligonucleotide
  Sense Strand Starting at position 150 of SEQ ID NO: 316492
auuauauguccuugaaggg

SEQ ID NO: 330552 - RNA, 19 nt, Artificial Sequence
  Description of Artificial Sequence: Synthetic oligonucleotide
  Antisense Strand to SEQ ID NO: 330551
cccuucaaggacauauaau

SEQ ID NO: 330553 - RNA, 19 nt, Artificial Sequence
  Description of Artificial Sequence: Synthetic oligonucleotide
  Sense Strand Starting at position 150 of SEQ ID NO: 316493
uuauauguccuugaagggu

SEQ ID NO: 330554 - RNA, 19 nt, Artificial Sequence
  Description of Artificial Sequence: Synthetic oligonucleotide
  Antisense Strand to SEQ ID NO: 330553
acccuucaaggacauauaa

SEQ ID NO: 330555 - RNA, 19 nt, Artificial Sequence
  Description of Artificial Sequence: Synthetic oligonucleotide
  Sense Strand Starting at position 150 of SEQ ID NO: 316956
ugggaaaucuuuccagacu

SEQ ID NO: 330556 - RNA, 19 nt, Artificial Sequence
  Description of Artificial Sequence: Synthetic oligonucleotide
  Antisense Strand to SEQ ID NO: 330555
agucuggaaagauuuccca

SEQ ID NO: 330557 - RNA, 19 nt, Artificial Sequence
  Description of Artificial Sequence: Synthetic oligonucleotide
  Sense Strand Starting at position 150 of SEQ ID NO: 317164
guuacuuugggacaaagca

SEQ ID NO: 330558 - RNA, 19 nt, Artificial Sequence
  Description of Artificial Sequence: Synthetic oligonucleotide
  Antisense Strand to SEQ ID NO: 330557
ugcuuugucccaaaguaac

SEQ ID NO: 330559 - RNA, 19 nt, Artificial Sequence
  Description of Artificial Sequence: Synthetic oligonucleotide
  Sense Strand Starting at position 150 of SEQ ID NO: 317196
cgggaucuuccaggacuuu

SEQ ID NO: 330560 - RNA, 19 nt, Artificial Sequence
  Description of Artificial Sequence: Synthetic oligonucleotide
  Antisense Strand to SEQ ID NO: 330559
aaaguccuggaagaucccg

SEQ ID NO: 330561 - RNA, 19 nt, Artificial Sequence
  Description of Artificial Sequence: Synthetic oligonucleotide
  Sense Strand Starting at position 150 of SEQ ID NO: 317269
uuccaaacagucugaguua

SEQ ID NO: 330562 - RNA, 19 nt, Artificial Sequence
  Description of Artificial Sequence: Synthetic oligonucleotide
  Antisense Strand to SEQ ID NO: 330561
uaacucagacuguuuggaa

SEQ ID NO: 330563 - RNA, 19 nt, Artificial Sequence
  Description of Artificial Sequence: Synthetic oligonucleotide
  Sense Strand Starting at position 150 of SEQ ID NO: 317278
gucugaguuacugagacac

SEQ ID NO: 330564 - RNA, 19 nt, Artificial Sequence
  Description of Artificial Sequence: Synthetic oligonucleotide
  Antisense Strand to SEQ ID NO: 330563
gugucucaguaacucagac

SEQ ID NO: 330565 - RNA, 19 nt, Artificial Sequence
  Description of Artificial Sequence: Synthetic oligonucleotide
  Sense Strand Starting at position 150 of SEQ ID NO: 317365
accugagagucacccagau

SEQ ID NO: 330566 - RNA, 19 nt, Artificial Sequence
  Description of Artificial Sequence: Synthetic oligonucleotide
  Antisense Strand to SEQ ID NO: 330565
aucugggugacucucaggu

SEQ ID NO: 330567 - RNA, 19 nt, Artificial Sequence
  Description of Artificial Sequence: Synthetic oligonucleotide
  Sense Strand Starting at position 150 of SEQ ID NO: 317421
gugucaagugacuaagauu

SEQ ID NO: 330568 - RNA, 19 nt, Artificial Sequence
  Description of Artificial Sequence: Synthetic oligonucleotide
  Antisense Strand to SEQ ID NO: 330567
aaucuuagucacuugacac

SEQ ID NO: 330569 - RNA, 19 nt, Artificial Sequence
  Description of Artificial Sequence: Synthetic oligonucleotide
  Sense Strand Starting at position 150 of SEQ ID NO: 317613
gaggaauggccaggguaug

SEQ ID NO: 330570 - RNA, 19 nt, Artificial Sequence
  Description of Artificial Sequence: Synthetic oligonucleotide
  Antisense Strand to SEQ ID NO: 330569
cauacccuggccauuccuc

SEQ ID NO: 330571 - RNA, 19 nt, Artificial Sequence
  Description of Artificial Sequence: Synthetic oligonucleotide
  Sense Strand Starting at position 150 of SEQ ID NO: 317624
aggguaugccauggagaaa

SEQ ID NO: 330572 - RNA, 19 nt, Artificial Sequence
  Description of Artificial Sequence: Synthetic oligonucleotide
  Antisense Strand to SEQ ID NO: 330571
uuucuccauggcauacccu

SEQ ID NO: 330573 - RNA, 19 nt, Artificial Sequence
  Description of Artificial Sequence: Synthetic oligonucleotide
  Sense Strand Starting at position 150 of SEQ ID NO: 317782
gugguugcgaaagauagga

SEQ ID NO: 330574 - RNA, 19 nt, Artificial Sequence
  Description of Artificial Sequence: Synthetic oligonucleotide
  Antisense Strand to SEQ ID NO: 330573
uccuaucuuucgcaaccac

SEQ ID NO: 330575 - RNA, 19 nt, Artificial Sequence
  Description of Artificial Sequence: Synthetic oligonucleotide
  Sense Strand Starting at position 150 of SEQ ID NO: 317786
uugcgaaagauaggaugua

SEQ ID NO: 330576 - RNA, 19 nt, Artificial Sequence
  Description of Artificial Sequence: Synthetic oligonucleotide
  Antisense Strand to SEQ ID NO: 330575
uacauccuaucuuucgcaa

SEQ ID NO: 330577 - RNA, 19 nt, Artificial Sequence
  Description of Artificial Sequence: Synthetic oligonucleotide
  Sense Strand Starting at position 150 of SEQ ID NO: 317889
caucuuugagagugguuga

SEQ ID NO: 330578 - RNA, 19 nt, Artificial Sequence
  Description of Artificial Sequence: Synthetic oligonucleotide
  Antisense Strand to SEQ ID NO: 330577
ucaaccacucucaaagaug

SEQ ID NO: 330579 - RNA, 19 nt, Artificial Sequence
  Description of Artificial Sequence: Synthetic oligonucleotide
  Sense Strand Starting at position 150 of SEQ ID NO: 317890
aucuuugagagugguugaa

SEQ ID NO: 330580 - RNA, 19 nt, Artificial Sequence
  Description of Artificial Sequence: Synthetic oligonucleotide
  Antisense Strand to SEQ ID NO: 330579
uucaaccacucucaaagau

SEQ ID NO: 330581 - RNA, 19 nt, Artificial Sequence
  Description of Artificial Sequence: Synthetic oligonucleotide
  Sense Strand Starting at position 150 of SEQ ID NO: 317892
cuuugagagugguugaaua

SEQ ID NO: 330582 - RNA, 19 nt, Artificial Sequence
  Description of Artificial Sequence: Synthetic oligonucleotide
  Antisense Strand to SEQ ID NO: 330581
uauucaaccacucucaaag

SEQ ID NO: 330583 - RNA, 19 nt, Artificial Sequence
  Description of Artificial Sequence: Synthetic oligonucleotide
  Sense Strand Starting at position 150 of SEQ ID NO: 317927
uuguuucuugagcaagaau

SEQ ID NO: 330584 - RNA, 19 nt, Artificial Sequence
  Description of Artificial Sequence: Synthetic oligonucleotide
  Antisense Strand to SEQ ID NO: 330583
auucuugcucaagaaacaa

SEQ ID NO: 330585 - RNA, 19 nt, Artificial Sequence
  Description of Artificial Sequence: Synthetic oligonucleotide
  Sense Strand Starting at position 150 of SEQ ID NO: 318107
ugugauguuguugcuaguu

SEQ ID NO: 330586 - RNA, 19 nt, Artificial Sequence
  Description of Artificial Sequence: Synthetic oligonucleotide
  Antisense Strand to SEQ ID NO: 330585
aacuagcaacaacaucaca

SEQ ID NO: 330587 - RNA, 19 nt, Artificial Sequence
  Description of Artificial Sequence: Synthetic oligonucleotide
  Sense Strand Starting at position 150 of SEQ ID NO: 318119
gcuaguugaauagaaggua

SEQ ID NO: 330588 - RNA, 19 nt, Artificial Sequence
  Description of Artificial Sequence: Synthetic oligonucleotide
  Antisense Strand to SEQ ID NO: 330587
uaccuucuauucaacuagc

SEQ ID NO: 330589 - RNA, 19 nt, Artificial Sequence
  Description of Artificial Sequence: Synthetic oligonucleotide
  Sense Strand Starting at position 150 of SEQ ID NO: 318122
aguugaauagaagguaagu

SEQ ID NO: 330590 - RNA, 19 nt, Artificial Sequence
  Description of Artificial Sequence: Synthetic oligonucleotide
  Antisense Strand to SEQ ID NO: 330589
acuuaccuucuauucaacu

SEQ ID NO: 330591 - RNA, 19 nt, Artificial Sequence
  Description of Artificial Sequence: Synthetic oligonucleotide
  Sense Strand Starting at position 150 of SEQ ID NO: 318224
cagugaacaucagugggaa

SEQ ID NO: 330592 - RNA, 19 nt, Artificial Sequence
  Description of Artificial Sequence: Synthetic oligonucleotide
  Antisense Strand to SEQ ID NO: 330591
uucccacugauguucacug

SEQ ID NO: 330593 - RNA, 19 nt, Artificial Sequence
  Description of Artificial Sequence: Synthetic oligonucleotide
  Sense Strand Starting at position 150 of SEQ ID NO: 318357
agcuauuaucuaugugaaa

SEQ ID NO: 330594 - RNA, 19 nt, Artificial Sequence
  Description of Artificial Sequence: Synthetic oligonucleotide
  Antisense Strand to SEQ ID NO: 330593
uuucacauagauaauagcu

SEQ ID NO: 330595 - RNA, 19 nt, Artificial Sequence
  Description of Artificial Sequence: Synthetic oligonucleotide
  Sense Strand Starting at position 150 of SEQ ID NO: 318368
augugaaauuggccacaau

SEQ ID NO: 330596 - RNA, 19 nt, Artificial Sequence
  Description of Artificial Sequence: Synthetic oligonucleotide
  Antisense Strand to SEQ ID NO: 330595
auuguggccaauuucacau

SEQ ID NO: 330597 - RNA, 19 nt, Artificial Sequence
  Description of Artificial Sequence: Synthetic oligonucleotide
  Sense Strand Starting at position 150 of SEQ ID NO: 318369
ugugaaauuggccacaaug

SEQ ID NO: 330598 - RNA, 19 nt, Artificial Sequence
  Description of Artificial Sequence: Synthetic oligonucleotide
  Antisense Strand to SEQ ID NO: 330597
cauuguggccaauuucaca

SEQ ID NO: 330599 - RNA, 19 nt, Artificial Sequence
  Description of Artificial Sequence: Synthetic oligonucleotide
  Sense Strand Starting at position 150 of SEQ ID NO: 318371
ugaaauuggccacaauggu

SEQ ID NO: 330600 - RNA, 19 nt, Artificial Sequence
  Description of Artificial Sequence: Synthetic oligonucleotide
  Antisense Strand to SEQ ID NO: 330599
accauuguggccaauuuca

SEQ ID NO: 330601 - RNA, 19 nt, Artificial Sequence
  Description of Artificial Sequence: Synthetic oligonucleotide
  Sense Strand Starting at position 150 of SEQ ID NO: 318389
uugcuuccucgggaucaga

SEQ ID NO: 330602 - RNA, 19 nt, Artificial Sequence
  Description of Artificial Sequence: Synthetic oligonucleotide
  Antisense Strand to SEQ ID NO: 330601
ucugaucccgaggaagcaa

SEQ ID NO: 330603 - RNA, 19 nt, Artificial Sequence
  Description of Artificial Sequence: Synthetic oligonucleotide
  Sense Strand Starting at position 150 of SEQ ID NO: 318400
ggaucagauuccucaccuu

SEQ ID NO: 330604 - RNA, 19 nt, Artificial Sequence
  Description of Artificial Sequence: Synthetic oligonucleotide
  Antisense Strand to SEQ ID NO: 330603
aaggugaggaaucugaucc

SEQ ID NO: 330605 - RNA, 19 nt, Artificial Sequence
  Description of Artificial Sequence: Synthetic oligonucleotide
  Sense Strand Starting at position 150 of SEQ ID NO: 318475
uugauagagauacgguauu

SEQ ID NO: 330606 - RNA, 19 nt, Artificial Sequence
  Description of Artificial Sequence: Synthetic oligonucleotide
  Antisense Strand to SEQ ID NO: 330605
aauaccguaucucuaucaa

SEQ ID NO: 330607 - RNA, 19 nt, Artificial Sequence
  Description of Artificial Sequence: Synthetic oligonucleotide
  Sense Strand Starting at position 150 of SEQ ID NO: 318488
gguauuuaguuaucacugu

SEQ ID NO: 330608 - RNA, 19 nt, Artificial Sequence
  Description of Artificial Sequence: Synthetic oligonucleotide
  Antisense Strand to SEQ ID NO: 330607
acagugauaacuaaauacc

SEQ ID NO: 330609 - RNA, 19 nt, Artificial Sequence
  Description of Artificial Sequence: Synthetic oligonucleotide
  Sense Strand Starting at position 150 of SEQ ID NO: 318854
acccaagcaugguugauau

SEQ ID NO: 330610 - RNA, 19 nt, Artificial Sequence
  Description of Artificial Sequence: Synthetic oligonucleotide
  Antisense Strand to SEQ ID NO: 330609
auaucaaccaugcuugggu

SEQ ID NO: 330611 - RNA, 19 nt, Artificial Sequence
  Description of Artificial Sequence: Synthetic oligonucleotide
  Sense Strand Starting at position 150 of SEQ ID NO: 319145
guaaauuucucaguggccu

SEQ ID NO: 330612 - RNA, 19 nt, Artificial Sequence
  Description of Artificial Sequence: Synthetic oligonucleotide
  Antisense Strand to SEQ ID NO: 330611
aggccacugagaaauuuac

SEQ ID NO: 330613 - RNA, 19 nt, Artificial Sequence
  Description of Artificial Sequence: Synthetic oligonucleotide
  Sense Strand Starting at position 151 of SEQ ID NO: 315252
uuaguuauaugacugcaca

SEQ ID NO: 330614 - RNA, 19 nt, Artificial Sequence
  Description of Artificial Sequence: Synthetic oligonucleotide
  Antisense Strand to SEQ ID NO: 330613
ugugcagucauauaacuaa

SEQ ID NO: 330615 - RNA, 19 nt, Artificial Sequence
  Description of Artificial Sequence: Synthetic oligonucleotide
  Sense Strand Starting at position 151 of SEQ ID NO: 315255
guuauaugacugcacacaa

SEQ ID NO: 330616 - RNA, 19 nt, Artificial Sequence
  Description of Artificial Sequence: Synthetic oligonucleotide
  Antisense Strand to SEQ ID NO: 330615
uugugugcagucauauaac

SEQ ID NO: 330617 - RNA, 19 nt, Artificial Sequence
  Description of Artificial Sequence: Synthetic oligonucleotide
  Sense Strand Starting at position 151 of SEQ ID NO: 315283
cuauucuucuguuuacaga

SEQ ID NO: 330618 - RNA, 19 nt, Artificial Sequence
  Description of Artificial Sequence: Synthetic oligonucleotide
  Antisense Strand to SEQ ID NO: 330617
ucuguaaacagaagaauag

SEQ ID NO: 330619 - RNA, 19 nt, Artificial Sequence
  Description of Artificial Sequence: Synthetic oligonucleotide
  Sense Strand Starting at position 151 of SEQ ID NO: 315394
caaccuggagcuuguuaga

SEQ ID NO: 330620 - RNA, 19 nt, Artificial Sequence
  Description of Artificial Sequence: Synthetic oligonucleotide
  Antisense Strand to SEQ ID NO: 330619
ucuaacaagcuccagguug

SEQ ID NO: 330621 - RNA, 19 nt, Artificial Sequence
  Description of Artificial Sequence: Synthetic oligonucleotide
  Sense Strand Starting at position 151 of SEQ ID NO: 315403
gcuuguuagaagcagaauu

SEQ ID NO: 330622 - RNA, 19 nt, Artificial Sequence
  Description of Artificial Sequence: Synthetic oligonucleotide
  Antisense Strand to SEQ ID NO: 330621
aauucugcuucuaacaagc

SEQ ID NO: 330623 - RNA, 19 nt, Artificial Sequence
  Description of Artificial Sequence: Synthetic oligonucleotide
  Sense Strand Starting at position 151 of SEQ ID NO: 315499
guuugagaagacuaggucu

SEQ ID NO: 330624 - RNA, 19 nt, Artificial Sequence
  Description of Artificial Sequence: Synthetic oligonucleotide
  Antisense Strand to SEQ ID NO: 330623
agaccuagucuucucaaac

SEQ ID NO: 330625 - RNA, 19 nt, Artificial Sequence
  Description of Artificial Sequence: Synthetic oligonucleotide
  Sense Strand Starting at position 151 of SEQ ID NO: 315507
agacuaggucucgaguaug

SEQ ID NO: 330626 - RNA, 19 nt, Artificial Sequence
  Description of Artificial Sequence: Synthetic oligonucleotide
  Antisense Strand to SEQ ID NO: 330625
cauacucgagaccuagucu

SEQ ID NO: 330627 - RNA, 19 nt, Artificial Sequence
  Description of Artificial Sequence: Synthetic oligonucleotide
  Sense Strand Starting at position 151 of SEQ ID NO: 315632
acacuugaaguuuauaguu

SEQ ID NO: 330628 - RNA, 19 nt, Artificial Sequence
  Description of Artificial Sequence: Synthetic oligonucleotide
  Antisense Strand to SEQ ID NO: 330627
aacuauaaacuucaagugu

SEQ ID NO: 330629 - RNA, 19 nt, Artificial Sequence
  Description of Artificial Sequence: Synthetic oligonucleotide
  Sense Strand Starting at position 151 of SEQ ID NO: 315728
uccaaagaugcugaguaua

SEQ ID NO: 330630 - RNA, 19 nt, Artificial Sequence
  Description of Artificial Sequence: Synthetic oligonucleotide
  Antisense Strand to SEQ ID NO: 330629
uauacucagcaucuuugga

SEQ ID NO: 330631 - RNA, 19 nt, Artificial Sequence
  Description of Artificial Sequence: Synthetic oligonucleotide
  Sense Strand Starting at position 151 of SEQ ID NO: 315730
caaagaugcugaguauacu

SEQ ID NO: 330632 - RNA, 19 nt, Artificial Sequence
  Description of Artificial Sequence: Synthetic oligonucleotide
  Antisense Strand to SEQ ID NO: 330631
aguauacucagcaucuuug

SEQ ID NO: 330633 - RNA, 19 nt, Artificial Sequence
  Description of Artificial Sequence: Synthetic oligonucleotide
  Sense Strand Starting at position 151 of SEQ ID NO: 315731
aaagaugcugaguauacuu

SEQ ID NO: 330634 - RNA, 19 nt, Artificial Sequence
  Description of Artificial Sequence: Synthetic oligonucleotide
  Antisense Strand to SEQ ID NO: 330633
aaguauacucagcaucuuu

SEQ ID NO: 330635 - RNA, 19 nt, Artificial Sequence
  Description of Artificial Sequence: Synthetic oligonucleotide
  Sense Strand Starting at position 151 of SEQ ID NO: 315977
ggucuuaauucuuuggaac

SEQ ID NO: 330636 - RNA, 19 nt, Artificial Sequence
  Description of Artificial Sequence: Synthetic oligonucleotide
  Antisense Strand to SEQ ID NO: 330635
guuccaaagaauuaagacc

SEQ ID NO: 330637 - RNA, 19 nt, Artificial Sequence
  Description of Artificial Sequence: Synthetic oligonucleotide
  Sense Strand Starting at position 151 of SEQ ID NO: 315978
gucuuaauucuuuggaacu

SEQ ID NO: 330638 - RNA, 19 nt, Artificial Sequence
  Description of Artificial Sequence: Synthetic oligonucleotide
  Antisense Strand to SEQ ID NO: 330637
aguuccaaagaauuaagac

SEQ ID NO: 330639 - RNA, 19 nt, Artificial Sequence
  Description of Artificial Sequence: Synthetic oligonucleotide
  Sense Strand Starting at position 151 of SEQ ID NO: 316012
caugguucggagugacaaa

SEQ ID NO: 330640 - RNA, 19 nt, Artificial Sequence
  Description of Artificial Sequence: Synthetic oligonucleotide
  Antisense Strand to SEQ ID NO: 330639
uuugucacuccgaaccaug

SEQ ID NO: 330641 - RNA, 19 nt, Artificial Sequence
  Description of Artificial Sequence: Synthetic oligonucleotide
  Sense Strand Starting at position 151 of SEQ ID NO: 316013
augguucggagugacaaau

SEQ ID NO: 330642 - RNA, 19 nt, Artificial Sequence
  Description of Artificial Sequence: Synthetic oligonucleotide
  Antisense Strand to SEQ ID NO: 330641
auuugucacuccgaaccau

SEQ ID NO: 330643 - RNA, 19 nt, Artificial Sequence
  Description of Artificial Sequence: Synthetic oligonucleotide
  Sense Strand Starting at position 151 of SEQ ID NO: 316019
cggagugacaaaugacuuu

SEQ ID NO: 330644 - RNA, 19 nt, Artificial Sequence
  Description of Artificial Sequence: Synthetic oligonucleotide
  Antisense Strand to SEQ ID NO: 330643
aaagucauuugucacuccg

SEQ ID NO: 330645 - RNA, 19 nt, Artificial Sequence
  Description of Artificial Sequence: Synthetic oligonucleotide
  Sense Strand Starting at position 151 of SEQ ID NO: 316544
uuaaaugacuuauuccgaa

SEQ ID NO: 330646 - RNA, 19 nt, Artificial Sequence
  Description of Artificial Sequence: Synthetic oligonucleotide
  Antisense Strand to SEQ ID NO: 330645
uucggaauaagucauuuaa

SEQ ID NO: 330647 - RNA, 19 nt, Artificial Sequence
  Description of Artificial Sequence: Synthetic oligonucleotide
  Sense Strand Starting at position 151 of SEQ ID NO: 316705
gccaacauucccgaggauu

SEQ ID NO: 330648 - RNA, 19 nt, Artificial Sequence
  Description of Artificial Sequence: Synthetic oligonucleotide
  Antisense Strand to SEQ ID NO: 330647
aauccucgggaauguuggc

SEQ ID NO: 330649 - RNA, 19 nt, Artificial Sequence
  Description of Artificial Sequence: Synthetic oligonucleotide
  Sense Strand Starting at position 151 of SEQ ID NO: 317602
gcgaugucgcgcgcaauuu

SEQ ID NO: 330650 - RNA, 19 nt, Artificial Sequence
  Description of Artificial Sequence: Synthetic oligonucleotide
  Antisense Strand to SEQ ID NO: 330649
aaauugcgcgcgacaucgc

SEQ ID NO: 330651 - RNA, 19 nt, Artificial Sequence
  Description of Artificial Sequence: Synthetic oligonucleotide
  Sense Strand Starting at position 151 of SEQ ID NO: 317843
acacacauuuacgagagaa

SEQ ID NO: 330652 - RNA, 19 nt, Artificial Sequence
  Description of Artificial Sequence: Synthetic oligonucleotide
  Antisense Strand to SEQ ID NO: 330651
uucucucguaaaugugugu

SEQ ID NO: 330653 - RNA, 19 nt, Artificial Sequence
  Description of Artificial Sequence: Synthetic oligonucleotide
  Sense Strand Starting at position 151 of SEQ ID NO: 317937
uugaucaguugacauuuaa

SEQ ID NO: 330654 - RNA, 19 nt, Artificial Sequence
  Description of Artificial Sequence: Synthetic oligonucleotide
  Antisense Strand to SEQ ID NO: 330653
uuaaaugucaacugaucaa

SEQ ID NO: 330655 - RNA, 19 nt, Artificial Sequence
  Description of Artificial Sequence: Synthetic oligonucleotide
  Sense Strand Starting at position 151 of SEQ ID NO: 317966
gccauuuaguagcugaaau

SEQ ID NO: 330656 - RNA, 19 nt, Artificial Sequence
  Description of Artificial Sequence: Synthetic oligonucleotide
  Antisense Strand to SEQ ID NO: 330655
auuucagcuacuaaauggc

SEQ ID NO: 330657 - RNA, 19 nt, Artificial Sequence
  Description of Artificial Sequence: Synthetic oligonucleotide
  Sense Strand Starting at position 151 of SEQ ID NO: 317995
gcagauccuggugagcaaa

SEQ ID NO: 330658 - RNA, 19 nt, Artificial Sequence
  Description of Artificial Sequence: Synthetic oligonucleotide
  Antisense Strand to SEQ ID NO: 330657
uuugcucaccaggaucugc

SEQ ID NO: 330659 - RNA, 19 nt, Artificial Sequence
  Description of Artificial Sequence: Synthetic oligonucleotide
  Sense Strand Starting at position 151 of SEQ ID NO: 317997
agauccuggugagcaaauu

SEQ ID NO: 330660 - RNA, 19 nt, Artificial Sequence
  Description of Artificial Sequence: Synthetic oligonucleotide
  Antisense Strand to SEQ ID NO: 330659
aauuugcucaccaggaucu

SEQ ID NO: 330661 - RNA, 19 nt, Artificial Sequence
  Description of Artificial Sequence: Synthetic oligonucleotide
  Sense Strand Starting at position 151 of SEQ ID NO: 318244
ucuggaggcagagguuaua

SEQ ID NO: 330662 - RNA, 19 nt, Artificial Sequence
  Description of Artificial Sequence: Synthetic oligonucleotide
  Antisense Strand to SEQ ID NO: 330661
uauaaccucugccuccaga

SEQ ID NO: 330663 - RNA, 19 nt, Artificial Sequence
  Description of Artificial Sequence: Synthetic oligonucleotide
  Sense Strand Starting at position 151 of SEQ ID NO: 318253
agagguuauaguuagccga

SEQ ID NO: 330664 - RNA, 19 nt, Artificial Sequence
  Description of Artificial Sequence: Synthetic oligonucleotide
  Antisense Strand to SEQ ID NO: 330663
ucggcuaacuauaaccucu

SEQ ID NO: 330665 - RNA, 19 nt, Artificial Sequence
  Description of Artificial Sequence: Synthetic oligonucleotide
  Sense Strand Starting at position 151 of SEQ ID NO: 318364
acauguaguccuuaaagca

SEQ ID NO: 330666 - RNA, 19 nt, Artificial Sequence
  Description of Artificial Sequence: Synthetic oligonucleotide
  Antisense Strand to SEQ ID NO: 330665
ugcuuuaaggacuacaugu

SEQ ID NO: 330667 - RNA, 19 nt, Artificial Sequence
  Description of Artificial Sequence: Synthetic oligonucleotide
  Sense Strand Starting at position 151 of SEQ ID NO: 318483
auguuagcuauugaagguu

SEQ ID NO: 330668 - RNA, 19 nt, Artificial Sequence
  Description of Artificial Sequence: Synthetic oligonucleotide
  Antisense Strand to SEQ ID NO: 330667
aaccuucaauagcuaacau

SEQ ID NO: 330669 - RNA, 19 nt, Artificial Sequence
  Description of Artificial Sequence: Synthetic oligonucleotide
  Sense Strand Starting at position 151 of SEQ ID NO: 318545
guuguuaguaaagagauga

SEQ ID NO: 330670 - RNA, 19 nt, Artificial Sequence
  Description of Artificial Sequence: Synthetic oligonucleotide
  Antisense Strand to SEQ ID NO: 330669
ucaucucuuuacuaacaac

SEQ ID NO: 330671 - RNA, 19 nt, Artificial Sequence
  Description of Artificial Sequence: Synthetic oligonucleotide
  Sense Strand Starting at position 151 of SEQ ID NO: 318749
uauauagucggccaggaga

SEQ ID NO: 330672 - RNA, 19 nt, Artificial Sequence
  Description of Artificial Sequence: Synthetic oligonucleotide
  Antisense Strand to SEQ ID NO: 330671
ucuccuggccgacuauaua

SEQ ID NO: 330673 - RNA, 19 nt, Artificial Sequence
  Description of Artificial Sequence: Synthetic oligonucleotide
  Sense Strand Starting at position 151 of SEQ ID NO: 318809
ggauguuaguacuuuauac

SEQ ID NO: 330674 - RNA, 19 nt, Artificial Sequence
  Description of Artificial Sequence: Synthetic oligonucleotide
  Antisense Strand to SEQ ID NO: 330673
guauaaaguacuaacaucc

SEQ ID NO: 330675 - RNA, 19 nt, Artificial Sequence
  Description of Artificial Sequence: Synthetic oligonucleotide
  Sense Strand Starting at position 151 of SEQ ID NO: 318811
auguuaguacuuuauacag

SEQ ID NO: 330676 - RNA, 19 nt, Artificial Sequence
  Description of Artificial Sequence: Synthetic oligonucleotide
  Antisense Strand to SEQ ID NO: 330675
cuguauaaaguacuaacau

SEQ ID NO: 330677 - RNA, 19 nt, Artificial Sequence
  Description of Artificial Sequence: Synthetic oligonucleotide
  Sense Strand Starting at position 151 of SEQ ID NO: 318836
aggaaagcuucuuuaagug

SEQ ID NO: 330678 - RNA, 19 nt, Artificial Sequence
  Description of Artificial Sequence: Synthetic oligonucleotide
  Antisense Strand to SEQ ID NO: 330677
cacuuaaagaagcuuuccu

SEQ ID NO: 330679 - RNA, 19 nt, Artificial Sequence
  Description of Artificial Sequence: Synthetic oligonucleotide
  Sense Strand Starting at position 151 of SEQ ID NO: 318844
uucuuuaagugacugaaga

SEQ ID NO: 330680 - RNA, 19 nt, Artificial Sequence
  Description of Artificial Sequence: Synthetic oligonucleotide
  Antisense Strand to SEQ ID NO: 330679
ucuucagucacuuaaagaa

SEQ ID NO: 330681 - RNA, 19 nt, Artificial Sequence
  Description of Artificial Sequence: Synthetic oligonucleotide
  Sense Strand Starting at position 151 of SEQ ID NO: 318845
ucuuuaagugacugaagau

SEQ ID NO: 330682 - RNA, 19 nt, Artificial Sequence
  Description of Artificial Sequence: Synthetic oligonucleotide
  Antisense Strand to SEQ ID NO: 330681
aucuucagucacuuaaaga

SEQ ID NO: 330683 - RNA, 19 nt, Artificial Sequence
  Description of Artificial Sequence: Synthetic oligonucleotide
  Sense Strand Starting at position 151 of SEQ ID NO: 318854
gacugaagaucagaagaaa

SEQ ID NO: 330684 - RNA, 19 nt, Artificial Sequence
  Description of Artificial Sequence: Synthetic oligonucleotide
  Antisense Strand to SEQ ID NO: 330683
uuucuucugaucuucaguc

SEQ ID NO: 330685 - RNA, 19 nt, Artificial Sequence
  Description of Artificial Sequence: Synthetic oligonucleotide
  Sense Strand Starting at position 151 of SEQ ID NO: 318992
ugcagucaagacugaucua

SEQ ID NO: 330686 - RNA, 19 nt, Artificial Sequence
  Description of Artificial Sequence: Synthetic oligonucleotide
  Antisense Strand to SEQ ID NO: 330685
uagaucagucuugacugca

SEQ ID NO: 330687 - RNA, 19 nt, Artificial Sequence
  Description of Artificial Sequence: Synthetic oligonucleotide
  Sense Strand Starting at position 151 of SEQ ID NO: 319015
aggguuucuuaaucauaga

SEQ ID NO: 330688 - RNA, 19 nt, Artificial Sequence
  Description of Artificial Sequence: Synthetic oligonucleotide
  Antisense Strand to SEQ ID NO: 330687
ucuaugauuaagaaacccu

SEQ ID NO: 330689 - RNA, 19 nt, Artificial Sequence
  Description of Artificial Sequence: Synthetic oligonucleotide
  Sense Strand Starting at position 151 of SEQ ID NO: 319169
accuccagacauuguuaca

SEQ ID NO: 330690 - RNA, 19 nt, Artificial Sequence
  Description of Artificial Sequence: Synthetic oligonucleotide
  Antisense Strand to SEQ ID NO: 330689
uguaacaaugucuggaggu

SEQ ID NO: 330691 - RNA, 19 nt, Artificial Sequence
  Description of Artificial Sequence: Synthetic oligonucleotide
  Sense Strand Starting at position 151 of SEQ ID NO: 319215
aauuaagagccauggaugu

SEQ ID NO: 330692 - RNA, 19 nt, Artificial Sequence
  Description of Artificial Sequence: Synthetic oligonucleotide
  Antisense Strand to SEQ ID NO: 330691
acauccauggcucuuaauu

SEQ ID NO: 330693 - RNA, 19 nt, Artificial Sequence
  Description of Artificial Sequence: Synthetic oligonucleotide
  Sense Strand Starting at position 152 of SEQ ID NO: 315421
ucuccuauugggugaccua

SEQ ID NO: 330694 - RNA, 19 nt, Artificial Sequence
  Description of Artificial Sequence: Synthetic oligonucleotide
  Antisense Strand to SEQ ID NO: 330693
uaggucacccaauaggaga

SEQ ID NO: 330695 - RNA, 19 nt, Artificial Sequence
  Description of Artificial Sequence: Synthetic oligonucleotide
  Sense Strand Starting at position 152 of SEQ ID NO: 315424
ccuauugggugaccuacaa

SEQ ID NO: 330696 - RNA, 19 nt, Artificial Sequence
  Description of Artificial Sequence: Synthetic oligonucleotide
  Antisense Strand to SEQ ID NO: 330695
uuguaggucacccaauagg

SEQ ID NO: 330697 - RNA, 19 nt, Artificial Sequence
  Description of Artificial Sequence: Synthetic oligonucleotide
  Sense Strand Starting at position 152 of SEQ ID NO: 315453
caaagaaguccaggguauc

SEQ ID NO: 330698 - RNA, 19 nt, Artificial Sequence
  Description of Artificial Sequence: Synthetic oligonucleotide
  Antisense Strand to SEQ ID NO: 330697
gauacccuggacuucuuug

SEQ ID NO: 330699 - RNA, 19 nt, Artificial Sequence
  Description of Artificial Sequence: Synthetic oligonucleotide
  Sense Strand Starting at position 152 of SEQ ID NO: 315454
aaagaaguccaggguaucu

SEQ ID NO: 330700 - RNA, 19 nt, Artificial Sequence
  Description of Artificial Sequence: Synthetic oligonucleotide
  Antisense Strand to SEQ ID NO: 330699
agauacccuggacuucuuu

SEQ ID NO: 330701 - RNA, 19 nt, Artificial Sequence
  Description of Artificial Sequence: Synthetic oligonucleotide
  Sense Strand Starting at position 152 of SEQ ID NO: 315513
gaaccauugcuacagggua

SEQ ID NO: 330702 - RNA, 19 nt, Artificial Sequence
  Description of Artificial Sequence: Synthetic oligonucleotide
  Antisense Strand to SEQ ID NO: 330701
uacccuguagcaaugguuc

SEQ ID NO: 330703 - RNA, 19 nt, Artificial Sequence
  Description of Artificial Sequence: Synthetic oligonucleotide
  Sense Strand Starting at position 152 of SEQ ID NO: 315554
cugauaacccugcauggau

SEQ ID NO: 330704 - RNA, 19 nt, Artificial Sequence
  Description of Artificial Sequence: Synthetic oligonucleotide
  Antisense Strand to SEQ ID NO: 330703
auccaugcaggguuaucag

SEQ ID NO: 330705 - RNA, 19 nt, Artificial Sequence
  Description of Artificial Sequence: Synthetic oligonucleotide
  Sense Strand Starting at position 152 of SEQ ID NO: 315850
ugaccagacuaucuuuguu

SEQ ID NO: 330706 - RNA, 19 nt, Artificial Sequence
  Description of Artificial Sequence: Synthetic oligonucleotide
  Antisense Strand to SEQ ID NO: 330705
aacaaagauagucugguca

SEQ ID NO: 330707 - RNA, 19 nt, Artificial Sequence
  Description of Artificial Sequence: Synthetic oligonucleotide
  Sense Strand Starting at position 152 of SEQ ID NO: 315955
gcaauaguuccaggaauca

SEQ ID NO: 330708 - RNA, 19 nt, Artificial Sequence
  Description of Artificial Sequence: Synthetic oligonucleotide
  Antisense Strand to SEQ ID NO: 330707
ugauuccuggaacuauugc

SEQ ID NO: 330709 - RNA, 19 nt, Artificial Sequence
  Description of Artificial Sequence: Synthetic oligonucleotide
  Sense Strand Starting at position 152 of SEQ ID NO: 316142
aguuaaucagaagguggau

SEQ ID NO: 330710 - RNA, 19 nt, Artificial Sequence
  Description of Artificial Sequence: Synthetic oligonucleotide
  Antisense Strand to SEQ ID NO: 330709
auccaccuucugauuaacu

SEQ ID NO: 330711 - RNA, 19 nt, Artificial Sequence
  Description of Artificial Sequence: Synthetic oligonucleotide
  Sense Strand Starting at position 152 of SEQ ID NO: 316186
uuuacaagucuuugaugag

SEQ ID NO: 330712 - RNA, 19 nt, Artificial Sequence
  Description of Artificial Sequence: Synthetic oligonucleotide
  Antisense Strand to SEQ ID NO: 330711
cucaucaaagacuuguaaa

SEQ ID NO: 330713 - RNA, 19 nt, Artificial Sequence
  Description of Artificial Sequence: Synthetic oligonucleotide
  Sense Strand Starting at position 152 of SEQ ID NO: 316205
agugaauaauguucccauc

SEQ ID NO: 330714 - RNA, 19 nt, Artificial Sequence
  Description of Artificial Sequence: Synthetic oligonucleotide
  Antisense Strand to SEQ ID NO: 330713
gaugggaacauuauucacu

SEQ ID NO: 330715 - RNA, 19 nt, Artificial Sequence
  Description of Artificial Sequence: Synthetic oligonucleotide
  Sense Strand Starting at position 152 of SEQ ID NO: 316219
ccaucauugcuagggauga

SEQ ID NO: 330716 - RNA, 19 nt, Artificial Sequence
  Description of Artificial Sequence: Synthetic oligonucleotide
  Antisense Strand to SEQ ID NO: 330715
ucaucccuagcaaugaugg

SEQ ID NO: 330717 - RNA, 19 nt, Artificial Sequence
  Description of Artificial Sequence: Synthetic oligonucleotide
  Sense Strand Starting at position 152 of SEQ ID NO: 316223
cauugcuagggaugaauca

SEQ ID NO: 330718 - RNA, 19 nt, Artificial Sequence
  Description of Artificial Sequence: Synthetic oligonucleotide
  Antisense Strand to SEQ ID NO: 330717
ugauucaucccuagcaaug

SEQ ID NO: 330719 - RNA, 19 nt, Artificial Sequence
  Description of Artificial Sequence: Synthetic oligonucleotide
  Sense Strand Starting at position 152 of SEQ ID NO: 316314
agucucaaccuucgagaca

SEQ ID NO: 330720 - RNA, 19 nt, Artificial Sequence
  Description of Artificial Sequence: Synthetic oligonucleotide
  Antisense Strand to SEQ ID NO: 330719
ugucucgaagguugagacu

SEQ ID NO: 330721 - RNA, 19 nt, Artificial Sequence
  Description of Artificial Sequence: Synthetic oligonucleotide
  Sense Strand Starting at position 152 of SEQ ID NO: 316534
gaugguaggcauggaagaa

SEQ ID NO: 330722 - RNA, 19 nt, Artificial Sequence
  Description of Artificial Sequence: Synthetic oligonucleotide
  Antisense Strand to SEQ ID NO: 330721
uucuuccaugccuaccauc

SEQ ID NO: 330723 - RNA, 19 nt, Artificial Sequence
  Description of Artificial Sequence: Synthetic oligonucleotide
  Sense Strand Starting at position 152 of SEQ ID NO: 316627
aagagauucugagagaagg

SEQ ID NO: 330724 - RNA, 19 nt, Artificial Sequence
  Description of Artificial Sequence: Synthetic oligonucleotide
  Antisense Strand to SEQ ID NO: 330723
ccuucucucagaaucucuu

SEQ ID NO: 330725 - RNA, 19 nt, Artificial Sequence
  Description of Artificial Sequence: Synthetic oligonucleotide
  Sense Strand Starting at position 152 of SEQ ID NO: 316738
cggaauaccucucugaaga

SEQ ID NO: 330726 - RNA, 19 nt, Artificial Sequence
  Description of Artificial Sequence: Synthetic oligonucleotide
  Antisense Strand to SEQ ID NO: 330725
ucuucagagagguauuccg

SEQ ID NO: 330727 - RNA, 19 nt, Artificial Sequence
  Description of Artificial Sequence: Synthetic oligonucleotide
  Sense Strand Starting at position 152 of SEQ ID NO: 317658
agugcaugaaggugaauaa

SEQ ID NO: 330728 - RNA, 19 nt, Artificial Sequence
  Description of Artificial Sequence: Synthetic oligonucleotide
  Antisense Strand to SEQ ID NO: 330727
uuauucaccuucaugcacu

SEQ ID NO: 330729 - RNA, 19 nt, Artificial Sequence
  Description of Artificial Sequence: Synthetic oligonucleotide
  Sense Strand Starting at position 152 of SEQ ID NO: 317659
gugcaugaaggugaauaau

SEQ ID NO: 330730 - RNA, 19 nt, Artificial Sequence
  Description of Artificial Sequence: Synthetic oligonucleotide
  Antisense Strand to SEQ ID NO: 330729
auuauucaccuucaugcac

SEQ ID NO: 330731 - RNA, 19 nt, Artificial Sequence
  Description of Artificial Sequence: Synthetic oligonucleotide
  Sense Strand Starting at position 152 of SEQ ID NO: 317789
aggguuccucacugugaga

SEQ ID NO: 330732 - RNA, 19 nt, Artificial Sequence
  Description of Artificial Sequence: Synthetic oligonucleotide
  Antisense Strand to SEQ ID NO: 330731
ucucacagugaggaacccu

SEQ ID NO: 330733 - RNA, 19 nt, Artificial Sequence
  Description of Artificial Sequence: Synthetic oligonucleotide
  Sense Strand Starting at position 152 of SEQ ID NO: 317834
cguccucaucuggaaaguu

SEQ ID NO: 330734 - RNA, 19 nt, Artificial Sequence
  Description of Artificial Sequence: Synthetic oligonucleotide
  Antisense Strand to SEQ ID NO: 330733
aacuuuccagaugaggacg

SEQ ID NO: 330735 - RNA, 19 nt, Artificial Sequence
  Description of Artificial Sequence: Synthetic oligonucleotide
  Sense Strand Starting at position 152 of SEQ ID NO: 317842
ucuggaaaguugguguaau

SEQ ID NO: 330736 - RNA, 19 nt, Artificial Sequence
  Description of Artificial Sequence: Synthetic oligonucleotide
  Antisense Strand to SEQ ID NO: 330735
auuacaccaacuuuccaga

SEQ ID NO: 330737 - RNA, 19 nt, Artificial Sequence
  Description of Artificial Sequence: Synthetic oligonucleotide
  Sense Strand Starting at position 152 of SEQ ID NO: 317853
gguguaauauuuguacccu

SEQ ID NO: 330738 - RNA, 19 nt, Artificial Sequence
  Description of Artificial Sequence: Synthetic oligonucleotide
  Antisense Strand to SEQ ID NO: 330737
aggguacaaauauuacacc

SEQ ID NO: 330739 - RNA, 19 nt, Artificial Sequence
  Description of Artificial Sequence: Synthetic oligonucleotide
  Sense Strand Starting at position 152 of SEQ ID NO: 317881
aguuguuaccaggauuaca

SEQ ID NO: 330740 - RNA, 19 nt, Artificial Sequence
  Description of Artificial Sequence: Synthetic oligonucleotide
  Antisense Strand to SEQ ID NO: 330739
uguaauccugguaacaacu

SEQ ID NO: 330741 - RNA, 19 nt, Artificial Sequence
  Description of Artificial Sequence: Synthetic oligonucleotide
  Sense Strand Starting at position 152 of SEQ ID NO: 317919
cacucagaacagugauuga

SEQ ID NO: 330742 - RNA, 19 nt, Artificial Sequence
  Description of Artificial Sequence: Synthetic oligonucleotide
  Antisense Strand to SEQ ID NO: 330741
ucaaucacuguucugagug

SEQ ID NO: 330743 - RNA, 19 nt, Artificial Sequence
  Description of Artificial Sequence: Synthetic oligonucleotide
  Sense Strand Starting at position 152 of SEQ ID NO: 317966
uuauuuaucuuugagagga

SEQ ID NO: 330744 - RNA, 19 nt, Artificial Sequence
  Description of Artificial Sequence: Synthetic oligonucleotide
  Antisense Strand to SEQ ID NO: 330743
uccucucaaagauaaauaa

SEQ ID NO: 330745 - RNA, 19 nt, Artificial Sequence
  Description of Artificial Sequence: Synthetic oligonucleotide
  Sense Strand Starting at position 152 of SEQ ID NO: 318077
uuuaguuagcauggaauua

SEQ ID NO: 330746 - RNA, 19 nt, Artificial Sequence
  Description of Artificial Sequence: Synthetic oligonucleotide
  Antisense Strand to SEQ ID NO: 330745
uaauuccaugcuaacuaaa

SEQ ID NO: 330747 - RNA, 19 nt, Artificial Sequence
  Description of Artificial Sequence: Synthetic oligonucleotide
  Sense Strand Starting at position 152 of SEQ ID NO: 318088
uggaauuauguuuguuaag

SEQ ID NO: 330748 - RNA, 19 nt, Artificial Sequence
  Description of Artificial Sequence: Synthetic oligonucleotide
  Antisense Strand to SEQ ID NO: 330747
cuuaacaaacauaauucca

SEQ ID NO: 330749 - RNA, 19 nt, Artificial Sequence
  Description of Artificial Sequence: Synthetic oligonucleotide
  Sense Strand Starting at position 152 of SEQ ID NO: 318268
caaauauguugacuugagu

SEQ ID NO: 330750 - RNA, 19 nt, Artificial Sequence
  Description of Artificial Sequence: Synthetic oligonucleotide
  Antisense Strand to SEQ ID NO: 330749
acucaagucaacauauuug

SEQ ID NO: 330751 - RNA, 19 nt, Artificial Sequence
  Description of Artificial Sequence: Synthetic oligonucleotide
  Sense Strand Starting at position 152 of SEQ ID NO: 318478
gcauucucagcugggauuu

SEQ ID NO: 330752 - RNA, 19 nt, Artificial Sequence
  Description of Artificial Sequence: Synthetic oligonucleotide
  Antisense Strand to SEQ ID NO: 330751
aaaucccagcugagaaugc

SEQ ID NO: 330753 - RNA, 19 nt, Artificial Sequence
  Description of Artificial Sequence: Synthetic oligonucleotide
  Sense Strand Starting at position 152 of SEQ ID NO: 318610
acuggagacugauaaagaa

SEQ ID NO: 330754 - RNA, 19 nt, Artificial Sequence
  Description of Artificial Sequence: Synthetic oligonucleotide
  Antisense Strand to SEQ ID NO: 330753
uucuuuaucagucuccagu

SEQ ID NO: 330755 - RNA, 19 nt, Artificial Sequence
  Description of Artificial Sequence: Synthetic oligonucleotide
  Sense Strand Starting at position 152 of SEQ ID NO: 318636
cauugaagggugugggaau

SEQ ID NO: 330756 - RNA, 19 nt, Artificial Sequence
  Description of Artificial Sequence: Synthetic oligonucleotide
  Antisense Strand to SEQ ID NO: 330755
auucccacacccuucaaug

SEQ ID NO: 330757 - RNA, 19 nt, Artificial Sequence
  Description of Artificial Sequence: Synthetic oligonucleotide
  Sense Strand Starting at position 152 of SEQ ID NO: 318668
uugauaggaucuguaguca

SEQ ID NO: 330758 - RNA, 19 nt, Artificial Sequence
  Description of Artificial Sequence: Synthetic oligonucleotide
  Antisense Strand to SEQ ID NO: 330757
ugacuacagauccuaucaa

SEQ ID NO: 330759 - RNA, 19 nt, Artificial Sequence
  Description of Artificial Sequence: Synthetic oligonucleotide
  Sense Strand Starting at position 152 of SEQ ID NO: 318672
uaggaucuguagucacgaa

SEQ ID NO: 330760 - RNA, 19 nt, Artificial Sequence
  Description of Artificial Sequence: Synthetic oligonucleotide
  Antisense Strand to SEQ ID NO: 330759
uucgugacuacagauccua

SEQ ID NO: 330761 - RNA, 19 nt, Artificial Sequence
  Description of Artificial Sequence: Synthetic oligonucleotide
  Sense Strand Starting at position 152 of SEQ ID NO: 318673
aggaucuguagucacgaaa

SEQ ID NO: 330762 - RNA, 19 nt, Artificial Sequence
  Description of Artificial Sequence: Synthetic oligonucleotide
  Antisense Strand to SEQ ID NO: 330761
uuucgugacuacagauccu

SEQ ID NO: 330763 - RNA, 19 nt, Artificial Sequence
  Description of Artificial Sequence: Synthetic oligonucleotide
  Sense Strand Starting at position 152 of SEQ ID NO: 318977
aguacuguuaagcaagguu

SEQ ID NO: 330764 - RNA, 19 nt, Artificial Sequence
  Description of Artificial Sequence: Synthetic oligonucleotide
  Antisense Strand to SEQ ID NO: 330763
aaccuugcuuaacaguacu

SEQ ID NO: 330765 - RNA, 19 nt, Artificial Sequence
  Description of Artificial Sequence: Synthetic oligonucleotide
  Sense Strand Starting at position 152 of SEQ ID NO: 318991
agguuuauauacucuguaa

SEQ ID NO: 330766 - RNA, 19 nt, Artificial Sequence
  Description of Artificial Sequence: Synthetic oligonucleotide
  Antisense Strand to SEQ ID NO: 330765
uuacagaguauauaaaccu

SEQ ID NO: 330767 - RNA, 19 nt, Artificial Sequence
  Description of Artificial Sequence: Synthetic oligonucleotide
  Sense Strand Starting at position 152 of SEQ ID NO: 319057
ucauguuacaguggaagga

SEQ ID NO: 330768 - RNA, 19 nt, Artificial Sequence
  Description of Artificial Sequence: Synthetic oligonucleotide
  Antisense Strand to SEQ ID NO: 330767
uccuuccacuguaacauga

SEQ ID NO: 330769 - RNA, 19 nt, Artificial Sequence
  Description of Artificial Sequence: Synthetic oligonucleotide
  Sense Strand Starting at position 152 of SEQ ID NO: 319061
guuacaguggaaggaauau

SEQ ID NO: 330770 - RNA, 19 nt, Artificial Sequence
  Description of Artificial Sequence: Synthetic oligonucleotide
  Antisense Strand to SEQ ID NO: 330769
auauuccuuccacuguaac

SEQ ID NO: 330771 - RNA, 19 nt, Artificial Sequence
  Description of Artificial Sequence: Synthetic oligonucleotide
  Sense Strand Starting at position 152 of SEQ ID NO: 319218
auuuauuccugugccugaa

SEQ ID NO: 330772 - RNA, 19 nt, Artificial Sequence
  Description of Artificial Sequence: Synthetic oligonucleotide
  Antisense Strand to SEQ ID NO: 330771
uucaggcacaggaauaaau

SEQ ID NO: 330773 - RNA, 19 nt, Artificial Sequence
  Description of Artificial Sequence: Synthetic oligonucleotide
  Sense Strand Starting at position 153 of SEQ ID NO: 315561
aagaaaggagcuuaguguu

SEQ ID NO: 330774 - RNA, 19 nt, Artificial Sequence
  Description of Artificial Sequence: Synthetic oligonucleotide
  Antisense Strand to SEQ ID NO: 330773
aacacuaagcuccuuucuu

SEQ ID NO: 330775 - RNA, 19 nt, Artificial Sequence
  Description of Artificial Sequence: Synthetic oligonucleotide
  Sense Strand Starting at position 153 of SEQ ID NO: 315631
cugagaugcccguaggaua

SEQ ID NO: 330776 - RNA, 19 nt, Artificial Sequence
  Description of Artificial Sequence: Synthetic oligonucleotide
  Antisense Strand to SEQ ID NO: 330775
uauccuacgggcaucucag

SEQ ID NO: 330777 - RNA, 19 nt, Artificial Sequence
  Description of Artificial Sequence: Synthetic oligonucleotide
  Sense Strand Starting at position 153 of SEQ ID NO: 315678
ccagaaauuugaggcaaag

SEQ ID NO: 330778 - RNA, 19 nt, Artificial Sequence
  Description of Artificial Sequence: Synthetic oligonucleotide
  Antisense Strand to SEQ ID NO: 330777
cuuugccucaaauuucugg

SEQ ID NO: 330779 - RNA, 19 nt, Artificial Sequence
  Description of Artificial Sequence: Synthetic oligonucleotide
  Sense Strand Starting at position 153 of SEQ ID NO: 315751
accgaaaugcacugagaaa

SEQ ID NO: 330780 - RNA, 19 nt, Artificial Sequence
  Description of Artificial Sequence: Synthetic oligonucleotide
  Antisense Strand to SEQ ID NO: 330779
uuucucagugcauuucggu

SEQ ID NO: 330781 - RNA, 19 nt, Artificial Sequence
  Description of Artificial Sequence: Synthetic oligonucleotide
  Sense Strand Starting at position 153 of SEQ ID NO: 315899
acgcguauccuugcaaguu

SEQ ID NO: 330782 - RNA, 19 nt, Artificial Sequence
  Description of Artificial Sequence: Synthetic oligonucleotide
  Antisense Strand to SEQ ID NO: 330781
aacuugcaaggauacgcgu

SEQ ID NO: 330783 - RNA, 19 nt, Artificial Sequence
  Description of Artificial Sequence: Synthetic oligonucleotide
  Sense Strand Starting at position 153 of SEQ ID NO: 315956
acaggacggcuuugaauau

SEQ ID NO: 330784 - RNA, 19 nt, Artificial Sequence
  Description of Artificial Sequence: Synthetic oligonucleotide
  Antisense Strand to SEQ ID NO: 330783
auauucaaagccguccugu

SEQ ID NO: 330785 - RNA, 19 nt, Artificial Sequence
  Description of Artificial Sequence: Synthetic oligonucleotide
  Sense Strand Starting at position 153 of SEQ ID NO: 316193
aggcccuuugugcaugaua

SEQ ID NO: 330786 - RNA, 19 nt, Artificial Sequence
  Description of Artificial Sequence: Synthetic oligonucleotide
  Antisense Strand to SEQ ID NO: 330785
uaucaugcacaaagggccu

SEQ ID NO: 330787 - RNA, 19 nt, Artificial Sequence
  Description of Artificial Sequence: Synthetic oligonucleotide
  Sense Strand Starting at position 153 of SEQ ID NO: 316327
gggcgauaucuccaacaug

SEQ ID NO: 330788 - RNA, 19 nt, Artificial Sequence
  Description of Artificial Sequence: Synthetic oligonucleotide
  Antisense Strand to SEQ ID NO: 330787
cauguuggagauaucgccc

SEQ ID NO: 330789 - RNA, 19 nt, Artificial Sequence
  Description of Artificial Sequence: Synthetic oligonucleotide
  Sense Strand Starting at position 153 of SEQ ID NO: 316357
agcuaaucauaugucagau

SEQ ID NO: 330790 - RNA, 19 nt, Artificial Sequence
  Description of Artificial Sequence: Synthetic oligonucleotide
  Antisense Strand to SEQ ID NO: 330789
aucugacauaugauuagcu

SEQ ID NO: 330791 - RNA, 19 nt, Artificial Sequence
  Description of Artificial Sequence: Synthetic oligonucleotide
  Sense Strand Starting at position 153 of SEQ ID NO: 316618
uuguuuacucuuuaguaag

SEQ ID NO: 330792 - RNA, 19 nt, Artificial Sequence
  Description of Artificial Sequence: Synthetic oligonucleotide
  Antisense Strand to SEQ ID NO: 330791
cuuacuaaagaguaaacaa

SEQ ID NO: 330793 - RNA, 19 nt, Artificial Sequence
  Description of Artificial Sequence: Synthetic oligonucleotide
  Sense Strand Starting at position 153 of SEQ ID NO: 316624
acucuuuaguaaguaaaga

SEQ ID NO: 330794 - RNA, 19 nt, Artificial Sequence
  Description of Artificial Sequence: Synthetic oligonucleotide
  Antisense Strand to SEQ ID NO: 330793
ucuuuacuuacuaaagagu

SEQ ID NO: 330795 - RNA, 19 nt, Artificial Sequence
  Description of Artificial Sequence: Synthetic oligonucleotide
  Sense Strand Starting at position 153 of SEQ ID NO: 316665
acccgauuuccuuguccga

SEQ ID NO: 330796 - RNA, 19 nt, Artificial Sequence
  Description of Artificial Sequence: Synthetic oligonucleotide
  Antisense Strand to SEQ ID NO: 330795
ucggacaaggaaaucgggu

SEQ ID NO: 330797 - RNA, 19 nt, Artificial Sequence
  Description of Artificial Sequence: Synthetic oligonucleotide
  Sense Strand Starting at position 153 of SEQ ID NO: 316667
ccgauuuccuuguccgaag

SEQ ID NO: 330798 - RNA, 19 nt, Artificial Sequence
  Description of Artificial Sequence: Synthetic oligonucleotide
  Antisense Strand to SEQ ID NO: 330797
cuucggacaaggaaaucgg

SEQ ID NO: 330799 - RNA, 19 nt, Artificial Sequence
  Description of Artificial Sequence: Synthetic oligonucleotide
  Sense Strand Starting at position 153 of SEQ ID NO: 316749
acauuaaucugggccucua

SEQ ID NO: 330800 - RNA, 19 nt, Artificial Sequence
  Description of Artificial Sequence: Synthetic oligonucleotide
  Antisense Strand to SEQ ID NO: 330799
uagaggcccagauuaaugu

SEQ ID NO: 330801 - RNA, 19 nt, Artificial Sequence
  Description of Artificial Sequence: Synthetic oligonucleotide
  Sense Strand Starting at position 153 of SEQ ID NO: 317400
cugcuuaucccagaaauga

SEQ ID NO: 330802 - RNA, 19 nt, Artificial Sequence
  Description of Artificial Sequence: Synthetic oligonucleotide
  Antisense Strand to SEQ ID NO: 330801
ucauuucugggauaagcag

SEQ ID NO: 330803 - RNA, 19 nt, Artificial Sequence
  Description of Artificial Sequence: Synthetic oligonucleotide
  Sense Strand Starting at position 153 of SEQ ID NO: 317420
guggaacucaauuguauug

SEQ ID NO: 330804 - RNA, 19 nt, Artificial Sequence
  Description of Artificial Sequence: Synthetic oligonucleotide
  Antisense Strand to SEQ ID NO: 330803
caauacaauugaguuccac

SEQ ID NO: 330805 - RNA, 19 nt, Artificial Sequence
  Description of Artificial Sequence: Synthetic oligonucleotide
  Sense Strand Starting at position 153 of SEQ ID NO: 317460
agguguuaccaggguauga

SEQ ID NO: 330806 - RNA, 19 nt, Artificial Sequence
  Description of Artificial Sequence: Synthetic oligonucleotide
  Antisense Strand to SEQ ID NO: 330805
ucauacccugguaacaccu

SEQ ID NO: 330807 - RNA, 19 nt, Artificial Sequence
  Description of Artificial Sequence: Synthetic oligonucleotide
  Sense Strand Starting at position 153 of SEQ ID NO: 317799
agagaagucaaauguucug

SEQ ID NO: 330808 - RNA, 19 nt, Artificial Sequence
  Description of Artificial Sequence: Synthetic oligonucleotide
  Antisense Strand to SEQ ID NO: 330807
cagaacauuugacuucucu

SEQ ID NO: 330809 - RNA, 19 nt, Artificial Sequence
  Description of Artificial Sequence: Synthetic oligonucleotide
  Sense Strand Starting at position 153 of SEQ ID NO: 317802
gaagucaaauguucugaau

SEQ ID NO: 330810 - RNA, 19 nt, Artificial Sequence
  Description of Artificial Sequence: Synthetic oligonucleotide
  Antisense Strand to SEQ ID NO: 330809
auucagaacauuugacuuc

SEQ ID NO: 330811 - RNA, 19 nt, Artificial Sequence
  Description of Artificial Sequence: Synthetic oligonucleotide
  Sense Strand Starting at position 153 of SEQ ID NO: 317839
gcggucauucggguaugca

SEQ ID NO: 330812 - RNA, 19 nt, Artificial Sequence
  Description of Artificial Sequence: Synthetic oligonucleotide
  Antisense Strand to SEQ ID NO: 330811
ugcauacccgaaugaccgc

SEQ ID NO: 330813 - RNA, 19 nt, Artificial Sequence
  Description of Artificial Sequence: Synthetic oligonucleotide
  Sense Strand Starting at position 153 of SEQ ID NO: 318003
uccaguugcuuauccagaa

SEQ ID NO: 330814 - RNA, 19 nt, Artificial Sequence
  Description of Artificial Sequence: Synthetic oligonucleotide
  Antisense Strand to SEQ ID NO: 330813
uucuggauaagcaacugga

SEQ ID NO: 330815 - RNA, 19 nt, Artificial Sequence
  Description of Artificial Sequence: Synthetic oligonucleotide
  Sense Strand Starting at position 153 of SEQ ID NO: 318007
guugcuuauccagaagguc

SEQ ID NO: 330816 - RNA, 19 nt, Artificial Sequence
  Description of Artificial Sequence: Synthetic oligonucleotide
  Antisense Strand to SEQ ID NO: 330815
gaccuucuggauaagcaac

SEQ ID NO: 330817 - RNA, 19 nt, Artificial Sequence
  Description of Artificial Sequence: Synthetic oligonucleotide
  Sense Strand Starting at position 153 of SEQ ID NO: 318066
acaacugauugucucagau

SEQ ID NO: 330818 - RNA, 19 nt, Artificial Sequence
  Description of Artificial Sequence: Synthetic oligonucleotide
  Antisense Strand to SEQ ID NO: 330817
aucugagacaaucaguugu

SEQ ID NO: 330819 - RNA, 19 nt, Artificial Sequence
  Description of Artificial Sequence: Synthetic oligonucleotide
  Sense Strand Starting at position 153 of SEQ ID NO: 318095
agucacuucucucugagag

SEQ ID NO: 330820 - RNA, 19 nt, Artificial Sequence
  Description of Artificial Sequence: Synthetic oligonucleotide
  Antisense Strand to SEQ ID NO: 330819
cucucagagagaagugacu

SEQ ID NO: 330821 - RNA, 19 nt, Artificial Sequence
  Description of Artificial Sequence: Synthetic oligonucleotide
  Sense Strand Starting at position 153 of SEQ ID NO: 318182
ccuuauuguccacagacuu

SEQ ID NO: 330822 - RNA, 19 nt, Artificial Sequence
  Description of Artificial Sequence: Synthetic oligonucleotide
  Antisense Strand to SEQ ID NO: 330821
aagucuguggacaauaagg

SEQ ID NO: 330823 - RNA, 19 nt, Artificial Sequence
  Description of Artificial Sequence: Synthetic oligonucleotide
  Sense Strand Starting at position 153 of SEQ ID NO: 318189
guccacagacuuugacauu

SEQ ID NO: 330824 - RNA, 19 nt, Artificial Sequence
  Description of Artificial Sequence: Synthetic oligonucleotide
  Antisense Strand to SEQ ID NO: 330823
aaugucaaagucuguggac

SEQ ID NO: 330825 - RNA, 19 nt, Artificial Sequence
  Description of Artificial Sequence: Synthetic oligonucleotide
  Sense Strand Starting at position 153 of SEQ ID NO: 318287
uugaauguuccacacggga

SEQ ID NO: 330826 - RNA, 19 nt, Artificial Sequence
  Description of Artificial Sequence: Synthetic oligonucleotide
  Antisense Strand to SEQ ID NO: 330825
ucccguguggaacauucaa

SEQ ID NO: 330827 - RNA, 19 nt, Artificial Sequence
  Description of Artificial Sequence: Synthetic oligonucleotide
  Sense Strand Starting at position 153 of SEQ ID NO: 318300
acgggaaccuugcccaaua

SEQ ID NO: 330828 - RNA, 19 nt, Artificial Sequence
  Description of Artificial Sequence: Synthetic oligonucleotide
  Antisense Strand to SEQ ID NO: 330827
uauugggcaagguucccgu

SEQ ID NO: 330829 - RNA, 19 nt, Artificial Sequence
  Description of Artificial Sequence: Synthetic oligonucleotide
  Sense Strand Starting at position 153 of SEQ ID NO: 318339
aaugguucuugccuugaau

SEQ ID NO: 330830 - RNA, 19 nt, Artificial Sequence
  Description of Artificial Sequence: Synthetic oligonucleotide
  Antisense Strand to SEQ ID NO: 330829
auucaaggcaagaaccauu

SEQ ID NO: 330831 - RNA, 19 nt, Artificial Sequence
  Description of Artificial Sequence: Synthetic oligonucleotide
  Sense Strand Starting at position 153 of SEQ ID NO: 318342
gguucuugccuugaaucau

SEQ ID NO: 330832 - RNA, 19 nt, Artificial Sequence
  Description of Artificial Sequence: Synthetic oligonucleotide
  Antisense Strand to SEQ ID NO: 330831
augauucaaggcaagaacc

SEQ ID NO: 330833 - RNA, 19 nt, Artificial Sequence
  Description of Artificial Sequence: Synthetic oligonucleotide
  Sense Strand Starting at position 153 of SEQ ID NO: 318406
guucgcauuacugucagua

SEQ ID NO: 330834 - RNA, 19 nt, Artificial Sequence
  Description of Artificial Sequence: Synthetic oligonucleotide
  Antisense Strand to SEQ ID NO: 330833
uacugacaguaaugcgaac

SEQ ID NO: 330835 - RNA, 19 nt, Artificial Sequence
  Description of Artificial Sequence: Synthetic oligonucleotide
  Sense Strand Starting at position 153 of SEQ ID NO: 318589
gggccuggucaguacuuau

SEQ ID NO: 330836 - RNA, 19 nt, Artificial Sequence
  Description of Artificial Sequence: Synthetic oligonucleotide
  Antisense Strand to SEQ ID NO: 330835
auaaguacugaccaggccc

SEQ ID NO: 330837 - RNA, 19 nt, Artificial Sequence
  Description of Artificial Sequence: Synthetic oligonucleotide
  Sense Strand Starting at position 153 of SEQ ID NO: 318758
uugggaauauuaccuugau

SEQ ID NO: 330838 - RNA, 19 nt, Artificial Sequence
  Description of Artificial Sequence: Synthetic oligonucleotide
  Antisense Strand to SEQ ID NO: 330837
aucaagguaauauucccaa

SEQ ID NO: 330839 - RNA, 19 nt, Artificial Sequence
  Description of Artificial Sequence: Synthetic oligonucleotide
  Sense Strand Starting at position 153 of SEQ ID NO: 318759
ugggaauauuaccuugauc

SEQ ID NO: 330840 - RNA, 19 nt, Artificial Sequence
  Description of Artificial Sequence: Synthetic oligonucleotide
  Antisense Strand to SEQ ID NO: 330839
gaucaagguaauauuccca

SEQ ID NO: 330841 - RNA, 19 nt, Artificial Sequence
  Description of Artificial Sequence: Synthetic oligonucleotide
  Sense Strand Starting at position 153 of SEQ ID NO: 318761
ggaauauuaccuugaucuu

SEQ ID NO: 330842 - RNA, 19 nt, Artificial Sequence
  Description of Artificial Sequence: Synthetic oligonucleotide
  Antisense Strand to SEQ ID NO: 330841
aagaucaagguaauauucc

SEQ ID NO: 330843 - RNA, 19 nt, Artificial Sequence
  Description of Artificial Sequence: Synthetic oligonucleotide
  Sense Strand Starting at position 153 of SEQ ID NO: 318764
auauuaccuugaucuuguu

SEQ ID NO: 330844 - RNA, 19 nt, Artificial Sequence
  Description of Artificial Sequence: Synthetic oligonucleotide
  Antisense Strand to SEQ ID NO: 330843
aacaagaucaagguaauau

SEQ ID NO: 330845 - RNA, 19 nt, Artificial Sequence
  Description of Artificial Sequence: Synthetic oligonucleotide
  Sense Strand Starting at position 153 of SEQ ID NO: 318948
uuagucacucuaugaagau

SEQ ID NO: 330846 - RNA, 19 nt, Artificial Sequence
  Description of Artificial Sequence: Synthetic oligonucleotide
  Antisense Strand to SEQ ID NO: 330845
aucuucauagagugacuaa

SEQ ID NO: 330847 - RNA, 19 nt, Artificial Sequence
  Description of Artificial Sequence: Synthetic oligonucleotide
  Sense Strand Starting at position 153 of SEQ ID NO: 318957
cuaugaagaucuguacaua

SEQ ID NO: 330848 - RNA, 19 nt, Artificial Sequence
  Description of Artificial Sequence: Synthetic oligonucleotide
  Antisense Strand to SEQ ID NO: 330847
uauguacagaucuucauag

SEQ ID NO: 330849 - RNA, 19 nt, Artificial Sequence
  Description of Artificial Sequence: Synthetic oligonucleotide
  Sense Strand Starting at position 153 of SEQ ID NO: 319217
uuugacauguccuuggaau

SEQ ID NO: 330850 - RNA, 19 nt, Artificial Sequence
  Description of Artificial Sequence: Synthetic oligonucleotide
  Antisense Strand to SEQ ID NO: 330849
auuccaaggacaugucaaa

SEQ ID NO: 330851 - RNA, 19 nt, Artificial Sequence
  Description of Artificial Sequence: Synthetic oligonucleotide
  Sense Strand Starting at position 153 of SEQ ID NO: 319218
uugacauguccuuggaaug

SEQ ID NO: 330852 - RNA, 19 nt, Artificial Sequence
  Description of Artificial Sequence: Synthetic oligonucleotide
  Antisense Strand to SEQ ID NO: 330851
cauuccaaggacaugucaa

SEQ ID NO: 330853 - RNA, 19 nt, Artificial Sequence
  Description of Artificial Sequence: Synthetic oligonucleotide
  Sense Strand Starting at position 154 of SEQ ID NO: 315266
augacuggcugguacuaaa

SEQ ID NO: 330854 - RNA, 19 nt, Artificial Sequence
  Description of Artificial Sequence: Synthetic oligonucleotide
  Antisense Strand to SEQ ID NO: 330853
uuuaguaccagccagucau

SEQ ID NO: 330855 - RNA, 19 nt, Artificial Sequence
  Description of Artificial Sequence: Synthetic oligonucleotide
  Sense Strand Starting at position 154 of SEQ ID NO: 315347
aguacuauuccugggaacu

SEQ ID NO: 330856 - RNA, 19 nt, Artificial Sequence
  Description of Artificial Sequence: Synthetic oligonucleotide
  Antisense Strand to SEQ ID NO: 330855
aguucccaggaauaguacu

SEQ ID NO: 330857 - RNA, 19 nt, Artificial Sequence
  Description of Artificial Sequence: Synthetic oligonucleotide
  Sense Strand Starting at position 154 of SEQ ID NO: 315348
guacuauuccugggaacug

SEQ ID NO: 330858 - RNA, 19 nt, Artificial Sequence
  Description of Artificial Sequence: Synthetic oligonucleotide
  Antisense Strand to SEQ ID NO: 330857
caguucccaggaauaguac

SEQ ID NO: 330859 - RNA, 19 nt, Artificial Sequence
  Description of Artificial Sequence: Synthetic oligonucleotide
  Sense Strand Starting at position 154 of SEQ ID NO: 315358
ugggaacuggguuguguaa

SEQ ID NO: 330860 - RNA, 19 nt, Artificial Sequence
  Description of Artificial Sequence: Synthetic oligonucleotide
  Antisense Strand to SEQ ID NO: 330859
uuacacaacccaguuccca

SEQ ID NO: 330861 - RNA, 19 nt, Artificial Sequence
  Description of Artificial Sequence: Synthetic oligonucleotide
  Sense Strand Starting at position 154 of SEQ ID NO: 315461
ccauguguuuacccacuca

SEQ ID NO: 330862 - RNA, 19 nt, Artificial Sequence
  Description of Artificial Sequence: Synthetic oligonucleotide
  Antisense Strand to SEQ ID NO: 330861
ugaguggguaaacacaugg

SEQ ID NO: 330863 - RNA, 19 nt, Artificial Sequence
  Description of Artificial Sequence: Synthetic oligonucleotide
  Sense Strand Starting at position 154 of SEQ ID NO: 315478
caaaguagcugugucauua

SEQ ID NO: 330864 - RNA, 19 nt, Artificial Sequence
  Description of Artificial Sequence: Synthetic oligonucleotide
  Antisense Strand to SEQ ID NO: 330863
uaaugacacagcuacuuug

SEQ ID NO: 330865 - RNA, 19 nt, Artificial Sequence
  Description of Artificial Sequence: Synthetic oligonucleotide
  Sense Strand Starting at position 154 of SEQ ID NO: 315482
guagcugugucauuaugug

SEQ ID NO: 330866 - RNA, 19 nt, Artificial Sequence
  Description of Artificial Sequence: Synthetic oligonucleotide
  Antisense Strand to SEQ ID NO: 330865
cacauaaugacacagcuac

SEQ ID NO: 330867 - RNA, 19 nt, Artificial Sequence
  Description of Artificial Sequence: Synthetic oligonucleotide
  Sense Strand Starting at position 154 of SEQ ID NO: 315487
ugugucauuaugugucaua

SEQ ID NO: 330868 - RNA, 19 nt, Artificial Sequence
  Description of Artificial Sequence: Synthetic oligonucleotide
  Antisense Strand to SEQ ID NO: 330867
uaugacacauaaugacaca

SEQ ID NO: 330869 - RNA, 19 nt, Artificial Sequence
  Description of Artificial Sequence: Synthetic oligonucleotide
  Sense Strand Starting at position 154 of SEQ ID NO: 315488
gugucauuaugugucauau

SEQ ID NO: 330870 - RNA, 19 nt, Artificial Sequence
  Description of Artificial Sequence: Synthetic oligonucleotide
  Antisense Strand to SEQ ID NO: 330869
auaugacacauaaugacac

SEQ ID NO: 330871 - RNA, 19 nt, Artificial Sequence
  Description of Artificial Sequence: Synthetic oligonucleotide
  Sense Strand Starting at position 154 of SEQ ID NO: 315569
aagaguaaguuugagggaa

SEQ ID NO: 330872 - RNA, 19 nt, Artificial Sequence
  Description of Artificial Sequence: Synthetic oligonucleotide
  Antisense Strand to SEQ ID NO: 330871
uucccucaaacuuacucuu

SEQ ID NO: 330873 - RNA, 19 nt, Artificial Sequence
  Description of Artificial Sequence: Synthetic oligonucleotide
  Sense Strand Starting at position 154 of SEQ ID NO: 315642
aacugagaaugccaugaga

SEQ ID NO: 330874 - RNA, 19 nt, Artificial Sequence
  Description of Artificial Sequence: Synthetic oligonucleotide
  Antisense Strand to SEQ ID NO: 330873
ucucauggcauucucaguu

SEQ ID NO: 330875 - RNA, 19 nt, Artificial Sequence
  Description of Artificial Sequence: Synthetic oligonucleotide
  Sense Strand Starting at position 154 of SEQ ID NO: 315707
uuuaccuuaguguaaauca

SEQ ID NO: 330876 - RNA, 19 nt, Artificial Sequence
  Description of Artificial Sequence: Synthetic oligonucleotide
  Antisense Strand to SEQ ID NO: 330875
ugauuuacacuaagguaaa

SEQ ID NO: 330877 - RNA, 19 nt, Artificial Sequence
  Description of Artificial Sequence: Synthetic oligonucleotide
  Sense Strand Starting at position 154 of SEQ ID NO: 315802
auucuacuguuaguuguua

SEQ ID NO: 330878 - RNA, 19 nt, Artificial Sequence
  Description of Artificial Sequence: Synthetic oligonucleotide
  Antisense Strand to SEQ ID NO: 330877
uaacaacuaacaguagaau

SEQ ID NO: 330879 - RNA, 19 nt, Artificial Sequence
  Description of Artificial Sequence: Synthetic oligonucleotide
  Sense Strand Starting at position 154 of SEQ ID NO: 315813
aguuguuacuaauacauca

SEQ ID NO: 330880 - RNA, 19 nt, Artificial Sequence
  Description of Artificial Sequence: Synthetic oligonucleotide
  Antisense Strand to SEQ ID NO: 330879
ugauguauuaguaacaacu

SEQ ID NO: 330881 - RNA, 19 nt, Artificial Sequence
  Description of Artificial Sequence: Synthetic oligonucleotide
  Sense Strand Starting at position 154 of SEQ ID NO: 315899
guauauuacuaagacagcu

SEQ ID NO: 330882 - RNA, 19 nt, Artificial Sequence
  Description of Artificial Sequence: Synthetic oligonucleotide
  Antisense Strand to SEQ ID NO: 330881
agcugucuuaguaauauac

SEQ ID NO: 330883 - RNA, 19 nt, Artificial Sequence
  Description of Artificial Sequence: Synthetic oligonucleotide
  Sense Strand Starting at position 154 of SEQ ID NO: 315927
auuucugggucucagagaa

SEQ ID NO: 330884 - RNA, 19 nt, Artificial Sequence
  Description of Artificial Sequence: Synthetic oligonucleotide
  Antisense Strand to SEQ ID NO: 330883
uucucugagacccagaaau

SEQ ID NO: 330885 - RNA, 19 nt, Artificial Sequence
  Description of Artificial Sequence: Synthetic oligonucleotide
  Sense Strand Starting at position 154 of SEQ ID NO: 315941
gagaauuuguccggguauc

SEQ ID NO: 330886 - RNA, 19 nt, Artificial Sequence
  Description of Artificial Sequence: Synthetic oligonucleotide
  Antisense Strand to SEQ ID NO: 330885
gauacccggacaaauucuc

SEQ ID NO: 330887 - RNA, 19 nt, Artificial Sequence
  Description of Artificial Sequence: Synthetic oligonucleotide
  Sense Strand Starting at position 154 of SEQ ID NO: 315942
agaauuuguccggguaucu

SEQ ID NO: 330888 - RNA, 19 nt, Artificial Sequence
  Description of Artificial Sequence: Synthetic oligonucleotide
  Antisense Strand to SEQ ID NO: 330887
agauacccggacaaauucu

SEQ ID NO: 330889 - RNA, 19 nt, Artificial Sequence
  Description of Artificial Sequence: Synthetic oligonucleotide
  Sense Strand Starting at position 154 of SEQ ID NO: 316031
auagcuuaaugagaaacuu

SEQ ID NO: 330890 - RNA, 19 nt, Artificial Sequence
  Description of Artificial Sequence: Synthetic oligonucleotide
  Antisense Strand to SEQ ID NO: 330889
aaguuucucauuaagcuau

SEQ ID NO: 330891 - RNA, 19 nt, Artificial Sequence
  Description of Artificial Sequence: Synthetic oligonucleotide
  Sense Strand Starting at position 154 of SEQ ID NO: 316058
guguauguacaucauaaau

SEQ ID NO: 330892 - RNA, 19 nt, Artificial Sequence
  Description of Artificial Sequence: Synthetic oligonucleotide
  Antisense Strand to SEQ ID NO: 330891
auuuaugauguacauacac

SEQ ID NO: 330893 - RNA, 19 nt, Artificial Sequence
  Description of Artificial Sequence: Synthetic oligonucleotide
  Sense Strand Starting at position 154 of SEQ ID NO: 316060
guauguacaucauaaauac

SEQ ID NO: 330894 - RNA, 19 nt, Artificial Sequence
  Description of Artificial Sequence: Synthetic oligonucleotide
  Antisense Strand to SEQ ID NO: 330893
guauuuaugauguacauac

SEQ ID NO: 330895 - RNA, 19 nt, Artificial Sequence
  Description of Artificial Sequence: Synthetic oligonucleotide
  Sense Strand Starting at position 154 of SEQ ID NO: 316089
uuuagagacugacuaguuu

SEQ ID NO: 330896 - RNA, 19 nt, Artificial Sequence
  Description of Artificial Sequence: Synthetic oligonucleotide
  Antisense Strand to SEQ ID NO: 330895
aaacuagucagucucuaaa

SEQ ID NO: 330897 - RNA, 19 nt, Artificial Sequence
  Description of Artificial Sequence: Synthetic oligonucleotide
  Sense Strand Starting at position 154 of SEQ ID NO: 316095
gacugacuaguuugggaac

SEQ ID NO: 330898 - RNA, 19 nt, Artificial Sequence
  Description of Artificial Sequence: Synthetic oligonucleotide
  Antisense Strand to SEQ ID NO: 330897
guucccaaacuagucaguc

SEQ ID NO: 330899 - RNA, 19 nt, Artificial Sequence
  Description of Artificial Sequence: Synthetic oligonucleotide
  Sense Strand Starting at position 154 of SEQ ID NO: 316098
ugacuaguuugggaacuac

SEQ ID NO: 330900 - RNA, 19 nt, Artificial Sequence
  Description of Artificial Sequence: Synthetic oligonucleotide
  Antisense Strand to SEQ ID NO: 330899
guaguucccaaacuaguca

SEQ ID NO: 330901 - RNA, 19 nt, Artificial Sequence
  Description of Artificial Sequence: Synthetic oligonucleotide
  Sense Strand Starting at position 154 of SEQ ID NO: 316138
aggaaaguuuaaccaguuu

SEQ ID NO: 330902 - RNA, 19 nt, Artificial Sequence
  Description of Artificial Sequence: Synthetic oligonucleotide
  Antisense Strand to SEQ ID NO: 330901
aaacugguuaaacuuuccu

SEQ ID NO: 330903 - RNA, 19 nt, Artificial Sequence
  Description of Artificial Sequence: Synthetic oligonucleotide
  Sense Strand Starting at position 154 of SEQ ID NO: 316283
gccaaauauuuguguuaca

SEQ ID NO: 330904 - RNA, 19 nt, Artificial Sequence
  Description of Artificial Sequence: Synthetic oligonucleotide
  Antisense Strand to SEQ ID NO: 330903
uguaacacaaauauuuggc

SEQ ID NO: 330905 - RNA, 19 nt, Artificial Sequence
  Description of Artificial Sequence: Synthetic oligonucleotide
  Sense Strand Starting at position 154 of SEQ ID NO: 316296
guuacauuauuuggcugaa

SEQ ID NO: 330906 - RNA, 19 nt, Artificial Sequence
  Description of Artificial Sequence: Synthetic oligonucleotide
  Antisense Strand to SEQ ID NO: 330905
uucagccaaauaauguaac

SEQ ID NO: 330907 - RNA, 19 nt, Artificial Sequence
  Description of Artificial Sequence: Synthetic oligonucleotide
  Sense Strand Starting at position 154 of SEQ ID NO: 316355
caguguagagcuugagaaa

SEQ ID NO: 330908 - RNA, 19 nt, Artificial Sequence
  Description of Artificial Sequence: Synthetic oligonucleotide
  Antisense Strand to SEQ ID NO: 330907
uuucucaagcucuacacug

SEQ ID NO: 330909 - RNA, 19 nt, Artificial Sequence
  Description of Artificial Sequence: Synthetic oligonucleotide
  Sense Strand Starting at position 154 of SEQ ID NO: 316473
cagaaagaaugugaaguau

SEQ ID NO: 330910 - RNA, 19 nt, Artificial Sequence
  Description of Artificial Sequence: Synthetic oligonucleotide
  Antisense Strand to SEQ ID NO: 330909
auacuucacauucuuucug

SEQ ID NO: 330911 - RNA, 19 nt, Artificial Sequence
  Description of Artificial Sequence: Synthetic oligonucleotide
  Sense Strand Starting at position 154 of SEQ ID NO: 316650
agcaaauacuccgaaagua

SEQ ID NO: 330912 - RNA, 19 nt, Artificial Sequence
  Description of Artificial Sequence: Synthetic oligonucleotide
  Antisense Strand to SEQ ID NO: 330911
uacuuucggaguauuugcu

SEQ ID NO: 330913 - RNA, 19 nt, Artificial Sequence
  Description of Artificial Sequence: Synthetic oligonucleotide
  Sense Strand Starting at position 154 of SEQ ID NO: 316792
gcaagaaucuccuucccug

SEQ ID NO: 330914 - RNA, 19 nt, Artificial Sequence
  Description of Artificial Sequence: Synthetic oligonucleotide
  Antisense Strand to SEQ ID NO: 330913
cagggaaggagauucuugc

SEQ ID NO: 330915 - RNA, 19 nt, Artificial Sequence
  Description of Artificial Sequence: Synthetic oligonucleotide
  Sense Strand Starting at position 154 of SEQ ID NO: 317258
gaaggaaacucgcaguaga

SEQ ID NO: 330916 - RNA, 19 nt, Artificial Sequence
  Description of Artificial Sequence: Synthetic oligonucleotide
  Antisense Strand to SEQ ID NO: 330915
ucuacugcgaguuuccuuc

SEQ ID NO: 330917 - RNA, 19 nt, Artificial Sequence
  Description of Artificial Sequence: Synthetic oligonucleotide
  Sense Strand Starting at position 154 of SEQ ID NO: 317306
ucccucuggcguugaaaga

SEQ ID NO: 330918 - RNA, 19 nt, Artificial Sequence
  Description of Artificial Sequence: Synthetic oligonucleotide
  Antisense Strand to SEQ ID NO: 330917
ucuuucaacgccagaggga

SEQ ID NO: 330919 - RNA, 19 nt, Artificial Sequence
  Description of Artificial Sequence: Synthetic oligonucleotide
  Sense Strand Starting at position 154 of SEQ ID NO: 317307
cccucuggcguugaaagau

SEQ ID NO: 330920 - RNA, 19 nt, Artificial Sequence
  Description of Artificial Sequence: Synthetic oligonucleotide
  Antisense Strand to SEQ ID NO: 330919
aucuuucaacgccagaggg

SEQ ID NO: 330921 - RNA, 19 nt, Artificial Sequence
  Description of Artificial Sequence: Synthetic oligonucleotide
  Sense Strand Starting at position 154 of SEQ ID NO: 317338
ccgaaaugcgcccgaaucu

SEQ ID NO: 330922 - RNA, 19 nt, Artificial Sequence
  Description of Artificial Sequence: Synthetic oligonucleotide
  Antisense Strand to SEQ ID NO: 330921
agauucgggcgcauuucgg

SEQ ID NO: 330923 - RNA, 19 nt, Artificial Sequence
  Description of Artificial Sequence: Synthetic oligonucleotide
  Sense Strand Starting at position 154 of SEQ ID NO: 317339
cgaaaugcgcccgaaucua

SEQ ID NO: 330924 - RNA, 19 nt, Artificial Sequence
  Description of Artificial Sequence: Synthetic oligonucleotide
  Antisense Strand to SEQ ID NO: 330923
uagauucgggcgcauuucg

SEQ ID NO: 330925 - RNA, 19 nt, Artificial Sequence
  Description of Artificial Sequence: Synthetic oligonucleotide
  Sense Strand Starting at position 154 of SEQ ID NO: 317347
gcccgaaucuagguaacaa

SEQ ID NO: 330926 - RNA, 19 nt, Artificial Sequence
  Description of Artificial Sequence: Synthetic oligonucleotide
  Antisense Strand to SEQ ID NO: 330925
uuguuaccuagauucgggc

SEQ ID NO: 330927 - RNA, 19 nt, Artificial Sequence
  Description of Artificial Sequence: Synthetic oligonucleotide
  Sense Strand Starting at position 154 of SEQ ID NO: 318907
cgcgguuucugguuucaga

SEQ ID NO: 330928 - RNA, 19 nt, Artificial Sequence
  Description of Artificial Sequence: Synthetic oligonucleotide
  Antisense Strand to SEQ ID NO: 330927
ucugaaaccagaaaccgcg

SEQ ID NO: 330929 - RNA, 19 nt, Artificial Sequence
  Description of Artificial Sequence: Synthetic oligonucleotide
  Sense Strand Starting at position 154 of SEQ ID NO: 318910
gguuucugguuucagaaag

SEQ ID NO: 330930 - RNA, 19 nt, Artificial Sequence
  Description of Artificial Sequence: Synthetic oligonucleotide
  Antisense Strand to SEQ ID NO: 330929
cuuucugaaaccagaaacc

SEQ ID NO: 330931 - RNA, 19 nt, Artificial Sequence
  Description of Artificial Sequence: Synthetic oligonucleotide
  Sense Strand Starting at position 154 of SEQ ID NO: 318953
ugauuauugugguuuacug

SEQ ID NO: 330932 - RNA, 19 nt, Artificial Sequence
  Description of Artificial Sequence: Synthetic oligonucleotide
  Antisense Strand to SEQ ID NO: 330931
caguaaaccacaauaauca

SEQ ID NO: 330933 - RNA, 19 nt, Artificial Sequence
  Description of Artificial Sequence: Synthetic oligonucleotide
  Sense Strand Starting at position 155 of SEQ ID NO: 315265
gcaagaaucuccuucccug

SEQ ID NO: 330934 - RNA, 19 nt, Artificial Sequence
  Description of Artificial Sequence: Synthetic oligonucleotide
  Antisense Strand to SEQ ID NO: 330933
cagggaaggagauucuugc

SEQ ID NO: 330935 - RNA, 19 nt, Artificial Sequence
  Description of Artificial Sequence: Synthetic oligonucleotide
  Sense Strand Starting at position 155 of SEQ ID NO: 315779
ucccucuggcguugaaaga

SEQ ID NO: 330936 - RNA, 19 nt, Artificial Sequence
  Description of Artificial Sequence: Synthetic oligonucleotide
  Antisense Strand to SEQ ID NO: 330935
ucuuucaacgccagaggga

SEQ ID NO: 330937 - RNA, 19 nt, Artificial Sequence
  Description of Artificial Sequence: Synthetic oligonucleotide
  Sense Strand Starting at position 155 of SEQ ID NO: 315780
cccucuggcguugaaagau

SEQ ID NO: 330938 - RNA, 19 nt, Artificial Sequence
  Description of Artificial Sequence: Synthetic oligonucleotide
  Antisense Strand to SEQ ID NO: 330937
aucuuucaacgccagaggg

SEQ ID NO: 330939 - RNA, 19 nt, Artificial Sequence
  Description of Artificial Sequence: Synthetic oligonucleotide
  Sense Strand Starting at position 155 of SEQ ID NO: 315812
cgaaaugcgcccgaaucua

SEQ ID NO: 330940 - RNA, 19 nt, Artificial Sequence
  Description of Artificial Sequence: Synthetic oligonucleotide
  Antisense Strand to SEQ ID NO: 330939
uagauucgggcgcauuucg

SEQ ID NO: 330941 - RNA, 19 nt, Artificial Sequence
  Description of Artificial Sequence: Synthetic oligonucleotide
  Sense Strand Starting at position 155 of SEQ ID NO: 315820
gcccgaaucuagguaacaa

SEQ ID NO: 330942 - RNA, 19 nt, Artificial Sequence
  Description of Artificial Sequence: Synthetic oligonucleotide
  Antisense Strand to SEQ ID NO: 330941
uuguuaccuagauucgggc

SEQ ID NO: 330943 - RNA, 19 nt, Artificial Sequence
  Description of Artificial Sequence: Synthetic oligonucleotide
  Sense Strand Starting at position 155 of SEQ ID NO: 317426
ugauuauugugguuuacug

SEQ ID NO: 330944 - RNA, 19 nt, Artificial Sequence
  Description of Artificial Sequence: Synthetic oligonucleotide
  Antisense Strand to SEQ ID NO: 330943
caguaaaccacaauaauca

SEQ ID NO: 330945 - RNA, 19 nt, Artificial Sequence
  Description of Artificial Sequence: Synthetic oligonucleotide
  Sense Strand Starting at position 155 of SEQ ID NO: 317709
ugagaaaggcucgaguagu

SEQ ID NO: 330946 - RNA, 19 nt, Artificial Sequence
  Description of Artificial Sequence: Synthetic oligonucleotide
  Antisense Strand to SEQ ID NO: 330945
acuacucgagccuuucuca

SEQ ID NO: 330947 - RNA, 19 nt, Artificial Sequence
  Description of Artificial Sequence: Synthetic oligonucleotide
  Sense Strand Starting at position 155 of SEQ ID NO: 317783
uuucuugagugagcacaaa

SEQ ID NO: 330948 - RNA, 19 nt, Artificial Sequence
  Description of Artificial Sequence: Synthetic oligonucleotide
  Antisense Strand to SEQ ID NO: 330947
uuugugcucacucaagaaa

SEQ ID NO: 330949 - RNA, 19 nt, Artificial Sequence
  Description of Artificial Sequence: Synthetic oligonucleotide
  Sense Strand Starting at position 155 of SEQ ID NO: 318150
uguguuuagggauaaguuu

SEQ ID NO: 330950 - RNA, 19 nt, Artificial Sequence
  Description of Artificial Sequence: Synthetic oligonucleotide
  Antisense Strand to SEQ ID NO: 330949
aaacuuaucccuaaacaca

SEQ ID NO: 330951 - RNA, 19 nt, Artificial Sequence
  Description of Artificial Sequence: Synthetic oligonucleotide
  Sense Strand Starting at position 155 of SEQ ID NO: 318189
gcaguagcgcuaguagaua

SEQ ID NO: 330952 - RNA, 19 nt, Artificial Sequence
  Description of Artificial Sequence: Synthetic oligonucleotide
  Antisense Strand to SEQ ID NO: 330951
uaucuacuagcgcuacugc

SEQ ID NO: 330953 - RNA, 19 nt, Artificial Sequence
  Description of Artificial Sequence: Synthetic oligonucleotide
  Sense Strand Starting at position 155 of SEQ ID NO: 318194
agcgcuaguagauacauua

SEQ ID NO: 330954 - RNA, 19 nt, Artificial Sequence
  Description of Artificial Sequence: Synthetic oligonucleotide
  Antisense Strand to SEQ ID NO: 330953
uaauguaucuacuagcgcu

SEQ ID NO: 330955 - RNA, 19 nt, Artificial Sequence
  Description of Artificial Sequence: Synthetic oligonucleotide
  Sense Strand Starting at position 155 of SEQ ID NO: 318279
ugguuccugauacguuauu

SEQ ID NO: 330956 - RNA, 19 nt, Artificial Sequence
  Description of Artificial Sequence: Synthetic oligonucleotide
  Antisense Strand to SEQ ID NO: 330955
aauaacguaucaggaacca

SEQ ID NO: 330957 - RNA, 19 nt, Artificial Sequence
  Description of Artificial Sequence: Synthetic oligonucleotide
  Sense Strand Starting at position 155 of SEQ ID NO: 318280
gguuccugauacguuauua

SEQ ID NO: 330958 - RNA, 19 nt, Artificial Sequence
  Description of Artificial Sequence: Synthetic oligonucleotide
  Antisense Strand to SEQ ID NO: 330957
uaauaacguaucaggaacc

SEQ ID NO: 330959 - RNA, 19 nt, Artificial Sequence
  Description of Artificial Sequence: Synthetic oligonucleotide
  Sense Strand Starting at position 155 of SEQ ID NO: 318284
ccugauacguuauuaaaca

SEQ ID NO: 330960 - RNA, 19 nt, Artificial Sequence
  Description of Artificial Sequence: Synthetic oligonucleotide
  Antisense Strand to SEQ ID NO: 330959
uguuuaauaacguaucagg

SEQ ID NO: 330961 - RNA, 19 nt, Artificial Sequence
  Description of Artificial Sequence: Synthetic oligonucleotide
  Sense Strand Starting at position 155 of SEQ ID NO: 318300
acaacugagucuuaacuga

SEQ ID NO: 330962 - RNA, 19 nt, Artificial Sequence
  Description of Artificial Sequence: Synthetic oligonucleotide
  Antisense Strand to SEQ ID NO: 330961
ucaguuaagacucaguugu

SEQ ID NO: 330963 - RNA, 19 nt, Artificial Sequence
  Description of Artificial Sequence: Synthetic oligonucleotide
  Sense Strand Starting at position 155 of SEQ ID NO: 318307
agucuuaacugaguuaauu

SEQ ID NO: 330964 - RNA, 19 nt, Artificial Sequence
  Description of Artificial Sequence: Synthetic oligonucleotide
  Antisense Strand to SEQ ID NO: 330963
aauuaacucaguuaagacu

SEQ ID NO: 330965 - RNA, 19 nt, Artificial Sequence
  Description of Artificial Sequence: Synthetic oligonucleotide
  Sense Strand Starting at position 155 of SEQ ID NO: 318359
guaacuggcauguguagau

SEQ ID NO: 330966 - RNA, 19 nt, Artificial Sequence
  Description of Artificial Sequence: Synthetic oligonucleotide
  Antisense Strand to SEQ ID NO: 330965
aucuacacaugccaguuac

SEQ ID NO: 330967 - RNA, 19 nt, Artificial Sequence
  Description of Artificial Sequence: Synthetic oligonucleotide
  Sense Strand Starting at position 155 of SEQ ID NO: 318379
aacucuacagcggguuaau

SEQ ID NO: 330968 - RNA, 19 nt, Artificial Sequence
  Description of Artificial Sequence: Synthetic oligonucleotide
  Antisense Strand to SEQ ID NO: 330967
auuaacccgcuguagaguu

SEQ ID NO: 330969 - RNA, 19 nt, Artificial Sequence
  Description of Artificial Sequence: Synthetic oligonucleotide
  Sense Strand Starting at position 155 of SEQ ID NO: 318403
acaucuauaccagguuauc

SEQ ID NO: 330970 - RNA, 19 nt, Artificial Sequence
  Description of Artificial Sequence: Synthetic oligonucleotide
  Antisense Strand to SEQ ID NO: 330969
gauaaccugguauagaugu

SEQ ID NO: 330971 - RNA, 19 nt, Artificial Sequence
  Description of Artificial Sequence: Synthetic oligonucleotide
  Sense Strand Starting at position 155 of SEQ ID NO: 318457
acagguauuuguuacaaau

SEQ ID NO: 330972 - RNA, 19 nt, Artificial Sequence
  Description of Artificial Sequence: Synthetic oligonucleotide
  Antisense Strand to SEQ ID NO: 330971
auuuguaacaaauaccugu

SEQ ID NO: 330973 - RNA, 19 nt, Artificial Sequence
  Description of Artificial Sequence: Synthetic oligonucleotide
  Sense Strand Starting at position 155 of SEQ ID NO: 318459
agguauuuguuacaaauuc

SEQ ID NO: 330974 - RNA, 19 nt, Artificial Sequence
  Description of Artificial Sequence: Synthetic oligonucleotide
  Antisense Strand to SEQ ID NO: 330973
gaauuuguaacaaauaccu

SEQ ID NO: 330975 - RNA, 19 nt, Artificial Sequence
  Description of Artificial Sequence: Synthetic oligonucleotide
  Sense Strand Starting at position 155 of SEQ ID NO: 318545
uguaacgauuugcauugaa

SEQ ID NO: 330976 - RNA, 19 nt, Artificial Sequence
  Description of Artificial Sequence: Synthetic oligonucleotide
  Antisense Strand to SEQ ID NO: 330975
uucaaugcaaaucguuaca

SEQ ID NO: 330977 - RNA, 19 nt, Artificial Sequence
  Description of Artificial Sequence: Synthetic oligonucleotide
  Sense Strand Starting at position 155 of SEQ ID NO: 318654
ccgccuuuggugggaauuu

SEQ ID NO: 330978 - RNA, 19 nt, Artificial Sequence
  Description of Artificial Sequence: Synthetic oligonucleotide
  Antisense Strand to SEQ ID NO: 330977
aaauucccaccaaaggcgg

SEQ ID NO: 330979 - RNA, 19 nt, Artificial Sequence
  Description of Artificial Sequence: Synthetic oligonucleotide
  Sense Strand Starting at position 155 of SEQ ID NO: 318750
aggaguuuggugugauggu

SEQ ID NO: 330980 - RNA, 19 nt, Artificial Sequence
  Description of Artificial Sequence: Synthetic oligonucleotide
  Antisense Strand to SEQ ID NO: 330979
accaucacaccaaacuccu

SEQ ID NO: 330981 - RNA, 19 nt, Artificial Sequence
  Description of Artificial Sequence: Synthetic oligonucleotide
  Sense Strand Starting at position 155 of SEQ ID NO: 318769
ucuggagaccugugcugua

SEQ ID NO: 330982 - RNA, 19 nt, Artificial Sequence
  Description of Artificial Sequence: Synthetic oligonucleotide
  Antisense Strand to SEQ ID NO: 330981
uacagcacaggucuccaga

SEQ ID NO: 330983 - RNA, 19 nt, Artificial Sequence
  Description of Artificial Sequence: Synthetic oligonucleotide
  Sense Strand Starting at position 155 of SEQ ID NO: 318951
auaaguugccauuaaacug

SEQ ID NO: 330984 - RNA, 19 nt, Artificial Sequence
  Description of Artificial Sequence: Synthetic oligonucleotide
  Antisense Strand to SEQ ID NO: 330983
caguuuaauggcaacuuau

SEQ ID NO: 330985 - RNA, 19 nt, Artificial Sequence
  Description of Artificial Sequence: Synthetic oligonucleotide
  Sense Strand Starting at position 155 of SEQ ID NO: 318996
ugagacuauuuagguaacu

SEQ ID NO: 330986 - RNA, 19 nt, Artificial Sequence
  Description of Artificial Sequence: Synthetic oligonucleotide
  Antisense Strand to SEQ ID NO: 330985
aguuaccuaaauagucuca

SEQ ID NO: 330987 - RNA, 19 nt, Artificial Sequence
  Description of Artificial Sequence: Synthetic oligonucleotide
  Sense Strand Starting at position 155 of SEQ ID NO: 319008
gguaacuaguaacaggauu

SEQ ID NO: 330988 - RNA, 19 nt, Artificial Sequence
  Description of Artificial Sequence: Synthetic oligonucleotide
  Antisense Strand to SEQ ID NO: 330987
aauccuguuacuaguuacc

SEQ ID NO: 330989 - RNA, 19 nt, Artificial Sequence
  Description of Artificial Sequence: Synthetic oligonucleotide
  Sense Strand Starting at position 155 of SEQ ID NO: 319048
cuuuguaucgaauaggucu

SEQ ID NO: 330990 - RNA, 19 nt, Artificial Sequence
  Description of Artificial Sequence: Synthetic oligonucleotide
  Antisense Strand to SEQ ID NO: 330989
agaccuauucgauacaaag

SEQ ID NO: 330991 - RNA, 19 nt, Artificial Sequence
  Description of Artificial Sequence: Synthetic oligonucleotide
  Sense Strand Starting at position 155 of SEQ ID NO: 319055
ucgaauaggucuuuggagu

SEQ ID NO: 330992 - RNA, 19 nt, Artificial Sequence
  Description of Artificial Sequence: Synthetic oligonucleotide
  Antisense Strand to SEQ ID NO: 330991
acuccaaagaccuauucga

SEQ ID NO: 330993 - RNA, 19 nt, Artificial Sequence
  Description of Artificial Sequence: Synthetic oligonucleotide
  Sense Strand Starting at position 155 of SEQ ID NO: 319056
cgaauaggucuuuggaguu

SEQ ID NO: 330994 - RNA, 19 nt, Artificial Sequence
  Description of Artificial Sequence: Synthetic oligonucleotide
  Antisense Strand to SEQ ID NO: 330993
aacuccaaagaccuauucg

SEQ ID NO: 330995 - RNA, 19 nt, Artificial Sequence
  Description of Artificial Sequence: Synthetic oligonucleotide
  Sense Strand Starting at position 155 of SEQ ID NO: 319090
gccuccagaugcuuggaau

SEQ ID NO: 330996 - RNA, 19 nt, Artificial Sequence
  Description of Artificial Sequence: Synthetic oligonucleotide
  Antisense Strand to SEQ ID NO: 330995
auuccaagcaucuggaggc

SEQ ID NO: 330997 - RNA, 19 nt, Artificial Sequence
  Description of Artificial Sequence: Synthetic oligonucleotide
  Sense Strand Starting at position 155 of SEQ ID NO: 319091
ccuccagaugcuuggaauu

SEQ ID NO: 330998 - RNA, 19 nt, Artificial Sequence
  Description of Artificial Sequence: Synthetic oligonucleotide
  Antisense Strand to SEQ ID NO: 330997
aauuccaagcaucuggagg

SEQ ID NO: 330999 - RNA, 19 nt, Artificial Sequence
  Description of Artificial Sequence: Synthetic oligonucleotide
  Sense Strand Starting at position 155 of SEQ ID NO: 319101
cuuggaauuguauaggcau

SEQ ID NO: 331000 - RNA, 19 nt, Artificial Sequence
  Description of Artificial Sequence: Synthetic oligonucleotide
  Antisense Strand to SEQ ID NO: 330999
augccuauacaauuccaag

SEQ ID NO: 331001 - RNA, 19 nt, Artificial Sequence
  Description of Artificial Sequence: Synthetic oligonucleotide
  Sense Strand Starting at position 155 of SEQ ID NO: 319103
uggaauuguauaggcauca

SEQ ID NO: 331002 - RNA, 19 nt, Artificial Sequence
  Description of Artificial Sequence: Synthetic oligonucleotide
  Antisense Strand to SEQ ID NO: 331001
ugaugccuauacaauucca

SEQ ID NO: 331003 - RNA, 19 nt, Artificial Sequence
  Description of Artificial Sequence: Synthetic oligonucleotide
  Sense Strand Starting at position 155 of SEQ ID NO: 319104
ggaauuguauaggcaucau

SEQ ID NO: 331004 - RNA, 19 nt, Artificial Sequence
  Description of Artificial Sequence: Synthetic oligonucleotide
  Antisense Strand to SEQ ID NO: 331003
augaugccuauacaauucc

SEQ ID NO: 331005 - RNA, 19 nt, Artificial Sequence
  Description of Artificial Sequence: Synthetic oligonucleotide
  Sense Strand Starting at position 155 of SEQ ID NO: 319144
cgguuacuagucuacacaa

SEQ ID NO: 331006 - RNA, 19 nt, Artificial Sequence
  Description of Artificial Sequence: Synthetic oligonucleotide
  Antisense Strand to SEQ ID NO: 331005
uuguguagacuaguaaccg

SEQ ID NO: 331007 - RNA, 19 nt, Artificial Sequence
  Description of Artificial Sequence: Synthetic oligonucleotide
  Sense Strand Starting at position 155 of SEQ ID NO: 319146
guuacuagucuacacaauu

SEQ ID NO: 331008 - RNA, 19 nt, Artificial Sequence
  Description of Artificial Sequence: Synthetic oligonucleotide
  Antisense Strand to SEQ ID NO: 331007
aauuguguagacuaguaac

SEQ ID NO: 331009 - RNA, 19 nt, Artificial Sequence
  Description of Artificial Sequence: Synthetic oligonucleotide
  Sense Strand Starting at position 155 of SEQ ID NO: 319185
cucugcaucuaaguaguuu

SEQ ID NO: 331010 - RNA, 19 nt, Artificial Sequence
  Description of Artificial Sequence: Synthetic oligonucleotide
  Antisense Strand to SEQ ID NO: 331009
aaacuacuuagaugcagag

SEQ ID NO: 331011 - RNA, 19 nt, Artificial Sequence
  Description of Artificial Sequence: Synthetic oligonucleotide
  Sense Strand Starting at position 155 of SEQ ID NO: 319189
gcaucuaaguaguuuacau

SEQ ID NO: 331012 - RNA, 19 nt, Artificial Sequence
  Description of Artificial Sequence: Synthetic oligonucleotide
  Antisense Strand to SEQ ID NO: 331011
auguaaacuacuuagaugc

SEQ ID NO: 331013 - RNA, 19 nt, Artificial Sequence
  Description of Artificial Sequence: Synthetic oligonucleotide
  Sense Strand Starting at position 156 of SEQ ID NO: 315433
ucggcuuauguuuguauuu

SEQ ID NO: 331014 - RNA, 19 nt, Artificial Sequence
  Description of Artificial Sequence: Synthetic oligonucleotide
  Antisense Strand to SEQ ID NO: 331013
aaauacaaacauaagccga

SEQ ID NO: 331015 - RNA, 19 nt, Artificial Sequence
  Description of Artificial Sequence: Synthetic oligonucleotide
  Sense Strand Starting at position 156 of SEQ ID NO: 315553
acugcuuaugaguaccaau

SEQ ID NO: 331016 - RNA, 19 nt, Artificial Sequence
  Description of Artificial Sequence: Synthetic oligonucleotide
  Antisense Strand to SEQ ID NO: 331015
auugguacucauaagcagu

SEQ ID NO: 331017 - RNA, 19 nt, Artificial Sequence
  Description of Artificial Sequence: Synthetic oligonucleotide
  Sense Strand Starting at position 156 of SEQ ID NO: 315663
auggcagaacuuugaaguu

SEQ ID NO: 331018 - RNA, 19 nt, Artificial Sequence
  Description of Artificial Sequence: Synthetic oligonucleotide
  Antisense Strand to SEQ ID NO: 331017
aacuucaaaguucugccau

SEQ ID NO: 331019 - RNA, 19 nt, Artificial Sequence
  Description of Artificial Sequence: Synthetic oligonucleotide
  Sense Strand Starting at position 156 of SEQ ID NO: 316330
acugcaaagugguuuccau

SEQ ID NO: 331020 - RNA, 19 nt, Artificial Sequence
  Description of Artificial Sequence: Synthetic oligonucleotide
  Antisense Strand to SEQ ID NO: 331019
auggaaaccacuuugcagu

SEQ ID NO: 331021 - RNA, 19 nt, Artificial Sequence
  Description of Artificial Sequence: Synthetic oligonucleotide
  Sense Strand Starting at position 156 of SEQ ID NO: 316337
agugguuuccaugacuggu

SEQ ID NO: 331022 - RNA, 19 nt, Artificial Sequence
  Description of Artificial Sequence: Synthetic oligonucleotide
  Antisense Strand to SEQ ID NO: 331021
accagucauggaaaccacu

SEQ ID NO: 331023 - RNA, 19 nt, Artificial Sequence
  Description of Artificial Sequence: Synthetic oligonucleotide
  Sense Strand Starting at position 156 of SEQ ID NO: 316412
aacuguuuccuaggccaga

SEQ ID NO: 331024 - RNA, 19 nt, Artificial Sequence
  Description of Artificial Sequence: Synthetic oligonucleotide
  Antisense Strand to SEQ ID NO: 331023
ucuggccuaggaaacaguu

SEQ ID NO: 331025 - RNA, 19 nt, Artificial Sequence
  Description of Artificial Sequence: Synthetic oligonucleotide
  Sense Strand Starting at position 156 of SEQ ID NO: 316413
acuguuuccuaggccagau

SEQ ID NO: 331026 - RNA, 19 nt, Artificial Sequence
  Description of Artificial Sequence: Synthetic oligonucleotide
  Antisense Strand to SEQ ID NO: 331025
aucuggccuaggaaacagu

SEQ ID NO: 331027 - RNA, 19 nt, Artificial Sequence
  Description of Artificial Sequence: Synthetic oligonucleotide
  Sense Strand Starting at position 156 of SEQ ID NO: 316434
ugaagaaugucugucaacu

SEQ ID NO: 331028 - RNA, 19 nt, Artificial Sequence
  Description of Artificial Sequence: Synthetic oligonucleotide
  Antisense Strand to SEQ ID NO: 331027
aguugacagacauucuuca

SEQ ID NO: 331029 - RNA, 19 nt, Artificial Sequence
  Description of Artificial Sequence: Synthetic oligonucleotide
  Sense Strand Starting at position 156 of SEQ ID NO: 316490
gagcacugucaugaacuaa

SEQ ID NO: 331030 - RNA, 19 nt, Artificial Sequence
  Description of Artificial Sequence: Synthetic oligonucleotide
  Antisense Strand to SEQ ID NO: 331029
uuaguucaugacagugcuc

SEQ ID NO: 331031 - RNA, 19 nt, Artificial Sequence
  Description of Artificial Sequence: Synthetic oligonucleotide
  Sense Strand Starting at position 156 of SEQ ID NO: 316620
ccugcaguucuccaagacu

SEQ ID NO: 331032 - RNA, 19 nt, Artificial Sequence
  Description of Artificial Sequence: Synthetic oligonucleotide
  Antisense Strand to SEQ ID NO: 331031
agucuuggagaacugcagg

SEQ ID NO: 331033 - RNA, 19 nt, Artificial Sequence
  Description of Artificial Sequence: Synthetic oligonucleotide
  Sense Strand Starting at position 156 of SEQ ID NO: 316765
ucucauucucaggagcaca

SEQ ID NO: 331034 - RNA, 19 nt, Artificial Sequence
  Description of Artificial Sequence: Synthetic oligonucleotide
  Antisense Strand to SEQ ID NO: 331033
ugugcuccugagaaugaga

SEQ ID NO: 331035 - RNA, 19 nt, Artificial Sequence
  Description of Artificial Sequence: Synthetic oligonucleotide
  Sense Strand Starting at position 156 of SEQ ID NO: 316906
cugugcacuccugggaaua

SEQ ID NO: 331036 - RNA, 19 nt, Artificial Sequence
  Description of Artificial Sequence: Synthetic oligonucleotide
  Antisense Strand to SEQ ID NO: 331035
uauucccaggagugcacag

SEQ ID NO: 331037 - RNA, 19 nt, Artificial Sequence
  Description of Artificial Sequence: Synthetic oligonucleotide
  Sense Strand Starting at position 156 of SEQ ID NO: 316907
ugugcacuccugggaauaa

SEQ ID NO: 331038 - RNA, 19 nt, Artificial Sequence
  Description of Artificial Sequence: Synthetic oligonucleotide
  Antisense Strand to SEQ ID NO: 331037
uuauucccaggagugcaca

SEQ ID NO: 331039 - RNA, 19 nt, Artificial Sequence
  Description of Artificial Sequence: Synthetic oligonucleotide
  Sense Strand Starting at position 156 of SEQ ID NO: 317009
cgaccaugucuuuauguaa

SEQ ID NO: 331040 - RNA, 19 nt, Artificial Sequence
  Description of Artificial Sequence: Synthetic oligonucleotide
  Antisense Strand to SEQ ID NO: 331039
uuacauaaagacauggucg

SEQ ID NO: 331041 - RNA, 19 nt, Artificial Sequence
  Description of Artificial Sequence: Synthetic oligonucleotide
  Sense Strand Starting at position 156 of SEQ ID NO: 317021
uauguaaugcauuggaaau

SEQ ID NO: 331042 - RNA, 19 nt, Artificial Sequence
  Description of Artificial Sequence: Synthetic oligonucleotide
  Antisense Strand to SEQ ID NO: 331041
auuuccaaugcauuacaua

SEQ ID NO: 331043 - RNA, 19 nt, Artificial Sequence
  Description of Artificial Sequence: Synthetic oligonucleotide
  Sense Strand Starting at position 156 of SEQ ID NO: 317022
auguaaugcauuggaaaug

SEQ ID NO: 331044 - RNA, 19 nt, Artificial Sequence
  Description of Artificial Sequence: Synthetic oligonucleotide
  Antisense Strand to SEQ ID NO: 331043
cauuuccaaugcauuacau

SEQ ID NO: 331045 - RNA, 19 nt, Artificial Sequence
  Description of Artificial Sequence: Synthetic oligonucleotide
  Sense Strand Starting at position 156 of SEQ ID NO: 317094
ccacgauuuccuggagcuu

SEQ ID NO: 331046 - RNA, 19 nt, Artificial Sequence
  Description of Artificial Sequence: Synthetic oligonucleotide
  Antisense Strand to SEQ ID NO: 331045
aagcuccaggaaaucgugg

SEQ ID NO: 331047 - RNA, 19 nt, Artificial Sequence
  Description of Artificial Sequence: Synthetic oligonucleotide
  Sense Strand Starting at position 156 of SEQ ID NO: 317543
ggaagagucuuggcaggga

SEQ ID NO: 331048 - RNA, 19 nt, Artificial Sequence
  Description of Artificial Sequence: Synthetic oligonucleotide
  Antisense Strand to SEQ ID NO: 331047
ucccugccaagacucuucc

SEQ ID NO: 331049 - RNA, 19 nt, Artificial Sequence
  Description of Artificial Sequence: Synthetic oligonucleotide
  Sense Strand Starting at position 156 of SEQ ID NO: 317546
agagucuuggcagggauga

SEQ ID NO: 331050 - RNA, 19 nt, Artificial Sequence
  Description of Artificial Sequence: Synthetic oligonucleotide
  Antisense Strand to SEQ ID NO: 331049
ucaucccugccaagacucu

SEQ ID NO: 331051 - RNA, 19 nt, Artificial Sequence
  Description of Artificial Sequence: Synthetic oligonucleotide
  Sense Strand Starting at position 156 of SEQ ID NO: 317579
cuagaaagcaucuggguaa

SEQ ID NO: 331052 - RNA, 19 nt, Artificial Sequence
  Description of Artificial Sequence: Synthetic oligonucleotide
  Antisense Strand to SEQ ID NO: 331051
uuacccagaugcuuucuag

SEQ ID NO: 331053 - RNA, 19 nt, Artificial Sequence
  Description of Artificial Sequence: Synthetic oligonucleotide
  Sense Strand Starting at position 156 of SEQ ID NO: 317735
uccuuuaagcguuaucuaa

SEQ ID NO: 331054 - RNA, 19 nt, Artificial Sequence
  Description of Artificial Sequence: Synthetic oligonucleotide
  Antisense Strand to SEQ ID NO: 331053
uuagauaacgcuuaaagga

SEQ ID NO: 331055 - RNA, 19 nt, Artificial Sequence
  Description of Artificial Sequence: Synthetic oligonucleotide
  Sense Strand Starting at position 156 of SEQ ID NO: 317939
gggcuucaguggguaacuu

SEQ ID NO: 331056 - RNA, 19 nt, Artificial Sequence
  Description of Artificial Sequence: Synthetic oligonucleotide
  Antisense Strand to SEQ ID NO: 331055
aaguuacccacugaagccc

SEQ ID NO: 331057 - RNA, 19 nt, Artificial Sequence
  Description of Artificial Sequence: Synthetic oligonucleotide
  Sense Strand Starting at position 156 of SEQ ID NO: 317940
ggcuucaguggguaacuuu

SEQ ID NO: 331058 - RNA, 19 nt, Artificial Sequence
  Description of Artificial Sequence: Synthetic oligonucleotide
  Antisense Strand to SEQ ID NO: 331057
aaaguuacccacugaagcc

SEQ ID NO: 331059 - RNA, 19 nt, Artificial Sequence
  Description of Artificial Sequence: Synthetic oligonucleotide
  Sense Strand Starting at position 156 of SEQ ID NO: 318002
gggaguuuacuugagguuu

SEQ ID NO: 331060 - RNA, 19 nt, Artificial Sequence
  Description of Artificial Sequence: Synthetic oligonucleotide
  Antisense Strand to SEQ ID NO: 331059
aaaccucaaguaaacuccc

SEQ ID NO: 331061 - RNA, 19 nt, Artificial Sequence
  Description of Artificial Sequence: Synthetic oligonucleotide
  Sense Strand Starting at position 156 of SEQ ID NO: 318008
uuacuugagguuuggguua

SEQ ID NO: 331062 - RNA, 19 nt, Artificial Sequence
  Description of Artificial Sequence: Synthetic oligonucleotide
  Antisense Strand to SEQ ID NO: 331061
uaacccaaaccucaaguaa

SEQ ID NO: 331063 - RNA, 19 nt, Artificial Sequence
  Description of Artificial Sequence: Synthetic oligonucleotide
  Sense Strand Starting at position 156 of SEQ ID NO: 318021
ggguuacugugagcagacu

SEQ ID NO: 331064 - RNA, 19 nt, Artificial Sequence
  Description of Artificial Sequence: Synthetic oligonucleotide
  Antisense Strand to SEQ ID NO: 331063
agucugcucacaguaaccc

SEQ ID NO: 331065 - RNA, 19 nt, Artificial Sequence
  Description of Artificial Sequence: Synthetic oligonucleotide
  Sense Strand Starting at position 156 of SEQ ID NO: 318022
gguuacugugagcagacua

SEQ ID NO: 331066 - RNA, 19 nt, Artificial Sequence
  Description of Artificial Sequence: Synthetic oligonucleotide
  Antisense Strand to SEQ ID NO: 331065
uagucugcucacaguaacc

SEQ ID NO: 331067 - RNA, 19 nt, Artificial Sequence
  Description of Artificial Sequence: Synthetic oligonucleotide
  Sense Strand Starting at position 156 of SEQ ID NO: 318047
gugacuaguauuggcauca

SEQ ID NO: 331068 - RNA, 19 nt, Artificial Sequence
  Description of Artificial Sequence: Synthetic oligonucleotide
  Antisense Strand to SEQ ID NO: 331067
ugaugccaauacuagucac

SEQ ID NO: 331069 - RNA, 19 nt, Artificial Sequence
  Description of Artificial Sequence: Synthetic oligonucleotide
  Sense Strand Starting at position 156 of SEQ ID NO: 318149
uccauucuucgggauccau

SEQ ID NO: 331070 - RNA, 19 nt, Artificial Sequence
  Description of Artificial Sequence: Synthetic oligonucleotide
  Antisense Strand to SEQ ID NO: 331069
auggaucccgaagaaugga

SEQ ID NO: 331071 - RNA, 19 nt, Artificial Sequence
  Description of Artificial Sequence: Synthetic oligonucleotide
  Sense Strand Starting at position 156 of SEQ ID NO: 318273
gacauagcuucuucuaggu

SEQ ID NO: 331072 - RNA, 19 nt, Artificial Sequence
  Description of Artificial Sequence: Synthetic oligonucleotide
  Antisense Strand to SEQ ID NO: 331071
accuagaagaagcuauguc

SEQ ID NO: 331073 - RNA, 19 nt, Artificial Sequence
  Description of Artificial Sequence: Synthetic oligonucleotide
  Sense Strand Starting at position 156 of SEQ ID NO: 318340
gguauuuccuugucugguu

SEQ ID NO: 331074 - RNA, 19 nt, Artificial Sequence
  Description of Artificial Sequence: Synthetic oligonucleotide
  Antisense Strand to SEQ ID NO: 331073
aaccagacaaggaaauacc

SEQ ID NO: 331075 - RNA, 19 nt, Artificial Sequence
  Description of Artificial Sequence: Synthetic oligonucleotide
  Sense Strand Starting at position 156 of SEQ ID NO: 318456
guugguguccaugcugcaa

SEQ ID NO: 331076 - RNA, 19 nt, Artificial Sequence
  Description of Artificial Sequence: Synthetic oligonucleotide
  Antisense Strand to SEQ ID NO: 331075
uugcagcauggacaccaac

SEQ ID NO: 331077 - RNA, 19 nt, Artificial Sequence
  Description of Artificial Sequence: Synthetic oligonucleotide
  Sense Strand Starting at position 156 of SEQ ID NO: 318546
aagugaaggugucuuauaa

SEQ ID NO: 331078 - RNA, 19 nt, Artificial Sequence
  Description of Artificial Sequence: Synthetic oligonucleotide
  Antisense Strand to SEQ ID NO: 331077
uuauaagacaccuucacuu

SEQ ID NO: 331079 - RNA, 19 nt, Artificial Sequence
  Description of Artificial Sequence: Synthetic oligonucleotide
  Sense Strand Starting at position 156 of SEQ ID NO: 318694
ccucaaggaucugccauau

SEQ ID NO: 331080 - RNA, 19 nt, Artificial Sequence
  Description of Artificial Sequence: Synthetic oligonucleotide
  Antisense Strand to SEQ ID NO: 331079
auauggcagauccuugagg

SEQ ID NO: 331081 - RNA, 19 nt, Artificial Sequence
  Description of Artificial Sequence: Synthetic oligonucleotide
  Sense Strand Starting at position 156 of SEQ ID NO: 318776
gagccuugugcagagaacu

SEQ ID NO: 331082 - RNA, 19 nt, Artificial Sequence
  Description of Artificial Sequence: Synthetic oligonucleotide
  Antisense Strand to SEQ ID NO: 331081
aguucucugcacaaggcuc

SEQ ID NO: 331083 - RNA, 19 nt, Artificial Sequence
  Description of Artificial Sequence: Synthetic oligonucleotide
  Sense Strand Starting at position 156 of SEQ ID NO: 318922
agcuuuaauccauaacgac

SEQ ID NO: 331084 - RNA, 19 nt, Artificial Sequence
  Description of Artificial Sequence: Synthetic oligonucleotide
  Antisense Strand to SEQ ID NO: 331083
gucguuauggauuaaagcu

SEQ ID NO: 331085 - RNA, 19 nt, Artificial Sequence
  Description of Artificial Sequence: Synthetic oligonucleotide
  Sense Strand Starting at position 156 of SEQ ID NO: 319003
cguugcuaucaucaaagua

SEQ ID NO: 331086 - RNA, 19 nt, Artificial Sequence
  Description of Artificial Sequence: Synthetic oligonucleotide
  Antisense Strand to SEQ ID NO: 331085
uacuuugaugauagcaacg

SEQ ID NO: 331087 - RNA, 19 nt, Artificial Sequence
  Description of Artificial Sequence: Synthetic oligonucleotide
  Sense Strand Starting at position 156 of SEQ ID NO: 319087
ucuagcggucuccagagaa

SEQ ID NO: 331088 - RNA, 19 nt, Artificial Sequence
  Description of Artificial Sequence: Synthetic oligonucleotide
  Antisense Strand to SEQ ID NO: 331087
uucucuggagaccgcuaga

SEQ ID NO: 331089 - RNA, 19 nt, Artificial Sequence
  Description of Artificial Sequence: Synthetic oligonucleotide
  Sense Strand Starting at position 156 of SEQ ID NO: 319091
gcggucuccagagaauuaa

SEQ ID NO: 331090 - RNA, 19 nt, Artificial Sequence
  Description of Artificial Sequence: Synthetic oligonucleotide
  Antisense Strand to SEQ ID NO: 331089
uuaauucucuggagaccgc

SEQ ID NO: 331091 - RNA, 19 nt, Artificial Sequence
  Description of Artificial Sequence: Synthetic oligonucleotide
  Sense Strand Starting at position 156 of SEQ ID NO: 319123
uuaggcuugcacuaaauaa

SEQ ID NO: 331092 - RNA, 19 nt, Artificial Sequence
  Description of Artificial Sequence: Synthetic oligonucleotide
  Antisense Strand to SEQ ID NO: 331091
uuauuuagugcaagccuaa

SEQ ID NO: 331093 - RNA, 19 nt, Artificial Sequence
  Description of Artificial Sequence: Synthetic oligonucleotide
  Sense Strand Starting at position 157 of SEQ ID NO: 315348
acugaauguccauaagcuu

SEQ ID NO: 331094 - RNA, 19 nt, Artificial Sequence
  Description of Artificial Sequence: Synthetic oligonucleotide
  Antisense Strand to SEQ ID NO: 331093
aagcuuauggacauucagu

SEQ ID NO: 331095 - RNA, 19 nt, Artificial Sequence
  Description of Artificial Sequence: Synthetic oligonucleotide
  Sense Strand Starting at position 157 of SEQ ID NO: 315473
acaauaugugagcaaaucu

SEQ ID NO: 331096 - RNA, 19 nt, Artificial Sequence
  Description of Artificial Sequence: Synthetic oligonucleotide
  Antisense Strand to SEQ ID NO: 331095
agauuugcucacauauugu

SEQ ID NO: 331097 - RNA, 19 nt, Artificial Sequence
  Description of Artificial Sequence: Synthetic oligonucleotide
  Sense Strand Starting at position 157 of SEQ ID NO: 315565
acacgaucacuuggaggua

SEQ ID NO: 331098 - RNA, 19 nt, Artificial Sequence
  Description of Artificial Sequence: Synthetic oligonucleotide
  Antisense Strand to SEQ ID NO: 331097
uaccuccaagugaucgugu

SEQ ID NO: 331099 - RNA, 19 nt, Artificial Sequence
  Description of Artificial Sequence: Synthetic oligonucleotide
  Sense Strand Starting at position 157 of SEQ ID NO: 315568
cgaucacuuggagguaaga

SEQ ID NO: 331100 - RNA, 19 nt, Artificial Sequence
  Description of Artificial Sequence: Synthetic oligonucleotide
  Antisense Strand to SEQ ID NO: 331099
ucuuaccuccaagugaucg

SEQ ID NO: 331101 - RNA, 19 nt, Artificial Sequence
  Description of Artificial Sequence: Synthetic oligonucleotide
  Sense Strand Starting at position 157 of SEQ ID NO: 315610
caguauuacgugcaaacug

SEQ ID NO: 331102 - RNA, 19 nt, Artificial Sequence
  Description of Artificial Sequence: Synthetic oligonucleotide
  Antisense Strand to SEQ ID NO: 331101
caguuugcacguaauacug

SEQ ID NO: 331103 - RNA, 19 nt, Artificial Sequence
  Description of Artificial Sequence: Synthetic oligonucleotide
  Sense Strand Starting at position 157 of SEQ ID NO: 315619
gugcaaacuguauauggga

SEQ ID NO: 331104 - RNA, 19 nt, Artificial Sequence
  Description of Artificial Sequence: Synthetic oligonucleotide
  Antisense Strand to SEQ ID NO: 331103
ucccauauacaguuugcac

SEQ ID NO: 331105 - RNA, 19 nt, Artificial Sequence
  Description of Artificial Sequence: Synthetic oligonucleotide
  Sense Strand Starting at position 157 of SEQ ID NO: 315621
gcaaacuguauaugggaua

SEQ ID NO: 331106 - RNA, 19 nt, Artificial Sequence
  Description of Artificial Sequence: Synthetic oligonucleotide
  Antisense Strand to SEQ ID NO: 331105
uaucccauauacaguuugc

SEQ ID NO: 331107 - RNA, 19 nt, Artificial Sequence
  Description of Artificial Sequence: Synthetic oligonucleotide
  Sense Strand Starting at position 157 of SEQ ID NO: 315640
gaauuacuauagcuuguga

SEQ ID NO: 331108 - RNA, 19 nt, Artificial Sequence
  Description of Artificial Sequence: Synthetic oligonucleotide
  Antisense Strand to SEQ ID NO: 331107
ucacaagcuauaguaauuc

SEQ ID NO: 331109 - RNA, 19 nt, Artificial Sequence
  Description of Artificial Sequence: Synthetic oligonucleotide
  Sense Strand Starting at position 157 of SEQ ID NO: 315651
gcuugugagggcagguaau

SEQ ID NO: 331110 - RNA, 19 nt, Artificial Sequence
  Description of Artificial Sequence: Synthetic oligonucleotide
  Antisense Strand to SEQ ID NO: 331109
auuaccugcccucacaagc

SEQ ID NO: 331111 - RNA, 19 nt, Artificial Sequence
  Description of Artificial Sequence: Synthetic oligonucleotide
  Sense Strand Starting at position 157 of SEQ ID NO: 315769
ucccauguccuccaaguuu

SEQ ID NO: 331112 - RNA, 19 nt, Artificial Sequence
  Description of Artificial Sequence: Synthetic oligonucleotide
  Antisense Strand to SEQ ID NO: 331111
aaacuuggaggacauggga

SEQ ID NO: 331113 - RNA, 19 nt, Artificial Sequence
  Description of Artificial Sequence: Synthetic oligonucleotide
  Sense Strand Starting at position 157 of SEQ ID NO: 315855
aguguucuagcccaauuag

SEQ ID NO: 331114 - RNA, 19 nt, Artificial Sequence
  Description of Artificial Sequence: Synthetic oligonucleotide
  Antisense Strand to SEQ ID NO: 331113
cuaauugggcuagaacacu

SEQ ID NO: 331115 - RNA, 19 nt, Artificial Sequence
  Description of Artificial Sequence: Synthetic oligonucleotide
  Sense Strand Starting at position 157 of SEQ ID NO: 315907
agacuacuccgagagcacu

SEQ ID NO: 331116 - RNA, 19 nt, Artificial Sequence
  Description of Artificial Sequence: Synthetic oligonucleotide
  Antisense Strand to SEQ ID NO: 331115
agugcucucggaguagucu

SEQ ID NO: 331117 - RNA, 19 nt, Artificial Sequence
  Description of Artificial Sequence: Synthetic oligonucleotide
  Sense Strand Starting at position 157 of SEQ ID NO: 315928
uaaugaggcaaguaguguu

SEQ ID NO: 331118 - RNA, 19 nt, Artificial Sequence
  Description of Artificial Sequence: Synthetic oligonucleotide
  Antisense Strand to SEQ ID NO: 331117
aacacuacuugccucauua

SEQ ID NO: 331119 - RNA, 19 nt, Artificial Sequence
  Description of Artificial Sequence: Synthetic oligonucleotide
  Sense Strand Starting at position 157 of SEQ ID NO: 315938
aguaguguuaggugaauga

SEQ ID NO: 331120 - RNA, 19 nt, Artificial Sequence
  Description of Artificial Sequence: Synthetic oligonucleotide
  Antisense Strand to SEQ ID NO: 331119
ucauucaccuaacacuacu

SEQ ID NO: 331121 - RNA, 19 nt, Artificial Sequence
  Description of Artificial Sequence: Synthetic oligonucleotide
  Sense Strand Starting at position 157 of SEQ ID NO: 315985
cggguagagaacugauuag

SEQ ID NO: 331122 - RNA, 19 nt, Artificial Sequence
  Description of Artificial Sequence: Synthetic oligonucleotide
  Antisense Strand to SEQ ID NO: 331121
cuaaucaguucucuacccg

SEQ ID NO: 331123 - RNA, 19 nt, Artificial Sequence
  Description of Artificial Sequence: Synthetic oligonucleotide
  Sense Strand Starting at position 157 of SEQ ID NO: 316031
gcaggacuagcaugguaaa

SEQ ID NO: 331124 - RNA, 19 nt, Artificial Sequence
  Description of Artificial Sequence: Synthetic oligonucleotide
  Antisense Strand to SEQ ID NO: 331123
uuuaccaugcuaguccugc

SEQ ID NO: 331125 - RNA, 19 nt, Artificial Sequence
  Description of Artificial Sequence: Synthetic oligonucleotide
  Sense Strand Starting at position 157 of SEQ ID NO: 316144
acucuaggauacucaaagu

SEQ ID NO: 331126 - RNA, 19 nt, Artificial Sequence
  Description of Artificial Sequence: Synthetic oligonucleotide
  Antisense Strand to SEQ ID NO: 331125
acuuugaguauccuagagu

SEQ ID NO: 331127 - RNA, 19 nt, Artificial Sequence
  Description of Artificial Sequence: Synthetic oligonucleotide
  Sense Strand Starting at position 157 of SEQ ID NO: 316306
ucaggaaaucugcacguuu

SEQ ID NO: 331128 - RNA, 19 nt, Artificial Sequence
  Description of Artificial Sequence: Synthetic oligonucleotide
  Antisense Strand to SEQ ID NO: 331127
aaacgugcagauuuccuga

SEQ ID NO: 331129 - RNA, 19 nt, Artificial Sequence
  Description of Artificial Sequence: Synthetic oligonucleotide
  Sense Strand Starting at position 157 of SEQ ID NO: 316334
ccaagaaagccugauguac

SEQ ID NO: 331130 - RNA, 19 nt, Artificial Sequence
  Description of Artificial Sequence: Synthetic oligonucleotide
  Antisense Strand to SEQ ID NO: 331129
guacaucaggcuuucuugg

SEQ ID NO: 331131 - RNA, 19 nt, Artificial Sequence
  Description of Artificial Sequence: Synthetic oligonucleotide
  Sense Strand Starting at position 157 of SEQ ID NO: 316350
uacuccaacgucugagauu

SEQ ID NO: 331132 - RNA, 19 nt, Artificial Sequence
  Description of Artificial Sequence: Synthetic oligonucleotide
  Antisense Strand to SEQ ID NO: 331131
aaucucagacguuggagua

SEQ ID NO: 331133 - RNA, 19 nt, Artificial Sequence
  Description of Artificial Sequence: Synthetic oligonucleotide
  Sense Strand Starting at position 157 of SEQ ID NO: 316471
ucgcuucugagauaccagu

SEQ ID NO: 331134 - RNA, 19 nt, Artificial Sequence
  Description of Artificial Sequence: Synthetic oligonucleotide
  Antisense Strand to SEQ ID NO: 331133
acugguaucucagaagcga

SEQ ID NO: 331135 - RNA, 19 nt, Artificial Sequence
  Description of Artificial Sequence: Synthetic oligonucleotide
  Sense Strand Starting at position 157 of SEQ ID NO: 316640
ugaguuggagagugaacaa

SEQ ID NO: 331136 - RNA, 19 nt, Artificial Sequence
  Description of Artificial Sequence: Synthetic oligonucleotide
  Antisense Strand to SEQ ID NO: 331135
uuguucacucuccaacuca

SEQ ID NO: 331137 - RNA, 19 nt, Artificial Sequence
  Description of Artificial Sequence: Synthetic oligonucleotide
  Sense Strand Starting at position 157 of SEQ ID NO: 316671
acgccuagacauugguaaa

SEQ ID NO: 331138 - RNA, 19 nt, Artificial Sequence
  Description of Artificial Sequence: Synthetic oligonucleotide
  Antisense Strand to SEQ ID NO: 331137
uuuaccaaugucuaggcgu

SEQ ID NO: 331139 - RNA, 19 nt, Artificial Sequence
  Description of Artificial Sequence: Synthetic oligonucleotide
  Sense Strand Starting at position 157 of SEQ ID NO: 316674
ccuagacauugguaaauuu

SEQ ID NO: 331140 - RNA, 19 nt, Artificial Sequence
  Description of Artificial Sequence: Synthetic oligonucleotide
  Antisense Strand to SEQ ID NO: 331139
aaauuuaccaaugucuagg

SEQ ID NO: 331141 - RNA, 19 nt, Artificial Sequence
  Description of Artificial Sequence: Synthetic oligonucleotide
  Sense Strand Starting at position 157 of SEQ ID NO: 316937
gacccugacggcuggaaau

SEQ ID NO: 331142 - RNA, 19 nt, Artificial Sequence
  Description of Artificial Sequence: Synthetic oligonucleotide
  Antisense Strand to SEQ ID NO: 331141
auuuccagccgucaggguc

SEQ ID NO: 331143 - RNA, 19 nt, Artificial Sequence
  Description of Artificial Sequence: Synthetic oligonucleotide
  Sense Strand Starting at position 157 of SEQ ID NO: 317266
agaaucaaaccgcgaaaga

SEQ ID NO: 331144 - RNA, 19 nt, Artificial Sequence
  Description of Artificial Sequence: Synthetic oligonucleotide
  Antisense Strand to SEQ ID NO: 331143
ucuuucgcgguuugauucu

SEQ ID NO: 331145 - RNA, 19 nt, Artificial Sequence
  Description of Artificial Sequence: Synthetic oligonucleotide
  Sense Strand Starting at position 157 of SEQ ID NO: 317417
gcgggacuccuggagaaau

SEQ ID NO: 331146 - RNA, 19 nt, Artificial Sequence
  Description of Artificial Sequence: Synthetic oligonucleotide
  Antisense Strand to SEQ ID NO: 331145
auuucuccaggagucccgc

SEQ ID NO: 331147 - RNA, 19 nt, Artificial Sequence
  Description of Artificial Sequence: Synthetic oligonucleotide
  Sense Strand Starting at position 157 of SEQ ID NO: 317480
augaccucugccgacuaaa

SEQ ID NO: 331148 - RNA, 19 nt, Artificial Sequence
  Description of Artificial Sequence: Synthetic oligonucleotide
  Antisense Strand to SEQ ID NO: 331147
uuuagucggcagaggucau

SEQ ID NO: 331149 - RNA, 19 nt, Artificial Sequence
  Description of Artificial Sequence: Synthetic oligonucleotide
  Sense Strand Starting at position 157 of SEQ ID NO: 317514
guggauuagggcuauacca

SEQ ID NO: 331150 - RNA, 19 nt, Artificial Sequence
  Description of Artificial Sequence: Synthetic oligonucleotide
  Antisense Strand to SEQ ID NO: 331149
ugguauagcccuaauccac

SEQ ID NO: 331151 - RNA, 19 nt, Artificial Sequence
  Description of Artificial Sequence: Synthetic oligonucleotide
  Sense Strand Starting at position 157 of SEQ ID NO: 317538
uggacucuucuagaguacu

SEQ ID NO: 331152 - RNA, 19 nt, Artificial Sequence
  Description of Artificial Sequence: Synthetic oligonucleotide
  Antisense Strand to SEQ ID NO: 331151
aguacucuagaagagucca

SEQ ID NO: 331153 - RNA, 19 nt, Artificial Sequence
  Description of Artificial Sequence: Synthetic oligonucleotide
  Sense Strand Starting at position 157 of SEQ ID NO: 317577
ccucgugguaaacagauaa

SEQ ID NO: 331154 - RNA, 19 nt, Artificial Sequence
  Description of Artificial Sequence: Synthetic oligonucleotide
  Antisense Strand to SEQ ID NO: 331153
uuaucuguuuaccacgagg

SEQ ID NO: 331155 - RNA, 19 nt, Artificial Sequence
  Description of Artificial Sequence: Synthetic oligonucleotide
  Sense Strand Starting at position 157 of SEQ ID NO: 317600
uagguuccugagggauaca

SEQ ID NO: 331156 - RNA, 19 nt, Artificial Sequence
  Description of Artificial Sequence: Synthetic oligonucleotide
  Antisense Strand to SEQ ID NO: 331155
uguaucccucaggaaccua

SEQ ID NO: 331157 - RNA, 19 nt, Artificial Sequence
  Description of Artificial Sequence: Synthetic oligonucleotide
  Sense Strand Starting at position 157 of SEQ ID NO: 317612
ggauacagucauggacuca

SEQ ID NO: 331158 - RNA, 19 nt, Artificial Sequence
  Description of Artificial Sequence: Synthetic oligonucleotide
  Antisense Strand to SEQ ID NO: 331157
ugaguccaugacuguaucc

SEQ ID NO: 331159 - RNA, 19 nt, Artificial Sequence
  Description of Artificial Sequence: Synthetic oligonucleotide
  Sense Strand Starting at position 157 of SEQ ID NO: 317653
cuuagaagguucccaaauu

SEQ ID NO: 331160 - RNA, 19 nt, Artificial Sequence
  Description of Artificial Sequence: Synthetic oligonucleotide
  Antisense Strand to SEQ ID NO: 331159
aauuugggaaccuucuaag

SEQ ID NO: 331161 - RNA, 19 nt, Artificial Sequence
  Description of Artificial Sequence: Synthetic oligonucleotide
  Sense Strand Starting at position 157 of SEQ ID NO: 317654
uuagaagguucccaaauuu

SEQ ID NO: 331162 - RNA, 19 nt, Artificial Sequence
  Description of Artificial Sequence: Synthetic oligonucleotide
  Antisense Strand to SEQ ID NO: 331161
aaauuugggaaccuucuaa

SEQ ID NO: 331163 - RNA, 19 nt, Artificial Sequence
  Description of Artificial Sequence: Synthetic oligonucleotide
  Sense Strand Starting at position 157 of SEQ ID NO: 317663
ucccaaauuuggguucguu

SEQ ID NO: 331164 - RNA, 19 nt, Artificial Sequence
  Description of Artificial Sequence: Synthetic oligonucleotide
  Antisense Strand to SEQ ID NO: 331163
aacgaacccaaauuuggga

SEQ ID NO: 331165 - RNA, 19 nt, Artificial Sequence
  Description of Artificial Sequence: Synthetic oligonucleotide
  Sense Strand Starting at position 157 of SEQ ID NO: 317675
guucguugaggcaguaaga

SEQ ID NO: 331166 - RNA, 19 nt, Artificial Sequence
  Description of Artificial Sequence: Synthetic oligonucleotide
  Antisense Strand to SEQ ID NO: 331165
ucuuacugccucaacgaac

SEQ ID NO: 331167 - RNA, 19 nt, Artificial Sequence
  Description of Artificial Sequence: Synthetic oligonucleotide
  Sense Strand Starting at position 157 of SEQ ID NO: 317763
acuuauugagacuagcacu

SEQ ID NO: 331168 - RNA, 19 nt, Artificial Sequence
  Description of Artificial Sequence: Synthetic oligonucleotide
  Antisense Strand to SEQ ID NO: 331167
agugcuagucucaauaagu

SEQ ID NO: 331169 - RNA, 19 nt, Artificial Sequence
  Description of Artificial Sequence: Synthetic oligonucleotide
  Sense Strand Starting at position 157 of SEQ ID NO: 317780
cuggcuuaaguguaacuau

SEQ ID NO: 331170 - RNA, 19 nt, Artificial Sequence
  Description of Artificial Sequence: Synthetic oligonucleotide
  Antisense Strand to SEQ ID NO: 331169
auaguuacacuuaagccag

SEQ ID NO: 331171 - RNA, 19 nt, Artificial Sequence
  Description of Artificial Sequence: Synthetic oligonucleotide
  Sense Strand Starting at position 157 of SEQ ID NO: 318652
uugugaguacaccaauuga

SEQ ID NO: 331172 - RNA, 19 nt, Artificial Sequence
  Description of Artificial Sequence: Synthetic oligonucleotide
  Antisense Strand to SEQ ID NO: 331171
ucaauugguguacucacaa

SEQ ID NO: 331173 - RNA, 19 nt, Artificial Sequence
  Description of Artificial Sequence: Synthetic oligonucleotide
  Sense Strand Starting at position 158 of SEQ ID NO: 315267
uugaaacagccaugaucua

SEQ ID NO: 331174 - RNA, 19 nt, Artificial Sequence
  Description of Artificial Sequence: Synthetic oligonucleotide
  Antisense Strand to SEQ ID NO: 331173
uagaucauggcuguuucaa

SEQ ID NO: 331175 - RNA, 19 nt, Artificial Sequence
  Description of Artificial Sequence: Synthetic oligonucleotide
  Sense Strand Starting at position 158 of SEQ ID NO: 315548
ccacgaaaugaaugaaagu

SEQ ID NO: 331176 - RNA, 19 nt, Artificial Sequence
  Description of Artificial Sequence: Synthetic oligonucleotide
  Antisense Strand to SEQ ID NO: 331175
acuuucauucauuucgugg

SEQ ID NO: 331177 - RNA, 19 nt, Artificial Sequence
  Description of Artificial Sequence: Synthetic oligonucleotide
  Sense Strand Starting at position 158 of SEQ ID NO: 315592
aucccagguuuccuagagu

SEQ ID NO: 331178 - RNA, 19 nt, Artificial Sequence
  Description of Artificial Sequence: Synthetic oligonucleotide
  Antisense Strand to SEQ ID NO: 331177
acucuaggaaaccugggau

SEQ ID NO: 331179 - RNA, 19 nt, Artificial Sequence
  Description of Artificial Sequence: Synthetic oligonucleotide
  Sense Strand Starting at position 158 of SEQ ID NO: 315689
caggaauaaugagaaauag

SEQ ID NO: 331180 - RNA, 19 nt, Artificial Sequence
  Description of Artificial Sequence: Synthetic oligonucleotide
  Antisense Strand to SEQ ID NO: 331179
cuauuucucauuauuccug

SEQ ID NO: 331181 - RNA, 19 nt, Artificial Sequence
  Description of Artificial Sequence: Synthetic oligonucleotide
  Sense Strand Starting at position 158 of SEQ ID NO: 315752
uguucuaugugccuggaau

SEQ ID NO: 331182 - RNA, 19 nt, Artificial Sequence
  Description of Artificial Sequence: Synthetic oligonucleotide
  Antisense Strand to SEQ ID NO: 331181
auuccaggcacauagaaca

SEQ ID NO: 331183 - RNA, 19 nt, Artificial Sequence
  Description of Artificial Sequence: Synthetic oligonucleotide
  Sense Strand Starting at position 158 of SEQ ID NO: 315753
guucuaugugccuggaauu

SEQ ID NO: 331184 - RNA, 19 nt, Artificial Sequence
  Description of Artificial Sequence: Synthetic oligonucleotide
  Antisense Strand to SEQ ID NO: 331183
aauuccaggcacauagaac

SEQ ID NO: 331185 - RNA, 19 nt, Artificial Sequence
  Description of Artificial Sequence: Synthetic oligonucleotide
  Sense Strand Starting at position 158 of SEQ ID NO: 315849
aaggauuuguuauguacug

SEQ ID NO: 331186 - RNA, 19 nt, Artificial Sequence
  Description of Artificial Sequence: Synthetic oligonucleotide
  Antisense Strand to SEQ ID NO: 331185
caguacauaacaaauccuu

SEQ ID NO: 331187 - RNA, 19 nt, Artificial Sequence
  Description of Artificial Sequence: Synthetic oligonucleotide
  Sense Strand Starting at position 158 of SEQ ID NO: 315868
cauuccugguugucagcua

SEQ ID NO: 331188 - RNA, 19 nt, Artificial Sequence
  Description of Artificial Sequence: Synthetic oligonucleotide
  Antisense Strand to SEQ ID NO: 331187
uagcugacaaccaggaaug

SEQ ID NO: 331189 - RNA, 19 nt, Artificial Sequence
  Description of Artificial Sequence: Synthetic oligonucleotide
  Sense Strand Starting at position 158 of SEQ ID NO: 315979
uguggaaacuaacuuuaga

SEQ ID NO: 331190 - RNA, 19 nt, Artificial Sequence
  Description of Artificial Sequence: Synthetic oligonucleotide
  Antisense Strand to SEQ ID NO: 331189
ucuaaaguuaguuuccaca

SEQ ID NO: 331191 - RNA, 19 nt, Artificial Sequence
  Description of Artificial Sequence: Synthetic oligonucleotide
  Sense Strand Starting at position 158 of SEQ ID NO: 316024
ucggauauaguccaaauac

SEQ ID NO: 331192 - RNA, 19 nt, Artificial Sequence
  Description of Artificial Sequence: Synthetic oligonucleotide
  Antisense Strand to SEQ ID NO: 331191
guauuuggacuauauccga

SEQ ID NO: 331193 - RNA, 19 nt, Artificial Sequence
  Description of Artificial Sequence: Synthetic oligonucleotide
  Sense Strand Starting at position 158 of SEQ ID NO: 316072
uuaaauggcuacuuaaguu

SEQ ID NO: 331194 - RNA, 19 nt, Artificial Sequence
  Description of Artificial Sequence: Synthetic oligonucleotide
  Antisense Strand to SEQ ID NO: 331193
aacuuaaguagccauuuaa

SEQ ID NO: 331195 - RNA, 19 nt, Artificial Sequence
  Description of Artificial Sequence: Synthetic oligonucleotide
  Sense Strand Starting at position 158 of SEQ ID NO: 316426
agaggagcaucuuuaacca

SEQ ID NO: 331196 - RNA, 19 nt, Artificial Sequence
  Description of Artificial Sequence: Synthetic oligonucleotide
  Antisense Strand to SEQ ID NO: 331195
ugguuaaagaugcuccucu

SEQ ID NO: 331197 - RNA, 19 nt, Artificial Sequence
  Description of Artificial Sequence: Synthetic oligonucleotide
  Sense Strand Starting at position 158 of SEQ ID NO: 316518
ccuggacgccuuggucaaa

SEQ ID NO: 331198 - RNA, 19 nt, Artificial Sequence
  Description of Artificial Sequence: Synthetic oligonucleotide
  Antisense Strand to SEQ ID NO: 331197
uuugaccaaggcguccagg

SEQ ID NO: 331199 - RNA, 19 nt, Artificial Sequence
  Description of Artificial Sequence: Synthetic oligonucleotide
  Sense Strand Starting at position 158 of SEQ ID NO: 317424
ucacuccuuccucggagaa

SEQ ID NO: 331200 - RNA, 19 nt, Artificial Sequence
  Description of Artificial Sequence: Synthetic oligonucleotide
  Antisense Strand to SEQ ID NO: 331199
uucuccgaggaaggaguga

SEQ ID NO: 331201 - RNA, 19 nt, Artificial Sequence
  Description of Artificial Sequence: Synthetic oligonucleotide
  Sense Strand Starting at position 158 of SEQ ID NO: 318043
gcguguguaugauuauuug

SEQ ID NO: 331202 - RNA, 19 nt, Artificial Sequence
  Description of Artificial Sequence: Synthetic oligonucleotide
  Antisense Strand to SEQ ID NO: 331201
caaauaaucauacacacgc

SEQ ID NO: 331203 - RNA, 19 nt, Artificial Sequence
  Description of Artificial Sequence: Synthetic oligonucleotide
  Sense Strand Starting at position 158 of SEQ ID NO: 318049
guaugauuauuuggaguau

SEQ ID NO: 331204 - RNA, 19 nt, Artificial Sequence
  Description of Artificial Sequence: Synthetic oligonucleotide
  Antisense Strand to SEQ ID NO: 331203
auacuccaaauaaucauac

SEQ ID NO: 331205 - RNA, 19 nt, Artificial Sequence
  Description of Artificial Sequence: Synthetic oligonucleotide
  Sense Strand Starting at position 158 of SEQ ID NO: 318103
agguguguucaugguacau

SEQ ID NO: 331206 - RNA, 19 nt, Artificial Sequence
  Description of Artificial Sequence: Synthetic oligonucleotide
  Antisense Strand to SEQ ID NO: 331205
auguaccaugaacacaccu

SEQ ID NO: 331207 - RNA, 19 nt, Artificial Sequence
  Description of Artificial Sequence: Synthetic oligonucleotide
  Sense Strand Starting at position 158 of SEQ ID NO: 318162
uguauacguguguauguga

SEQ ID NO: 331208 - RNA, 19 nt, Artificial Sequence
  Description of Artificial Sequence: Synthetic oligonucleotide
  Antisense Strand to SEQ ID NO: 331207
ucacauacacacguauaca

SEQ ID NO: 331209 - RNA, 19 nt, Artificial Sequence
  Description of Artificial Sequence: Synthetic oligonucleotide
  Sense Strand Starting at position 158 of SEQ ID NO: 318163
guauacguguguaugugaa

SEQ ID NO: 331210 - RNA, 19 nt, Artificial Sequence
  Description of Artificial Sequence: Synthetic oligonucleotide
  Antisense Strand to SEQ ID NO: 331209
uucacauacacacguauac

SEQ ID NO: 331211 - RNA, 19 nt, Artificial Sequence
  Description of Artificial Sequence: Synthetic oligonucleotide
  Sense Strand Starting at position 158 of SEQ ID NO: 318165
auacguguguaugugaaau

SEQ ID NO: 331212 - RNA, 19 nt, Artificial Sequence
  Description of Artificial Sequence: Synthetic oligonucleotide
  Antisense Strand to SEQ ID NO: 331211
auuucacauacacacguau

SEQ ID NO: 331213 - RNA, 19 nt, Artificial Sequence
  Description of Artificial Sequence: Synthetic oligonucleotide
  Sense Strand Starting at position 158 of SEQ ID NO: 318243
gcagaauauguauaugugu

SEQ ID NO: 331214 - RNA, 19 nt, Artificial Sequence
  Description of Artificial Sequence: Synthetic oligonucleotide
  Antisense Strand to SEQ ID NO: 331213
acacauauacauauucugc

SEQ ID NO: 331215 - RNA, 19 nt, Artificial Sequence
  Description of Artificial Sequence: Synthetic oligonucleotide
  Sense Strand Starting at position 158 of SEQ ID NO: 318302
uggguaugcuuaguaauac

SEQ ID NO: 331216 - RNA, 19 nt, Artificial Sequence
  Description of Artificial Sequence: Synthetic oligonucleotide
  Antisense Strand to SEQ ID NO: 331215
guauuacuaagcauaccca

SEQ ID NO: 331217 - RNA, 19 nt, Artificial Sequence
  Description of Artificial Sequence: Synthetic oligonucleotide
  Sense Strand Starting at position 158 of SEQ ID NO: 318412
gugugugguacauaggagu

SEQ ID NO: 331218 - RNA, 19 nt, Artificial Sequence
  Description of Artificial Sequence: Synthetic oligonucleotide
  Antisense Strand to SEQ ID NO: 331217
acuccuauguaccacacac

SEQ ID NO: 331219 - RNA, 19 nt, Artificial Sequence
  Description of Artificial Sequence: Synthetic oligonucleotide
  Sense Strand Starting at position 158 of SEQ ID NO: 318449
gacucauguaugcggagga

SEQ ID NO: 331220 - RNA, 19 nt, Artificial Sequence
  Description of Artificial Sequence: Synthetic oligonucleotide
  Antisense Strand to SEQ ID NO: 331219
uccuccgcauacaugaguc

SEQ ID NO: 331221 - RNA, 19 nt, Artificial Sequence
  Description of Artificial Sequence: Synthetic oligonucleotide
  Sense Strand Starting at position 158 of SEQ ID NO: 318569
gggacaaguugcuccaaau

SEQ ID NO: 331222 - RNA, 19 nt, Artificial Sequence
  Description of Artificial Sequence: Synthetic oligonucleotide
  Antisense Strand to SEQ ID NO: 331221
auuuggagcaacuuguccc

SEQ ID NO: 331223 - RNA, 19 nt, Artificial Sequence
  Description of Artificial Sequence: Synthetic oligonucleotide
  Sense Strand Starting at position 158 of SEQ ID NO: 318670
ggugcacugcugggaauua

SEQ ID NO: 331224 - RNA, 19 nt, Artificial Sequence
  Description of Artificial Sequence: Synthetic oligonucleotide
  Antisense Strand to SEQ ID NO: 331223
uaauucccagcagugcacc

SEQ ID NO: 331225 - RNA, 19 nt, Artificial Sequence
  Description of Artificial Sequence: Synthetic oligonucleotide
  Sense Strand Starting at position 158 of SEQ ID NO: 318683
gaauuaguguuucccugca

SEQ ID NO: 331226 - RNA, 19 nt, Artificial Sequence
  Description of Artificial Sequence: Synthetic oligonucleotide
  Antisense Strand to SEQ ID NO: 331225
ugcagggaaacacuaauuc

SEQ ID NO: 331227 - RNA, 19 nt, Artificial Sequence
  Description of Artificial Sequence: Synthetic oligonucleotide
  Sense Strand Starting at position 158 of SEQ ID NO: 318685
auuaguguuucccugcaac

SEQ ID NO: 331228 - RNA, 19 nt, Artificial Sequence
  Description of Artificial Sequence: Synthetic oligonucleotide
  Antisense Strand to SEQ ID NO: 331227
guugcagggaaacacuaau

SEQ ID NO: 331229 - RNA, 19 nt, Artificial Sequence
  Description of Artificial Sequence: Synthetic oligonucleotide
  Sense Strand Starting at position 158 of SEQ ID NO: 318688
aguguuucccugcaacaag

SEQ ID NO: 331230 - RNA, 19 nt, Artificial Sequence
  Description of Artificial Sequence: Synthetic oligonucleotide
  Antisense Strand to SEQ ID NO: 331229
cuuguugcagggaaacacu

SEQ ID NO: 331231 - RNA, 19 nt, Artificial Sequence
  Description of Artificial Sequence: Synthetic oligonucleotide
  Sense Strand Starting at position 158 of SEQ ID NO: 318837
gguccacuuucuccuuuau

SEQ ID NO: 331232 - RNA, 19 nt, Artificial Sequence
  Description of Artificial Sequence: Synthetic oligonucleotide
  Antisense Strand to SEQ ID NO: 331231
auaaaggagaaaguggacc

SEQ ID NO: 331233 - RNA, 19 nt, Artificial Sequence
  Description of Artificial Sequence: Synthetic oligonucleotide
  Sense Strand Starting at position 158 of SEQ ID NO: 318862
ccugcuuugcacugacaag

SEQ ID NO: 331234 - RNA, 19 nt, Artificial Sequence
  Description of Artificial Sequence: Synthetic oligonucleotide
  Antisense Strand to SEQ ID NO: 331233
cuugucagugcaaagcagg

SEQ ID NO: 331235 - RNA, 19 nt, Artificial Sequence
  Description of Artificial Sequence: Synthetic oligonucleotide
  Sense Strand Starting at position 158 of SEQ ID NO: 318876
acaagagacucaucauggu

SEQ ID NO: 331236 - RNA, 19 nt, Artificial Sequence
  Description of Artificial Sequence: Synthetic oligonucleotide
  Antisense Strand to SEQ ID NO: 331235
accaugaugagucucuugu

SEQ ID NO: 331237 - RNA, 19 nt, Artificial Sequence
  Description of Artificial Sequence: Synthetic oligonucleotide
  Sense Strand Starting at position 158 of SEQ ID NO: 318968
uuauguaaccuuggcuuga

SEQ ID NO: 331238 - RNA, 19 nt, Artificial Sequence
  Description of Artificial Sequence: Synthetic oligonucleotide
  Antisense Strand to SEQ ID NO: 331237
ucaagccaagguuacauaa

SEQ ID NO: 331239 - RNA, 19 nt, Artificial Sequence
  Description of Artificial Sequence: Synthetic oligonucleotide
  Sense Strand Starting at position 158 of SEQ ID NO: 318970
auguaaccuuggcuugaga

SEQ ID NO: 331240 - RNA, 19 nt, Artificial Sequence
  Description of Artificial Sequence: Synthetic oligonucleotide
  Antisense Strand to SEQ ID NO: 331239
ucucaagccaagguuacau

SEQ ID NO: 331241 - RNA, 19 nt, Artificial Sequence
  Description of Artificial Sequence: Synthetic oligonucleotide
  Sense Strand Starting at position 158 of SEQ ID NO: 318972
guaaccuuggcuugagaag

SEQ ID NO: 331242 - RNA, 19 nt, Artificial Sequence
  Description of Artificial Sequence: Synthetic oligonucleotide
  Antisense Strand to SEQ ID NO: 331241
cuucucaagccaagguuac

SEQ ID NO: 331243 - RNA, 19 nt, Artificial Sequence
  Description of Artificial Sequence: Synthetic oligonucleotide
  Sense Strand Starting at position 158 of SEQ ID NO: 318978
uuggcuugagaagggaaau

SEQ ID NO: 331244 - RNA, 19 nt, Artificial Sequence
  Description of Artificial Sequence: Synthetic oligonucleotide
  Antisense Strand to SEQ ID NO: 331243
auuucccuucucaagccaa

SEQ ID NO: 331245 - RNA, 19 nt, Artificial Sequence
  Description of Artificial Sequence: Synthetic oligonucleotide
  Sense Strand Starting at position 158 of SEQ ID NO: 319004
gcauauaucugacucuggu

SEQ ID NO: 331246 - RNA, 19 nt, Artificial Sequence
  Description of Artificial Sequence: Synthetic oligonucleotide
  Antisense Strand to SEQ ID NO: 331245
accagagucagauauaugc

SEQ ID NO: 331247 - RNA, 19 nt, Artificial Sequence
  Description of Artificial Sequence: Synthetic oligonucleotide
  Sense Strand Starting at position 158 of SEQ ID NO: 319007
uauaucugacucuggugaa

SEQ ID NO: 331248 - RNA, 19 nt, Artificial Sequence
  Description of Artificial Sequence: Synthetic oligonucleotide
  Antisense Strand to SEQ ID NO: 331247
uucaccagagucagauaua

SEQ ID NO: 331249 - RNA, 19 nt, Artificial Sequence
  Description of Artificial Sequence: Synthetic oligonucleotide
  Sense Strand Starting at position 158 of SEQ ID NO: 319079
uccagaaaggucugaauca

SEQ ID NO: 331250 - RNA, 19 nt, Artificial Sequence
  Description of Artificial Sequence: Synthetic oligonucleotide
  Antisense Strand to SEQ ID NO: 331249
ugauucagaccuuucugga

SEQ ID NO: 331251 - RNA, 19 nt, Artificial Sequence
  Description of Artificial Sequence: Synthetic oligonucleotide
  Sense Strand Starting at position 158 of SEQ ID NO: 319080
ccagaaaggucugaaucaa

SEQ ID NO: 331252 - RNA, 19 nt, Artificial Sequence
  Description of Artificial Sequence: Synthetic oligonucleotide
  Antisense Strand to SEQ ID NO: 331251
uugauucagaccuuucugg

SEQ ID NO: 331253 - RNA, 19 nt, Artificial Sequence
  Description of Artificial Sequence: Synthetic oligonucleotide
  Sense Strand Starting at position 159 of SEQ ID NO: 315596
cuuaaaucucguugaccag

SEQ ID NO: 331254 - RNA, 19 nt, Artificial Sequence
  Description of Artificial Sequence: Synthetic oligonucleotide
  Antisense Strand to SEQ ID NO: 331253
cuggucaacgagauuuaag

SEQ ID NO: 331255 - RNA, 19 nt, Artificial Sequence
  Description of Artificial Sequence: Synthetic oligonucleotide
  Sense Strand Starting at position 159 of SEQ ID NO: 315597
uuaaaucucguugaccaga

SEQ ID NO: 331256 - RNA, 19 nt, Artificial Sequence
  Description of Artificial Sequence: Synthetic oligonucleotide
  Antisense Strand to SEQ ID NO: 331255
ucuggucaacgagauuuaa

SEQ ID NO: 331257 - RNA, 19 nt, Artificial Sequence
  Description of Artificial Sequence: Synthetic oligonucleotide
  Sense Strand Starting at position 159 of SEQ ID NO: 315599
aaaucucguugaccagaau

SEQ ID NO: 331258 - RNA, 19 nt, Artificial Sequence
  Description of Artificial Sequence: Synthetic oligonucleotide
  Antisense Strand to SEQ ID NO: 331257
auucuggucaacgagauuu

SEQ ID NO: 331259 - RNA, 19 nt, Artificial Sequence
  Description of Artificial Sequence: Synthetic oligonucleotide
  Sense Strand Starting at position 159 of SEQ ID NO: 315602
ucucguugaccagaaugaa

SEQ ID NO: 331260 - RNA, 19 nt, Artificial Sequence
  Description of Artificial Sequence: Synthetic oligonucleotide
  Antisense Strand to SEQ ID NO: 331259
uucauucuggucaacgaga

SEQ ID NO: 331261 - RNA, 19 nt, Artificial Sequence
  Description of Artificial Sequence: Synthetic oligonucleotide
  Sense Strand Starting at position 159 of SEQ ID NO: 315755
auauuaugauuguccacag

SEQ ID NO: 331262 - RNA, 19 nt, Artificial Sequence
  Description of Artificial Sequence: Synthetic oligonucleotide
  Antisense Strand to SEQ ID NO: 331261
cuguggacaaucauaauau

SEQ ID NO: 331263 - RNA, 19 nt, Artificial Sequence
  Description of Artificial Sequence: Synthetic oligonucleotide
  Sense Strand Starting at position 159 of SEQ ID NO: 315863
agauaaauaugugugagca

SEQ ID NO: 331264 - RNA, 19 nt, Artificial Sequence
  Description of Artificial Sequence: Synthetic oligonucleotide
  Antisense Strand to SEQ ID NO: 331263
ugcucacacauauuuaucu

SEQ ID NO: 331265 - RNA, 19 nt, Artificial Sequence
  Description of Artificial Sequence: Synthetic oligonucleotide
  Sense Strand Starting at position 159 of SEQ ID NO: 315864
gauaaauaugugugagcac

SEQ ID NO: 331266 - RNA, 19 nt, Artificial Sequence
  Description of Artificial Sequence: Synthetic oligonucleotide
  Antisense Strand to SEQ ID NO: 331265
gugcucacacauauuuauc

SEQ ID NO: 331267 - RNA, 19 nt, Artificial Sequence
  Description of Artificial Sequence: Synthetic oligonucleotide
  Sense Strand Starting at position 159 of SEQ ID NO: 315867
aaauaugugugagcacaua

SEQ ID NO: 331268 - RNA, 19 nt, Artificial Sequence
  Description of Artificial Sequence: Synthetic oligonucleotide
  Antisense Strand to SEQ ID NO: 331267
uaugugcucacacauauuu

SEQ ID NO: 331269 - RNA, 19 nt, Artificial Sequence
  Description of Artificial Sequence: Synthetic oligonucleotide
  Sense Strand Starting at position 159 of SEQ ID NO: 315880
cacauagacgugugaaaua

SEQ ID NO: 331270 - RNA, 19 nt, Artificial Sequence
  Description of Artificial Sequence: Synthetic oligonucleotide
  Antisense Strand to SEQ ID NO: 331269
uauuucacacgucuaugug

SEQ ID NO: 331271 - RNA, 19 nt, Artificial Sequence
  Description of Artificial Sequence: Synthetic oligonucleotide
  Sense Strand Starting at position 159 of SEQ ID NO: 316042
aguaaugacgauuaaguuu

SEQ ID NO: 331272 - RNA, 19 nt, Artificial Sequence
  Description of Artificial Sequence: Synthetic oligonucleotide
  Antisense Strand to SEQ ID NO: 331271
aaacuuaaucgucauuacu

SEQ ID NO: 331273 - RNA, 19 nt, Artificial Sequence
  Description of Artificial Sequence: Synthetic oligonucleotide
  Sense Strand Starting at position 159 of SEQ ID NO: 316428
acauuaaaucuagguguug

SEQ ID NO: 331274 - RNA, 19 nt, Artificial Sequence
  Description of Artificial Sequence: Synthetic oligonucleotide
  Antisense Strand to SEQ ID NO: 331273
caacaccuagauuuaaugu

SEQ ID NO: 331275 - RNA, 19 nt, Artificial Sequence
  Description of Artificial Sequence: Synthetic oligonucleotide
  Sense Strand Starting at position 159 of SEQ ID NO: 316445
uggguauucccaggacugu

SEQ ID NO: 331276 - RNA, 19 nt, Artificial Sequence
  Description of Artificial Sequence: Synthetic oligonucleotide
  Antisense Strand to SEQ ID NO: 331275
acaguccugggaauaccca

SEQ ID NO: 331277 - RNA, 19 nt, Artificial Sequence
  Description of Artificial Sequence: Synthetic oligonucleotide
  Sense Strand Starting at position 159 of SEQ ID NO: 316633
augccuaccugauucuaga

SEQ ID NO: 331278 - RNA, 19 nt, Artificial Sequence
  Description of Artificial Sequence: Synthetic oligonucleotide
  Antisense Strand to SEQ ID NO: 331277
ucuagaaucagguaggcau

SEQ ID NO: 331279 - RNA, 19 nt, Artificial Sequence
  Description of Artificial Sequence: Synthetic oligonucleotide
  Sense Strand Starting at position 159 of SEQ ID NO: 316707
gucuuccgucuauaacaaa

SEQ ID NO: 331280 - RNA, 19 nt, Artificial Sequence
  Description of Artificial Sequence: Synthetic oligonucleotide
  Antisense Strand to SEQ ID NO: 331279
uuuguuauagacggaagac

SEQ ID NO: 331281 - RNA, 19 nt, Artificial Sequence
  Description of Artificial Sequence: Synthetic oligonucleotide
  Sense Strand Starting at position 159 of SEQ ID NO: 316901
ucagaauaagaguguuuaa

SEQ ID NO: 331282 - RNA, 19 nt, Artificial Sequence
  Description of Artificial Sequence: Synthetic oligonucleotide
  Antisense Strand to SEQ ID NO: 331281
uuaaacacucuuauucuga

SEQ ID NO: 331283 - RNA, 19 nt, Artificial Sequence
  Description of Artificial Sequence: Synthetic oligonucleotide
  Sense Strand Starting at position 159 of SEQ ID NO: 316904
gaauaagaguguuuaauag

SEQ ID NO: 331284 - RNA, 19 nt, Artificial Sequence
  Description of Artificial Sequence: Synthetic oligonucleotide
  Antisense Strand to SEQ ID NO: 331283
cuauuaaacacucuuauuc

SEQ ID NO: 331285 - RNA, 19 nt, Artificial Sequence
  Description of Artificial Sequence: Synthetic oligonucleotide
  Sense Strand Starting at position 159 of SEQ ID NO: 316910
gaguguuuaauaggaaagu

SEQ ID NO: 331286 - RNA, 19 nt, Artificial Sequence
  Description of Artificial Sequence: Synthetic oligonucleotide
  Antisense Strand to SEQ ID NO: 331285
acuuuccuauuaaacacuc

SEQ ID NO: 331287 - RNA, 19 nt, Artificial Sequence
  Description of Artificial Sequence: Synthetic oligonucleotide
  Sense Strand Starting at position 159 of SEQ ID NO: 317006
gagaaugucuaggcugaag

SEQ ID NO: 331288 - RNA, 19 nt, Artificial Sequence
  Description of Artificial Sequence: Synthetic oligonucleotide
  Antisense Strand to SEQ ID NO: 331287
cuucagccuagacauucuc

SEQ ID NO: 331289 - RNA, 19 nt, Artificial Sequence
  Description of Artificial Sequence: Synthetic oligonucleotide
  Sense Strand Starting at position 159 of SEQ ID NO: 317480
cuguaauugcaauaugauc

SEQ ID NO: 331290 - RNA, 19 nt, Artificial Sequence
  Description of Artificial Sequence: Synthetic oligonucleotide
  Antisense Strand to SEQ ID NO: 331289
gaucauauugcaauuacag

SEQ ID NO: 331291 - RNA, 19 nt, Artificial Sequence
  Description of Artificial Sequence: Synthetic oligonucleotide
  Sense Strand Starting at position 159 of SEQ ID NO: 317581
aaugacauccaguggcuau

SEQ ID NO: 331292 - RNA, 19 nt, Artificial Sequence
  Description of Artificial Sequence: Synthetic oligonucleotide
  Antisense Strand to SEQ ID NO: 331291
auagccacuggaugucauu

SEQ ID NO: 331293 - RNA, 19 nt, Artificial Sequence
  Description of Artificial Sequence: Synthetic oligonucleotide
  Sense Strand Starting at position 159 of SEQ ID NO: 317592
guggcuauuggauaaguuu

SEQ ID NO: 331294 - RNA, 19 nt, Artificial Sequence
  Description of Artificial Sequence: Synthetic oligonucleotide
  Antisense Strand to SEQ ID NO: 331293
aaacuuauccaauagccac

SEQ ID NO: 331295 - RNA, 19 nt, Artificial Sequence
  Description of Artificial Sequence: Synthetic oligonucleotide
  Sense Strand Starting at position 159 of SEQ ID NO: 317601
ggauaaguuucuucuuucu

SEQ ID NO: 331296 - RNA, 19 nt, Artificial Sequence
  Description of Artificial Sequence: Synthetic oligonucleotide
  Antisense Strand to SEQ ID NO: 331295
agaaagaagaaacuuaucc

SEQ ID NO: 331297 - RNA, 19 nt, Artificial Sequence
  Description of Artificial Sequence: Synthetic oligonucleotide
  Sense Strand Starting at position 159 of SEQ ID NO: 317664
guacucuuccaugaagcuu

SEQ ID NO: 331298 - RNA, 19 nt, Artificial Sequence
  Description of Artificial Sequence: Synthetic oligonucleotide
  Antisense Strand to SEQ ID NO: 331297
aagcuucauggaagaguac

SEQ ID NO: 331299 - RNA, 19 nt, Artificial Sequence
  Description of Artificial Sequence: Synthetic oligonucleotide
  Sense Strand Starting at position 159 of SEQ ID NO: 317834
gugauugcacuguaaacug

SEQ ID NO: 331300 - RNA, 19 nt, Artificial Sequence
  Description of Artificial Sequence: Synthetic oligonucleotide
  Antisense Strand to SEQ ID NO: 331299
caguuuacagugcaaucac

SEQ ID NO: 331301 - RNA, 19 nt, Artificial Sequence
  Description of Artificial Sequence: Synthetic oligonucleotide
  Sense Strand Starting at position 159 of SEQ ID NO: 317864
auaguuaaccacuguggga

SEQ ID NO: 331302 - RNA, 19 nt, Artificial Sequence
  Description of Artificial Sequence: Synthetic oligonucleotide
  Antisense Strand to SEQ ID NO: 331301
ucccacagugguuaacuau

SEQ ID NO: 331303 - RNA, 19 nt, Artificial Sequence
  Description of Artificial Sequence: Synthetic oligonucleotide
  Sense Strand Starting at position 159 of SEQ ID NO: 317936
ucaaauaugggcugaaugu

SEQ ID NO: 331304 - RNA, 19 nt, Artificial Sequence
  Description of Artificial Sequence: Synthetic oligonucleotide
  Antisense Strand to SEQ ID NO: 331303
acauucagcccauauuuga

SEQ ID NO: 331305 - RNA, 19 nt, Artificial Sequence
  Description of Artificial Sequence: Synthetic oligonucleotide
  Sense Strand Starting at position 159 of SEQ ID NO: 317937
caaauaugggcugaauguu

SEQ ID NO: 331306 - RNA, 19 nt, Artificial Sequence
  Description of Artificial Sequence: Synthetic oligonucleotide
  Antisense Strand to SEQ ID NO: 331305
aacauucagcccauauuug

SEQ ID NO: 331307 - RNA, 19 nt, Artificial Sequence
  Description of Artificial Sequence: Synthetic oligonucleotide
  Sense Strand Starting at position 159 of SEQ ID NO: 317946
gcugaauguuaauuaugau

SEQ ID NO: 331308 - RNA, 19 nt, Artificial Sequence
  Description of Artificial Sequence: Synthetic oligonucleotide
  Antisense Strand to SEQ ID NO: 331307
aucauaauuaacauucagc

SEQ ID NO: 331309 - RNA, 19 nt, Artificial Sequence
  Description of Artificial Sequence: Synthetic oligonucleotide
  Sense Strand Starting at position 159 of SEQ ID NO: 318123
ugcugagagacuggguaua

SEQ ID NO: 331310 - RNA, 19 nt, Artificial Sequence
  Description of Artificial Sequence: Synthetic oligonucleotide
  Antisense Strand to SEQ ID NO: 331309
uauacccagucucucagca

SEQ ID NO: 331311 - RNA, 19 nt, Artificial Sequence
  Description of Artificial Sequence: Synthetic oligonucleotide
  Sense Strand Starting at position 159 of SEQ ID NO: 318393
cuguuaugaccucacauuc

SEQ ID NO: 331312 - RNA, 19 nt, Artificial Sequence
  Description of Artificial Sequence: Synthetic oligonucleotide
  Antisense Strand to SEQ ID NO: 331311
gaaugugaggucauaacag

SEQ ID NO: 331313 - RNA, 19 nt, Artificial Sequence
  Description of Artificial Sequence: Synthetic oligonucleotide
  Sense Strand Starting at position 159 of SEQ ID NO: 318416
cucauugaacauugagauc

SEQ ID NO: 331314 - RNA, 19 nt, Artificial Sequence
  Description of Artificial Sequence: Synthetic oligonucleotide
  Antisense Strand to SEQ ID NO: 331313
gaucucaauguucaaugag

SEQ ID NO: 331315 - RNA, 19 nt, Artificial Sequence
  Description of Artificial Sequence: Synthetic oligonucleotide
  Sense Strand Starting at position 159 of SEQ ID NO: 318449
cuuguuuaacugcacugau

SEQ ID NO: 331316 - RNA, 19 nt, Artificial Sequence
  Description of Artificial Sequence: Synthetic oligonucleotide
  Antisense Strand to SEQ ID NO: 331315
aucagugcaguuaaacaag

SEQ ID NO: 331317 - RNA, 19 nt, Artificial Sequence
  Description of Artificial Sequence: Synthetic oligonucleotide
  Sense Strand Starting at position 159 of SEQ ID NO: 318452
guuuaacugcacugauuuc

SEQ ID NO: 331318 - RNA, 19 nt, Artificial Sequence
  Description of Artificial Sequence: Synthetic oligonucleotide
  Antisense Strand to SEQ ID NO: 331317
gaaaucagugcaguuaaac

SEQ ID NO: 331319 - RNA, 19 nt, Artificial Sequence
  Description of Artificial Sequence: Synthetic oligonucleotide
  Sense Strand Starting at position 159 of SEQ ID NO: 318489
guauuaaggcuuuaaauac

SEQ ID NO: 331320 - RNA, 19 nt, Artificial Sequence
  Description of Artificial Sequence: Synthetic oligonucleotide
  Antisense Strand to SEQ ID NO: 331319
guauuuaaagccuuaauac

SEQ ID NO: 331321 - RNA, 19 nt, Artificial Sequence
  Description of Artificial Sequence: Synthetic oligonucleotide
  Sense Strand Starting at position 159 of SEQ ID NO: 318538
aucuguagcuaucucagaa

SEQ ID NO: 331322 - RNA, 19 nt, Artificial Sequence
  Description of Artificial Sequence: Synthetic oligonucleotide
  Antisense Strand to SEQ ID NO: 331321
uucugagauagcuacagau

SEQ ID NO: 331323 - RNA, 19 nt, Artificial Sequence
  Description of Artificial Sequence: Synthetic oligonucleotide
  Sense Strand Starting at position 159 of SEQ ID NO: 318674
ugaagugcucuccaucuca

SEQ ID NO: 331324 - RNA, 19 nt, Artificial Sequence
  Description of Artificial Sequence: Synthetic oligonucleotide
  Antisense Strand to SEQ ID NO: 331323
ugagauggagagcacuuca

SEQ ID NO: 331325 - RNA, 19 nt, Artificial Sequence
  Description of Artificial Sequence: Synthetic oligonucleotide
  Sense Strand Starting at position 159 of SEQ ID NO: 318682
ucuccaucucaguauaugu

SEQ ID NO: 331326 - RNA, 19 nt, Artificial Sequence
  Description of Artificial Sequence: Synthetic oligonucleotide
  Antisense Strand to SEQ ID NO: 331325
acauauacugagauggaga

SEQ ID NO: 331327 - RNA, 19 nt, Artificial Sequence
  Description of Artificial Sequence: Synthetic oligonucleotide
  Sense Strand Starting at position 159 of SEQ ID NO: 318684
uccaucucaguauauguau

SEQ ID NO: 331328 - RNA, 19 nt, Artificial Sequence
  Description of Artificial Sequence: Synthetic oligonucleotide
  Antisense Strand to SEQ ID NO: 331327
auacauauacugagaugga

SEQ ID NO: 331329 - RNA, 19 nt, Artificial Sequence
  Description of Artificial Sequence: Synthetic oligonucleotide
  Sense Strand Starting at position 159 of SEQ ID NO: 318709
ucaacaaguugcucagaaa

SEQ ID NO: 331330 - RNA, 19 nt, Artificial Sequence
  Description of Artificial Sequence: Synthetic oligonucleotide
  Antisense Strand to SEQ ID NO: 331329
uuucugagcaacuuguuga

SEQ ID NO: 331331 - RNA, 19 nt, Artificial Sequence
  Description of Artificial Sequence: Synthetic oligonucleotide
  Sense Strand Starting at position 159 of SEQ ID NO: 318737
ggcauuacccuugauuccu

SEQ ID NO: 331332 - RNA, 19 nt, Artificial Sequence
  Description of Artificial Sequence: Synthetic oligonucleotide
  Antisense Strand to SEQ ID NO: 331331
aggaaucaaggguaaugcc

SEQ ID NO: 331333 - RNA, 19 nt, Artificial Sequence
  Description of Artificial Sequence: Synthetic oligonucleotide
  Sense Strand Starting at position 160 of SEQ ID NO: 317781
uugacuugcgacugggauu

SEQ ID NO: 331334 - RNA, 19 nt, Artificial Sequence
  Description of Artificial Sequence: Synthetic oligonucleotide
  Antisense Strand to SEQ ID NO: 331333
aaucccagucgcaagucaa

SEQ ID NO: 331335 - RNA, 19 nt, Artificial Sequence
  Description of Artificial Sequence: Synthetic oligonucleotide
  Sense Strand Starting at position 160 of SEQ ID NO: 317792
cugggauucgcuuaccauc

SEQ ID NO: 331336 - RNA, 19 nt, Artificial Sequence
  Description of Artificial Sequence: Synthetic oligonucleotide
  Antisense Strand to SEQ ID NO: 331335
gaugguaagcgaaucccag

SEQ ID NO: 331337 - RNA, 19 nt, Artificial Sequence
  Description of Artificial Sequence: Synthetic oligonucleotide
  Sense Strand Starting at position 160 of SEQ ID NO: 317794
gggauucgcuuaccaucuu

SEQ ID NO: 331338 - RNA, 19 nt, Artificial Sequence
  Description of Artificial Sequence: Synthetic oligonucleotide
  Antisense Strand to SEQ ID NO: 331337
aagaugguaagcgaauccc

SEQ ID NO: 331339 - RNA, 19 nt, Artificial Sequence
  Description of Artificial Sequence: Synthetic oligonucleotide
  Sense Strand Starting at position 160 of SEQ ID NO: 317803
uuaccaucuuucuugugau

SEQ ID NO: 331340 - RNA, 19 nt, Artificial Sequence
  Description of Artificial Sequence: Synthetic oligonucleotide
  Antisense Strand to SEQ ID NO: 331339
aucacaagaaagaugguaa

SEQ ID NO: 331341 - RNA, 19 nt, Artificial Sequence
  Description of Artificial Sequence: Synthetic oligonucleotide
  Sense Strand Starting at position 160 of SEQ ID NO: 317845
gccauuaauggcuagugca

SEQ ID NO: 331342 - RNA, 19 nt, Artificial Sequence
  Description of Artificial Sequence: Synthetic oligonucleotide
  Antisense Strand to SEQ ID NO: 331341
ugcacuagccauuaauggc

SEQ ID NO: 331343 - RNA, 19 nt, Artificial Sequence
  Description of Artificial Sequence: Synthetic oligonucleotide
  Sense Strand Starting at position 160 of SEQ ID NO: 317909
gcggauauuucugcuugca

SEQ ID NO: 331344 - RNA, 19 nt, Artificial Sequence
  Description of Artificial Sequence: Synthetic oligonucleotide
  Antisense Strand to SEQ ID NO: 331343
ugcaagcagaaauauccgc

SEQ ID NO: 331345 - RNA, 19 nt, Artificial Sequence
  Description of Artificial Sequence: Synthetic oligonucleotide
  Sense Strand Starting at position 160 of SEQ ID NO: 317981
uagagaauuucucguagag

SEQ ID NO: 331346 - RNA, 19 nt, Artificial Sequence
  Description of Artificial Sequence: Synthetic oligonucleotide
  Antisense Strand to SEQ ID NO: 331345
cucuacgagaaauucucua

SEQ ID NO: 331347 - RNA, 19 nt, Artificial Sequence
  Description of Artificial Sequence: Synthetic oligonucleotide
  Sense Strand Starting at position 160 of SEQ ID NO: 317983
gagaauuucucguagaggg

SEQ ID NO: 331348 - RNA, 19 nt, Artificial Sequence
  Description of Artificial Sequence: Synthetic oligonucleotide
  Antisense Strand to SEQ ID NO: 331347
cccucuacgagaaauucuc

SEQ ID NO: 331349 - RNA, 19 nt, Artificial Sequence
  Description of Artificial Sequence: Synthetic oligonucleotide
  Sense Strand Starting at position 160 of SEQ ID NO: 318056
aggugaccuuaguugauua

SEQ ID NO: 331350 - RNA, 19 nt, Artificial Sequence
  Description of Artificial Sequence: Synthetic oligonucleotide
  Antisense Strand to SEQ ID NO: 331349
uaaucaacuaaggucaccu

SEQ ID NO: 331351 - RNA, 19 nt, Artificial Sequence
  Description of Artificial Sequence: Synthetic oligonucleotide
  Sense Strand Starting at position 160 of SEQ ID NO: 318057
ggugaccuuaguugauuaa

SEQ ID NO: 331352 - RNA, 19 nt, Artificial Sequence
  Description of Artificial Sequence: Synthetic oligonucleotide
  Antisense Strand to SEQ ID NO: 331351
uuaaucaacuaaggucacc

SEQ ID NO: 331353 - RNA, 19 nt, Artificial Sequence
  Description of Artificial Sequence: Synthetic oligonucleotide
  Sense Strand Starting at position 160 of SEQ ID NO: 318060
gaccuuaguugauuaagga

SEQ ID NO: 331354 - RNA, 19 nt, Artificial Sequence
  Description of Artificial Sequence: Synthetic oligonucleotide
  Antisense Strand to SEQ ID NO: 331353
uccuuaaucaacuaagguc

SEQ ID NO: 331355 - RNA, 19 nt, Artificial Sequence
  Description of Artificial Sequence: Synthetic oligonucleotide
  Sense Strand Starting at position 160 of SEQ ID NO: 318195
auaacacauccgugaaaug

SEQ ID NO: 331356 - RNA, 19 nt, Artificial Sequence
  Description of Artificial Sequence: Synthetic oligonucleotide
  Antisense Strand to SEQ ID NO: 331355
cauuucacggauguguuau

SEQ ID NO: 331357 - RNA, 19 nt, Artificial Sequence
  Description of Artificial Sequence: Synthetic oligonucleotide
  Sense Strand Starting at position 160 of SEQ ID NO: 318204
ccgugaaaugccuaaggag

SEQ ID NO: 331358 - RNA, 19 nt, Artificial Sequence
  Description of Artificial Sequence: Synthetic oligonucleotide
  Antisense Strand to SEQ ID NO: 331357
cuccuuaggcauuucacgg

SEQ ID NO: 331359 - RNA, 19 nt, Artificial Sequence
  Description of Artificial Sequence: Synthetic oligonucleotide
  Sense Strand Starting at position 160 of SEQ ID NO: 318222
gguuacaagugauuggcaa

SEQ ID NO: 331360 - RNA, 19 nt, Artificial Sequence
  Description of Artificial Sequence: Synthetic oligonucleotide
  Antisense Strand to SEQ ID NO: 331359
uugccaaucacuuguaacc

SEQ ID NO: 331361 - RNA, 19 nt, Artificial Sequence
  Description of Artificial Sequence: Synthetic oligonucleotide
  Sense Strand Starting at position 160 of SEQ ID NO: 318223
guuacaagugauuggcaac

SEQ ID NO: 331362 - RNA, 19 nt, Artificial Sequence
  Description of Artificial Sequence: Synthetic oligonucleotide
  Antisense Strand to SEQ ID NO: 331361
guugccaaucacuuguaac

SEQ ID NO: 331363 - RNA, 19 nt, Artificial Sequence
  Description of Artificial Sequence: Synthetic oligonucleotide
  Sense Strand Starting at position 160 of SEQ ID NO: 318240
acguucuugagcguugauu

SEQ ID NO: 331364 - RNA, 19 nt, Artificial Sequence
  Description of Artificial Sequence: Synthetic oligonucleotide
  Antisense Strand to SEQ ID NO: 331363
aaucaacgcucaagaacgu

SEQ ID NO: 331365 - RNA, 19 nt, Artificial Sequence
  Description of Artificial Sequence: Synthetic oligonucleotide
  Sense Strand Starting at position 160 of SEQ ID NO: 318242
guucuugagcguugauuug

SEQ ID NO: 331366 - RNA, 19 nt, Artificial Sequence
  Description of Artificial Sequence: Synthetic oligonucleotide
  Antisense Strand to SEQ ID NO: 331365
caaaucaacgcucaagaac

SEQ ID NO: 331367 - RNA, 19 nt, Artificial Sequence
  Description of Artificial Sequence: Synthetic oligonucleotide
  Sense Strand Starting at position 160 of SEQ ID NO: 318281
agauuauucuuguucgcaa

SEQ ID NO: 331368 - RNA, 19 nt, Artificial Sequence
  Description of Artificial Sequence: Synthetic oligonucleotide
  Antisense Strand to SEQ ID NO: 331367
uugcgaacaagaauaaucu

SEQ ID NO: 331369 - RNA, 19 nt, Artificial Sequence
  Description of Artificial Sequence: Synthetic oligonucleotide
  Sense Strand Starting at position 160 of SEQ ID NO: 318282
gauuauucuuguucgcaaa

SEQ ID NO: 331370 - RNA, 19 nt, Artificial Sequence
  Description of Artificial Sequence: Synthetic oligonucleotide
  Antisense Strand to SEQ ID NO: 331369
uuugcgaacaagaauaauc

SEQ ID NO: 331371 - RNA, 19 nt, Artificial Sequence
  Description of Artificial Sequence: Synthetic oligonucleotide
  Sense Strand Starting at position 160 of SEQ ID NO: 318283
auuauucuuguucgcaaag

SEQ ID NO: 331372 - RNA, 19 nt, Artificial Sequence
  Description of Artificial Sequence: Synthetic oligonucleotide
  Antisense Strand to SEQ ID NO: 331371
cuuugcgaacaagaauaau

SEQ ID NO: 331373 - RNA, 19 nt, Artificial Sequence
  Description of Artificial Sequence: Synthetic oligonucleotide
  Sense Strand Starting at position 160 of SEQ ID NO: 318295
cgcaaaguuugacuuuaaa

SEQ ID NO: 331374 - RNA, 19 nt, Artificial Sequence
  Description of Artificial Sequence: Synthetic oligonucleotide
  Antisense Strand to SEQ ID NO: 331373
uuuaaagucaaacuuugcg

SEQ ID NO: 331375 - RNA, 19 nt, Artificial Sequence
  Description of Artificial Sequence: Synthetic oligonucleotide
  Sense Strand Starting at position 160 of SEQ ID NO: 318312
aaggaauucugcgcuccca

SEQ ID NO: 331376 - RNA, 19 nt, Artificial Sequence
  Description of Artificial Sequence: Synthetic oligonucleotide
  Antisense Strand to SEQ ID NO: 331375
ugggagcgcagaauuccuu

SEQ ID NO: 331377 - RNA, 19 nt, Artificial Sequence
  Description of Artificial Sequence: Synthetic oligonucleotide
  Sense Strand Starting at position 160 of SEQ ID NO: 318315
gaauucugcgcucccaguu

SEQ ID NO: 331378 - RNA, 19 nt, Artificial Sequence
  Description of Artificial Sequence: Synthetic oligonucleotide
  Antisense Strand to SEQ ID NO: 331377
aacugggagcgcagaauuc

SEQ ID NO: 331379 - RNA, 19 nt, Artificial Sequence
  Description of Artificial Sequence: Synthetic oligonucleotide
  Sense Strand Starting at position 160 of SEQ ID NO: 318443
ggcacaucuacauggugua

SEQ ID NO: 331380 - RNA, 19 nt, Artificial Sequence
  Description of Artificial Sequence: Synthetic oligonucleotide
  Antisense Strand to SEQ ID NO: 331379
uacaccauguagaugugcc

SEQ ID NO: 331381 - RNA, 19 nt, Artificial Sequence
  Description of Artificial Sequence: Synthetic oligonucleotide
  Sense Strand Starting at position 160 of SEQ ID NO: 318448
aucuacaugguguaguuaa

SEQ ID NO: 331382 - RNA, 19 nt, Artificial Sequence
  Description of Artificial Sequence: Synthetic oligonucleotide
  Antisense Strand to SEQ ID NO: 331381
uuaacuacaccauguagau

SEQ ID NO: 331383 - RNA, 19 nt, Artificial Sequence
  Description of Artificial Sequence: Synthetic oligonucleotide
  Sense Strand Starting at position 160 of SEQ ID NO: 318695
cccugaguaagucaucgua

SEQ ID NO: 331384 - RNA, 19 nt, Artificial Sequence
  Description of Artificial Sequence: Synthetic oligonucleotide
  Antisense Strand to SEQ ID NO: 331383
uacgaugacuuacucaggg

SEQ ID NO: 331385 - RNA, 19 nt, Artificial Sequence
  Description of Artificial Sequence: Synthetic oligonucleotide
  Sense Strand Starting at position 160 of SEQ ID NO: 318697
cugaguaagucaucguaug

SEQ ID NO: 331386 - RNA, 19 nt, Artificial Sequence
  Description of Artificial Sequence: Synthetic oligonucleotide
  Antisense Strand to SEQ ID NO: 331385
cauacgaugacuuacucag

SEQ ID NO: 331387 - RNA, 19 nt, Artificial Sequence
  Description of Artificial Sequence: Synthetic oligonucleotide
  Sense Strand Starting at position 160 of SEQ ID NO: 318718
uccguaacaaagugaugau

SEQ ID NO: 331388 - RNA, 19 nt, Artificial Sequence
  Description of Artificial Sequence: Synthetic oligonucleotide
  Antisense Strand to SEQ ID NO: 331387
aucaucacuuuguuacgga

SEQ ID NO: 331389 - RNA, 19 nt, Artificial Sequence
  Description of Artificial Sequence: Synthetic oligonucleotide
  Sense Strand Starting at position 160 of SEQ ID NO: 318738
gaacaagaagguuggcaau

SEQ ID NO: 331390 - RNA, 19 nt, Artificial Sequence
  Description of Artificial Sequence: Synthetic oligonucleotide
  Antisense Strand to SEQ ID NO: 331389
auugccaaccuucuuguuc

SEQ ID NO: 331391 - RNA, 19 nt, Artificial Sequence
  Description of Artificial Sequence: Synthetic oligonucleotide
  Sense Strand Starting at position 160 of SEQ ID NO: 318761
guuugauugagacagguca

SEQ ID NO: 331392 - RNA, 19 nt, Artificial Sequence
  Description of Artificial Sequence: Synthetic oligonucleotide
  Antisense Strand to SEQ ID NO: 331391
ugaccugucucaaucaaac

SEQ ID NO: 331393 - RNA, 19 nt, Artificial Sequence
  Description of Artificial Sequence: Synthetic oligonucleotide
  Sense Strand Starting at position 160 of SEQ ID NO: 318768
ugagacaggucauugcuca

SEQ ID NO: 331394 - RNA, 19 nt, Artificial Sequence
  Description of Artificial Sequence: Synthetic oligonucleotide
  Antisense Strand to SEQ ID NO: 331393
ugagcaaugaccugucuca

SEQ ID NO: 331395 - RNA, 19 nt, Artificial Sequence
  Description of Artificial Sequence: Synthetic oligonucleotide
  Sense Strand Starting at position 160 of SEQ ID NO: 318775
ggucauugcucagccugaa

SEQ ID NO: 331396 - RNA, 19 nt, Artificial Sequence
  Description of Artificial Sequence: Synthetic oligonucleotide
  Antisense Strand to SEQ ID NO: 331395
uucaggcugagcaaugacc

SEQ ID NO: 331397 - RNA, 19 nt, Artificial Sequence
  Description of Artificial Sequence: Synthetic oligonucleotide
  Sense Strand Starting at position 160 of SEQ ID NO: 318779
auugcucagccugaaugaa

SEQ ID NO: 331398 - RNA, 19 nt, Artificial Sequence
  Description of Artificial Sequence: Synthetic oligonucleotide
  Antisense Strand to SEQ ID NO: 331397
uucauucaggcugagcaau

SEQ ID NO: 331399 - RNA, 19 nt, Artificial Sequence
  Description of Artificial Sequence: Synthetic oligonucleotide
  Sense Strand Starting at position 160 of SEQ ID NO: 318807
acauaucuguugcugugaa

SEQ ID NO: 331400 - RNA, 19 nt, Artificial Sequence
  Description of Artificial Sequence: Synthetic oligonucleotide
  Antisense Strand to SEQ ID NO: 331399
uucacagcaacagauaugu

SEQ ID NO: 331401 - RNA, 19 nt, Artificial Sequence
  Description of Artificial Sequence: Synthetic oligonucleotide
  Sense Strand Starting at position 160 of SEQ ID NO: 318880
cuaaguguuacggagacaa

SEQ ID NO: 331402 - RNA, 19 nt, Artificial Sequence
  Description of Artificial Sequence: Synthetic oligonucleotide
  Antisense Strand to SEQ ID NO: 331401
uugucuccguaacacuuag

SEQ ID NO: 331403 - RNA, 19 nt, Artificial Sequence
  Description of Artificial Sequence: Synthetic oligonucleotide
  Sense Strand Starting at position 160 of SEQ ID NO: 318884
guguuacggagacaagaua

SEQ ID NO: 331404 - RNA, 19 nt, Artificial Sequence
  Description of Artificial Sequence: Synthetic oligonucleotide
  Antisense Strand to SEQ ID NO: 331403
uaucuugucuccguaacac

SEQ ID NO: 331405 - RNA, 19 nt, Artificial Sequence
  Description of Artificial Sequence: Synthetic oligonucleotide
  Sense Strand Starting at position 160 of SEQ ID NO: 318905
guauguaacgcuuacuuga

SEQ ID NO: 331406 - RNA, 19 nt, Artificial Sequence
  Description of Artificial Sequence: Synthetic oligonucleotide
  Antisense Strand to SEQ ID NO: 331405
ucaaguaagcguuacauac

SEQ ID NO: 331407 - RNA, 19 nt, Artificial Sequence
  Description of Artificial Sequence: Synthetic oligonucleotide
  Sense Strand Starting at position 160 of SEQ ID NO: 318972
ucucuuuauagggaggcau

SEQ ID NO: 331408 - RNA, 19 nt, Artificial Sequence
  Description of Artificial Sequence: Synthetic oligonucleotide
  Antisense Strand to SEQ ID NO: 331407
augccucccuauaaagaga

SEQ ID NO: 331409 - RNA, 19 nt, Artificial Sequence
  Description of Artificial Sequence: Synthetic oligonucleotide
  Sense Strand Starting at position 160 of SEQ ID NO: 318974
ucuuuauagggaggcauau

SEQ ID NO: 331410 - RNA, 19 nt, Artificial Sequence
  Description of Artificial Sequence: Synthetic oligonucleotide
  Antisense Strand to SEQ ID NO: 331409
auaugccucccuauaaaga

SEQ ID NO: 331411 - RNA, 19 nt, Artificial Sequence
  Description of Artificial Sequence: Synthetic oligonucleotide
  Sense Strand Starting at position 160 of SEQ ID NO: 319002
ugcaaagccugauugacaa

SEQ ID NO: 331412 - RNA, 19 nt, Artificial Sequence
  Description of Artificial Sequence: Synthetic oligonucleotide
  Antisense Strand to SEQ ID NO: 331411
uugucaaucaggcuuugca

SEQ ID NO: 331413 - RNA, 19 nt, Artificial Sequence
  Description of Artificial Sequence: Synthetic oligonucleotide
  Sense Strand Starting at position 161 of SEQ ID NO: 315257
ucugacaucucagagaaga

SEQ ID NO: 331414 - RNA, 19 nt, Artificial Sequence
  Description of Artificial Sequence: Synthetic oligonucleotide
  Antisense Strand to SEQ ID NO: 331413
ucuucucugagaugucaga

SEQ ID NO: 331415 - RNA, 19 nt, Artificial Sequence
  Description of Artificial Sequence: Synthetic oligonucleotide
  Sense Strand Starting at position 161 of SEQ ID NO: 315449
ggugguauucucuagcacu

SEQ ID NO: 331416 - RNA, 19 nt, Artificial Sequence
  Description of Artificial Sequence: Synthetic oligonucleotide
  Antisense Strand to SEQ ID NO: 331415
agugcuagagaauaccacc

SEQ ID NO: 331417 - RNA, 19 nt, Artificial Sequence
  Description of Artificial Sequence: Synthetic oligonucleotide
  Sense Strand Starting at position 161 of SEQ ID NO: 315485
uucuguagugcccauagaa

SEQ ID NO: 331418 - RNA, 19 nt, Artificial Sequence
  Description of Artificial Sequence: Synthetic oligonucleotide
  Antisense Strand to SEQ ID NO: 331417
uucuaugggcacuacagaa

SEQ ID NO: 331419 - RNA, 19 nt, Artificial Sequence
  Description of Artificial Sequence: Synthetic oligonucleotide
  Sense Strand Starting at position 161 of SEQ ID NO: 315507
auuguugugcuauaacaag

SEQ ID NO: 331420 - RNA, 19 nt, Artificial Sequence
  Description of Artificial Sequence: Synthetic oligonucleotide
  Antisense Strand to SEQ ID NO: 331419
cuuguuauagcacaacaau

SEQ ID NO: 331421 - RNA, 19 nt, Artificial Sequence
  Description of Artificial Sequence: Synthetic oligonucleotide
  Sense Strand Starting at position 161 of SEQ ID NO: 315586
aacugaggguuccaggaaa

SEQ ID NO: 331422 - RNA, 19 nt, Artificial Sequence
  Description of Artificial Sequence: Synthetic oligonucleotide
  Antisense Strand to SEQ ID NO: 331421
uuuccuggaacccucaguu

SEQ ID NO: 331423 - RNA, 19 nt, Artificial Sequence
  Description of Artificial Sequence: Synthetic oligonucleotide
  Sense Strand Starting at position 161 of SEQ ID NO: 315626
ggaaguuccugacagaaua

SEQ ID NO: 331424 - RNA, 19 nt, Artificial Sequence
  Description of Artificial Sequence: Synthetic oligonucleotide
  Antisense Strand to SEQ ID NO: 331423
uauucugucaggaacuucc

SEQ ID NO: 331425 - RNA, 19 nt, Artificial Sequence
  Description of Artificial Sequence: Synthetic oligonucleotide
  Sense Strand Starting at position 161 of SEQ ID NO: 315645
gaaagaaucuaaggaguua

SEQ ID NO: 331426 - RNA, 19 nt, Artificial Sequence
  Description of Artificial Sequence: Synthetic oligonucleotide
  Antisense Strand to SEQ ID NO: 331425
uaacuccuuagauucuuuc

SEQ ID NO: 331427 - RNA, 19 nt, Artificial Sequence
  Description of Artificial Sequence: Synthetic oligonucleotide
  Sense Strand Starting at position 161 of SEQ ID NO: 315718
guugaccucagcuguaaug

SEQ ID NO: 331428 - RNA, 19 nt, Artificial Sequence
  Description of Artificial Sequence: Synthetic oligonucleotide
  Antisense Strand to SEQ ID NO: 331427
cauuacagcugaggucaac

SEQ ID NO: 331429 - RNA, 19 nt, Artificial Sequence
  Description of Artificial Sequence: Synthetic oligonucleotide
  Sense Strand Starting at position 161 of SEQ ID NO: 315819
ugugguccuucccuaaaga

SEQ ID NO: 331430 - RNA, 19 nt, Artificial Sequence
  Description of Artificial Sequence: Synthetic oligonucleotide
  Antisense Strand to SEQ ID NO: 331429
ucuuuagggaaggaccaca

SEQ ID NO: 331431 - RNA, 19 nt, Artificial Sequence
  Description of Artificial Sequence: Synthetic oligonucleotide
  Sense Strand Starting at position 161 of SEQ ID NO: 315855
cuuuguuguucucuccaca

SEQ ID NO: 331432 - RNA, 19 nt, Artificial Sequence
  Description of Artificial Sequence: Synthetic oligonucleotide
  Antisense Strand to SEQ ID NO: 331431
uguggagagaacaacaaag

SEQ ID NO: 331433 - RNA, 19 nt, Artificial Sequence
  Description of Artificial Sequence: Synthetic oligonucleotide
  Sense Strand Starting at position 161 of SEQ ID NO: 315858
uguuguucucuccacaauu

SEQ ID NO: 331434 - RNA, 19 nt, Artificial Sequence
  Description of Artificial Sequence: Synthetic oligonucleotide
  Antisense Strand to SEQ ID NO: 331433
aauuguggagagaacaaca

SEQ ID NO: 331435 - RNA, 19 nt, Artificial Sequence
  Description of Artificial Sequence: Synthetic oligonucleotide
  Sense Strand Starting at position 161 of SEQ ID NO: 316426
ugaugucauuacguguaca

SEQ ID NO: 331436 - RNA, 19 nt, Artificial Sequence
  Description of Artificial Sequence: Synthetic oligonucleotide
  Antisense Strand to SEQ ID NO: 331435
uguacacguaaugacauca

SEQ ID NO: 331437 - RNA, 19 nt, Artificial Sequence
  Description of Artificial Sequence: Synthetic oligonucleotide
  Sense Strand Starting at position 161 of SEQ ID NO: 316438
guguacacucuguggauga

SEQ ID NO: 331438 - RNA, 19 nt, Artificial Sequence
  Description of Artificial Sequence: Synthetic oligonucleotide
  Antisense Strand to SEQ ID NO: 331437
ucauccacagaguguacac

SEQ ID NO: 331439 - RNA, 19 nt, Artificial Sequence
  Description of Artificial Sequence: Synthetic oligonucleotide
  Sense Strand Starting at position 161 of SEQ ID NO: 316452
gaugaucaugucugggaac

SEQ ID NO: 331440 - RNA, 19 nt, Artificial Sequence
  Description of Artificial Sequence: Synthetic oligonucleotide
  Antisense Strand to SEQ ID NO: 331439
guucccagacaugaucauc

SEQ ID NO: 331441 - RNA, 19 nt, Artificial Sequence
  Description of Artificial Sequence: Synthetic oligonucleotide
  Sense Strand Starting at position 161 of SEQ ID NO: 316454
ugaucaugucugggaacuc

SEQ ID NO: 331442 - RNA, 19 nt, Artificial Sequence
  Description of Artificial Sequence: Synthetic oligonucleotide
  Antisense Strand to SEQ ID NO: 331441
gaguucccagacaugauca

SEQ ID NO: 331443 - RNA, 19 nt, Artificial Sequence
  Description of Artificial Sequence: Synthetic oligonucleotide
  Sense Strand Starting at position 161 of SEQ ID NO: 316484
ccucuuuguccugaguucu

SEQ ID NO: 331444 - RNA, 19 nt, Artificial Sequence
  Description of Artificial Sequence: Synthetic oligonucleotide
  Antisense Strand to SEQ ID NO: 331443
agaacucaggacaaagagg

SEQ ID NO: 331445 - RNA, 19 nt, Artificial Sequence
  Description of Artificial Sequence: Synthetic oligonucleotide
  Sense Strand Starting at position 161 of SEQ ID NO: 316494
cugaguucucccuggagac

SEQ ID NO: 331446 - RNA, 19 nt, Artificial Sequence
  Description of Artificial Sequence: Synthetic oligonucleotide
  Antisense Strand to SEQ ID NO: 331445
gucuccagggagaacucag

SEQ ID NO: 331447 - RNA, 19 nt, Artificial Sequence
  Description of Artificial Sequence: Synthetic oligonucleotide
  Sense Strand Starting at position 161 of SEQ ID NO: 316496
gaguucucccuggagacga

SEQ ID NO: 331448 - RNA, 19 nt, Artificial Sequence
  Description of Artificial Sequence: Synthetic oligonucleotide
  Antisense Strand to SEQ ID NO: 331447
ucgucuccagggagaacuc

SEQ ID NO: 331449 - RNA, 19 nt, Artificial Sequence
  Description of Artificial Sequence: Synthetic oligonucleotide
  Sense Strand Starting at position 161 of SEQ ID NO: 316646
ggaucacuuugucugucua

SEQ ID NO: 331450 - RNA, 19 nt, Artificial Sequence
  Description of Artificial Sequence: Synthetic oligonucleotide
  Antisense Strand to SEQ ID NO: 331449
uagacagacaaagugaucc

SEQ ID NO: 331451 - RNA, 19 nt, Artificial Sequence
  Description of Artificial Sequence: Synthetic oligonucleotide
  Sense Strand Starting at position 161 of SEQ ID NO: 316659
ugucuauccuucucuguca

SEQ ID NO: 331452 - RNA, 19 nt, Artificial Sequence
  Description of Artificial Sequence: Synthetic oligonucleotide
  Antisense Strand to SEQ ID NO: 331451
ugacagagaaggauagaca

SEQ ID NO: 331453 - RNA, 19 nt, Artificial Sequence
  Description of Artificial Sequence: Synthetic oligonucleotide
  Sense Strand Starting at position 161 of SEQ ID NO: 316699
agguuagcucaacaguauu

SEQ ID NO: 331454 - RNA, 19 nt, Artificial Sequence
  Description of Artificial Sequence: Synthetic oligonucleotide
  Antisense Strand to SEQ ID NO: 331453
aauacuguugagcuaaccu

SEQ ID NO: 331455 - RNA, 19 nt, Artificial Sequence
  Description of Artificial Sequence: Synthetic oligonucleotide
  Sense Strand Starting at position 161 of SEQ ID NO: 317003
gguccuauuccagguugga

SEQ ID NO: 331456 - RNA, 19 nt, Artificial Sequence
  Description of Artificial Sequence: Synthetic oligonucleotide
  Antisense Strand to SEQ ID NO: 331455
uccaaccuggaauaggacc

SEQ ID NO: 331457 - RNA, 19 nt, Artificial Sequence
  Description of Artificial Sequence: Synthetic oligonucleotide
  Sense Strand Starting at position 161 of SEQ ID NO: 317049
cggcaugacucagucagau

SEQ ID NO: 331458 - RNA, 19 nt, Artificial Sequence
  Description of Artificial Sequence: Synthetic oligonucleotide
  Antisense Strand to SEQ ID NO: 331457
aucugacugagucaugccg

SEQ ID NO: 331459 - RNA, 19 nt, Artificial Sequence
  Description of Artificial Sequence: Synthetic oligonucleotide
  Sense Strand Starting at position 161 of SEQ ID NO: 317215
agaaucucuggaggucaau

SEQ ID NO: 331460 - RNA, 19 nt, Artificial Sequence
  Description of Artificial Sequence: Synthetic oligonucleotide
  Antisense Strand to SEQ ID NO: 331459
auugaccuccagagauucu

SEQ ID NO: 331461 - RNA, 19 nt, Artificial Sequence
  Description of Artificial Sequence: Synthetic oligonucleotide
  Sense Strand Starting at position 161 of SEQ ID NO: 317256
gaagguugugacugcacaa

SEQ ID NO: 331462 - RNA, 19 nt, Artificial Sequence
  Description of Artificial Sequence: Synthetic oligonucleotide
  Antisense Strand to SEQ ID NO: 331461
uugugcagucacaaccuuc

SEQ ID NO: 331463 - RNA, 19 nt, Artificial Sequence
  Description of Artificial Sequence: Synthetic oligonucleotide
  Sense Strand Starting at position 161 of SEQ ID NO: 317332
cuaguucuucucugugaga

SEQ ID NO: 331464 - RNA, 19 nt, Artificial Sequence
  Description of Artificial Sequence: Synthetic oligonucleotide
  Antisense Strand to SEQ ID NO: 331463
ucucacagagaagaacuag

SEQ ID NO: 331465 - RNA, 19 nt, Artificial Sequence
  Description of Artificial Sequence: Synthetic oligonucleotide
  Sense Strand Starting at position 161 of SEQ ID NO: 317333
uaguucuucucugugagaa

SEQ ID NO: 331466 - RNA, 19 nt, Artificial Sequence
  Description of Artificial Sequence: Synthetic oligonucleotide
  Antisense Strand to SEQ ID NO: 331465
uucucacagagaagaacua

SEQ ID NO: 331467 - RNA, 19 nt, Artificial Sequence
  Description of Artificial Sequence: Synthetic oligonucleotide
  Sense Strand Starting at position 161 of SEQ ID NO: 317334
aguucuucucugugagaaa

SEQ ID NO: 331468 - RNA, 19 nt, Artificial Sequence
  Description of Artificial Sequence: Synthetic oligonucleotide
  Antisense Strand to SEQ ID NO: 331467
uuucucacagagaagaacu

SEQ ID NO: 331469 - RNA, 19 nt, Artificial Sequence
  Description of Artificial Sequence: Synthetic oligonucleotide
  Sense Strand Starting at position 161 of SEQ ID NO: 317366
gcauuaacagccugaagag

SEQ ID NO: 331470 - RNA, 19 nt, Artificial Sequence
  Description of Artificial Sequence: Synthetic oligonucleotide
  Antisense Strand to SEQ ID NO: 331469
cucuucaggcuguuaaugc

SEQ ID NO: 331471 - RNA, 19 nt, Artificial Sequence
  Description of Artificial Sequence: Synthetic oligonucleotide
  Sense Strand Starting at position 161 of SEQ ID NO: 317428
uggauucgcagccaaugaa

SEQ ID NO: 331472 - RNA, 19 nt, Artificial Sequence
  Description of Artificial Sequence: Synthetic oligonucleotide
  Antisense Strand to SEQ ID NO: 331471
uucauuggcugcgaaucca

SEQ ID NO: 331473 - RNA, 19 nt, Artificial Sequence
  Description of Artificial Sequence: Synthetic oligonucleotide
  Sense Strand Starting at position 161 of SEQ ID NO: 317431
auucgcagccaaugaaaua

SEQ ID NO: 331474 - RNA, 19 nt, Artificial Sequence
  Description of Artificial Sequence: Synthetic oligonucleotide
  Antisense Strand to SEQ ID NO: 331473
uauuucauuggcugcgaau

SEQ ID NO: 331475 - RNA, 19 nt, Artificial Sequence
  Description of Artificial Sequence: Synthetic oligonucleotide
  Sense Strand Starting at position 161 of SEQ ID NO: 317501
uccauacugccaggaauau

SEQ ID NO: 331476 - RNA, 19 nt, Artificial Sequence
  Description of Artificial Sequence: Synthetic oligonucleotide
  Antisense Strand to SEQ ID NO: 331475
auauuccuggcaguaugga

SEQ ID NO: 331477 - RNA, 19 nt, Artificial Sequence
  Description of Artificial Sequence: Synthetic oligonucleotide
  Sense Strand Starting at position 161 of SEQ ID NO: 317612
auuuaucucuuaggaguuu

SEQ ID NO: 331478 - RNA, 19 nt, Artificial Sequence
  Description of Artificial Sequence: Synthetic oligonucleotide
  Antisense Strand to SEQ ID NO: 331477
aaacuccuaagagauaaau

SEQ ID NO: 331479 - RNA, 19 nt, Artificial Sequence
  Description of Artificial Sequence: Synthetic oligonucleotide
  Sense Strand Starting at position 161 of SEQ ID NO: 317627
guuuguggugaccaggaau

SEQ ID NO: 331480 - RNA, 19 nt, Artificial Sequence
  Description of Artificial Sequence: Synthetic oligonucleotide
  Antisense Strand to SEQ ID NO: 331479
auuccuggucaccacaaac

SEQ ID NO: 331481 - RNA, 19 nt, Artificial Sequence
  Description of Artificial Sequence: Synthetic oligonucleotide
  Sense Strand Starting at position 161 of SEQ ID NO: 317718
augcaaagauuugacauua

SEQ ID NO: 331482 - RNA, 19 nt, Artificial Sequence
  Description of Artificial Sequence: Synthetic oligonucleotide
  Antisense Strand to SEQ ID NO: 331481
uaaugucaaaucuuugcau

SEQ ID NO: 331483 - RNA, 19 nt, Artificial Sequence
  Description of Artificial Sequence: Synthetic oligonucleotide
  Sense Strand Starting at position 161 of SEQ ID NO: 317728
uugacauuaugguuccauu

SEQ ID NO: 331484 - RNA, 19 nt, Artificial Sequence
  Description of Artificial Sequence: Synthetic oligonucleotide
  Antisense Strand to SEQ ID NO: 331483
aauggaaccauaaugucaa

SEQ ID NO: 331485 - RNA, 19 nt, Artificial Sequence
  Description of Artificial Sequence: Synthetic oligonucleotide
  Sense Strand Starting at position 161 of SEQ ID NO: 317748
ugagcuacccuuugacaaa

SEQ ID NO: 331486 - RNA, 19 nt, Artificial Sequence
  Description of Artificial Sequence: Synthetic oligonucleotide
  Antisense Strand to SEQ ID NO: 331485
uuugucaaaggguagcuca

SEQ ID NO: 331487 - RNA, 19 nt, Artificial Sequence
  Description of Artificial Sequence: Synthetic oligonucleotide
  Sense Strand Starting at position 161 of SEQ ID NO: 317887
gcuagugucaauggcacaa

SEQ ID NO: 331488 - RNA, 19 nt, Artificial Sequence
  Description of Artificial Sequence: Synthetic oligonucleotide
  Antisense Strand to SEQ ID NO: 331487
uugugccauugacacuagc

SEQ ID NO: 331489 - RNA, 19 nt, Artificial Sequence
  Description of Artificial Sequence: Synthetic oligonucleotide
  Sense Strand Starting at position 161 of SEQ ID NO: 317961
ugcgaacucacagguauua

SEQ ID NO: 331490 - RNA, 19 nt, Artificial Sequence
  Description of Artificial Sequence: Synthetic oligonucleotide
  Antisense Strand to SEQ ID NO: 331489
uaauaccugugaguucgca

SEQ ID NO: 331491 - RNA, 19 nt, Artificial Sequence
  Description of Artificial Sequence: Synthetic oligonucleotide
  Sense Strand Starting at position 161 of SEQ ID NO: 318401
uuacuagcguuacuauaaa

SEQ ID NO: 331492 - RNA, 19 nt, Artificial Sequence
  Description of Artificial Sequence: Synthetic oligonucleotide
  Antisense Strand to SEQ ID NO: 331491
uuuauaguaacgcuaguaa

SEQ ID NO: 331493 - RNA, 19 nt, Artificial Sequence
  Description of Artificial Sequence: Synthetic oligonucleotide
  Sense Strand Starting at position 162 of SEQ ID NO: 315257
ugaaucucaugugcuauuu

SEQ ID NO: 331494 - RNA, 19 nt, Artificial Sequence
  Description of Artificial Sequence: Synthetic oligonucleotide
  Antisense Strand to SEQ ID NO: 331493
aaauagcacaugagauuca

SEQ ID NO: 331495 - RNA, 19 nt, Artificial Sequence
  Description of Artificial Sequence: Synthetic oligonucleotide
  Sense Strand Starting at position 162 of SEQ ID NO: 315288
gcuuuagucagcuggagag

SEQ ID NO: 331496 - RNA, 19 nt, Artificial Sequence
  Description of Artificial Sequence: Synthetic oligonucleotide
  Antisense Strand to SEQ ID NO: 331495
cucuccagcugacuaaagc

SEQ ID NO: 331497 - RNA, 19 nt, Artificial Sequence
  Description of Artificial Sequence: Synthetic oligonucleotide
  Sense Strand Starting at position 162 of SEQ ID NO: 315420
gugcauuucuucugacaaa

SEQ ID NO: 331498 - RNA, 19 nt, Artificial Sequence
  Description of Artificial Sequence: Synthetic oligonucleotide
  Antisense Strand to SEQ ID NO: 331497
uuugucagaagaaaugcac

SEQ ID NO: 331499 - RNA, 19 nt, Artificial Sequence
  Description of Artificial Sequence: Synthetic oligonucleotide
  Sense Strand Starting at position 162 of SEQ ID NO: 315441
ugaggucauucccacauuu

SEQ ID NO: 331500 - RNA, 19 nt, Artificial Sequence
  Description of Artificial Sequence: Synthetic oligonucleotide
  Antisense Strand to SEQ ID NO: 331499
aaaugugggaaugaccuca

SEQ ID NO: 331501 - RNA, 19 nt, Artificial Sequence
  Description of Artificial Sequence: Synthetic oligonucleotide
  Sense Strand Starting at position 162 of SEQ ID NO: 315463
ccgcaucucugauuuguaa

SEQ ID NO: 331502 - RNA, 19 nt, Artificial Sequence
  Description of Artificial Sequence: Synthetic oligonucleotide
  Antisense Strand to SEQ ID NO: 331501
uuacaaaucagagaugcgg

SEQ ID NO: 331503 - RNA, 19 nt, Artificial Sequence
  Description of Artificial Sequence: Synthetic oligonucleotide
  Sense Strand Starting at position 162 of SEQ ID NO: 315606
guguuacuccaacaucuuu

SEQ ID NO: 331504 - RNA, 19 nt, Artificial Sequence
  Description of Artificial Sequence: Synthetic oligonucleotide
  Antisense Strand to SEQ ID NO: 331503
aaagauguuggaguaacac

SEQ ID NO: 331505 - RNA, 19 nt, Artificial Sequence
  Description of Artificial Sequence: Synthetic oligonucleotide
  Sense Strand Starting at position 162 of SEQ ID NO: 315724
ugacacuuccugcaaauga

SEQ ID NO: 331506 - RNA, 19 nt, Artificial Sequence
  Description of Artificial Sequence: Synthetic oligonucleotide
  Antisense Strand to SEQ ID NO: 331505
ucauuugcaggaaguguca

SEQ ID NO: 331507 - RNA, 19 nt, Artificial Sequence
  Description of Artificial Sequence: Synthetic oligonucleotide
  Sense Strand Starting at position 162 of SEQ ID NO: 315747
ucaugaugcuugggacuca

SEQ ID NO: 331508 - RNA, 19 nt, Artificial Sequence
  Description of Artificial Sequence: Synthetic oligonucleotide
  Antisense Strand to SEQ ID NO: 331507
ugagucccaagcaucauga

SEQ ID NO: 331509 - RNA, 19 nt, Artificial Sequence
  Description of Artificial Sequence: Synthetic oligonucleotide
  Sense Strand Starting at position 162 of SEQ ID NO: 315936
agggaauuaucuccgugua

SEQ ID NO: 331510 - RNA, 19 nt, Artificial Sequence
  Description of Artificial Sequence: Synthetic oligonucleotide
  Antisense Strand to SEQ ID NO: 331509
uacacggagauaauucccu

SEQ ID NO: 331511 - RNA, 19 nt, Artificial Sequence
  Description of Artificial Sequence: Synthetic oligonucleotide
  Sense Strand Starting at position 162 of SEQ ID NO: 315937
gggaauuaucuccguguag

SEQ ID NO: 331512 - RNA, 19 nt, Artificial Sequence
  Description of Artificial Sequence: Synthetic oligonucleotide
  Antisense Strand to SEQ ID NO: 331511
cuacacggagauaauuccc

SEQ ID NO: 331513 - RNA, 19 nt, Artificial Sequence
  Description of Artificial Sequence: Synthetic oligonucleotide
  Sense Strand Starting at position 162 of SEQ ID NO: 315938
ggaauuaucuccguguagg

SEQ ID NO: 331514 - RNA, 19 nt, Artificial Sequence
  Description of Artificial Sequence: Synthetic oligonucleotide
  Antisense Strand to SEQ ID NO: 331513
ccuacacggagauaauucc

SEQ ID NO: 331515 - RNA, 19 nt, Artificial Sequence
  Description of Artificial Sequence: Synthetic oligonucleotide
  Sense Strand Starting at position 162 of SEQ ID NO: 315939
gaauuaucuccguguaggu

SEQ ID NO: 331516 - RNA, 19 nt, Artificial Sequence
  Description of Artificial Sequence: Synthetic oligonucleotide
  Antisense Strand to SEQ ID NO: 331515
accuacacggagauaauuc

SEQ ID NO: 331517 - RNA, 19 nt, Artificial Sequence
  Description of Artificial Sequence: Synthetic oligonucleotide
  Sense Strand Starting at position 162 of SEQ ID NO: 316030
ggccaucucccaggcagau

SEQ ID NO: 331518 - RNA, 19 nt, Artificial Sequence
  Description of Artificial Sequence: Synthetic oligonucleotide
  Antisense Strand to SEQ ID NO: 331517
aucugccugggagauggcc

SEQ ID NO: 331519 - RNA, 19 nt, Artificial Sequence
  Description of Artificial Sequence: Synthetic oligonucleotide
  Sense Strand Starting at position 162 of SEQ ID NO: 316140
agccaauuauugcuaagua

SEQ ID NO: 331520 - RNA, 19 nt, Artificial Sequence
  Description of Artificial Sequence: Synthetic oligonucleotide
  Antisense Strand to SEQ ID NO: 331519
uacuuagcaauaauuggcu

SEQ ID NO: 331521 - RNA, 19 nt, Artificial Sequence
  Description of Artificial Sequence: Synthetic oligonucleotide
  Sense Strand Starting at position 162 of SEQ ID NO: 316141
gccaauuauugcuaaguaa

SEQ ID NO: 331522 - RNA, 19 nt, Artificial Sequence
  Description of Artificial Sequence: Synthetic oligonucleotide
  Antisense Strand to SEQ ID NO: 331521
uuacuuagcaauaauuggc

SEQ ID NO: 331523 - RNA, 19 nt, Artificial Sequence
  Description of Artificial Sequence: Synthetic oligonucleotide
  Sense Strand Starting at position 162 of SEQ ID NO: 316628
gggaccuucuuccuaguca

SEQ ID NO: 331524 - RNA, 19 nt, Artificial Sequence
  Description of Artificial Sequence: Synthetic oligonucleotide
  Antisense Strand to SEQ ID NO: 331523
ugacuaggaagaagguccc

SEQ ID NO: 331525 - RNA, 19 nt, Artificial Sequence
  Description of Artificial Sequence: Synthetic oligonucleotide
  Sense Strand Starting at position 162 of SEQ ID NO: 316629
ggaccuucuuccuagucaa

SEQ ID NO: 331526 - RNA, 19 nt, Artificial Sequence
  Description of Artificial Sequence: Synthetic oligonucleotide
  Antisense Strand to SEQ ID NO: 331525
uugacuaggaagaaggucc

SEQ ID NO: 331527 - RNA, 19 nt, Artificial Sequence
  Description of Artificial Sequence: Synthetic oligonucleotide
  Sense Strand Starting at position 162 of SEQ ID NO: 316632
ccuucuuccuagucaacga

SEQ ID NO: 331528 - RNA, 19 nt, Artificial Sequence
  Description of Artificial Sequence: Synthetic oligonucleotide
  Antisense Strand to SEQ ID NO: 331527
ucguugacuaggaagaagg

SEQ ID NO: 331529 - RNA, 19 nt, Artificial Sequence
  Description of Artificial Sequence: Synthetic oligonucleotide
  Sense Strand Starting at position 162 of SEQ ID NO: 318478
gcucguguuguucaaggaa

SEQ ID NO: 331530 - RNA, 19 nt, Artificial Sequence
  Description of Artificial Sequence: Synthetic oligonucleotide
  Antisense Strand to SEQ ID NO: 331529
uuccuugaacaacacgagc

SEQ ID NO: 331531 - RNA, 19 nt, Artificial Sequence
  Description of Artificial Sequence: Synthetic oligonucleotide
  Sense Strand Starting at position 162 of SEQ ID NO: 318481
cguguuguucaaggaaaua

SEQ ID NO: 331532 - RNA, 19 nt, Artificial Sequence
  Description of Artificial Sequence: Synthetic oligonucleotide
  Antisense Strand to SEQ ID NO: 331531
uauuuccuugaacaacacg

SEQ ID NO: 331533 - RNA, 19 nt, Artificial Sequence
  Description of Artificial Sequence: Synthetic oligonucleotide
  Sense Strand Starting at position 162 of SEQ ID NO: 318535
agcugaagggaguaguuua

SEQ ID NO: 331534 - RNA, 19 nt, Artificial Sequence
  Description of Artificial Sequence: Synthetic oligonucleotide
  Antisense Strand to SEQ ID NO: 331533
uaaacuacucccuucagcu

SEQ ID NO: 331535 - RNA, 19 nt, Artificial Sequence
  Description of Artificial Sequence: Synthetic oligonucleotide
  Sense Strand Starting at position 162 of SEQ ID NO: 318630
uacuuuaucuaguggauga

SEQ ID NO: 331536 - RNA, 19 nt, Artificial Sequence
  Description of Artificial Sequence: Synthetic oligonucleotide
  Antisense Strand to SEQ ID NO: 331535
ucauccacuagauaaagua

SEQ ID NO: 331537 - RNA, 19 nt, Artificial Sequence
  Description of Artificial Sequence: Synthetic oligonucleotide
  Sense Strand Starting at position 162 of SEQ ID NO: 318634
uuaucuaguggaugacuga

SEQ ID NO: 331538 - RNA, 19 nt, Artificial Sequence
  Description of Artificial Sequence: Synthetic oligonucleotide
  Antisense Strand to SEQ ID NO: 331537
ucagucauccacuagauaa

SEQ ID NO: 331539 - RNA, 19 nt, Artificial Sequence
  Description of Artificial Sequence: Synthetic oligonucleotide
  Sense Strand Starting at position 162 of SEQ ID NO: 318637
ucuaguggaugacugauau

SEQ ID NO: 331540 - RNA, 19 nt, Artificial Sequence
  Description of Artificial Sequence: Synthetic oligonucleotide
  Antisense Strand to SEQ ID NO: 331539
auaucagucauccacuaga

SEQ ID NO: 331541 - RNA, 19 nt, Artificial Sequence
  Description of Artificial Sequence: Synthetic oligonucleotide
  Sense Strand Starting at position 162 of SEQ ID NO: 318665
agcuuugugcugccuguua

SEQ ID NO: 331542 - RNA, 19 nt, Artificial Sequence
  Description of Artificial Sequence: Synthetic oligonucleotide
  Antisense Strand to SEQ ID NO: 331541
uaacaggcagcacaaagcu

SEQ ID NO: 331543 - RNA, 19 nt, Artificial Sequence
  Description of Artificial Sequence: Synthetic oligonucleotide
  Sense Strand Starting at position 162 of SEQ ID NO: 318688
aagggcgucugcuuuguua

SEQ ID NO: 331544 - RNA, 19 nt, Artificial Sequence
  Description of Artificial Sequence: Synthetic oligonucleotide
  Antisense Strand to SEQ ID NO: 331543
uaacaaagcagacgcccuu

SEQ ID NO: 331545 - RNA, 19 nt, Artificial Sequence
  Description of Artificial Sequence: Synthetic oligonucleotide
  Sense Strand Starting at position 162 of SEQ ID NO: 318690
gggcgucugcuuuguuacu

SEQ ID NO: 331546 - RNA, 19 nt, Artificial Sequence
  Description of Artificial Sequence: Synthetic oligonucleotide
  Antisense Strand to SEQ ID NO: 331545
aguaacaaagcagacgccc

SEQ ID NO: 331547 - RNA, 19 nt, Artificial Sequence
  Description of Artificial Sequence: Synthetic oligonucleotide
  Sense Strand Starting at position 162 of SEQ ID NO: 318806
aaagcucagcgugaauuaa

SEQ ID NO: 331548 - RNA, 19 nt, Artificial Sequence
  Description of Artificial Sequence: Synthetic oligonucleotide
  Antisense Strand to SEQ ID NO: 331547
uuaauucacgcugagcuuu

SEQ ID NO: 331549 - RNA, 19 nt, Artificial Sequence
  Description of Artificial Sequence: Synthetic oligonucleotide
  Sense Strand Starting at position 162 of SEQ ID NO: 318810
cucagcgugaauuaagaaa

SEQ ID NO: 331550 - RNA, 19 nt, Artificial Sequence
  Description of Artificial Sequence: Synthetic oligonucleotide
  Antisense Strand to SEQ ID NO: 331549
uuucuuaauucacgcugag

SEQ ID NO: 331551 - RNA, 19 nt, Artificial Sequence
  Description of Artificial Sequence: Synthetic oligonucleotide
  Sense Strand Starting at position 162 of SEQ ID NO: 318844
gaaggugcuccuuacccaa

SEQ ID NO: 331552 - RNA, 19 nt, Artificial Sequence
  Description of Artificial Sequence: Synthetic oligonucleotide
  Antisense Strand to SEQ ID NO: 331551
uuggguaaggagcaccuuc

SEQ ID NO: 331553 - RNA, 19 nt, Artificial Sequence
  Description of Artificial Sequence: Synthetic oligonucleotide
  Sense Strand Starting at position 162 of SEQ ID NO: 318847
ggugcuccuuacccaaaga

SEQ ID NO: 331554 - RNA, 19 nt, Artificial Sequence
  Description of Artificial Sequence: Synthetic oligonucleotide
  Antisense Strand to SEQ ID NO: 331553
ucuuuggguaaggagcacc

SEQ ID NO: 331555 - RNA, 19 nt, Artificial Sequence
  Description of Artificial Sequence: Synthetic oligonucleotide
  Sense Strand Starting at position 162 of SEQ ID NO: 318872
acuagucauccucaauugu

SEQ ID NO: 331556 - RNA, 19 nt, Artificial Sequence
  Description of Artificial Sequence: Synthetic oligonucleotide
  Antisense Strand to SEQ ID NO: 331555
acaauugaggaugacuagu

SEQ ID NO: 331557 - RNA, 19 nt, Artificial Sequence
  Description of Artificial Sequence: Synthetic oligonucleotide
  Sense Strand Starting at position 162 of SEQ ID NO: 318956
ggugucugguccgugagga

SEQ ID NO: 331558 - RNA, 19 nt, Artificial Sequence
  Description of Artificial Sequence: Synthetic oligonucleotide
  Antisense Strand to SEQ ID NO: 331557
uccucacggaccagacacc

SEQ ID NO: 331559 - RNA, 19 nt, Artificial Sequence
  Description of Artificial Sequence: Synthetic oligonucleotide
  Sense Strand Starting at position 162 of SEQ ID NO: 318957
gugucugguccgugaggau

SEQ ID NO: 331560 - RNA, 19 nt, Artificial Sequence
  Description of Artificial Sequence: Synthetic oligonucleotide
  Antisense Strand to SEQ ID NO: 331559
auccucacggaccagacac

SEQ ID NO: 331561 - RNA, 19 nt, Artificial Sequence
  Description of Artificial Sequence: Synthetic oligonucleotide
  Sense Strand Starting at position 162 of SEQ ID NO: 319032
gagaaaucgcccuacgguc

SEQ ID NO: 331562 - RNA, 19 nt, Artificial Sequence
  Description of Artificial Sequence: Synthetic oligonucleotide
  Antisense Strand to SEQ ID NO: 331561
gaccguagggcgauuucuc

SEQ ID NO: 331563 - RNA, 19 nt, Artificial Sequence
  Description of Artificial Sequence: Synthetic oligonucleotide
  Sense Strand Starting at position 162 of SEQ ID NO: 319045
acggucuaguaacaauaua

SEQ ID NO: 331564 - RNA, 19 nt, Artificial Sequence
  Description of Artificial Sequence: Synthetic oligonucleotide
  Antisense Strand to SEQ ID NO: 331563
uauauuguuacuagaccgu

SEQ ID NO: 331565 - RNA, 19 nt, Artificial Sequence
  Description of Artificial Sequence: Synthetic oligonucleotide
  Sense Strand Starting at position 162 of SEQ ID NO: 319088
auggcugcuucugauccaa

SEQ ID NO: 331566 - RNA, 19 nt, Artificial Sequence
  Description of Artificial Sequence: Synthetic oligonucleotide
  Antisense Strand to SEQ ID NO: 331565
uuggaucagaagcagccau

SEQ ID NO: 331567 - RNA, 19 nt, Artificial Sequence
  Description of Artificial Sequence: Synthetic oligonucleotide
  Sense Strand Starting at position 162 of SEQ ID NO: 319122
gaagacgguucccuccaaa

SEQ ID NO: 331568 - RNA, 19 nt, Artificial Sequence
  Description of Artificial Sequence: Synthetic oligonucleotide
  Antisense Strand to SEQ ID NO: 331567
uuuggagggaaccgucuuc

SEQ ID NO: 331569 - RNA, 19 nt, Artificial Sequence
  Description of Artificial Sequence: Synthetic oligonucleotide
  Sense Strand Starting at position 162 of SEQ ID NO: 319125
gacgguucccuccaaagaa

SEQ ID NO: 331570 - RNA, 19 nt, Artificial Sequence
  Description of Artificial Sequence: Synthetic oligonucleotide
  Antisense Strand to SEQ ID NO: 331569
uucuuuggagggaaccguc

SEQ ID NO: 331571 - RNA, 19 nt, Artificial Sequence
  Description of Artificial Sequence: Synthetic oligonucleotide
  Sense Strand Starting at position 162 of SEQ ID NO: 319196
cagaacuccuggucuaaag

SEQ ID NO: 331572 - RNA, 19 nt, Artificial Sequence
  Description of Artificial Sequence: Synthetic oligonucleotide
  Antisense Strand to SEQ ID NO: 331571
cuuuagaccaggaguucug

SEQ ID NO: 331573 - RNA, 19 nt, Artificial Sequence
  Description of Artificial Sequence: Synthetic oligonucleotide
  Sense Strand Starting at position 163 of SEQ ID NO: 315320
ggagcuaugaaacggcuaa

SEQ ID NO: 331574 - RNA, 19 nt, Artificial Sequence
  Description of Artificial Sequence: Synthetic oligonucleotide
  Antisense Strand to SEQ ID NO: 331573
uuagccguuucauagcucc

SEQ ID NO: 331575 - RNA, 19 nt, Artificial Sequence
  Description of Artificial Sequence: Synthetic oligonucleotide
  Sense Strand Starting at position 163 of SEQ ID NO: 315363
cgugcuuggcuuugaggaa

SEQ ID NO: 331576 - RNA, 19 nt, Artificial Sequence
  Description of Artificial Sequence: Synthetic oligonucleotide
  Antisense Strand to SEQ ID NO: 331575
uuccucaaagccaagcacg

SEQ ID NO: 331577 - RNA, 19 nt, Artificial Sequence
  Description of Artificial Sequence: Synthetic oligonucleotide
  Sense Strand Starting at position 163 of SEQ ID NO: 315418
uaagcacuaugauugaagu

SEQ ID NO: 331578 - RNA, 19 nt, Artificial Sequence
  Description of Artificial Sequence: Synthetic oligonucleotide
  Antisense Strand to SEQ ID NO: 331577
acuucaaucauagugcuua

SEQ ID NO: 331579 - RNA, 19 nt, Artificial Sequence
  Description of Artificial Sequence: Synthetic oligonucleotide
  Sense Strand Starting at position 163 of SEQ ID NO: 315437
ccauuuccaucacggcaaa

SEQ ID NO: 331580 - RNA, 19 nt, Artificial Sequence
  Description of Artificial Sequence: Synthetic oligonucleotide
  Antisense Strand to SEQ ID NO: 331579
uuugccgugauggaaaugg

SEQ ID NO: 331581 - RNA, 19 nt, Artificial Sequence
  Description of Artificial Sequence: Synthetic oligonucleotide
  Sense Strand Starting at position 163 of SEQ ID NO: 315566
ccgugcggcacuuguaauu

SEQ ID NO: 331582 - RNA, 19 nt, Artificial Sequence
  Description of Artificial Sequence: Synthetic oligonucleotide
  Antisense Strand to SEQ ID NO: 331581
aauuacaagugccgcacgg

SEQ ID NO: 331583 - RNA, 19 nt, Artificial Sequence
  Description of Artificial Sequence: Synthetic oligonucleotide
  Sense Strand Starting at position 163 of SEQ ID NO: 315576
cuuguaauuugccaacuga

SEQ ID NO: 331584 - RNA, 19 nt, Artificial Sequence
  Description of Artificial Sequence: Synthetic oligonucleotide
  Antisense Strand to SEQ ID NO: 331583
ucaguuggcaaauuacaag

SEQ ID NO: 331585 - RNA, 19 nt, Artificial Sequence
  Description of Artificial Sequence: Synthetic oligonucleotide
  Sense Strand Starting at position 163 of SEQ ID NO: 315614
caggcugugcaaugagaga

SEQ ID NO: 331586 - RNA, 19 nt, Artificial Sequence
  Description of Artificial Sequence: Synthetic oligonucleotide
  Antisense Strand to SEQ ID NO: 331585
ucucucauugcacagccug

SEQ ID NO: 331587 - RNA, 19 nt, Artificial Sequence
  Description of Artificial Sequence: Synthetic oligonucleotide
  Sense Strand Starting at position 163 of SEQ ID NO: 315744
gcucuuacccuugggcaga

SEQ ID NO: 331588 - RNA, 19 nt, Artificial Sequence
  Description of Artificial Sequence: Synthetic oligonucleotide
  Antisense Strand to SEQ ID NO: 331587
ucugcccaaggguaagagc

SEQ ID NO: 331589 - RNA, 19 nt, Artificial Sequence
  Description of Artificial Sequence: Synthetic oligonucleotide
  Sense Strand Starting at position 163 of SEQ ID NO: 315953
gggucugggcacugacaua

SEQ ID NO: 331590 - RNA, 19 nt, Artificial Sequence
  Description of Artificial Sequence: Synthetic oligonucleotide
  Antisense Strand to SEQ ID NO: 331589
uaugucagugcccagaccc

SEQ ID NO: 331591 - RNA, 19 nt, Artificial Sequence
  Description of Artificial Sequence: Synthetic oligonucleotide
  Sense Strand Starting at position 163 of SEQ ID NO: 315991
ggaaacugauacguccuaa

SEQ ID NO: 331592 - RNA, 19 nt, Artificial Sequence
  Description of Artificial Sequence: Synthetic oligonucleotide
  Antisense Strand to SEQ ID NO: 331591
uuaggacguaucaguuucc

SEQ ID NO: 331593 - RNA, 19 nt, Artificial Sequence
  Description of Artificial Sequence: Synthetic oligonucleotide
  Sense Strand Starting at position 163 of SEQ ID NO: 316159
agcuauuacucuguuggca

SEQ ID NO: 331594 - RNA, 19 nt, Artificial Sequence
  Description of Artificial Sequence: Synthetic oligonucleotide
  Antisense Strand to SEQ ID NO: 331593
ugccaacagaguaauagcu

SEQ ID NO: 331595 - RNA, 19 nt, Artificial Sequence
  Description of Artificial Sequence: Synthetic oligonucleotide
  Sense Strand Starting at position 163 of SEQ ID NO: 316399
ggagaugucccucaccucu

SEQ ID NO: 331596 - RNA, 19 nt, Artificial Sequence
  Description of Artificial Sequence: Synthetic oligonucleotide
  Antisense Strand to SEQ ID NO: 331595
agaggugagggacaucucc

SEQ ID NO: 331597 - RNA, 19 nt, Artificial Sequence
  Description of Artificial Sequence: Synthetic oligonucleotide
  Sense Strand Starting at position 163 of SEQ ID NO: 317633
ggccuagagucacagguuu

SEQ ID NO: 331598 - RNA, 19 nt, Artificial Sequence
  Description of Artificial Sequence: Synthetic oligonucleotide
  Antisense Strand to SEQ ID NO: 331597
aaaccugugacucuaggcc

SEQ ID NO: 331599 - RNA, 19 nt, Artificial Sequence
  Description of Artificial Sequence: Synthetic oligonucleotide
  Sense Strand Starting at position 163 of SEQ ID NO: 317646
agguuuaaugguggaguga

SEQ ID NO: 331600 - RNA, 19 nt, Artificial Sequence
  Description of Artificial Sequence: Synthetic oligonucleotide
  Antisense Strand to SEQ ID NO: 331599
ucacuccaccauuaaaccu

SEQ ID NO: 331601 - RNA, 19 nt, Artificial Sequence
  Description of Artificial Sequence: Synthetic oligonucleotide
  Sense Strand Starting at position 163 of SEQ ID NO: 317716
ggcucuagcuaucuuuaag

SEQ ID NO: 331602 - RNA, 19 nt, Artificial Sequence
  Description of Artificial Sequence: Synthetic oligonucleotide
  Antisense Strand to SEQ ID NO: 331601
cuuaaagauagcuagagcc

SEQ ID NO: 331603 - RNA, 19 nt, Artificial Sequence
  Description of Artificial Sequence: Synthetic oligonucleotide
  Sense Strand Starting at position 163 of SEQ ID NO: 317952
cuguuuagauucuuccaga

SEQ ID NO: 331604 - RNA, 19 nt, Artificial Sequence
  Description of Artificial Sequence: Synthetic oligonucleotide
  Antisense Strand to SEQ ID NO: 331603
ucuggaagaaucuaaacag

SEQ ID NO: 331605 - RNA, 19 nt, Artificial Sequence
  Description of Artificial Sequence: Synthetic oligonucleotide
  Sense Strand Starting at position 163 of SEQ ID NO: 317953
uguuuagauucuuccagag

SEQ ID NO: 331606 - RNA, 19 nt, Artificial Sequence
  Description of Artificial Sequence: Synthetic oligonucleotide
  Antisense Strand to SEQ ID NO: 331605
cucuggaagaaucuaaaca

SEQ ID NO: 331607 - RNA, 19 nt, Artificial Sequence
  Description of Artificial Sequence: Synthetic oligonucleotide
  Sense Strand Starting at position 163 of SEQ ID NO: 318100
caguguccucgcuugugaa

SEQ ID NO: 331608 - RNA, 19 nt, Artificial Sequence
  Description of Artificial Sequence: Synthetic oligonucleotide
  Antisense Strand to SEQ ID NO: 331607
uucacaagcgaggacacug

SEQ ID NO: 331609 - RNA, 19 nt, Artificial Sequence
  Description of Artificial Sequence: Synthetic oligonucleotide
  Sense Strand Starting at position 163 of SEQ ID NO: 318101
aguguccucgcuugugaau

SEQ ID NO: 331610 - RNA, 19 nt, Artificial Sequence
  Description of Artificial Sequence: Synthetic oligonucleotide
  Antisense Strand to SEQ ID NO: 331609
auucacaagcgaggacacu

SEQ ID NO: 331611 - RNA, 19 nt, Artificial Sequence
  Description of Artificial Sequence: Synthetic oligonucleotide
  Sense Strand Starting at position 163 of SEQ ID NO: 318113
ugugaaugcuugugugggu

SEQ ID NO: 331612 - RNA, 19 nt, Artificial Sequence
  Description of Artificial Sequence: Synthetic oligonucleotide
  Antisense Strand to SEQ ID NO: 331611
acccacacaagcauucaca

SEQ ID NO: 331613 - RNA, 19 nt, Artificial Sequence
  Description of Artificial Sequence: Synthetic oligonucleotide
  Sense Strand Starting at position 163 of SEQ ID NO: 318165
gggagaaucucuugguaaa

SEQ ID NO: 331614 - RNA, 19 nt, Artificial Sequence
  Description of Artificial Sequence: Synthetic oligonucleotide
  Antisense Strand to SEQ ID NO: 331613
uuuaccaagagauucuccc

SEQ ID NO: 331615 - RNA, 19 nt, Artificial Sequence
  Description of Artificial Sequence: Synthetic oligonucleotide
  Sense Strand Starting at position 163 of SEQ ID NO: 318166
ggagaaucucuugguaaac

SEQ ID NO: 331616 - RNA, 19 nt, Artificial Sequence
  Description of Artificial Sequence: Synthetic oligonucleotide
  Antisense Strand to SEQ ID NO: 331615
guuuaccaagagauucucc

SEQ ID NO: 331617 - RNA, 19 nt, Artificial Sequence
  Description of Artificial Sequence: Synthetic oligonucleotide
  Sense Strand Starting at position 163 of SEQ ID NO: 318167
gagaaucucuugguaaacu

SEQ ID NO: 331618 - RNA, 19 nt, Artificial Sequence
  Description of Artificial Sequence: Synthetic oligonucleotide
  Antisense Strand to SEQ ID NO: 331617
aguuuaccaagagauucuc

SEQ ID NO: 331619 - RNA, 19 nt, Artificial Sequence
  Description of Artificial Sequence: Synthetic oligonucleotide
  Sense Strand Starting at position 163 of SEQ ID NO: 318206
agaccaucccuaggauucu

SEQ ID NO: 331620 - RNA, 19 nt, Artificial Sequence
  Description of Artificial Sequence: Synthetic oligonucleotide
  Antisense Strand to SEQ ID NO: 331619
agaauccuagggauggucu

SEQ ID NO: 331621 - RNA, 19 nt, Artificial Sequence
  Description of Artificial Sequence: Synthetic oligonucleotide
  Sense Strand Starting at position 163 of SEQ ID NO: 318212
ucccuaggauucuacugaa

SEQ ID NO: 331622 - RNA, 19 nt, Artificial Sequence
  Description of Artificial Sequence: Synthetic oligonucleotide
  Antisense Strand to SEQ ID NO: 331621
uucaguagaauccuaggga

SEQ ID NO: 331623 - RNA, 19 nt, Artificial Sequence
  Description of Artificial Sequence: Synthetic oligonucleotide
  Sense Strand Starting at position 163 of SEQ ID NO: 318215
cuaggauucuacugaaguu

SEQ ID NO: 331624 - RNA, 19 nt, Artificial Sequence
  Description of Artificial Sequence: Synthetic oligonucleotide
  Antisense Strand to SEQ ID NO: 331623
aacuucaguagaauccuag

SEQ ID NO: 331625 - RNA, 19 nt, Artificial Sequence
  Description of Artificial Sequence: Synthetic oligonucleotide
  Sense Strand Starting at position 163 of SEQ ID NO: 318316
agcaauaacugcccacaga

SEQ ID NO: 331626 - RNA, 19 nt, Artificial Sequence
  Description of Artificial Sequence: Synthetic oligonucleotide
  Antisense Strand to SEQ ID NO: 331625
ucugugggcaguuauugcu

SEQ ID NO: 331627 - RNA, 19 nt, Artificial Sequence
  Description of Artificial Sequence: Synthetic oligonucleotide
  Sense Strand Starting at position 163 of SEQ ID NO: 318336
cuggccuaucacgaggaau

SEQ ID NO: 331628 - RNA, 19 nt, Artificial Sequence
  Description of Artificial Sequence: Synthetic oligonucleotide
  Antisense Strand to SEQ ID NO: 331627
auuccucgugauaggccag

SEQ ID NO: 331629 - RNA, 19 nt, Artificial Sequence
  Description of Artificial Sequence: Synthetic oligonucleotide
  Sense Strand Starting at position 163 of SEQ ID NO: 318338
ggccuaucacgaggaauga

SEQ ID NO: 331630 - RNA, 19 nt, Artificial Sequence
  Description of Artificial Sequence: Synthetic oligonucleotide
  Antisense Strand to SEQ ID NO: 331629
ucauuccucgugauaggcc

SEQ ID NO: 331631 - RNA, 19 nt, Artificial Sequence
  Description of Artificial Sequence: Synthetic oligonucleotide
  Sense Strand Starting at position 163 of SEQ ID NO: 318375
gcaggaugguucggaaaug

SEQ ID NO: 331632 - RNA, 19 nt, Artificial Sequence
  Description of Artificial Sequence: Synthetic oligonucleotide
  Antisense Strand to SEQ ID NO: 331631
cauuuccgaaccauccugc

SEQ ID NO: 331633 - RNA, 19 nt, Artificial Sequence
  Description of Artificial Sequence: Synthetic oligonucleotide
  Sense Strand Starting at position 163 of SEQ ID NO: 318376
caggaugguucggaaaugu

SEQ ID NO: 331634 - RNA, 19 nt, Artificial Sequence
  Description of Artificial Sequence: Synthetic oligonucleotide
  Antisense Strand to SEQ ID NO: 331633
acauuuccgaaccauccug

SEQ ID NO: 331635 - RNA, 19 nt, Artificial Sequence
  Description of Artificial Sequence: Synthetic oligonucleotide
  Sense Strand Starting at position 163 of SEQ ID NO: 318465
gcaguugaaagggaauagu

SEQ ID NO: 331636 - RNA, 19 nt, Artificial Sequence
  Description of Artificial Sequence: Synthetic oligonucleotide
  Antisense Strand to SEQ ID NO: 331635
acuauucccuuucaacugc

SEQ ID NO: 331637 - RNA, 19 nt, Artificial Sequence
  Description of Artificial Sequence: Synthetic oligonucleotide
  Sense Strand Starting at position 163 of SEQ ID NO: 318947
gcaucucugucuuccucau

SEQ ID NO: 331638 - RNA, 19 nt, Artificial Sequence
  Description of Artificial Sequence: Synthetic oligonucleotide
  Antisense Strand to SEQ ID NO: 331637
augaggaagacagagaugc

SEQ ID NO: 331639 - RNA, 19 nt, Artificial Sequence
  Description of Artificial Sequence: Synthetic oligonucleotide
  Sense Strand Starting at position 163 of SEQ ID NO: 318975
agggcuggccugugauauc

SEQ ID NO: 331640 - RNA, 19 nt, Artificial Sequence
  Description of Artificial Sequence: Synthetic oligonucleotide
  Antisense Strand to SEQ ID NO: 331639
gauaucacaggccagcccu

SEQ ID NO: 331641 - RNA, 19 nt, Artificial Sequence
  Description of Artificial Sequence: Synthetic oligonucleotide
  Sense Strand Starting at position 163 of SEQ ID NO: 318986
gugauauccucucuuaccu

SEQ ID NO: 331642 - RNA, 19 nt, Artificial Sequence
  Description of Artificial Sequence: Synthetic oligonucleotide
  Antisense Strand to SEQ ID NO: 331641
agguaagagaggauaucac

SEQ ID NO: 331643 - RNA, 19 nt, Artificial Sequence
  Description of Artificial Sequence: Synthetic oligonucleotide
  Sense Strand Starting at position 163 of SEQ ID NO: 318999
uuaccuguuugcuggacau

SEQ ID NO: 331644 - RNA, 19 nt, Artificial Sequence
  Description of Artificial Sequence: Synthetic oligonucleotide
  Antisense Strand to SEQ ID NO: 331643
auguccagcaaacagguaa

SEQ ID NO: 331645 - RNA, 19 nt, Artificial Sequence
  Description of Artificial Sequence: Synthetic oligonucleotide
  Sense Strand Starting at position 163 of SEQ ID NO: 319001
accuguuugcuggacauau

SEQ ID NO: 331646 - RNA, 19 nt, Artificial Sequence
  Description of Artificial Sequence: Synthetic oligonucleotide
  Antisense Strand to SEQ ID NO: 331645
auauguccagcaaacaggu

SEQ ID NO: 331647 - RNA, 19 nt, Artificial Sequence
  Description of Artificial Sequence: Synthetic oligonucleotide
  Sense Strand Starting at position 163 of SEQ ID NO: 319003
cuguuugcuggacauauaa

SEQ ID NO: 331648 - RNA, 19 nt, Artificial Sequence
  Description of Artificial Sequence: Synthetic oligonucleotide
  Antisense Strand to SEQ ID NO: 331647
uuauauguccagcaaacag

SEQ ID NO: 331649 - RNA, 19 nt, Artificial Sequence
  Description of Artificial Sequence: Synthetic oligonucleotide
  Sense Strand Starting at position 163 of SEQ ID NO: 319112
ucugcaguggccugagaaa

SEQ ID NO: 331650 - RNA, 19 nt, Artificial Sequence
  Description of Artificial Sequence: Synthetic oligonucleotide
  Antisense Strand to SEQ ID NO: 331649
uuucucaggccacugcaga

SEQ ID NO: 331651 - RNA, 19 nt, Artificial Sequence
  Description of Artificial Sequence: Synthetic oligonucleotide
  Sense Strand Starting at position 164 of SEQ ID NO: 315306
gggucugggcacugacaua

SEQ ID NO: 331652 - RNA, 19 nt, Artificial Sequence
  Description of Artificial Sequence: Synthetic oligonucleotide
  Antisense Strand to SEQ ID NO: 331651
uaugucagugcccagaccc

SEQ ID NO: 331653 - RNA, 19 nt, Artificial Sequence
  Description of Artificial Sequence: Synthetic oligonucleotide
  Sense Strand Starting at position 164 of SEQ ID NO: 315344
ggaaacugauacguccuaa

SEQ ID NO: 331654 - RNA, 19 nt, Artificial Sequence
  Description of Artificial Sequence: Synthetic oligonucleotide
  Antisense Strand to SEQ ID NO: 331653
uuaggacguaucaguuucc

SEQ ID NO: 331655 - RNA, 19 nt, Artificial Sequence
  Description of Artificial Sequence: Synthetic oligonucleotide
  Sense Strand Starting at position 164 of SEQ ID NO: 315512
agcuauuacucuguuggca

SEQ ID NO: 331656 - RNA, 19 nt, Artificial Sequence
  Description of Artificial Sequence: Synthetic oligonucleotide
  Antisense Strand to SEQ ID NO: 331655
ugccaacagaguaauagcu

SEQ ID NO: 331657 - RNA, 19 nt, Artificial Sequence
  Description of Artificial Sequence: Synthetic oligonucleotide
  Sense Strand Starting at position 164 of SEQ ID NO: 315752
ggagaugucccucaccucu

SEQ ID NO: 331658 - RNA, 19 nt, Artificial Sequence
  Description of Artificial Sequence: Synthetic oligonucleotide
  Antisense Strand to SEQ ID NO: 331657
agaggugagggacaucucc

SEQ ID NO: 331659 - RNA, 19 nt, Artificial Sequence
  Description of Artificial Sequence: Synthetic oligonucleotide
  Sense Strand Starting at position 164 of SEQ ID NO: 316986
ggccuagagucacagguuu

SEQ ID NO: 331660 - RNA, 19 nt, Artificial Sequence
  Description of Artificial Sequence: Synthetic oligonucleotide
  Antisense Strand to SEQ ID NO: 331659
aaaccugugacucuaggcc

SEQ ID NO: 331661 - RNA, 19 nt, Artificial Sequence
  Description of Artificial Sequence: Synthetic oligonucleotide
  Sense Strand Starting at position 164 of SEQ ID NO: 316999
agguuuaaugguggaguga

SEQ ID NO: 331662 - RNA, 19 nt, Artificial Sequence
  Description of Artificial Sequence: Synthetic oligonucleotide
  Antisense Strand to SEQ ID NO: 331661
ucacuccaccauuaaaccu

SEQ ID NO: 331663 - RNA, 19 nt, Artificial Sequence
  Description of Artificial Sequence: Synthetic oligonucleotide
  Sense Strand Starting at position 164 of SEQ ID NO: 317069
ggcucuagcuaucuuuaag

SEQ ID NO: 331664 - RNA, 19 nt, Artificial Sequence
  Description of Artificial Sequence: Synthetic oligonucleotide
  Antisense Strand to SEQ ID NO: 331663
cuuaaagauagcuagagcc

SEQ ID NO: 331665 - RNA, 19 nt, Artificial Sequence
  Description of Artificial Sequence: Synthetic oligonucleotide
  Sense Strand Starting at position 164 of SEQ ID NO: 317305
cuguuuagauucuuccaga

SEQ ID NO: 331666 - RNA, 19 nt, Artificial Sequence
  Description of Artificial Sequence: Synthetic oligonucleotide
  Antisense Strand to SEQ ID NO: 331665
ucuggaagaaucuaaacag

SEQ ID NO: 331667 - RNA, 19 nt, Artificial Sequence
  Description of Artificial Sequence: Synthetic oligonucleotide
  Sense Strand Starting at position 164 of SEQ ID NO: 317306
uguuuagauucuuccagag

SEQ ID NO: 331668 - RNA, 19 nt, Artificial Sequence
  Description of Artificial Sequence: Synthetic oligonucleotide
  Antisense Strand to SEQ ID NO: 331667
cucuggaagaaucuaaaca

SEQ ID NO: 331669 - RNA, 19 nt, Artificial Sequence
  Description of Artificial Sequence: Synthetic oligonucleotide
  Sense Strand Starting at position 164 of SEQ ID NO: 317453
caguguccucgcuugugaa

SEQ ID NO: 331670 - RNA, 19 nt, Artificial Sequence
  Description of Artificial Sequence: Synthetic oligonucleotide
  Antisense Strand to SEQ ID NO: 331669
uucacaagcgaggacacug

SEQ ID NO: 331671 - RNA, 19 nt, Artificial Sequence
  Description of Artificial Sequence: Synthetic oligonucleotide
  Sense Strand Starting at position 164 of SEQ ID NO: 317454
aguguccucgcuugugaau

SEQ ID NO: 331672 - RNA, 19 nt, Artificial Sequence
  Description of Artificial Sequence: Synthetic oligonucleotide
  Antisense Strand to SEQ ID NO: 331671
auucacaagcgaggacacu

SEQ ID NO: 331673 - RNA, 19 nt, Artificial Sequence
  Description of Artificial Sequence: Synthetic oligonucleotide
  Sense Strand Starting at position 164 of SEQ ID NO: 317518
gggagaaucucuugguaaa

SEQ ID NO: 331674 - RNA, 19 nt, Artificial Sequence
  Description of Artificial Sequence: Synthetic oligonucleotide
  Antisense Strand to SEQ ID NO: 331673
uuuaccaagagauucuccc

SEQ ID NO: 331675 - RNA, 19 nt, Artificial Sequence
  Description of Artificial Sequence: Synthetic oligonucleotide
  Sense Strand Starting at position 164 of SEQ ID NO: 317519
ggagaaucucuugguaaac

SEQ ID NO: 331676 - RNA, 19 nt, Artificial Sequence
  Description of Artificial Sequence: Synthetic oligonucleotide
  Antisense Strand to SEQ ID NO: 331675
guuuaccaagagauucucc

SEQ ID NO: 331677 - RNA, 19 nt, Artificial Sequence
  Description of Artificial Sequence: Synthetic oligonucleotide
  Sense Strand Starting at position 164 of SEQ ID NO: 317520
gagaaucucuugguaaacu

SEQ ID NO: 331678 - RNA, 19 nt, Artificial Sequence
  Description of Artificial Sequence: Synthetic oligonucleotide
  Antisense Strand to SEQ ID NO: 331677
aguuuaccaagagauucuc

SEQ ID NO: 331679 - RNA, 19 nt, Artificial Sequence
  Description of Artificial Sequence: Synthetic oligonucleotide
  Sense Strand Starting at position 164 of SEQ ID NO: 317559
agaccaucccuaggauucu

SEQ ID NO: 331680 - RNA, 19 nt, Artificial Sequence
  Description of Artificial Sequence: Synthetic oligonucleotide
  Antisense Strand to SEQ ID NO: 331679
agaauccuagggauggucu

SEQ ID NO: 331681 - RNA, 19 nt, Artificial Sequence
  Description of Artificial Sequence: Synthetic oligonucleotide
  Sense Strand Starting at position 164 of SEQ ID NO: 317565
ucccuaggauucuacugaa

SEQ ID NO: 331682 - RNA, 19 nt, Artificial Sequence
  Description of Artificial Sequence: Synthetic oligonucleotide
  Antisense Strand to SEQ ID NO: 331681
uucaguagaauccuaggga

SEQ ID NO: 331683 - RNA, 19 nt, Artificial Sequence
  Description of Artificial Sequence: Synthetic oligonucleotide
  Sense Strand Starting at position 164 of SEQ ID NO: 317568
cuaggauucuacugaaguu

SEQ ID NO: 331684 - RNA, 19 nt, Artificial Sequence
  Description of Artificial Sequence: Synthetic oligonucleotide
  Antisense Strand to SEQ ID NO: 331683
aacuucaguagaauccuag

SEQ ID NO: 331685 - RNA, 19 nt, Artificial Sequence
  Description of Artificial Sequence: Synthetic oligonucleotide
  Sense Strand Starting at position 164 of SEQ ID NO: 317669
agcaauaacugcccacaga

SEQ ID NO: 331686 - RNA, 19 nt, Artificial Sequence
  Description of Artificial Sequence: Synthetic oligonucleotide
  Antisense Strand to SEQ ID NO: 331685
ucugugggcaguuauugcu

SEQ ID NO: 331687 - RNA, 19 nt, Artificial Sequence
  Description of Artificial Sequence: Synthetic oligonucleotide
  Sense Strand Starting at position 164 of SEQ ID NO: 317689
cuggccuaucacgaggaau

SEQ ID NO: 331688 - RNA, 19 nt, Artificial Sequence
  Description of Artificial Sequence: Synthetic oligonucleotide
  Antisense Strand to SEQ ID NO: 331687
auuccucgugauaggccag

SEQ ID NO: 331689 - RNA, 19 nt, Artificial Sequence
  Description of Artificial Sequence: Synthetic oligonucleotide
  Sense Strand Starting at position 164 of SEQ ID NO: 317691
ggccuaucacgaggaauga

SEQ ID NO: 331690 - RNA, 19 nt, Artificial Sequence
  Description of Artificial Sequence: Synthetic oligonucleotide
  Antisense Strand to SEQ ID NO: 331689
ucauuccucgugauaggcc

SEQ ID NO: 331691 - RNA, 19 nt, Artificial Sequence
  Description of Artificial Sequence: Synthetic oligonucleotide
  Sense Strand Starting at position 164 of SEQ ID NO: 317729
caggaugguucggaaaugu

SEQ ID NO: 331692 - RNA, 19 nt, Artificial Sequence
  Description of Artificial Sequence: Synthetic oligonucleotide
  Antisense Strand to SEQ ID NO: 331691
acauuuccgaaccauccug

SEQ ID NO: 331693 - RNA, 19 nt, Artificial Sequence
  Description of Artificial Sequence: Synthetic oligonucleotide
  Sense Strand Starting at position 164 of SEQ ID NO: 317818
gcaguugaaagggaauagu

SEQ ID NO: 331694 - RNA, 19 nt, Artificial Sequence
  Description of Artificial Sequence: Synthetic oligonucleotide
  Antisense Strand to SEQ ID NO: 331693
acuauucccuuucaacugc

SEQ ID NO: 331695 - RNA, 19 nt, Artificial Sequence
  Description of Artificial Sequence: Synthetic oligonucleotide
  Sense Strand Starting at position 164 of SEQ ID NO: 318300
gcaucucugucuuccucau

SEQ ID NO: 331696 - RNA, 19 nt, Artificial Sequence
  Description of Artificial Sequence: Synthetic oligonucleotide
  Antisense Strand to SEQ ID NO: 331695
augaggaagacagagaugc

SEQ ID NO: 331697 - RNA, 19 nt, Artificial Sequence
  Description of Artificial Sequence: Synthetic oligonucleotide
  Sense Strand Starting at position 164 of SEQ ID NO: 318328
agggcuggccugugauauc

SEQ ID NO: 331698 - RNA, 19 nt, Artificial Sequence
  Description of Artificial Sequence: Synthetic oligonucleotide
  Antisense Strand to SEQ ID NO: 331697
gauaucacaggccagcccu

SEQ ID NO: 331699 - RNA, 19 nt, Artificial Sequence
  Description of Artificial Sequence: Synthetic oligonucleotide
  Sense Strand Starting at position 164 of SEQ ID NO: 318339
gugauauccucucuuaccu

SEQ ID NO: 331700 - RNA, 19 nt, Artificial Sequence
  Description of Artificial Sequence: Synthetic oligonucleotide
  Antisense Strand to SEQ ID NO: 331699
agguaagagaggauaucac

SEQ ID NO: 331701 - RNA, 19 nt, Artificial Sequence
  Description of Artificial Sequence: Synthetic oligonucleotide
  Sense Strand Starting at position 164 of SEQ ID NO: 318354
accuguuugcuggacauau

SEQ ID NO: 331702 - RNA, 19 nt, Artificial Sequence
  Description of Artificial Sequence: Synthetic oligonucleotide
  Antisense Strand to SEQ ID NO: 331701
auauguccagcaaacaggu

SEQ ID NO: 331703 - RNA, 19 nt, Artificial Sequence
  Description of Artificial Sequence: Synthetic oligonucleotide
  Sense Strand Starting at position 164 of SEQ ID NO: 318356
cuguuugcuggacauauaa

SEQ ID NO: 331704 - RNA, 19 nt, Artificial Sequence
  Description of Artificial Sequence: Synthetic oligonucleotide
  Antisense Strand to SEQ ID NO: 331703
uuauauguccagcaaacag

SEQ ID NO: 331705 - RNA, 19 nt, Artificial Sequence
  Description of Artificial Sequence: Synthetic oligonucleotide
  Sense Strand Starting at position 164 of SEQ ID NO: 318465
ucugcaguggccugagaaa

SEQ ID NO: 331706 - RNA, 19 nt, Artificial Sequence
  Description of Artificial Sequence: Synthetic oligonucleotide
  Antisense Strand to SEQ ID NO: 331705
uuucucaggccacugcaga

SEQ ID NO: 331707 - RNA, 19 nt, Artificial Sequence
  Description of Artificial Sequence: Synthetic oligonucleotide
  Sense Strand Starting at position 164 of SEQ ID NO: 318608
aguucuagccuccacagau

SEQ ID NO: 331708 - RNA, 19 nt, Artificial Sequence
  Description of Artificial Sequence: Synthetic oligonucleotide
  Antisense Strand to SEQ ID NO: 331707
aucuguggaggcuagaacu

SEQ ID NO: 331709 - RNA, 19 nt, Artificial Sequence
  Description of Artificial Sequence: Synthetic oligonucleotide
  Sense Strand Starting at position 164 of SEQ ID NO: 318618
uccacagaugugcaucuaa

SEQ ID NO: 331710 - RNA, 19 nt, Artificial Sequence
  Description of Artificial Sequence: Synthetic oligonucleotide
  Antisense Strand to SEQ ID NO: 331709
uuagaugcacaucugugga

SEQ ID NO: 331711 - RNA, 19 nt, Artificial Sequence
  Description of Artificial Sequence: Synthetic oligonucleotide
  Sense Strand Starting at position 164 of SEQ ID NO: 318724
agaguaaacaagugguaag

SEQ ID NO: 331712 - RNA, 19 nt, Artificial Sequence
  Description of Artificial Sequence: Synthetic oligonucleotide
  Antisense Strand to SEQ ID NO: 331711
cuuaccacuuguuuacucu

SEQ ID NO: 331713 - RNA, 19 nt, Artificial Sequence
  Description of Artificial Sequence: Synthetic oligonucleotide
  Sense Strand Starting at position 164 of SEQ ID NO: 318725
gaguaaacaagugguaagu

SEQ ID NO: 331714 - RNA, 19 nt, Artificial Sequence
  Description of Artificial Sequence: Synthetic oligonucleotide
  Antisense Strand to SEQ ID NO: 331713
acuuaccacuuguuuacuc

SEQ ID NO: 331715 - RNA, 19 nt, Artificial Sequence
  Description of Artificial Sequence: Synthetic oligonucleotide
  Sense Strand Starting at position 164 of SEQ ID NO: 318734
agugguaaguguuuacgaa

SEQ ID NO: 331716 - RNA, 19 nt, Artificial Sequence
  Description of Artificial Sequence: Synthetic oligonucleotide
  Antisense Strand to SEQ ID NO: 331715
uucguaaacacuuaccacu

SEQ ID NO: 331717 - RNA, 19 nt, Artificial Sequence
  Description of Artificial Sequence: Synthetic oligonucleotide
  Sense Strand Starting at position 164 of SEQ ID NO: 318735
gugguaaguguuuacgaau

SEQ ID NO: 331718 - RNA, 19 nt, Artificial Sequence
  Description of Artificial Sequence: Synthetic oligonucleotide
  Antisense Strand to SEQ ID NO: 331717
auucguaaacacuuaccac

SEQ ID NO: 331719 - RNA, 19 nt, Artificial Sequence
  Description of Artificial Sequence: Synthetic oligonucleotide
  Sense Strand Starting at position 164 of SEQ ID NO: 318810
acguuaagaucuugggaga

SEQ ID NO: 331720 - RNA, 19 nt, Artificial Sequence
  Description of Artificial Sequence: Synthetic oligonucleotide
  Antisense Strand to SEQ ID NO: 331719
ucucccaagaucuuaacgu

SEQ ID NO: 331721 - RNA, 19 nt, Artificial Sequence
  Description of Artificial Sequence: Synthetic oligonucleotide
  Sense Strand Starting at position 164 of SEQ ID NO: 318811
cguuaagaucuugggagaa

SEQ ID NO: 331722 - RNA, 19 nt, Artificial Sequence
  Description of Artificial Sequence: Synthetic oligonucleotide
  Antisense Strand to SEQ ID NO: 331721
uucucccaagaucuuaacg

SEQ ID NO: 331723 - RNA, 19 nt, Artificial Sequence
  Description of Artificial Sequence: Synthetic oligonucleotide
  Sense Strand Starting at position 164 of SEQ ID NO: 318836
gagccuucccaaggaauag

SEQ ID NO: 331724 - RNA, 19 nt, Artificial Sequence
  Description of Artificial Sequence: Synthetic oligonucleotide
  Antisense Strand to SEQ ID NO: 331723
cuauuccuugggaaggcuc

SEQ ID NO: 331725 - RNA, 19 nt, Artificial Sequence
  Description of Artificial Sequence: Synthetic oligonucleotide
  Sense Strand Starting at position 164 of SEQ ID NO: 318912
gccugugcuggaagacgua

SEQ ID NO: 331726 - RNA, 19 nt, Artificial Sequence
  Description of Artificial Sequence: Synthetic oligonucleotide
  Antisense Strand to SEQ ID NO: 331725
uacgucuuccagcacaggc

SEQ ID NO: 331727 - RNA, 19 nt, Artificial Sequence
  Description of Artificial Sequence: Synthetic oligonucleotide
  Sense Strand Starting at position 164 of SEQ ID NO: 318972
guaggugccaguucugcau

SEQ ID NO: 331728 - RNA, 19 nt, Artificial Sequence
  Description of Artificial Sequence: Synthetic oligonucleotide
  Antisense Strand to SEQ ID NO: 331727
augcagaacuggcaccuac

SEQ ID NO: 331729 - RNA, 19 nt, Artificial Sequence
  Description of Artificial Sequence: Synthetic oligonucleotide
  Sense Strand Starting at position 164 of SEQ ID NO: 318976
gugccaguucugcauggga

SEQ ID NO: 331730 - RNA, 19 nt, Artificial Sequence
  Description of Artificial Sequence: Synthetic oligonucleotide
  Antisense Strand to SEQ ID NO: 331729
ucccaugcagaacuggcac

SEQ ID NO: 331731 - RNA, 19 nt, Artificial Sequence
  Description of Artificial Sequence: Synthetic oligonucleotide
  Sense Strand Starting at position 165 of SEQ ID NO: 315469
uccuguugaucugcuaacu

SEQ ID NO: 331732 - RNA, 19 nt, Artificial Sequence
  Description of Artificial Sequence: Synthetic oligonucleotide
  Antisense Strand to SEQ ID NO: 331731
aguuagcagaucaacagga

SEQ ID NO: 331733 - RNA, 19 nt, Artificial Sequence
  Description of Artificial Sequence: Synthetic oligonucleotide
  Sense Strand Starting at position 165 of SEQ ID NO: 315474
uugaucugcuaacuugaaa

SEQ ID NO: 331734 - RNA, 19 nt, Artificial Sequence
  Description of Artificial Sequence: Synthetic oligonucleotide
  Antisense Strand to SEQ ID NO: 331733
uuucaaguuagcagaucaa

SEQ ID NO: 331735 - RNA, 19 nt, Artificial Sequence
  Description of Artificial Sequence: Synthetic oligonucleotide
  Sense Strand Starting at position 165 of SEQ ID NO: 315607
ugcugccuauuugaauuaa

SEQ ID NO: 331736 - RNA, 19 nt, Artificial Sequence
  Description of Artificial Sequence: Synthetic oligonucleotide
  Antisense Strand to SEQ ID NO: 331735
uuaauucaaauaggcagca

SEQ ID NO: 331737 - RNA, 19 nt, Artificial Sequence
  Description of Artificial Sequence: Synthetic oligonucleotide
  Sense Strand Starting at position 165 of SEQ ID NO: 315627
auugaugcagcuugugaua

SEQ ID NO: 331738 - RNA, 19 nt, Artificial Sequence
  Description of Artificial Sequence: Synthetic oligonucleotide
  Antisense Strand to SEQ ID NO: 331737
uaucacaagcugcaucaau

SEQ ID NO: 331739 - RNA, 19 nt, Artificial Sequence
  Description of Artificial Sequence: Synthetic oligonucleotide
  Sense Strand Starting at position 165 of SEQ ID NO: 315682
ccagaauuacauggaugca

SEQ ID NO: 331740 - RNA, 19 nt, Artificial Sequence
  Description of Artificial Sequence: Synthetic oligonucleotide
  Antisense Strand to SEQ ID NO: 331739
ugcauccauguaauucugg

SEQ ID NO: 331741 - RNA, 19 nt, Artificial Sequence
  Description of Artificial Sequence: Synthetic oligonucleotide
  Sense Strand Starting at position 165 of SEQ ID NO: 315724
cuacucucauagguuauua

SEQ ID NO: 331742 - RNA, 19 nt, Artificial Sequence
  Description of Artificial Sequence: Synthetic oligonucleotide
  Antisense Strand to SEQ ID NO: 331741
uaauaaccuaugagaguag

SEQ ID NO: 331743 - RNA, 19 nt, Artificial Sequence
  Description of Artificial Sequence: Synthetic oligonucleotide
  Sense Strand Starting at position 165 of SEQ ID NO: 315733
uagguuauuacccggcagu

SEQ ID NO: 331744 - RNA, 19 nt, Artificial Sequence
  Description of Artificial Sequence: Synthetic oligonucleotide
  Antisense Strand to SEQ ID NO: 331743
acugccggguaauaaccua

SEQ ID NO: 331745 - RNA, 19 nt, Artificial Sequence
  Description of Artificial Sequence: Synthetic oligonucleotide
  Sense Strand Starting at position 165 of SEQ ID NO: 315785
ccuuaucugcaaugaugua

SEQ ID NO: 331746 - RNA, 19 nt, Artificial Sequence
  Description of Artificial Sequence: Synthetic oligonucleotide
  Antisense Strand to SEQ ID NO: 331745
uacaucauugcagauaagg

SEQ ID NO: 331747 - RNA, 19 nt, Artificial Sequence
  Description of Artificial Sequence: Synthetic oligonucleotide
  Sense Strand Starting at position 165 of SEQ ID NO: 315880
agcgucuuucucugauaca

SEQ ID NO: 331748 - RNA, 19 nt, Artificial Sequence
  Description of Artificial Sequence: Synthetic oligonucleotide
  Antisense Strand to SEQ ID NO: 331747
uguaucagagaaagacgcu

SEQ ID NO: 331749 - RNA, 19 nt, Artificial Sequence
  Description of Artificial Sequence: Synthetic oligonucleotide
  Sense Strand Starting at position 165 of SEQ ID NO: 315960
cuuggaugaaguuagcauu

SEQ ID NO: 331750 - RNA, 19 nt, Artificial Sequence
  Description of Artificial Sequence: Synthetic oligonucleotide
  Antisense Strand to SEQ ID NO: 331749
aaugcuaacuucauccaag

SEQ ID NO: 331751 - RNA, 19 nt, Artificial Sequence
  Description of Artificial Sequence: Synthetic oligonucleotide
  Sense Strand Starting at position 165 of SEQ ID NO: 315997
cugcucuggcacugaaaca

SEQ ID NO: 331752 - RNA, 19 nt, Artificial Sequence
  Description of Artificial Sequence: Synthetic oligonucleotide
  Antisense Strand to SEQ ID NO: 331751
uguuucagugccagagcag

SEQ ID NO: 331753 - RNA, 19 nt, Artificial Sequence
  Description of Artificial Sequence: Synthetic oligonucleotide
  Sense Strand Starting at position 165 of SEQ ID NO: 316075
ggacagugcgagugaguau

SEQ ID NO: 331754 - RNA, 19 nt, Artificial Sequence
  Description of Artificial Sequence: Synthetic oligonucleotide
  Antisense Strand to SEQ ID NO: 331753
auacucacucgcacugucc

SEQ ID NO: 331755 - RNA, 19 nt, Artificial Sequence
  Description of Artificial Sequence: Synthetic oligonucleotide
  Sense Strand Starting at position 165 of SEQ ID NO: 316100
uuucuuugugguuagaauc

SEQ ID NO: 331756 - RNA, 19 nt, Artificial Sequence
  Description of Artificial Sequence: Synthetic oligonucleotide
  Antisense Strand to SEQ ID NO: 331755
gauucuaaccacaaagaaa

SEQ ID NO: 331757 - RNA, 19 nt, Artificial Sequence
  Description of Artificial Sequence: Synthetic oligonucleotide
  Sense Strand Starting at position 165 of SEQ ID NO: 316106
ugugguuagaaucaagugu

SEQ ID NO: 331758 - RNA, 19 nt, Artificial Sequence
  Description of Artificial Sequence: Synthetic oligonucleotide
  Antisense Strand to SEQ ID NO: 331757
acacuugauucuaaccaca

SEQ ID NO: 331759 - RNA, 19 nt, Artificial Sequence
  Description of Artificial Sequence: Synthetic oligonucleotide
  Sense Strand Starting at position 165 of SEQ ID NO: 316148
ggaagaagucacugcauag

SEQ ID NO: 331760 - RNA, 19 nt, Artificial Sequence
  Description of Artificial Sequence: Synthetic oligonucleotide
  Antisense Strand to SEQ ID NO: 331759
cuaugcagugacuucuucc

SEQ ID NO: 331761 - RNA, 19 nt, Artificial Sequence
  Description of Artificial Sequence: Synthetic oligonucleotide
  Sense Strand Starting at position 165 of SEQ ID NO: 316152
gaagucacugcauaguaca

SEQ ID NO: 331762 - RNA, 19 nt, Artificial Sequence
  Description of Artificial Sequence: Synthetic oligonucleotide
  Antisense Strand to SEQ ID NO: 331761
uguacuaugcagugacuuc

SEQ ID NO: 331763 - RNA, 19 nt, Artificial Sequence
  Description of Artificial Sequence: Synthetic oligonucleotide
  Sense Strand Starting at position 165 of SEQ ID NO: 316163
auaguacaaugccaagaaa

SEQ ID NO: 331764 - RNA, 19 nt, Artificial Sequence
  Description of Artificial Sequence: Synthetic oligonucleotide
  Antisense Strand to SEQ ID NO: 331763
uuucuuggcauuguacuau

SEQ ID NO: 331765 - RNA, 19 nt, Artificial Sequence
  Description of Artificial Sequence: Synthetic oligonucleotide
  Sense Strand Starting at position 165 of SEQ ID NO: 316189
aucagagaguccuccgaua

SEQ ID NO: 331766 - RNA, 19 nt, Artificial Sequence
  Description of Artificial Sequence: Synthetic oligonucleotide
  Antisense Strand to SEQ ID NO: 331765
uaucggaggacucucugau

SEQ ID NO: 331767 - RNA, 19 nt, Artificial Sequence
  Description of Artificial Sequence: Synthetic oligonucleotide
  Sense Strand Starting at position 165 of SEQ ID NO: 316191
cagagaguccuccgauaac

SEQ ID NO: 331768 - RNA, 19 nt, Artificial Sequence
  Description of Artificial Sequence: Synthetic oligonucleotide
  Antisense Strand to SEQ ID NO: 331767
guuaucggaggacucucug

SEQ ID NO: 331769 - RNA, 19 nt, Artificial Sequence
  Description of Artificial Sequence: Synthetic oligonucleotide
  Sense Strand Starting at position 165 of SEQ ID NO: 316194
agaguccuccgauaacuga

SEQ ID NO: 331770 - RNA, 19 nt, Artificial Sequence
  Description of Artificial Sequence: Synthetic oligonucleotide
  Antisense Strand to SEQ ID NO: 331769
ucaguuaucggaggacucu

SEQ ID NO: 331771 - RNA, 19 nt, Artificial Sequence
  Description of Artificial Sequence: Synthetic oligonucleotide
  Sense Strand Starting at position 165 of SEQ ID NO: 316223
ggcucacguuuguuuggaa

SEQ ID NO: 331772 - RNA, 19 nt, Artificial Sequence
  Description of Artificial Sequence: Synthetic oligonucleotide
  Antisense Strand to SEQ ID NO: 331771
uuccaaacaaacgugagcc

SEQ ID NO: 331773 - RNA, 19 nt, Artificial Sequence
  Description of Artificial Sequence: Synthetic oligonucleotide
  Sense Strand Starting at position 165 of SEQ ID NO: 316224
gcucacguuuguuuggaaa

SEQ ID NO: 331774 - RNA, 19 nt, Artificial Sequence
  Description of Artificial Sequence: Synthetic oligonucleotide
  Antisense Strand to SEQ ID NO: 331773
uuuccaaacaaacgugagc

SEQ ID NO: 331775 - RNA, 19 nt, Artificial Sequence
  Description of Artificial Sequence: Synthetic oligonucleotide
  Sense Strand Starting at position 165 of SEQ ID NO: 316415
auauguaacacccguguca

SEQ ID NO: 331776 - RNA, 19 nt, Artificial Sequence
  Description of Artificial Sequence: Synthetic oligonucleotide
  Antisense Strand to SEQ ID NO: 331775
ugacacggguguuacauau

SEQ ID NO: 331777 - RNA, 19 nt, Artificial Sequence
  Description of Artificial Sequence: Synthetic oligonucleotide
  Sense Strand Starting at position 165 of SEQ ID NO: 316417
auguaacacccgugucaca

SEQ ID NO: 331778 - RNA, 19 nt, Artificial Sequence
  Description of Artificial Sequence: Synthetic oligonucleotide
  Antisense Strand to SEQ ID NO: 331777
ugugacacggguguuacau

SEQ ID NO: 331779 - RNA, 19 nt, Artificial Sequence
  Description of Artificial Sequence: Synthetic oligonucleotide
  Sense Strand Starting at position 165 of SEQ ID NO: 316483
ggagcagugcgauguaaca

SEQ ID NO: 331780 - RNA, 19 nt, Artificial Sequence
  Description of Artificial Sequence: Synthetic oligonucleotide
  Antisense Strand to SEQ ID NO: 331779
uguuacaucgcacugcucc

SEQ ID NO: 331781 - RNA, 19 nt, Artificial Sequence
  Description of Artificial Sequence: Synthetic oligonucleotide
  Sense Strand Starting at position 165 of SEQ ID NO: 316599
cggaguuaagaaugcgcaa

SEQ ID NO: 331782 - RNA, 19 nt, Artificial Sequence
  Description of Artificial Sequence: Synthetic oligonucleotide
  Antisense Strand to SEQ ID NO: 331781
uugcgcauucuuaacuccg

SEQ ID NO: 331783 - RNA, 19 nt, Artificial Sequence
  Description of Artificial Sequence: Synthetic oligonucleotide
  Sense Strand Starting at position 165 of SEQ ID NO: 316602
aguuaagaaugcgcaaagu

SEQ ID NO: 331784 - RNA, 19 nt, Artificial Sequence
  Description of Artificial Sequence: Synthetic oligonucleotide
  Antisense Strand to SEQ ID NO: 331783
acuuugcgcauucuuaacu

SEQ ID NO: 331785 - RNA, 19 nt, Artificial Sequence
  Description of Artificial Sequence: Synthetic oligonucleotide
  Sense Strand Starting at position 165 of SEQ ID NO: 316703
gcaaauagcagucagaaga

SEQ ID NO: 331786 - RNA, 19 nt, Artificial Sequence
  Description of Artificial Sequence: Synthetic oligonucleotide
  Antisense Strand to SEQ ID NO: 331785
ucuucugacugcuauuugc

SEQ ID NO: 331787 - RNA, 19 nt, Artificial Sequence
  Description of Artificial Sequence: Synthetic oligonucleotide
  Sense Strand Starting at position 165 of SEQ ID NO: 316797
ggaaguuggauucgguaac

SEQ ID NO: 331788 - RNA, 19 nt, Artificial Sequence
  Description of Artificial Sequence: Synthetic oligonucleotide
  Antisense Strand to SEQ ID NO: 331787
guuaccgaauccaacuucc

SEQ ID NO: 331789 - RNA, 19 nt, Artificial Sequence
  Description of Artificial Sequence: Synthetic oligonucleotide
  Sense Strand Starting at position 165 of SEQ ID NO: 317564
cggaaacuccaguguccuu

SEQ ID NO: 331790 - RNA, 19 nt, Artificial Sequence
  Description of Artificial Sequence: Synthetic oligonucleotide
  Antisense Strand to SEQ ID NO: 331789
aaggacacuggaguuuccg

SEQ ID NO: 331791 - RNA, 19 nt, Artificial Sequence
  Description of Artificial Sequence: Synthetic oligonucleotide
  Sense Strand Starting at position 165 of SEQ ID NO: 317626
cgcugaguucuuuacaacu

SEQ ID NO: 331792 - RNA, 19 nt, Artificial Sequence
  Description of Artificial Sequence: Synthetic oligonucleotide
  Antisense Strand to SEQ ID NO: 331791
aguuguaaagaacucagcg

SEQ ID NO: 331793 - RNA, 19 nt, Artificial Sequence
  Description of Artificial Sequence: Synthetic oligonucleotide
  Sense Strand Starting at position 165 of SEQ ID NO: 317904
gcagaaaucucagaaagga

SEQ ID NO: 331794 - RNA, 19 nt, Artificial Sequence
  Description of Artificial Sequence: Synthetic oligonucleotide
  Antisense Strand to SEQ ID NO: 331793
uccuuucugagauuucugc

SEQ ID NO: 331795 - RNA, 19 nt, Artificial Sequence
  Description of Artificial Sequence: Synthetic oligonucleotide
  Sense Strand Starting at position 165 of SEQ ID NO: 318290
cacccuggauuucgggaua

SEQ ID NO: 331796 - RNA, 19 nt, Artificial Sequence
  Description of Artificial Sequence: Synthetic oligonucleotide
  Antisense Strand to SEQ ID NO: 331795
uaucccgaaauccagggug

SEQ ID NO: 331797 - RNA, 19 nt, Artificial Sequence
  Description of Artificial Sequence: Synthetic oligonucleotide
  Sense Strand Starting at position 165 of SEQ ID NO: 318309
aaagauuucuccgagccug

SEQ ID NO: 331798 - RNA, 19 nt, Artificial Sequence
  Description of Artificial Sequence: Synthetic oligonucleotide
  Antisense Strand to SEQ ID NO: 331797
caggcucggagaaaucuuu

SEQ ID NO: 331799 - RNA, 19 nt, Artificial Sequence
  Description of Artificial Sequence: Synthetic oligonucleotide
  Sense Strand Starting at position 165 of SEQ ID NO: 318598
cggagugaggcugagucau

SEQ ID NO: 331800 - RNA, 19 nt, Artificial Sequence
  Description of Artificial Sequence: Synthetic oligonucleotide
  Antisense Strand to SEQ ID NO: 331799
augacucagccucacuccg

SEQ ID NO: 331801 - RNA, 19 nt, Artificial Sequence
  Description of Artificial Sequence: Synthetic oligonucleotide
  Sense Strand Starting at position 165 of SEQ ID NO: 318778
ucagguugcagggaaguaa

SEQ ID NO: 331802 - RNA, 19 nt, Artificial Sequence
  Description of Artificial Sequence: Synthetic oligonucleotide
  Antisense Strand to SEQ ID NO: 331801
uuacuucccugcaaccuga

SEQ ID NO: 331803 - RNA, 19 nt, Artificial Sequence
  Description of Artificial Sequence: Synthetic oligonucleotide
  Sense Strand Starting at position 165 of SEQ ID NO: 318883
ugcagauguugggcuugau

SEQ ID NO: 331804 - RNA, 19 nt, Artificial Sequence
  Description of Artificial Sequence: Synthetic oligonucleotide
  Antisense Strand to SEQ ID NO: 331803
aucaagcccaacaucugca

SEQ ID NO: 331805 - RNA, 19 nt, Artificial Sequence
  Description of Artificial Sequence: Synthetic oligonucleotide
  Sense Strand Starting at position 165 of SEQ ID NO: 319084
agccucuacggaugacuaa

SEQ ID NO: 331806 - RNA, 19 nt, Artificial Sequence
  Description of Artificial Sequence: Synthetic oligonucleotide
  Antisense Strand to SEQ ID NO: 331805
uuagucauccguagaggcu

SEQ ID NO: 331807 - RNA, 19 nt, Artificial Sequence
  Description of Artificial Sequence: Synthetic oligonucleotide
  Sense Strand Starting at position 165 of SEQ ID NO: 319093
ggaugacuaaccgguuaua

SEQ ID NO: 331808 - RNA, 19 nt, Artificial Sequence
  Description of Artificial Sequence: Synthetic oligonucleotide
  Antisense Strand to SEQ ID NO: 331807
uauaaccgguuagucaucc

SEQ ID NO: 331809 - RNA, 19 nt, Artificial Sequence
  Description of Artificial Sequence: Synthetic oligonucleotide
  Sense Strand Starting at position 165 of SEQ ID NO: 319096
ugacuaaccgguuauaaug

SEQ ID NO: 331810 - RNA, 19 nt, Artificial Sequence
  Description of Artificial Sequence: Synthetic oligonucleotide
  Antisense Strand to SEQ ID NO: 331809
cauuauaaccgguuaguca

SEQ ID NO: 331811 - RNA, 19 nt, Artificial Sequence
  Description of Artificial Sequence: Synthetic oligonucleotide
  Sense Strand Starting at position 166 of SEQ ID NO: 315528
cccagugauuugcauaaua

SEQ ID NO: 331812 - RNA, 19 nt, Artificial Sequence
  Description of Artificial Sequence: Synthetic oligonucleotide
  Antisense Strand to SEQ ID NO: 331811
uauuaugcaaaucacuggg

SEQ ID NO: 331813 - RNA, 19 nt, Artificial Sequence
  Description of Artificial Sequence: Synthetic oligonucleotide
  Sense Strand Starting at position 166 of SEQ ID NO: 315676
auaucuuagcaguaaagua

SEQ ID NO: 331814 - RNA, 19 nt, Artificial Sequence
  Description of Artificial Sequence: Synthetic oligonucleotide
  Antisense Strand to SEQ ID NO: 331813
uacuuuacugcuaagauau

SEQ ID NO: 331815 - RNA, 19 nt, Artificial Sequence
  Description of Artificial Sequence: Synthetic oligonucleotide
  Sense Strand Starting at position 166 of SEQ ID NO: 315692
guaacugcuagggagcaua

SEQ ID NO: 331816 - RNA, 19 nt, Artificial Sequence
  Description of Artificial Sequence: Synthetic oligonucleotide
  Antisense Strand to SEQ ID NO: 331815
uaugcucccuagcaguuac

SEQ ID NO: 331817 - RNA, 19 nt, Artificial Sequence
  Description of Artificial Sequence: Synthetic oligonucleotide
  Sense Strand Starting at position 166 of SEQ ID NO: 315761
agucaauguguugauaaag

SEQ ID NO: 331818 - RNA, 19 nt, Artificial Sequence
  Description of Artificial Sequence: Synthetic oligonucleotide
  Antisense Strand to SEQ ID NO: 331817
cuuuaucaacacauugacu

SEQ ID NO: 331819 - RNA, 19 nt, Artificial Sequence
  Description of Artificial Sequence: Synthetic oligonucleotide
  Sense Strand Starting at position 166 of SEQ ID NO: 315935
cucucuuccuagguaaaug

SEQ ID NO: 331820 - RNA, 19 nt, Artificial Sequence
  Description of Artificial Sequence: Synthetic oligonucleotide
  Antisense Strand to SEQ ID NO: 331819
cauuuaccuaggaagagag

SEQ ID NO: 331821 - RNA, 19 nt, Artificial Sequence
  Description of Artificial Sequence: Synthetic oligonucleotide
  Sense Strand Starting at position 166 of SEQ ID NO: 315945
agguaaaugacacgucuca

SEQ ID NO: 331822 - RNA, 19 nt, Artificial Sequence
  Description of Artificial Sequence: Synthetic oligonucleotide
  Antisense Strand to SEQ ID NO: 331821
ugagacgugucauuuaccu

SEQ ID NO: 331823 - RNA, 19 nt, Artificial Sequence
  Description of Artificial Sequence: Synthetic oligonucleotide
  Sense Strand Starting at position 166 of SEQ ID NO: 317334
aggucuggccaaugagaga

SEQ ID NO: 331824 - RNA, 19 nt, Artificial Sequence
  Description of Artificial Sequence: Synthetic oligonucleotide
  Antisense Strand to SEQ ID NO: 331823
ucucucauuggccagaccu

SEQ ID NO: 331825 - RNA, 19 nt, Artificial Sequence
  Description of Artificial Sequence: Synthetic oligonucleotide
  Sense Strand Starting at position 166 of SEQ ID NO: 317446
ggcggaucuuaccucuuua

SEQ ID NO: 331826 - RNA, 19 nt, Artificial Sequence
  Description of Artificial Sequence: Synthetic oligonucleotide
  Antisense Strand to SEQ ID NO: 331825
uaaagagguaagauccgcc

SEQ ID NO: 331827 - RNA, 19 nt, Artificial Sequence
  Description of Artificial Sequence: Synthetic oligonucleotide
  Sense Strand Starting at position 166 of SEQ ID NO: 317624
gagguucuucugcgcauuu

SEQ ID NO: 331828 - RNA, 19 nt, Artificial Sequence
  Description of Artificial Sequence: Synthetic oligonucleotide
  Antisense Strand to SEQ ID NO: 331827
aaaugcgcagaagaaccuc

SEQ ID NO: 331829 - RNA, 19 nt, Artificial Sequence
  Description of Artificial Sequence: Synthetic oligonucleotide
  Sense Strand Starting at position 166 of SEQ ID NO: 317690
aguagcaaucucugacgau

SEQ ID NO: 331830 - RNA, 19 nt, Artificial Sequence
  Description of Artificial Sequence: Synthetic oligonucleotide
  Antisense Strand to SEQ ID NO: 331829
aucgucagagauugcuacu

SEQ ID NO: 331831 - RNA, 19 nt, Artificial Sequence
  Description of Artificial Sequence: Synthetic oligonucleotide
  Sense Strand Starting at position 166 of SEQ ID NO: 317694
gcaaucucugacgauucca

SEQ ID NO: 331832 - RNA, 19 nt, Artificial Sequence
  Description of Artificial Sequence: Synthetic oligonucleotide
  Antisense Strand to SEQ ID NO: 331831
uggaaucgucagagauugc

SEQ ID NO: 331833 - RNA, 19 nt, Artificial Sequence
  Description of Artificial Sequence: Synthetic oligonucleotide
  Sense Strand Starting at position 166 of SEQ ID NO: 317702
ugacgauuccagcagcaaa

SEQ ID NO: 331834 - RNA, 19 nt, Artificial Sequence
  Description of Artificial Sequence: Synthetic oligonucleotide
  Antisense Strand to SEQ ID NO: 331833
uuugcugcuggaaucguca

SEQ ID NO: 331835 - RNA, 19 nt, Artificial Sequence
  Description of Artificial Sequence: Synthetic oligonucleotide
  Sense Strand Starting at position 166 of SEQ ID NO: 317853
uuacuuagucuagguauaa

SEQ ID NO: 331836 - RNA, 19 nt, Artificial Sequence
  Description of Artificial Sequence: Synthetic oligonucleotide
  Antisense Strand to SEQ ID NO: 331835
uuauaccuagacuaaguaa

SEQ ID NO: 331837 - RNA, 19 nt, Artificial Sequence
  Description of Artificial Sequence: Synthetic oligonucleotide
  Sense Strand Starting at position 166 of SEQ ID NO: 317866
guauaaaucucaguagagc

SEQ ID NO: 331838 - RNA, 19 nt, Artificial Sequence
  Description of Artificial Sequence: Synthetic oligonucleotide
  Antisense Strand to SEQ ID NO: 331837
gcucuacugagauuuauac

SEQ ID NO: 331839 - RNA, 19 nt, Artificial Sequence
  Description of Artificial Sequence: Synthetic oligonucleotide
  Sense Strand Starting at position 166 of SEQ ID NO: 317978
uugaacguuuaagucuaaa

SEQ ID NO: 331840 - RNA, 19 nt, Artificial Sequence
  Description of Artificial Sequence: Synthetic oligonucleotide
  Antisense Strand to SEQ ID NO: 331839
uuuagacuuaaacguucaa

SEQ ID NO: 331841 - RNA, 19 nt, Artificial Sequence
  Description of Artificial Sequence: Synthetic oligonucleotide
  Sense Strand Starting at position 166 of SEQ ID NO: 318036
aguuguaaggauuaaguga

SEQ ID NO: 331842 - RNA, 19 nt, Artificial Sequence
  Description of Artificial Sequence: Synthetic oligonucleotide
  Antisense Strand to SEQ ID NO: 331841
ucacuuaauccuuacaacu

SEQ ID NO: 331843 - RNA, 19 nt, Artificial Sequence
  Description of Artificial Sequence: Synthetic oligonucleotide
  Sense Strand Starting at position 166 of SEQ ID NO: 318133
uuucuaauucuggauagca

SEQ ID NO: 331844 - RNA, 19 nt, Artificial Sequence
  Description of Artificial Sequence: Synthetic oligonucleotide
  Antisense Strand to SEQ ID NO: 331843
ugcuauccagaauuagaaa

SEQ ID NO: 331845 - RNA, 19 nt, Artificial Sequence
  Description of Artificial Sequence: Synthetic oligonucleotide
  Sense Strand Starting at position 166 of SEQ ID NO: 318298
ccugaaauguguccuuuag

SEQ ID NO: 331846 - RNA, 19 nt, Artificial Sequence
  Description of Artificial Sequence: Synthetic oligonucleotide
  Antisense Strand to SEQ ID NO: 331845
cuaaaggacacauuucagg

SEQ ID NO: 331847 - RNA, 19 nt, Artificial Sequence
  Description of Artificial Sequence: Synthetic oligonucleotide
  Sense Strand Starting at position 166 of SEQ ID NO: 318300
ugaaauguguccuuuagaa

SEQ ID NO: 331848 - RNA, 19 nt, Artificial Sequence
  Description of Artificial Sequence: Synthetic oligonucleotide
  Antisense Strand to SEQ ID NO: 331847
uucuaaaggacacauuuca

SEQ ID NO: 331849 - RNA, 19 nt, Artificial Sequence
  Description of Artificial Sequence: Synthetic oligonucleotide
  Sense Strand Starting at position 166 of SEQ ID NO: 318347
ugaaucagaaguuguguuu

SEQ ID NO: 331850 - RNA, 19 nt, Artificial Sequence
  Description of Artificial Sequence: Synthetic oligonucleotide
  Antisense Strand to SEQ ID NO: 331849
aaacacaacuucugauuca

SEQ ID NO: 331851 - RNA, 19 nt, Artificial Sequence
  Description of Artificial Sequence: Synthetic oligonucleotide
  Sense Strand Starting at position 166 of SEQ ID NO: 318350
aucagaaguuguguuucua

SEQ ID NO: 331852 - RNA, 19 nt, Artificial Sequence
  Description of Artificial Sequence: Synthetic oligonucleotide
  Antisense Strand to SEQ ID NO: 331851
uagaaacacaacuucugau

SEQ ID NO: 331853 - RNA, 19 nt, Artificial Sequence
  Description of Artificial Sequence: Synthetic oligonucleotide
  Sense Strand Starting at position 166 of SEQ ID NO: 318354
gaaguuguguuucuaaaug

SEQ ID NO: 331854 - RNA, 19 nt, Artificial Sequence
  Description of Artificial Sequence: Synthetic oligonucleotide
  Antisense Strand to SEQ ID NO: 331853
cauuuagaaacacaacuuc

SEQ ID NO: 331855 - RNA, 19 nt, Artificial Sequence
  Description of Artificial Sequence: Synthetic oligonucleotide
  Sense Strand Starting at position 166 of SEQ ID NO: 318362
guuucuaaaugagcuuaau

SEQ ID NO: 331856 - RNA, 19 nt, Artificial Sequence
  Description of Artificial Sequence: Synthetic oligonucleotide
  Antisense Strand to SEQ ID NO: 331855
auuaagcucauuuagaaac

SEQ ID NO: 331857 - RNA, 19 nt, Artificial Sequence
  Description of Artificial Sequence: Synthetic oligonucleotide
  Sense Strand Starting at position 166 of SEQ ID NO: 318430
gauggacugguucaguagu

SEQ ID NO: 331858 - RNA, 19 nt, Artificial Sequence
  Description of Artificial Sequence: Synthetic oligonucleotide
  Antisense Strand to SEQ ID NO: 331857
acuacugaaccaguccauc

SEQ ID NO: 331859 - RNA, 19 nt, Artificial Sequence
  Description of Artificial Sequence: Synthetic oligonucleotide
  Sense Strand Starting at position 166 of SEQ ID NO: 318708
gcaagcacauucuugaaga

SEQ ID NO: 331860 - RNA, 19 nt, Artificial Sequence
  Description of Artificial Sequence: Synthetic oligonucleotide
  Antisense Strand to SEQ ID NO: 331859
ucuucaagaaugugcuugc

SEQ ID NO: 331861 - RNA, 19 nt, Artificial Sequence
  Description of Artificial Sequence: Synthetic oligonucleotide
  Sense Strand Starting at position 166 of SEQ ID NO: 318734
gugaauaccuguguuauug

SEQ ID NO: 331862 - RNA, 19 nt, Artificial Sequence
  Description of Artificial Sequence: Synthetic oligonucleotide
  Antisense Strand to SEQ ID NO: 331861
caauaacacagguauucac

SEQ ID NO: 331863 - RNA, 19 nt, Artificial Sequence
  Description of Artificial Sequence: Synthetic oligonucleotide
  Sense Strand Starting at position 166 of SEQ ID NO: 318743
uguguuauuguaggagaua

SEQ ID NO: 331864 - RNA, 19 nt, Artificial Sequence
  Description of Artificial Sequence: Synthetic oligonucleotide
  Antisense Strand to SEQ ID NO: 331863
uaucuccuacaauaacaca

SEQ ID NO: 331865 - RNA, 19 nt, Artificial Sequence
  Description of Artificial Sequence: Synthetic oligonucleotide
  Sense Strand Starting at position 166 of SEQ ID NO: 318746
guuauuguaggagauaguu

SEQ ID NO: 331866 - RNA, 19 nt, Artificial Sequence
  Description of Artificial Sequence: Synthetic oligonucleotide
  Antisense Strand to SEQ ID NO: 331865
aacuaucuccuacaauaac

SEQ ID NO: 331867 - RNA, 19 nt, Artificial Sequence
  Description of Artificial Sequence: Synthetic oligonucleotide
  Sense Strand Starting at position 166 of SEQ ID NO: 318755
ggagauaguugccuacugu

SEQ ID NO: 331868 - RNA, 19 nt, Artificial Sequence
  Description of Artificial Sequence: Synthetic oligonucleotide
  Antisense Strand to SEQ ID NO: 331867
acaguaggcaacuaucucc

SEQ ID NO: 331869 - RNA, 19 nt, Artificial Sequence
  Description of Artificial Sequence: Synthetic oligonucleotide
  Sense Strand Starting at position 166 of SEQ ID NO: 318756
gagauaguugccuacugug

SEQ ID NO: 331870 - RNA, 19 nt, Artificial Sequence
  Description of Artificial Sequence: Synthetic oligonucleotide
  Antisense Strand to SEQ ID NO: 331869
cacaguaggcaacuaucuc

SEQ ID NO: 331871 - RNA, 19 nt, Artificial Sequence
  Description of Artificial Sequence: Synthetic oligonucleotide
  Sense Strand Starting at position 166 of SEQ ID NO: 318920
caaagaaguuaggauuugu

SEQ ID NO: 331872 - RNA, 19 nt, Artificial Sequence
  Description of Artificial Sequence: Synthetic oligonucleotide
  Antisense Strand to SEQ ID NO: 331871
acaaauccuaacuucuuug

SEQ ID NO: 331873 - RNA, 19 nt, Artificial Sequence
  Description of Artificial Sequence: Synthetic oligonucleotide
  Sense Strand Starting at position 166 of SEQ ID NO: 318931
ggauuuguuuauugaaaug

SEQ ID NO: 331874 - RNA, 19 nt, Artificial Sequence
  Description of Artificial Sequence: Synthetic oligonucleotide
  Antisense Strand to SEQ ID NO: 331873
cauuucaauaaacaaaucc

SEQ ID NO: 331875 - RNA, 19 nt, Artificial Sequence
  Description of Artificial Sequence: Synthetic oligonucleotide
  Sense Strand Starting at position 166 of SEQ ID NO: 318936
uguuuauugaaaugguagu

SEQ ID NO: 331876 - RNA, 19 nt, Artificial Sequence
  Description of Artificial Sequence: Synthetic oligonucleotide
  Antisense Strand to SEQ ID NO: 331875
acuaccauuucaauaaaca

SEQ ID NO: 331877 - RNA, 19 nt, Artificial Sequence
  Description of Artificial Sequence: Synthetic oligonucleotide
  Sense Strand Starting at position 166 of SEQ ID NO: 318942
uugaaaugguagucggagu

SEQ ID NO: 331878 - RNA, 19 nt, Artificial Sequence
  Description of Artificial Sequence: Synthetic oligonucleotide
  Antisense Strand to SEQ ID NO: 331877
acuccgacuaccauuucaa

SEQ ID NO: 331879 - RNA, 19 nt, Artificial Sequence
  Description of Artificial Sequence: Synthetic oligonucleotide
  Sense Strand Starting at position 166 of SEQ ID NO: 318943
ugaaaugguagucggaguu

SEQ ID NO: 331880 - RNA, 19 nt, Artificial Sequence
  Description of Artificial Sequence: Synthetic oligonucleotide
  Antisense Strand to SEQ ID NO: 331879
aacuccgacuaccauuuca

SEQ ID NO: 331881 - RNA, 19 nt, Artificial Sequence
  Description of Artificial Sequence: Synthetic oligonucleotide
  Sense Strand Starting at position 166 of SEQ ID NO: 318955
cggaguuucuggguucuaa

SEQ ID NO: 331882 - RNA, 19 nt, Artificial Sequence
  Description of Artificial Sequence: Synthetic oligonucleotide
  Antisense Strand to SEQ ID NO: 331881
uuagaacccagaaacuccg

SEQ ID NO: 331883 - RNA, 19 nt, Artificial Sequence
  Description of Artificial Sequence: Synthetic oligonucleotide
  Sense Strand Starting at position 166 of SEQ ID NO: 318994
guaugaccuugggcauaua

SEQ ID NO: 331884 - RNA, 19 nt, Artificial Sequence
  Description of Artificial Sequence: Synthetic oligonucleotide
  Antisense Strand to SEQ ID NO: 331883
uauaugcccaaggucauac

SEQ ID NO: 331885 - RNA, 19 nt, Artificial Sequence
  Description of Artificial Sequence: Synthetic oligonucleotide
  Sense Strand Starting at position 166 of SEQ ID NO: 319079
agcuacauugagcaauaga

SEQ ID NO: 331886 - RNA, 19 nt, Artificial Sequence
  Description of Artificial Sequence: Synthetic oligonucleotide
  Antisense Strand to SEQ ID NO: 331885
ucuauugcucaauguagcu

SEQ ID NO: 331887 - RNA, 19 nt, Artificial Sequence
  Description of Artificial Sequence: Synthetic oligonucleotide
  Sense Strand Starting at position 166 of SEQ ID NO: 319192
uucugagucuuguugauaa

SEQ ID NO: 331888 - RNA, 19 nt, Artificial Sequence
  Description of Artificial Sequence: Synthetic oligonucleotide
  Antisense Strand to SEQ ID NO: 331887
uuaucaacaagacucagaa

SEQ ID NO: 331889 - RNA, 19 nt, Artificial Sequence
  Description of Artificial Sequence: Synthetic oligonucleotide
  Sense Strand Starting at position 166 of SEQ ID NO: 319203
guugauaaccaugacagca

SEQ ID NO: 331890 - RNA, 19 nt, Artificial Sequence
  Description of Artificial Sequence: Synthetic oligonucleotide
  Antisense Strand to SEQ ID NO: 331889
ugcugucaugguuaucaac

SEQ ID NO: 331891 - RNA, 19 nt, Artificial Sequence
  Description of Artificial Sequence: Synthetic oligonucleotide
  Sense Strand Starting at position 167 of SEQ ID NO: 315328
agcauagugcuuuaaagua

SEQ ID NO: 331892 - RNA, 19 nt, Artificial Sequence
  Description of Artificial Sequence: Synthetic oligonucleotide
  Antisense Strand to SEQ ID NO: 331891
uacuuuaaagcacuaugcu

SEQ ID NO: 331893 - RNA, 19 nt, Artificial Sequence
  Description of Artificial Sequence: Synthetic oligonucleotide
  Sense Strand Starting at position 167 of SEQ ID NO: 315375
uugggacuauaacauuuaa

SEQ ID NO: 331894 - RNA, 19 nt, Artificial Sequence
  Description of Artificial Sequence: Synthetic oligonucleotide
  Antisense Strand to SEQ ID NO: 331893
uuaaauguuauagucccaa

SEQ ID NO: 331895 - RNA, 19 nt, Artificial Sequence
  Description of Artificial Sequence: Synthetic oligonucleotide
  Sense Strand Starting at position 167 of SEQ ID NO: 315485
uugaaauuaccaugccagu

SEQ ID NO: 331896 - RNA, 19 nt, Artificial Sequence
  Description of Artificial Sequence: Synthetic oligonucleotide
  Antisense Strand to SEQ ID NO: 331895
acuggcaugguaauuucaa

SEQ ID NO: 331897 - RNA, 19 nt, Artificial Sequence
  Description of Artificial Sequence: Synthetic oligonucleotide
  Sense Strand Starting at position 167 of SEQ ID NO: 315650
ggaggaucuacuugagcuc

SEQ ID NO: 331898 - RNA, 19 nt, Artificial Sequence
  Description of Artificial Sequence: Synthetic oligonucleotide
  Antisense Strand to SEQ ID NO: 331897
gagcucaaguagauccucc

SEQ ID NO: 331899 - RNA, 19 nt, Artificial Sequence
  Description of Artificial Sequence: Synthetic oligonucleotide
  Sense Strand Starting at position 167 of SEQ ID NO: 315942
uggucaaacuuguuuauaa

SEQ ID NO: 331900 - RNA, 19 nt, Artificial Sequence
  Description of Artificial Sequence: Synthetic oligonucleotide
  Antisense Strand to SEQ ID NO: 331899
uuauaaacaaguuugacca

SEQ ID NO: 331901 - RNA, 19 nt, Artificial Sequence
  Description of Artificial Sequence: Synthetic oligonucleotide
  Sense Strand Starting at position 167 of SEQ ID NO: 315943
ggucaaacuuguuuauaac

SEQ ID NO: 331902 - RNA, 19 nt, Artificial Sequence
  Description of Artificial Sequence: Synthetic oligonucleotide
  Antisense Strand to SEQ ID NO: 331901
guuauaaacaaguuugacc

SEQ ID NO: 331903 - RNA, 19 nt, Artificial Sequence
  Description of Artificial Sequence: Synthetic oligonucleotide
  Sense Strand Starting at position 167 of SEQ ID NO: 315944
gucaaacuuguuuauaaca

SEQ ID NO: 331904 - RNA, 19 nt, Artificial Sequence
  Description of Artificial Sequence: Synthetic oligonucleotide
  Antisense Strand to SEQ ID NO: 331903
uguuauaaacaaguuugac

SEQ ID NO: 331905 - RNA, 19 nt, Artificial Sequence
  Description of Artificial Sequence: Synthetic oligonucleotide
  Sense Strand Starting at position 167 of SEQ ID NO: 315987
uuccacugacuuugagagu

SEQ ID NO: 331906 - RNA, 19 nt, Artificial Sequence
  Description of Artificial Sequence: Synthetic oligonucleotide
  Antisense Strand to SEQ ID NO: 331905
acucucaaagucaguggaa

SEQ ID NO: 331907 - RNA, 19 nt, Artificial Sequence
  Description of Artificial Sequence: Synthetic oligonucleotide
  Sense Strand Starting at position 167 of SEQ ID NO: 316074
guccaaaucuacuuguuua

SEQ ID NO: 331908 - RNA, 19 nt, Artificial Sequence
  Description of Artificial Sequence: Synthetic oligonucleotide
  Antisense Strand to SEQ ID NO: 331907
uaaacaaguagauuuggac

SEQ ID NO: 331909 - RNA, 19 nt, Artificial Sequence
  Description of Artificial Sequence: Synthetic oligonucleotide
  Sense Strand Starting at position 167 of SEQ ID NO: 316217
uagaaauugcaguaguauu

SEQ ID NO: 331910 - RNA, 19 nt, Artificial Sequence
  Description of Artificial Sequence: Synthetic oligonucleotide
  Antisense Strand to SEQ ID NO: 331909
aauacuacugcaauuucua

SEQ ID NO: 331911 - RNA, 19 nt, Artificial Sequence
  Description of Artificial Sequence: Synthetic oligonucleotide
  Sense Strand Starting at position 167 of SEQ ID NO: 316276
aggaucagauuugacuauu

SEQ ID NO: 331912 - RNA, 19 nt, Artificial Sequence
  Description of Artificial Sequence: Synthetic oligonucleotide
  Antisense Strand to SEQ ID NO: 331911
aauagucaaaucugauccu

SEQ ID NO: 331913 - RNA, 19 nt, Artificial Sequence
  Description of Artificial Sequence: Synthetic oligonucleotide
  Sense Strand Starting at position 167 of SEQ ID NO: 316311
guaagaauuguggacaugu

SEQ ID NO: 331914 - RNA, 19 nt, Artificial Sequence
  Description of Artificial Sequence: Synthetic oligonucleotide
  Antisense Strand to SEQ ID NO: 331913
acauguccacaauucuuac

SEQ ID NO: 331915 - RNA, 19 nt, Artificial Sequence
  Description of Artificial Sequence: Synthetic oligonucleotide
  Sense Strand Starting at position 167 of SEQ ID NO: 316448
gcuguuugacuagagcuaa

SEQ ID NO: 331916 - RNA, 19 nt, Artificial Sequence
  Description of Artificial Sequence: Synthetic oligonucleotide
  Antisense Strand to SEQ ID NO: 331915
uuagcucuagucaaacagc

SEQ ID NO: 331917 - RNA, 19 nt, Artificial Sequence
  Description of Artificial Sequence: Synthetic oligonucleotide
  Sense Strand Starting at position 167 of SEQ ID NO: 316553
uccuacuugucuuuaugau

SEQ ID NO: 331918 - RNA, 19 nt, Artificial Sequence
  Description of Artificial Sequence: Synthetic oligonucleotide
  Antisense Strand to SEQ ID NO: 331917
aucauaaagacaaguagga

SEQ ID NO: 331919 - RNA, 19 nt, Artificial Sequence
  Description of Artificial Sequence: Synthetic oligonucleotide
  Sense Strand Starting at position 167 of SEQ ID NO: 316554
ccuacuugucuuuaugaua

SEQ ID NO: 331920 - RNA, 19 nt, Artificial Sequence
  Description of Artificial Sequence: Synthetic oligonucleotide
  Antisense Strand to SEQ ID NO: 331919
uaucauaaagacaaguagg

SEQ ID NO: 331921 - RNA, 19 nt, Artificial Sequence
  Description of Artificial Sequence: Synthetic oligonucleotide
  Sense Strand Starting at position 167 of SEQ ID NO: 316575
ccugucauugacugguaca

SEQ ID NO: 331922 - RNA, 19 nt, Artificial Sequence
  Description of Artificial Sequence: Synthetic oligonucleotide
  Antisense Strand to SEQ ID NO: 331921
uguaccagucaaugacagg

SEQ ID NO: 331923 - RNA, 19 nt, Artificial Sequence
  Description of Artificial Sequence: Synthetic oligonucleotide
  Sense Strand Starting at position 167 of SEQ ID NO: 316636
acauaugauggcuacuuua

SEQ ID NO: 331924 - RNA, 19 nt, Artificial Sequence
  Description of Artificial Sequence: Synthetic oligonucleotide
  Antisense Strand to SEQ ID NO: 331923
uaaaguagccaucauaugu

SEQ ID NO: 331925 - RNA, 19 nt, Artificial Sequence
  Description of Artificial Sequence: Synthetic oligonucleotide
  Sense Strand Starting at position 167 of SEQ ID NO: 316639
uaugauggcuacuuuauga

SEQ ID NO: 331926 - RNA, 19 nt, Artificial Sequence
  Description of Artificial Sequence: Synthetic oligonucleotide
  Antisense Strand to SEQ ID NO: 331925
ucauaaaguagccaucaua

SEQ ID NO: 331927 - RNA, 19 nt, Artificial Sequence
  Description of Artificial Sequence: Synthetic oligonucleotide
  Sense Strand Starting at position 167 of SEQ ID NO: 316738
acaccaaguguuugggauu

SEQ ID NO: 331928 - RNA, 19 nt, Artificial Sequence
  Description of Artificial Sequence: Synthetic oligonucleotide
  Antisense Strand to SEQ ID NO: 331927
aaucccaaacacuuggugu

SEQ ID NO: 331929 - RNA, 19 nt, Artificial Sequence
  Description of Artificial Sequence: Synthetic oligonucleotide
  Sense Strand Starting at position 167 of SEQ ID NO: 316752
ggauuuaauugguauaauc

SEQ ID NO: 331930 - RNA, 19 nt, Artificial Sequence
  Description of Artificial Sequence: Synthetic oligonucleotide
  Antisense Strand to SEQ ID NO: 331929
gauuauaccaauuaaaucc

SEQ ID NO: 331931 - RNA, 19 nt, Artificial Sequence
  Description of Artificial Sequence: Synthetic oligonucleotide
  Sense Strand Starting at position 167 of SEQ ID NO: 316830
ggagaacuuuaccuaaggu

SEQ ID NO: 331932 - RNA, 19 nt, Artificial Sequence
  Description of Artificial Sequence: Synthetic oligonucleotide
  Antisense Strand to SEQ ID NO: 331931
accuuagguaaaguucucc

SEQ ID NO: 331933 - RNA, 19 nt, Artificial Sequence
  Description of Artificial Sequence: Synthetic oligonucleotide
  Sense Strand Starting at position 167 of SEQ ID NO: 316937
aaagaaaugcacuguguaa

SEQ ID NO: 331934 - RNA, 19 nt, Artificial Sequence
  Description of Artificial Sequence: Synthetic oligonucleotide
  Antisense Strand to SEQ ID NO: 331933
uuacacagugcauuucuuu

SEQ ID NO: 331935 - RNA, 19 nt, Artificial Sequence
  Description of Artificial Sequence: Synthetic oligonucleotide
  Sense Strand Starting at position 167 of SEQ ID NO: 316939
agaaaugcacuguguaaug

SEQ ID NO: 331936 - RNA, 19 nt, Artificial Sequence
  Description of Artificial Sequence: Synthetic oligonucleotide
  Antisense Strand to SEQ ID NO: 331935
cauuacacagugcauuucu

SEQ ID NO: 331937 - RNA, 19 nt, Artificial Sequence
  Description of Artificial Sequence: Synthetic oligonucleotide
  Sense Strand Starting at position 167 of SEQ ID NO: 316984
ugaauauacgcauauauac

SEQ ID NO: 331938 - RNA, 19 nt, Artificial Sequence
  Description of Artificial Sequence: Synthetic oligonucleotide
  Antisense Strand to SEQ ID NO: 331937
guauauaugcguauauuca

SEQ ID NO: 331939 - RNA, 19 nt, Artificial Sequence
  Description of Artificial Sequence: Synthetic oligonucleotide
  Sense Strand Starting at position 167 of SEQ ID NO: 317668
gagguaucuacugggugaa

SEQ ID NO: 331940 - RNA, 19 nt, Artificial Sequence
  Description of Artificial Sequence: Synthetic oligonucleotide
  Antisense Strand to SEQ ID NO: 331939
uucacccaguagauaccuc

SEQ ID NO: 331941 - RNA, 19 nt, Artificial Sequence
  Description of Artificial Sequence: Synthetic oligonucleotide
  Sense Strand Starting at position 167 of SEQ ID NO: 317669
agguaucuacugggugaag

SEQ ID NO: 331942 - RNA, 19 nt, Artificial Sequence
  Description of Artificial Sequence: Synthetic oligonucleotide
  Antisense Strand to SEQ ID NO: 331941
cuucacccaguagauaccu

SEQ ID NO: 331943 - RNA, 19 nt, Artificial Sequence
  Description of Artificial Sequence: Synthetic oligonucleotide
  Sense Strand Starting at position 167 of SEQ ID NO: 317723
aagcuuggugucuaacuca

SEQ ID NO: 331944 - RNA, 19 nt, Artificial Sequence
  Description of Artificial Sequence: Synthetic oligonucleotide
  Antisense Strand to SEQ ID NO: 331943
ugaguuagacaccaagcuu

SEQ ID NO: 331945 - RNA, 19 nt, Artificial Sequence
  Description of Artificial Sequence: Synthetic oligonucleotide
  Sense Strand Starting at position 167 of SEQ ID NO: 318223
ucuauucuuuaagucagua

SEQ ID NO: 331946 - RNA, 19 nt, Artificial Sequence
  Description of Artificial Sequence: Synthetic oligonucleotide
  Antisense Strand to SEQ ID NO: 331945
uacugacuuaaagaauaga

SEQ ID NO: 331947 - RNA, 19 nt, Artificial Sequence
  Description of Artificial Sequence: Synthetic oligonucleotide
  Sense Strand Starting at position 167 of SEQ ID NO: 318404
cacagugcacucuaagaga

SEQ ID NO: 331948 - RNA, 19 nt, Artificial Sequence
  Description of Artificial Sequence: Synthetic oligonucleotide
  Antisense Strand to SEQ ID NO: 331947
ucucuuagagugcacugug

SEQ ID NO: 331949 - RNA, 19 nt, Artificial Sequence
  Description of Artificial Sequence: Synthetic oligonucleotide
  Sense Strand Starting at position 167 of SEQ ID NO: 318485
guugcuuagguacauaaua

SEQ ID NO: 331950 - RNA, 19 nt, Artificial Sequence
  Description of Artificial Sequence: Synthetic oligonucleotide
  Antisense Strand to SEQ ID NO: 331949
uauuauguaccuaagcaac

SEQ ID NO: 331951 - RNA, 19 nt, Artificial Sequence
  Description of Artificial Sequence: Synthetic oligonucleotide
  Sense Strand Starting at position 167 of SEQ ID NO: 318521
cacugagcaucuguauuga

SEQ ID NO: 331952 - RNA, 19 nt, Artificial Sequence
  Description of Artificial Sequence: Synthetic oligonucleotide
  Antisense Strand to SEQ ID NO: 331951
ucaauacagaugcucagug

SEQ ID NO: 331953 - RNA, 19 nt, Artificial Sequence
  Description of Artificial Sequence: Synthetic oligonucleotide
  Sense Strand Starting at position 167 of SEQ ID NO: 318772
gauccagcaugaucuagau

SEQ ID NO: 331954 - RNA, 19 nt, Artificial Sequence
  Description of Artificial Sequence: Synthetic oligonucleotide
  Antisense Strand to SEQ ID NO: 331953
aucuagaucaugcuggauc

SEQ ID NO: 331955 - RNA, 19 nt, Artificial Sequence
  Description of Artificial Sequence: Synthetic oligonucleotide
  Sense Strand Starting at position 167 of SEQ ID NO: 318779
caugaucuagauuguguua

SEQ ID NO: 331956 - RNA, 19 nt, Artificial Sequence
  Description of Artificial Sequence: Synthetic oligonucleotide
  Antisense Strand to SEQ ID NO: 331955
uaacacaaucuagaucaug

SEQ ID NO: 331957 - RNA, 19 nt, Artificial Sequence
  Description of Artificial Sequence: Synthetic oligonucleotide
  Sense Strand Starting at position 167 of SEQ ID NO: 318782
gaucuagauuguguuacau

SEQ ID NO: 331958 - RNA, 19 nt, Artificial Sequence
  Description of Artificial Sequence: Synthetic oligonucleotide
  Antisense Strand to SEQ ID NO: 331957
auguaacacaaucuagauc

SEQ ID NO: 331959 - RNA, 19 nt, Artificial Sequence
  Description of Artificial Sequence: Synthetic oligonucleotide
  Sense Strand Starting at position 167 of SEQ ID NO: 318977
gcauuugacuuccugagca

SEQ ID NO: 331960 - RNA, 19 nt, Artificial Sequence
  Description of Artificial Sequence: Synthetic oligonucleotide
  Antisense Strand to SEQ ID NO: 331959
ugcucaggaagucaaaugc

SEQ ID NO: 331961 - RNA, 19 nt, Artificial Sequence
  Description of Artificial Sequence: Synthetic oligonucleotide
  Sense Strand Starting at position 167 of SEQ ID NO: 318981
uugacuuccugagcauauu

SEQ ID NO: 331962 - RNA, 19 nt, Artificial Sequence
  Description of Artificial Sequence: Synthetic oligonucleotide
  Antisense Strand to SEQ ID NO: 331961
aauaugcucaggaagucaa

SEQ ID NO: 331963 - RNA, 19 nt, Artificial Sequence
  Description of Artificial Sequence: Synthetic oligonucleotide
  Sense Strand Starting at position 167 of SEQ ID NO: 319002
ccaacagaagcaugcuuau

SEQ ID NO: 331964 - RNA, 19 nt, Artificial Sequence
  Description of Artificial Sequence: Synthetic oligonucleotide
  Antisense Strand to SEQ ID NO: 331963
auaagcaugcuucuguugg

SEQ ID NO: 331965 - RNA, 19 nt, Artificial Sequence
  Description of Artificial Sequence: Synthetic oligonucleotide
  Sense Strand Starting at position 167 of SEQ ID NO: 319194
uuauguuaggaguauaugu

SEQ ID NO: 331966 - RNA, 19 nt, Artificial Sequence
  Description of Artificial Sequence: Synthetic oligonucleotide
  Antisense Strand to SEQ ID NO: 331965
acauauacuccuaacauaa

SEQ ID NO: 331967 - RNA, 19 nt, Artificial Sequence
  Description of Artificial Sequence: Synthetic oligonucleotide
  Sense Strand Starting at position 167 of SEQ ID NO: 319196
auguuaggaguauauguaa

SEQ ID NO: 331968 - RNA, 19 nt, Artificial Sequence
  Description of Artificial Sequence: Synthetic oligonucleotide
  Antisense Strand to SEQ ID NO: 331967
uuacauauacuccuaacau

SEQ ID NO: 331969 - RNA, 19 nt, Artificial Sequence
  Description of Artificial Sequence: Synthetic oligonucleotide
  Sense Strand Starting at position 167 of SEQ ID NO: 319199
uuaggaguauauguaagua

SEQ ID NO: 331970 - RNA, 19 nt, Artificial Sequence
  Description of Artificial Sequence: Synthetic oligonucleotide
  Antisense Strand to SEQ ID NO: 331969
uacuuacauauacuccuaa

SEQ ID NO: 331971 - RNA, 19 nt, Artificial Sequence
  Description of Artificial Sequence: Synthetic oligonucleotide
  Sense Strand Starting at position 168 of SEQ ID NO: 315329
gugucauugcuugccuugu

SEQ ID NO: 331972 - RNA, 19 nt, Artificial Sequence
  Description of Artificial Sequence: Synthetic oligonucleotide
  Antisense Strand to SEQ ID NO: 331971
acaaggcaagcaaugacac

SEQ ID NO: 331973 - RNA, 19 nt, Artificial Sequence
  Description of Artificial Sequence: Synthetic oligonucleotide
  Sense Strand Starting at position 168 of SEQ ID NO: 315539
cuugacagauaccuguaau

SEQ ID NO: 331974 - RNA, 19 nt, Artificial Sequence
  Description of Artificial Sequence: Synthetic oligonucleotide
  Antisense Strand to SEQ ID NO: 331973
auuacagguaucugucaag

SEQ ID NO: 331975 - RNA, 19 nt, Artificial Sequence
  Description of Artificial Sequence: Synthetic oligonucleotide
  Sense Strand Starting at position 168 of SEQ ID NO: 315615
gcagccugcguauuauaau

SEQ ID NO: 331976 - RNA, 19 nt, Artificial Sequence
  Description of Artificial Sequence: Synthetic oligonucleotide
  Antisense Strand to SEQ ID NO: 331975
auuauaauacgcaggcugc

SEQ ID NO: 331977 - RNA, 19 nt, Artificial Sequence
  Description of Artificial Sequence: Synthetic oligonucleotide
  Sense Strand Starting at position 168 of SEQ ID NO: 315653
uuuggagaguaauugauua

SEQ ID NO: 331978 - RNA, 19 nt, Artificial Sequence
  Description of Artificial Sequence: Synthetic oligonucleotide
  Antisense Strand to SEQ ID NO: 331977
uaaucaauuacucuccaaa

SEQ ID NO: 331979 - RNA, 19 nt, Artificial Sequence
  Description of Artificial Sequence: Synthetic oligonucleotide
  Sense Strand Starting at position 168 of SEQ ID NO: 315930
uacauaaaguggucucuga

SEQ ID NO: 331980 - RNA, 19 nt, Artificial Sequence
  Description of Artificial Sequence: Synthetic oligonucleotide
  Antisense Strand to SEQ ID NO: 331979
ucagagaccacuuuaugua

SEQ ID NO: 331981 - RNA, 19 nt, Artificial Sequence
  Description of Artificial Sequence: Synthetic oligonucleotide
  Sense Strand Starting at position 168 of SEQ ID NO: 316082
acauauugugcuuauacau

SEQ ID NO: 331982 - RNA, 19 nt, Artificial Sequence
  Description of Artificial Sequence: Synthetic oligonucleotide
  Antisense Strand to SEQ ID NO: 331981
auguauaagcacaauaugu

SEQ ID NO: 331983 - RNA, 19 nt, Artificial Sequence
  Description of Artificial Sequence: Synthetic oligonucleotide
  Sense Strand Starting at position 168 of SEQ ID NO: 316135
aauugcugugaauguauuu

SEQ ID NO: 331984 - RNA, 19 nt, Artificial Sequence
  Description of Artificial Sequence: Synthetic oligonucleotide
  Antisense Strand to SEQ ID NO: 331983
aaauacauucacagcaauu

SEQ ID NO: 331985 - RNA, 19 nt, Artificial Sequence
  Description of Artificial Sequence: Synthetic oligonucleotide
  Sense Strand Starting at position 168 of SEQ ID NO: 316314
uugcuaugacaauauuagu

SEQ ID NO: 331986 - RNA, 19 nt, Artificial Sequence
  Description of Artificial Sequence: Synthetic oligonucleotide
  Antisense Strand to SEQ ID NO: 331985
acuaauauugucauagcaa

SEQ ID NO: 331987 - RNA, 19 nt, Artificial Sequence
  Description of Artificial Sequence: Synthetic oligonucleotide
  Sense Strand Starting at position 168 of SEQ ID NO: 316320
ugacaauauuaguuguaug

SEQ ID NO: 331988 - RNA, 19 nt, Artificial Sequence
  Description of Artificial Sequence: Synthetic oligonucleotide
  Antisense Strand to SEQ ID NO: 331987
cauacaacuaauauuguca

SEQ ID NO: 331989 - RNA, 19 nt, Artificial Sequence
  Description of Artificial Sequence: Synthetic oligonucleotide
  Sense Strand Starting at position 168 of SEQ ID NO: 316336
augauaaaggcuugacuuu

SEQ ID NO: 331990 - RNA, 19 nt, Artificial Sequence
  Description of Artificial Sequence: Synthetic oligonucleotide
  Antisense Strand to SEQ ID NO: 331989
aaagucaagccuuuaucau

SEQ ID NO: 331991 - RNA, 19 nt, Artificial Sequence
  Description of Artificial Sequence: Synthetic oligonucleotide
  Sense Strand Starting at position 168 of SEQ ID NO: 316379
caaagaugagcguauguca

SEQ ID NO: 331992 - RNA, 19 nt, Artificial Sequence
  Description of Artificial Sequence: Synthetic oligonucleotide
  Antisense Strand to SEQ ID NO: 331991
ugacauacgcucaucuuug

SEQ ID NO: 331993 - RNA, 19 nt, Artificial Sequence
  Description of Artificial Sequence: Synthetic oligonucleotide
  Sense Strand Starting at position 168 of SEQ ID NO: 316496
uguagacugcucuaaacag

SEQ ID NO: 331994 - RNA, 19 nt, Artificial Sequence
  Description of Artificial Sequence: Synthetic oligonucleotide
  Antisense Strand to SEQ ID NO: 331993
cuguuuagagcagucuaca

SEQ ID NO: 331995 - RNA, 19 nt, Artificial Sequence
  Description of Artificial Sequence: Synthetic oligonucleotide
  Sense Strand Starting at position 168 of SEQ ID NO: 316530
cauaaaugauaggucuaug

SEQ ID NO: 331996 - RNA, 19 nt, Artificial Sequence
  Description of Artificial Sequence: Synthetic oligonucleotide
  Antisense Strand to SEQ ID NO: 331995
cauagaccuaucauuuaug

SEQ ID NO: 331997 - RNA, 19 nt, Artificial Sequence
  Description of Artificial Sequence: Synthetic oligonucleotide
  Sense Strand Starting at position 168 of SEQ ID NO: 316535
augauaggucuaugauaca

SEQ ID NO: 331998 - RNA, 19 nt, Artificial Sequence
  Description of Artificial Sequence: Synthetic oligonucleotide
  Antisense Strand to SEQ ID NO: 331997
uguaucauagaccuaucau

SEQ ID NO: 331999 - RNA, 19 nt, Artificial Sequence
  Description of Artificial Sequence: Synthetic oligonucleotide
  Sense Strand Starting at position 168 of SEQ ID NO: 316728
agaaaucgauagcuuauaa

SEQ ID NO: 332000 - RNA, 19 nt, Artificial Sequence
  Description of Artificial Sequence: Synthetic oligonucleotide
  Antisense Strand to SEQ ID NO: 331999
uuauaagcuaucgauuucu

SEQ ID NO: 332001 - RNA, 19 nt, Artificial Sequence
  Description of Artificial Sequence: Synthetic oligonucleotide
  Sense Strand Starting at position 168 of SEQ ID NO: 316981
augcaaacaugucucagaa

SEQ ID NO: 332002 - RNA, 19 nt, Artificial Sequence
  Description of Artificial Sequence: Synthetic oligonucleotide
  Antisense Strand to SEQ ID NO: 332001
uucugagacauguuugcau

SEQ ID NO: 332003 - RNA, 19 nt, Artificial Sequence
  Description of Artificial Sequence: Synthetic oligonucleotide
  Sense Strand Starting at position 168 of SEQ ID NO: 317033
guaggaauuuaugaacaau

SEQ ID NO: 332004 - RNA, 19 nt, Artificial Sequence
  Description of Artificial Sequence: Synthetic oligonucleotide
  Antisense Strand to SEQ ID NO: 332003
auuguucauaaauuccuac

SEQ ID NO: 332005 - RNA, 19 nt, Artificial Sequence
  Description of Artificial Sequence: Synthetic oligonucleotide
  Sense Strand Starting at position 168 of SEQ ID NO: 317161
ggagcucaccuuuaacuuu

SEQ ID NO: 332006 - RNA, 19 nt, Artificial Sequence
  Description of Artificial Sequence: Synthetic oligonucleotide
  Antisense Strand to SEQ ID NO: 332005
aaaguuaaaggugagcucc

SEQ ID NO: 332007 - RNA, 19 nt, Artificial Sequence
  Description of Artificial Sequence: Synthetic oligonucleotide
  Sense Strand Starting at position 168 of SEQ ID NO: 317245
uuagacagauucucuagua

SEQ ID NO: 332008 - RNA, 19 nt, Artificial Sequence
  Description of Artificial Sequence: Synthetic oligonucleotide
  Antisense Strand to SEQ ID NO: 332007
uacuagagaaucugucuaa

SEQ ID NO: 332009 - RNA, 19 nt, Artificial Sequence
  Description of Artificial Sequence: Synthetic oligonucleotide
  Sense Strand Starting at position 168 of SEQ ID NO: 317298
agaguacauuugugauuuc

SEQ ID NO: 332010 - RNA, 19 nt, Artificial Sequence
  Description of Artificial Sequence: Synthetic oligonucleotide
  Antisense Strand to SEQ ID NO: 332009
gaaaucacaaauguacucu

SEQ ID NO: 332011 - RNA, 19 nt, Artificial Sequence
  Description of Artificial Sequence: Synthetic oligonucleotide
  Sense Strand Starting at position 168 of SEQ ID NO: 317362
uaguguuaugaguaagauc

SEQ ID NO: 332012 - RNA, 19 nt, Artificial Sequence
  Description of Artificial Sequence: Synthetic oligonucleotide
  Antisense Strand to SEQ ID NO: 332011
gaucuuacucauaacacua

SEQ ID NO: 332013 - RNA, 19 nt, Artificial Sequence
  Description of Artificial Sequence: Synthetic oligonucleotide
  Sense Strand Starting at position 168 of SEQ ID NO: 317371
gaguaagauccuugaguaa

SEQ ID NO: 332014 - RNA, 19 nt, Artificial Sequence
  Description of Artificial Sequence: Synthetic oligonucleotide
  Antisense Strand to SEQ ID NO: 332013
uuacucaaggaucuuacuc

SEQ ID NO: 332015 - RNA, 19 nt, Artificial Sequence
  Description of Artificial Sequence: Synthetic oligonucleotide
  Sense Strand Starting at position 168 of SEQ ID NO: 317374
uaagauccuugaguaagac

SEQ ID NO: 332016 - RNA, 19 nt, Artificial Sequence
  Description of Artificial Sequence: Synthetic oligonucleotide
  Antisense Strand to SEQ ID NO: 332015
gucuuacucaaggaucuua

SEQ ID NO: 332017 - RNA, 19 nt, Artificial Sequence
  Description of Artificial Sequence: Synthetic oligonucleotide
  Sense Strand Starting at position 168 of SEQ ID NO: 317453
ccuuuaauggaauguauaa

SEQ ID NO: 332018 - RNA, 19 nt, Artificial Sequence
  Description of Artificial Sequence: Synthetic oligonucleotide
  Antisense Strand to SEQ ID NO: 332017
uuauacauuccauuaaagg

SEQ ID NO: 332019 - RNA, 19 nt, Artificial Sequence
  Description of Artificial Sequence: Synthetic oligonucleotide
  Sense Strand Starting at position 168 of SEQ ID NO: 317605
uccaucauuugagugcuuu

SEQ ID NO: 332020 - RNA, 19 nt, Artificial Sequence
  Description of Artificial Sequence: Synthetic oligonucleotide
  Antisense Strand to SEQ ID NO: 332019
aaagcacucaaaugaugga

SEQ ID NO: 332021 - RNA, 19 nt, Artificial Sequence
  Description of Artificial Sequence: Synthetic oligonucleotide
  Sense Strand Starting at position 168 of SEQ ID NO: 317606
ccaucauuugagugcuuuc

SEQ ID NO: 332022 - RNA, 19 nt, Artificial Sequence
  Description of Artificial Sequence: Synthetic oligonucleotide
  Antisense Strand to SEQ ID NO: 332021
gaaagcacucaaaugaugg

SEQ ID NO: 332023 - RNA, 19 nt, Artificial Sequence
  Description of Artificial Sequence: Synthetic oligonucleotide
  Sense Strand Starting at position 168 of SEQ ID NO: 317609
ucauuugagugcuuucuaa

SEQ ID NO: 332024 - RNA, 19 nt, Artificial Sequence
  Description of Artificial Sequence: Synthetic oligonucleotide
  Antisense Strand to SEQ ID NO: 332023
uuagaaagcacucaaauga

SEQ ID NO: 332025 - RNA, 19 nt, Artificial Sequence
  Description of Artificial Sequence: Synthetic oligonucleotide
  Sense Strand Starting at position 168 of SEQ ID NO: 317734
ucaaauuacuugcugaaga

SEQ ID NO: 332026 - RNA, 19 nt, Artificial Sequence
  Description of Artificial Sequence: Synthetic oligonucleotide
  Antisense Strand to SEQ ID NO: 332025
ucuucagcaaguaauuuga

SEQ ID NO: 332027 - RNA, 19 nt, Artificial Sequence
  Description of Artificial Sequence: Synthetic oligonucleotide
  Sense Strand Starting at position 168 of SEQ ID NO: 317782
ugauucuagguguaucuga

SEQ ID NO: 332028 - RNA, 19 nt, Artificial Sequence
  Description of Artificial Sequence: Synthetic oligonucleotide
  Antisense Strand to SEQ ID NO: 332027
ucagauacaccuagaauca

SEQ ID NO: 332029 - RNA, 19 nt, Artificial Sequence
  Description of Artificial Sequence: Synthetic oligonucleotide
  Sense Strand Starting at position 168 of SEQ ID NO: 317789
agguguaucugacuccaga

SEQ ID NO: 332030 - RNA, 19 nt, Artificial Sequence
  Description of Artificial Sequence: Synthetic oligonucleotide
  Antisense Strand to SEQ ID NO: 332029
ucuggagucagauacaccu

SEQ ID NO: 332031 - RNA, 19 nt, Artificial Sequence
  Description of Artificial Sequence: Synthetic oligonucleotide
  Sense Strand Starting at position 168 of SEQ ID NO: 318030
ugguaaacauuguuuaaag

SEQ ID NO: 332032 - RNA, 19 nt, Artificial Sequence
  Description of Artificial Sequence: Synthetic oligonucleotide
  Antisense Strand to SEQ ID NO: 332031
cuuuaaacaauguuuacca

SEQ ID NO: 332033 - RNA, 19 nt, Artificial Sequence
  Description of Artificial Sequence: Synthetic oligonucleotide
  Sense Strand Starting at position 168 of SEQ ID NO: 318032
guaaacauuguuuaaagca

SEQ ID NO: 332034 - RNA, 19 nt, Artificial Sequence
  Description of Artificial Sequence: Synthetic oligonucleotide
  Antisense Strand to SEQ ID NO: 332033
ugcuuuaaacaauguuuac

SEQ ID NO: 332035 - RNA, 19 nt, Artificial Sequence
  Description of Artificial Sequence: Synthetic oligonucleotide
  Sense Strand Starting at position 168 of SEQ ID NO: 318157
agugauauagucuacuuug

SEQ ID NO: 332036 - RNA, 19 nt, Artificial Sequence
  Description of Artificial Sequence: Synthetic oligonucleotide
  Antisense Strand to SEQ ID NO: 332035
caaaguagacuauaucacu

SEQ ID NO: 332037 - RNA, 19 nt, Artificial Sequence
  Description of Artificial Sequence: Synthetic oligonucleotide
  Sense Strand Starting at position 168 of SEQ ID NO: 318165
agucuacuuugacuuacua

SEQ ID NO: 332038 - RNA, 19 nt, Artificial Sequence
  Description of Artificial Sequence: Synthetic oligonucleotide
  Antisense Strand to SEQ ID NO: 332037
uaguaagucaaaguagacu

SEQ ID NO: 332039 - RNA, 19 nt, Artificial Sequence
  Description of Artificial Sequence: Synthetic oligonucleotide
  Sense Strand Starting at position 168 of SEQ ID NO: 318253
uccaucuccuaauugggaa

SEQ ID NO: 332040 - RNA, 19 nt, Artificial Sequence
  Description of Artificial Sequence: Synthetic oligonucleotide
  Antisense Strand to SEQ ID NO: 332039
uucccaauuaggagaugga

SEQ ID NO: 332041 - RNA, 19 nt, Artificial Sequence
  Description of Artificial Sequence: Synthetic oligonucleotide
  Sense Strand Starting at position 168 of SEQ ID NO: 318597
ggauuaaguccuugaccca

SEQ ID NO: 332042 - RNA, 19 nt, Artificial Sequence
  Description of Artificial Sequence: Synthetic oligonucleotide
  Antisense Strand to SEQ ID NO: 332041
ugggucaaggacuuaaucc

SEQ ID NO: 332043 - RNA, 19 nt, Artificial Sequence
  Description of Artificial Sequence: Synthetic oligonucleotide
  Sense Strand Starting at position 168 of SEQ ID NO: 318660
gugguagacuacuuacaau

SEQ ID NO: 332044 - RNA, 19 nt, Artificial Sequence
  Description of Artificial Sequence: Synthetic oligonucleotide
  Antisense Strand to SEQ ID NO: 332043
auuguaaguagucuaccac

SEQ ID NO: 332045 - RNA, 19 nt, Artificial Sequence
  Description of Artificial Sequence: Synthetic oligonucleotide
  Sense Strand Starting at position 168 of SEQ ID NO: 318977
gccagcaauuucuuaacga

SEQ ID NO: 332046 - RNA, 19 nt, Artificial Sequence
  Description of Artificial Sequence: Synthetic oligonucleotide
  Antisense Strand to SEQ ID NO: 332045
ucguuaagaaauugcuggc

SEQ ID NO: 332047 - RNA, 19 nt, Artificial Sequence
  Description of Artificial Sequence: Synthetic oligonucleotide
  Sense Strand Starting at position 168 of SEQ ID NO: 319168
uuauaugaaguauggaacu

SEQ ID NO: 332048 - RNA, 19 nt, Artificial Sequence
  Description of Artificial Sequence: Synthetic oligonucleotide
  Antisense Strand to SEQ ID NO: 332047
aguuccauacuucauauaa

SEQ ID NO: 332049 - RNA, 19 nt, Artificial Sequence
  Description of Artificial Sequence: Synthetic oligonucleotide
  Sense Strand Starting at position 168 of SEQ ID NO: 319190
uuguauuaucaacagguuu

SEQ ID NO: 332050 - RNA, 19 nt, Artificial Sequence
  Description of Artificial Sequence: Synthetic oligonucleotide
  Antisense Strand to SEQ ID NO: 332049
aaaccuguugauaauacaa

SEQ ID NO: 332051 - RNA, 19 nt, Artificial Sequence
  Description of Artificial Sequence: Synthetic oligonucleotide
  Sense Strand Starting at position 169 of SEQ ID NO: 315287
gcucaagugcugcaaauuu

SEQ ID NO: 332052 - RNA, 19 nt, Artificial Sequence
  Description of Artificial Sequence: Synthetic oligonucleotide
  Antisense Strand to SEQ ID NO: 332051
aaauuugcagcacuugagc

SEQ ID NO: 332053 - RNA, 19 nt, Artificial Sequence
  Description of Artificial Sequence: Synthetic oligonucleotide
  Sense Strand Starting at position 169 of SEQ ID NO: 315315
agaacagaacgcugacuuu

SEQ ID NO: 332054 - RNA, 19 nt, Artificial Sequence
  Description of Artificial Sequence: Synthetic oligonucleotide
  Antisense Strand to SEQ ID NO: 332053
aaagucagcguucuguucu

SEQ ID NO: 332055 - RNA, 19 nt, Artificial Sequence
  Description of Artificial Sequence: Synthetic oligonucleotide
  Sense Strand Starting at position 169 of SEQ ID NO: 315568
gcagcuguacuuuaucaag

SEQ ID NO: 332056 - RNA, 19 nt, Artificial Sequence
  Description of Artificial Sequence: Synthetic oligonucleotide
  Antisense Strand to SEQ ID NO: 332055
cuugauaaaguacagcugc

SEQ ID NO: 332057 - RNA, 19 nt, Artificial Sequence
  Description of Artificial Sequence: Synthetic oligonucleotide
  Sense Strand Starting at position 169 of SEQ ID NO: 315635
cgaagucaccuugggaaga

SEQ ID NO: 332058 - RNA, 19 nt, Artificial Sequence
  Description of Artificial Sequence: Synthetic oligonucleotide
  Antisense Strand to SEQ ID NO: 332057
ucuucccaaggugacuucg

SEQ ID NO: 332059 - RNA, 19 nt, Artificial Sequence
  Description of Artificial Sequence: Synthetic oligonucleotide
  Sense Strand Starting at position 169 of SEQ ID NO: 315756
uggugagaacuccagccau

SEQ ID NO: 332060 - RNA, 19 nt, Artificial Sequence
  Description of Artificial Sequence: Synthetic oligonucleotide
  Antisense Strand to SEQ ID NO: 332059
auggcuggaguucucacca

SEQ ID NO: 332061 - RNA, 19 nt, Artificial Sequence
  Description of Artificial Sequence: Synthetic oligonucleotide
  Sense Strand Starting at position 169 of SEQ ID NO: 316858
ggacgaaggguccagcaua

SEQ ID NO: 332062 - RNA, 19 nt, Artificial Sequence
  Description of Artificial Sequence: Synthetic oligonucleotide
  Antisense Strand to SEQ ID NO: 332061
uaugcuggacccuucgucc

SEQ ID NO: 332063 - RNA, 19 nt, Artificial Sequence
  Description of Artificial Sequence: Synthetic oligonucleotide
  Sense Strand Starting at position 169 of SEQ ID NO: 317210
gaguguugcaagcugucga

SEQ ID NO: 332064 - RNA, 19 nt, Artificial Sequence
  Description of Artificial Sequence: Synthetic oligonucleotide
  Antisense Strand to SEQ ID NO: 332063
ucgacagcuugcaacacuc

SEQ ID NO: 332065 - RNA, 19 nt, Artificial Sequence
  Description of Artificial Sequence: Synthetic oligonucleotide
  Sense Strand Starting at position 169 of SEQ ID NO: 317284
uguuuauuggcuuaacucu

SEQ ID NO: 332066 - RNA, 19 nt, Artificial Sequence
  Description of Artificial Sequence: Synthetic oligonucleotide
  Antisense Strand to SEQ ID NO: 332065
agaguuaagccaauaaaca

SEQ ID NO: 332067 - RNA, 19 nt, Artificial Sequence
  Description of Artificial Sequence: Synthetic oligonucleotide
  Sense Strand Starting at position 169 of SEQ ID NO: 317543
acgcuaaaucgagaggucu

SEQ ID NO: 332068 - RNA, 19 nt, Artificial Sequence
  Description of Artificial Sequence: Synthetic oligonucleotide
  Antisense Strand to SEQ ID NO: 332067
agaccucucgauuuagcgu

SEQ ID NO: 332069 - RNA, 19 nt, Artificial Sequence
  Description of Artificial Sequence: Synthetic oligonucleotide
  Sense Strand Starting at position 169 of SEQ ID NO: 317545
gcuaaaucgagaggucuua

SEQ ID NO: 332070 - RNA, 19 nt, Artificial Sequence
  Description of Artificial Sequence: Synthetic oligonucleotide
  Antisense Strand to SEQ ID NO: 332069
uaagaccucucgauuuagc

SEQ ID NO: 332071 - RNA, 19 nt, Artificial Sequence
  Description of Artificial Sequence: Synthetic oligonucleotide
  Sense Strand Starting at position 169 of SEQ ID NO: 317570
aggaggaaguccgugagau

SEQ ID NO: 332072 - RNA, 19 nt, Artificial Sequence
  Description of Artificial Sequence: Synthetic oligonucleotide
  Antisense Strand to SEQ ID NO: 332071
aucucacggacuuccuccu

SEQ ID NO: 332073 - RNA, 19 nt, Artificial Sequence
  Description of Artificial Sequence: Synthetic oligonucleotide
  Sense Strand Starting at position 169 of SEQ ID NO: 317571
ggaggaaguccgugagauc

SEQ ID NO: 332074 - RNA, 19 nt, Artificial Sequence
  Description of Artificial Sequence: Synthetic oligonucleotide
  Antisense Strand to SEQ ID NO: 332073
gaucucacggacuuccucc

SEQ ID NO: 332075 - RNA, 19 nt, Artificial Sequence
  Description of Artificial Sequence: Synthetic oligonucleotide
  Sense Strand Starting at position 169 of SEQ ID NO: 317716
gcaugcgcccagucuaauu

SEQ ID NO: 332076 - RNA, 19 nt, Artificial Sequence
  Description of Artificial Sequence: Synthetic oligonucleotide
  Antisense Strand to SEQ ID NO: 332075
aauuagacugggcgcaugc

SEQ ID NO: 332077 - RNA, 19 nt, Artificial Sequence
  Description of Artificial Sequence: Synthetic oligonucleotide
  Sense Strand Starting at position 169 of SEQ ID NO: 317766
ugguguuucgaccaggcaa

SEQ ID NO: 332078 - RNA, 19 nt, Artificial Sequence
  Description of Artificial Sequence: Synthetic oligonucleotide
  Antisense Strand to SEQ ID NO: 332077
uugccuggucgaaacacca

SEQ ID NO: 332079 - RNA, 19 nt, Artificial Sequence
  Description of Artificial Sequence: Synthetic oligonucleotide
  Sense Strand Starting at position 169 of SEQ ID NO: 317872
augcuuucugcugagguga

SEQ ID NO: 332080 - RNA, 19 nt, Artificial Sequence
  Description of Artificial Sequence: Synthetic oligonucleotide
  Antisense Strand to SEQ ID NO: 332079
ucaccucagcagaaagcau

SEQ ID NO: 332081 - RNA, 19 nt, Artificial Sequence
  Description of Artificial Sequence: Synthetic oligonucleotide
  Sense Strand Starting at position 169 of SEQ ID NO: 318043
cugccucucggguaaacua

SEQ ID NO: 332082 - RNA, 19 nt, Artificial Sequence
  Description of Artificial Sequence: Synthetic oligonucleotide
  Antisense Strand to SEQ ID NO: 332081
uaguuuacccgagaggcag

SEQ ID NO: 332083 - RNA, 19 nt, Artificial Sequence
  Description of Artificial Sequence: Synthetic oligonucleotide
  Sense Strand Starting at position 169 of SEQ ID NO: 318114
gccaguaaaccugguaaac

SEQ ID NO: 332084 - RNA, 19 nt, Artificial Sequence
  Description of Artificial Sequence: Synthetic oligonucleotide
  Antisense Strand to SEQ ID NO: 332083
guuuaccagguuuacuggc

SEQ ID NO: 332085 - RNA, 19 nt, Artificial Sequence
  Description of Artificial Sequence: Synthetic oligonucleotide
  Sense Strand Starting at position 169 of SEQ ID NO: 318288
uagauacucgugggaguga

SEQ ID NO: 332086 - RNA, 19 nt, Artificial Sequence
  Description of Artificial Sequence: Synthetic oligonucleotide
  Antisense Strand to SEQ ID NO: 332085
ucacucccacgaguaucua

SEQ ID NO: 332087 - RNA, 19 nt, Artificial Sequence
  Description of Artificial Sequence: Synthetic oligonucleotide
  Sense Strand Starting at position 169 of SEQ ID NO: 318317
guagcaugaguuuaaaguu

SEQ ID NO: 332088 - RNA, 19 nt, Artificial Sequence
  Description of Artificial Sequence: Synthetic oligonucleotide
  Antisense Strand to SEQ ID NO: 332087
aacuuuaaacucaugcuac

SEQ ID NO: 332089 - RNA, 19 nt, Artificial Sequence
  Description of Artificial Sequence: Synthetic oligonucleotide
  Sense Strand Starting at position 169 of SEQ ID NO: 318392
auaguaaagugaccuguuu

SEQ ID NO: 332090 - RNA, 19 nt, Artificial Sequence
  Description of Artificial Sequence: Synthetic oligonucleotide
  Antisense Strand to SEQ ID NO: 332089
aaacaggucacuuuacuau

SEQ ID NO: 332091 - RNA, 19 nt, Artificial Sequence
  Description of Artificial Sequence: Synthetic oligonucleotide
  Sense Strand Starting at position 169 of SEQ ID NO: 318394
aguaaagugaccuguuuga

SEQ ID NO: 332092 - RNA, 19 nt, Artificial Sequence
  Description of Artificial Sequence: Synthetic oligonucleotide
  Antisense Strand to SEQ ID NO: 332091
ucaaacaggucacuuuacu

SEQ ID NO: 332093 - RNA, 19 nt, Artificial Sequence
  Description of Artificial Sequence: Synthetic oligonucleotide
  Sense Strand Starting at position 169 of SEQ ID NO: 318405
cuguuugagaccugcagau

SEQ ID NO: 332094 - RNA, 19 nt, Artificial Sequence
  Description of Artificial Sequence: Synthetic oligonucleotide
  Antisense Strand to SEQ ID NO: 332093
aucugcaggucucaaacag

SEQ ID NO: 332095 - RNA, 19 nt, Artificial Sequence
  Description of Artificial Sequence: Synthetic oligonucleotide
  Sense Strand Starting at position 169 of SEQ ID NO: 318407
guuugagaccugcagauga

SEQ ID NO: 332096 - RNA, 19 nt, Artificial Sequence
  Description of Artificial Sequence: Synthetic oligonucleotide
  Antisense Strand to SEQ ID NO: 332095
ucaucugcaggucucaaac

SEQ ID NO: 332097 - RNA, 19 nt, Artificial Sequence
  Description of Artificial Sequence: Synthetic oligonucleotide
  Sense Strand Starting at position 169 of SEQ ID NO: 318476
ugaguuaaguacuuggaug

SEQ ID NO: 332098 - RNA, 19 nt, Artificial Sequence
  Description of Artificial Sequence: Synthetic oligonucleotide
  Antisense Strand to SEQ ID NO: 332097
cauccaaguacuuaacuca

SEQ ID NO: 332099 - RNA, 19 nt, Artificial Sequence
  Description of Artificial Sequence: Synthetic oligonucleotide
  Sense Strand Starting at position 169 of SEQ ID NO: 318481
uaaguacuuggauggcuua

SEQ ID NO: 332100 - RNA, 19 nt, Artificial Sequence
  Description of Artificial Sequence: Synthetic oligonucleotide
  Antisense Strand to SEQ ID NO: 332099
uaagccauccaaguacuua

SEQ ID NO: 332101 - RNA, 19 nt, Artificial Sequence
  Description of Artificial Sequence: Synthetic oligonucleotide
  Sense Strand Starting at position 169 of SEQ ID NO: 318484
guacuuggauggcuuauau

SEQ ID NO: 332102 - RNA, 19 nt, Artificial Sequence
  Description of Artificial Sequence: Synthetic oligonucleotide
  Antisense Strand to SEQ ID NO: 332101
auauaagccauccaaguac

SEQ ID NO: 332103 - RNA, 19 nt, Artificial Sequence
  Description of Artificial Sequence: Synthetic oligonucleotide
  Sense Strand Starting at position 169 of SEQ ID NO: 318488
uuggauggcuuauauuuga

SEQ ID NO: 332104 - RNA, 19 nt, Artificial Sequence
  Description of Artificial Sequence: Synthetic oligonucleotide
  Antisense Strand to SEQ ID NO: 332103
ucaaauauaagccauccaa

SEQ ID NO: 332105 - RNA, 19 nt, Artificial Sequence
  Description of Artificial Sequence: Synthetic oligonucleotide
  Sense Strand Starting at position 169 of SEQ ID NO: 318742
guaacacauuguucuaggu

SEQ ID NO: 332106 - RNA, 19 nt, Artificial Sequence
  Description of Artificial Sequence: Synthetic oligonucleotide
  Antisense Strand to SEQ ID NO: 332105
accuagaacaauguguuac

SEQ ID NO: 332107 - RNA, 19 nt, Artificial Sequence
  Description of Artificial Sequence: Synthetic oligonucleotide
  Sense Strand Starting at position 169 of SEQ ID NO: 318804
ucuauaaucuccuuuggga

SEQ ID NO: 332108 - RNA, 19 nt, Artificial Sequence
  Description of Artificial Sequence: Synthetic oligonucleotide
  Antisense Strand to SEQ ID NO: 332107
ucccaaaggagauuauaga

SEQ ID NO: 332109 - RNA, 19 nt, Artificial Sequence
  Description of Artificial Sequence: Synthetic oligonucleotide
  Sense Strand Starting at position 169 of SEQ ID NO: 318877
ucaacaaauccaggucagu

SEQ ID NO: 332110 - RNA, 19 nt, Artificial Sequence
  Description of Artificial Sequence: Synthetic oligonucleotide
  Antisense Strand to SEQ ID NO: 332109
acugaccuggauuuguuga

SEQ ID NO: 332111 - RNA, 19 nt, Artificial Sequence
  Description of Artificial Sequence: Synthetic oligonucleotide
  Sense Strand Starting at position 169 of SEQ ID NO: 318988
cauauacauggguggugaa

SEQ ID NO: 332112 - RNA, 19 nt, Artificial Sequence
  Description of Artificial Sequence: Synthetic oligonucleotide
  Antisense Strand to SEQ ID NO: 332111
uucaccacccauguauaug

SEQ ID NO: 332113 - RNA, 19 nt, Artificial Sequence
  Description of Artificial Sequence: Synthetic oligonucleotide
  Sense Strand Starting at position 169 of SEQ ID NO: 318989
auauacauggguggugaaa

SEQ ID NO: 332114 - RNA, 19 nt, Artificial Sequence
  Description of Artificial Sequence: Synthetic oligonucleotide
  Antisense Strand to SEQ ID NO: 332113
uuucaccacccauguauau

SEQ ID NO: 332115 - RNA, 19 nt, Artificial Sequence
  Description of Artificial Sequence: Synthetic oligonucleotide
  Sense Strand Starting at position 169 of SEQ ID NO: 319013
agguauugcaaguggaaua

SEQ ID NO: 332116 - RNA, 19 nt, Artificial Sequence
  Description of Artificial Sequence: Synthetic oligonucleotide
  Antisense Strand to SEQ ID NO: 332115
uauuccacuugcaauaccu

SEQ ID NO: 332117 - RNA, 19 nt, Artificial Sequence
  Description of Artificial Sequence: Synthetic oligonucleotide
  Sense Strand Starting at position 169 of SEQ ID NO: 319014
gguauugcaaguggaauaa

SEQ ID NO: 332118 - RNA, 19 nt, Artificial Sequence
  Description of Artificial Sequence: Synthetic oligonucleotide
  Antisense Strand to SEQ ID NO: 332117
uuauuccacuugcaauacc

SEQ ID NO: 332119 - RNA, 19 nt, Artificial Sequence
  Description of Artificial Sequence: Synthetic oligonucleotide
  Sense Strand Starting at position 169 of SEQ ID NO: 319025
uggaauaagugguuugcaa

SEQ ID NO: 332120 - RNA, 19 nt, Artificial Sequence
  Description of Artificial Sequence: Synthetic oligonucleotide
  Antisense Strand to SEQ ID NO: 332119
uugcaaaccacuuauucca

SEQ ID NO: 332121 - RNA, 19 nt, Artificial Sequence
  Description of Artificial Sequence: Synthetic oligonucleotide
  Sense Strand Starting at position 169 of SEQ ID NO: 319027
gaauaagugguuugcaaug

SEQ ID NO: 332122 - RNA, 19 nt, Artificial Sequence
  Description of Artificial Sequence: Synthetic oligonucleotide
  Antisense Strand to SEQ ID NO: 332121
cauugcaaaccacuuauuc

SEQ ID NO: 332123 - RNA, 19 nt, Artificial Sequence
  Description of Artificial Sequence: Synthetic oligonucleotide
  Sense Strand Starting at position 169 of SEQ ID NO: 319037
uuugcaaugccagaguaau

SEQ ID NO: 332124 - RNA, 19 nt, Artificial Sequence
  Description of Artificial Sequence: Synthetic oligonucleotide
  Antisense Strand to SEQ ID NO: 332123
auuacucuggcauugcaaa

SEQ ID NO: 332125 - RNA, 19 nt, Artificial Sequence
  Description of Artificial Sequence: Synthetic oligonucleotide
  Sense Strand Starting at position 169 of SEQ ID NO: 319073
aagguuaaagaguguuaug

SEQ ID NO: 332126 - RNA, 19 nt, Artificial Sequence
  Description of Artificial Sequence: Synthetic oligonucleotide
  Antisense Strand to SEQ ID NO: 332125
cauaacacucuuuaaccuu

SEQ ID NO: 332127 - RNA, 19 nt, Artificial Sequence
  Description of Artificial Sequence: Synthetic oligonucleotide
  Sense Strand Starting at position 169 of SEQ ID NO: 319084
guguuauggaaacagggua

SEQ ID NO: 332128 - RNA, 19 nt, Artificial Sequence
  Description of Artificial Sequence: Synthetic oligonucleotide
  Antisense Strand to SEQ ID NO: 332127
uacccuguuuccauaacac

SEQ ID NO: 332129 - RNA, 19 nt, Artificial Sequence
  Description of Artificial Sequence: Synthetic oligonucleotide
  Sense Strand Starting at position 169 of SEQ ID NO: 319180
aauuaaggaguaugugaug

SEQ ID NO: 332130 - RNA, 19 nt, Artificial Sequence
  Description of Artificial Sequence: Synthetic oligonucleotide
  Antisense Strand to SEQ ID NO: 332129
caucacauacuccuuaauu

SEQ ID NO: 332131 - RNA, 19 nt, Artificial Sequence
  Description of Artificial Sequence: Synthetic oligonucleotide
  Sense Strand Starting at position 170 of SEQ ID NO: 315281
cuaguucucuucccaguuu

SEQ ID NO: 332132 - RNA, 19 nt, Artificial Sequence
  Description of Artificial Sequence: Synthetic oligonucleotide
  Antisense Strand to SEQ ID NO: 332131
aaacugggaagagaacuag

SEQ ID NO: 332133 - RNA, 19 nt, Artificial Sequence
  Description of Artificial Sequence: Synthetic oligonucleotide
  Sense Strand Starting at position 170 of SEQ ID NO: 315333
ccugacuucuggcaguaca

SEQ ID NO: 332134 - RNA, 19 nt, Artificial Sequence
  Description of Artificial Sequence: Synthetic oligonucleotide
  Antisense Strand to SEQ ID NO: 332133
uguacugccagaagucagg

SEQ ID NO: 332135 - RNA, 19 nt, Artificial Sequence
  Description of Artificial Sequence: Synthetic oligonucleotide
  Sense Strand Starting at position 170 of SEQ ID NO: 315336
gacuucuggcaguacaaca

SEQ ID NO: 332136 - RNA, 19 nt, Artificial Sequence
  Description of Artificial Sequence: Synthetic oligonucleotide
  Antisense Strand to SEQ ID NO: 332135
uguuguacugccagaaguc

SEQ ID NO: 332137 - RNA, 19 nt, Artificial Sequence
  Description of Artificial Sequence: Synthetic oligonucleotide
  Sense Strand Starting at position 170 of SEQ ID NO: 315714
aggucugucucauccagca

SEQ ID NO: 332138 - RNA, 19 nt, Artificial Sequence
  Description of Artificial Sequence: Synthetic oligonucleotide
  Antisense Strand to SEQ ID NO: 332137
ugcuggaugagacagaccu

SEQ ID NO: 332139 - RNA, 19 nt, Artificial Sequence
  Description of Artificial Sequence: Synthetic oligonucleotide
  Sense Strand Starting at position 170 of SEQ ID NO: 315719
ugucucauccagcaggaga

SEQ ID NO: 332140 - RNA, 19 nt, Artificial Sequence
  Description of Artificial Sequence: Synthetic oligonucleotide
  Antisense Strand to SEQ ID NO: 332139
ucuccugcuggaugagaca

SEQ ID NO: 332141 - RNA, 19 nt, Artificial Sequence
  Description of Artificial Sequence: Synthetic oligonucleotide
  Sense Strand Starting at position 170 of SEQ ID NO: 315743
ggaguucucucccauuuau

SEQ ID NO: 332142 - RNA, 19 nt, Artificial Sequence
  Description of Artificial Sequence: Synthetic oligonucleotide
  Antisense Strand to SEQ ID NO: 332141
auaaaugggagagaacucc

SEQ ID NO: 332143 - RNA, 19 nt, Artificial Sequence
  Description of Artificial Sequence: Synthetic oligonucleotide
  Sense Strand Starting at position 170 of SEQ ID NO: 315752
ucccauuuaucagaugaag

SEQ ID NO: 332144 - RNA, 19 nt, Artificial Sequence
  Description of Artificial Sequence: Synthetic oligonucleotide
  Antisense Strand to SEQ ID NO: 332143
cuucaucugauaaauggga

SEQ ID NO: 332145 - RNA, 19 nt, Artificial Sequence
  Description of Artificial Sequence: Synthetic oligonucleotide
  Sense Strand Starting at position 170 of SEQ ID NO: 315777
gagacugagguuggaguua

SEQ ID NO: 332146 - RNA, 19 nt, Artificial Sequence
  Description of Artificial Sequence: Synthetic oligonucleotide
  Antisense Strand to SEQ ID NO: 332145
uaacuccaaccucagucuc

SEQ ID NO: 332147 - RNA, 19 nt, Artificial Sequence
  Description of Artificial Sequence: Synthetic oligonucleotide
  Sense Strand Starting at position 170 of SEQ ID NO: 316055
gggccucuggugugagauu

SEQ ID NO: 332148 - RNA, 19 nt, Artificial Sequence
  Description of Artificial Sequence: Synthetic oligonucleotide
  Antisense Strand to SEQ ID NO: 332147
aaucucacaccagaggccc

SEQ ID NO: 332149 - RNA, 19 nt, Artificial Sequence
  Description of Artificial Sequence: Synthetic oligonucleotide
  Sense Strand Starting at position 170 of SEQ ID NO: 316126
ggcagaaucuucuaggaaa

SEQ ID NO: 332150 - RNA, 19 nt, Artificial Sequence
  Description of Artificial Sequence: Synthetic oligonucleotide
  Antisense Strand to SEQ ID NO: 332149
uuuccuagaagauucugcc

SEQ ID NO: 332151 - RNA, 19 nt, Artificial Sequence
  Description of Artificial Sequence: Synthetic oligonucleotide
  Sense Strand Starting at position 170 of SEQ ID NO: 316129
agaaucuucuaggaaagga

SEQ ID NO: 332152 - RNA, 19 nt, Artificial Sequence
  Description of Artificial Sequence: Synthetic oligonucleotide
  Antisense Strand to SEQ ID NO: 332151
uccuuuccuagaagauucu

SEQ ID NO: 332153 - RNA, 19 nt, Artificial Sequence
  Description of Artificial Sequence: Synthetic oligonucleotide
  Sense Strand Starting at position 170 of SEQ ID NO: 316321
cgugacaccugaucauaca

SEQ ID NO: 332154 - RNA, 19 nt, Artificial Sequence
  Description of Artificial Sequence: Synthetic oligonucleotide
  Antisense Strand to SEQ ID NO: 332153
uguaugaucaggugucacg

SEQ ID NO: 332155 - RNA, 19 nt, Artificial Sequence
  Description of Artificial Sequence: Synthetic oligonucleotide
  Sense Strand Starting at position 170 of SEQ ID NO: 316988
guggccacuccuugggaaa

SEQ ID NO: 332156 - RNA, 19 nt, Artificial Sequence
  Description of Artificial Sequence: Synthetic oligonucleotide
  Antisense Strand to SEQ ID NO: 332155
uuucccaaggaguggccac

SEQ ID NO: 332157 - RNA, 19 nt, Artificial Sequence
  Description of Artificial Sequence: Synthetic oligonucleotide
  Sense Strand Starting at position 170 of SEQ ID NO: 317241
cucugaugucaguggaggu

SEQ ID NO: 332158 - RNA, 19 nt, Artificial Sequence
  Description of Artificial Sequence: Synthetic oligonucleotide
  Antisense Strand to SEQ ID NO: 332157
accuccacugacaucagag

SEQ ID NO: 332159 - RNA, 19 nt, Artificial Sequence
  Description of Artificial Sequence: Synthetic oligonucleotide
  Sense Strand Starting at position 170 of SEQ ID NO: 317342
cccugcuucuggucagaga

SEQ ID NO: 332160 - RNA, 19 nt, Artificial Sequence
  Description of Artificial Sequence: Synthetic oligonucleotide
  Antisense Strand to SEQ ID NO: 332159
ucucugaccagaagcaggg

SEQ ID NO: 332161 - RNA, 19 nt, Artificial Sequence
  Description of Artificial Sequence: Synthetic oligonucleotide
  Sense Strand Starting at position 170 of SEQ ID NO: 317343
ccugcuucuggucagagau

SEQ ID NO: 332162 - RNA, 19 nt, Artificial Sequence
  Description of Artificial Sequence: Synthetic oligonucleotide
  Antisense Strand to SEQ ID NO: 332161
aucucugaccagaagcagg

SEQ ID NO: 332163 - RNA, 19 nt, Artificial Sequence
  Description of Artificial Sequence: Synthetic oligonucleotide
  Sense Strand Starting at position 170 of SEQ ID NO: 317345
ugcuucuggucagagaucu

SEQ ID NO: 332164 - RNA, 19 nt, Artificial Sequence
  Description of Artificial Sequence: Synthetic oligonucleotide
  Antisense Strand to SEQ ID NO: 332163
agaucucugaccagaagca

SEQ ID NO: 332165 - RNA, 19 nt, Artificial Sequence
  Description of Artificial Sequence: Synthetic oligonucleotide
  Sense Strand Starting at position 170 of SEQ ID NO: 317745
cccgguuccucugcaagau

SEQ ID NO: 332166 - RNA, 19 nt, Artificial Sequence
  Description of Artificial Sequence: Synthetic oligonucleotide
  Antisense Strand to SEQ ID NO: 332165
aucuugcagaggaaccggg

SEQ ID NO: 332167 - RNA, 19 nt, Artificial Sequence
  Description of Artificial Sequence: Synthetic oligonucleotide
  Sense Strand Starting at position 170 of SEQ ID NO: 317808
gguggugccuagagguauu

SEQ ID NO: 332168 - RNA, 19 nt, Artificial Sequence
  Description of Artificial Sequence: Synthetic oligonucleotide
  Antisense Strand to SEQ ID NO: 332167
aauaccucuaggcaccacc

SEQ ID NO: 332169 - RNA, 19 nt, Artificial Sequence
  Description of Artificial Sequence: Synthetic oligonucleotide
  Sense Strand Starting at position 170 of SEQ ID NO: 317852
gaaguuaaaucgggauccu

SEQ ID NO: 332170 - RNA, 19 nt, Artificial Sequence
  Description of Artificial Sequence: Synthetic oligonucleotide
  Antisense Strand to SEQ ID NO: 332169
aggaucccgauuuaacuuc

SEQ ID NO: 332171 - RNA, 19 nt, Artificial Sequence
  Description of Artificial Sequence: Synthetic oligonucleotide
  Sense Strand Starting at position 170 of SEQ ID NO: 318004
aaggccuuccuugggaaga

SEQ ID NO: 332172 - RNA, 19 nt, Artificial Sequence
  Description of Artificial Sequence: Synthetic oligonucleotide
  Antisense Strand to SEQ ID NO: 332171
ucuucccaaggaaggccuu

SEQ ID NO: 332173 - RNA, 19 nt, Artificial Sequence
  Description of Artificial Sequence: Synthetic oligonucleotide
  Sense Strand Starting at position 170 of SEQ ID NO: 318018
gaagaaauuuggugccgag

SEQ ID NO: 332174 - RNA, 19 nt, Artificial Sequence
  Description of Artificial Sequence: Synthetic oligonucleotide
  Antisense Strand to SEQ ID NO: 332173
cucggcaccaaauuucuuc

SEQ ID NO: 332175 - RNA, 19 nt, Artificial Sequence
  Description of Artificial Sequence: Synthetic oligonucleotide
  Sense Strand Starting at position 170 of SEQ ID NO: 318054
gggagcaacucgcaggaau

SEQ ID NO: 332176 - RNA, 19 nt, Artificial Sequence
  Description of Artificial Sequence: Synthetic oligonucleotide
  Antisense Strand to SEQ ID NO: 332175
auuccugcgaguugcuccc

SEQ ID NO: 332177 - RNA, 19 nt, Artificial Sequence
  Description of Artificial Sequence: Synthetic oligonucleotide
  Sense Strand Starting at position 170 of SEQ ID NO: 318167
ugaauucuugcauguucca

SEQ ID NO: 332178 - RNA, 19 nt, Artificial Sequence
  Description of Artificial Sequence: Synthetic oligonucleotide
  Antisense Strand to SEQ ID NO: 332177
uggaacaugcaagaauuca

SEQ ID NO: 332179 - RNA, 19 nt, Artificial Sequence
  Description of Artificial Sequence: Synthetic oligonucleotide
  Sense Strand Starting at position 170 of SEQ ID NO: 318176
gcauguuccagcuggugau

SEQ ID NO: 332180 - RNA, 19 nt, Artificial Sequence
  Description of Artificial Sequence: Synthetic oligonucleotide
  Antisense Strand to SEQ ID NO: 332179
aucaccagcuggaacaugc

SEQ ID NO: 332181 - RNA, 19 nt, Artificial Sequence
  Description of Artificial Sequence: Synthetic oligonucleotide
  Sense Strand Starting at position 170 of SEQ ID NO: 318196
gggagagaacagugcuuau

SEQ ID NO: 332182 - RNA, 19 nt, Artificial Sequence
  Description of Artificial Sequence: Synthetic oligonucleotide
  Antisense Strand to SEQ ID NO: 332181
auaagcacuguucucuccc

SEQ ID NO: 332183 - RNA, 19 nt, Artificial Sequence
  Description of Artificial Sequence: Synthetic oligonucleotide
  Sense Strand Starting at position 170 of SEQ ID NO: 318605
gaggaagauagcugagguu

SEQ ID NO: 332184 - RNA, 19 nt, Artificial Sequence
  Description of Artificial Sequence: Synthetic oligonucleotide
  Antisense Strand to SEQ ID NO: 332183
aaccucagcuaucuuccuc

SEQ ID NO: 332185 - RNA, 19 nt, Artificial Sequence
  Description of Artificial Sequence: Synthetic oligonucleotide
  Sense Strand Starting at position 170 of SEQ ID NO: 318614
agcugagguuccuggaaag

SEQ ID NO: 332186 - RNA, 19 nt, Artificial Sequence
  Description of Artificial Sequence: Synthetic oligonucleotide
  Antisense Strand to SEQ ID NO: 332185
cuuuccaggaaccucagcu

SEQ ID NO: 332187 - RNA, 19 nt, Artificial Sequence
  Description of Artificial Sequence: Synthetic oligonucleotide
  Sense Strand Starting at position 170 of SEQ ID NO: 318632
ggcuuuggagucuaacuga

SEQ ID NO: 332188 - RNA, 19 nt, Artificial Sequence
  Description of Artificial Sequence: Synthetic oligonucleotide
  Antisense Strand to SEQ ID NO: 332187
ucaguuagacuccaaagcc

SEQ ID NO: 332189 - RNA, 19 nt, Artificial Sequence
  Description of Artificial Sequence: Synthetic oligonucleotide
  Sense Strand Starting at position 170 of SEQ ID NO: 318639
gagucuaacugauccuggu

SEQ ID NO: 332190 - RNA, 19 nt, Artificial Sequence
  Description of Artificial Sequence: Synthetic oligonucleotide
  Antisense Strand to SEQ ID NO: 332189
accaggaucaguuagacuc

SEQ ID NO: 332191 - RNA, 19 nt, Artificial Sequence
  Description of Artificial Sequence: Synthetic oligonucleotide
  Sense Strand Starting at position 170 of SEQ ID NO: 318642
ucuaacugauccuggucau

SEQ ID NO: 332192 - RNA, 19 nt, Artificial Sequence
  Description of Artificial Sequence: Synthetic oligonucleotide
  Antisense Strand to SEQ ID NO: 332191
augaccaggaucaguuaga

SEQ ID NO: 332193 - RNA, 19 nt, Artificial Sequence
  Description of Artificial Sequence: Synthetic oligonucleotide
  Sense Strand Starting at position 170 of SEQ ID NO: 318679
ucaguuucuuacucgggaa

SEQ ID NO: 332194 - RNA, 19 nt, Artificial Sequence
  Description of Artificial Sequence: Synthetic oligonucleotide
  Antisense Strand to SEQ ID NO: 332193
uucccgaguaagaaacuga

SEQ ID NO: 332195 - RNA, 19 nt, Artificial Sequence
  Description of Artificial Sequence: Synthetic oligonucleotide
  Sense Strand Starting at position 170 of SEQ ID NO: 318681
aguuucuuacucgggaaca

SEQ ID NO: 332196 - RNA, 19 nt, Artificial Sequence
  Description of Artificial Sequence: Synthetic oligonucleotide
  Antisense Strand to SEQ ID NO: 332195
uguucccgaguaagaaacu

SEQ ID NO: 332197 - RNA, 19 nt, Artificial Sequence
  Description of Artificial Sequence: Synthetic oligonucleotide
  Sense Strand Starting at position 170 of SEQ ID NO: 318683
uuucuuacucgggaacaug

SEQ ID NO: 332198 - RNA, 19 nt, Artificial Sequence
  Description of Artificial Sequence: Synthetic oligonucleotide
  Antisense Strand to SEQ ID NO: 332197
cauguucccgaguaagaaa

SEQ ID NO: 332199 - RNA, 19 nt, Artificial Sequence
  Description of Artificial Sequence: Synthetic oligonucleotide
  Sense Strand Starting at position 170 of SEQ ID NO: 318691
ucgggaacaugggaauauu

SEQ ID NO: 332200 - RNA, 19 nt, Artificial Sequence
  Description of Artificial Sequence: Synthetic oligonucleotide
  Antisense Strand to SEQ ID NO: 332199
aauauucccauguucccga

SEQ ID NO: 332201 - RNA, 19 nt, Artificial Sequence
  Description of Artificial Sequence: Synthetic oligonucleotide
  Sense Strand Starting at position 170 of SEQ ID NO: 318717
gacucagaguucugagaau

SEQ ID NO: 332202 - RNA, 19 nt, Artificial Sequence
  Description of Artificial Sequence: Synthetic oligonucleotide
  Antisense Strand to SEQ ID NO: 332201
auucucagaacucugaguc

SEQ ID NO: 332203 - RNA, 19 nt, Artificial Sequence
  Description of Artificial Sequence: Synthetic oligonucleotide
  Sense Strand Starting at position 170 of SEQ ID NO: 318726
uucugagaauucuaugaua

SEQ ID NO: 332204 - RNA, 19 nt, Artificial Sequence
  Description of Artificial Sequence: Synthetic oligonucleotide
  Antisense Strand to SEQ ID NO: 332203
uaucauagaauucucagaa

SEQ ID NO: 332205 - RNA, 19 nt, Artificial Sequence
  Description of Artificial Sequence: Synthetic oligonucleotide
  Sense Strand Starting at position 170 of SEQ ID NO: 318782
gagagcuagacucagugua

SEQ ID NO: 332206 - RNA, 19 nt, Artificial Sequence
  Description of Artificial Sequence: Synthetic oligonucleotide
  Antisense Strand to SEQ ID NO: 332205
uacacugagucuagcucuc

SEQ ID NO: 332207 - RNA, 19 nt, Artificial Sequence
  Description of Artificial Sequence: Synthetic oligonucleotide
  Sense Strand Starting at position 170 of SEQ ID NO: 318784
gagcuagacucaguguaaa

SEQ ID NO: 332208 - RNA, 19 nt, Artificial Sequence
  Description of Artificial Sequence: Synthetic oligonucleotide
  Antisense Strand to SEQ ID NO: 332207
uuuacacugagucuagcuc

SEQ ID NO: 332209 - RNA, 19 nt, Artificial Sequence
  Description of Artificial Sequence: Synthetic oligonucleotide
  Sense Strand Starting at position 170 of SEQ ID NO: 319035
uguccuuucgaggacuugu

SEQ ID NO: 332210 - RNA, 19 nt, Artificial Sequence
  Description of Artificial Sequence: Synthetic oligonucleotide
  Antisense Strand to SEQ ID NO: 332209
acaaguccucgaaaggaca

SEQ ID NO: 332211 - RNA, 19 nt, Artificial Sequence
  Description of Artificial Sequence: Synthetic oligonucleotide
  Sense Strand Starting at position 171 of SEQ ID NO: 315370
aacaaagagucggauauaa

SEQ ID NO: 332212 - RNA, 19 nt, Artificial Sequence
  Description of Artificial Sequence: Synthetic oligonucleotide
  Antisense Strand to SEQ ID NO: 332211
uuauauccgacucuuuguu

SEQ ID NO: 332213 - RNA, 19 nt, Artificial Sequence
  Description of Artificial Sequence: Synthetic oligonucleotide
  Sense Strand Starting at position 171 of SEQ ID NO: 315391
auacaaaugugcugaggaa

SEQ ID NO: 332214 - RNA, 19 nt, Artificial Sequence
  Description of Artificial Sequence: Synthetic oligonucleotide
  Antisense Strand to SEQ ID NO: 332213
uuccucagcacauuuguau

SEQ ID NO: 332215 - RNA, 19 nt, Artificial Sequence
  Description of Artificial Sequence: Synthetic oligonucleotide
  Sense Strand Starting at position 171 of SEQ ID NO: 316276
ucccucugaguugaucaga

SEQ ID NO: 332216 - RNA, 19 nt, Artificial Sequence
  Description of Artificial Sequence: Synthetic oligonucleotide
  Antisense Strand to SEQ ID NO: 332215
ucugaucaacucagaggga

SEQ ID NO: 332217 - RNA, 19 nt, Artificial Sequence
  Description of Artificial Sequence: Synthetic oligonucleotide
  Sense Strand Starting at position 171 of SEQ ID NO: 316281
cugaguugaucagaaaccu

SEQ ID NO: 332218 - RNA, 19 nt, Artificial Sequence
  Description of Artificial Sequence: Synthetic oligonucleotide
  Antisense Strand to SEQ ID NO: 332217
agguuucugaucaacucag

SEQ ID NO: 332219 - RNA, 19 nt, Artificial Sequence
  Description of Artificial Sequence: Synthetic oligonucleotide
  Sense Strand Starting at position 171 of SEQ ID NO: 316527
acccgaagguucuucguau

SEQ ID NO: 332220 - RNA, 19 nt, Artificial Sequence
  Description of Artificial Sequence: Synthetic oligonucleotide
  Antisense Strand to SEQ ID NO: 332219
auacgaagaaccuucgggu

SEQ ID NO: 332221 - RNA, 19 nt, Artificial Sequence
  Description of Artificial Sequence: Synthetic oligonucleotide
  Sense Strand Starting at position 171 of SEQ ID NO: 316528
cccgaagguucuucguauu

SEQ ID NO: 332222 - RNA, 19 nt, Artificial Sequence
  Description of Artificial Sequence: Synthetic oligonucleotide
  Antisense Strand to SEQ ID NO: 332221
aauacgaagaaccuucggg

SEQ ID NO: 332223 - RNA, 19 nt, Artificial Sequence
  Description of Artificial Sequence: Synthetic oligonucleotide
  Sense Strand Starting at position 171 of SEQ ID NO: 316541
cguauuguccaccgacuca

SEQ ID NO: 332224 - RNA, 19 nt, Artificial Sequence
  Description of Artificial Sequence: Synthetic oligonucleotide
  Antisense Strand to SEQ ID NO: 332223
ugagucgguggacaauacg

SEQ ID NO: 332225 - RNA, 19 nt, Artificial Sequence
  Description of Artificial Sequence: Synthetic oligonucleotide
  Sense Strand Starting at position 171 of SEQ ID NO: 316559
aguauuugaucccaaagaa

SEQ ID NO: 332226 - RNA, 19 nt, Artificial Sequence
  Description of Artificial Sequence: Synthetic oligonucleotide
  Antisense Strand to SEQ ID NO: 332225
uucuuugggaucaaauacu

SEQ ID NO: 332227 - RNA, 19 nt, Artificial Sequence
  Description of Artificial Sequence: Synthetic oligonucleotide
  Sense Strand Starting at position 171 of SEQ ID NO: 316695
caccguguucccgggagaa

SEQ ID NO: 332228 - RNA, 19 nt, Artificial Sequence
  Description of Artificial Sequence: Synthetic oligonucleotide
  Antisense Strand to SEQ ID NO: 332227
uucucccgggaacacggug

SEQ ID NO: 332229 - RNA, 19 nt, Artificial Sequence
  Description of Artificial Sequence: Synthetic oligonucleotide
  Sense Strand Starting at position 171 of SEQ ID NO: 316696
accguguucccgggagaag

SEQ ID NO: 332230 - RNA, 19 nt, Artificial Sequence
  Description of Artificial Sequence: Synthetic oligonucleotide
  Antisense Strand to SEQ ID NO: 332229
cuucucccgggaacacggu

SEQ ID NO: 332231 - RNA, 19 nt, Artificial Sequence
  Description of Artificial Sequence: Synthetic oligonucleotide
  Sense Strand Starting at position 171 of SEQ ID NO: 316934
ccugguugcccgcgaagaa

SEQ ID NO: 332232 - RNA, 19 nt, Artificial Sequence
  Description of Artificial Sequence: Synthetic oligonucleotide
  Antisense Strand to SEQ ID NO: 332231
uucuucgcgggcaaccagg

SEQ ID NO: 332233 - RNA, 19 nt, Artificial Sequence
  Description of Artificial Sequence: Synthetic oligonucleotide
  Sense Strand Starting at position 171 of SEQ ID NO: 317021
ccaucuugucuucgcugua

SEQ ID NO: 332234 - RNA, 19 nt, Artificial Sequence
  Description of Artificial Sequence: Synthetic oligonucleotide
  Antisense Strand to SEQ ID NO: 332233
uacagcgaagacaagaugg

SEQ ID NO: 332235 - RNA, 19 nt, Artificial Sequence
  Description of Artificial Sequence: Synthetic oligonucleotide
  Sense Strand Starting at position 171 of SEQ ID NO: 317843
guugcucugcuggucuuaa

SEQ ID NO: 332236 - RNA, 19 nt, Artificial Sequence
  Description of Artificial Sequence: Synthetic oligonucleotide
  Antisense Strand to SEQ ID NO: 332235
uuaagaccagcagagcaac

SEQ ID NO: 332237 - RNA, 19 nt, Artificial Sequence
  Description of Artificial Sequence: Synthetic oligonucleotide
  Sense Strand Starting at position 171 of SEQ ID NO: 317858
uuaaguagaucgucagggu

SEQ ID NO: 332238 - RNA, 19 nt, Artificial Sequence
  Description of Artificial Sequence: Synthetic oligonucleotide
  Antisense Strand to SEQ ID NO: 332237
acccugacgaucuacuuaa

SEQ ID NO: 332239 - RNA, 19 nt, Artificial Sequence
  Description of Artificial Sequence: Synthetic oligonucleotide
  Sense Strand Starting at position 171 of SEQ ID NO: 317936
ucucuaagugucuguaucu

SEQ ID NO: 332240 - RNA, 19 nt, Artificial Sequence
  Description of Artificial Sequence: Synthetic oligonucleotide
  Antisense Strand to SEQ ID NO: 332239
agauacagacacuuagaga

SEQ ID NO: 332241 - RNA, 19 nt, Artificial Sequence
  Description of Artificial Sequence: Synthetic oligonucleotide
  Sense Strand Starting at position 171 of SEQ ID NO: 317973
uaucucuuucgcuguguua

SEQ ID NO: 332242 - RNA, 19 nt, Artificial Sequence
  Description of Artificial Sequence: Synthetic oligonucleotide
  Antisense Strand to SEQ ID NO: 332241
uaacacagcgaaagagaua

SEQ ID NO: 332243 - RNA, 19 nt, Artificial Sequence
  Description of Artificial Sequence: Synthetic oligonucleotide
  Sense Strand Starting at position 171 of SEQ ID NO: 317974
aucucuuucgcuguguuau

SEQ ID NO: 332244 - RNA, 19 nt, Artificial Sequence
  Description of Artificial Sequence: Synthetic oligonucleotide
  Antisense Strand to SEQ ID NO: 332243
auaacacagcgaaagagau

SEQ ID NO: 332245 - RNA, 19 nt, Artificial Sequence
  Description of Artificial Sequence: Synthetic oligonucleotide
  Sense Strand Starting at position 171 of SEQ ID NO: 317985
uguguuauggccuuugucu

SEQ ID NO: 332246 - RNA, 19 nt, Artificial Sequence
  Description of Artificial Sequence: Synthetic oligonucleotide
  Antisense Strand to SEQ ID NO: 332245
agacaaaggccauaacaca

SEQ ID NO: 332247 - RNA, 19 nt, Artificial Sequence
  Description of Artificial Sequence: Synthetic oligonucleotide
  Sense Strand Starting at position 171 of SEQ ID NO: 317987
uguuauggccuuugucuau

SEQ ID NO: 332248 - RNA, 19 nt, Artificial Sequence
  Description of Artificial Sequence: Synthetic oligonucleotide
  Antisense Strand to SEQ ID NO: 332247
auagacaaaggccauaaca

SEQ ID NO: 332249 - RNA, 19 nt, Artificial Sequence
  Description of Artificial Sequence: Synthetic oligonucleotide
  Sense Strand Starting at position 171 of SEQ ID NO: 318000
gucuaugccugucccuuaa

SEQ ID NO: 332250 - RNA, 19 nt, Artificial Sequence
  Description of Artificial Sequence: Synthetic oligonucleotide
  Antisense Strand to SEQ ID NO: 332249
uuaagggacaggcauagac

SEQ ID NO: 332251 - RNA, 19 nt, Artificial Sequence
  Description of Artificial Sequence: Synthetic oligonucleotide
  Sense Strand Starting at position 171 of SEQ ID NO: 318021
gucugccuuucucuaucua

SEQ ID NO: 332252 - RNA, 19 nt, Artificial Sequence
  Description of Artificial Sequence: Synthetic oligonucleotide
  Antisense Strand to SEQ ID NO: 332251
uagauagagaaaggcagac

SEQ ID NO: 332253 - RNA, 19 nt, Artificial Sequence
  Description of Artificial Sequence: Synthetic oligonucleotide
  Sense Strand Starting at position 171 of SEQ ID NO: 318055
ccuguaucucugugccagu

SEQ ID NO: 332254 - RNA, 19 nt, Artificial Sequence
  Description of Artificial Sequence: Synthetic oligonucleotide
  Antisense Strand to SEQ ID NO: 332253
acuggcacagagauacagg

SEQ ID NO: 332255 - RNA, 19 nt, Artificial Sequence
  Description of Artificial Sequence: Synthetic oligonucleotide
  Sense Strand Starting at position 171 of SEQ ID NO: 318072
gugucuccgucuccugaau

SEQ ID NO: 332256 - RNA, 19 nt, Artificial Sequence
  Description of Artificial Sequence: Synthetic oligonucleotide
  Antisense Strand to SEQ ID NO: 332255
auucaggagacggagacac

SEQ ID NO: 332257 - RNA, 19 nt, Artificial Sequence
  Description of Artificial Sequence: Synthetic oligonucleotide
  Sense Strand Starting at position 171 of SEQ ID NO: 318324
gagggagugcgguagagau

SEQ ID NO: 332258 - RNA, 19 nt, Artificial Sequence
  Description of Artificial Sequence: Synthetic oligonucleotide
  Antisense Strand to SEQ ID NO: 332257
aucucuaccgcacucccuc

SEQ ID NO: 332259 - RNA, 19 nt, Artificial Sequence
  Description of Artificial Sequence: Synthetic oligonucleotide
  Sense Strand Starting at position 171 of SEQ ID NO: 318382
gaguucucgccucaccgau

SEQ ID NO: 332260 - RNA, 19 nt, Artificial Sequence
  Description of Artificial Sequence: Synthetic oligonucleotide
  Antisense Strand to SEQ ID NO: 332259
aucggugaggcgagaacuc

SEQ ID NO: 332261 - RNA, 19 nt, Artificial Sequence
  Description of Artificial Sequence: Synthetic oligonucleotide
  Sense Strand Starting at position 171 of SEQ ID NO: 318491
gcaggagcucuggcgcaau

SEQ ID NO: 332262 - RNA, 19 nt, Artificial Sequence
  Description of Artificial Sequence: Synthetic oligonucleotide
  Antisense Strand to SEQ ID NO: 332261
auugcgccagagcuccugc

SEQ ID NO: 332263 - RNA, 19 nt, Artificial Sequence
  Description of Artificial Sequence: Synthetic oligonucleotide
  Sense Strand Starting at position 171 of SEQ ID NO: 318571
cgguaaugaucacccugua

SEQ ID NO: 332264 - RNA, 19 nt, Artificial Sequence
  Description of Artificial Sequence: Synthetic oligonucleotide
  Antisense Strand to SEQ ID NO: 332263
uacagggugaucauuaccg

SEQ ID NO: 332265 - RNA, 19 nt, Artificial Sequence
  Description of Artificial Sequence: Synthetic oligonucleotide
  Sense Strand Starting at position 171 of SEQ ID NO: 318574
uaaugaucacccuguacgu

SEQ ID NO: 332266 - RNA, 19 nt, Artificial Sequence
  Description of Artificial Sequence: Synthetic oligonucleotide
  Antisense Strand to SEQ ID NO: 332265
acguacagggugaucauua

SEQ ID NO: 332267 - RNA, 19 nt, Artificial Sequence
  Description of Artificial Sequence: Synthetic oligonucleotide
  Sense Strand Starting at position 171 of SEQ ID NO: 318613
acgcgcuuuccuuccuuaa

SEQ ID NO: 332268 - RNA, 19 nt, Artificial Sequence
  Description of Artificial Sequence: Synthetic oligonucleotide
  Antisense Strand to SEQ ID NO: 332267
uuaaggaaggaaagcgcgu

SEQ ID NO: 332269 - RNA, 19 nt, Artificial Sequence
  Description of Artificial Sequence: Synthetic oligonucleotide
  Sense Strand Starting at position 171 of SEQ ID NO: 318614
cgcgcuuuccuuccuuaau

SEQ ID NO: 332270 - RNA, 19 nt, Artificial Sequence
  Description of Artificial Sequence: Synthetic oligonucleotide
  Antisense Strand to SEQ ID NO: 332269
auuaaggaaggaaagcgcg

SEQ ID NO: 332271 - RNA, 19 nt, Artificial Sequence
  Description of Artificial Sequence: Synthetic oligonucleotide
  Sense Strand Starting at position 171 of SEQ ID NO: 318615
gcgcuuuccuuccuuaauc

SEQ ID NO: 332272 - RNA, 19 nt, Artificial Sequence
  Description of Artificial Sequence: Synthetic oligonucleotide
  Antisense Strand to SEQ ID NO: 332271
gauuaaggaaggaaagcgc

SEQ ID NO: 332273 - RNA, 19 nt, Artificial Sequence
  Description of Artificial Sequence: Synthetic oligonucleotide
  Sense Strand Starting at position 171 of SEQ ID NO: 318694
acuuucucgccagguguua

SEQ ID NO: 332274 - RNA, 19 nt, Artificial Sequence
  Description of Artificial Sequence: Synthetic oligonucleotide
  Antisense Strand to SEQ ID NO: 332273
uaacaccuggcgagaaagu

SEQ ID NO: 332275 - RNA, 19 nt, Artificial Sequence
  Description of Artificial Sequence: Synthetic oligonucleotide
  Sense Strand Starting at position 171 of SEQ ID NO: 318696
uuucucgccagguguuaau

SEQ ID NO: 332276 - RNA, 19 nt, Artificial Sequence
  Description of Artificial Sequence: Synthetic oligonucleotide
  Antisense Strand to SEQ ID NO: 332275
auuaacaccuggcgagaaa

SEQ ID NO: 332277 - RNA, 19 nt, Artificial Sequence
  Description of Artificial Sequence: Synthetic oligonucleotide
  Sense Strand Starting at position 171 of SEQ ID NO: 318706
gguguuaauaccggagaca

SEQ ID NO: 332278 - RNA, 19 nt, Artificial Sequence
  Description of Artificial Sequence: Synthetic oligonucleotide
  Antisense Strand to SEQ ID NO: 332277
ugucuccgguauuaacacc

SEQ ID NO: 332279 - RNA, 19 nt, Artificial Sequence
  Description of Artificial Sequence: Synthetic oligonucleotide
  Sense Strand Starting at position 171 of SEQ ID NO: 318707
guguuaauaccggagacac

SEQ ID NO: 332280 - RNA, 19 nt, Artificial Sequence
  Description of Artificial Sequence: Synthetic oligonucleotide
  Antisense Strand to SEQ ID NO: 332279
gugucuccgguauuaacac

SEQ ID NO: 332281 - RNA, 19 nt, Artificial Sequence
  Description of Artificial Sequence: Synthetic oligonucleotide
  Sense Strand Starting at position 171 of SEQ ID NO: 318770
ggcgguaugccacaggaua

SEQ ID NO: 332282 - RNA, 19 nt, Artificial Sequence
  Description of Artificial Sequence: Synthetic oligonucleotide
  Antisense Strand to SEQ ID NO: 332281
uauccuguggcauaccgcc

SEQ ID NO: 332283 - RNA, 19 nt, Artificial Sequence
  Description of Artificial Sequence: Synthetic oligonucleotide
  Sense Strand Starting at position 171 of SEQ ID NO: 318991
acuggaaguuguccaguaa

SEQ ID NO: 332284 - RNA, 19 nt, Artificial Sequence
  Description of Artificial Sequence: Synthetic oligonucleotide
  Antisense Strand to SEQ ID NO: 332283
uuacuggacaacuuccagu

SEQ ID NO: 332285 - RNA, 19 nt, Artificial Sequence
  Description of Artificial Sequence: Synthetic oligonucleotide
  Sense Strand Starting at position 171 of SEQ ID NO: 318992
cuggaaguuguccaguaau

SEQ ID NO: 332286 - RNA, 19 nt, Artificial Sequence
  Description of Artificial Sequence: Synthetic oligonucleotide
  Antisense Strand to SEQ ID NO: 332285
auuacuggacaacuuccag

SEQ ID NO: 332287 - RNA, 19 nt, Artificial Sequence
  Description of Artificial Sequence: Synthetic oligonucleotide
  Sense Strand Starting at position 171 of SEQ ID NO: 319029
ccacuuucucagugaccuu

SEQ ID NO: 332288 - RNA, 19 nt, Artificial Sequence
  Description of Artificial Sequence: Synthetic oligonucleotide
  Antisense Strand to SEQ ID NO: 332287
aaggucacugagaaagugg

SEQ ID NO: 332289 - RNA, 19 nt, Artificial Sequence
  Description of Artificial Sequence: Synthetic oligonucleotide
  Sense Strand Starting at position 171 of SEQ ID NO: 319032
cuuucucagugaccuugaa

SEQ ID NO: 332290 - RNA, 19 nt, Artificial Sequence
  Description of Artificial Sequence: Synthetic oligonucleotide
  Antisense Strand to SEQ ID NO: 332289
uucaaggucacugagaaag

SEQ ID NO: 332291 - RNA, 19 nt, Artificial Sequence
  Description of Artificial Sequence: Synthetic oligonucleotide
  Sense Strand Starting at position 172 of SEQ ID NO: 315242
ccaggagcuauccauggua

SEQ ID NO: 332292 - RNA, 19 nt, Artificial Sequence
  Description of Artificial Sequence: Synthetic oligonucleotide
  Antisense Strand to SEQ ID NO: 332291
uaccauggauagcuccugg

SEQ ID NO: 332293 - RNA, 19 nt, Artificial Sequence
  Description of Artificial Sequence: Synthetic oligonucleotide
  Sense Strand Starting at position 172 of SEQ ID NO: 315244
aggagcuauccaugguacu

SEQ ID NO: 332294 - RNA, 19 nt, Artificial Sequence
  Description of Artificial Sequence: Synthetic oligonucleotide
  Antisense Strand to SEQ ID NO: 332293
aguaccauggauagcuccu

SEQ ID NO: 332295 - RNA, 19 nt, Artificial Sequence
  Description of Artificial Sequence: Synthetic oligonucleotide
  Sense Strand Starting at position 172 of SEQ ID NO: 315245
ggagcuauccaugguacug

SEQ ID NO: 332296 - RNA, 19 nt, Artificial Sequence
  Description of Artificial Sequence: Synthetic oligonucleotide
  Antisense Strand to SEQ ID NO: 332295
caguaccauggauagcucc

SEQ ID NO: 332297 - RNA, 19 nt, Artificial Sequence
  Description of Artificial Sequence: Synthetic oligonucleotide
  Sense Strand Starting at position 172 of SEQ ID NO: 315445
gcagguccaacauguugaa

SEQ ID NO: 332298 - RNA, 19 nt, Artificial Sequence
  Description of Artificial Sequence: Synthetic oligonucleotide
  Antisense Strand to SEQ ID NO: 332297
uucaacauguuggaccugc

SEQ ID NO: 332299 - RNA, 19 nt, Artificial Sequence
  Description of Artificial Sequence: Synthetic oligonucleotide
  Sense Strand Starting at position 172 of SEQ ID NO: 315502
cuggcugcuucccuuuaua

SEQ ID NO: 332300 - RNA, 19 nt, Artificial Sequence
  Description of Artificial Sequence: Synthetic oligonucleotide
  Antisense Strand to SEQ ID NO: 332299
uauaaagggaagcagccag

SEQ ID NO: 332301 - RNA, 19 nt, Artificial Sequence
  Description of Artificial Sequence: Synthetic oligonucleotide
  Sense Strand Starting at position 172 of SEQ ID NO: 315942
accugacucugaguggaga

SEQ ID NO: 332302 - RNA, 19 nt, Artificial Sequence
  Description of Artificial Sequence: Synthetic oligonucleotide
  Antisense Strand to SEQ ID NO: 332301
ucuccacucagagucaggu

SEQ ID NO: 332303 - RNA, 19 nt, Artificial Sequence
  Description of Artificial Sequence: Synthetic oligonucleotide
  Sense Strand Starting at position 172 of SEQ ID NO: 316039
gcaccaggucucuaaaggu

SEQ ID NO: 332304 - RNA, 19 nt, Artificial Sequence
  Description of Artificial Sequence: Synthetic oligonucleotide
  Antisense Strand to SEQ ID NO: 332303
accuuuagagaccuggugc

SEQ ID NO: 332305 - RNA, 19 nt, Artificial Sequence
  Description of Artificial Sequence: Synthetic oligonucleotide
  Sense Strand Starting at position 172 of SEQ ID NO: 316152
gggcccugauccuuaggaa

SEQ ID NO: 332306 - RNA, 19 nt, Artificial Sequence
  Description of Artificial Sequence: Synthetic oligonucleotide
  Antisense Strand to SEQ ID NO: 332305
uuccuaaggaucagggccc

SEQ ID NO: 332307 - RNA, 19 nt, Artificial Sequence
  Description of Artificial Sequence: Synthetic oligonucleotide
  Sense Strand Starting at position 172 of SEQ ID NO: 316153
ggcccugauccuuaggaag

SEQ ID NO: 332308 - RNA, 19 nt, Artificial Sequence
  Description of Artificial Sequence: Synthetic oligonucleotide
  Antisense Strand to SEQ ID NO: 332307
cuuccuaaggaucagggcc

SEQ ID NO: 332309 - RNA, 19 nt, Artificial Sequence
  Description of Artificial Sequence: Synthetic oligonucleotide
  Sense Strand Starting at position 172 of SEQ ID NO: 316629
cggguugucgcccauaaag

SEQ ID NO: 332310 - RNA, 19 nt, Artificial Sequence
  Description of Artificial Sequence: Synthetic oligonucleotide
  Antisense Strand to SEQ ID NO: 332309
cuuuaugggcgacaacccg

SEQ ID NO: 332311 - RNA, 19 nt, Artificial Sequence
  Description of Artificial Sequence: Synthetic oligonucleotide
  Sense Strand Starting at position 172 of SEQ ID NO: 316631
gguugucgcccauaaagaa

SEQ ID NO: 332312 - RNA, 19 nt, Artificial Sequence
  Description of Artificial Sequence: Synthetic oligonucleotide
  Antisense Strand to SEQ ID NO: 332311
uucuuuaugggcgacaacc

SEQ ID NO: 332313 - RNA, 19 nt, Artificial Sequence
  Description of Artificial Sequence: Synthetic oligonucleotide
  Sense Strand Starting at position 172 of SEQ ID NO: 316644
aaagaacucuccguuguca

SEQ ID NO: 332314 - RNA, 19 nt, Artificial Sequence
  Description of Artificial Sequence: Synthetic oligonucleotide
  Antisense Strand to SEQ ID NO: 332313
ugacaacggagaguucuuu

SEQ ID NO: 332315 - RNA, 19 nt, Artificial Sequence
  Description of Artificial Sequence: Synthetic oligonucleotide
  Sense Strand Starting at position 172 of SEQ ID NO: 316646
agaacucuccguugucaug

SEQ ID NO: 332316 - RNA, 19 nt, Artificial Sequence
  Description of Artificial Sequence: Synthetic oligonucleotide
  Antisense Strand to SEQ ID NO: 332315
caugacaacggagaguucu

SEQ ID NO: 332317 - RNA, 19 nt, Artificial Sequence
  Description of Artificial Sequence: Synthetic oligonucleotide
  Sense Strand Starting at position 172 of SEQ ID NO: 316652
cuccguugucauggaaauu

SEQ ID NO: 332318 - RNA, 19 nt, Artificial Sequence
  Description of Artificial Sequence: Synthetic oligonucleotide
  Antisense Strand to SEQ ID NO: 332317
aauuuccaugacaacggag

SEQ ID NO: 332319 - RNA, 19 nt, Artificial Sequence
  Description of Artificial Sequence: Synthetic oligonucleotide
  Sense Strand Starting at position 172 of SEQ ID NO: 316653
uccguugucauggaaauua

SEQ ID NO: 332320 - RNA, 19 nt, Artificial Sequence
  Description of Artificial Sequence: Synthetic oligonucleotide
  Antisense Strand to SEQ ID NO: 332319
uaauuuccaugacaacgga

SEQ ID NO: 332321 - RNA, 19 nt, Artificial Sequence
  Description of Artificial Sequence: Synthetic oligonucleotide
  Sense Strand Starting at position 172 of SEQ ID NO: 316664
ggaaauuagugacugcuaa

SEQ ID NO: 332322 - RNA, 19 nt, Artificial Sequence
  Description of Artificial Sequence: Synthetic oligonucleotide
  Antisense Strand to SEQ ID NO: 332321
uuagcagucacuaauuucc

SEQ ID NO: 332323 - RNA, 19 nt, Artificial Sequence
  Description of Artificial Sequence: Synthetic oligonucleotide
  Sense Strand Starting at position 172 of SEQ ID NO: 316665
gaaauuagugacugcuaag

SEQ ID NO: 332324 - RNA, 19 nt, Artificial Sequence
  Description of Artificial Sequence: Synthetic oligonucleotide
  Antisense Strand to SEQ ID NO: 332323
cuuagcagucacuaauuuc

SEQ ID NO: 332325 - RNA, 19 nt, Artificial Sequence
  Description of Artificial Sequence: Synthetic oligonucleotide
  Sense Strand Starting at position 172 of SEQ ID NO: 316784
acgaaucuucgaggguuaa

SEQ ID NO: 332326 - RNA, 19 nt, Artificial Sequence
  Description of Artificial Sequence: Synthetic oligonucleotide
  Antisense Strand to SEQ ID NO: 332325
uuaacccucgaagauucgu

SEQ ID NO: 332327 - RNA, 19 nt, Artificial Sequence
  Description of Artificial Sequence: Synthetic oligonucleotide
  Sense Strand Starting at position 172 of SEQ ID NO: 316785
cgaaucuucgaggguuaau

SEQ ID NO: 332328 - RNA, 19 nt, Artificial Sequence
  Description of Artificial Sequence: Synthetic oligonucleotide
  Antisense Strand to SEQ ID NO: 332327
auuaacccucgaagauucg

SEQ ID NO: 332329 - RNA, 19 nt, Artificial Sequence
  Description of Artificial Sequence: Synthetic oligonucleotide
  Sense Strand Starting at position 172 of SEQ ID NO: 316788
aucuucgaggguuaaucuu

SEQ ID NO: 332330 - RNA, 19 nt, Artificial Sequence
  Description of Artificial Sequence: Synthetic oligonucleotide
  Antisense Strand to SEQ ID NO: 332329
aagauuaacccucgaagau

SEQ ID NO: 332331 - RNA, 19 nt, Artificial Sequence
  Description of Artificial Sequence: Synthetic oligonucleotide
  Sense Strand Starting at position 172 of SEQ ID NO: 317307
gcagaaucccacuggagag

SEQ ID NO: 332332 - RNA, 19 nt, Artificial Sequence
  Description of Artificial Sequence: Synthetic oligonucleotide
  Antisense Strand to SEQ ID NO: 332331
cucuccagugggauucugc

SEQ ID NO: 332333 - RNA, 19 nt, Artificial Sequence
  Description of Artificial Sequence: Synthetic oligonucleotide
  Sense Strand Starting at position 172 of SEQ ID NO: 317512
agucauuagucucuaggga

SEQ ID NO: 332334 - RNA, 19 nt, Artificial Sequence
  Description of Artificial Sequence: Synthetic oligonucleotide
  Antisense Strand to SEQ ID NO: 332333
ucccuagagacuaaugacu

SEQ ID NO: 332335 - RNA, 19 nt, Artificial Sequence
  Description of Artificial Sequence: Synthetic oligonucleotide
  Sense Strand Starting at position 172 of SEQ ID NO: 317513
gucauuagucucuagggaa

SEQ ID NO: 332336 - RNA, 19 nt, Artificial Sequence
  Description of Artificial Sequence: Synthetic oligonucleotide
  Antisense Strand to SEQ ID NO: 332335
uucccuagagacuaaugac

SEQ ID NO: 332337 - RNA, 19 nt, Artificial Sequence
  Description of Artificial Sequence: Synthetic oligonucleotide
  Sense Strand Starting at position 172 of SEQ ID NO: 317650
guguguuugcagguaguca

SEQ ID NO: 332338 - RNA, 19 nt, Artificial Sequence
  Description of Artificial Sequence: Synthetic oligonucleotide
  Antisense Strand to SEQ ID NO: 332337
ugacuaccugcaaacacac

SEQ ID NO: 332339 - RNA, 19 nt, Artificial Sequence
  Description of Artificial Sequence: Synthetic oligonucleotide
  Sense Strand Starting at position 172 of SEQ ID NO: 317743
gcagguagucagugugaaa

SEQ ID NO: 332340 - RNA, 19 nt, Artificial Sequence
  Description of Artificial Sequence: Synthetic oligonucleotide
  Antisense Strand to SEQ ID NO: 332339
uuucacacugacuaccugc

SEQ ID NO: 332341 - RNA, 19 nt, Artificial Sequence
  Description of Artificial Sequence: Synthetic oligonucleotide
  Sense Strand Starting at position 172 of SEQ ID NO: 317952
ucagucuaaucacugucaa

SEQ ID NO: 332342 - RNA, 19 nt, Artificial Sequence
  Description of Artificial Sequence: Synthetic oligonucleotide
  Antisense Strand to SEQ ID NO: 332341
uugacagugauuagacuga

SEQ ID NO: 332343 - RNA, 19 nt, Artificial Sequence
  Description of Artificial Sequence: Synthetic oligonucleotide
  Sense Strand Starting at position 172 of SEQ ID NO: 317979
ugaguuguaucacucuagu

SEQ ID NO: 332344 - RNA, 19 nt, Artificial Sequence
  Description of Artificial Sequence: Synthetic oligonucleotide
  Antisense Strand to SEQ ID NO: 332343
acuagagugauacaacuca

SEQ ID NO: 332345 - RNA, 19 nt, Artificial Sequence
  Description of Artificial Sequence: Synthetic oligonucleotide
  Sense Strand Starting at position 172 of SEQ ID NO: 318061
gugcuaaucagagggagga

SEQ ID NO: 332346 - RNA, 19 nt, Artificial Sequence
  Description of Artificial Sequence: Synthetic oligonucleotide
  Antisense Strand to SEQ ID NO: 332345
uccucccucugauuagcac

SEQ ID NO: 332347 - RNA, 19 nt, Artificial Sequence
  Description of Artificial Sequence: Synthetic oligonucleotide
  Sense Strand Starting at position 172 of SEQ ID NO: 318107
aaaggaaguccuuggccau

SEQ ID NO: 332348 - RNA, 19 nt, Artificial Sequence
  Description of Artificial Sequence: Synthetic oligonucleotide
  Antisense Strand to SEQ ID NO: 332347
auggccaaggacuuccuuu

SEQ ID NO: 332349 - RNA, 19 nt, Artificial Sequence
  Description of Artificial Sequence: Synthetic oligonucleotide
  Sense Strand Starting at position 172 of SEQ ID NO: 318108
aaggaaguccuuggccauu

SEQ ID NO: 332350 - RNA, 19 nt, Artificial Sequence
  Description of Artificial Sequence: Synthetic oligonucleotide
  Antisense Strand to SEQ ID NO: 332349
aauggccaaggacuuccuu

SEQ ID NO: 332351 - RNA, 19 nt, Artificial Sequence
  Description of Artificial Sequence: Synthetic oligonucleotide
  Sense Strand Starting at position 172 of SEQ ID NO: 318561
cugaguggucucggguuau

SEQ ID NO: 332352 - RNA, 19 nt, Artificial Sequence
  Description of Artificial Sequence: Synthetic oligonucleotide
  Antisense Strand to SEQ ID NO: 332351
auaacccgagaccacucag

SEQ ID NO: 332353 - RNA, 19 nt, Artificial Sequence
  Description of Artificial Sequence: Synthetic oligonucleotide
  Sense Strand Starting at position 172 of SEQ ID NO: 318621
ggguaucugcaaggcagaa

SEQ ID NO: 332354 - RNA, 19 nt, Artificial Sequence
  Description of Artificial Sequence: Synthetic oligonucleotide
  Antisense Strand to SEQ ID NO: 332353
uucugccuugcagauaccc

SEQ ID NO: 332355 - RNA, 19 nt, Artificial Sequence
  Description of Artificial Sequence: Synthetic oligonucleotide
  Sense Strand Starting at position 172 of SEQ ID NO: 318639
acccguuucucaucucagu

SEQ ID NO: 332356 - RNA, 19 nt, Artificial Sequence
  Description of Artificial Sequence: Synthetic oligonucleotide
  Antisense Strand to SEQ ID NO: 332355
acugagaugagaaacgggu

SEQ ID NO: 332357 - RNA, 19 nt, Artificial Sequence
  Description of Artificial Sequence: Synthetic oligonucleotide
  Sense Strand Starting at position 172 of SEQ ID NO: 318662
ucggcugaugucugcagaa

SEQ ID NO: 332358 - RNA, 19 nt, Artificial Sequence
  Description of Artificial Sequence: Synthetic oligonucleotide
  Antisense Strand to SEQ ID NO: 332357
uucugcagacaucagccga

SEQ ID NO: 332359 - RNA, 19 nt, Artificial Sequence
  Description of Artificial Sequence: Synthetic oligonucleotide
  Sense Strand Starting at position 172 of SEQ ID NO: 318664
ggcugaugucugcagaaug

SEQ ID NO: 332360 - RNA, 19 nt, Artificial Sequence
  Description of Artificial Sequence: Synthetic oligonucleotide
  Antisense Strand to SEQ ID NO: 332359
cauucugcagacaucagcc

SEQ ID NO: 332361 - RNA, 19 nt, Artificial Sequence
  Description of Artificial Sequence: Synthetic oligonucleotide
  Sense Strand Starting at position 172 of SEQ ID NO: 318669
augucugcagaaugaauga

SEQ ID NO: 332362 - RNA, 19 nt, Artificial Sequence
  Description of Artificial Sequence: Synthetic oligonucleotide
  Antisense Strand to SEQ ID NO: 332361
ucauucauucugcagacau

SEQ ID NO: 332363 - RNA, 19 nt, Artificial Sequence
  Description of Artificial Sequence: Synthetic oligonucleotide
  Sense Strand Starting at position 172 of SEQ ID NO: 318682
gaaugaauggccuggcacu

SEQ ID NO: 332364 - RNA, 19 nt, Artificial Sequence
  Description of Artificial Sequence: Synthetic oligonucleotide
  Antisense Strand to SEQ ID NO: 332363
agugccaggccauucauuc

SEQ ID NO: 332365 - RNA, 19 nt, Artificial Sequence
  Description of Artificial Sequence: Synthetic oligonucleotide
  Sense Strand Starting at position 172 of SEQ ID NO: 318734
aacaaugggucucugaguu

SEQ ID NO: 332366 - RNA, 19 nt, Artificial Sequence
  Description of Artificial Sequence: Synthetic oligonucleotide
  Antisense Strand to SEQ ID NO: 332365
aacucagagacccauuguu

SEQ ID NO: 332367 - RNA, 19 nt, Artificial Sequence
  Description of Artificial Sequence: Synthetic oligonucleotide
  Sense Strand Starting at position 172 of SEQ ID NO: 319138
ggucccuggaguuaucagu

SEQ ID NO: 332368 - RNA, 19 nt, Artificial Sequence
  Description of Artificial Sequence: Synthetic oligonucleotide
  Antisense Strand to SEQ ID NO: 332367
acugauaacuccagggacc

SEQ ID NO: 332369 - RNA, 19 nt, Artificial Sequence
  Description of Artificial Sequence: Synthetic oligonucleotide
  Sense Strand Starting at position 172 of SEQ ID NO: 319203
ggcuuugagagcuggacau

SEQ ID NO: 332370 - RNA, 19 nt, Artificial Sequence
  Description of Artificial Sequence: Synthetic oligonucleotide
  Antisense Strand to SEQ ID NO: 332369
auguccagcucucaaagcc

SEQ ID NO: 332371 - RNA, 19 nt, Artificial Sequence
  Description of Artificial Sequence: Synthetic oligonucleotide
  Sense Strand Starting at position 173 of SEQ ID NO: 315329
ggauguacccagggucaau

SEQ ID NO: 332372 - RNA, 19 nt, Artificial Sequence
  Description of Artificial Sequence: Synthetic oligonucleotide
  Antisense Strand to SEQ ID NO: 332371
auugacccuggguacaucc

SEQ ID NO: 332373 - RNA, 19 nt, Artificial Sequence
  Description of Artificial Sequence: Synthetic oligonucleotide
  Sense Strand Starting at position 173 of SEQ ID NO: 315422
ggcugugaccuuugaagca

SEQ ID NO: 332374 - RNA, 19 nt, Artificial Sequence
  Description of Artificial Sequence: Synthetic oligonucleotide
  Antisense Strand to SEQ ID NO: 332373
ugcuucaaaggucacagcc

SEQ ID NO: 332375 - RNA, 19 nt, Artificial Sequence
  Description of Artificial Sequence: Synthetic oligonucleotide
  Sense Strand Starting at position 173 of SEQ ID NO: 315429
accuuugaagcaugugauu

SEQ ID NO: 332376 - RNA, 19 nt, Artificial Sequence
  Description of Artificial Sequence: Synthetic oligonucleotide
  Antisense Strand to SEQ ID NO: 332375
aaucacaugcuucaaaggu

SEQ ID NO: 332377 - RNA, 19 nt, Artificial Sequence
  Description of Artificial Sequence: Synthetic oligonucleotide
  Sense Strand Starting at position 173 of SEQ ID NO: 315431
cuuugaagcaugugauuga

SEQ ID NO: 332378 - RNA, 19 nt, Artificial Sequence
  Description of Artificial Sequence: Synthetic oligonucleotide
  Antisense Strand to SEQ ID NO: 332377
ucaaucacaugcuucaaag

SEQ ID NO: 332379 - RNA, 19 nt, Artificial Sequence
  Description of Artificial Sequence: Synthetic oligonucleotide
  Sense Strand Starting at position 173 of SEQ ID NO: 315434
ugaagcaugugauugaauc

SEQ ID NO: 332380 - RNA, 19 nt, Artificial Sequence
  Description of Artificial Sequence: Synthetic oligonucleotide
  Antisense Strand to SEQ ID NO: 332379
gauucaaucacaugcuuca

SEQ ID NO: 332381 - RNA, 19 nt, Artificial Sequence
  Description of Artificial Sequence: Synthetic oligonucleotide
  Sense Strand Starting at position 173 of SEQ ID NO: 315556
cugagagcugaguacucuu

SEQ ID NO: 332382 - RNA, 19 nt, Artificial Sequence
  Description of Artificial Sequence: Synthetic oligonucleotide
  Antisense Strand to SEQ ID NO: 332381
aagaguacucagcucucag

SEQ ID NO: 332383 - RNA, 19 nt, Artificial Sequence
  Description of Artificial Sequence: Synthetic oligonucleotide
  Sense Strand Starting at position 173 of SEQ ID NO: 315559
agagcugaguacucuuaga

SEQ ID NO: 332384 - RNA, 19 nt, Artificial Sequence
  Description of Artificial Sequence: Synthetic oligonucleotide
  Antisense Strand to SEQ ID NO: 332383
ucuaagaguacucagcucu

SEQ ID NO: 332385 - RNA, 19 nt, Artificial Sequence
  Description of Artificial Sequence: Synthetic oligonucleotide
  Sense Strand Starting at position 173 of SEQ ID NO: 315604
cggaaucuccuggaaagcu

SEQ ID NO: 332386 - RNA, 19 nt, Artificial Sequence
  Description of Artificial Sequence: Synthetic oligonucleotide
  Antisense Strand to SEQ ID NO: 332385
agcuuuccaggagauuccg

SEQ ID NO: 332387 - RNA, 19 nt, Artificial Sequence
  Description of Artificial Sequence: Synthetic oligonucleotide
  Sense Strand Starting at position 173 of SEQ ID NO: 315650
cccagagucugucugagua

SEQ ID NO: 332388 - RNA, 19 nt, Artificial Sequence
  Description of Artificial Sequence: Synthetic oligonucleotide
  Antisense Strand to SEQ ID NO: 332387
uacucagacagacucuggg

SEQ ID NO: 332389 - RNA, 19 nt, Artificial Sequence
  Description of Artificial Sequence: Synthetic oligonucleotide
  Sense Strand Starting at position 173 of SEQ ID NO: 315672
cugaguagggccugagaau

SEQ ID NO: 332390 - RNA, 19 nt, Artificial Sequence
  Description of Artificial Sequence: Synthetic oligonucleotide
  Antisense Strand to SEQ ID NO: 332389
auucucaggcccuacucag

SEQ ID NO: 332391 - RNA, 19 nt, Artificial Sequence
  Description of Artificial Sequence: Synthetic oligonucleotide
  Sense Strand Starting at position 173 of SEQ ID NO: 315831
ggaguaguuaauugaccca

SEQ ID NO: 332392 - RNA, 19 nt, Artificial Sequence
  Description of Artificial Sequence: Synthetic oligonucleotide
  Antisense Strand to SEQ ID NO: 332391
ugggucaauuaacuacucc

SEQ ID NO: 332393 - RNA, 19 nt, Artificial Sequence
  Description of Artificial Sequence: Synthetic oligonucleotide
  Sense Strand Starting at position 173 of SEQ ID NO: 315988
ggagaagcucaaggucaaa

SEQ ID NO: 332394 - RNA, 19 nt, Artificial Sequence
  Description of Artificial Sequence: Synthetic oligonucleotide
  Antisense Strand to SEQ ID NO: 332393
uuugaccuugagcuucucc

SEQ ID NO: 332395 - RNA, 19 nt, Artificial Sequence
  Description of Artificial Sequence: Synthetic oligonucleotide
  Sense Strand Starting at position 173 of SEQ ID NO: 316034
gccacaucccagugggaaa

SEQ ID NO: 332396 - RNA, 19 nt, Artificial Sequence
  Description of Artificial Sequence: Synthetic oligonucleotide
  Antisense Strand to SEQ ID NO: 332395
uuucccacugggauguggc

SEQ ID NO: 332397 - RNA, 19 nt, Artificial Sequence
  Description of Artificial Sequence: Synthetic oligonucleotide
  Sense Strand Starting at position 173 of SEQ ID NO: 316519
aaccuaaagucuggauaga

SEQ ID NO: 332398 - RNA, 19 nt, Artificial Sequence
  Description of Artificial Sequence: Synthetic oligonucleotide
  Antisense Strand to SEQ ID NO: 332397
ucuauccagacuuuagguu

SEQ ID NO: 332399 - RNA, 19 nt, Artificial Sequence
  Description of Artificial Sequence: Synthetic oligonucleotide
  Sense Strand Starting at position 173 of SEQ ID NO: 316530
uggauagaguucuucccua

SEQ ID NO: 332400 - RNA, 19 nt, Artificial Sequence
  Description of Artificial Sequence: Synthetic oligonucleotide
  Antisense Strand to SEQ ID NO: 332399
uagggaagaacucuaucca

SEQ ID NO: 332401 - RNA, 19 nt, Artificial Sequence
  Description of Artificial Sequence: Synthetic oligonucleotide
  Sense Strand Starting at position 173 of SEQ ID NO: 316534
uagaguucuucccuaugug

SEQ ID NO: 332402 - RNA, 19 nt, Artificial Sequence
  Description of Artificial Sequence: Synthetic oligonucleotide
  Antisense Strand to SEQ ID NO: 332401
cacauagggaagaacucua

SEQ ID NO: 332403 - RNA, 19 nt, Artificial Sequence
  Description of Artificial Sequence: Synthetic oligonucleotide
  Sense Strand Starting at position 173 of SEQ ID NO: 316725
acacgagcucuagaagguu

SEQ ID NO: 332404 - RNA, 19 nt, Artificial Sequence
  Description of Artificial Sequence: Synthetic oligonucleotide
  Antisense Strand to SEQ ID NO: 332403
aaccuucuagagcucgugu

SEQ ID NO: 332405 - RNA, 19 nt, Artificial Sequence
  Description of Artificial Sequence: Synthetic oligonucleotide
  Sense Strand Starting at position 173 of SEQ ID NO: 316733
ucuagaagguucccuggaa

SEQ ID NO: 332406 - RNA, 19 nt, Artificial Sequence
  Description of Artificial Sequence: Synthetic oligonucleotide
  Antisense Strand to SEQ ID NO: 332405
uuccagggaaccuucuaga

SEQ ID NO: 332407 - RNA, 19 nt, Artificial Sequence
  Description of Artificial Sequence: Synthetic oligonucleotide
  Sense Strand Starting at position 173 of SEQ ID NO: 316734
cuagaagguucccuggaaa

SEQ ID NO: 332408 - RNA, 19 nt, Artificial Sequence
  Description of Artificial Sequence: Synthetic oligonucleotide
  Antisense Strand to SEQ ID NO: 332407
uuuccagggaaccuucuag

SEQ ID NO: 332409 - RNA, 19 nt, Artificial Sequence
  Description of Artificial Sequence: Synthetic oligonucleotide
  Sense Strand Starting at position 173 of SEQ ID NO: 317256
gccuuccuugugugcaaga

SEQ ID NO: 332410 - RNA, 19 nt, Artificial Sequence
  Description of Artificial Sequence: Synthetic oligonucleotide
  Antisense Strand to SEQ ID NO: 332409
ucuugcacacaaggaaggc

SEQ ID NO: 332411 - RNA, 19 nt, Artificial Sequence
  Description of Artificial Sequence: Synthetic oligonucleotide
  Sense Strand Starting at position 173 of SEQ ID NO: 317257
ccuuccuugugugcaagau

SEQ ID NO: 332412 - RNA, 19 nt, Artificial Sequence
  Description of Artificial Sequence: Synthetic oligonucleotide
  Antisense Strand to SEQ ID NO: 332411
aucuugcacacaaggaagg

SEQ ID NO: 332413 - RNA, 19 nt, Artificial Sequence
  Description of Artificial Sequence: Synthetic oligonucleotide
  Sense Strand Starting at position 173 of SEQ ID NO: 317314
cugaccggagauugucaua

SEQ ID NO: 332414 - RNA, 19 nt, Artificial Sequence
  Description of Artificial Sequence: Synthetic oligonucleotide
  Antisense Strand to SEQ ID NO: 332413
uaugacaaucuccggucag

SEQ ID NO: 332415 - RNA, 19 nt, Artificial Sequence
  Description of Artificial Sequence: Synthetic oligonucleotide
  Sense Strand Starting at position 173 of SEQ ID NO: 317339
ggugcucaagagcguuaaa

SEQ ID NO: 332416 - RNA, 19 nt, Artificial Sequence
  Description of Artificial Sequence: Synthetic oligonucleotide
  Antisense Strand to SEQ ID NO: 332415
uuuaacgcucuugagcacc

SEQ ID NO: 332417 - RNA, 19 nt, Artificial Sequence
  Description of Artificial Sequence: Synthetic oligonucleotide
  Sense Strand Starting at position 173 of SEQ ID NO: 317349
agcguuaaaucccuccaga

SEQ ID NO: 332418 - RNA, 19 nt, Artificial Sequence
  Description of Artificial Sequence: Synthetic oligonucleotide
  Antisense Strand to SEQ ID NO: 332417
ucuggagggauuuaacgcu

SEQ ID NO: 332419 - RNA, 19 nt, Artificial Sequence
  Description of Artificial Sequence: Synthetic oligonucleotide
  Sense Strand Starting at position 173 of SEQ ID NO: 317376
gagccaggugccuauucua

SEQ ID NO: 332420 - RNA, 19 nt, Artificial Sequence
  Description of Artificial Sequence: Synthetic oligonucleotide
  Antisense Strand to SEQ ID NO: 332419
uagaauaggcaccuggcuc

SEQ ID NO: 332421 - RNA, 19 nt, Artificial Sequence
  Description of Artificial Sequence: Synthetic oligonucleotide
  Sense Strand Starting at position 173 of SEQ ID NO: 317379
ccaggugccuauucuacau

SEQ ID NO: 332422 - RNA, 19 nt, Artificial Sequence
  Description of Artificial Sequence: Synthetic oligonucleotide
  Antisense Strand to SEQ ID NO: 332421
auguagaauaggcaccugg

SEQ ID NO: 332423 - RNA, 19 nt, Artificial Sequence
  Description of Artificial Sequence: Synthetic oligonucleotide
  Sense Strand Starting at position 173 of SEQ ID NO: 317398
ccuucuacuccucaggagu

SEQ ID NO: 332424 - RNA, 19 nt, Artificial Sequence
  Description of Artificial Sequence: Synthetic oligonucleotide
  Antisense Strand to SEQ ID NO: 332423
acuccugaggaguagaagg

SEQ ID NO: 332425 - RNA, 19 nt, Artificial Sequence
  Description of Artificial Sequence: Synthetic oligonucleotide
  Sense Strand Starting at position 173 of SEQ ID NO: 317463
cccuguaggcaucgauuaa

SEQ ID NO: 332426 - RNA, 19 nt, Artificial Sequence
  Description of Artificial Sequence: Synthetic oligonucleotide
  Antisense Strand to SEQ ID NO: 332425
uuaaucgaugccuacaggg

SEQ ID NO: 332427 - RNA, 19 nt, Artificial Sequence
  Description of Artificial Sequence: Synthetic oligonucleotide
  Sense Strand Starting at position 173 of SEQ ID NO: 317464
ccuguaggcaucgauuaag

SEQ ID NO: 332428 - RNA, 19 nt, Artificial Sequence
  Description of Artificial Sequence: Synthetic oligonucleotide
  Antisense Strand to SEQ ID NO: 332427
cuuaaucgaugccuacagg

SEQ ID NO: 332429 - RNA, 19 nt, Artificial Sequence
  Description of Artificial Sequence: Synthetic oligonucleotide
  Sense Strand Starting at position 173 of SEQ ID NO: 317467
guaggcaucgauuaagaau

SEQ ID NO: 332430 - RNA, 19 nt, Artificial Sequence
  Description of Artificial Sequence: Synthetic oligonucleotide
  Antisense Strand to SEQ ID NO: 332429
auucuuaaucgaugccuac

SEQ ID NO: 332431 - RNA, 19 nt, Artificial Sequence
  Description of Artificial Sequence: Synthetic oligonucleotide
  Sense Strand Starting at position 173 of SEQ ID NO: 317470
ggcaucgauuaagaauuga

SEQ ID NO: 332432 - RNA, 19 nt, Artificial Sequence
  Description of Artificial Sequence: Synthetic oligonucleotide
  Antisense Strand to SEQ ID NO: 332431
ucaauucuuaaucgaugcc

SEQ ID NO: 332433 - RNA, 19 nt, Artificial Sequence
  Description of Artificial Sequence: Synthetic oligonucleotide
  Sense Strand Starting at position 173 of SEQ ID NO: 317765
gagugagacucaguaugaa

SEQ ID NO: 332434 - RNA, 19 nt, Artificial Sequence
  Description of Artificial Sequence: Synthetic oligonucleotide
  Antisense Strand to SEQ ID NO: 332433
uucauacugagucucacuc

SEQ ID NO: 332435 - RNA, 19 nt, Artificial Sequence
  Description of Artificial Sequence: Synthetic oligonucleotide
  Sense Strand Starting at position 173 of SEQ ID NO: 318259
agggcugucuucuuaauau

SEQ ID NO: 332436 - RNA, 19 nt, Artificial Sequence
  Description of Artificial Sequence: Synthetic oligonucleotide
  Antisense Strand to SEQ ID NO: 332435
auauuaagaagacagcccu

SEQ ID NO: 332437 - RNA, 19 nt, Artificial Sequence
  Description of Artificial Sequence: Synthetic oligonucleotide
  Sense Strand Starting at position 173 of SEQ ID NO: 318359
caguuauaauaggcagaca

SEQ ID NO: 332438 - RNA, 19 nt, Artificial Sequence
  Description of Artificial Sequence: Synthetic oligonucleotide
  Antisense Strand to SEQ ID NO: 332437
ugucugccuauuauaacug

SEQ ID NO: 332439 - RNA, 19 nt, Artificial Sequence
  Description of Artificial Sequence: Synthetic oligonucleotide
  Sense Strand Starting at position 173 of SEQ ID NO: 318383
cagucuguaucucugaguu

SEQ ID NO: 332440 - RNA, 19 nt, Artificial Sequence
  Description of Artificial Sequence: Synthetic oligonucleotide
  Antisense Strand to SEQ ID NO: 332439
aacucagagauacagacug

SEQ ID NO: 332441 - RNA, 19 nt, Artificial Sequence
  Description of Artificial Sequence: Synthetic oligonucleotide
  Sense Strand Starting at position 173 of SEQ ID NO: 318390
uaucucugaguucgagacu

SEQ ID NO: 332442 - RNA, 19 nt, Artificial Sequence
  Description of Artificial Sequence: Synthetic oligonucleotide
  Antisense Strand to SEQ ID NO: 332441
agucucgaacucagagaua

SEQ ID NO: 332443 - RNA, 19 nt, Artificial Sequence
  Description of Artificial Sequence: Synthetic oligonucleotide
  Sense Strand Starting at position 173 of SEQ ID NO: 318401
ucgagacucccaugaacgu

SEQ ID NO: 332444 - RNA, 19 nt, Artificial Sequence
  Description of Artificial Sequence: Synthetic oligonucleotide
  Antisense Strand to SEQ ID NO: 332443
acguucaugggagucucga

SEQ ID NO: 332445 - RNA, 19 nt, Artificial Sequence
  Description of Artificial Sequence: Synthetic oligonucleotide
  Sense Strand Starting at position 173 of SEQ ID NO: 318957
caggaagucucuccugauu

SEQ ID NO: 332446 - RNA, 19 nt, Artificial Sequence
  Description of Artificial Sequence: Synthetic oligonucleotide
  Antisense Strand to SEQ ID NO: 332445
aaucaggagagacuuccug

SEQ ID NO: 332447 - RNA, 19 nt, Artificial Sequence
  Description of Artificial Sequence: Synthetic oligonucleotide
  Sense Strand Starting at position 173 of SEQ ID NO: 318960
gaagucucuccugauucga

SEQ ID NO: 332448 - RNA, 19 nt, Artificial Sequence
  Description of Artificial Sequence: Synthetic oligonucleotide
  Antisense Strand to SEQ ID NO: 332447
ucgaaucaggagagacuuc

SEQ ID NO: 332449 - RNA, 19 nt, Artificial Sequence
  Description of Artificial Sequence: Synthetic oligonucleotide
  Sense Strand Starting at position 173 of SEQ ID NO: 318998
uggugcucuagcugagaca

SEQ ID NO: 332450 - RNA, 19 nt, Artificial Sequence
  Description of Artificial Sequence: Synthetic oligonucleotide
  Antisense Strand to SEQ ID NO: 332449
ugucucagcuagagcacca

SEQ ID NO: 332451 - RNA, 19 nt, Artificial Sequence
  Description of Artificial Sequence: Synthetic oligonucleotide
  Sense Strand Starting at position 174 of SEQ ID NO: 315602
aguuauaggagcugucaga

SEQ ID NO: 332452 - RNA, 19 nt, Artificial Sequence
  Description of Artificial Sequence: Synthetic oligonucleotide
  Antisense Strand to SEQ ID NO: 332451
ucugacagcuccuauaacu

SEQ ID NO: 332453 - RNA, 19 nt, Artificial Sequence
  Description of Artificial Sequence: Synthetic oligonucleotide
  Sense Strand Starting at position 174 of SEQ ID NO: 315709
gaaucauaacaguguccgu

SEQ ID NO: 332454 - RNA, 19 nt, Artificial Sequence
  Description of Artificial Sequence: Synthetic oligonucleotide
  Antisense Strand to SEQ ID NO: 332453
acggacacuguuaugauuc

SEQ ID NO: 332455 - RNA, 19 nt, Artificial Sequence
  Description of Artificial Sequence: Synthetic oligonucleotide
  Sense Strand Starting at position 174 of SEQ ID NO: 315712
ucauaacaguguccguuua

SEQ ID NO: 332456 - RNA, 19 nt, Artificial Sequence
  Description of Artificial Sequence: Synthetic oligonucleotide
  Antisense Strand to SEQ ID NO: 332455
uaaacggacacuguuauga

SEQ ID NO: 332457 - RNA, 19 nt, Artificial Sequence
  Description of Artificial Sequence: Synthetic oligonucleotide
  Sense Strand Starting at position 174 of SEQ ID NO: 315713
cauaacaguguccguuuau

SEQ ID NO: 332458 - RNA, 19 nt, Artificial Sequence
  Description of Artificial Sequence: Synthetic oligonucleotide
  Antisense Strand to SEQ ID NO: 332457
auaaacggacacuguuaug

SEQ ID NO: 332459 - RNA, 19 nt, Artificial Sequence
  Description of Artificial Sequence: Synthetic oligonucleotide
  Sense Strand Starting at position 174 of SEQ ID NO: 315714
auaacaguguccguuuaug

SEQ ID NO: 332460 - RNA, 19 nt, Artificial Sequence
  Description of Artificial Sequence: Synthetic oligonucleotide
  Antisense Strand to SEQ ID NO: 332459
cauaaacggacacuguuau

SEQ ID NO: 332461 - RNA, 19 nt, Artificial Sequence
  Description of Artificial Sequence: Synthetic oligonucleotide
  Sense Strand Starting at position 174 of SEQ ID NO: 315751
ugccaugaaccugagcauu

SEQ ID NO: 332462 - RNA, 19 nt, Artificial Sequence
  Description of Artificial Sequence: Synthetic oligonucleotide
  Antisense Strand to SEQ ID NO: 332461
aaugcucagguucauggca

SEQ ID NO: 332463 - RNA, 19 nt, Artificial Sequence
  Description of Artificial Sequence: Synthetic oligonucleotide
  Sense Strand Starting at position 174 of SEQ ID NO: 315866
ggguuaaguuacuugucca

SEQ ID NO: 332464 - RNA, 19 nt, Artificial Sequence
  Description of Artificial Sequence: Synthetic oligonucleotide
  Antisense Strand to SEQ ID NO: 332463
uggacaaguaacuuaaccc

SEQ ID NO: 332465 - RNA, 19 nt, Artificial Sequence
  Description of Artificial Sequence: Synthetic oligonucleotide
  Sense Strand Starting at position 174 of SEQ ID NO: 315867
gguuaaguuacuuguccau

SEQ ID NO: 332466 - RNA, 19 nt, Artificial Sequence
  Description of Artificial Sequence: Synthetic oligonucleotide
  Antisense Strand to SEQ ID NO: 332465
auggacaaguaacuuaacc

SEQ ID NO: 332467 - RNA, 19 nt, Artificial Sequence
  Description of Artificial Sequence: Synthetic oligonucleotide
  Sense Strand Starting at position 174 of SEQ ID NO: 315874
uuacuuguccauggucaca

SEQ ID NO: 332468 - RNA, 19 nt, Artificial Sequence
  Description of Artificial Sequence: Synthetic oligonucleotide
  Antisense Strand to SEQ ID NO: 332467
ugugaccauggacaaguaa

SEQ ID NO: 332469 - RNA, 19 nt, Artificial Sequence
  Description of Artificial Sequence: Synthetic oligonucleotide
  Sense Strand Starting at position 174 of SEQ ID NO: 316071
cuaagaucuuggccucugu

SEQ ID NO: 332470 - RNA, 19 nt, Artificial Sequence
  Description of Artificial Sequence: Synthetic oligonucleotide
  Antisense Strand to SEQ ID NO: 332469
acagaggccaagaucuuag

SEQ ID NO: 332471 - RNA, 19 nt, Artificial Sequence
  Description of Artificial Sequence: Synthetic oligonucleotide
  Sense Strand Starting at position 174 of SEQ ID NO: 316075
gaucuuggccucuguauua

SEQ ID NO: 332472 - RNA, 19 nt, Artificial Sequence
  Description of Artificial Sequence: Synthetic oligonucleotide
  Antisense Strand to SEQ ID NO: 332471
uaauacagaggccaagauc

SEQ ID NO: 332473 - RNA, 19 nt, Artificial Sequence
  Description of Artificial Sequence: Synthetic oligonucleotide
  Sense Strand Starting at position 174 of SEQ ID NO: 316088
guauuagacuggccuggau

SEQ ID NO: 332474 - RNA, 19 nt, Artificial Sequence
  Description of Artificial Sequence: Synthetic oligonucleotide
  Antisense Strand to SEQ ID NO: 332473
auccaggccagucuaauac

SEQ ID NO: 332475 - RNA, 19 nt, Artificial Sequence
  Description of Artificial Sequence: Synthetic oligonucleotide
  Sense Strand Starting at position 174 of SEQ ID NO: 316108
uggacuaagucucccacuu

SEQ ID NO: 332476 - RNA, 19 nt, Artificial Sequence
  Description of Artificial Sequence: Synthetic oligonucleotide
  Antisense Strand to SEQ ID NO: 332475
aagugggagacuuagucca

SEQ ID NO: 332477 - RNA, 19 nt, Artificial Sequence
  Description of Artificial Sequence: Synthetic oligonucleotide
  Sense Strand Starting at position 174 of SEQ ID NO: 316247
gccagaacuggccaugaga

SEQ ID NO: 332478 - RNA, 19 nt, Artificial Sequence
  Description of Artificial Sequence: Synthetic oligonucleotide
  Antisense Strand to SEQ ID NO: 332477
ucucauggccaguucuggc

SEQ ID NO: 332479 - RNA, 19 nt, Artificial Sequence
  Description of Artificial Sequence: Synthetic oligonucleotide
  Sense Strand Starting at position 174 of SEQ ID NO: 316319
guggaaacucauuggacca

SEQ ID NO: 332480 - RNA, 19 nt, Artificial Sequence
  Description of Artificial Sequence: Synthetic oligonucleotide
  Antisense Strand to SEQ ID NO: 332479
ugguccaaugaguuuccac

SEQ ID NO: 332481 - RNA, 19 nt, Artificial Sequence
  Description of Artificial Sequence: Synthetic oligonucleotide
  Sense Strand Starting at position 174 of SEQ ID NO: 316321
ggaaacucauuggaccaga

SEQ ID NO: 332482 - RNA, 19 nt, Artificial Sequence
  Description of Artificial Sequence: Synthetic oligonucleotide
  Antisense Strand to SEQ ID NO: 332481
ucugguccaaugaguuucc

SEQ ID NO: 332483 - RNA, 19 nt, Artificial Sequence
  Description of Artificial Sequence: Synthetic oligonucleotide
  Sense Strand Starting at position 174 of SEQ ID NO: 316326
cucauuggaccagauguuu

SEQ ID NO: 332484 - RNA, 19 nt, Artificial Sequence
  Description of Artificial Sequence: Synthetic oligonucleotide
  Antisense Strand to SEQ ID NO: 332483
aaacaucugguccaaugag

SEQ ID NO: 332485 - RNA, 19 nt, Artificial Sequence
  Description of Artificial Sequence: Synthetic oligonucleotide
  Sense Strand Starting at position 174 of SEQ ID NO: 316337
agauguuuccaccguucuu

SEQ ID NO: 332486 - RNA, 19 nt, Artificial Sequence
  Description of Artificial Sequence: Synthetic oligonucleotide
  Antisense Strand to SEQ ID NO: 332485
aagaacgguggaaacaucu

SEQ ID NO: 332487 - RNA, 19 nt, Artificial Sequence
  Description of Artificial Sequence: Synthetic oligonucleotide
  Sense Strand Starting at position 174 of SEQ ID NO: 316360
gcucuauuccugugguucu

SEQ ID NO: 332488 - RNA, 19 nt, Artificial Sequence
  Description of Artificial Sequence: Synthetic oligonucleotide
  Antisense Strand to SEQ ID NO: 332487
agaaccacaggaauagagc

SEQ ID NO: 332489 - RNA, 19 nt, Artificial Sequence
  Description of Artificial Sequence: Synthetic oligonucleotide
  Sense Strand Starting at position 174 of SEQ ID NO: 316985
cagcuuaaugcagggagaa

SEQ ID NO: 332490 - RNA, 19 nt, Artificial Sequence
  Description of Artificial Sequence: Synthetic oligonucleotide
  Antisense Strand to SEQ ID NO: 332489
uucucccugcauuaagcug

SEQ ID NO: 332491 - RNA, 19 nt, Artificial Sequence
  Description of Artificial Sequence: Synthetic oligonucleotide
  Sense Strand Starting at position 174 of SEQ ID NO: 316986
agcuuaaugcagggagaag

SEQ ID NO: 332492 - RNA, 19 nt, Artificial Sequence
  Description of Artificial Sequence: Synthetic oligonucleotide
  Antisense Strand to SEQ ID NO: 332491
cuucucccugcauuaagcu

SEQ ID NO: 332493 - RNA, 19 nt, Artificial Sequence
  Description of Artificial Sequence: Synthetic oligonucleotide
  Sense Strand Starting at position 174 of SEQ ID NO: 317269
gcgcucaccagacagaaau

SEQ ID NO: 332494 - RNA, 19 nt, Artificial Sequence
  Description of Artificial Sequence: Synthetic oligonucleotide
  Antisense Strand to SEQ ID NO: 332493
auuucugucuggugagcgc

SEQ ID NO: 332495 - RNA, 19 nt, Artificial Sequence
  Description of Artificial Sequence: Synthetic oligonucleotide
  Sense Strand Starting at position 174 of SEQ ID NO: 317497
gcggcauggacguaauauc

SEQ ID NO: 332496 - RNA, 19 nt, Artificial Sequence
  Description of Artificial Sequence: Synthetic oligonucleotide
  Antisense Strand to SEQ ID NO: 332495
gauauuacguccaugccgc

SEQ ID NO: 332497 - RNA, 19 nt, Artificial Sequence
  Description of Artificial Sequence: Synthetic oligonucleotide
  Sense Strand Starting at position 174 of SEQ ID NO: 317587
gcuuucucaucuguaggca

SEQ ID NO: 332498 - RNA, 19 nt, Artificial Sequence
  Description of Artificial Sequence: Synthetic oligonucleotide
  Antisense Strand to SEQ ID NO: 332497
ugccuacagaugagaaagc

SEQ ID NO: 332499 - RNA, 19 nt, Artificial Sequence
  Description of Artificial Sequence: Synthetic oligonucleotide
  Sense Strand Starting at position 174 of SEQ ID NO: 317588
cuuucucaucuguaggcau

SEQ ID NO: 332500 - RNA, 19 nt, Artificial Sequence
  Description of Artificial Sequence: Synthetic oligonucleotide
  Antisense Strand to SEQ ID NO: 332499
augccuacagaugagaaag

SEQ ID NO: 332501 - RNA, 19 nt, Artificial Sequence
  Description of Artificial Sequence: Synthetic oligonucleotide
  Sense Strand Starting at position 174 of SEQ ID NO: 317834
caaugaaucugggauggag

SEQ ID NO: 332502 - RNA, 19 nt, Artificial Sequence
  Description of Artificial Sequence: Synthetic oligonucleotide
  Antisense Strand to SEQ ID NO: 332501
cuccaucccagauucauug

SEQ ID NO: 332503 - RNA, 19 nt, Artificial Sequence
  Description of Artificial Sequence: Synthetic oligonucleotide
  Sense Strand Starting at position 174 of SEQ ID NO: 317873
cuuaauauccugcgcagca

SEQ ID NO: 332504 - RNA, 19 nt, Artificial Sequence
  Description of Artificial Sequence: Synthetic oligonucleotide
  Antisense Strand to SEQ ID NO: 332503
ugcugcgcaggauauuaag

SEQ ID NO: 332505 - RNA, 19 nt, Artificial Sequence
  Description of Artificial Sequence: Synthetic oligonucleotide
  Sense Strand Starting at position 174 of SEQ ID NO: 317874
uuaauauccugcgcagcaa

SEQ ID NO: 332506 - RNA, 19 nt, Artificial Sequence
  Description of Artificial Sequence: Synthetic oligonucleotide
  Antisense Strand to SEQ ID NO: 332505
uugcugcgcaggauauuaa

SEQ ID NO: 332507 - RNA, 19 nt, Artificial Sequence
  Description of Artificial Sequence: Synthetic oligonucleotide
  Sense Strand Starting at position 174 of SEQ ID NO: 317929
aagggaguagugugugcuu

SEQ ID NO: 332508 - RNA, 19 nt, Artificial Sequence
  Description of Artificial Sequence: Synthetic oligonucleotide
  Antisense Strand to SEQ ID NO: 332507
aagcacacacuacucccuu

SEQ ID NO: 332509 - RNA, 19 nt, Artificial Sequence
  Description of Artificial Sequence: Synthetic oligonucleotide
  Sense Strand Starting at position 174 of SEQ ID NO: 317931
gggaguagugugugcuuca

SEQ ID NO: 332510 - RNA, 19 nt, Artificial Sequence
  Description of Artificial Sequence: Synthetic oligonucleotide
  Antisense Strand to SEQ ID NO: 332509
ugaagcacacacuacuccc

SEQ ID NO: 332511 - RNA, 19 nt, Artificial Sequence
  Description of Artificial Sequence: Synthetic oligonucleotide
  Sense Strand Starting at position 174 of SEQ ID NO: 317932
ggaguagugugugcuucag

SEQ ID NO: 332512 - RNA, 19 nt, Artificial Sequence
  Description of Artificial Sequence: Synthetic oligonucleotide
  Antisense Strand to SEQ ID NO: 332511
cugaagcacacacuacucc

SEQ ID NO: 332513 - RNA, 19 nt, Artificial Sequence
  Description of Artificial Sequence: Synthetic oligonucleotide
  Sense Strand Starting at position 174 of SEQ ID NO: 317934
aguagugugugcuucagag

SEQ ID NO: 332514 - RNA, 19 nt, Artificial Sequence
  Description of Artificial Sequence: Synthetic oligonucleotide
  Antisense Strand to SEQ ID NO: 332513
cucugaagcacacacuacu

SEQ ID NO: 332515 - RNA, 19 nt, Artificial Sequence
  Description of Artificial Sequence: Synthetic oligonucleotide
  Sense Strand Starting at position 174 of SEQ ID NO: 318047
cucauaagauaaggauaaa

SEQ ID NO: 332516 - RNA, 19 nt, Artificial Sequence
  Description of Artificial Sequence: Synthetic oligonucleotide
  Antisense Strand to SEQ ID NO: 332515
uuuauccuuaucuuaugag

SEQ ID NO: 332517 - RNA, 19 nt, Artificial Sequence
  Description of Artificial Sequence: Synthetic oligonucleotide
  Sense Strand Starting at position 174 of SEQ ID NO: 318375
guuauuaugagguacguag

SEQ ID NO: 332518 - RNA, 19 nt, Artificial Sequence
  Description of Artificial Sequence: Synthetic oligonucleotide
  Antisense Strand to SEQ ID NO: 332517
cuacguaccucauaauaac

SEQ ID NO: 332519 - RNA, 19 nt, Artificial Sequence
  Description of Artificial Sequence: Synthetic oligonucleotide
  Sense Strand Starting at position 174 of SEQ ID NO: 318413
agaacacugcaauguugaa

SEQ ID NO: 332520 - RNA, 19 nt, Artificial Sequence
  Description of Artificial Sequence: Synthetic oligonucleotide
  Antisense Strand to SEQ ID NO: 332519
uucaacauugcaguguucu

SEQ ID NO: 332521 - RNA, 19 nt, Artificial Sequence
  Description of Artificial Sequence: Synthetic oligonucleotide
  Sense Strand Starting at position 174 of SEQ ID NO: 318579
auggguaguggcuaucaua

SEQ ID NO: 332522 - RNA, 19 nt, Artificial Sequence
  Description of Artificial Sequence: Synthetic oligonucleotide
  Antisense Strand to SEQ ID NO: 332521
uaugauagccacuacccau

SEQ ID NO: 332523 - RNA, 19 nt, Artificial Sequence
  Description of Artificial Sequence: Synthetic oligonucleotide
  Sense Strand Starting at position 174 of SEQ ID NO: 318604
agugcagaucuguacaaca

SEQ ID NO: 332524 - RNA, 19 nt, Artificial Sequence
  Description of Artificial Sequence: Synthetic oligonucleotide
  Antisense Strand to SEQ ID NO: 332523
uguuguacagaucugcacu

SEQ ID NO: 332525 - RNA, 19 nt, Artificial Sequence
  Description of Artificial Sequence: Synthetic oligonucleotide
  Sense Strand Starting at position 174 of SEQ ID NO: 318606
ugcagaucuguacaacaag

SEQ ID NO: 332526 - RNA, 19 nt, Artificial Sequence
  Description of Artificial Sequence: Synthetic oligonucleotide
  Antisense Strand to SEQ ID NO: 332525
cuuguuguacagaucugca

SEQ ID NO: 332527 - RNA, 19 nt, Artificial Sequence
  Description of Artificial Sequence: Synthetic oligonucleotide
  Sense Strand Starting at position 174 of SEQ ID NO: 318756
uagagaguuccuggagcgu

SEQ ID NO: 332528 - RNA, 19 nt, Artificial Sequence
  Description of Artificial Sequence: Synthetic oligonucleotide
  Antisense Strand to SEQ ID NO: 332527
acgcuccaggaacucucua

SEQ ID NO: 332529 - RNA, 19 nt, Artificial Sequence
  Description of Artificial Sequence: Synthetic oligonucleotide
  Sense Strand Starting at position 174 of SEQ ID NO: 319137
ggcagaguucgcagugaga

SEQ ID NO: 332530 - RNA, 19 nt, Artificial Sequence
  Description of Artificial Sequence: Synthetic oligonucleotide
  Antisense Strand to SEQ ID NO: 332529
ucucacugcgaacucugcc

SEQ ID NO: 332531 - RNA, 19 nt, Artificial Sequence
  Description of Artificial Sequence: Synthetic oligonucleotide
  Sense Strand Starting at position 175 of SEQ ID NO: 315651
gagacauuguuaucauagg

SEQ ID NO: 332532 - RNA, 19 nt, Artificial Sequence
  Description of Artificial Sequence: Synthetic oligonucleotide
  Antisense Strand to SEQ ID NO: 332531
ccuaugauaacaaugucuc

SEQ ID NO: 332533 - RNA, 19 nt, Artificial Sequence
  Description of Artificial Sequence: Synthetic oligonucleotide
  Sense Strand Starting at position 175 of SEQ ID NO: 315964
guuaguuuauuacugaaga

SEQ ID NO: 332534 - RNA, 19 nt, Artificial Sequence
  Description of Artificial Sequence: Synthetic oligonucleotide
  Antisense Strand to SEQ ID NO: 332533
ucuucaguaauaaacuaac

SEQ ID NO: 332535 - RNA, 19 nt, Artificial Sequence
  Description of Artificial Sequence: Synthetic oligonucleotide
  Sense Strand Starting at position 175 of SEQ ID NO: 316010
aggguacacugcuuauaaa

SEQ ID NO: 332536 - RNA, 19 nt, Artificial Sequence
  Description of Artificial Sequence: Synthetic oligonucleotide
  Antisense Strand to SEQ ID NO: 332535
uuuauaagcaguguacccu

SEQ ID NO: 332537 - RNA, 19 nt, Artificial Sequence
  Description of Artificial Sequence: Synthetic oligonucleotide
  Sense Strand Starting at position 175 of SEQ ID NO: 316011
ggguacacugcuuauaaag

SEQ ID NO: 332538 - RNA, 19 nt, Artificial Sequence
  Description of Artificial Sequence: Synthetic oligonucleotide
  Antisense Strand to SEQ ID NO: 332537
cuuuauaagcaguguaccc

SEQ ID NO: 332539 - RNA, 19 nt, Artificial Sequence
  Description of Artificial Sequence: Synthetic oligonucleotide
  Sense Strand Starting at position 175 of SEQ ID NO: 316020
gcuuauaaagucuacaaga

SEQ ID NO: 332540 - RNA, 19 nt, Artificial Sequence
  Description of Artificial Sequence: Synthetic oligonucleotide
  Antisense Strand to SEQ ID NO: 332539
ucuuguagacuuuauaagc

SEQ ID NO: 332541 - RNA, 19 nt, Artificial Sequence
  Description of Artificial Sequence: Synthetic oligonucleotide
  Sense Strand Starting at position 175 of SEQ ID NO: 316036
agaguagagcagugaaugu

SEQ ID NO: 332542 - RNA, 19 nt, Artificial Sequence
  Description of Artificial Sequence: Synthetic oligonucleotide
  Antisense Strand to SEQ ID NO: 332541
acauucacugcucuacucu

SEQ ID NO: 332543 - RNA, 19 nt, Artificial Sequence
  Description of Artificial Sequence: Synthetic oligonucleotide
  Sense Strand Starting at position 175 of SEQ ID NO: 316137
cccacacugguguaguauu

SEQ ID NO: 332544 - RNA, 19 nt, Artificial Sequence
  Description of Artificial Sequence: Synthetic oligonucleotide
  Antisense Strand to SEQ ID NO: 332543
aauacuacaccaguguggg

SEQ ID NO: 332545 - RNA, 19 nt, Artificial Sequence
  Description of Artificial Sequence: Synthetic oligonucleotide
  Sense Strand Starting at position 175 of SEQ ID NO: 316303
acagcuuagguguggaaca

SEQ ID NO: 332546 - RNA, 19 nt, Artificial Sequence
  Description of Artificial Sequence: Synthetic oligonucleotide
  Antisense Strand to SEQ ID NO: 332545
uguuccacaccuaagcugu

SEQ ID NO: 332547 - RNA, 19 nt, Artificial Sequence
  Description of Artificial Sequence: Synthetic oligonucleotide
  Sense Strand Starting at position 175 of SEQ ID NO: 316339
uuguguaagcgcuuucuac

SEQ ID NO: 332548 - RNA, 19 nt, Artificial Sequence
  Description of Artificial Sequence: Synthetic oligonucleotide
  Antisense Strand to SEQ ID NO: 332547
guagaaagcgcuuacacaa

SEQ ID NO: 332549 - RNA, 19 nt, Artificial Sequence
  Description of Artificial Sequence: Synthetic oligonucleotide
  Sense Strand Starting at position 175 of SEQ ID NO: 316421
gacgcaugacuguauguca

SEQ ID NO: 332550 - RNA, 19 nt, Artificial Sequence
  Description of Artificial Sequence: Synthetic oligonucleotide
  Antisense Strand to SEQ ID NO: 332549
ugacauacagucaugcguc

SEQ ID NO: 332551 - RNA, 19 nt, Artificial Sequence
  Description of Artificial Sequence: Synthetic oligonucleotide
  Sense Strand Starting at position 175 of SEQ ID NO: 316424
gcaugacuguaugucaaau

SEQ ID NO: 332552 - RNA, 19 nt, Artificial Sequence
  Description of Artificial Sequence: Synthetic oligonucleotide
  Antisense Strand to SEQ ID NO: 332551
auuugacauacagucaugc

SEQ ID NO: 332553 - RNA, 19 nt, Artificial Sequence
  Description of Artificial Sequence: Synthetic oligonucleotide
  Sense Strand Starting at position 175 of SEQ ID NO: 316480
auuuaacgagcaugcauua

SEQ ID NO: 332554 - RNA, 19 nt, Artificial Sequence
  Description of Artificial Sequence: Synthetic oligonucleotide
  Antisense Strand to SEQ ID NO: 332553
uaaugcaugcucguuaaau

SEQ ID NO: 332555 - RNA, 19 nt, Artificial Sequence
  Description of Artificial Sequence: Synthetic oligonucleotide
  Sense Strand Starting at position 175 of SEQ ID NO: 316555
gcaagaauuggcuacuaac

SEQ ID NO: 332556 - RNA, 19 nt, Artificial Sequence
  Description of Artificial Sequence: Synthetic oligonucleotide
  Antisense Strand to SEQ ID NO: 332555
guuaguagccaauucuugc

SEQ ID NO: 332557 - RNA, 19 nt, Artificial Sequence
  Description of Artificial Sequence: Synthetic oligonucleotide
  Sense Strand Starting at position 175 of SEQ ID NO: 317539
cucuguuaaguguaaggga

SEQ ID NO: 332558 - RNA, 19 nt, Artificial Sequence
  Description of Artificial Sequence: Synthetic oligonucleotide
  Antisense Strand to SEQ ID NO: 332557
ucccuuacacuuaacagag

SEQ ID NO: 332559 - RNA, 19 nt, Artificial Sequence
  Description of Artificial Sequence: Synthetic oligonucleotide
  Sense Strand Starting at position 175 of SEQ ID NO: 317625
gacagagguucuuuagagu

SEQ ID NO: 332560 - RNA, 19 nt, Artificial Sequence
  Description of Artificial Sequence: Synthetic oligonucleotide
  Antisense Strand to SEQ ID NO: 332559
acucuaaagaaccucuguc

SEQ ID NO: 332561 - RNA, 19 nt, Artificial Sequence
  Description of Artificial Sequence: Synthetic oligonucleotide
  Sense Strand Starting at position 175 of SEQ ID NO: 317642
gucacucuucgcuaacauu

SEQ ID NO: 332562 - RNA, 19 nt, Artificial Sequence
  Description of Artificial Sequence: Synthetic oligonucleotide
  Antisense Strand to SEQ ID NO: 332561
aauguuagcgaagagugac

SEQ ID NO: 332563 - RNA, 19 nt, Artificial Sequence
  Description of Artificial Sequence: Synthetic oligonucleotide
  Sense Strand Starting at position 175 of SEQ ID NO: 317683
gcugaaucaugacccuaua

SEQ ID NO: 332564 - RNA, 19 nt, Artificial Sequence
  Description of Artificial Sequence: Synthetic oligonucleotide
  Antisense Strand to SEQ ID NO: 332563
uauagggucaugauucagc

SEQ ID NO: 332565 - RNA, 19 nt, Artificial Sequence
  Description of Artificial Sequence: Synthetic oligonucleotide
  Sense Strand Starting at position 175 of SEQ ID NO: 317721
ggucguauugauugaauug

SEQ ID NO: 332566 - RNA, 19 nt, Artificial Sequence
  Description of Artificial Sequence: Synthetic oligonucleotide
  Antisense Strand to SEQ ID NO: 332565
caauucaaucaauacgacc

SEQ ID NO: 332567 - RNA, 19 nt, Artificial Sequence
  Description of Artificial Sequence: Synthetic oligonucleotide
  Sense Strand Starting at position 175 of SEQ ID NO: 317722
gucguauugauugaauugu

SEQ ID NO: 332568 - RNA, 19 nt, Artificial Sequence
  Description of Artificial Sequence: Synthetic oligonucleotide
  Antisense Strand to SEQ ID NO: 332567
acaauucaaucaauacgac

SEQ ID NO: 332569 - RNA, 19 nt, Artificial Sequence
  Description of Artificial Sequence: Synthetic oligonucleotide
  Sense Strand Starting at position 175 of SEQ ID NO: 317768
uguacuuacccuuagguua

SEQ ID NO: 332570 - RNA, 19 nt, Artificial Sequence
  Description of Artificial Sequence: Synthetic oligonucleotide
  Antisense Strand to SEQ ID NO: 332569
uaaccuaaggguaaguaca

SEQ ID NO: 332571 - RNA, 19 nt, Artificial Sequence
  Description of Artificial Sequence: Synthetic oligonucleotide
  Sense Strand Starting at position 175 of SEQ ID NO: 317855
gucugaagucagcaguaau

SEQ ID NO: 332572 - RNA, 19 nt, Artificial Sequence
  Description of Artificial Sequence: Synthetic oligonucleotide
  Antisense Strand to SEQ ID NO: 332571
auuacugcugacuucagac

SEQ ID NO: 332573 - RNA, 19 nt, Artificial Sequence
  Description of Artificial Sequence: Synthetic oligonucleotide
  Sense Strand Starting at position 175 of SEQ ID NO: 317858
ugaagucagcaguaauaaa

SEQ ID NO: 332574 - RNA, 19 nt, Artificial Sequence
  Description of Artificial Sequence: Synthetic oligonucleotide
  Antisense Strand to SEQ ID NO: 332573
uuuauuacugcugacuuca

SEQ ID NO: 332575 - RNA, 19 nt, Artificial Sequence
  Description of Artificial Sequence: Synthetic oligonucleotide
  Sense Strand Starting at position 175 of SEQ ID NO: 317908
ugcugagucaaagaaguaa

SEQ ID NO: 332576 - RNA, 19 nt, Artificial Sequence
  Description of Artificial Sequence: Synthetic oligonucleotide
  Antisense Strand to SEQ ID NO: 332575
uuacuucuuugacucagca

SEQ ID NO: 332577 - RNA, 19 nt, Artificial Sequence
  Description of Artificial Sequence: Synthetic oligonucleotide
  Sense Strand Starting at position 175 of SEQ ID NO: 318048
uuuauaucucaaugguggu

SEQ ID NO: 332578 - RNA, 19 nt, Artificial Sequence
  Description of Artificial Sequence: Synthetic oligonucleotide
  Antisense Strand to SEQ ID NO: 332577
accaccauugagauauaaa

SEQ ID NO: 332579 - RNA, 19 nt, Artificial Sequence
  Description of Artificial Sequence: Synthetic oligonucleotide
  Sense Strand Starting at position 175 of SEQ ID NO: 318052
uaucucaauggugguguaa

SEQ ID NO: 332580 - RNA, 19 nt, Artificial Sequence
  Description of Artificial Sequence: Synthetic oligonucleotide
  Antisense Strand to SEQ ID NO: 332579
uuacaccaccauugagaua

SEQ ID NO: 332581 - RNA, 19 nt, Artificial Sequence
  Description of Artificial Sequence: Synthetic oligonucleotide
  Sense Strand Starting at position 175 of SEQ ID NO: 318153
ucagucauuuggccugcau

SEQ ID NO: 332582 - RNA, 19 nt, Artificial Sequence
  Description of Artificial Sequence: Synthetic oligonucleotide
  Antisense Strand to SEQ ID NO: 332581
augcaggccaaaugacuga

SEQ ID NO: 332583 - RNA, 19 nt, Artificial Sequence
  Description of Artificial Sequence: Synthetic oligonucleotide
  Sense Strand Starting at position 175 of SEQ ID NO: 318290
gcccaaagauggcucucaa

SEQ ID NO: 332584 - RNA, 19 nt, Artificial Sequence
  Description of Artificial Sequence: Synthetic oligonucleotide
  Antisense Strand to SEQ ID NO: 332583
uugagagccaucuuugggc

SEQ ID NO: 332585 - RNA, 19 nt, Artificial Sequence
  Description of Artificial Sequence: Synthetic oligonucleotide
  Sense Strand Starting at position 175 of SEQ ID NO: 318338
cagggaugcuuccugucuu

SEQ ID NO: 332586 - RNA, 19 nt, Artificial Sequence
  Description of Artificial Sequence: Synthetic oligonucleotide
  Antisense Strand to SEQ ID NO: 332585
aagacaggaagcaucccug

SEQ ID NO: 332587 - RNA, 19 nt, Artificial Sequence
  Description of Artificial Sequence: Synthetic oligonucleotide
  Sense Strand Starting at position 175 of SEQ ID NO: 318758
agagcuagacauugacgau

SEQ ID NO: 332588 - RNA, 19 nt, Artificial Sequence
  Description of Artificial Sequence: Synthetic oligonucleotide
  Antisense Strand to SEQ ID NO: 332587
aucgucaaugucuagcucu

SEQ ID NO: 332589 - RNA, 19 nt, Artificial Sequence
  Description of Artificial Sequence: Synthetic oligonucleotide
  Sense Strand Starting at position 175 of SEQ ID NO: 318836
guauuaauauuugcagucu

SEQ ID NO: 332590 - RNA, 19 nt, Artificial Sequence
  Description of Artificial Sequence: Synthetic oligonucleotide
  Antisense Strand to SEQ ID NO: 332589
agacugcaaauauuaauac

SEQ ID NO: 332591 - RNA, 19 nt, Artificial Sequence
  Description of Artificial Sequence: Synthetic oligonucleotide
  Sense Strand Starting at position 175 of SEQ ID NO: 318875
auccaugagcaucgucaau

SEQ ID NO: 332592 - RNA, 19 nt, Artificial Sequence
  Description of Artificial Sequence: Synthetic oligonucleotide
  Antisense Strand to SEQ ID NO: 332591
auugacgaugcucauggau

SEQ ID NO: 332593 - RNA, 19 nt, Artificial Sequence
  Description of Artificial Sequence: Synthetic oligonucleotide
  Sense Strand Starting at position 175 of SEQ ID NO: 318877
ccaugagcaucgucaauuu

SEQ ID NO: 332594 - RNA, 19 nt, Artificial Sequence
  Description of Artificial Sequence: Synthetic oligonucleotide
  Antisense Strand to SEQ ID NO: 332593
aaauugacgaugcucaugg

SEQ ID NO: 332595 - RNA, 19 nt, Artificial Sequence
  Description of Artificial Sequence: Synthetic oligonucleotide
  Sense Strand Starting at position 175 of SEQ ID NO: 319019
ugguaucgcuuauuuaacu

SEQ ID NO: 332596 - RNA, 19 nt, Artificial Sequence
  Description of Artificial Sequence: Synthetic oligonucleotide
  Antisense Strand to SEQ ID NO: 332595
aguuaaauaagcgauacca

SEQ ID NO: 332597 - RNA, 19 nt, Artificial Sequence
  Description of Artificial Sequence: Synthetic oligonucleotide
  Sense Strand Starting at position 175 of SEQ ID NO: 319020
gguaucgcuuauuuaacuu

SEQ ID NO: 332598 - RNA, 19 nt, Artificial Sequence
  Description of Artificial Sequence: Synthetic oligonucleotide
  Antisense Strand to SEQ ID NO: 332597
aaguuaaauaagcgauacc

SEQ ID NO: 332599 - RNA, 19 nt, Artificial Sequence
  Description of Artificial Sequence: Synthetic oligonucleotide
  Sense Strand Starting at position 175 of SEQ ID NO: 319052
uugcuaguauaugcaaaua

SEQ ID NO: 332600 - RNA, 19 nt, Artificial Sequence
  Description of Artificial Sequence: Synthetic oligonucleotide
  Antisense Strand to SEQ ID NO: 332599
uauuugcauauacuagcaa

SEQ ID NO: 332601 - RNA, 19 nt, Artificial Sequence
  Description of Artificial Sequence: Synthetic oligonucleotide
  Sense Strand Starting at position 175 of SEQ ID NO: 319063
ugcaaauagcauugacauu

SEQ ID NO: 332602 - RNA, 19 nt, Artificial Sequence
  Description of Artificial Sequence: Synthetic oligonucleotide
  Antisense Strand to SEQ ID NO: 332601
aaugucaaugcuauuugca

SEQ ID NO: 332603 - RNA, 19 nt, Artificial Sequence
  Description of Artificial Sequence: Synthetic oligonucleotide
  Sense Strand Starting at position 175 of SEQ ID NO: 319092
ccuuguauucugugaucau

SEQ ID NO: 332604 - RNA, 19 nt, Artificial Sequence
  Description of Artificial Sequence: Synthetic oligonucleotide
  Antisense Strand to SEQ ID NO: 332603
augaucacagaauacaagg

SEQ ID NO: 332605 - RNA, 19 nt, Artificial Sequence
  Description of Artificial Sequence: Synthetic oligonucleotide
  Sense Strand Starting at position 175 of SEQ ID NO: 319095
uguauucugugaucaucaa

SEQ ID NO: 332606 - RNA, 19 nt, Artificial Sequence
  Description of Artificial Sequence: Synthetic oligonucleotide
  Antisense Strand to SEQ ID NO: 332605
uugaugaucacagaauaca

SEQ ID NO: 332607 - RNA, 19 nt, Artificial Sequence
  Description of Artificial Sequence: Synthetic oligonucleotide
  Sense Strand Starting at position 175 of SEQ ID NO: 319096
guauucugugaucaucaau

SEQ ID NO: 332608 - RNA, 19 nt, Artificial Sequence
  Description of Artificial Sequence: Synthetic oligonucleotide
  Antisense Strand to SEQ ID NO: 332607
auugaugaucacagaauac

SEQ ID NO: 332609 - RNA, 19 nt, Artificial Sequence
  Description of Artificial Sequence: Synthetic oligonucleotide
  Sense Strand Starting at position 175 of SEQ ID NO: 319155
acaugugccuuuguggaau

SEQ ID NO: 332610 - RNA, 19 nt, Artificial Sequence
  Description of Artificial Sequence: Synthetic oligonucleotide
  Antisense Strand to SEQ ID NO: 332609
auuccacaaaggcacaugu

SEQ ID NO: 332611 - RNA, 19 nt, Artificial Sequence
  Description of Artificial Sequence: Synthetic oligonucleotide
  Sense Strand Starting at position 176 of SEQ ID NO: 315330
cugcauuauuucucucagu

SEQ ID NO: 332612 - RNA, 19 nt, Artificial Sequence
  Description of Artificial Sequence: Synthetic oligonucleotide
  Antisense Strand to SEQ ID NO: 332611
acugagagaaauaaugcag

SEQ ID NO: 332613 - RNA, 19 nt, Artificial Sequence
  Description of Artificial Sequence: Synthetic oligonucleotide
  Sense Strand Starting at position 176 of SEQ ID NO: 315331
ugcauuauuucucucagua

SEQ ID NO: 332614 - RNA, 19 nt, Artificial Sequence
  Description of Artificial Sequence: Synthetic oligonucleotide
  Antisense Strand to SEQ ID NO: 332613
uacugagagaaauaaugca

SEQ ID NO: 332615 - RNA, 19 nt, Artificial Sequence
  Description of Artificial Sequence: Synthetic oligonucleotide
  Sense Strand Starting at position 176 of SEQ ID NO: 315389
gggaaagauaaguguguuu

SEQ ID NO: 332616 - RNA, 19 nt, Artificial Sequence
  Description of Artificial Sequence: Synthetic oligonucleotide
  Antisense Strand to SEQ ID NO: 332615
aaacacacuuaucuuuccc

SEQ ID NO: 332617 - RNA, 19 nt, Artificial Sequence
  Description of Artificial Sequence: Synthetic oligonucleotide
  Sense Strand Starting at position 176 of SEQ ID NO: 315391
gaaagauaaguguguuuag

SEQ ID NO: 332618 - RNA, 19 nt, Artificial Sequence
  Description of Artificial Sequence: Synthetic oligonucleotide
  Antisense Strand to SEQ ID NO: 332617
cuaaacacacuuaucuuuc

SEQ ID NO: 332619 - RNA, 19 nt, Artificial Sequence
  Description of Artificial Sequence: Synthetic oligonucleotide
  Sense Strand Starting at position 176 of SEQ ID NO: 315392
aaagauaaguguguuuaga

SEQ ID NO: 332620 - RNA, 19 nt, Artificial Sequence
  Description of Artificial Sequence: Synthetic oligonucleotide
  Antisense Strand to SEQ ID NO: 332619
ucuaaacacacuuaucuuu

SEQ ID NO: 332621 - RNA, 19 nt, Artificial Sequence
  Description of Artificial Sequence: Synthetic oligonucleotide
  Sense Strand Starting at position 176 of SEQ ID NO: 315394
agauaaguguguuuagaac

SEQ ID NO: 332622 - RNA, 19 nt, Artificial Sequence
  Description of Artificial Sequence: Synthetic oligonucleotide
  Antisense Strand to SEQ ID NO: 332621
guucuaaacacacuuaucu

SEQ ID NO: 332623 - RNA, 19 nt, Artificial Sequence
  Description of Artificial Sequence: Synthetic oligonucleotide
  Sense Strand Starting at position 176 of SEQ ID NO: 315402
guguuuagaacuugacaug

SEQ ID NO: 332624 - RNA, 19 nt, Artificial Sequence
  Description of Artificial Sequence: Synthetic oligonucleotide
  Antisense Strand to SEQ ID NO: 332623
caugucaaguucuaaacac

SEQ ID NO: 332625 - RNA, 19 nt, Artificial Sequence
  Description of Artificial Sequence: Synthetic oligonucleotide
  Sense Strand Starting at position 176 of SEQ ID NO: 315510
ugaggaccaccuugugaaa

SEQ ID NO: 332626 - RNA, 19 nt, Artificial Sequence
  Description of Artificial Sequence: Synthetic oligonucleotide
  Antisense Strand to SEQ ID NO: 332625
uuucacaaggugguccuca

SEQ ID NO: 332627 - RNA, 19 nt, Artificial Sequence
  Description of Artificial Sequence: Synthetic oligonucleotide
  Sense Strand Starting at position 176 of SEQ ID NO: 315653
aaaggcuauggguguagaa

SEQ ID NO: 332628 - RNA, 19 nt, Artificial Sequence
  Description of Artificial Sequence: Synthetic oligonucleotide
  Antisense Strand to SEQ ID NO: 332627
uucuacacccauagccuuu

SEQ ID NO: 332629 - RNA, 19 nt, Artificial Sequence
  Description of Artificial Sequence: Synthetic oligonucleotide
  Sense Strand Starting at position 176 of SEQ ID NO: 315655
aggcuauggguguagaaag

SEQ ID NO: 332630 - RNA, 19 nt, Artificial Sequence
  Description of Artificial Sequence: Synthetic oligonucleotide
  Antisense Strand to SEQ ID NO: 332629
cuuucuacacccauagccu

SEQ ID NO: 332631 - RNA, 19 nt, Artificial Sequence
  Description of Artificial Sequence: Synthetic oligonucleotide
  Sense Strand Starting at position 176 of SEQ ID NO: 315708
uugccuguagaagauaaau

SEQ ID NO: 332632 - RNA, 19 nt, Artificial Sequence
  Description of Artificial Sequence: Synthetic oligonucleotide
  Antisense Strand to SEQ ID NO: 332631
auuuaucuucuacaggcaa

SEQ ID NO: 332633 - RNA, 19 nt, Artificial Sequence
  Description of Artificial Sequence: Synthetic oligonucleotide
  Sense Strand Starting at position 176 of SEQ ID NO: 315710
gccuguagaagauaaaugu

SEQ ID NO: 332634 - RNA, 19 nt, Artificial Sequence
  Description of Artificial Sequence: Synthetic oligonucleotide
  Antisense Strand to SEQ ID NO: 332633
acauuuaucuucuacaggc

SEQ ID NO: 332635 - RNA, 19 nt, Artificial Sequence
  Description of Artificial Sequence: Synthetic oligonucleotide
  Sense Strand Starting at position 176 of SEQ ID NO: 315714
guagaagauaaauguuugu

SEQ ID NO: 332636 - RNA, 19 nt, Artificial Sequence
  Description of Artificial Sequence: Synthetic oligonucleotide
  Antisense Strand to SEQ ID NO: 332635
acaaacauuuaucuucuac

SEQ ID NO: 332637 - RNA, 19 nt, Artificial Sequence
  Description of Artificial Sequence: Synthetic oligonucleotide
  Sense Strand Starting at position 176 of SEQ ID NO: 315927
gguagcuuggaccaggaau

SEQ ID NO: 332638 - RNA, 19 nt, Artificial Sequence
  Description of Artificial Sequence: Synthetic oligonucleotide
  Antisense Strand to SEQ ID NO: 332637
auuccugguccaagcuacc

SEQ ID NO: 332639 - RNA, 19 nt, Artificial Sequence
  Description of Artificial Sequence: Synthetic oligonucleotide
  Sense Strand Starting at position 176 of SEQ ID NO: 316057
aguccuuucugacuauauc

SEQ ID NO: 332640 - RNA, 19 nt, Artificial Sequence
  Description of Artificial Sequence: Synthetic oligonucleotide
  Antisense Strand to SEQ ID NO: 332639
gauauagucagaaaggacu

SEQ ID NO: 332641 - RNA, 19 nt, Artificial Sequence
  Description of Artificial Sequence: Synthetic oligonucleotide
  Sense Strand Starting at position 176 of SEQ ID NO: 316058
guccuuucugacuauauca

SEQ ID NO: 332642 - RNA, 19 nt, Artificial Sequence
  Description of Artificial Sequence: Synthetic oligonucleotide
  Antisense Strand to SEQ ID NO: 332641
ugauauagucagaaaggac

SEQ ID NO: 332643 - RNA, 19 nt, Artificial Sequence
  Description of Artificial Sequence: Synthetic oligonucleotide
  Sense Strand Starting at position 176 of SEQ ID NO: 317464
ggcaauuugcuaggcucua

SEQ ID NO: 332644 - RNA, 19 nt, Artificial Sequence
  Description of Artificial Sequence: Synthetic oligonucleotide
  Antisense Strand to SEQ ID NO: 332643
uagagccuagcaaauugcc

SEQ ID NO: 332645 - RNA, 19 nt, Artificial Sequence
  Description of Artificial Sequence: Synthetic oligonucleotide
  Sense Strand Starting at position 176 of SEQ ID NO: 317465
gcaauuugcuaggcucuau

SEQ ID NO: 332646 - RNA, 19 nt, Artificial Sequence
  Description of Artificial Sequence: Synthetic oligonucleotide
  Antisense Strand to SEQ ID NO: 332645
auagagccuagcaaauugc

SEQ ID NO: 332647 - RNA, 19 nt, Artificial Sequence
  Description of Artificial Sequence: Synthetic oligonucleotide
  Sense Strand Starting at position 176 of SEQ ID NO: 317469
uuugcuaggcucuauaaag

SEQ ID NO: 332648 - RNA, 19 nt, Artificial Sequence
  Description of Artificial Sequence: Synthetic oligonucleotide
  Antisense Strand to SEQ ID NO: 332647
cuuuauagagccuagcaaa

SEQ ID NO: 332649 - RNA, 19 nt, Artificial Sequence
  Description of Artificial Sequence: Synthetic oligonucleotide
  Sense Strand Starting at position 176 of SEQ ID NO: 317640
cugucaacaguaggaaauu

SEQ ID NO: 332650 - RNA, 19 nt, Artificial Sequence
  Description of Artificial Sequence: Synthetic oligonucleotide
  Antisense Strand to SEQ ID NO: 332649
aauuuccuacuguugacag

SEQ ID NO: 332651 - RNA, 19 nt, Artificial Sequence
  Description of Artificial Sequence: Synthetic oligonucleotide
  Sense Strand Starting at position 176 of SEQ ID NO: 317641
ugucaacaguaggaaauuu

SEQ ID NO: 332652 - RNA, 19 nt, Artificial Sequence
  Description of Artificial Sequence: Synthetic oligonucleotide
  Antisense Strand to SEQ ID NO: 332651
aaauuuccuacuguugaca

SEQ ID NO: 332653 - RNA, 19 nt, Artificial Sequence
  Description of Artificial Sequence: Synthetic oligonucleotide
  Sense Strand Starting at position 176 of SEQ ID NO: 317673
gggugacuuaaugggacau

SEQ ID NO: 332654 - RNA, 19 nt, Artificial Sequence
  Description of Artificial Sequence: Synthetic oligonucleotide
  Antisense Strand to SEQ ID NO: 332653
augucccauuaagucaccc

SEQ ID NO: 332655 - RNA, 19 nt, Artificial Sequence
  Description of Artificial Sequence: Synthetic oligonucleotide
  Sense Strand Starting at position 176 of SEQ ID NO: 317674
ggugacuuaaugggacauu

SEQ ID NO: 332656 - RNA, 19 nt, Artificial Sequence
  Description of Artificial Sequence: Synthetic oligonucleotide
  Antisense Strand to SEQ ID NO: 332655
aaugucccauuaagucacc

SEQ ID NO: 332657 - RNA, 19 nt, Artificial Sequence
  Description of Artificial Sequence: Synthetic oligonucleotide
  Sense Strand Starting at position 176 of SEQ ID NO: 317893
gcagauuucuucucugcaa

SEQ ID NO: 332658 - RNA, 19 nt, Artificial Sequence
  Description of Artificial Sequence: Synthetic oligonucleotide
  Antisense Strand to SEQ ID NO: 332657
uugcagagaagaaaucugc

SEQ ID NO: 332659 - RNA, 19 nt, Artificial Sequence
  Description of Artificial Sequence: Synthetic oligonucleotide
  Sense Strand Starting at position 176 of SEQ ID NO: 317943
uggaguguuaaaugaaaua

SEQ ID NO: 332660 - RNA, 19 nt, Artificial Sequence
  Description of Artificial Sequence: Synthetic oligonucleotide
  Antisense Strand to SEQ ID NO: 332659
uauuucauuuaacacucca

SEQ ID NO: 332661 - RNA, 19 nt, Artificial Sequence
  Description of Artificial Sequence: Synthetic oligonucleotide
  Sense Strand Starting at position 176 of SEQ ID NO: 317966
aggaaagugcccuguauag

SEQ ID NO: 332662 - RNA, 19 nt, Artificial Sequence
  Description of Artificial Sequence: Synthetic oligonucleotide
  Antisense Strand to SEQ ID NO: 332661
cuauacagggcacuuuccu

SEQ ID NO: 332663 - RNA, 19 nt, Artificial Sequence
  Description of Artificial Sequence: Synthetic oligonucleotide
  Sense Strand Starting at position 176 of SEQ ID NO: 317968
gaaagugcccuguauagaa

SEQ ID NO: 332664 - RNA, 19 nt, Artificial Sequence
  Description of Artificial Sequence: Synthetic oligonucleotide
  Antisense Strand to SEQ ID NO: 332663
uucuauacagggcacuuuc

SEQ ID NO: 332665 - RNA, 19 nt, Artificial Sequence
  Description of Artificial Sequence: Synthetic oligonucleotide
  Sense Strand Starting at position 176 of SEQ ID NO: 318226
gaggauguggcucaguagu

SEQ ID NO: 332666 - RNA, 19 nt, Artificial Sequence
  Description of Artificial Sequence: Synthetic oligonucleotide
  Antisense Strand to SEQ ID NO: 332665
acuacugagccacauccuc

SEQ ID NO: 332667 - RNA, 19 nt, Artificial Sequence
  Description of Artificial Sequence: Synthetic oligonucleotide
  Sense Strand Starting at position 176 of SEQ ID NO: 318239
aguaguggugccuaucaaa

SEQ ID NO: 332668 - RNA, 19 nt, Artificial Sequence
  Description of Artificial Sequence: Synthetic oligonucleotide
  Antisense Strand to SEQ ID NO: 332667
uuugauaggcaccacuacu

SEQ ID NO: 332669 - RNA, 19 nt, Artificial Sequence
  Description of Artificial Sequence: Synthetic oligonucleotide
  Sense Strand Starting at position 176 of SEQ ID NO: 318382
cggauuacaccugggcaua

SEQ ID NO: 332670 - RNA, 19 nt, Artificial Sequence
  Description of Artificial Sequence: Synthetic oligonucleotide
  Antisense Strand to SEQ ID NO: 332669
uaugcccagguguaauccg

SEQ ID NO: 332671 - RNA, 19 nt, Artificial Sequence
  Description of Artificial Sequence: Synthetic oligonucleotide
  Sense Strand Starting at position 176 of SEQ ID NO: 318383
ggauuacaccugggcauaa

SEQ ID NO: 332672 - RNA, 19 nt, Artificial Sequence
  Description of Artificial Sequence: Synthetic oligonucleotide
  Antisense Strand to SEQ ID NO: 332671
uuaugcccagguguaaucc

SEQ ID NO: 332673 - RNA, 19 nt, Artificial Sequence
  Description of Artificial Sequence: Synthetic oligonucleotide
  Sense Strand Starting at position 176 of SEQ ID NO: 318393
ugggcauaauguccaaauu

SEQ ID NO: 332674 - RNA, 19 nt, Artificial Sequence
  Description of Artificial Sequence: Synthetic oligonucleotide
  Antisense Strand to SEQ ID NO: 332673
aauuuggacauuaugccca

SEQ ID NO: 332675 - RNA, 19 nt, Artificial Sequence
  Description of Artificial Sequence: Synthetic oligonucleotide
  Sense Strand Starting at position 176 of SEQ ID NO: 318412
ugggcacuaucuuuaagaa

SEQ ID NO: 332676 - RNA, 19 nt, Artificial Sequence
  Description of Artificial Sequence: Synthetic oligonucleotide
  Antisense Strand to SEQ ID NO: 332675
uucuuaaagauagugccca

SEQ ID NO: 332677 - RNA, 19 nt, Artificial Sequence
  Description of Artificial Sequence: Synthetic oligonucleotide
  Sense Strand Starting at position 176 of SEQ ID NO: 318544
accugaucagcuugacuua

SEQ ID NO: 332678 - RNA, 19 nt, Artificial Sequence
  Description of Artificial Sequence: Synthetic oligonucleotide
  Antisense Strand to SEQ ID NO: 332677
uaagucaagcugaucaggu

SEQ ID NO: 332679 - RNA, 19 nt, Artificial Sequence
  Description of Artificial Sequence: Synthetic oligonucleotide
  Sense Strand Starting at position 176 of SEQ ID NO: 318573
gcuugaucacuuuaccagu

SEQ ID NO: 332680 - RNA, 19 nt, Artificial Sequence
  Description of Artificial Sequence: Synthetic oligonucleotide
  Antisense Strand to SEQ ID NO: 332679
acugguaaagugaucaagc

SEQ ID NO: 332681 - RNA, 19 nt, Artificial Sequence
  Description of Artificial Sequence: Synthetic oligonucleotide
  Sense Strand Starting at position 176 of SEQ ID NO: 318588
cagugugucccagugugua

SEQ ID NO: 332682 - RNA, 19 nt, Artificial Sequence
  Description of Artificial Sequence: Synthetic oligonucleotide
  Antisense Strand to SEQ ID NO: 332681
uacacacugggacacacug

SEQ ID NO: 332683 - RNA, 19 nt, Artificial Sequence
  Description of Artificial Sequence: Synthetic oligonucleotide
  Sense Strand Starting at position 176 of SEQ ID NO: 318715
guuccuauggauuauguca

SEQ ID NO: 332684 - RNA, 19 nt, Artificial Sequence
  Description of Artificial Sequence: Synthetic oligonucleotide
  Antisense Strand to SEQ ID NO: 332683
ugacauaauccauaggaac

SEQ ID NO: 332685 - RNA, 19 nt, Artificial Sequence
  Description of Artificial Sequence: Synthetic oligonucleotide
  Sense Strand Starting at position 176 of SEQ ID NO: 318752
uguaguauuugucuuugca

SEQ ID NO: 332686 - RNA, 19 nt, Artificial Sequence
  Description of Artificial Sequence: Synthetic oligonucleotide
  Antisense Strand to SEQ ID NO: 332685
ugcaaagacaaauacuaca

SEQ ID NO: 332687 - RNA, 19 nt, Artificial Sequence
  Description of Artificial Sequence: Synthetic oligonucleotide
  Sense Strand Starting at position 176 of SEQ ID NO: 318892
guuauuauuccuuaugcag

SEQ ID NO: 332688 - RNA, 19 nt, Artificial Sequence
  Description of Artificial Sequence: Synthetic oligonucleotide
  Antisense Strand to SEQ ID NO: 332687
cugcauaaggaauaauaac

SEQ ID NO: 332689 - RNA, 19 nt, Artificial Sequence
  Description of Artificial Sequence: Synthetic oligonucleotide
  Sense Strand Starting at position 176 of SEQ ID NO: 319069
uauuaugaccaguggauag

SEQ ID NO: 332690 - RNA, 19 nt, Artificial Sequence
  Description of Artificial Sequence: Synthetic oligonucleotide
  Antisense Strand to SEQ ID NO: 332689
cuauccacuggucauaaua

SEQ ID NO: 332691 - RNA, 19 nt, Artificial Sequence
  Description of Artificial Sequence: Synthetic oligonucleotide
  Sense Strand Starting at position 177 of SEQ ID NO: 315537
uuuggucuagcauagaagu

SEQ ID NO: 332692 - RNA, 19 nt, Artificial Sequence
  Description of Artificial Sequence: Synthetic oligonucleotide
  Antisense Strand to SEQ ID NO: 332691
acuucuaugcuagaccaaa

SEQ ID NO: 332693 - RNA, 19 nt, Artificial Sequence
  Description of Artificial Sequence: Synthetic oligonucleotide
  Sense Strand Starting at position 177 of SEQ ID NO: 315577
cuguauuggcaggaaguaa

SEQ ID NO: 332694 - RNA, 19 nt, Artificial Sequence
  Description of Artificial Sequence: Synthetic oligonucleotide
  Antisense Strand to SEQ ID NO: 332693
uuacuuccugccaauacag

SEQ ID NO: 332695 - RNA, 19 nt, Artificial Sequence
  Description of Artificial Sequence: Synthetic oligonucleotide
  Sense Strand Starting at position 177 of SEQ ID NO: 315623
uauggagacuguucccaaa

SEQ ID NO: 332696 - RNA, 19 nt, Artificial Sequence
  Description of Artificial Sequence: Synthetic oligonucleotide
  Antisense Strand to SEQ ID NO: 332695
uuugggaacagucuccaua

SEQ ID NO: 332697 - RNA, 19 nt, Artificial Sequence
  Description of Artificial Sequence: Synthetic oligonucleotide
  Sense Strand Starting at position 177 of SEQ ID NO: 315625
uggagacuguucccaaaug

SEQ ID NO: 332698 - RNA, 19 nt, Artificial Sequence
  Description of Artificial Sequence: Synthetic oligonucleotide
  Antisense Strand to SEQ ID NO: 332697
cauuugggaacagucucca

SEQ ID NO: 332699 - RNA, 19 nt, Artificial Sequence
  Description of Artificial Sequence: Synthetic oligonucleotide
  Sense Strand Starting at position 177 of SEQ ID NO: 315659
ugaggagucuucucuacuc

SEQ ID NO: 332700 - RNA, 19 nt, Artificial Sequence
  Description of Artificial Sequence: Synthetic oligonucleotide
  Antisense Strand to SEQ ID NO: 332699
gaguagagaagacuccuca

SEQ ID NO: 332701 - RNA, 19 nt, Artificial Sequence
  Description of Artificial Sequence: Synthetic oligonucleotide
  Sense Strand Starting at position 177 of SEQ ID NO: 315661
aggagucuucucuacucaa

SEQ ID NO: 332702 - RNA, 19 nt, Artificial Sequence
  Description of Artificial Sequence: Synthetic oligonucleotide
  Antisense Strand to SEQ ID NO: 332701
uugaguagagaagacuccu

SEQ ID NO: 332703 - RNA, 19 nt, Artificial Sequence
  Description of Artificial Sequence: Synthetic oligonucleotide
  Sense Strand Starting at position 177 of SEQ ID NO: 315981
cugcauuauuucucucagu

SEQ ID NO: 332704 - RNA, 19 nt, Artificial Sequence
  Description of Artificial Sequence: Synthetic oligonucleotide
  Antisense Strand to SEQ ID NO: 332703
acugagagaaauaaugcag

SEQ ID NO: 332705 - RNA, 19 nt, Artificial Sequence
  Description of Artificial Sequence: Synthetic oligonucleotide
  Sense Strand Starting at position 177 of SEQ ID NO: 315982
ugcauuauuucucucagua

SEQ ID NO: 332706 - RNA, 19 nt, Artificial Sequence
  Description of Artificial Sequence: Synthetic oligonucleotide
  Antisense Strand to SEQ ID NO: 332705
uacugagagaaauaaugca

SEQ ID NO: 332707 - RNA, 19 nt, Artificial Sequence
  Description of Artificial Sequence: Synthetic oligonucleotide
  Sense Strand Starting at position 177 of SEQ ID NO: 316040
gggaaagauaaguguguuu

SEQ ID NO: 332708 - RNA, 19 nt, Artificial Sequence
  Description of Artificial Sequence: Synthetic oligonucleotide
  Antisense Strand to SEQ ID NO: 332707
aaacacacuuaucuuuccc

SEQ ID NO: 332709 - RNA, 19 nt, Artificial Sequence
  Description of Artificial Sequence: Synthetic oligonucleotide
  Sense Strand Starting at position 177 of SEQ ID NO: 316042
gaaagauaaguguguuuag

SEQ ID NO: 332710 - RNA, 19 nt, Artificial Sequence
  Description of Artificial Sequence: Synthetic oligonucleotide
  Antisense Strand to SEQ ID NO: 332709
cuaaacacacuuaucuuuc

SEQ ID NO: 332711 - RNA, 19 nt, Artificial Sequence
  Description of Artificial Sequence: Synthetic oligonucleotide
  Sense Strand Starting at position 177 of SEQ ID NO: 316043
aaagauaaguguguuuaga

SEQ ID NO: 332712 - RNA, 19 nt, Artificial Sequence
  Description of Artificial Sequence: Synthetic oligonucleotide
  Antisense Strand to SEQ ID NO: 332711
ucuaaacacacuuaucuuu

SEQ ID NO: 332713 - RNA, 19 nt, Artificial Sequence
  Description of Artificial Sequence: Synthetic oligonucleotide
  Sense Strand Starting at position 177 of SEQ ID NO: 316045
agauaaguguguuuagaac

SEQ ID NO: 332714 - RNA, 19 nt, Artificial Sequence
  Description of Artificial Sequence: Synthetic oligonucleotide
  Antisense Strand to SEQ ID NO: 332713
guucuaaacacacuuaucu

SEQ ID NO: 332715 - RNA, 19 nt, Artificial Sequence
  Description of Artificial Sequence: Synthetic oligonucleotide
  Sense Strand Starting at position 177 of SEQ ID NO: 316053
guguuuagaacuugacaug

SEQ ID NO: 332716 - RNA, 19 nt, Artificial Sequence
  Description of Artificial Sequence: Synthetic oligonucleotide
  Antisense Strand to SEQ ID NO: 332715
caugucaaguucuaaacac

SEQ ID NO: 332717 - RNA, 19 nt, Artificial Sequence
  Description of Artificial Sequence: Synthetic oligonucleotide
  Sense Strand Starting at position 177 of SEQ ID NO: 316161
ugaggaccaccuugugaaa

SEQ ID NO: 332718 - RNA, 19 nt, Artificial Sequence
  Description of Artificial Sequence: Synthetic oligonucleotide
  Antisense Strand to SEQ ID NO: 332717
uuucacaaggugguccuca

SEQ ID NO: 332719 - RNA, 19 nt, Artificial Sequence
  Description of Artificial Sequence: Synthetic oligonucleotide
  Sense Strand Starting at position 177 of SEQ ID NO: 316304
aaaggcuauggguguagaa

SEQ ID NO: 332720 - RNA, 19 nt, Artificial Sequence
  Description of Artificial Sequence: Synthetic oligonucleotide
  Antisense Strand to SEQ ID NO: 332719
uucuacacccauagccuuu

SEQ ID NO: 332721 - RNA, 19 nt, Artificial Sequence
  Description of Artificial Sequence: Synthetic oligonucleotide
  Sense Strand Starting at position 177 of SEQ ID NO: 316306
aggcuauggguguagaaag

SEQ ID NO: 332722 - RNA, 19 nt, Artificial Sequence
  Description of Artificial Sequence: Synthetic oligonucleotide
  Antisense Strand to SEQ ID NO: 332721
cuuucuacacccauagccu

SEQ ID NO: 332723 - RNA, 19 nt, Artificial Sequence
  Description of Artificial Sequence: Synthetic oligonucleotide
  Sense Strand Starting at position 177 of SEQ ID NO: 316359
uugccuguagaagauaaau

SEQ ID NO: 332724 - RNA, 19 nt, Artificial Sequence
  Description of Artificial Sequence: Synthetic oligonucleotide
  Antisense Strand to SEQ ID NO: 332723
auuuaucuucuacaggcaa

SEQ ID NO: 332725 - RNA, 19 nt, Artificial Sequence
  Description of Artificial Sequence: Synthetic oligonucleotide
  Sense Strand Starting at position 177 of SEQ ID NO: 316361
gccuguagaagauaaaugu

SEQ ID NO: 332726 - RNA, 19 nt, Artificial Sequence
  Description of Artificial Sequence: Synthetic oligonucleotide
  Antisense Strand to SEQ ID NO: 332725
acauuuaucuucuacaggc

SEQ ID NO: 332727 - RNA, 19 nt, Artificial Sequence
  Description of Artificial Sequence: Synthetic oligonucleotide
  Sense Strand Starting at position 177 of SEQ ID NO: 316365
guagaagauaaauguuugu

SEQ ID NO: 332728 - RNA, 19 nt, Artificial Sequence
  Description of Artificial Sequence: Synthetic oligonucleotide
  Antisense Strand to SEQ ID NO: 332727
acaaacauuuaucuucuac

SEQ ID NO: 332729 - RNA, 19 nt, Artificial Sequence
  Description of Artificial Sequence: Synthetic oligonucleotide
  Sense Strand Starting at position 177 of SEQ ID NO: 316578
gguagcuuggaccaggaau

SEQ ID NO: 332730 - RNA, 19 nt, Artificial Sequence
  Description of Artificial Sequence: Synthetic oligonucleotide
  Antisense Strand to SEQ ID NO: 332729
auuccugguccaagcuacc

SEQ ID NO: 332731 - RNA, 19 nt, Artificial Sequence
  Description of Artificial Sequence: Synthetic oligonucleotide
  Sense Strand Starting at position 177 of SEQ ID NO: 316708
aguccuuucugacuauauc

SEQ ID NO: 332732 - RNA, 19 nt, Artificial Sequence
  Description of Artificial Sequence: Synthetic oligonucleotide
  Antisense Strand to SEQ ID NO: 332731
gauauagucagaaaggacu

SEQ ID NO: 332733 - RNA, 19 nt, Artificial Sequence
  Description of Artificial Sequence: Synthetic oligonucleotide
  Sense Strand Starting at position 177 of SEQ ID NO: 316709
guccuuucugacuauauca

SEQ ID NO: 332734 - RNA, 19 nt, Artificial Sequence
  Description of Artificial Sequence: Synthetic oligonucleotide
  Antisense Strand to SEQ ID NO: 332733
ugauauagucagaaaggac

SEQ ID NO: 332735 - RNA, 19 nt, Artificial Sequence
  Description of Artificial Sequence: Synthetic oligonucleotide
  Sense Strand Starting at position 177 of SEQ ID NO: 318115
ggcaauuugcuaggcucua

SEQ ID NO: 332736 - RNA, 19 nt, Artificial Sequence
  Description of Artificial Sequence: Synthetic oligonucleotide
  Antisense Strand to SEQ ID NO: 332735
uagagccuagcaaauugcc

SEQ ID NO: 332737 - RNA, 19 nt, Artificial Sequence
  Description of Artificial Sequence: Synthetic oligonucleotide
  Sense Strand Starting at position 177 of SEQ ID NO: 318116
gcaauuugcuaggcucuau

SEQ ID NO: 332738 - RNA, 19 nt, Artificial Sequence
  Description of Artificial Sequence: Synthetic oligonucleotide
  Antisense Strand to SEQ ID NO: 332737
auagagccuagcaaauugc

SEQ ID NO: 332739 - RNA, 19 nt, Artificial Sequence
  Description of Artificial Sequence: Synthetic oligonucleotide
  Sense Strand Starting at position 177 of SEQ ID NO: 318120
uuugcuaggcucuauaaag

SEQ ID NO: 332740 - RNA, 19 nt, Artificial Sequence
  Description of Artificial Sequence: Synthetic oligonucleotide
  Antisense Strand to SEQ ID NO: 332739
cuuuauagagccuagcaaa

SEQ ID NO: 332741 - RNA, 19 nt, Artificial Sequence
  Description of Artificial Sequence: Synthetic oligonucleotide
  Sense Strand Starting at position 177 of SEQ ID NO: 318291
cugucaacaguaggaaauu

SEQ ID NO: 332742 - RNA, 19 nt, Artificial Sequence
  Description of Artificial Sequence: Synthetic oligonucleotide
  Antisense Strand to SEQ ID NO: 332741
aauuuccuacuguugacag

SEQ ID NO: 332743 - RNA, 19 nt, Artificial Sequence
  Description of Artificial Sequence: Synthetic oligonucleotide
  Sense Strand Starting at position 177 of SEQ ID NO: 318292
ugucaacaguaggaaauuu

SEQ ID NO: 332744 - RNA, 19 nt, Artificial Sequence
  Description of Artificial Sequence: Synthetic oligonucleotide
  Antisense Strand to SEQ ID NO: 332743
aaauuuccuacuguugaca

SEQ ID NO: 332745 - RNA, 19 nt, Artificial Sequence
  Description of Artificial Sequence: Synthetic oligonucleotide
  Sense Strand Starting at position 177 of SEQ ID NO: 318324
gggugacuuaaugggacau

SEQ ID NO: 332746 - RNA, 19 nt, Artificial Sequence
  Description of Artificial Sequence: Synthetic oligonucleotide
  Antisense Strand to SEQ ID NO: 332745
augucccauuaagucaccc

SEQ ID NO: 332747 - RNA, 19 nt, Artificial Sequence
  Description of Artificial Sequence: Synthetic oligonucleotide
  Sense Strand Starting at position 177 of SEQ ID NO: 318325
ggugacuuaaugggacauu

SEQ ID NO: 332748 - RNA, 19 nt, Artificial Sequence
  Description of Artificial Sequence: Synthetic oligonucleotide
  Antisense Strand to SEQ ID NO: 332747
aaugucccauuaagucacc

SEQ ID NO: 332749 - RNA, 19 nt, Artificial Sequence
  Description of Artificial Sequence: Synthetic oligonucleotide
  Sense Strand Starting at position 177 of SEQ ID NO: 318544
gcagauuucuucucugcaa

SEQ ID NO: 332750 - RNA, 19 nt, Artificial Sequence
  Description of Artificial Sequence: Synthetic oligonucleotide
  Antisense Strand to SEQ ID NO: 332749
uugcagagaagaaaucugc

SEQ ID NO: 332751 - RNA, 19 nt, Artificial Sequence
  Description of Artificial Sequence: Synthetic oligonucleotide
  Sense Strand Starting at position 177 of SEQ ID NO: 318594
uggaguguuaaaugaaaua

SEQ ID NO: 332752 - RNA, 19 nt, Artificial Sequence
  Description of Artificial Sequence: Synthetic oligonucleotide
  Antisense Strand to SEQ ID NO: 332751
uauuucauuuaacacucca

SEQ ID NO: 332753 - RNA, 19 nt, Artificial Sequence
  Description of Artificial Sequence: Synthetic oligonucleotide
  Sense Strand Starting at position 177 of SEQ ID NO: 318617
aggaaagugcccuguauag

SEQ ID NO: 332754 - RNA, 19 nt, Artificial Sequence
  Description of Artificial Sequence: Synthetic oligonucleotide
  Antisense Strand to SEQ ID NO: 332753
cuauacagggcacuuuccu

SEQ ID NO: 332755 - RNA, 19 nt, Artificial Sequence
  Description of Artificial Sequence: Synthetic oligonucleotide
  Sense Strand Starting at position 177 of SEQ ID NO: 318619
gaaagugcccuguauagaa

SEQ ID NO: 332756 - RNA, 19 nt, Artificial Sequence
  Description of Artificial Sequence: Synthetic oligonucleotide
  Antisense Strand to SEQ ID NO: 332755
uucuauacagggcacuuuc

SEQ ID NO: 332757 - RNA, 19 nt, Artificial Sequence
  Description of Artificial Sequence: Synthetic oligonucleotide
  Sense Strand Starting at position 177 of SEQ ID NO: 318877
gaggauguggcucaguagu

SEQ ID NO: 332758 - RNA, 19 nt, Artificial Sequence
  Description of Artificial Sequence: Synthetic oligonucleotide
  Antisense Strand to SEQ ID NO: 332757
acuacugagccacauccuc

SEQ ID NO: 332759 - RNA, 19 nt, Artificial Sequence
  Description of Artificial Sequence: Synthetic oligonucleotide
  Sense Strand Starting at position 177 of SEQ ID NO: 318890
aguaguggugccuaucaaa

SEQ ID NO: 332760 - RNA, 19 nt, Artificial Sequence
  Description of Artificial Sequence: Synthetic oligonucleotide
  Antisense Strand to SEQ ID NO: 332759
uuugauaggcaccacuacu

SEQ ID NO: 332761 - RNA, 19 nt, Artificial Sequence
  Description of Artificial Sequence: Synthetic oligonucleotide
  Sense Strand Starting at position 177 of SEQ ID NO: 319033
cggauuacaccugggcaua

SEQ ID NO: 332762 - RNA, 19 nt, Artificial Sequence
  Description of Artificial Sequence: Synthetic oligonucleotide
  Antisense Strand to SEQ ID NO: 332761
uaugcccagguguaauccg

SEQ ID NO: 332763 - RNA, 19 nt, Artificial Sequence
  Description of Artificial Sequence: Synthetic oligonucleotide
  Sense Strand Starting at position 177 of SEQ ID NO: 319034
ggauuacaccugggcauaa

SEQ ID NO: 332764 - RNA, 19 nt, Artificial Sequence
  Description of Artificial Sequence: Synthetic oligonucleotide
  Antisense Strand to SEQ ID NO: 332763
uuaugcccagguguaaucc

SEQ ID NO: 332765 - RNA, 19 nt, Artificial Sequence
  Description of Artificial Sequence: Synthetic oligonucleotide
  Sense Strand Starting at position 177 of SEQ ID NO: 319044
ugggcauaauguccaaauu

SEQ ID NO: 332766 - RNA, 19 nt, Artificial Sequence
  Description of Artificial Sequence: Synthetic oligonucleotide
  Antisense Strand to SEQ ID NO: 332765
aauuuggacauuaugccca

SEQ ID NO: 332767 - RNA, 19 nt, Artificial Sequence
  Description of Artificial Sequence: Synthetic oligonucleotide
  Sense Strand Starting at position 177 of SEQ ID NO: 319063
ugggcacuaucuuuaagaa

SEQ ID NO: 332768 - RNA, 19 nt, Artificial Sequence
  Description of Artificial Sequence: Synthetic oligonucleotide
  Antisense Strand to SEQ ID NO: 332767
uucuuaaagauagugccca

SEQ ID NO: 332769 - RNA, 19 nt, Artificial Sequence
  Description of Artificial Sequence: Synthetic oligonucleotide
  Sense Strand Starting at position 177 of SEQ ID NO: 319195
accugaucagcuugacuua

SEQ ID NO: 332770 - RNA, 19 nt, Artificial Sequence
  Description of Artificial Sequence: Synthetic oligonucleotide
  Antisense Strand to SEQ ID NO: 332769
uaagucaagcugaucaggu

SEQ ID NO: 332771 - RNA, 19 nt, Artificial Sequence
  Description of Artificial Sequence: Synthetic oligonucleotide
  Sense Strand Starting at position 178 of SEQ ID NO: 315475
acugaagaauucuagauuu

SEQ ID NO: 332772 - RNA, 19 nt, Artificial Sequence
  Description of Artificial Sequence: Synthetic oligonucleotide
  Antisense Strand to SEQ ID NO: 332771
aaaucuagaauucuucagu

SEQ ID NO: 332773 - RNA, 19 nt, Artificial Sequence
  Description of Artificial Sequence: Synthetic oligonucleotide
  Sense Strand Starting at position 178 of SEQ ID NO: 315618
acaagcauuucggaugaaa

SEQ ID NO: 332774 - RNA, 19 nt, Artificial Sequence
  Description of Artificial Sequence: Synthetic oligonucleotide
  Antisense Strand to SEQ ID NO: 332773
uuucauccgaaaugcuugu

SEQ ID NO: 332775 - RNA, 19 nt, Artificial Sequence
  Description of Artificial Sequence: Synthetic oligonucleotide
  Sense Strand Starting at position 178 of SEQ ID NO: 315652
ugaaauauacuguggguau

SEQ ID NO: 332776 - RNA, 19 nt, Artificial Sequence
  Description of Artificial Sequence: Synthetic oligonucleotide
  Antisense Strand to SEQ ID NO: 332775
auacccacaguauauuuca

SEQ ID NO: 332777 - RNA, 19 nt, Artificial Sequence
  Description of Artificial Sequence: Synthetic oligonucleotide
  Sense Strand Starting at position 178 of SEQ ID NO: 315702
uguacaauagcucauugau

SEQ ID NO: 332778 - RNA, 19 nt, Artificial Sequence
  Description of Artificial Sequence: Synthetic oligonucleotide
  Antisense Strand to SEQ ID NO: 332777
aucaaugagcuauuguaca

SEQ ID NO: 332779 - RNA, 19 nt, Artificial Sequence
  Description of Artificial Sequence: Synthetic oligonucleotide
  Sense Strand Starting at position 178 of SEQ ID NO: 315734
ugcuuacauguugaaauaa

SEQ ID NO: 332780 - RNA, 19 nt, Artificial Sequence
  Description of Artificial Sequence: Synthetic oligonucleotide
  Antisense Strand to SEQ ID NO: 332779
uuauuucaacauguaagca

SEQ ID NO: 332781 - RNA, 19 nt, Artificial Sequence
  Description of Artificial Sequence: Synthetic oligonucleotide
  Sense Strand Starting at position 178 of SEQ ID NO: 315805
accuguuugcuuucgcauu

SEQ ID NO: 332782 - RNA, 19 nt, Artificial Sequence
  Description of Artificial Sequence: Synthetic oligonucleotide
  Antisense Strand to SEQ ID NO: 332781
aaugcgaaagcaaacaggu

SEQ ID NO: 332783 - RNA, 19 nt, Artificial Sequence
  Description of Artificial Sequence: Synthetic oligonucleotide
  Sense Strand Starting at position 178 of SEQ ID NO: 315860
ugguaacaguaucccuauu

SEQ ID NO: 332784 - RNA, 19 nt, Artificial Sequence
  Description of Artificial Sequence: Synthetic oligonucleotide
  Antisense Strand to SEQ ID NO: 332783
aauagggauacuguuacca

SEQ ID NO: 332785 - RNA, 19 nt, Artificial Sequence
  Description of Artificial Sequence: Synthetic oligonucleotide
  Sense Strand Starting at position 178 of SEQ ID NO: 315881
acagcacuggccugagauu

SEQ ID NO: 332786 - RNA, 19 nt, Artificial Sequence
  Description of Artificial Sequence: Synthetic oligonucleotide
  Antisense Strand to SEQ ID NO: 332785
aaucucaggccagugcugu

SEQ ID NO: 332787 - RNA, 19 nt, Artificial Sequence
  Description of Artificial Sequence: Synthetic oligonucleotide
  Sense Strand Starting at position 178 of SEQ ID NO: 315892
cugagauuccaaugcuuuc

SEQ ID NO: 332788 - RNA, 19 nt, Artificial Sequence
  Description of Artificial Sequence: Synthetic oligonucleotide
  Antisense Strand to SEQ ID NO: 332787
gaaagcauuggaaucucag

SEQ ID NO: 332789 - RNA, 19 nt, Artificial Sequence
  Description of Artificial Sequence: Synthetic oligonucleotide
  Sense Strand Starting at position 178 of SEQ ID NO: 315994
gaggaauucugcuuuagaa

SEQ ID NO: 332790 - RNA, 19 nt, Artificial Sequence
  Description of Artificial Sequence: Synthetic oligonucleotide
  Antisense Strand to SEQ ID NO: 332789
uucuaaagcagaauuccuc

SEQ ID NO: 332791 - RNA, 19 nt, Artificial Sequence
  Description of Artificial Sequence: Synthetic oligonucleotide
  Sense Strand Starting at position 178 of SEQ ID NO: 316096
uugauaccagcuuggucaa

SEQ ID NO: 332792 - RNA, 19 nt, Artificial Sequence
  Description of Artificial Sequence: Synthetic oligonucleotide
  Antisense Strand to SEQ ID NO: 332791
uugaccaagcugguaucaa

SEQ ID NO: 332793 - RNA, 19 nt, Artificial Sequence
  Description of Artificial Sequence: Synthetic oligonucleotide
  Sense Strand Starting at position 178 of SEQ ID NO: 316310
gaaagaucccucuggguac

SEQ ID NO: 332794 - RNA, 19 nt, Artificial Sequence
  Description of Artificial Sequence: Synthetic oligonucleotide
  Antisense Strand to SEQ ID NO: 332793
guacccagagggaucuuuc

SEQ ID NO: 332795 - RNA, 19 nt, Artificial Sequence
  Description of Artificial Sequence: Synthetic oligonucleotide
  Sense Strand Starting at position 178 of SEQ ID NO: 316808
cacuuaggucauggagaug

SEQ ID NO: 332796 - RNA, 19 nt, Artificial Sequence
  Description of Artificial Sequence: Synthetic oligonucleotide
  Antisense Strand to SEQ ID NO: 332795
caucuccaugaccuaagug

SEQ ID NO: 332797 - RNA, 19 nt, Artificial Sequence
  Description of Artificial Sequence: Synthetic oligonucleotide
  Sense Strand Starting at position 178 of SEQ ID NO: 317955
acaugaaguccauguucgu

SEQ ID NO: 332798 - RNA, 19 nt, Artificial Sequence
  Description of Artificial Sequence: Synthetic oligonucleotide
  Antisense Strand to SEQ ID NO: 332797
acgaacauggacuucaugu

SEQ ID NO: 332799 - RNA, 19 nt, Artificial Sequence
  Description of Artificial Sequence: Synthetic oligonucleotide
  Sense Strand Starting at position 178 of SEQ ID NO: 318047
gggugcaccucucuuagau

SEQ ID NO: 332800 - RNA, 19 nt, Artificial Sequence
  Description of Artificial Sequence: Synthetic oligonucleotide
  Antisense Strand to SEQ ID NO: 332799
aucuaagagaggugcaccc

SEQ ID NO: 332801 - RNA, 19 nt, Artificial Sequence
  Description of Artificial Sequence: Synthetic oligonucleotide
  Sense Strand Starting at position 178 of SEQ ID NO: 318298
auuauaauacugugcggua

SEQ ID NO: 332802 - RNA, 19 nt, Artificial Sequence
  Description of Artificial Sequence: Synthetic oligonucleotide
  Antisense Strand to SEQ ID NO: 332801
uaccgcacaguauuauaau

SEQ ID NO: 332803 - RNA, 19 nt, Artificial Sequence
  Description of Artificial Sequence: Synthetic oligonucleotide
  Sense Strand Starting at position 178 of SEQ ID NO: 318299
uuauaauacugugcgguaa

SEQ ID NO: 332804 - RNA, 19 nt, Artificial Sequence
  Description of Artificial Sequence: Synthetic oligonucleotide
  Antisense Strand to SEQ ID NO: 332803
uuaccgcacaguauuauaa

SEQ ID NO: 332805 - RNA, 19 nt, Artificial Sequence
  Description of Artificial Sequence: Synthetic oligonucleotide
  Sense Strand Starting at position 178 of SEQ ID NO: 318312
cgguaagugccacagauca

SEQ ID NO: 332806 - RNA, 19 nt, Artificial Sequence
  Description of Artificial Sequence: Synthetic oligonucleotide
  Antisense Strand to SEQ ID NO: 332805
ugaucuguggcacuuaccg

SEQ ID NO: 332807 - RNA, 19 nt, Artificial Sequence
  Description of Artificial Sequence: Synthetic oligonucleotide
  Sense Strand Starting at position 178 of SEQ ID NO: 318314
guaagugccacagaucaga

SEQ ID NO: 332808 - RNA, 19 nt, Artificial Sequence
  Description of Artificial Sequence: Synthetic oligonucleotide
  Antisense Strand to SEQ ID NO: 332807
ucugaucuguggcacuuac

SEQ ID NO: 332809 - RNA, 19 nt, Artificial Sequence
  Description of Artificial Sequence: Synthetic oligonucleotide
  Sense Strand Starting at position 178 of SEQ ID NO: 318339
uuacaaagagcuggucuua

SEQ ID NO: 332810 - RNA, 19 nt, Artificial Sequence
  Description of Artificial Sequence: Synthetic oligonucleotide
  Antisense Strand to SEQ ID NO: 332809
uaagaccagcucuuuguaa

SEQ ID NO: 332811 - RNA, 19 nt, Artificial Sequence
  Description of Artificial Sequence: Synthetic oligonucleotide
  Sense Strand Starting at position 178 of SEQ ID NO: 318413
ggagguggcuuugcagaua

SEQ ID NO: 332812 - RNA, 19 nt, Artificial Sequence
  Description of Artificial Sequence: Synthetic oligonucleotide
  Antisense Strand to SEQ ID NO: 332811
uaucugcaaagccaccucc

SEQ ID NO: 332813 - RNA, 19 nt, Artificial Sequence
  Description of Artificial Sequence: Synthetic oligonucleotide
  Sense Strand Starting at position 178 of SEQ ID NO: 318416
gguggcuuugcagauaggu

SEQ ID NO: 332814 - RNA, 19 nt, Artificial Sequence
  Description of Artificial Sequence: Synthetic oligonucleotide
  Antisense Strand to SEQ ID NO: 332813
accuaucugcaaagccacc

SEQ ID NO: 332815 - RNA, 19 nt, Artificial Sequence
  Description of Artificial Sequence: Synthetic oligonucleotide
  Sense Strand Starting at position 178 of SEQ ID NO: 318418
uggcuuugcagauagguau

SEQ ID NO: 332816 - RNA, 19 nt, Artificial Sequence
  Description of Artificial Sequence: Synthetic oligonucleotide
  Antisense Strand to SEQ ID NO: 332815
auaccuaucugcaaagcca

SEQ ID NO: 332817 - RNA, 19 nt, Artificial Sequence
  Description of Artificial Sequence: Synthetic oligonucleotide
  Sense Strand Starting at position 178 of SEQ ID NO: 318422
uuugcagauagguaucgaa

SEQ ID NO: 332818 - RNA, 19 nt, Artificial Sequence
  Description of Artificial Sequence: Synthetic oligonucleotide
  Antisense Strand to SEQ ID NO: 332817
uucgauaccuaucugcaaa

SEQ ID NO: 332819 - RNA, 19 nt, Artificial Sequence
  Description of Artificial Sequence: Synthetic oligonucleotide
  Sense Strand Starting at position 178 of SEQ ID NO: 318429
auagguaucgaaugacaag

SEQ ID NO: 332820 - RNA, 19 nt, Artificial Sequence
  Description of Artificial Sequence: Synthetic oligonucleotide
  Antisense Strand to SEQ ID NO: 332819
cuugucauucgauaccuau

SEQ ID NO: 332821 - RNA, 19 nt, Artificial Sequence
  Description of Artificial Sequence: Synthetic oligonucleotide
  Sense Strand Starting at position 178 of SEQ ID NO: 318474
aaguuacaggauuguggau

SEQ ID NO: 332822 - RNA, 19 nt, Artificial Sequence
  Description of Artificial Sequence: Synthetic oligonucleotide
  Antisense Strand to SEQ ID NO: 332821
auccacaauccuguaacuu

SEQ ID NO: 332823 - RNA, 19 nt, Artificial Sequence
  Description of Artificial Sequence: Synthetic oligonucleotide
  Sense Strand Starting at position 178 of SEQ ID NO: 318490
gauauugaggagugguaua

SEQ ID NO: 332824 - RNA, 19 nt, Artificial Sequence
  Description of Artificial Sequence: Synthetic oligonucleotide
  Antisense Strand to SEQ ID NO: 332823
uauaccacuccucaauauc

SEQ ID NO: 332825 - RNA, 19 nt, Artificial Sequence
  Description of Artificial Sequence: Synthetic oligonucleotide
  Sense Strand Starting at position 178 of SEQ ID NO: 318501
gugguauagacaggaaugu

SEQ ID NO: 332826 - RNA, 19 nt, Artificial Sequence
  Description of Artificial Sequence: Synthetic oligonucleotide
  Antisense Strand to SEQ ID NO: 332825
acauuccugucuauaccac

SEQ ID NO: 332827 - RNA, 19 nt, Artificial Sequence
  Description of Artificial Sequence: Synthetic oligonucleotide
  Sense Strand Starting at position 178 of SEQ ID NO: 318674
ggacagggucgguaucaga

SEQ ID NO: 332828 - RNA, 19 nt, Artificial Sequence
  Description of Artificial Sequence: Synthetic oligonucleotide
  Antisense Strand to SEQ ID NO: 332827
ucugauaccgacccugucc

SEQ ID NO: 332829 - RNA, 19 nt, Artificial Sequence
  Description of Artificial Sequence: Synthetic oligonucleotide
  Sense Strand Starting at position 178 of SEQ ID NO: 318677
cagggucgguaucagauuu

SEQ ID NO: 332830 - RNA, 19 nt, Artificial Sequence
  Description of Artificial Sequence: Synthetic oligonucleotide
  Antisense Strand to SEQ ID NO: 332829
aaaucugauaccgacccug

SEQ ID NO: 332831 - RNA, 19 nt, Artificial Sequence
  Description of Artificial Sequence: Synthetic oligonucleotide
  Sense Strand Starting at position 178 of SEQ ID NO: 318683
cgguaucagauuugugugu

SEQ ID NO: 332832 - RNA, 19 nt, Artificial Sequence
  Description of Artificial Sequence: Synthetic oligonucleotide
  Antisense Strand to SEQ ID NO: 332831
acacacaaaucugauaccg

SEQ ID NO: 332833 - RNA, 19 nt, Artificial Sequence
  Description of Artificial Sequence: Synthetic oligonucleotide
  Sense Strand Starting at position 178 of SEQ ID NO: 318742
cugggugaaguuugaggua

SEQ ID NO: 332834 - RNA, 19 nt, Artificial Sequence
  Description of Artificial Sequence: Synthetic oligonucleotide
  Antisense Strand to SEQ ID NO: 332833
uaccucaaacuucacccag

SEQ ID NO: 332835 - RNA, 19 nt, Artificial Sequence
  Description of Artificial Sequence: Synthetic oligonucleotide
  Sense Strand Starting at position 178 of SEQ ID NO: 318832
aaguaauagugacuugaau

SEQ ID NO: 332836 - RNA, 19 nt, Artificial Sequence
  Description of Artificial Sequence: Synthetic oligonucleotide
  Antisense Strand to SEQ ID NO: 332835
auucaagucacuauuacuu

SEQ ID NO: 332837 - RNA, 19 nt, Artificial Sequence
  Description of Artificial Sequence: Synthetic oligonucleotide
  Sense Strand Starting at position 178 of SEQ ID NO: 319004
caucucugagucuggauaa

SEQ ID NO: 332838 - RNA, 19 nt, Artificial Sequence
  Description of Artificial Sequence: Synthetic oligonucleotide
  Antisense Strand to SEQ ID NO: 332837
uuauccagacucagagaug

SEQ ID NO: 332839 - RNA, 19 nt, Artificial Sequence
  Description of Artificial Sequence: Synthetic oligonucleotide
  Sense Strand Starting at position 178 of SEQ ID NO: 319011
gagucuggauaagaagaaa

SEQ ID NO: 332840 - RNA, 19 nt, Artificial Sequence
  Description of Artificial Sequence: Synthetic oligonucleotide
  Antisense Strand to SEQ ID NO: 332839
uuucuucuuauccagacuc

SEQ ID NO: 332841 - RNA, 19 nt, Artificial Sequence
  Description of Artificial Sequence: Synthetic oligonucleotide
  Sense Strand Starting at position 178 of SEQ ID NO: 319079
guuauaaagcuuuguuaga

SEQ ID NO: 332842 - RNA, 19 nt, Artificial Sequence
  Description of Artificial Sequence: Synthetic oligonucleotide
  Antisense Strand to SEQ ID NO: 332841
ucuaacaaagcuuuauaac

SEQ ID NO: 332843 - RNA, 19 nt, Artificial Sequence
  Description of Artificial Sequence: Synthetic oligonucleotide
  Sense Strand Starting at position 178 of SEQ ID NO: 319081
uauaaagcuuuguuagaag

SEQ ID NO: 332844 - RNA, 19 nt, Artificial Sequence
  Description of Artificial Sequence: Synthetic oligonucleotide
  Antisense Strand to SEQ ID NO: 332843
cuucuaacaaagcuuuaua

SEQ ID NO: 332845 - RNA, 19 nt, Artificial Sequence
  Description of Artificial Sequence: Synthetic oligonucleotide
  Sense Strand Starting at position 178 of SEQ ID NO: 319118
guuuauaucucauugguca

SEQ ID NO: 332846 - RNA, 19 nt, Artificial Sequence
  Description of Artificial Sequence: Synthetic oligonucleotide
  Antisense Strand to SEQ ID NO: 332845
ugaccaaugagauauaaac

SEQ ID NO: 332847 - RNA, 19 nt, Artificial Sequence
  Description of Artificial Sequence: Synthetic oligonucleotide
  Sense Strand Starting at position 178 of SEQ ID NO: 319119
uuuauaucucauuggucac

SEQ ID NO: 332848 - RNA, 19 nt, Artificial Sequence
  Description of Artificial Sequence: Synthetic oligonucleotide
  Antisense Strand to SEQ ID NO: 332847
gugaccaaugagauauaaa

SEQ ID NO: 332849 - RNA, 19 nt, Artificial Sequence
  Description of Artificial Sequence: Synthetic oligonucleotide
  Sense Strand Starting at position 178 of SEQ ID NO: 319141
ugucuuggcaaacgaugau

SEQ ID NO: 332850 - RNA, 19 nt, Artificial Sequence
  Description of Artificial Sequence: Synthetic oligonucleotide
  Antisense Strand to SEQ ID NO: 332849
aucaucguuugccaagaca

SEQ ID NO: 332851 - RNA, 19 nt, Artificial Sequence
  Description of Artificial Sequence: Synthetic oligonucleotide
  Sense Strand Starting at position 179 of SEQ ID NO: 315307
ccaagcauucuauggccau

SEQ ID NO: 332852 - RNA, 19 nt, Artificial Sequence
  Description of Artificial Sequence: Synthetic oligonucleotide
  Antisense Strand to SEQ ID NO: 332851
auggccauagaaugcuugg

SEQ ID NO: 332853 - RNA, 19 nt, Artificial Sequence
  Description of Artificial Sequence: Synthetic oligonucleotide
  Sense Strand Starting at position 179 of SEQ ID NO: 315310
agcauucuauggccauaca

SEQ ID NO: 332854 - RNA, 19 nt, Artificial Sequence
  Description of Artificial Sequence: Synthetic oligonucleotide
  Antisense Strand to SEQ ID NO: 332853
uguauggccauagaaugcu

SEQ ID NO: 332855 - RNA, 19 nt, Artificial Sequence
  Description of Artificial Sequence: Synthetic oligonucleotide
  Sense Strand Starting at position 179 of SEQ ID NO: 315501
ccauaacaaugguugguau

SEQ ID NO: 332856 - RNA, 19 nt, Artificial Sequence
  Description of Artificial Sequence: Synthetic oligonucleotide
  Antisense Strand to SEQ ID NO: 332855
auaccaaccauuguuaugg

SEQ ID NO: 332857 - RNA, 19 nt, Artificial Sequence
  Description of Artificial Sequence: Synthetic oligonucleotide
  Sense Strand Starting at position 179 of SEQ ID NO: 315502
cauaacaaugguugguauu

SEQ ID NO: 332858 - RNA, 19 nt, Artificial Sequence
  Description of Artificial Sequence: Synthetic oligonucleotide
  Antisense Strand to SEQ ID NO: 332857
aauaccaaccauuguuaug

SEQ ID NO: 332859 - RNA, 19 nt, Artificial Sequence
  Description of Artificial Sequence: Synthetic oligonucleotide
  Sense Strand Starting at position 179 of SEQ ID NO: 315503
auaacaaugguugguauua

SEQ ID NO: 332860 - RNA, 19 nt, Artificial Sequence
  Description of Artificial Sequence: Synthetic oligonucleotide
  Antisense Strand to SEQ ID NO: 332859
uaauaccaaccauuguuau

SEQ ID NO: 332861 - RNA, 19 nt, Artificial Sequence
  Description of Artificial Sequence: Synthetic oligonucleotide
  Sense Strand Starting at position 179 of SEQ ID NO: 315504
uaacaaugguugguauuaa

SEQ ID NO: 332862 - RNA, 19 nt, Artificial Sequence
  Description of Artificial Sequence: Synthetic oligonucleotide
  Antisense Strand to SEQ ID NO: 332861
uuaauaccaaccauuguua

SEQ ID NO: 332863 - RNA, 19 nt, Artificial Sequence
  Description of Artificial Sequence: Synthetic oligonucleotide
  Sense Strand Starting at position 179 of SEQ ID NO: 315601
ccacuuuguccaugagcuu

SEQ ID NO: 332864 - RNA, 19 nt, Artificial Sequence
  Description of Artificial Sequence: Synthetic oligonucleotide
  Antisense Strand to SEQ ID NO: 332863
aagcucauggacaaagugg

SEQ ID NO: 332865 - RNA, 19 nt, Artificial Sequence
  Description of Artificial Sequence: Synthetic oligonucleotide
  Sense Strand Starting at position 179 of SEQ ID NO: 316040
guagcuaaggcugaacuaa

SEQ ID NO: 332866 - RNA, 19 nt, Artificial Sequence
  Description of Artificial Sequence: Synthetic oligonucleotide
  Antisense Strand to SEQ ID NO: 332865
uuaguucagccuuagcuac

SEQ ID NO: 332867 - RNA, 19 nt, Artificial Sequence
  Description of Artificial Sequence: Synthetic oligonucleotide
  Sense Strand Starting at position 179 of SEQ ID NO: 316204
gagccuuacgcagaaacuu

SEQ ID NO: 332868 - RNA, 19 nt, Artificial Sequence
  Description of Artificial Sequence: Synthetic oligonucleotide
  Antisense Strand to SEQ ID NO: 332867
aaguuucugcguaaggcuc

SEQ ID NO: 332869 - RNA, 19 nt, Artificial Sequence
  Description of Artificial Sequence: Synthetic oligonucleotide
  Sense Strand Starting at position 179 of SEQ ID NO: 316290
acagcucuguugucaacaa

SEQ ID NO: 332870 - RNA, 19 nt, Artificial Sequence
  Description of Artificial Sequence: Synthetic oligonucleotide
  Antisense Strand to SEQ ID NO: 332869
uuguugacaacagagcugu

SEQ ID NO: 332871 - RNA, 19 nt, Artificial Sequence
  Description of Artificial Sequence: Synthetic oligonucleotide
  Sense Strand Starting at position 179 of SEQ ID NO: 316316
gggcaugucccacacuaaa

SEQ ID NO: 332872 - RNA, 19 nt, Artificial Sequence
  Description of Artificial Sequence: Synthetic oligonucleotide
  Antisense Strand to SEQ ID NO: 332871
uuuagugugggacaugccc

SEQ ID NO: 332873 - RNA, 19 nt, Artificial Sequence
  Description of Artificial Sequence: Synthetic oligonucleotide
  Sense Strand Starting at position 179 of SEQ ID NO: 316386
cguuauucccaagaaccaa

SEQ ID NO: 332874 - RNA, 19 nt, Artificial Sequence
  Description of Artificial Sequence: Synthetic oligonucleotide
  Antisense Strand to SEQ ID NO: 332873
uugguucuugggaauaacg

SEQ ID NO: 332875 - RNA, 19 nt, Artificial Sequence
  Description of Artificial Sequence: Synthetic oligonucleotide
  Sense Strand Starting at position 179 of SEQ ID NO: 316765
ggguucuggucuuuaaaug

SEQ ID NO: 332876 - RNA, 19 nt, Artificial Sequence
  Description of Artificial Sequence: Synthetic oligonucleotide
  Antisense Strand to SEQ ID NO: 332875
cauuuaaagaccagaaccc

SEQ ID NO: 332877 - RNA, 19 nt, Artificial Sequence
  Description of Artificial Sequence: Synthetic oligonucleotide
  Sense Strand Starting at position 179 of SEQ ID NO: 317018
ggagugggaucgcugagaa

SEQ ID NO: 332878 - RNA, 19 nt, Artificial Sequence
  Description of Artificial Sequence: Synthetic oligonucleotide
  Antisense Strand to SEQ ID NO: 332877
uucucagcgaucccacucc

SEQ ID NO: 332879 - RNA, 19 nt, Artificial Sequence
  Description of Artificial Sequence: Synthetic oligonucleotide
  Sense Strand Starting at position 179 of SEQ ID NO: 317406
gcucgcagcacgucagaaa

SEQ ID NO: 332880 - RNA, 19 nt, Artificial Sequence
  Description of Artificial Sequence: Synthetic oligonucleotide
  Antisense Strand to SEQ ID NO: 332879
uuucugacgugcugcgagc

SEQ ID NO: 332881 - RNA, 19 nt, Artificial Sequence
  Description of Artificial Sequence: Synthetic oligonucleotide
  Sense Strand Starting at position 179 of SEQ ID NO: 317456
ggacucucccgggaacgaa

SEQ ID NO: 332882 - RNA, 19 nt, Artificial Sequence
  Description of Artificial Sequence: Synthetic oligonucleotide
  Antisense Strand to SEQ ID NO: 332881
uucguucccgggagagucc

SEQ ID NO: 332883 - RNA, 19 nt, Artificial Sequence
  Description of Artificial Sequence: Synthetic oligonucleotide
  Sense Strand Starting at position 179 of SEQ ID NO: 317685
gguccaacgcuggagaaau

SEQ ID NO: 332884 - RNA, 19 nt, Artificial Sequence
  Description of Artificial Sequence: Synthetic oligonucleotide
  Antisense Strand to SEQ ID NO: 332883
auuucuccagcguuggacc

SEQ ID NO: 332885 - RNA, 19 nt, Artificial Sequence
  Description of Artificial Sequence: Synthetic oligonucleotide
  Sense Strand Starting at position 179 of SEQ ID NO: 317748
caaacaggucuaugacguu

SEQ ID NO: 332886 - RNA, 19 nt, Artificial Sequence
  Description of Artificial Sequence: Synthetic oligonucleotide
  Antisense Strand to SEQ ID NO: 332885
aacgucauagaccuguuug

SEQ ID NO: 332887 - RNA, 19 nt, Artificial Sequence
  Description of Artificial Sequence: Synthetic oligonucleotide
  Sense Strand Starting at position 179 of SEQ ID NO: 317768
cuucuuguuggcuaucaaa

SEQ ID NO: 332888 - RNA, 19 nt, Artificial Sequence
  Description of Artificial Sequence: Synthetic oligonucleotide
  Antisense Strand to SEQ ID NO: 332887
uuugauagccaacaagaag

SEQ ID NO: 332889 - RNA, 19 nt, Artificial Sequence
  Description of Artificial Sequence: Synthetic oligonucleotide
  Sense Strand Starting at position 179 of SEQ ID NO: 317847
gugacaucugaaugccaac

SEQ ID NO: 332890 - RNA, 19 nt, Artificial Sequence
  Description of Artificial Sequence: Synthetic oligonucleotide
  Antisense Strand to SEQ ID NO: 332889
guuggcauucagaugucac

SEQ ID NO: 332891 - RNA, 19 nt, Artificial Sequence
  Description of Artificial Sequence: Synthetic oligonucleotide
  Sense Strand Starting at position 179 of SEQ ID NO: 317967
gccaaacagucucugcuaa

SEQ ID NO: 332892 - RNA, 19 nt, Artificial Sequence
  Description of Artificial Sequence: Synthetic oligonucleotide
  Antisense Strand to SEQ ID NO: 332891
uuagcagagacuguuuggc

SEQ ID NO: 332893 - RNA, 19 nt, Artificial Sequence
  Description of Artificial Sequence: Synthetic oligonucleotide
  Sense Strand Starting at position 179 of SEQ ID NO: 318056
gcaaguuucugccuaaaug

SEQ ID NO: 332894 - RNA, 19 nt, Artificial Sequence
  Description of Artificial Sequence: Synthetic oligonucleotide
  Antisense Strand to SEQ ID NO: 332893
cauuuaggcagaaacuugc

SEQ ID NO: 332895 - RNA, 19 nt, Artificial Sequence
  Description of Artificial Sequence: Synthetic oligonucleotide
  Sense Strand Starting at position 179 of SEQ ID NO: 318105
cggagucaccuuuacauag

SEQ ID NO: 332896 - RNA, 19 nt, Artificial Sequence
  Description of Artificial Sequence: Synthetic oligonucleotide
  Antisense Strand to SEQ ID NO: 332895
cuauguaaaggugacuccg

SEQ ID NO: 332897 - RNA, 19 nt, Artificial Sequence
  Description of Artificial Sequence: Synthetic oligonucleotide
  Sense Strand Starting at position 179 of SEQ ID NO: 318221
ccgacaucuggcuagucuu

SEQ ID NO: 332898 - RNA, 19 nt, Artificial Sequence
  Description of Artificial Sequence: Synthetic oligonucleotide
  Antisense Strand to SEQ ID NO: 332897
aagacuagccagaugucgg

SEQ ID NO: 332899 - RNA, 19 nt, Artificial Sequence
  Description of Artificial Sequence: Synthetic oligonucleotide
  Sense Strand Starting at position 179 of SEQ ID NO: 318224
acaucuggcuagucuuuaa

SEQ ID NO: 332900 - RNA, 19 nt, Artificial Sequence
  Description of Artificial Sequence: Synthetic oligonucleotide
  Antisense Strand to SEQ ID NO: 332899
uuaaagacuagccagaugu

SEQ ID NO: 332901 - RNA, 19 nt, Artificial Sequence
  Description of Artificial Sequence: Synthetic oligonucleotide
  Sense Strand Starting at position 179 of SEQ ID NO: 318228
cuggcuagucuuuaaagga

SEQ ID NO: 332902 - RNA, 19 nt, Artificial Sequence
  Description of Artificial Sequence: Synthetic oligonucleotide
  Antisense Strand to SEQ ID NO: 332901
uccuuuaaagacuagccag

SEQ ID NO: 332903 - RNA, 19 nt, Artificial Sequence
  Description of Artificial Sequence: Synthetic oligonucleotide
  Sense Strand Starting at position 179 of SEQ ID NO: 318277
gcaauaucauagguuaaac

SEQ ID NO: 332904 - RNA, 19 nt, Artificial Sequence
  Description of Artificial Sequence: Synthetic oligonucleotide
  Antisense Strand to SEQ ID NO: 332903
guuuaaccuaugauauugc

SEQ ID NO: 332905 - RNA, 19 nt, Artificial Sequence
  Description of Artificial Sequence: Synthetic oligonucleotide
  Sense Strand Starting at position 179 of SEQ ID NO: 318393
guugauagcguuuauuaca

SEQ ID NO: 332906 - RNA, 19 nt, Artificial Sequence
  Description of Artificial Sequence: Synthetic oligonucleotide
  Antisense Strand to SEQ ID NO: 332905
uguaauaaacgcuaucaac

SEQ ID NO: 332907 - RNA, 19 nt, Artificial Sequence
  Description of Artificial Sequence: Synthetic oligonucleotide
  Sense Strand Starting at position 179 of SEQ ID NO: 318423
ggacaucucagauguucug

SEQ ID NO: 332908 - RNA, 19 nt, Artificial Sequence
  Description of Artificial Sequence: Synthetic oligonucleotide
  Antisense Strand to SEQ ID NO: 332907
cagaacaucugagaugucc

SEQ ID NO: 332909 - RNA, 19 nt, Artificial Sequence
  Description of Artificial Sequence: Synthetic oligonucleotide
  Sense Strand Starting at position 179 of SEQ ID NO: 318429
cucagauguucugauauuu

SEQ ID NO: 332910 - RNA, 19 nt, Artificial Sequence
  Description of Artificial Sequence: Synthetic oligonucleotide
  Antisense Strand to SEQ ID NO: 332909
aaauaucagaacaucugag

SEQ ID NO: 332911 - RNA, 19 nt, Artificial Sequence
  Description of Artificial Sequence: Synthetic oligonucleotide
  Sense Strand Starting at position 179 of SEQ ID NO: 318675
ggugauaaagugugauuca

SEQ ID NO: 332912 - RNA, 19 nt, Artificial Sequence
  Description of Artificial Sequence: Synthetic oligonucleotide
  Antisense Strand to SEQ ID NO: 332911
ugaaucacacuuuaucacc

SEQ ID NO: 332913 - RNA, 19 nt, Artificial Sequence
  Description of Artificial Sequence: Synthetic oligonucleotide
  Sense Strand Starting at position 179 of SEQ ID NO: 318715
ucauuauuucugugccagu

SEQ ID NO: 332914 - RNA, 19 nt, Artificial Sequence
  Description of Artificial Sequence: Synthetic oligonucleotide
  Antisense Strand to SEQ ID NO: 332913
acuggcacagaaauaauga

SEQ ID NO: 332915 - RNA, 19 nt, Artificial Sequence
  Description of Artificial Sequence: Synthetic oligonucleotide
  Sense Strand Starting at position 179 of SEQ ID NO: 318724
cugugccaguaauuaaaga

SEQ ID NO: 332916 - RNA, 19 nt, Artificial Sequence
  Description of Artificial Sequence: Synthetic oligonucleotide
  Antisense Strand to SEQ ID NO: 332915
ucuuuaauuacuggcacag

SEQ ID NO: 332917 - RNA, 19 nt, Artificial Sequence
  Description of Artificial Sequence: Synthetic oligonucleotide
  Sense Strand Starting at position 179 of SEQ ID NO: 318907
aauuaauguguagaagcau

SEQ ID NO: 332918 - RNA, 19 nt, Artificial Sequence
  Description of Artificial Sequence: Synthetic oligonucleotide
  Antisense Strand to SEQ ID NO: 332917
augcuucuacacauuaauu

SEQ ID NO: 332919 - RNA, 19 nt, Artificial Sequence
  Description of Artificial Sequence: Synthetic oligonucleotide
  Sense Strand Starting at position 179 of SEQ ID NO: 318915
uguagaagcauguagcaaa

SEQ ID NO: 332920 - RNA, 19 nt, Artificial Sequence
  Description of Artificial Sequence: Synthetic oligonucleotide
  Antisense Strand to SEQ ID NO: 332919
uuugcuacaugcuucuaca

SEQ ID NO: 332921 - RNA, 19 nt, Artificial Sequence
  Description of Artificial Sequence: Synthetic oligonucleotide
  Sense Strand Starting at position 179 of SEQ ID NO: 319078
aauggcauugccuauggua

SEQ ID NO: 332922 - RNA, 19 nt, Artificial Sequence
  Description of Artificial Sequence: Synthetic oligonucleotide
  Antisense Strand to SEQ ID NO: 332921
uaccauaggcaaugccauu

SEQ ID NO: 332923 - RNA, 19 nt, Artificial Sequence
  Description of Artificial Sequence: Synthetic oligonucleotide
  Sense Strand Starting at position 179 of SEQ ID NO: 319101
gcauaucauguugauauaa

SEQ ID NO: 332924 - RNA, 19 nt, Artificial Sequence
  Description of Artificial Sequence: Synthetic oligonucleotide
  Antisense Strand to SEQ ID NO: 332923
uuauaucaacaugauaugc

SEQ ID NO: 332925 - RNA, 19 nt, Artificial Sequence
  Description of Artificial Sequence: Synthetic oligonucleotide
  Sense Strand Starting at position 179 of SEQ ID NO: 319135
guguaugguuugacguauu

SEQ ID NO: 332926 - RNA, 19 nt, Artificial Sequence
  Description of Artificial Sequence: Synthetic oligonucleotide
  Antisense Strand to SEQ ID NO: 332925
aauacgucaaaccauacac

SEQ ID NO: 332927 - RNA, 19 nt, Artificial Sequence
  Description of Artificial Sequence: Synthetic oligonucleotide
  Sense Strand Starting at position 179 of SEQ ID NO: 319156
gaaauauauguaugugaga

SEQ ID NO: 332928 - RNA, 19 nt, Artificial Sequence
  Description of Artificial Sequence: Synthetic oligonucleotide
  Antisense Strand to SEQ ID NO: 332927
ucucacauacauauauuuc

SEQ ID NO: 332929 - RNA, 19 nt, Artificial Sequence
  Description of Artificial Sequence: Synthetic oligonucleotide
  Sense Strand Starting at position 179 of SEQ ID NO: 319163
auguaugugagauacggua

SEQ ID NO: 332930 - RNA, 19 nt, Artificial Sequence
  Description of Artificial Sequence: Synthetic oligonucleotide
  Antisense Strand to SEQ ID NO: 332929
uaccguaucucacauacau

SEQ ID NO: 332931 - RNA, 19 nt, Artificial Sequence
  Description of Artificial Sequence: Synthetic oligonucleotide
  Sense Strand Starting at position 180 of SEQ ID NO: 315370
auguguacggacugucauu

SEQ ID NO: 332932 - RNA, 19 nt, Artificial Sequence
  Description of Artificial Sequence: Synthetic oligonucleotide
  Antisense Strand to SEQ ID NO: 332931
aaugacaguccguacacau

SEQ ID NO: 332933 - RNA, 19 nt, Artificial Sequence
  Description of Artificial Sequence: Synthetic oligonucleotide
  Sense Strand Starting at position 180 of SEQ ID NO: 315427
gaagcaaugugucccaagu

SEQ ID NO: 332934 - RNA, 19 nt, Artificial Sequence
  Description of Artificial Sequence: Synthetic oligonucleotide
  Antisense Strand to SEQ ID NO: 332933
acuugggacacauugcuuc

SEQ ID NO: 332935 - RNA, 19 nt, Artificial Sequence
  Description of Artificial Sequence: Synthetic oligonucleotide
  Sense Strand Starting at position 180 of SEQ ID NO: 315506
ucuccauuacguuggaaag

SEQ ID NO: 332936 - RNA, 19 nt, Artificial Sequence
  Description of Artificial Sequence: Synthetic oligonucleotide
  Antisense Strand to SEQ ID NO: 332935
cuuuccaacguaauggaga

SEQ ID NO: 332937 - RNA, 19 nt, Artificial Sequence
  Description of Artificial Sequence: Synthetic oligonucleotide
  Sense Strand Starting at position 180 of SEQ ID NO: 315507
cuccauuacguuggaaaga

SEQ ID NO: 332938 - RNA, 19 nt, Artificial Sequence
  Description of Artificial Sequence: Synthetic oligonucleotide
  Antisense Strand to SEQ ID NO: 332937
ucuuuccaacguaauggag

SEQ ID NO: 332939 - RNA, 19 nt, Artificial Sequence
  Description of Artificial Sequence: Synthetic oligonucleotide
  Sense Strand Starting at position 180 of SEQ ID NO: 315508
uccauuacguuggaaagau

SEQ ID NO: 332940 - RNA, 19 nt, Artificial Sequence
  Description of Artificial Sequence: Synthetic oligonucleotide
  Antisense Strand to SEQ ID NO: 332939
aucuuuccaacguaaugga

SEQ ID NO: 332941 - RNA, 19 nt, Artificial Sequence
  Description of Artificial Sequence: Synthetic oligonucleotide
  Sense Strand Starting at position 180 of SEQ ID NO: 315556
gcuguuaaacgacagcaaa

SEQ ID NO: 332942 - RNA, 19 nt, Artificial Sequence
  Description of Artificial Sequence: Synthetic oligonucleotide
  Antisense Strand to SEQ ID NO: 332941
uuugcugucguuuaacagc

SEQ ID NO: 332943 - RNA, 19 nt, Artificial Sequence
  Description of Artificial Sequence: Synthetic oligonucleotide
  Sense Strand Starting at position 180 of SEQ ID NO: 315584
uuccgaauauggcaauuaa

SEQ ID NO: 332944 - RNA, 19 nt, Artificial Sequence
  Description of Artificial Sequence: Synthetic oligonucleotide
  Antisense Strand to SEQ ID NO: 332943
uuaauugccauauucggaa

SEQ ID NO: 332945 - RNA, 19 nt, Artificial Sequence
  Description of Artificial Sequence: Synthetic oligonucleotide
  Sense Strand Starting at position 180 of SEQ ID NO: 315594
ggcaauuaauaggcuagua

SEQ ID NO: 332946 - RNA, 19 nt, Artificial Sequence
  Description of Artificial Sequence: Synthetic oligonucleotide
  Antisense Strand to SEQ ID NO: 332945
uacuagccuauuaauugcc

SEQ ID NO: 332947 - RNA, 19 nt, Artificial Sequence
  Description of Artificial Sequence: Synthetic oligonucleotide
  Sense Strand Starting at position 180 of SEQ ID NO: 315674
agaccagucucacucugua

SEQ ID NO: 332948 - RNA, 19 nt, Artificial Sequence
  Description of Artificial Sequence: Synthetic oligonucleotide
  Antisense Strand to SEQ ID NO: 332947
uacagagugagacuggucu

SEQ ID NO: 332949 - RNA, 19 nt, Artificial Sequence
  Description of Artificial Sequence: Synthetic oligonucleotide
  Sense Strand Starting at position 180 of SEQ ID NO: 315964
ggcccacccuuaguuagaa

SEQ ID NO: 332950 - RNA, 19 nt, Artificial Sequence
  Description of Artificial Sequence: Synthetic oligonucleotide
  Antisense Strand to SEQ ID NO: 332949
uucuaacuaagggugggcc

SEQ ID NO: 332951 - RNA, 19 nt, Artificial Sequence
  Description of Artificial Sequence: Synthetic oligonucleotide
  Sense Strand Starting at position 180 of SEQ ID NO: 315965
gcccacccuuaguuagaaa

SEQ ID NO: 332952 - RNA, 19 nt, Artificial Sequence
  Description of Artificial Sequence: Synthetic oligonucleotide
  Antisense Strand to SEQ ID NO: 332951
uuucuaacuaagggugggc

SEQ ID NO: 332953 - RNA, 19 nt, Artificial Sequence
  Description of Artificial Sequence: Synthetic oligonucleotide
  Sense Strand Starting at position 180 of SEQ ID NO: 316701
gagucugucugacucagaa

SEQ ID NO: 332954 - RNA, 19 nt, Artificial Sequence
  Description of Artificial Sequence: Synthetic oligonucleotide
  Antisense Strand to SEQ ID NO: 332953
uucugagucagacagacuc

SEQ ID NO: 332955 - RNA, 19 nt, Artificial Sequence
  Description of Artificial Sequence: Synthetic oligonucleotide
  Sense Strand Starting at position 180 of SEQ ID NO: 316705
cugucugacucagaaucga

SEQ ID NO: 332956 - RNA, 19 nt, Artificial Sequence
  Description of Artificial Sequence: Synthetic oligonucleotide
  Antisense Strand to SEQ ID NO: 332955
ucgauucugagucagacag

SEQ ID NO: 332957 - RNA, 19 nt, Artificial Sequence
  Description of Artificial Sequence: Synthetic oligonucleotide
  Sense Strand Starting at position 180 of SEQ ID NO: 317006
gcagcugucuuuccuuauu

SEQ ID NO: 332958 - RNA, 19 nt, Artificial Sequence
  Description of Artificial Sequence: Synthetic oligonucleotide
  Antisense Strand to SEQ ID NO: 332957
aauaaggaaagacagcugc

SEQ ID NO: 332959 - RNA, 19 nt, Artificial Sequence
  Description of Artificial Sequence: Synthetic oligonucleotide
  Sense Strand Starting at position 180 of SEQ ID NO: 317262
auaaaugucucgcggccaa

SEQ ID NO: 332960 - RNA, 19 nt, Artificial Sequence
  Description of Artificial Sequence: Synthetic oligonucleotide
  Antisense Strand to SEQ ID NO: 332959
uuggccgcgagacauuuau

SEQ ID NO: 332961 - RNA, 19 nt, Artificial Sequence
  Description of Artificial Sequence: Synthetic oligonucleotide
  Sense Strand Starting at position 180 of SEQ ID NO: 317382
cccuuauucuuccggacaa

SEQ ID NO: 332962 - RNA, 19 nt, Artificial Sequence
  Description of Artificial Sequence: Synthetic oligonucleotide
  Antisense Strand to SEQ ID NO: 332961
uuguccggaagaauaaggg

SEQ ID NO: 332963 - RNA, 19 nt, Artificial Sequence
  Description of Artificial Sequence: Synthetic oligonucleotide
  Sense Strand Starting at position 180 of SEQ ID NO: 317383
ccuuauucuuccggacaac

SEQ ID NO: 332964 - RNA, 19 nt, Artificial Sequence
  Description of Artificial Sequence: Synthetic oligonucleotide
  Antisense Strand to SEQ ID NO: 332963
guuguccggaagaauaagg

SEQ ID NO: 332965 - RNA, 19 nt, Artificial Sequence
  Description of Artificial Sequence: Synthetic oligonucleotide
  Sense Strand Starting at position 180 of SEQ ID NO: 317384
cuuauucuuccggacaacu

SEQ ID NO: 332966 - RNA, 19 nt, Artificial Sequence
  Description of Artificial Sequence: Synthetic oligonucleotide
  Antisense Strand to SEQ ID NO: 332965
aguuguccggaagaauaag

SEQ ID NO: 332967 - RNA, 19 nt, Artificial Sequence
  Description of Artificial Sequence: Synthetic oligonucleotide
  Sense Strand Starting at position 180 of SEQ ID NO: 317457
gcucgauuuauccaacgcu

SEQ ID NO: 332968 - RNA, 19 nt, Artificial Sequence
  Description of Artificial Sequence: Synthetic oligonucleotide
  Antisense Strand to SEQ ID NO: 332967
agcguuggauaaaucgagc

SEQ ID NO: 332969 - RNA, 19 nt, Artificial Sequence
  Description of Artificial Sequence: Synthetic oligonucleotide
  Sense Strand Starting at position 180 of SEQ ID NO: 317460
cgauuuauccaacgcugau

SEQ ID NO: 332970 - RNA, 19 nt, Artificial Sequence
  Description of Artificial Sequence: Synthetic oligonucleotide
  Antisense Strand to SEQ ID NO: 332969
aucagcguuggauaaaucg

SEQ ID NO: 332971 - RNA, 19 nt, Artificial Sequence
  Description of Artificial Sequence: Synthetic oligonucleotide
  Sense Strand Starting at position 180 of SEQ ID NO: 317470
aacgcugaucagugaaaga

SEQ ID NO: 332972 - RNA, 19 nt, Artificial Sequence
  Description of Artificial Sequence: Synthetic oligonucleotide
  Antisense Strand to SEQ ID NO: 332971
ucuuucacugaucagcguu

SEQ ID NO: 332973 - RNA, 19 nt, Artificial Sequence
  Description of Artificial Sequence: Synthetic oligonucleotide
  Sense Strand Starting at position 180 of SEQ ID NO: 317589
cuuggaaugcccugacuca

SEQ ID NO: 332974 - RNA, 19 nt, Artificial Sequence
  Description of Artificial Sequence: Synthetic oligonucleotide
  Antisense Strand to SEQ ID NO: 332973
ugagucagggcauuccaag

SEQ ID NO: 332975 - RNA, 19 nt, Artificial Sequence
  Description of Artificial Sequence: Synthetic oligonucleotide
  Sense Strand Starting at position 180 of SEQ ID NO: 317590
uuggaaugcccugacucau

SEQ ID NO: 332976 - RNA, 19 nt, Artificial Sequence
  Description of Artificial Sequence: Synthetic oligonucleotide
  Antisense Strand to SEQ ID NO: 332975
augagucagggcauuccaa

SEQ ID NO: 332977 - RNA, 19 nt, Artificial Sequence
  Description of Artificial Sequence: Synthetic oligonucleotide
  Sense Strand Starting at position 180 of SEQ ID NO: 318185
gcagcaaaguccucagggu

SEQ ID NO: 332978 - RNA, 19 nt, Artificial Sequence
  Description of Artificial Sequence: Synthetic oligonucleotide
  Antisense Strand to SEQ ID NO: 332977
acccugaggacuuugcugc

SEQ ID NO: 332979 - RNA, 19 nt, Artificial Sequence
  Description of Artificial Sequence: Synthetic oligonucleotide
  Sense Strand Starting at position 180 of SEQ ID NO: 318192
aguccucagggucaaguua

SEQ ID NO: 332980 - RNA, 19 nt, Artificial Sequence
  Description of Artificial Sequence: Synthetic oligonucleotide
  Antisense Strand to SEQ ID NO: 332979
uaacuugacccugaggacu

SEQ ID NO: 332981 - RNA, 19 nt, Artificial Sequence
  Description of Artificial Sequence: Synthetic oligonucleotide
  Sense Strand Starting at position 180 of SEQ ID NO: 318351
agucuucuuuccugcauga

SEQ ID NO: 332982 - RNA, 19 nt, Artificial Sequence
  Description of Artificial Sequence: Synthetic oligonucleotide
  Antisense Strand to SEQ ID NO: 332981
ucaugcaggaaagaagacu

SEQ ID NO: 332983 - RNA, 19 nt, Artificial Sequence
  Description of Artificial Sequence: Synthetic oligonucleotide
  Sense Strand Starting at position 180 of SEQ ID NO: 318368
gaacuagaguguccugaua

SEQ ID NO: 332984 - RNA, 19 nt, Artificial Sequence
  Description of Artificial Sequence: Synthetic oligonucleotide
  Antisense Strand to SEQ ID NO: 332983
uaucaggacacucuaguuc

SEQ ID NO: 332985 - RNA, 19 nt, Artificial Sequence
  Description of Artificial Sequence: Synthetic oligonucleotide
  Sense Strand Starting at position 180 of SEQ ID NO: 318370
acuagaguguccugauaac

SEQ ID NO: 332986 - RNA, 19 nt, Artificial Sequence
  Description of Artificial Sequence: Synthetic oligonucleotide
  Antisense Strand to SEQ ID NO: 332985
guuaucaggacacucuagu

SEQ ID NO: 332987 - RNA, 19 nt, Artificial Sequence
  Description of Artificial Sequence: Synthetic oligonucleotide
  Sense Strand Starting at position 180 of SEQ ID NO: 318403
ggcugaagucaagauauuc

SEQ ID NO: 332988 - RNA, 19 nt, Artificial Sequence
  Description of Artificial Sequence: Synthetic oligonucleotide
  Antisense Strand to SEQ ID NO: 332987
gaauaucuugacuucagcc

SEQ ID NO: 332989 - RNA, 19 nt, Artificial Sequence
  Description of Artificial Sequence: Synthetic oligonucleotide
  Sense Strand Starting at position 180 of SEQ ID NO: 318734
uuuggaggugcucaggaaa

SEQ ID NO: 332990 - RNA, 19 nt, Artificial Sequence
  Description of Artificial Sequence: Synthetic oligonucleotide
  Antisense Strand to SEQ ID NO: 332989
uuuccugagcaccuccaaa

SEQ ID NO: 332991 - RNA, 19 nt, Artificial Sequence
  Description of Artificial Sequence: Synthetic oligonucleotide
  Sense Strand Starting at position 180 of SEQ ID NO: 318757
agcucagagcuaugaugga

SEQ ID NO: 332992 - RNA, 19 nt, Artificial Sequence
  Description of Artificial Sequence: Synthetic oligonucleotide
  Antisense Strand to SEQ ID NO: 332991
uccaucauagcucugagcu

SEQ ID NO: 332993 - RNA, 19 nt, Artificial Sequence
  Description of Artificial Sequence: Synthetic oligonucleotide
  Sense Strand Starting at position 180 of SEQ ID NO: 318764
agcuaugauggaugaagca

SEQ ID NO: 332994 - RNA, 19 nt, Artificial Sequence
  Description of Artificial Sequence: Synthetic oligonucleotide
  Antisense Strand to SEQ ID NO: 332993
ugcuucauccaucauagcu

SEQ ID NO: 332995 - RNA, 19 nt, Artificial Sequence
  Description of Artificial Sequence: Synthetic oligonucleotide
  Sense Strand Starting at position 180 of SEQ ID NO: 318840
uguugucuuggccaaccaa

SEQ ID NO: 332996 - RNA, 19 nt, Artificial Sequence
  Description of Artificial Sequence: Synthetic oligonucleotide
  Antisense Strand to SEQ ID NO: 332995
uugguuggccaagacaaca

SEQ ID NO: 332997 - RNA, 19 nt, Artificial Sequence
  Description of Artificial Sequence: Synthetic oligonucleotide
  Sense Strand Starting at position 180 of SEQ ID NO: 318878
uggucaacuccuggaacga

SEQ ID NO: 332998 - RNA, 19 nt, Artificial Sequence
  Description of Artificial Sequence: Synthetic oligonucleotide
  Antisense Strand to SEQ ID NO: 332997
ucguuccaggaguugacca

SEQ ID NO: 332999 - RNA, 19 nt, Artificial Sequence
  Description of Artificial Sequence: Synthetic oligonucleotide
  Sense Strand Starting at position 180 of SEQ ID NO: 319009
guguccagacugugaggua

SEQ ID NO: 333000 - RNA, 19 nt, Artificial Sequence
  Description of Artificial Sequence: Synthetic oligonucleotide
  Antisense Strand to SEQ ID NO: 332999
uaccucacagucuggacac

SEQ ID NO: 333001 - RNA, 19 nt, Artificial Sequence
  Description of Artificial Sequence: Synthetic oligonucleotide
  Sense Strand Starting at position 180 of SEQ ID NO: 319010
uguccagacugugagguaa

SEQ ID NO: 333002 - RNA, 19 nt, Artificial Sequence
  Description of Artificial Sequence: Synthetic oligonucleotide
  Antisense Strand to SEQ ID NO: 333001
uuaccucacagucuggaca

SEQ ID NO: 333003 - RNA, 19 nt, Artificial Sequence
  Description of Artificial Sequence: Synthetic oligonucleotide
  Sense Strand Starting at position 180 of SEQ ID NO: 319118
guccucauuuggucaacuu

SEQ ID NO: 333004 - RNA, 19 nt, Artificial Sequence
  Description of Artificial Sequence: Synthetic oligonucleotide
  Antisense Strand to SEQ ID NO: 333003
aaguugaccaaaugaggac

SEQ ID NO: 333005 - RNA, 19 nt, Artificial Sequence
  Description of Artificial Sequence: Synthetic oligonucleotide
  Sense Strand Starting at position 181 of SEQ ID NO: 315349
cgcggucgugcacuucaua

SEQ ID NO: 333006 - RNA, 19 nt, Artificial Sequence
  Description of Artificial Sequence: Synthetic oligonucleotide
  Antisense Strand to SEQ ID NO: 333005
uaugaagugcacgaccgcg

SEQ ID NO: 333007 - RNA, 19 nt, Artificial Sequence
  Description of Artificial Sequence: Synthetic oligonucleotide
  Sense Strand Starting at position 181 of SEQ ID NO: 315402
gagucuuucuugcuagagg

SEQ ID NO: 333008 - RNA, 19 nt, Artificial Sequence
  Description of Artificial Sequence: Synthetic oligonucleotide
  Antisense Strand to SEQ ID NO: 333007
ccucuagcaagaaagacuc

SEQ ID NO: 333009 - RNA, 19 nt, Artificial Sequence
  Description of Artificial Sequence: Synthetic oligonucleotide
  Sense Strand Starting at position 181 of SEQ ID NO: 315405
ucuuucuugcuagaggaga

SEQ ID NO: 333010 - RNA, 19 nt, Artificial Sequence
  Description of Artificial Sequence: Synthetic oligonucleotide
  Antisense Strand to SEQ ID NO: 333009
ucuccucuagcaagaaaga

SEQ ID NO: 333011 - RNA, 19 nt, Artificial Sequence
  Description of Artificial Sequence: Synthetic oligonucleotide
  Sense Strand Starting at position 181 of SEQ ID NO: 315678
cagcgaacaggcugugaua

SEQ ID NO: 333012 - RNA, 19 nt, Artificial Sequence
  Description of Artificial Sequence: Synthetic oligonucleotide
  Antisense Strand to SEQ ID NO: 333011
uaucacagccuguucgcug

SEQ ID NO: 333013 - RNA, 19 nt, Artificial Sequence
  Description of Artificial Sequence: Synthetic oligonucleotide
  Sense Strand Starting at position 181 of SEQ ID NO: 315691
gugauaagcucuucccuga

SEQ ID NO: 333014 - RNA, 19 nt, Artificial Sequence
  Description of Artificial Sequence: Synthetic oligonucleotide
  Antisense Strand to SEQ ID NO: 333013
ucagggaagagcuuaucac

SEQ ID NO: 333015 - RNA, 19 nt, Artificial Sequence
  Description of Artificial Sequence: Synthetic oligonucleotide
  Sense Strand Starting at position 181 of SEQ ID NO: 315817
ccuugaggcccugagggau

SEQ ID NO: 333016 - RNA, 19 nt, Artificial Sequence
  Description of Artificial Sequence: Synthetic oligonucleotide
  Antisense Strand to SEQ ID NO: 333015
aucccucagggccucaagg

SEQ ID NO: 333017 - RNA, 19 nt, Artificial Sequence
  Description of Artificial Sequence: Synthetic oligonucleotide
  Sense Strand Starting at position 181 of SEQ ID NO: 315949
agcugagaaccugguauca

SEQ ID NO: 333018 - RNA, 19 nt, Artificial Sequence
  Description of Artificial Sequence: Synthetic oligonucleotide
  Antisense Strand to SEQ ID NO: 333017
ugauaccagguucucagcu

SEQ ID NO: 333019 - RNA, 19 nt, Artificial Sequence
  Description of Artificial Sequence: Synthetic oligonucleotide
  Sense Strand Starting at position 181 of SEQ ID NO: 316127
cauugugugcccugaacag

SEQ ID NO: 333020 - RNA, 19 nt, Artificial Sequence
  Description of Artificial Sequence: Synthetic oligonucleotide
  Antisense Strand to SEQ ID NO: 333019
cuguucagggcacacaaug

SEQ ID NO: 333021 - RNA, 19 nt, Artificial Sequence
  Description of Artificial Sequence: Synthetic oligonucleotide
  Sense Strand Starting at position 181 of SEQ ID NO: 316136
cccugaacaguuugucagu

SEQ ID NO: 333022 - RNA, 19 nt, Artificial Sequence
  Description of Artificial Sequence: Synthetic oligonucleotide
  Antisense Strand to SEQ ID NO: 333021
acugacaaacuguucaggg

SEQ ID NO: 333023 - RNA, 19 nt, Artificial Sequence
  Description of Artificial Sequence: Synthetic oligonucleotide
  Sense Strand Starting at position 181 of SEQ ID NO: 316308
uagagucccucuuugguau

SEQ ID NO: 333024 - RNA, 19 nt, Artificial Sequence
  Description of Artificial Sequence: Synthetic oligonucleotide
  Antisense Strand to SEQ ID NO: 333023
auaccaaagagggacucua

SEQ ID NO: 333025 - RNA, 19 nt, Artificial Sequence
  Description of Artificial Sequence: Synthetic oligonucleotide
  Sense Strand Starting at position 181 of SEQ ID NO: 316309
agagucccucuuugguaua

SEQ ID NO: 333026 - RNA, 19 nt, Artificial Sequence
  Description of Artificial Sequence: Synthetic oligonucleotide
  Antisense Strand to SEQ ID NO: 333025
uauaccaaagagggacucu

SEQ ID NO: 333027 - RNA, 19 nt, Artificial Sequence
  Description of Artificial Sequence: Synthetic oligonucleotide
  Sense Strand Starting at position 181 of SEQ ID NO: 316720
uggacucuguggagaggua

SEQ ID NO: 333028 - RNA, 19 nt, Artificial Sequence
  Description of Artificial Sequence: Synthetic oligonucleotide
  Antisense Strand to SEQ ID NO: 333027
uaccucuccacagagucca

SEQ ID NO: 333029 - RNA, 19 nt, Artificial Sequence
  Description of Artificial Sequence: Synthetic oligonucleotide
  Sense Strand Starting at position 181 of SEQ ID NO: 316732
agagguagccauuauagcu

SEQ ID NO: 333030 - RNA, 19 nt, Artificial Sequence
  Description of Artificial Sequence: Synthetic oligonucleotide
  Antisense Strand to SEQ ID NO: 333029
agcuauaauggcuaccucu

SEQ ID NO: 333031 - RNA, 19 nt, Artificial Sequence
  Description of Artificial Sequence: Synthetic oligonucleotide
  Sense Strand Starting at position 181 of SEQ ID NO: 316950
gugagugugagggauguua

SEQ ID NO: 333032 - RNA, 19 nt, Artificial Sequence
  Description of Artificial Sequence: Synthetic oligonucleotide
  Antisense Strand to SEQ ID NO: 333031
uaacaucccucacacucac

SEQ ID NO: 333033 - RNA, 19 nt, Artificial Sequence
  Description of Artificial Sequence: Synthetic oligonucleotide
  Sense Strand Starting at position 181 of SEQ ID NO: 316952
gagugugagggauguuaau

SEQ ID NO: 333034 - RNA, 19 nt, Artificial Sequence
  Description of Artificial Sequence: Synthetic oligonucleotide
  Antisense Strand to SEQ ID NO: 333033
auuaacaucccucacacuc

SEQ ID NO: 333035 - RNA, 19 nt, Artificial Sequence
  Description of Artificial Sequence: Synthetic oligonucleotide
  Sense Strand Starting at position 181 of SEQ ID NO: 317002
gggagugucuugguaucuc

SEQ ID NO: 333036 - RNA, 19 nt, Artificial Sequence
  Description of Artificial Sequence: Synthetic oligonucleotide
  Antisense Strand to SEQ ID NO: 333035
gagauaccaagacacuccc

SEQ ID NO: 333037 - RNA, 19 nt, Artificial Sequence
  Description of Artificial Sequence: Synthetic oligonucleotide
  Sense Strand Starting at position 181 of SEQ ID NO: 317012
ugguaucucccaggacagu

SEQ ID NO: 333038 - RNA, 19 nt, Artificial Sequence
  Description of Artificial Sequence: Synthetic oligonucleotide
  Antisense Strand to SEQ ID NO: 333037
acuguccugggagauacca

SEQ ID NO: 333039 - RNA, 19 nt, Artificial Sequence
  Description of Artificial Sequence: Synthetic oligonucleotide
  Sense Strand Starting at position 181 of SEQ ID NO: 317013
gguaucucccaggacagua

SEQ ID NO: 333040 - RNA, 19 nt, Artificial Sequence
  Description of Artificial Sequence: Synthetic oligonucleotide
  Antisense Strand to SEQ ID NO: 333039
uacuguccugggagauacc

SEQ ID NO: 333041 - RNA, 19 nt, Artificial Sequence
  Description of Artificial Sequence: Synthetic oligonucleotide
  Sense Strand Starting at position 181 of SEQ ID NO: 317027
caguaacuccagcaugguu

SEQ ID NO: 333042 - RNA, 19 nt, Artificial Sequence
  Description of Artificial Sequence: Synthetic oligonucleotide
  Antisense Strand to SEQ ID NO: 333041
aaccaugcuggaguuacug

SEQ ID NO: 333043 - RNA, 19 nt, Artificial Sequence
  Description of Artificial Sequence: Synthetic oligonucleotide
  Sense Strand Starting at position 181 of SEQ ID NO: 317106
gugguuauggcucauaucu

SEQ ID NO: 333044 - RNA, 19 nt, Artificial Sequence
  Description of Artificial Sequence: Synthetic oligonucleotide
  Antisense Strand to SEQ ID NO: 333043
agauaugagccauaaccac

SEQ ID NO: 333045 - RNA, 19 nt, Artificial Sequence
  Description of Artificial Sequence: Synthetic oligonucleotide
  Sense Strand Starting at position 181 of SEQ ID NO: 317377
ggaggaguaggcuaugcaa

SEQ ID NO: 333046 - RNA, 19 nt, Artificial Sequence
  Description of Artificial Sequence: Synthetic oligonucleotide
  Antisense Strand to SEQ ID NO: 333045
uugcauagccuacuccucc

SEQ ID NO: 333047 - RNA, 19 nt, Artificial Sequence
  Description of Artificial Sequence: Synthetic oligonucleotide
  Sense Strand Starting at position 181 of SEQ ID NO: 317379
aggaguaggcuaugcaacu

SEQ ID NO: 333048 - RNA, 19 nt, Artificial Sequence
  Description of Artificial Sequence: Synthetic oligonucleotide
  Antisense Strand to SEQ ID NO: 333047
aguugcauagccuacuccu

SEQ ID NO: 333049 - RNA, 19 nt, Artificial Sequence
  Description of Artificial Sequence: Synthetic oligonucleotide
  Sense Strand Starting at position 181 of SEQ ID NO: 317380
ggaguaggcuaugcaacuu

SEQ ID NO: 333050 - RNA, 19 nt, Artificial Sequence
  Description of Artificial Sequence: Synthetic oligonucleotide
  Antisense Strand to SEQ ID NO: 333049
aaguugcauagccuacucc

SEQ ID NO: 333051 - RNA, 19 nt, Artificial Sequence
  Description of Artificial Sequence: Synthetic oligonucleotide
  Sense Strand Starting at position 181 of SEQ ID NO: 317401
aguccuguuagggaccuau

SEQ ID NO: 333052 - RNA, 19 nt, Artificial Sequence
  Description of Artificial Sequence: Synthetic oligonucleotide
  Antisense Strand to SEQ ID NO: 333051
auaggucccuaacaggacu

SEQ ID NO: 333053 - RNA, 19 nt, Artificial Sequence
  Description of Artificial Sequence: Synthetic oligonucleotide
  Sense Strand Starting at position 181 of SEQ ID NO: 317462
agcugaaaguggguguuua

SEQ ID NO: 333054 - RNA, 19 nt, Artificial Sequence
  Description of Artificial Sequence: Synthetic oligonucleotide
  Antisense Strand to SEQ ID NO: 333053
uaaacacccacuuucagcu

SEQ ID NO: 333055 - RNA, 19 nt, Artificial Sequence
  Description of Artificial Sequence: Synthetic oligonucleotide
  Sense Strand Starting at position 181 of SEQ ID NO: 317463
gcugaaaguggguguuuag

SEQ ID NO: 333056 - RNA, 19 nt, Artificial Sequence
  Description of Artificial Sequence: Synthetic oligonucleotide
  Antisense Strand to SEQ ID NO: 333055
cuaaacacccacuuucagc

SEQ ID NO: 333057 - RNA, 19 nt, Artificial Sequence
  Description of Artificial Sequence: Synthetic oligonucleotide
  Sense Strand Starting at position 181 of SEQ ID NO: 317466
gaaaguggguguuuagaga

SEQ ID NO: 333058 - RNA, 19 nt, Artificial Sequence
  Description of Artificial Sequence: Synthetic oligonucleotide
  Antisense Strand to SEQ ID NO: 333057
ucucuaaacacccacuuuc

SEQ ID NO: 333059 - RNA, 19 nt, Artificial Sequence
  Description of Artificial Sequence: Synthetic oligonucleotide
  Sense Strand Starting at position 181 of SEQ ID NO: 317545
gcugacaucagcuggcaaa

SEQ ID NO: 333060 - RNA, 19 nt, Artificial Sequence
  Description of Artificial Sequence: Synthetic oligonucleotide
  Antisense Strand to SEQ ID NO: 333059
uuugccagcugaugucagc

SEQ ID NO: 333061 - RNA, 19 nt, Artificial Sequence
  Description of Artificial Sequence: Synthetic oligonucleotide
  Sense Strand Starting at position 181 of SEQ ID NO: 317817
uccuacuacgauugucaga

SEQ ID NO: 333062 - RNA, 19 nt, Artificial Sequence
  Description of Artificial Sequence: Synthetic oligonucleotide
  Antisense Strand to SEQ ID NO: 333061
ucugacaaucguaguagga

SEQ ID NO: 333063 - RNA, 19 nt, Artificial Sequence
  Description of Artificial Sequence: Synthetic oligonucleotide
  Sense Strand Starting at position 181 of SEQ ID NO: 317858
uuggguauuagcugaauga

SEQ ID NO: 333064 - RNA, 19 nt, Artificial Sequence
  Description of Artificial Sequence: Synthetic oligonucleotide
  Antisense Strand to SEQ ID NO: 333063
ucauucagcuaauacccaa

SEQ ID NO: 333065 - RNA, 19 nt, Artificial Sequence
  Description of Artificial Sequence: Synthetic oligonucleotide
  Sense Strand Starting at position 181 of SEQ ID NO: 317859
uggguauuagcugaaugac

SEQ ID NO: 333066 - RNA, 19 nt, Artificial Sequence
  Description of Artificial Sequence: Synthetic oligonucleotide
  Antisense Strand to SEQ ID NO: 333065
gucauucagcuaauaccca

SEQ ID NO: 333067 - RNA, 19 nt, Artificial Sequence
  Description of Artificial Sequence: Synthetic oligonucleotide
  Sense Strand Starting at position 181 of SEQ ID NO: 317934
ggcugaguuugggcuuuga

SEQ ID NO: 333068 - RNA, 19 nt, Artificial Sequence
  Description of Artificial Sequence: Synthetic oligonucleotide
  Antisense Strand to SEQ ID NO: 333067
ucaaagcccaaacucagcc

SEQ ID NO: 333069 - RNA, 19 nt, Artificial Sequence
  Description of Artificial Sequence: Synthetic oligonucleotide
  Sense Strand Starting at position 181 of SEQ ID NO: 318054
ggcucaucuagaggacuca

SEQ ID NO: 333070 - RNA, 19 nt, Artificial Sequence
  Description of Artificial Sequence: Synthetic oligonucleotide
  Antisense Strand to SEQ ID NO: 333069
ugaguccucuagaugagcc

SEQ ID NO: 333071 - RNA, 19 nt, Artificial Sequence
  Description of Artificial Sequence: Synthetic oligonucleotide
  Sense Strand Starting at position 181 of SEQ ID NO: 318431
ccuacacuucccugagagu

SEQ ID NO: 333072 - RNA, 19 nt, Artificial Sequence
  Description of Artificial Sequence: Synthetic oligonucleotide
  Antisense Strand to SEQ ID NO: 333071
acucucagggaaguguagg

SEQ ID NO: 333073 - RNA, 19 nt, Artificial Sequence
  Description of Artificial Sequence: Synthetic oligonucleotide
  Sense Strand Starting at position 181 of SEQ ID NO: 318432
cuacacuucccugagaguu

SEQ ID NO: 333074 - RNA, 19 nt, Artificial Sequence
  Description of Artificial Sequence: Synthetic oligonucleotide
  Antisense Strand to SEQ ID NO: 333073
aacucucagggaaguguag

SEQ ID NO: 333075 - RNA, 19 nt, Artificial Sequence
  Description of Artificial Sequence: Synthetic oligonucleotide
  Sense Strand Starting at position 181 of SEQ ID NO: 318514
gguacuuuaccuggucaua

SEQ ID NO: 333076 - RNA, 19 nt, Artificial Sequence
  Description of Artificial Sequence: Synthetic oligonucleotide
  Antisense Strand to SEQ ID NO: 333075
uaugaccagguaaaguacc

SEQ ID NO: 333077 - RNA, 19 nt, Artificial Sequence
  Description of Artificial Sequence: Synthetic oligonucleotide
  Sense Strand Starting at position 181 of SEQ ID NO: 318829
ggcuuuaucuggucauauc

SEQ ID NO: 333078 - RNA, 19 nt, Artificial Sequence
  Description of Artificial Sequence: Synthetic oligonucleotide
  Antisense Strand to SEQ ID NO: 333077
gauaugaccagauaaagcc

SEQ ID NO: 333079 - RNA, 19 nt, Artificial Sequence
  Description of Artificial Sequence: Synthetic oligonucleotide
  Sense Strand Starting at position 181 of SEQ ID NO: 318956
ccuguagugauagggagau

SEQ ID NO: 333080 - RNA, 19 nt, Artificial Sequence
  Description of Artificial Sequence: Synthetic oligonucleotide
  Antisense Strand to SEQ ID NO: 333079
aucucccuaucacuacagg

SEQ ID NO: 333081 - RNA, 19 nt, Artificial Sequence
  Description of Artificial Sequence: Synthetic oligonucleotide
  Sense Strand Starting at position 181 of SEQ ID NO: 319004
uggugauuccuggaguugu

SEQ ID NO: 333082 - RNA, 19 nt, Artificial Sequence
  Description of Artificial Sequence: Synthetic oligonucleotide
  Antisense Strand to SEQ ID NO: 333081
acaacuccaggaaucacca

SEQ ID NO: 333083 - RNA, 19 nt, Artificial Sequence
  Description of Artificial Sequence: Synthetic oligonucleotide
  Sense Strand Starting at position 181 of SEQ ID NO: 319178
uuccauucuguggagugua

SEQ ID NO: 333084 - RNA, 19 nt, Artificial Sequence
  Description of Artificial Sequence: Synthetic oligonucleotide
  Antisense Strand to SEQ ID NO: 333083
uacacuccacagaauggaa

SEQ ID NO: 333085 - RNA, 19 nt, Artificial Sequence
  Description of Artificial Sequence: Synthetic oligonucleotide
  Sense Strand Starting at position 182 of SEQ ID NO: 315258
agauaccagugauuguaaa

SEQ ID NO: 333086 - RNA, 19 nt, Artificial Sequence
  Description of Artificial Sequence: Synthetic oligonucleotide
  Antisense Strand to SEQ ID NO: 333085
uuuacaaucacugguaucu

SEQ ID NO: 333087 - RNA, 19 nt, Artificial Sequence
  Description of Artificial Sequence: Synthetic oligonucleotide
  Sense Strand Starting at position 182 of SEQ ID NO: 315259
gauaccagugauuguaaau

SEQ ID NO: 333088 - RNA, 19 nt, Artificial Sequence
  Description of Artificial Sequence: Synthetic oligonucleotide
  Antisense Strand to SEQ ID NO: 333087
auuuacaaucacugguauc

SEQ ID NO: 333089 - RNA, 19 nt, Artificial Sequence
  Description of Artificial Sequence: Synthetic oligonucleotide
  Sense Strand Starting at position 182 of SEQ ID NO: 315364
ugaaacuguucuguauacu

SEQ ID NO: 333090 - RNA, 19 nt, Artificial Sequence
  Description of Artificial Sequence: Synthetic oligonucleotide
  Antisense Strand to SEQ ID NO: 333089
aguauacagaacaguuuca

SEQ ID NO: 333091 - RNA, 19 nt, Artificial Sequence
  Description of Artificial Sequence: Synthetic oligonucleotide
  Sense Strand Starting at position 182 of SEQ ID NO: 315376
guauacuuuacugguggau

SEQ ID NO: 333092 - RNA, 19 nt, Artificial Sequence
  Description of Artificial Sequence: Synthetic oligonucleotide
  Antisense Strand to SEQ ID NO: 333091
auccaccaguaaaguauac

SEQ ID NO: 333093 - RNA, 19 nt, Artificial Sequence
  Description of Artificial Sequence: Synthetic oligonucleotide
  Sense Strand Starting at position 182 of SEQ ID NO: 315379
uacuuuacugguggauaca

SEQ ID NO: 333094 - RNA, 19 nt, Artificial Sequence
  Description of Artificial Sequence: Synthetic oligonucleotide
  Antisense Strand to SEQ ID NO: 333093
uguauccaccaguaaagua

SEQ ID NO: 333095 - RNA, 19 nt, Artificial Sequence
  Description of Artificial Sequence: Synthetic oligonucleotide
  Sense Strand Starting at position 182 of SEQ ID NO: 315858
guaagauguuaacaacaga

SEQ ID NO: 333096 - RNA, 19 nt, Artificial Sequence
  Description of Artificial Sequence: Synthetic oligonucleotide
  Antisense Strand to SEQ ID NO: 333095
ucuguuguuaacaucuuac

SEQ ID NO: 333097 - RNA, 19 nt, Artificial Sequence
  Description of Artificial Sequence: Synthetic oligonucleotide
  Sense Strand Starting at position 182 of SEQ ID NO: 316336
gacuuagagccagggagua

SEQ ID NO: 333098 - RNA, 19 nt, Artificial Sequence
  Description of Artificial Sequence: Synthetic oligonucleotide
  Antisense Strand to SEQ ID NO: 333097
uacucccuggcucuaaguc

SEQ ID NO: 333099 - RNA, 19 nt, Artificial Sequence
  Description of Artificial Sequence: Synthetic oligonucleotide
  Sense Strand Starting at position 182 of SEQ ID NO: 316372
ucuggaguccuaugaggaa

SEQ ID NO: 333100 - RNA, 19 nt, Artificial Sequence
  Description of Artificial Sequence: Synthetic oligonucleotide
  Antisense Strand to SEQ ID NO: 333099
uuccucauaggacuccaga

SEQ ID NO: 333101 - RNA, 19 nt, Artificial Sequence
  Description of Artificial Sequence: Synthetic oligonucleotide
  Sense Strand Starting at position 182 of SEQ ID NO: 316535
uuucgaguauucucaacaa

SEQ ID NO: 333102 - RNA, 19 nt, Artificial Sequence
  Description of Artificial Sequence: Synthetic oligonucleotide
  Antisense Strand to SEQ ID NO: 333101
uuguugagaauacucgaaa

SEQ ID NO: 333103 - RNA, 19 nt, Artificial Sequence
  Description of Artificial Sequence: Synthetic oligonucleotide
  Sense Strand Starting at position 182 of SEQ ID NO: 316619
gcuagcaucuucguaggga

SEQ ID NO: 333104 - RNA, 19 nt, Artificial Sequence
  Description of Artificial Sequence: Synthetic oligonucleotide
  Antisense Strand to SEQ ID NO: 333103
ucccuacgaagaugcuagc

SEQ ID NO: 333105 - RNA, 19 nt, Artificial Sequence
  Description of Artificial Sequence: Synthetic oligonucleotide
  Sense Strand Starting at position 182 of SEQ ID NO: 316876
ccaucuacgcuaugacuuu

SEQ ID NO: 333106 - RNA, 19 nt, Artificial Sequence
  Description of Artificial Sequence: Synthetic oligonucleotide
  Antisense Strand to SEQ ID NO: 333105
aaagucauagcguagaugg

SEQ ID NO: 333107 - RNA, 19 nt, Artificial Sequence
  Description of Artificial Sequence: Synthetic oligonucleotide
  Sense Strand Starting at position 182 of SEQ ID NO: 317683
auauuugggugguggaaua

SEQ ID NO: 333108 - RNA, 19 nt, Artificial Sequence
  Description of Artificial Sequence: Synthetic oligonucleotide
  Antisense Strand to SEQ ID NO: 333107
uauuccaccacccaaauau

SEQ ID NO: 333109 - RNA, 19 nt, Artificial Sequence
  Description of Artificial Sequence: Synthetic oligonucleotide
  Sense Strand Starting at position 182 of SEQ ID NO: 317801
ggcaccuuccaauguaaga

SEQ ID NO: 333110 - RNA, 19 nt, Artificial Sequence
  Description of Artificial Sequence: Synthetic oligonucleotide
  Antisense Strand to SEQ ID NO: 333109
ucuuacauuggaaggugcc

SEQ ID NO: 333111 - RNA, 19 nt, Artificial Sequence
  Description of Artificial Sequence: Synthetic oligonucleotide
  Sense Strand Starting at position 182 of SEQ ID NO: 317852
gaggcaaauuucuaggaaa

SEQ ID NO: 333112 - RNA, 19 nt, Artificial Sequence
  Description of Artificial Sequence: Synthetic oligonucleotide
  Antisense Strand to SEQ ID NO: 333111
uuuccuagaaauuugccuc

SEQ ID NO: 333113 - RNA, 19 nt, Artificial Sequence
  Description of Artificial Sequence: Synthetic oligonucleotide
  Sense Strand Starting at position 182 of SEQ ID NO: 317855
gcaaauuucuaggaaagau

SEQ ID NO: 333114 - RNA, 19 nt, Artificial Sequence
  Description of Artificial Sequence: Synthetic oligonucleotide
  Antisense Strand to SEQ ID NO: 333113
aucuuuccuagaaauuugc

SEQ ID NO: 333115 - RNA, 19 nt, Artificial Sequence
  Description of Artificial Sequence: Synthetic oligonucleotide
  Sense Strand Starting at position 182 of SEQ ID NO: 317919
cuaucuaucuaugauagag

SEQ ID NO: 333116 - RNA, 19 nt, Artificial Sequence
  Description of Artificial Sequence: Synthetic oligonucleotide
  Antisense Strand to SEQ ID NO: 333115
cucuaucauagauagauag

SEQ ID NO: 333117 - RNA, 19 nt, Artificial Sequence
  Description of Artificial Sequence: Synthetic oligonucleotide
  Sense Strand Starting at position 182 of SEQ ID NO: 318347
agguauaaacccgaaguuu

SEQ ID NO: 333118 - RNA, 19 nt, Artificial Sequence
  Description of Artificial Sequence: Synthetic oligonucleotide
  Antisense Strand to SEQ ID NO: 333117
aaacuucggguuuauaccu

SEQ ID NO: 333119 - RNA, 19 nt, Artificial Sequence
  Description of Artificial Sequence: Synthetic oligonucleotide
  Sense Strand Starting at position 182 of SEQ ID NO: 318355
acccgaaguuuccugauaa

SEQ ID NO: 333120 - RNA, 19 nt, Artificial Sequence
  Description of Artificial Sequence: Synthetic oligonucleotide
  Antisense Strand to SEQ ID NO: 333119
uuaucaggaaacuucgggu

SEQ ID NO: 333121 - RNA, 19 nt, Artificial Sequence
  Description of Artificial Sequence: Synthetic oligonucleotide
  Sense Strand Starting at position 182 of SEQ ID NO: 318359
gaaguuuccugauaaagga

SEQ ID NO: 333122 - RNA, 19 nt, Artificial Sequence
  Description of Artificial Sequence: Synthetic oligonucleotide
  Antisense Strand to SEQ ID NO: 333121
uccuuuaucaggaaacuuc

SEQ ID NO: 333123 - RNA, 19 nt, Artificial Sequence
  Description of Artificial Sequence: Synthetic oligonucleotide
  Sense Strand Starting at position 182 of SEQ ID NO: 318423
gagggugggagacguauaa

SEQ ID NO: 333124 - RNA, 19 nt, Artificial Sequence
  Description of Artificial Sequence: Synthetic oligonucleotide
  Antisense Strand to SEQ ID NO: 333123
uuauacgucucccacccuc

SEQ ID NO: 333125 - RNA, 19 nt, Artificial Sequence
  Description of Artificial Sequence: Synthetic oligonucleotide
  Sense Strand Starting at position 182 of SEQ ID NO: 318427
gugggagacguauaauaua

SEQ ID NO: 333126 - RNA, 19 nt, Artificial Sequence
  Description of Artificial Sequence: Synthetic oligonucleotide
  Antisense Strand to SEQ ID NO: 333125
uauauuauacgucucccac

SEQ ID NO: 333127 - RNA, 19 nt, Artificial Sequence
  Description of Artificial Sequence: Synthetic oligonucleotide
  Sense Strand Starting at position 182 of SEQ ID NO: 318436
guauaauauacagguggca

SEQ ID NO: 333128 - RNA, 19 nt, Artificial Sequence
  Description of Artificial Sequence: Synthetic oligonucleotide
  Antisense Strand to SEQ ID NO: 333127
ugccaccuguauauuauac

SEQ ID NO: 333129 - RNA, 19 nt, Artificial Sequence
  Description of Artificial Sequence: Synthetic oligonucleotide
  Sense Strand Starting at position 182 of SEQ ID NO: 318631
cauggauccuagcagaaag

SEQ ID NO: 333130 - RNA, 19 nt, Artificial Sequence
  Description of Artificial Sequence: Synthetic oligonucleotide
  Antisense Strand to SEQ ID NO: 333129
cuuucugcuaggauccaug

SEQ ID NO: 333131 - RNA, 19 nt, Artificial Sequence
  Description of Artificial Sequence: Synthetic oligonucleotide
  Sense Strand Starting at position 182 of SEQ ID NO: 318668
aagaacaugcugugagaaa

SEQ ID NO: 333132 - RNA, 19 nt, Artificial Sequence
  Description of Artificial Sequence: Synthetic oligonucleotide
  Antisense Strand to SEQ ID NO: 333131
uuucucacagcauguucuu

SEQ ID NO: 333133 - RNA, 19 nt, Artificial Sequence
  Description of Artificial Sequence: Synthetic oligonucleotide
  Sense Strand Starting at position 182 of SEQ ID NO: 318712
accgacauucuagaaugua

SEQ ID NO: 333134 - RNA, 19 nt, Artificial Sequence
  Description of Artificial Sequence: Synthetic oligonucleotide
  Antisense Strand to SEQ ID NO: 333133
uacauucuagaaugucggu

SEQ ID NO: 333135 - RNA, 19 nt, Artificial Sequence
  Description of Artificial Sequence: Synthetic oligonucleotide
  Sense Strand Starting at position 182 of SEQ ID NO: 318715
gacauucuagaauguaugu

SEQ ID NO: 333136 - RNA, 19 nt, Artificial Sequence
  Description of Artificial Sequence: Synthetic oligonucleotide
  Antisense Strand to SEQ ID NO: 333135
acauacauucuagaauguc

SEQ ID NO: 333137 - RNA, 19 nt, Artificial Sequence
  Description of Artificial Sequence: Synthetic oligonucleotide
  Sense Strand Starting at position 182 of SEQ ID NO: 318720
ucuagaauguauguauuag

SEQ ID NO: 333138 - RNA, 19 nt, Artificial Sequence
  Description of Artificial Sequence: Synthetic oligonucleotide
  Antisense Strand to SEQ ID NO: 333137
cuaauacauacauucuaga

SEQ ID NO: 333139 - RNA, 19 nt, Artificial Sequence
  Description of Artificial Sequence: Synthetic oligonucleotide
  Sense Strand Starting at position 182 of SEQ ID NO: 318724
gaauguauguauuagaaag

SEQ ID NO: 333140 - RNA, 19 nt, Artificial Sequence
  Description of Artificial Sequence: Synthetic oligonucleotide
  Antisense Strand to SEQ ID NO: 333139
cuuucuaauacauacauuc

SEQ ID NO: 333141 - RNA, 19 nt, Artificial Sequence
  Description of Artificial Sequence: Synthetic oligonucleotide
  Sense Strand Starting at position 182 of SEQ ID NO: 318754
gguaacauuugcuccagca

SEQ ID NO: 333142 - RNA, 19 nt, Artificial Sequence
  Description of Artificial Sequence: Synthetic oligonucleotide
  Antisense Strand to SEQ ID NO: 333141
ugcuggagcaaauguuacc

SEQ ID NO: 333143 - RNA, 19 nt, Artificial Sequence
  Description of Artificial Sequence: Synthetic oligonucleotide
  Sense Strand Starting at position 182 of SEQ ID NO: 318767
ccagcaauccaaggauuau

SEQ ID NO: 333144 - RNA, 19 nt, Artificial Sequence
  Description of Artificial Sequence: Synthetic oligonucleotide
  Antisense Strand to SEQ ID NO: 333143
auaauccuuggauugcugg

SEQ ID NO: 333145 - RNA, 19 nt, Artificial Sequence
  Description of Artificial Sequence: Synthetic oligonucleotide
  Sense Strand Starting at position 182 of SEQ ID NO: 318844
ccucuagguuuguuacuuu

SEQ ID NO: 333146 - RNA, 19 nt, Artificial Sequence
  Description of Artificial Sequence: Synthetic oligonucleotide
  Antisense Strand to SEQ ID NO: 333145
aaaguaacaaaccuagagg

SEQ ID NO: 333147 - RNA, 19 nt, Artificial Sequence
  Description of Artificial Sequence: Synthetic oligonucleotide
  Sense Strand Starting at position 182 of SEQ ID NO: 318933
aguuuauaagcuugacauu

SEQ ID NO: 333148 - RNA, 19 nt, Artificial Sequence
  Description of Artificial Sequence: Synthetic oligonucleotide
  Antisense Strand to SEQ ID NO: 333147
aaugucaagcuuauaaacu

SEQ ID NO: 333149 - RNA, 19 nt, Artificial Sequence
  Description of Artificial Sequence: Synthetic oligonucleotide
  Sense Strand Starting at position 182 of SEQ ID NO: 319006
acaguauacagauguuugu

SEQ ID NO: 333150 - RNA, 19 nt, Artificial Sequence
  Description of Artificial Sequence: Synthetic oligonucleotide
  Antisense Strand to SEQ ID NO: 333149
acaaacaucuguauacugu

SEQ ID NO: 333151 - RNA, 19 nt, Artificial Sequence
  Description of Artificial Sequence: Synthetic oligonucleotide
  Sense Strand Starting at position 182 of SEQ ID NO: 319009
guauacagauguuuguuaa

SEQ ID NO: 333152 - RNA, 19 nt, Artificial Sequence
  Description of Artificial Sequence: Synthetic oligonucleotide
  Antisense Strand to SEQ ID NO: 333151
uuaacaaacaucuguauac

SEQ ID NO: 333153 - RNA, 19 nt, Artificial Sequence
  Description of Artificial Sequence: Synthetic oligonucleotide
  Sense Strand Starting at position 182 of SEQ ID NO: 319040
uuguuucucuagccagaag

SEQ ID NO: 333154 - RNA, 19 nt, Artificial Sequence
  Description of Artificial Sequence: Synthetic oligonucleotide
  Antisense Strand to SEQ ID NO: 333153
cuucuggcuagagaaacaa

SEQ ID NO: 333155 - RNA, 19 nt, Artificial Sequence
  Description of Artificial Sequence: Synthetic oligonucleotide
  Sense Strand Starting at position 182 of SEQ ID NO: 319043
uuucucuagccagaaguau

SEQ ID NO: 333156 - RNA, 19 nt, Artificial Sequence
  Description of Artificial Sequence: Synthetic oligonucleotide
  Antisense Strand to SEQ ID NO: 333155
auacuucuggcuagagaaa

SEQ ID NO: 333157 - RNA, 19 nt, Artificial Sequence
  Description of Artificial Sequence: Synthetic oligonucleotide
  Sense Strand Starting at position 182 of SEQ ID NO: 319051
gccagaaguaucuguagga

SEQ ID NO: 333158 - RNA, 19 nt, Artificial Sequence
  Description of Artificial Sequence: Synthetic oligonucleotide
  Antisense Strand to SEQ ID NO: 333157
uccuacagauacuucuggc

SEQ ID NO: 333159 - RNA, 19 nt, Artificial Sequence
  Description of Artificial Sequence: Synthetic oligonucleotide
  Sense Strand Starting at position 182 of SEQ ID NO: 319052
ccagaaguaucuguaggac

SEQ ID NO: 333160 - RNA, 19 nt, Artificial Sequence
  Description of Artificial Sequence: Synthetic oligonucleotide
  Antisense Strand to SEQ ID NO: 333159
guccuacagauacuucugg

SEQ ID NO: 333161 - RNA, 19 nt, Artificial Sequence
  Description of Artificial Sequence: Synthetic oligonucleotide
  Sense Strand Starting at position 182 of SEQ ID NO: 319055
gaaguaucuguaggacacu

SEQ ID NO: 333162 - RNA, 19 nt, Artificial Sequence
  Description of Artificial Sequence: Synthetic oligonucleotide
  Antisense Strand to SEQ ID NO: 333161
aguguccuacagauacuuc

SEQ ID NO: 333163 - RNA, 19 nt, Artificial Sequence
  Description of Artificial Sequence: Synthetic oligonucleotide
  Sense Strand Starting at position 182 of SEQ ID NO: 319193
ugcagaacuuuaguauaau

SEQ ID NO: 333164 - RNA, 19 nt, Artificial Sequence
  Description of Artificial Sequence: Synthetic oligonucleotide
  Antisense Strand to SEQ ID NO: 333163
auuauacuaaaguucugca

SEQ ID NO: 333165 - RNA, 19 nt, Artificial Sequence
  Description of Artificial Sequence: Synthetic oligonucleotide
  Sense Strand Starting at position 183 of SEQ ID NO: 315363
ucagauacauggcuuggaa

SEQ ID NO: 333166 - RNA, 19 nt, Artificial Sequence
  Description of Artificial Sequence: Synthetic oligonucleotide
  Antisense Strand to SEQ ID NO: 333165
uuccaagccauguaucuga

SEQ ID NO: 333167 - RNA, 19 nt, Artificial Sequence
  Description of Artificial Sequence: Synthetic oligonucleotide
  Sense Strand Starting at position 183 of SEQ ID NO: 315365
agauacauggcuuggaaau

SEQ ID NO: 333168 - RNA, 19 nt, Artificial Sequence
  Description of Artificial Sequence: Synthetic oligonucleotide
  Antisense Strand to SEQ ID NO: 333167
auuuccaagccauguaucu

SEQ ID NO: 333169 - RNA, 19 nt, Artificial Sequence
  Description of Artificial Sequence: Synthetic oligonucleotide
  Sense Strand Starting at position 183 of SEQ ID NO: 315366
gauacauggcuuggaaaua

SEQ ID NO: 333170 - RNA, 19 nt, Artificial Sequence
  Description of Artificial Sequence: Synthetic oligonucleotide
  Antisense Strand to SEQ ID NO: 333169
uauuuccaagccauguauc

SEQ ID NO: 333171 - RNA, 19 nt, Artificial Sequence
  Description of Artificial Sequence: Synthetic oligonucleotide
  Sense Strand Starting at position 183 of SEQ ID NO: 315538
ggacagugguacguggaaa

SEQ ID NO: 333172 - RNA, 19 nt, Artificial Sequence
  Description of Artificial Sequence: Synthetic oligonucleotide
  Antisense Strand to SEQ ID NO: 333171
uuuccacguaccacugucc

SEQ ID NO: 333173 - RNA, 19 nt, Artificial Sequence
  Description of Artificial Sequence: Synthetic oligonucleotide
  Sense Strand Starting at position 183 of SEQ ID NO: 315539
gacagugguacguggaaac

SEQ ID NO: 333174 - RNA, 19 nt, Artificial Sequence
  Description of Artificial Sequence: Synthetic oligonucleotide
  Antisense Strand to SEQ ID NO: 333173
guuuccacguaccacuguc

SEQ ID NO: 333175 - RNA, 19 nt, Artificial Sequence
  Description of Artificial Sequence: Synthetic oligonucleotide
  Sense Strand Starting at position 183 of SEQ ID NO: 315860
ggugaaagguuauuagcaa

SEQ ID NO: 333176 - RNA, 19 nt, Artificial Sequence
  Description of Artificial Sequence: Synthetic oligonucleotide
  Antisense Strand to SEQ ID NO: 333175
uugcuaauaaccuuucacc

SEQ ID NO: 333177 - RNA, 19 nt, Artificial Sequence
  Description of Artificial Sequence: Synthetic oligonucleotide
  Sense Strand Starting at position 183 of SEQ ID NO: 315943
ggagaaucaguuugcuuua

SEQ ID NO: 333178 - RNA, 19 nt, Artificial Sequence
  Description of Artificial Sequence: Synthetic oligonucleotide
  Antisense Strand to SEQ ID NO: 333177
uaaagcaaacugauucucc

SEQ ID NO: 333179 - RNA, 19 nt, Artificial Sequence
  Description of Artificial Sequence: Synthetic oligonucleotide
  Sense Strand Starting at position 183 of SEQ ID NO: 315944
gagaaucaguuugcuuuau

SEQ ID NO: 333180 - RNA, 19 nt, Artificial Sequence
  Description of Artificial Sequence: Synthetic oligonucleotide
  Antisense Strand to SEQ ID NO: 333179
auaaagcaaacugauucuc

SEQ ID NO: 333181 - RNA, 19 nt, Artificial Sequence
  Description of Artificial Sequence: Synthetic oligonucleotide
  Sense Strand Starting at position 183 of SEQ ID NO: 316012
auuugagaaucauauaagc

SEQ ID NO: 333182 - RNA, 19 nt, Artificial Sequence
  Description of Artificial Sequence: Synthetic oligonucleotide
  Antisense Strand to SEQ ID NO: 333181
gcuuauaugauucucaaau

SEQ ID NO: 333183 - RNA, 19 nt, Artificial Sequence
  Description of Artificial Sequence: Synthetic oligonucleotide
  Sense Strand Starting at position 183 of SEQ ID NO: 316039
guagucauaucuccuacca

SEQ ID NO: 333184 - RNA, 19 nt, Artificial Sequence
  Description of Artificial Sequence: Synthetic oligonucleotide
  Antisense Strand to SEQ ID NO: 333183
ugguaggagauaugacuac

SEQ ID NO: 333185 - RNA, 19 nt, Artificial Sequence
  Description of Artificial Sequence: Synthetic oligonucleotide
  Sense Strand Starting at position 183 of SEQ ID NO: 316067
agauaauacugccuuugua

SEQ ID NO: 333186 - RNA, 19 nt, Artificial Sequence
  Description of Artificial Sequence: Synthetic oligonucleotide
  Antisense Strand to SEQ ID NO: 333185
uacaaaggcaguauuaucu

SEQ ID NO: 333187 - RNA, 19 nt, Artificial Sequence
  Description of Artificial Sequence: Synthetic oligonucleotide
  Sense Strand Starting at position 183 of SEQ ID NO: 316077
gccuuuguagaaugacuua

SEQ ID NO: 333188 - RNA, 19 nt, Artificial Sequence
  Description of Artificial Sequence: Synthetic oligonucleotide
  Antisense Strand to SEQ ID NO: 333187
uaagucauucuacaaaggc

SEQ ID NO: 333189 - RNA, 19 nt, Artificial Sequence
  Description of Artificial Sequence: Synthetic oligonucleotide
  Sense Strand Starting at position 183 of SEQ ID NO: 316126
auccauacccugugaguua

SEQ ID NO: 333190 - RNA, 19 nt, Artificial Sequence
  Description of Artificial Sequence: Synthetic oligonucleotide
  Antisense Strand to SEQ ID NO: 333189
uaacucacaggguauggau

SEQ ID NO: 333191 - RNA, 19 nt, Artificial Sequence
  Description of Artificial Sequence: Synthetic oligonucleotide
  Sense Strand Starting at position 183 of SEQ ID NO: 316306
agcccucgauuuccucaua

SEQ ID NO: 333192 - RNA, 19 nt, Artificial Sequence
  Description of Artificial Sequence: Synthetic oligonucleotide
  Antisense Strand to SEQ ID NO: 333191
uaugaggaaaucgagggcu

SEQ ID NO: 333193 - RNA, 19 nt, Artificial Sequence
  Description of Artificial Sequence: Synthetic oligonucleotide
  Sense Strand Starting at position 183 of SEQ ID NO: 316307
gcccucgauuuccucauau

SEQ ID NO: 333194 - RNA, 19 nt, Artificial Sequence
  Description of Artificial Sequence: Synthetic oligonucleotide
  Antisense Strand to SEQ ID NO: 333193
auaugaggaaaucgagggc

SEQ ID NO: 333195 - RNA, 19 nt, Artificial Sequence
  Description of Artificial Sequence: Synthetic oligonucleotide
  Sense Strand Starting at position 183 of SEQ ID NO: 316355
uaaggauaucgugacuauu

SEQ ID NO: 333196 - RNA, 19 nt, Artificial Sequence
  Description of Artificial Sequence: Synthetic oligonucleotide
  Antisense Strand to SEQ ID NO: 333195
aauagucacgauauccuua

SEQ ID NO: 333197 - RNA, 19 nt, Artificial Sequence
  Description of Artificial Sequence: Synthetic oligonucleotide
  Sense Strand Starting at position 183 of SEQ ID NO: 316357
aggauaucgugacuauuaa

SEQ ID NO: 333198 - RNA, 19 nt, Artificial Sequence
  Description of Artificial Sequence: Synthetic oligonucleotide
  Antisense Strand to SEQ ID NO: 333197
uuaauagucacgauauccu

SEQ ID NO: 333199 - RNA, 19 nt, Artificial Sequence
  Description of Artificial Sequence: Synthetic oligonucleotide
  Sense Strand Starting at position 183 of SEQ ID NO: 316449
ugcuguuaucauuaagaug

SEQ ID NO: 333200 - RNA, 19 nt, Artificial Sequence
  Description of Artificial Sequence: Synthetic oligonucleotide
  Antisense Strand to SEQ ID NO: 333199
caucuuaaugauaacagca

SEQ ID NO: 333201 - RNA, 19 nt, Artificial Sequence
  Description of Artificial Sequence: Synthetic oligonucleotide
  Sense Strand Starting at position 183 of SEQ ID NO: 316504
guuguaugucuacaacaac

SEQ ID NO: 333202 - RNA, 19 nt, Artificial Sequence
  Description of Artificial Sequence: Synthetic oligonucleotide
  Antisense Strand to SEQ ID NO: 333201
guuguuguagacauacaac

SEQ ID NO: 333203 - RNA, 19 nt, Artificial Sequence
  Description of Artificial Sequence: Synthetic oligonucleotide
  Sense Strand Starting at position 183 of SEQ ID NO: 316515
acaacaacugugugaucga

SEQ ID NO: 333204 - RNA, 19 nt, Artificial Sequence
  Description of Artificial Sequence: Synthetic oligonucleotide
  Antisense Strand to SEQ ID NO: 333203
ucgaucacacaguuguugu

SEQ ID NO: 333205 - RNA, 19 nt, Artificial Sequence
  Description of Artificial Sequence: Synthetic oligonucleotide
  Sense Strand Starting at position 183 of SEQ ID NO: 316623
ggaaguucugagcaguaaa

SEQ ID NO: 333206 - RNA, 19 nt, Artificial Sequence
  Description of Artificial Sequence: Synthetic oligonucleotide
  Antisense Strand to SEQ ID NO: 333205
uuuacugcucagaacuucc

SEQ ID NO: 333207 - RNA, 19 nt, Artificial Sequence
  Description of Artificial Sequence: Synthetic oligonucleotide
  Sense Strand Starting at position 183 of SEQ ID NO: 316804
guguuacgacgggaagauu

SEQ ID NO: 333208 - RNA, 19 nt, Artificial Sequence
  Description of Artificial Sequence: Synthetic oligonucleotide
  Antisense Strand to SEQ ID NO: 333207
aaucuucccgucguaacac

SEQ ID NO: 333209 - RNA, 19 nt, Artificial Sequence
  Description of Artificial Sequence: Synthetic oligonucleotide
  Sense Strand Starting at position 183 of SEQ ID NO: 317127
ccgaaugccgcgcuucaua

SEQ ID NO: 333210 - RNA, 19 nt, Artificial Sequence
  Description of Artificial Sequence: Synthetic oligonucleotide
  Antisense Strand to SEQ ID NO: 333209
uaugaagcgcggcauucgg

SEQ ID NO: 333211 - RNA, 19 nt, Artificial Sequence
  Description of Artificial Sequence: Synthetic oligonucleotide
  Sense Strand Starting at position 183 of SEQ ID NO: 317409
guaggaggcgaauagguuu

SEQ ID NO: 333212 - RNA, 19 nt, Artificial Sequence
  Description of Artificial Sequence: Synthetic oligonucleotide
  Antisense Strand to SEQ ID NO: 333211
aaaccuauucgccuccuac

SEQ ID NO: 333213 - RNA, 19 nt, Artificial Sequence
  Description of Artificial Sequence: Synthetic oligonucleotide
  Sense Strand Starting at position 183 of SEQ ID NO: 317554
ugugauggaaauugcagaa

SEQ ID NO: 333214 - RNA, 19 nt, Artificial Sequence
  Description of Artificial Sequence: Synthetic oligonucleotide
  Antisense Strand to SEQ ID NO: 333213
uucugcaauuuccaucaca

SEQ ID NO: 333215 - RNA, 19 nt, Artificial Sequence
  Description of Artificial Sequence: Synthetic oligonucleotide
  Sense Strand Starting at position 183 of SEQ ID NO: 317649
uccucuuauguugagguaa

SEQ ID NO: 333216 - RNA, 19 nt, Artificial Sequence
  Description of Artificial Sequence: Synthetic oligonucleotide
  Antisense Strand to SEQ ID NO: 333215
uuaccucaacauaagagga

SEQ ID NO: 333217 - RNA, 19 nt, Artificial Sequence
  Description of Artificial Sequence: Synthetic oligonucleotide
  Sense Strand Starting at position 183 of SEQ ID NO: 317792
agagauaacucaguuuauu

SEQ ID NO: 333218 - RNA, 19 nt, Artificial Sequence
  Description of Artificial Sequence: Synthetic oligonucleotide
  Antisense Strand to SEQ ID NO: 333217
aauaaacugaguuaucucu

SEQ ID NO: 333219 - RNA, 19 nt, Artificial Sequence
  Description of Artificial Sequence: Synthetic oligonucleotide
  Sense Strand Starting at position 183 of SEQ ID NO: 318429
cccauuacccaugaguuau

SEQ ID NO: 333220 - RNA, 19 nt, Artificial Sequence
  Description of Artificial Sequence: Synthetic oligonucleotide
  Antisense Strand to SEQ ID NO: 333219
auaacucauggguaauggg

SEQ ID NO: 333221 - RNA, 19 nt, Artificial Sequence
  Description of Artificial Sequence: Synthetic oligonucleotide
  Sense Strand Starting at position 183 of SEQ ID NO: 318435
acccaugaguuaucacuuu

SEQ ID NO: 333222 - RNA, 19 nt, Artificial Sequence
  Description of Artificial Sequence: Synthetic oligonucleotide
  Antisense Strand to SEQ ID NO: 333221
aaagugauaacucaugggu

SEQ ID NO: 333223 - RNA, 19 nt, Artificial Sequence
  Description of Artificial Sequence: Synthetic oligonucleotide
  Sense Strand Starting at position 183 of SEQ ID NO: 318441
gaguuaucacuuugaacag

SEQ ID NO: 333224 - RNA, 19 nt, Artificial Sequence
  Description of Artificial Sequence: Synthetic oligonucleotide
  Antisense Strand to SEQ ID NO: 333223
cuguucaaagugauaacuc

SEQ ID NO: 333225 - RNA, 19 nt, Artificial Sequence
  Description of Artificial Sequence: Synthetic oligonucleotide
  Sense Strand Starting at position 183 of SEQ ID NO: 318533
uagguauuacuguaacaug

SEQ ID NO: 333226 - RNA, 19 nt, Artificial Sequence
  Description of Artificial Sequence: Synthetic oligonucleotide
  Antisense Strand to SEQ ID NO: 333225
cauguuacaguaauaccua

SEQ ID NO: 333227 - RNA, 19 nt, Artificial Sequence
  Description of Artificial Sequence: Synthetic oligonucleotide
  Sense Strand Starting at position 183 of SEQ ID NO: 318579
auuguuucucauuagucua

SEQ ID NO: 333228 - RNA, 19 nt, Artificial Sequence
  Description of Artificial Sequence: Synthetic oligonucleotide
  Antisense Strand to SEQ ID NO: 333227
uagacuaaugagaaacaau

SEQ ID NO: 333229 - RNA, 19 nt, Artificial Sequence
  Description of Artificial Sequence: Synthetic oligonucleotide
  Sense Strand Starting at position 183 of SEQ ID NO: 318582
guuucucauuagucuacaa

SEQ ID NO: 333230 - RNA, 19 nt, Artificial Sequence
  Description of Artificial Sequence: Synthetic oligonucleotide
  Antisense Strand to SEQ ID NO: 333229
uuguagacuaaugagaaac

SEQ ID NO: 333231 - RNA, 19 nt, Artificial Sequence
  Description of Artificial Sequence: Synthetic oligonucleotide
  Sense Strand Starting at position 183 of SEQ ID NO: 318640
uaguguugggaauguuaug

SEQ ID NO: 333232 - RNA, 19 nt, Artificial Sequence
  Description of Artificial Sequence: Synthetic oligonucleotide
  Antisense Strand to SEQ ID NO: 333231
cauaacauucccaacacua

SEQ ID NO: 333233 - RNA, 19 nt, Artificial Sequence
  Description of Artificial Sequence: Synthetic oligonucleotide
  Sense Strand Starting at position 183 of SEQ ID NO: 318708
ugagcugagaucugcaaau

SEQ ID NO: 333234 - RNA, 19 nt, Artificial Sequence
  Description of Artificial Sequence: Synthetic oligonucleotide
  Antisense Strand to SEQ ID NO: 333233
auuugcagaucucagcuca

SEQ ID NO: 333235 - RNA, 19 nt, Artificial Sequence
  Description of Artificial Sequence: Synthetic oligonucleotide
  Sense Strand Starting at position 183 of SEQ ID NO: 318710
agcugagaucugcaaauga

SEQ ID NO: 333236 - RNA, 19 nt, Artificial Sequence
  Description of Artificial Sequence: Synthetic oligonucleotide
  Antisense Strand to SEQ ID NO: 333235
ucauuugcagaucucagcu

SEQ ID NO: 333237 - RNA, 19 nt, Artificial Sequence
  Description of Artificial Sequence: Synthetic oligonucleotide
  Sense Strand Starting at position 183 of SEQ ID NO: 318897
uccuaaggccauugggaau

SEQ ID NO: 333238 - RNA, 19 nt, Artificial Sequence
  Description of Artificial Sequence: Synthetic oligonucleotide
  Antisense Strand to SEQ ID NO: 333237
auucccaauggccuuagga

SEQ ID NO: 333239 - RNA, 19 nt, Artificial Sequence
  Description of Artificial Sequence: Synthetic oligonucleotide
  Sense Strand Starting at position 183 of SEQ ID NO: 318966
gaucaauggcuguagugua

SEQ ID NO: 333240 - RNA, 19 nt, Artificial Sequence
  Description of Artificial Sequence: Synthetic oligonucleotide
  Antisense Strand to SEQ ID NO: 333239
uacacuacagccauugauc

SEQ ID NO: 333241 - RNA, 19 nt, Artificial Sequence
  Description of Artificial Sequence: Synthetic oligonucleotide
  Sense Strand Starting at position 183 of SEQ ID NO: 319035
uuggauguagccugagaac

SEQ ID NO: 333242 - RNA, 19 nt, Artificial Sequence
  Description of Artificial Sequence: Synthetic oligonucleotide
  Antisense Strand to SEQ ID NO: 333241
guucucaggcuacauccaa

SEQ ID NO: 333243 - RNA, 19 nt, Artificial Sequence
  Description of Artificial Sequence: Synthetic oligonucleotide
  Sense Strand Starting at position 183 of SEQ ID NO: 319092
gaauuauauugugugaugu

SEQ ID NO: 333244 - RNA, 19 nt, Artificial Sequence
  Description of Artificial Sequence: Synthetic oligonucleotide
  Antisense Strand to SEQ ID NO: 333243
acaucacacaauauaauuc

SEQ ID NO: 333245 - RNA, 19 nt, Artificial Sequence
  Description of Artificial Sequence: Synthetic oligonucleotide
  Sense Strand Starting at position 184 of SEQ ID NO: 315316
gggugaauauuaguaccuu

SEQ ID NO: 333246 - RNA, 19 nt, Artificial Sequence
  Description of Artificial Sequence: Synthetic oligonucleotide
  Antisense Strand to SEQ ID NO: 333245
aagguacuaauauucaccc

SEQ ID NO: 333247 - RNA, 19 nt, Artificial Sequence
  Description of Artificial Sequence: Synthetic oligonucleotide
  Sense Strand Starting at position 184 of SEQ ID NO: 315705
ugccuuuaacuuuaagaga

SEQ ID NO: 333248 - RNA, 19 nt, Artificial Sequence
  Description of Artificial Sequence: Synthetic oligonucleotide
  Antisense Strand to SEQ ID NO: 333247
ucucuuaaaguuaaaggca

SEQ ID NO: 333249 - RNA, 19 nt, Artificial Sequence
  Description of Artificial Sequence: Synthetic oligonucleotide
  Sense Strand Starting at position 184 of SEQ ID NO: 315773
cuaaccugucaguauaggu

SEQ ID NO: 333250 - RNA, 19 nt, Artificial Sequence
  Description of Artificial Sequence: Synthetic oligonucleotide
  Antisense Strand to SEQ ID NO: 333249
accuauacugacagguuag

SEQ ID NO: 333251 - RNA, 19 nt, Artificial Sequence
  Description of Artificial Sequence: Synthetic oligonucleotide
  Sense Strand Starting at position 184 of SEQ ID NO: 315786
auagguuggcuuuaauauu

SEQ ID NO: 333252 - RNA, 19 nt, Artificial Sequence
  Description of Artificial Sequence: Synthetic oligonucleotide
  Antisense Strand to SEQ ID NO: 333251
aauauuaaagccaaccuau

SEQ ID NO: 333253 - RNA, 19 nt, Artificial Sequence
  Description of Artificial Sequence: Synthetic oligonucleotide
  Sense Strand Starting at position 184 of SEQ ID NO: 315897
uugggacaccuauauguuu

SEQ ID NO: 333254 - RNA, 19 nt, Artificial Sequence
  Description of Artificial Sequence: Synthetic oligonucleotide
  Antisense Strand to SEQ ID NO: 333253
aaacauauaggugucccaa

SEQ ID NO: 333255 - RNA, 19 nt, Artificial Sequence
  Description of Artificial Sequence: Synthetic oligonucleotide
  Sense Strand Starting at position 184 of SEQ ID NO: 315935
guccuaauacucugaagua

SEQ ID NO: 333256 - RNA, 19 nt, Artificial Sequence
  Description of Artificial Sequence: Synthetic oligonucleotide
  Antisense Strand to SEQ ID NO: 333255
uacuucagaguauuaggac

SEQ ID NO: 333257 - RNA, 19 nt, Artificial Sequence
  Description of Artificial Sequence: Synthetic oligonucleotide
  Sense Strand Starting at position 184 of SEQ ID NO: 316019
caaguagagugagugagaa

SEQ ID NO: 333258 - RNA, 19 nt, Artificial Sequence
  Description of Artificial Sequence: Synthetic oligonucleotide
  Antisense Strand to SEQ ID NO: 333257
uucucacucacucuacuug

SEQ ID NO: 333259 - RNA, 19 nt, Artificial Sequence
  Description of Artificial Sequence: Synthetic oligonucleotide
  Sense Strand Starting at position 184 of SEQ ID NO: 316037
aagggucuaucacuaagau

SEQ ID NO: 333260 - RNA, 19 nt, Artificial Sequence
  Description of Artificial Sequence: Synthetic oligonucleotide
  Antisense Strand to SEQ ID NO: 333259
aucuuagugauagacccuu

SEQ ID NO: 333261 - RNA, 19 nt, Artificial Sequence
  Description of Artificial Sequence: Synthetic oligonucleotide
  Sense Strand Starting at position 184 of SEQ ID NO: 316356
cccggcuaucacuaagauu

SEQ ID NO: 333262 - RNA, 19 nt, Artificial Sequence
  Description of Artificial Sequence: Synthetic oligonucleotide
  Antisense Strand to SEQ ID NO: 333261
aaucuuagugauagccggg

SEQ ID NO: 333263 - RNA, 19 nt, Artificial Sequence
  Description of Artificial Sequence: Synthetic oligonucleotide
  Sense Strand Starting at position 184 of SEQ ID NO: 316369
aagauuucugucuguaagc

SEQ ID NO: 333264 - RNA, 19 nt, Artificial Sequence
  Description of Artificial Sequence: Synthetic oligonucleotide
  Antisense Strand to SEQ ID NO: 333263
gcuuacagacagaaaucuu

SEQ ID NO: 333265 - RNA, 19 nt, Artificial Sequence
  Description of Artificial Sequence: Synthetic oligonucleotide
  Sense Strand Starting at position 184 of SEQ ID NO: 316370
agauuucugucuguaagcu

SEQ ID NO: 333266 - RNA, 19 nt, Artificial Sequence
  Description of Artificial Sequence: Synthetic oligonucleotide
  Antisense Strand to SEQ ID NO: 333265
agcuuacagacagaaaucu

SEQ ID NO: 333267 - RNA, 19 nt, Artificial Sequence
  Description of Artificial Sequence: Synthetic oligonucleotide
  Sense Strand Starting at position 184 of SEQ ID NO: 316519
guguacuuagaacaaguuu

SEQ ID NO: 333268 - RNA, 19 nt, Artificial Sequence
  Description of Artificial Sequence: Synthetic oligonucleotide
  Antisense Strand to SEQ ID NO: 333267
aaacuuguucuaaguacac

SEQ ID NO: 333269 - RNA, 19 nt, Artificial Sequence
  Description of Artificial Sequence: Synthetic oligonucleotide
  Sense Strand Starting at position 184 of SEQ ID NO: 316542
ucuagaguagcugauguaa

SEQ ID NO: 333270 - RNA, 19 nt, Artificial Sequence
  Description of Artificial Sequence: Synthetic oligonucleotide
  Antisense Strand to SEQ ID NO: 333269
uuacaucagcuacucuaga

SEQ ID NO: 333271 - RNA, 19 nt, Artificial Sequence
  Description of Artificial Sequence: Synthetic oligonucleotide
  Sense Strand Starting at position 184 of SEQ ID NO: 316677
aaaguucugggaggacuuu

SEQ ID NO: 333272 - RNA, 19 nt, Artificial Sequence
  Description of Artificial Sequence: Synthetic oligonucleotide
  Antisense Strand to SEQ ID NO: 333271
aaaguccucccagaacuuu

SEQ ID NO: 333273 - RNA, 19 nt, Artificial Sequence
  Description of Artificial Sequence: Synthetic oligonucleotide
  Sense Strand Starting at position 184 of SEQ ID NO: 316726
agaggauaugucugcauag

SEQ ID NO: 333274 - RNA, 19 nt, Artificial Sequence
  Description of Artificial Sequence: Synthetic oligonucleotide
  Antisense Strand to SEQ ID NO: 333273
cuaugcagacauauccucu

SEQ ID NO: 333275 - RNA, 19 nt, Artificial Sequence
  Description of Artificial Sequence: Synthetic oligonucleotide
  Sense Strand Starting at position 184 of SEQ ID NO: 316728
aggauaugucugcauagca

SEQ ID NO: 333276 - RNA, 19 nt, Artificial Sequence
  Description of Artificial Sequence: Synthetic oligonucleotide
  Antisense Strand to SEQ ID NO: 333275
ugcuaugcagacauauccu

SEQ ID NO: 333277 - RNA, 19 nt, Artificial Sequence
  Description of Artificial Sequence: Synthetic oligonucleotide
  Sense Strand Starting at position 184 of SEQ ID NO: 316757
aggguuccuccugacugua

SEQ ID NO: 333278 - RNA, 19 nt, Artificial Sequence
  Description of Artificial Sequence: Synthetic oligonucleotide
  Antisense Strand to SEQ ID NO: 333277
uacagucaggaggaacccu

SEQ ID NO: 333279 - RNA, 19 nt, Artificial Sequence
  Description of Artificial Sequence: Synthetic oligonucleotide
  Sense Strand Starting at position 184 of SEQ ID NO: 317027
aagcuaggucgacauucuu

SEQ ID NO: 333280 - RNA, 19 nt, Artificial Sequence
  Description of Artificial Sequence: Synthetic oligonucleotide
  Antisense Strand to SEQ ID NO: 333279
aagaaugucgaccuagcuu

SEQ ID NO: 333281 - RNA, 19 nt, Artificial Sequence
  Description of Artificial Sequence: Synthetic oligonucleotide
  Sense Strand Starting at position 184 of SEQ ID NO: 317037
gacauucuugucugaugga

SEQ ID NO: 333282 - RNA, 19 nt, Artificial Sequence
  Description of Artificial Sequence: Synthetic oligonucleotide
  Antisense Strand to SEQ ID NO: 333281
uccaucagacaagaauguc

SEQ ID NO: 333283 - RNA, 19 nt, Artificial Sequence
  Description of Artificial Sequence: Synthetic oligonucleotide
  Sense Strand Starting at position 184 of SEQ ID NO: 317290
ccaucuugagaaggucaga

SEQ ID NO: 333284 - RNA, 19 nt, Artificial Sequence
  Description of Artificial Sequence: Synthetic oligonucleotide
  Antisense Strand to SEQ ID NO: 333283
ucugaccuucucaagaugg

SEQ ID NO: 333285 - RNA, 19 nt, Artificial Sequence
  Description of Artificial Sequence: Synthetic oligonucleotide
  Sense Strand Starting at position 184 of SEQ ID NO: 317521
aaggcugacgcuuaaguaa

SEQ ID NO: 333286 - RNA, 19 nt, Artificial Sequence
  Description of Artificial Sequence: Synthetic oligonucleotide
  Antisense Strand to SEQ ID NO: 333285
uuacuuaagcgucagccuu

SEQ ID NO: 333287 - RNA, 19 nt, Artificial Sequence
  Description of Artificial Sequence: Synthetic oligonucleotide
  Sense Strand Starting at position 184 of SEQ ID NO: 317653
gagcguacgagauaaggau

SEQ ID NO: 333288 - RNA, 19 nt, Artificial Sequence
  Description of Artificial Sequence: Synthetic oligonucleotide
  Antisense Strand to SEQ ID NO: 333287
auccuuaucucguacgcuc

SEQ ID NO: 333289 - RNA, 19 nt, Artificial Sequence
  Description of Artificial Sequence: Synthetic oligonucleotide
  Sense Strand Starting at position 184 of SEQ ID NO: 317717
uaauguagugcuuauuaug

SEQ ID NO: 333290 - RNA, 19 nt, Artificial Sequence
  Description of Artificial Sequence: Synthetic oligonucleotide
  Antisense Strand to SEQ ID NO: 333289
cauaauaagcacuacauua

SEQ ID NO: 333291 - RNA, 19 nt, Artificial Sequence
  Description of Artificial Sequence: Synthetic oligonucleotide
  Sense Strand Starting at position 184 of SEQ ID NO: 318060
cugacuuucuggguuggaa

SEQ ID NO: 333292 - RNA, 19 nt, Artificial Sequence
  Description of Artificial Sequence: Synthetic oligonucleotide
  Antisense Strand to SEQ ID NO: 333291
uuccaacccagaaagucag

SEQ ID NO: 333293 - RNA, 19 nt, Artificial Sequence
  Description of Artificial Sequence: Synthetic oligonucleotide
  Sense Strand Starting at position 184 of SEQ ID NO: 318062
gacuuucuggguuggaauc

SEQ ID NO: 333294 - RNA, 19 nt, Artificial Sequence
  Description of Artificial Sequence: Synthetic oligonucleotide
  Antisense Strand to SEQ ID NO: 333293
gauuccaacccagaaaguc

SEQ ID NO: 333295 - RNA, 19 nt, Artificial Sequence
  Description of Artificial Sequence: Synthetic oligonucleotide
  Sense Strand Starting at position 184 of SEQ ID NO: 318175
augggucuuagugaggauu

SEQ ID NO: 333296 - RNA, 19 nt, Artificial Sequence
  Description of Artificial Sequence: Synthetic oligonucleotide
  Antisense Strand to SEQ ID NO: 333295
aauccucacuaagacccau

SEQ ID NO: 333297 - RNA, 19 nt, Artificial Sequence
  Description of Artificial Sequence: Synthetic oligonucleotide
  Sense Strand Starting at position 184 of SEQ ID NO: 318194
agaugaguuaaaugagcua

SEQ ID NO: 333298 - RNA, 19 nt, Artificial Sequence
  Description of Artificial Sequence: Synthetic oligonucleotide
  Antisense Strand to SEQ ID NO: 333297
uagcucauuuaacucaucu

SEQ ID NO: 333299 - RNA, 19 nt, Artificial Sequence
  Description of Artificial Sequence: Synthetic oligonucleotide
  Sense Strand Starting at position 184 of SEQ ID NO: 318292
cccagaaucuggguauaug

SEQ ID NO: 333300 - RNA, 19 nt, Artificial Sequence
  Description of Artificial Sequence: Synthetic oligonucleotide
  Antisense Strand to SEQ ID NO: 333299
cauauacccagauucuggg

SEQ ID NO: 333301 - RNA, 19 nt, Artificial Sequence
  Description of Artificial Sequence: Synthetic oligonucleotide
  Sense Strand Starting at position 184 of SEQ ID NO: 318303
gguauauggugaccuuuau

SEQ ID NO: 333302 - RNA, 19 nt, Artificial Sequence
  Description of Artificial Sequence: Synthetic oligonucleotide
  Antisense Strand to SEQ ID NO: 333301
auaaaggucaccauauacc

SEQ ID NO: 333303 - RNA, 19 nt, Artificial Sequence
  Description of Artificial Sequence: Synthetic oligonucleotide
  Sense Strand Starting at position 184 of SEQ ID NO: 318352
aauuaaagcgauugagaug

SEQ ID NO: 333304 - RNA, 19 nt, Artificial Sequence
  Description of Artificial Sequence: Synthetic oligonucleotide
  Antisense Strand to SEQ ID NO: 333303
caucucaaucgcuuuaauu

SEQ ID NO: 333305 - RNA, 19 nt, Artificial Sequence
  Description of Artificial Sequence: Synthetic oligonucleotide
  Sense Strand Starting at position 184 of SEQ ID NO: 318487
ggaccacaugccuagguau

SEQ ID NO: 333306 - RNA, 19 nt, Artificial Sequence
  Description of Artificial Sequence: Synthetic oligonucleotide
  Antisense Strand to SEQ ID NO: 333305
auaccuaggcauguggucc

SEQ ID NO: 333307 - RNA, 19 nt, Artificial Sequence
  Description of Artificial Sequence: Synthetic oligonucleotide
  Sense Strand Starting at position 184 of SEQ ID NO: 318691
gcaagacgaaagugaucau

SEQ ID NO: 333308 - RNA, 19 nt, Artificial Sequence
  Description of Artificial Sequence: Synthetic oligonucleotide
  Antisense Strand to SEQ ID NO: 333307
augaucacuuucgucuugc

SEQ ID NO: 333309 - RNA, 19 nt, Artificial Sequence
  Description of Artificial Sequence: Synthetic oligonucleotide
  Sense Strand Starting at position 184 of SEQ ID NO: 318703
ugaucauaaugauuguaac

SEQ ID NO: 333310 - RNA, 19 nt, Artificial Sequence
  Description of Artificial Sequence: Synthetic oligonucleotide
  Antisense Strand to SEQ ID NO: 333309
guuacaaucauuaugauca

SEQ ID NO: 333311 - RNA, 19 nt, Artificial Sequence
  Description of Artificial Sequence: Synthetic oligonucleotide
  Sense Strand Starting at position 184 of SEQ ID NO: 318753
ugacucuuugcauagauua

SEQ ID NO: 333312 - RNA, 19 nt, Artificial Sequence
  Description of Artificial Sequence: Synthetic oligonucleotide
  Antisense Strand to SEQ ID NO: 333311
uaaucuaugcaaagaguca

SEQ ID NO: 333313 - RNA, 19 nt, Artificial Sequence
  Description of Artificial Sequence: Synthetic oligonucleotide
  Sense Strand Starting at position 184 of SEQ ID NO: 318859
ucucaucugucuuuaugga

SEQ ID NO: 333314 - RNA, 19 nt, Artificial Sequence
  Description of Artificial Sequence: Synthetic oligonucleotide
  Antisense Strand to SEQ ID NO: 333313
uccauaaagacagaugaga

SEQ ID NO: 333315 - RNA, 19 nt, Artificial Sequence
  Description of Artificial Sequence: Synthetic oligonucleotide
  Sense Strand Starting at position 184 of SEQ ID NO: 318951
uuuguuuauuucuccaagu

SEQ ID NO: 333316 - RNA, 19 nt, Artificial Sequence
  Description of Artificial Sequence: Synthetic oligonucleotide
  Antisense Strand to SEQ ID NO: 333315
acuuggagaaauaaacaaa

SEQ ID NO: 333317 - RNA, 19 nt, Artificial Sequence
  Description of Artificial Sequence: Synthetic oligonucleotide
  Sense Strand Starting at position 184 of SEQ ID NO: 318952
uuguuuauuucuccaaguc

SEQ ID NO: 333318 - RNA, 19 nt, Artificial Sequence
  Description of Artificial Sequence: Synthetic oligonucleotide
  Antisense Strand to SEQ ID NO: 333317
gacuuggagaaauaaacaa

SEQ ID NO: 333319 - RNA, 19 nt, Artificial Sequence
  Description of Artificial Sequence: Synthetic oligonucleotide
  Sense Strand Starting at position 184 of SEQ ID NO: 319007
gauaaucgggccuaauaau

SEQ ID NO: 333320 - RNA, 19 nt, Artificial Sequence
  Description of Artificial Sequence: Synthetic oligonucleotide
  Antisense Strand to SEQ ID NO: 333319
auuauuaggcccgauuauc

SEQ ID NO: 333321 - RNA, 19 nt, Artificial Sequence
  Description of Artificial Sequence: Synthetic oligonucleotide
  Sense Strand Starting at position 184 of SEQ ID NO: 319040
uucuuaauggaguggaaug

SEQ ID NO: 333322 - RNA, 19 nt, Artificial Sequence
  Description of Artificial Sequence: Synthetic oligonucleotide
  Antisense Strand to SEQ ID NO: 333321
cauuccacuccauuaagaa

SEQ ID NO: 333323 - RNA, 19 nt, Artificial Sequence
  Description of Artificial Sequence: Synthetic oligonucleotide
  Sense Strand Starting at position 184 of SEQ ID NO: 319041
ucuuaauggaguggaaugu

SEQ ID NO: 333324 - RNA, 19 nt, Artificial Sequence
  Description of Artificial Sequence: Synthetic oligonucleotide
  Antisense Strand to SEQ ID NO: 333323
acauuccacuccauuaaga

SEQ ID NO: 333325 - RNA, 19 nt, Artificial Sequence
  Description of Artificial Sequence: Synthetic oligonucleotide
  Sense Strand Starting at position 185 of SEQ ID NO: 315318
acuucugggucuugaacuu

SEQ ID NO: 333326 - RNA, 19 nt, Artificial Sequence
  Description of Artificial Sequence: Synthetic oligonucleotide
  Antisense Strand to SEQ ID NO: 333325
aaguucaagacccagaagu

SEQ ID NO: 333327 - RNA, 19 nt, Artificial Sequence
  Description of Artificial Sequence: Synthetic oligonucleotide
  Sense Strand Starting at position 185 of SEQ ID NO: 315837
ucuccaugcuaccuguaua

SEQ ID NO: 333328 - RNA, 19 nt, Artificial Sequence
  Description of Artificial Sequence: Synthetic oligonucleotide
  Antisense Strand to SEQ ID NO: 333327
uauacagguagcauggaga

SEQ ID NO: 333329 - RNA, 19 nt, Artificial Sequence
  Description of Artificial Sequence: Synthetic oligonucleotide
  Sense Strand Starting at position 185 of SEQ ID NO: 315903
ccuugaagaugcuaguaca

SEQ ID NO: 333330 - RNA, 19 nt, Artificial Sequence
  Description of Artificial Sequence: Synthetic oligonucleotide
  Antisense Strand to SEQ ID NO: 333329
uguacuagcaucuucaagg

SEQ ID NO: 333331 - RNA, 19 nt, Artificial Sequence
  Description of Artificial Sequence: Synthetic oligonucleotide
  Sense Strand Starting at position 185 of SEQ ID NO: 315932
ggaagagguauucguucua

SEQ ID NO: 333332 - RNA, 19 nt, Artificial Sequence
  Description of Artificial Sequence: Synthetic oligonucleotide
  Antisense Strand to SEQ ID NO: 333331
uagaacgaauaccucuucc

SEQ ID NO: 333333 - RNA, 19 nt, Artificial Sequence
  Description of Artificial Sequence: Synthetic oligonucleotide
  Sense Strand Starting at position 185 of SEQ ID NO: 315937
agguauucguucuaaggug

SEQ ID NO: 333334 - RNA, 19 nt, Artificial Sequence
  Description of Artificial Sequence: Synthetic oligonucleotide
  Antisense Strand to SEQ ID NO: 333333
caccuuagaacgaauaccu

SEQ ID NO: 333335 - RNA, 19 nt, Artificial Sequence
  Description of Artificial Sequence: Synthetic oligonucleotide
  Sense Strand Starting at position 185 of SEQ ID NO: 315961
cggucauuccaagguaaau

SEQ ID NO: 333336 - RNA, 19 nt, Artificial Sequence
  Description of Artificial Sequence: Synthetic oligonucleotide
  Antisense Strand to SEQ ID NO: 333335
auuuaccuuggaaugaccg

SEQ ID NO: 333337 - RNA, 19 nt, Artificial Sequence
  Description of Artificial Sequence: Synthetic oligonucleotide
  Sense Strand Starting at position 185 of SEQ ID NO: 316190
ucaacucuacugcgacaau

SEQ ID NO: 333338 - RNA, 19 nt, Artificial Sequence
  Description of Artificial Sequence: Synthetic oligonucleotide
  Antisense Strand to SEQ ID NO: 333337
auugucgcaguagaguuga

SEQ ID NO: 333339 - RNA, 19 nt, Artificial Sequence
  Description of Artificial Sequence: Synthetic oligonucleotide
  Sense Strand Starting at position 185 of SEQ ID NO: 316193
acucuacugcgacaaucuu

SEQ ID NO: 333340 - RNA, 19 nt, Artificial Sequence
  Description of Artificial Sequence: Synthetic oligonucleotide
  Antisense Strand to SEQ ID NO: 333339
aagauugucgcaguagagu

SEQ ID NO: 333341 - RNA, 19 nt, Artificial Sequence
  Description of Artificial Sequence: Synthetic oligonucleotide
  Sense Strand Starting at position 185 of SEQ ID NO: 316540
ggccuacugcgagauucuu

SEQ ID NO: 333342 - RNA, 19 nt, Artificial Sequence
  Description of Artificial Sequence: Synthetic oligonucleotide
  Antisense Strand to SEQ ID NO: 333341
aagaaucucgcaguaggcc

SEQ ID NO: 333343 - RNA, 19 nt, Artificial Sequence
  Description of Artificial Sequence: Synthetic oligonucleotide
  Sense Strand Starting at position 185 of SEQ ID NO: 316546
cugcgagauucuugaggcu

SEQ ID NO: 333344 - RNA, 19 nt, Artificial Sequence
  Description of Artificial Sequence: Synthetic oligonucleotide
  Antisense Strand to SEQ ID NO: 333343
agccucaagaaucucgcag

SEQ ID NO: 333345 - RNA, 19 nt, Artificial Sequence
  Description of Artificial Sequence: Synthetic oligonucleotide
  Sense Strand Starting at position 185 of SEQ ID NO: 316605
ugcagaaaguucuagcaga

SEQ ID NO: 333346 - RNA, 19 nt, Artificial Sequence
  Description of Artificial Sequence: Synthetic oligonucleotide
  Antisense Strand to SEQ ID NO: 333345
ucugcuagaacuuucugca

SEQ ID NO: 333347 - RNA, 19 nt, Artificial Sequence
  Description of Artificial Sequence: Synthetic oligonucleotide
  Sense Strand Starting at position 185 of SEQ ID NO: 316811
gagaaaucccagcgggcuu

SEQ ID NO: 333348 - RNA, 19 nt, Artificial Sequence
  Description of Artificial Sequence: Synthetic oligonucleotide
  Antisense Strand to SEQ ID NO: 333347
aagcccgcugggauuucuc

SEQ ID NO: 333349 - RNA, 19 nt, Artificial Sequence
  Description of Artificial Sequence: Synthetic oligonucleotide
  Sense Strand Starting at position 185 of SEQ ID NO: 316919
cccugcgaaucggaugaaa

SEQ ID NO: 333350 - RNA, 19 nt, Artificial Sequence
  Description of Artificial Sequence: Synthetic oligonucleotide
  Antisense Strand to SEQ ID NO: 333349
uuucauccgauucgcaggg

SEQ ID NO: 333351 - RNA, 19 nt, Artificial Sequence
  Description of Artificial Sequence: Synthetic oligonucleotide
  Sense Strand Starting at position 185 of SEQ ID NO: 317263
agguccucuucugaccaau

SEQ ID NO: 333352 - RNA, 19 nt, Artificial Sequence
  Description of Artificial Sequence: Synthetic oligonucleotide
  Antisense Strand to SEQ ID NO: 333351
auuggucagaagaggaccu

SEQ ID NO: 333353 - RNA, 19 nt, Artificial Sequence
  Description of Artificial Sequence: Synthetic oligonucleotide
  Sense Strand Starting at position 185 of SEQ ID NO: 317374
cagggucuccucugaccaa

SEQ ID NO: 333354 - RNA, 19 nt, Artificial Sequence
  Description of Artificial Sequence: Synthetic oligonucleotide
  Antisense Strand to SEQ ID NO: 333353
uuggucagaggagacccug

SEQ ID NO: 333355 - RNA, 19 nt, Artificial Sequence
  Description of Artificial Sequence: Synthetic oligonucleotide
  Sense Strand Starting at position 185 of SEQ ID NO: 317625
ucacuugucgcucgaccua

SEQ ID NO: 333356 - RNA, 19 nt, Artificial Sequence
  Description of Artificial Sequence: Synthetic oligonucleotide
  Antisense Strand to SEQ ID NO: 333355
uaggucgagcgacaaguga

SEQ ID NO: 333357 - RNA, 19 nt, Artificial Sequence
  Description of Artificial Sequence: Synthetic oligonucleotide
  Sense Strand Starting at position 185 of SEQ ID NO: 317868
caagaaaucuucugagguu

SEQ ID NO: 333358 - RNA, 19 nt, Artificial Sequence
  Description of Artificial Sequence: Synthetic oligonucleotide
  Antisense Strand to SEQ ID NO: 333357
aaccucagaagauuucuug

SEQ ID NO: 333359 - RNA, 19 nt, Artificial Sequence
  Description of Artificial Sequence: Synthetic oligonucleotide
  Sense Strand Starting at position 185 of SEQ ID NO: 317869
aagaaaucuucugagguuu

SEQ ID NO: 333360 - RNA, 19 nt, Artificial Sequence
  Description of Artificial Sequence: Synthetic oligonucleotide
  Antisense Strand to SEQ ID NO: 333359
aaaccucagaagauuucuu

SEQ ID NO: 333361 - RNA, 19 nt, Artificial Sequence
  Description of Artificial Sequence: Synthetic oligonucleotide
  Sense Strand Starting at position 185 of SEQ ID NO: 317871
gaaaucuucugagguuucu

SEQ ID NO: 333362 - RNA, 19 nt, Artificial Sequence
  Description of Artificial Sequence: Synthetic oligonucleotide
  Antisense Strand to SEQ ID NO: 333361
agaaaccucagaagauuuc

SEQ ID NO: 333363 - RNA, 19 nt, Artificial Sequence
  Description of Artificial Sequence: Synthetic oligonucleotide
  Sense Strand Starting at position 185 of SEQ ID NO: 317960
ugccucuggugcuuauaga

SEQ ID NO: 333364 - RNA, 19 nt, Artificial Sequence
  Description of Artificial Sequence: Synthetic oligonucleotide
  Antisense Strand to SEQ ID NO: 333363
ucuauaagcaccagaggca

SEQ ID NO: 333365 - RNA, 19 nt, Artificial Sequence
  Description of Artificial Sequence: Synthetic oligonucleotide
  Sense Strand Starting at position 185 of SEQ ID NO: 317961
gccucuggugcuuauagau

SEQ ID NO: 333366 - RNA, 19 nt, Artificial Sequence
  Description of Artificial Sequence: Synthetic oligonucleotide
  Antisense Strand to SEQ ID NO: 333365
aucuauaagcaccagaggc

SEQ ID NO: 333367 - RNA, 19 nt, Artificial Sequence
  Description of Artificial Sequence: Synthetic oligonucleotide
  Sense Strand Starting at position 185 of SEQ ID NO: 317967
ggugcuuauagaugacuua

SEQ ID NO: 333368 - RNA, 19 nt, Artificial Sequence
  Description of Artificial Sequence: Synthetic oligonucleotide
  Antisense Strand to SEQ ID NO: 333367
uaagucaucuauaagcacc

SEQ ID NO: 333369 - RNA, 19 nt, Artificial Sequence
  Description of Artificial Sequence: Synthetic oligonucleotide
  Sense Strand Starting at position 185 of SEQ ID NO: 317970
gcuuauagaugacuuagaa

SEQ ID NO: 333370 - RNA, 19 nt, Artificial Sequence
  Description of Artificial Sequence: Synthetic oligonucleotide
  Antisense Strand to SEQ ID NO: 333369
uucuaagucaucuauaagc

SEQ ID NO: 333371 - RNA, 19 nt, Artificial Sequence
  Description of Artificial Sequence: Synthetic oligonucleotide
  Sense Strand Starting at position 185 of SEQ ID NO: 317974
auagaugacuuagaaagca

SEQ ID NO: 333372 - RNA, 19 nt, Artificial Sequence
  Description of Artificial Sequence: Synthetic oligonucleotide
  Antisense Strand to SEQ ID NO: 333371
ugcuuucuaagucaucuau

SEQ ID NO: 333373 - RNA, 19 nt, Artificial Sequence
  Description of Artificial Sequence: Synthetic oligonucleotide
  Sense Strand Starting at position 185 of SEQ ID NO: 318219
ugcaaucaccaauggagua

SEQ ID NO: 333374 - RNA, 19 nt, Artificial Sequence
  Description of Artificial Sequence: Synthetic oligonucleotide
  Antisense Strand to SEQ ID NO: 333373
uacuccauuggugauugca

SEQ ID NO: 333375 - RNA, 19 nt, Artificial Sequence
  Description of Artificial Sequence: Synthetic oligonucleotide
  Sense Strand Starting at position 185 of SEQ ID NO: 318419
ugacaaaugcugcggaugu

SEQ ID NO: 333376 - RNA, 19 nt, Artificial Sequence
  Description of Artificial Sequence: Synthetic oligonucleotide
  Antisense Strand to SEQ ID NO: 333375
acauccgcagcauuuguca

SEQ ID NO: 333377 - RNA, 19 nt, Artificial Sequence
  Description of Artificial Sequence: Synthetic oligonucleotide
  Sense Strand Starting at position 185 of SEQ ID NO: 318429
ugcggauguguucagggaa

SEQ ID NO: 333378 - RNA, 19 nt, Artificial Sequence
  Description of Artificial Sequence: Synthetic oligonucleotide
  Antisense Strand to SEQ ID NO: 333377
uucccugaacacauccgca

SEQ ID NO: 333379 - RNA, 19 nt, Artificial Sequence
  Description of Artificial Sequence: Synthetic oligonucleotide
  Sense Strand Starting at position 185 of SEQ ID NO: 318455
uagaauuaacuuugaguga

SEQ ID NO: 333380 - RNA, 19 nt, Artificial Sequence
  Description of Artificial Sequence: Synthetic oligonucleotide
  Antisense Strand to SEQ ID NO: 333379
ucacucaaaguuaauucua

SEQ ID NO: 333381 - RNA, 19 nt, Artificial Sequence
  Description of Artificial Sequence: Synthetic oligonucleotide
  Sense Strand Starting at position 185 of SEQ ID NO: 318456
agaauuaacuuugagugac

SEQ ID NO: 333382 - RNA, 19 nt, Artificial Sequence
  Description of Artificial Sequence: Synthetic oligonucleotide
  Antisense Strand to SEQ ID NO: 333381
gucacucaaaguuaauucu

SEQ ID NO: 333383 - RNA, 19 nt, Artificial Sequence
  Description of Artificial Sequence: Synthetic oligonucleotide
  Sense Strand Starting at position 185 of SEQ ID NO: 318459
auuaacuuugagugaccuu

SEQ ID NO: 333384 - RNA, 19 nt, Artificial Sequence
  Description of Artificial Sequence: Synthetic oligonucleotide
  Antisense Strand to SEQ ID NO: 333383
aaggucacucaaaguuaau

SEQ ID NO: 333385 - RNA, 19 nt, Artificial Sequence
  Description of Artificial Sequence: Synthetic oligonucleotide
  Sense Strand Starting at position 185 of SEQ ID NO: 318466
uugagugaccuugguagga

SEQ ID NO: 333386 - RNA, 19 nt, Artificial Sequence
  Description of Artificial Sequence: Synthetic oligonucleotide
  Antisense Strand to SEQ ID NO: 333385
uccuaccaaggucacucaa

SEQ ID NO: 333387 - RNA, 19 nt, Artificial Sequence
  Description of Artificial Sequence: Synthetic oligonucleotide
  Sense Strand Starting at position 185 of SEQ ID NO: 318492
cagugauguagugaggaug

SEQ ID NO: 333388 - RNA, 19 nt, Artificial Sequence
  Description of Artificial Sequence: Synthetic oligonucleotide
  Antisense Strand to SEQ ID NO: 333387
cauccucacuacaucacug

SEQ ID NO: 333389 - RNA, 19 nt, Artificial Sequence
  Description of Artificial Sequence: Synthetic oligonucleotide
  Sense Strand Starting at position 185 of SEQ ID NO: 318555
uuggcauauccauacaaug

SEQ ID NO: 333390 - RNA, 19 nt, Artificial Sequence
  Description of Artificial Sequence: Synthetic oligonucleotide
  Antisense Strand to SEQ ID NO: 333389
cauuguauggauaugccaa

SEQ ID NO: 333391 - RNA, 19 nt, Artificial Sequence
  Description of Artificial Sequence: Synthetic oligonucleotide
  Sense Strand Starting at position 185 of SEQ ID NO: 318745
guggcauugccugaggcaa

SEQ ID NO: 333392 - RNA, 19 nt, Artificial Sequence
  Description of Artificial Sequence: Synthetic oligonucleotide
  Antisense Strand to SEQ ID NO: 333391
uugccucaggcaaugccac

SEQ ID NO: 333393 - RNA, 19 nt, Artificial Sequence
  Description of Artificial Sequence: Synthetic oligonucleotide
  Sense Strand Starting at position 185 of SEQ ID NO: 318747
ggcauugccugaggcaaau

SEQ ID NO: 333394 - RNA, 19 nt, Artificial Sequence
  Description of Artificial Sequence: Synthetic oligonucleotide
  Antisense Strand to SEQ ID NO: 333393
auuugccucaggcaaugcc

SEQ ID NO: 333395 - RNA, 19 nt, Artificial Sequence
  Description of Artificial Sequence: Synthetic oligonucleotide
  Sense Strand Starting at position 185 of SEQ ID NO: 318757
gaggcaaaugagugccaua

SEQ ID NO: 333396 - RNA, 19 nt, Artificial Sequence
  Description of Artificial Sequence: Synthetic oligonucleotide
  Antisense Strand to SEQ ID NO: 333395
uauggcacucauuugccuc

SEQ ID NO: 333397 - RNA, 19 nt, Artificial Sequence
  Description of Artificial Sequence: Synthetic oligonucleotide
  Sense Strand Starting at position 185 of SEQ ID NO: 319161
ggcaguguuucagaggugu

SEQ ID NO: 333398 - RNA, 19 nt, Artificial Sequence
  Description of Artificial Sequence: Synthetic oligonucleotide
  Antisense Strand to SEQ ID NO: 333397
acaccucugaaacacugcc

SEQ ID NO: 333399 - RNA, 19 nt, Artificial Sequence
  Description of Artificial Sequence: Synthetic oligonucleotide
  Sense Strand Starting at position 185 of SEQ ID NO: 319178
guauacauauaucgaaaug

SEQ ID NO: 333400 - RNA, 19 nt, Artificial Sequence
  Description of Artificial Sequence: Synthetic oligonucleotide
  Antisense Strand to SEQ ID NO: 333399
cauuucgauauauguauac

SEQ ID NO: 333401 - RNA, 19 nt, Artificial Sequence
  Description of Artificial Sequence: Synthetic oligonucleotide
  Sense Strand Starting at position 185 of SEQ ID NO: 319188
aucgaaaugcaucaaauug

SEQ ID NO: 333402 - RNA, 19 nt, Artificial Sequence
  Description of Artificial Sequence: Synthetic oligonucleotide
  Antisense Strand to SEQ ID NO: 333401
caauuugaugcauuucgau

SEQ ID NO: 333403 - RNA, 19 nt, Artificial Sequence
  Description of Artificial Sequence: Synthetic oligonucleotide
  Sense Strand Starting at position 186 of SEQ ID NO: 315468
ggccuacugcgagauucuu

SEQ ID NO: 333404 - RNA, 19 nt, Artificial Sequence
  Description of Artificial Sequence: Synthetic oligonucleotide
  Antisense Strand to SEQ ID NO: 333403
aagaaucucgcaguaggcc

SEQ ID NO: 333405 - RNA, 19 nt, Artificial Sequence
  Description of Artificial Sequence: Synthetic oligonucleotide
  Sense Strand Starting at position 186 of SEQ ID NO: 315474
cugcgagauucuugaggcu

SEQ ID NO: 333406 - RNA, 19 nt, Artificial Sequence
  Description of Artificial Sequence: Synthetic oligonucleotide
  Antisense Strand to SEQ ID NO: 333405
agccucaagaaucucgcag

SEQ ID NO: 333407 - RNA, 19 nt, Artificial Sequence
  Description of Artificial Sequence: Synthetic oligonucleotide
  Sense Strand Starting at position 186 of SEQ ID NO: 315533
ugcagaaaguucuagcaga

SEQ ID NO: 333408 - RNA, 19 nt, Artificial Sequence
  Description of Artificial Sequence: Synthetic oligonucleotide
  Antisense Strand to SEQ ID NO: 333407
ucugcuagaacuuucugca

SEQ ID NO: 333409 - RNA, 19 nt, Artificial Sequence
  Description of Artificial Sequence: Synthetic oligonucleotide
  Sense Strand Starting at position 186 of SEQ ID NO: 315739
gagaaaucccagcgggcuu

SEQ ID NO: 333410 - RNA, 19 nt, Artificial Sequence
  Description of Artificial Sequence: Synthetic oligonucleotide
  Antisense Strand to SEQ ID NO: 333409
aagcccgcugggauuucuc

SEQ ID NO: 333411 - RNA, 19 nt, Artificial Sequence
  Description of Artificial Sequence: Synthetic oligonucleotide
  Sense Strand Starting at position 186 of SEQ ID NO: 315847
cccugcgaaucggaugaaa

SEQ ID NO: 333412 - RNA, 19 nt, Artificial Sequence
  Description of Artificial Sequence: Synthetic oligonucleotide
  Antisense Strand to SEQ ID NO: 333411
uuucauccgauucgcaggg

SEQ ID NO: 333413 - RNA, 19 nt, Artificial Sequence
  Description of Artificial Sequence: Synthetic oligonucleotide
  Sense Strand Starting at position 186 of SEQ ID NO: 316191
agguccucuucugaccaau

SEQ ID NO: 333414 - RNA, 19 nt, Artificial Sequence
  Description of Artificial Sequence: Synthetic oligonucleotide
  Antisense Strand to SEQ ID NO: 333413
auuggucagaagaggaccu

SEQ ID NO: 333415 - RNA, 19 nt, Artificial Sequence
  Description of Artificial Sequence: Synthetic oligonucleotide
  Sense Strand Starting at position 186 of SEQ ID NO: 316302
cagggucuccucugaccaa

SEQ ID NO: 333416 - RNA, 19 nt, Artificial Sequence
  Description of Artificial Sequence: Synthetic oligonucleotide
  Antisense Strand to SEQ ID NO: 333415
uuggucagaggagacccug

SEQ ID NO: 333417 - RNA, 19 nt, Artificial Sequence
  Description of Artificial Sequence: Synthetic oligonucleotide
  Sense Strand Starting at position 186 of SEQ ID NO: 316553
ucacuugucgcucgaccua

SEQ ID NO: 333418 - RNA, 19 nt, Artificial Sequence
  Description of Artificial Sequence: Synthetic oligonucleotide
  Antisense Strand to SEQ ID NO: 333417
uaggucgagcgacaaguga

SEQ ID NO: 333419 - RNA, 19 nt, Artificial Sequence
  Description of Artificial Sequence: Synthetic oligonucleotide
  Sense Strand Starting at position 186 of SEQ ID NO: 316796
caagaaaucuucugagguu

SEQ ID NO: 333420 - RNA, 19 nt, Artificial Sequence
  Description of Artificial Sequence: Synthetic oligonucleotide
  Antisense Strand to SEQ ID NO: 333419
aaccucagaagauuucuug

SEQ ID NO: 333421 - RNA, 19 nt, Artificial Sequence
  Description of Artificial Sequence: Synthetic oligonucleotide
  Sense Strand Starting at position 186 of SEQ ID NO: 316797
aagaaaucuucugagguuu

SEQ ID NO: 333422 - RNA, 19 nt, Artificial Sequence
  Description of Artificial Sequence: Synthetic oligonucleotide
  Antisense Strand to SEQ ID NO: 333421
aaaccucagaagauuucuu

SEQ ID NO: 333423 - RNA, 19 nt, Artificial Sequence
  Description of Artificial Sequence: Synthetic oligonucleotide
  Sense Strand Starting at position 186 of SEQ ID NO: 316799
gaaaucuucugagguuucu

SEQ ID NO: 333424 - RNA, 19 nt, Artificial Sequence
  Description of Artificial Sequence: Synthetic oligonucleotide
  Antisense Strand to SEQ ID NO: 333423
agaaaccucagaagauuuc

SEQ ID NO: 333425 - RNA, 19 nt, Artificial Sequence
  Description of Artificial Sequence: Synthetic oligonucleotide
  Sense Strand Starting at position 186 of SEQ ID NO: 316888
ugccucuggugcuuauaga

SEQ ID NO: 333426 - RNA, 19 nt, Artificial Sequence
  Description of Artificial Sequence: Synthetic oligonucleotide
  Antisense Strand to SEQ ID NO: 333425
ucuauaagcaccagaggca

SEQ ID NO: 333427 - RNA, 19 nt, Artificial Sequence
  Description of Artificial Sequence: Synthetic oligonucleotide
  Sense Strand Starting at position 186 of SEQ ID NO: 316889
gccucuggugcuuauagau

SEQ ID NO: 333428 - RNA, 19 nt, Artificial Sequence
  Description of Artificial Sequence: Synthetic oligonucleotide
  Antisense Strand to SEQ ID NO: 333427
aucuauaagcaccagaggc

SEQ ID NO: 333429 - RNA, 19 nt, Artificial Sequence
  Description of Artificial Sequence: Synthetic oligonucleotide
  Sense Strand Starting at position 186 of SEQ ID NO: 316895
ggugcuuauagaugacuua

SEQ ID NO: 333430 - RNA, 19 nt, Artificial Sequence
  Description of Artificial Sequence: Synthetic oligonucleotide
  Antisense Strand to SEQ ID NO: 333429
uaagucaucuauaagcacc

SEQ ID NO: 333431 - RNA, 19 nt, Artificial Sequence
  Description of Artificial Sequence: Synthetic oligonucleotide
  Sense Strand Starting at position 186 of SEQ ID NO: 316898
gcuuauagaugacuuagaa

SEQ ID NO: 333432 - RNA, 19 nt, Artificial Sequence
  Description of Artificial Sequence: Synthetic oligonucleotide
  Antisense Strand to SEQ ID NO: 333431
uucuaagucaucuauaagc

SEQ ID NO: 333433 - RNA, 19 nt, Artificial Sequence
  Description of Artificial Sequence: Synthetic oligonucleotide
  Sense Strand Starting at position 186 of SEQ ID NO: 316902
auagaugacuuagaaagca

SEQ ID NO: 333434 - RNA, 19 nt, Artificial Sequence
  Description of Artificial Sequence: Synthetic oligonucleotide
  Antisense Strand to SEQ ID NO: 333433
ugcuuucuaagucaucuau

SEQ ID NO: 333435 - RNA, 19 nt, Artificial Sequence
  Description of Artificial Sequence: Synthetic oligonucleotide
  Sense Strand Starting at position 186 of SEQ ID NO: 317147
ugcaaucaccaauggagua

SEQ ID NO: 333436 - RNA, 19 nt, Artificial Sequence
  Description of Artificial Sequence: Synthetic oligonucleotide
  Antisense Strand to SEQ ID NO: 333435
uacuccauuggugauugca

SEQ ID NO: 333437 - RNA, 19 nt, Artificial Sequence
  Description of Artificial Sequence: Synthetic oligonucleotide
  Sense Strand Starting at position 186 of SEQ ID NO: 317347
ugacaaaugcugcggaugu

SEQ ID NO: 333438 - RNA, 19 nt, Artificial Sequence
  Description of Artificial Sequence: Synthetic oligonucleotide
  Antisense Strand to SEQ ID NO: 333437
acauccgcagcauuuguca

SEQ ID NO: 333439 - RNA, 19 nt, Artificial Sequence
  Description of Artificial Sequence: Synthetic oligonucleotide
  Sense Strand Starting at position 186 of SEQ ID NO: 317357
ugcggauguguucagggaa

SEQ ID NO: 333440 - RNA, 19 nt, Artificial Sequence
  Description of Artificial Sequence: Synthetic oligonucleotide
  Antisense Strand to SEQ ID NO: 333439
uucccugaacacauccgca

SEQ ID NO: 333441 - RNA, 19 nt, Artificial Sequence
  Description of Artificial Sequence: Synthetic oligonucleotide
  Sense Strand Starting at position 186 of SEQ ID NO: 317383
uagaauuaacuuugaguga

SEQ ID NO: 333442 - RNA, 19 nt, Artificial Sequence
  Description of Artificial Sequence: Synthetic oligonucleotide
  Antisense Strand to SEQ ID NO: 333441
ucacucaaaguuaauucua

SEQ ID NO: 333443 - RNA, 19 nt, Artificial Sequence
  Description of Artificial Sequence: Synthetic oligonucleotide
  Sense Strand Starting at position 186 of SEQ ID NO: 317384
agaauuaacuuugagugac

SEQ ID NO: 333444 - RNA, 19 nt, Artificial Sequence
  Description of Artificial Sequence: Synthetic oligonucleotide
  Antisense Strand to SEQ ID NO: 333443
gucacucaaaguuaauucu

SEQ ID NO: 333445 - RNA, 19 nt, Artificial Sequence
  Description of Artificial Sequence: Synthetic oligonucleotide
  Sense Strand Starting at position 186 of SEQ ID NO: 317387
auuaacuuugagugaccuu

SEQ ID NO: 333446 - RNA, 19 nt, Artificial Sequence
  Description of Artificial Sequence: Synthetic oligonucleotide
  Antisense Strand to SEQ ID NO: 333445
aaggucacucaaaguuaau

SEQ ID NO: 333447 - RNA, 19 nt, Artificial Sequence
  Description of Artificial Sequence: Synthetic oligonucleotide
  Sense Strand Starting at position 186 of SEQ ID NO: 317394
uugagugaccuugguagga

SEQ ID NO: 333448 - RNA, 19 nt, Artificial Sequence
  Description of Artificial Sequence: Synthetic oligonucleotide
  Antisense Strand to SEQ ID NO: 333447
uccuaccaaggucacucaa

SEQ ID NO: 333449 - RNA, 19 nt, Artificial Sequence
  Description of Artificial Sequence: Synthetic oligonucleotide
  Sense Strand Starting at position 186 of SEQ ID NO: 317420
cagugauguagugaggaug

SEQ ID NO: 333450 - RNA, 19 nt, Artificial Sequence
  Description of Artificial Sequence: Synthetic oligonucleotide
  Antisense Strand to SEQ ID NO: 333449
cauccucacuacaucacug

SEQ ID NO: 333451 - RNA, 19 nt, Artificial Sequence
  Description of Artificial Sequence: Synthetic oligonucleotide
  Sense Strand Starting at position 186 of SEQ ID NO: 317483
uuggcauauccauacaaug

SEQ ID NO: 333452 - RNA, 19 nt, Artificial Sequence
  Description of Artificial Sequence: Synthetic oligonucleotide
  Antisense Strand to SEQ ID NO: 333451
cauuguauggauaugccaa

SEQ ID NO: 333453 - RNA, 19 nt, Artificial Sequence
  Description of Artificial Sequence: Synthetic oligonucleotide
  Sense Strand Starting at position 186 of SEQ ID NO: 317673
guggcauugccugaggcaa

SEQ ID NO: 333454 - RNA, 19 nt, Artificial Sequence
  Description of Artificial Sequence: Synthetic oligonucleotide
  Antisense Strand to SEQ ID NO: 333453
uugccucaggcaaugccac

SEQ ID NO: 333455 - RNA, 19 nt, Artificial Sequence
  Description of Artificial Sequence: Synthetic oligonucleotide
  Sense Strand Starting at position 186 of SEQ ID NO: 317675
ggcauugccugaggcaaau

SEQ ID NO: 333456 - RNA, 19 nt, Artificial Sequence
  Description of Artificial Sequence: Synthetic oligonucleotide
  Antisense Strand to SEQ ID NO: 333455
auuugccucaggcaaugcc

SEQ ID NO: 333457 - RNA, 19 nt, Artificial Sequence
  Description of Artificial Sequence: Synthetic oligonucleotide
  Sense Strand Starting at position 186 of SEQ ID NO: 317685
gaggcaaaugagugccaua

SEQ ID NO: 333458 - RNA, 19 nt, Artificial Sequence
  Description of Artificial Sequence: Synthetic oligonucleotide
  Antisense Strand to SEQ ID NO: 333457
uauggcacucauuugccuc

SEQ ID NO: 333459 - RNA, 19 nt, Artificial Sequence
  Description of Artificial Sequence: Synthetic oligonucleotide
  Sense Strand Starting at position 186 of SEQ ID NO: 318089
ggcaguguuucagaggugu

SEQ ID NO: 333460 - RNA, 19 nt, Artificial Sequence
  Description of Artificial Sequence: Synthetic oligonucleotide
  Antisense Strand to SEQ ID NO: 333459
acaccucugaaacacugcc

SEQ ID NO: 333461 - RNA, 19 nt, Artificial Sequence
  Description of Artificial Sequence: Synthetic oligonucleotide
  Sense Strand Starting at position 186 of SEQ ID NO: 318106
guauacauauaucgaaaug

SEQ ID NO: 333462 - RNA, 19 nt, Artificial Sequence
  Description of Artificial Sequence: Synthetic oligonucleotide
  Antisense Strand to SEQ ID NO: 333461
cauuucgauauauguauac

SEQ ID NO: 333463 - RNA, 19 nt, Artificial Sequence
  Description of Artificial Sequence: Synthetic oligonucleotide
  Sense Strand Starting at position 186 of SEQ ID NO: 318116
aucgaaaugcaucaaauug

SEQ ID NO: 333464 - RNA, 19 nt, Artificial Sequence
  Description of Artificial Sequence: Synthetic oligonucleotide
  Antisense Strand to SEQ ID NO: 333463
caauuugaugcauuucgau

SEQ ID NO: 333465 - RNA, 19 nt, Artificial Sequence
  Description of Artificial Sequence: Synthetic oligonucleotide
  Sense Strand Starting at position 186 of SEQ ID NO: 318147
augugcaguuuaucaugua

SEQ ID NO: 333466 - RNA, 19 nt, Artificial Sequence
  Description of Artificial Sequence: Synthetic oligonucleotide
  Antisense Strand to SEQ ID NO: 333465
uacaugauaaacugcacau

SEQ ID NO: 333467 - RNA, 19 nt, Artificial Sequence
  Description of Artificial Sequence: Synthetic oligonucleotide
  Sense Strand Starting at position 186 of SEQ ID NO: 318148
ugugcaguuuaucauguau

SEQ ID NO: 333468 - RNA, 19 nt, Artificial Sequence
  Description of Artificial Sequence: Synthetic oligonucleotide
  Antisense Strand to SEQ ID NO: 333467
auacaugauaaacugcaca

SEQ ID NO: 333469 - RNA, 19 nt, Artificial Sequence
  Description of Artificial Sequence: Synthetic oligonucleotide
  Sense Strand Starting at position 186 of SEQ ID NO: 318150
ugcaguuuaucauguauua

SEQ ID NO: 333470 - RNA, 19 nt, Artificial Sequence
  Description of Artificial Sequence: Synthetic oligonucleotide
  Antisense Strand to SEQ ID NO: 333469
uaauacaugauaaacugca

SEQ ID NO: 333471 - RNA, 19 nt, Artificial Sequence
  Description of Artificial Sequence: Synthetic oligonucleotide
  Sense Strand Starting at position 187 of SEQ ID NO: 315271
ggaauacuaugccugguca

SEQ ID NO: 333472 - RNA, 19 nt, Artificial Sequence
  Description of Artificial Sequence: Synthetic oligonucleotide
  Antisense Strand to SEQ ID NO: 333471
ugaccaggcauaguauucc

SEQ ID NO: 333473 - RNA, 19 nt, Artificial Sequence
  Description of Artificial Sequence: Synthetic oligonucleotide
  Sense Strand Starting at position 187 of SEQ ID NO: 315272
gaauacuaugccuggucaa

SEQ ID NO: 333474 - RNA, 19 nt, Artificial Sequence
  Description of Artificial Sequence: Synthetic oligonucleotide
  Antisense Strand to SEQ ID NO: 333473
uugaccaggcauaguauuc

SEQ ID NO: 333475 - RNA, 19 nt, Artificial Sequence
  Description of Artificial Sequence: Synthetic oligonucleotide
  Sense Strand Starting at position 187 of SEQ ID NO: 315364
gugugagaucuuggcaaau

SEQ ID NO: 333476 - RNA, 19 nt, Artificial Sequence
  Description of Artificial Sequence: Synthetic oligonucleotide
  Antisense Strand to SEQ ID NO: 333475
auuugccaagaucucacac

SEQ ID NO: 333477 - RNA, 19 nt, Artificial Sequence
  Description of Artificial Sequence: Synthetic oligonucleotide
  Sense Strand Starting at position 187 of SEQ ID NO: 315528
uggguugaacugugucauc

SEQ ID NO: 333478 - RNA, 19 nt, Artificial Sequence
  Description of Artificial Sequence: Synthetic oligonucleotide
  Antisense Strand to SEQ ID NO: 333477
gaugacacaguucaaccca

SEQ ID NO: 333479 - RNA, 19 nt, Artificial Sequence
  Description of Artificial Sequence: Synthetic oligonucleotide
  Sense Strand Starting at position 187 of SEQ ID NO: 315533
ugaacugugucaucccaau

SEQ ID NO: 333480 - RNA, 19 nt, Artificial Sequence
  Description of Artificial Sequence: Synthetic oligonucleotide
  Antisense Strand to SEQ ID NO: 333479
auugggaugacacaguuca

SEQ ID NO: 333481 - RNA, 19 nt, Artificial Sequence
  Description of Artificial Sequence: Synthetic oligonucleotide
  Sense Strand Starting at position 187 of SEQ ID NO: 315545
ucccaauucguauguugaa

SEQ ID NO: 333482 - RNA, 19 nt, Artificial Sequence
  Description of Artificial Sequence: Synthetic oligonucleotide
  Antisense Strand to SEQ ID NO: 333481
uucaacauacgaauuggga

SEQ ID NO: 333483 - RNA, 19 nt, Artificial Sequence
  Description of Artificial Sequence: Synthetic oligonucleotide
  Sense Strand Starting at position 187 of SEQ ID NO: 315787
aaggauugccugcaaagcu

SEQ ID NO: 333484 - RNA, 19 nt, Artificial Sequence
  Description of Artificial Sequence: Synthetic oligonucleotide
  Antisense Strand to SEQ ID NO: 333483
agcuuugcaggcaauccuu

SEQ ID NO: 333485 - RNA, 19 nt, Artificial Sequence
  Description of Artificial Sequence: Synthetic oligonucleotide
  Sense Strand Starting at position 187 of SEQ ID NO: 315795
ccugcaaagcucuggaaac

SEQ ID NO: 333486 - RNA, 19 nt, Artificial Sequence
  Description of Artificial Sequence: Synthetic oligonucleotide
  Antisense Strand to SEQ ID NO: 333485
guuuccagagcuuugcagg

SEQ ID NO: 333487 - RNA, 19 nt, Artificial Sequence
  Description of Artificial Sequence: Synthetic oligonucleotide
  Sense Strand Starting at position 187 of SEQ ID NO: 316025
ccuaguguuugguuuagag

SEQ ID NO: 333488 - RNA, 19 nt, Artificial Sequence
  Description of Artificial Sequence: Synthetic oligonucleotide
  Antisense Strand to SEQ ID NO: 333487
cucuaaaccaaacacuagg

SEQ ID NO: 333489 - RNA, 19 nt, Artificial Sequence
  Description of Artificial Sequence: Synthetic oligonucleotide
  Sense Strand Starting at position 187 of SEQ ID NO: 316027
uaguguuugguuuagagcu

SEQ ID NO: 333490 - RNA, 19 nt, Artificial Sequence
  Description of Artificial Sequence: Synthetic oligonucleotide
  Antisense Strand to SEQ ID NO: 333489
agcucuaaaccaaacacua

SEQ ID NO: 333491 - RNA, 19 nt, Artificial Sequence
  Description of Artificial Sequence: Synthetic oligonucleotide
  Sense Strand Starting at position 187 of SEQ ID NO: 316045
uaccuuaaccugugaggga

SEQ ID NO: 333492 - RNA, 19 nt, Artificial Sequence
  Description of Artificial Sequence: Synthetic oligonucleotide
  Antisense Strand to SEQ ID NO: 333491
ucccucacagguuaaggua

SEQ ID NO: 333493 - RNA, 19 nt, Artificial Sequence
  Description of Artificial Sequence: Synthetic oligonucleotide
  Sense Strand Starting at position 187 of SEQ ID NO: 316120
acuuacugucauuggucau

SEQ ID NO: 333494 - RNA, 19 nt, Artificial Sequence
  Description of Artificial Sequence: Synthetic oligonucleotide
  Antisense Strand to SEQ ID NO: 333493
augaccaaugacaguaagu

SEQ ID NO: 333495 - RNA, 19 nt, Artificial Sequence
  Description of Artificial Sequence: Synthetic oligonucleotide
  Sense Strand Starting at position 187 of SEQ ID NO: 316444
gccucaagccuuugcauuu

SEQ ID NO: 333496 - RNA, 19 nt, Artificial Sequence
  Description of Artificial Sequence: Synthetic oligonucleotide
  Antisense Strand to SEQ ID NO: 333495
aaaugcaaaggcuugaggc

SEQ ID NO: 333497 - RNA, 19 nt, Artificial Sequence
  Description of Artificial Sequence: Synthetic oligonucleotide
  Sense Strand Starting at position 187 of SEQ ID NO: 316661
auccauucguugucuauuu

SEQ ID NO: 333498 - RNA, 19 nt, Artificial Sequence
  Description of Artificial Sequence: Synthetic oligonucleotide
  Antisense Strand to SEQ ID NO: 333497
aaauagacaacgaauggau

SEQ ID NO: 333499 - RNA, 19 nt, Artificial Sequence
  Description of Artificial Sequence: Synthetic oligonucleotide
  Sense Strand Starting at position 187 of SEQ ID NO: 316877
gugccauuccugccgcauu

SEQ ID NO: 333500 - RNA, 19 nt, Artificial Sequence
  Description of Artificial Sequence: Synthetic oligonucleotide
  Antisense Strand to SEQ ID NO: 333499
aaugcggcaggaauggcac

SEQ ID NO: 333501 - RNA, 19 nt, Artificial Sequence
  Description of Artificial Sequence: Synthetic oligonucleotide
  Sense Strand Starting at position 187 of SEQ ID NO: 317020
guagauggguguguuucaa

SEQ ID NO: 333502 - RNA, 19 nt, Artificial Sequence
  Description of Artificial Sequence: Synthetic oligonucleotide
  Antisense Strand to SEQ ID NO: 333501
uugaaacacacccaucuac

SEQ ID NO: 333503 - RNA, 19 nt, Artificial Sequence
  Description of Artificial Sequence: Synthetic oligonucleotide
  Sense Strand Starting at position 187 of SEQ ID NO: 317268
gguuuacgucuccaaggca

SEQ ID NO: 333504 - RNA, 19 nt, Artificial Sequence
  Description of Artificial Sequence: Synthetic oligonucleotide
  Antisense Strand to SEQ ID NO: 333503
ugccuuggagacguaaacc

SEQ ID NO: 333505 - RNA, 19 nt, Artificial Sequence
  Description of Artificial Sequence: Synthetic oligonucleotide
  Sense Strand Starting at position 187 of SEQ ID NO: 317518
ucauccugauugguuuauu

SEQ ID NO: 333506 - RNA, 19 nt, Artificial Sequence
  Description of Artificial Sequence: Synthetic oligonucleotide
  Antisense Strand to SEQ ID NO: 333505
aauaaaccaaucaggauga

SEQ ID NO: 333507 - RNA, 19 nt, Artificial Sequence
  Description of Artificial Sequence: Synthetic oligonucleotide
  Sense Strand Starting at position 187 of SEQ ID NO: 317821
gcgagcgagauccaucaua

SEQ ID NO: 333508 - RNA, 19 nt, Artificial Sequence
  Description of Artificial Sequence: Synthetic oligonucleotide
  Antisense Strand to SEQ ID NO: 333507
uaugauggaucucgcucgc

SEQ ID NO: 333509 - RNA, 19 nt, Artificial Sequence
  Description of Artificial Sequence: Synthetic oligonucleotide
  Sense Strand Starting at position 187 of SEQ ID NO: 317993
uugaguucugaacauguuc

SEQ ID NO: 333510 - RNA, 19 nt, Artificial Sequence
  Description of Artificial Sequence: Synthetic oligonucleotide
  Antisense Strand to SEQ ID NO: 333509
gaacauguucagaacucaa

SEQ ID NO: 333511 - RNA, 19 nt, Artificial Sequence
  Description of Artificial Sequence: Synthetic oligonucleotide
  Sense Strand Starting at position 187 of SEQ ID NO: 317998
uucugaacauguuccuaga

SEQ ID NO: 333512 - RNA, 19 nt, Artificial Sequence
  Description of Artificial Sequence: Synthetic oligonucleotide
  Antisense Strand to SEQ ID NO: 333511
ucuaggaacauguucagaa

SEQ ID NO: 333513 - RNA, 19 nt, Artificial Sequence
  Description of Artificial Sequence: Synthetic oligonucleotide
  Sense Strand Starting at position 187 of SEQ ID NO: 318000
cugaacauguuccuagauu

SEQ ID NO: 333514 - RNA, 19 nt, Artificial Sequence
  Description of Artificial Sequence: Synthetic oligonucleotide
  Antisense Strand to SEQ ID NO: 333513
aaucuaggaacauguucag

SEQ ID NO: 333515 - RNA, 19 nt, Artificial Sequence
  Description of Artificial Sequence: Synthetic oligonucleotide
  Sense Strand Starting at position 187 of SEQ ID NO: 318001
ugaacauguuccuagauuu

SEQ ID NO: 333516 - RNA, 19 nt, Artificial Sequence
  Description of Artificial Sequence: Synthetic oligonucleotide
  Antisense Strand to SEQ ID NO: 333515
aaaucuaggaacauguuca

SEQ ID NO: 333517 - RNA, 19 nt, Artificial Sequence
  Description of Artificial Sequence: Synthetic oligonucleotide
  Sense Strand Starting at position 187 of SEQ ID NO: 318295
ugaaucuucgcugguagaa

SEQ ID NO: 333518 - RNA, 19 nt, Artificial Sequence
  Description of Artificial Sequence: Synthetic oligonucleotide
  Antisense Strand to SEQ ID NO: 333517
uucuaccagcgaagauuca

SEQ ID NO: 333519 - RNA, 19 nt, Artificial Sequence
  Description of Artificial Sequence: Synthetic oligonucleotide
  Sense Strand Starting at position 187 of SEQ ID NO: 318308
guagaauagugucccaacu

SEQ ID NO: 333520 - RNA, 19 nt, Artificial Sequence
  Description of Artificial Sequence: Synthetic oligonucleotide
  Antisense Strand to SEQ ID NO: 333519
aguugggacacuauucuac

SEQ ID NO: 333521 - RNA, 19 nt, Artificial Sequence
  Description of Artificial Sequence: Synthetic oligonucleotide
  Sense Strand Starting at position 187 of SEQ ID NO: 318374
uguguuaagccacauaugu

SEQ ID NO: 333522 - RNA, 19 nt, Artificial Sequence
  Description of Artificial Sequence: Synthetic oligonucleotide
  Antisense Strand to SEQ ID NO: 333521
acauauguggcuuaacaca

SEQ ID NO: 333523 - RNA, 19 nt, Artificial Sequence
  Description of Artificial Sequence: Synthetic oligonucleotide
  Sense Strand Starting at position 187 of SEQ ID NO: 318479
auugucaaaugugcugaaa

SEQ ID NO: 333524 - RNA, 19 nt, Artificial Sequence
  Description of Artificial Sequence: Synthetic oligonucleotide
  Antisense Strand to SEQ ID NO: 333523
uuucagcacauuugacaau

SEQ ID NO: 333525 - RNA, 19 nt, Artificial Sequence
  Description of Artificial Sequence: Synthetic oligonucleotide
  Sense Strand Starting at position 187 of SEQ ID NO: 318482
gucaaaugugcugaaagac

SEQ ID NO: 333526 - RNA, 19 nt, Artificial Sequence
  Description of Artificial Sequence: Synthetic oligonucleotide
  Antisense Strand to SEQ ID NO: 333525
gucuuucagcacauuugac

SEQ ID NO: 333527 - RNA, 19 nt, Artificial Sequence
  Description of Artificial Sequence: Synthetic oligonucleotide
  Sense Strand Starting at position 187 of SEQ ID NO: 318522
gagagaggcuccuuacacu

SEQ ID NO: 333528 - RNA, 19 nt, Artificial Sequence
  Description of Artificial Sequence: Synthetic oligonucleotide
  Antisense Strand to SEQ ID NO: 333527
aguguaaggagccucucuc

SEQ ID NO: 333529 - RNA, 19 nt, Artificial Sequence
  Description of Artificial Sequence: Synthetic oligonucleotide
  Sense Strand Starting at position 187 of SEQ ID NO: 318528
ggcuccuuacacugacauu

SEQ ID NO: 333530 - RNA, 19 nt, Artificial Sequence
  Description of Artificial Sequence: Synthetic oligonucleotide
  Antisense Strand to SEQ ID NO: 333529
aaugucaguguaaggagcc

SEQ ID NO: 333531 - RNA, 19 nt, Artificial Sequence
  Description of Artificial Sequence: Synthetic oligonucleotide
  Sense Strand Starting at position 187 of SEQ ID NO: 318726
aggugcucuaaugagacuu

SEQ ID NO: 333532 - RNA, 19 nt, Artificial Sequence
  Description of Artificial Sequence: Synthetic oligonucleotide
  Antisense Strand to SEQ ID NO: 333531
aagucucauuagagcaccu

SEQ ID NO: 333533 - RNA, 19 nt, Artificial Sequence
  Description of Artificial Sequence: Synthetic oligonucleotide
  Sense Strand Starting at position 187 of SEQ ID NO: 319030
caggaaucguccuuccauu

SEQ ID NO: 333534 - RNA, 19 nt, Artificial Sequence
  Description of Artificial Sequence: Synthetic oligonucleotide
  Antisense Strand to SEQ ID NO: 333533
aauggaaggacgauuccug

SEQ ID NO: 333535 - RNA, 19 nt, Artificial Sequence
  Description of Artificial Sequence: Synthetic oligonucleotide
  Sense Strand Starting at position 187 of SEQ ID NO: 319053
gcaguuaucccagacaaug

SEQ ID NO: 333536 - RNA, 19 nt, Artificial Sequence
  Description of Artificial Sequence: Synthetic oligonucleotide
  Antisense Strand to SEQ ID NO: 333535
cauugucugggauaacugc

SEQ ID NO: 333537 - RNA, 19 nt, Artificial Sequence
  Description of Artificial Sequence: Synthetic oligonucleotide
  Sense Strand Starting at position 187 of SEQ ID NO: 319072
augcacaagcuuugggaaa

SEQ ID NO: 333538 - RNA, 19 nt, Artificial Sequence
  Description of Artificial Sequence: Synthetic oligonucleotide
  Antisense Strand to SEQ ID NO: 333537
uuucccaaagcuugugcau

SEQ ID NO: 333539 - RNA, 19 nt, Artificial Sequence
  Description of Artificial Sequence: Synthetic oligonucleotide
  Sense Strand Starting at position 187 of SEQ ID NO: 319125
aaaggcaaguuaucuguca

SEQ ID NO: 333540 - RNA, 19 nt, Artificial Sequence
  Description of Artificial Sequence: Synthetic oligonucleotide
  Antisense Strand to SEQ ID NO: 333539
ugacagauaacuugccuuu

SEQ ID NO: 333541 - RNA, 19 nt, Artificial Sequence
  Description of Artificial Sequence: Synthetic oligonucleotide
  Sense Strand Starting at position 187 of SEQ ID NO: 319133
guuaucugucaguuugugu

SEQ ID NO: 333542 - RNA, 19 nt, Artificial Sequence
  Description of Artificial Sequence: Synthetic oligonucleotide
  Antisense Strand to SEQ ID NO: 333541
acacaaacugacagauaac

SEQ ID NO: 333543 - RNA, 19 nt, Artificial Sequence
  Description of Artificial Sequence: Synthetic oligonucleotide
  Sense Strand Starting at position 187 of SEQ ID NO: 319148
guguguucuggccuuuguu

SEQ ID NO: 333544 - RNA, 19 nt, Artificial Sequence
  Description of Artificial Sequence: Synthetic oligonucleotide
  Antisense Strand to SEQ ID NO: 333543
aacaaaggccagaacacac

SEQ ID NO: 333545 - RNA, 19 nt, Artificial Sequence
  Description of Artificial Sequence: Synthetic oligonucleotide
  Sense Strand Starting at position 187 of SEQ ID NO: 319149
uguguucuggccuuuguuu

SEQ ID NO: 333546 - RNA, 19 nt, Artificial Sequence
  Description of Artificial Sequence: Synthetic oligonucleotide
  Antisense Strand to SEQ ID NO: 333545
aaacaaaggccagaacaca

SEQ ID NO: 333547 - RNA, 19 nt, Artificial Sequence
  Description of Artificial Sequence: Synthetic oligonucleotide
  Sense Strand Starting at position 187 of SEQ ID NO: 319176
gguagcuuacaagguuaga

SEQ ID NO: 333548 - RNA, 19 nt, Artificial Sequence
  Description of Artificial Sequence: Synthetic oligonucleotide
  Antisense Strand to SEQ ID NO: 333547
ucuaaccuuguaagcuacc

SEQ ID NO: 333549 - RNA, 19 nt, Artificial Sequence
  Description of Artificial Sequence: Synthetic oligonucleotide
  Sense Strand Starting at position 187 of SEQ ID NO: 319216
ugaccugauuuggaacuuu

SEQ ID NO: 333550 - RNA, 19 nt, Artificial Sequence
  Description of Artificial Sequence: Synthetic oligonucleotide
  Antisense Strand to SEQ ID NO: 333549
aaaguuccaaaucagguca

SEQ ID NO: 333551 - RNA, 19 nt, Artificial Sequence
  Description of Artificial Sequence: Synthetic oligonucleotide
  Sense Strand Starting at position 188 of SEQ ID NO: 315350
accucuugugaucaaguaa

SEQ ID NO: 333552 - RNA, 19 nt, Artificial Sequence
  Description of Artificial Sequence: Synthetic oligonucleotide
  Antisense Strand to SEQ ID NO: 333551
uuacuugaucacaagaggu

SEQ ID NO: 333553 - RNA, 19 nt, Artificial Sequence
  Description of Artificial Sequence: Synthetic oligonucleotide
  Sense Strand Starting at position 188 of SEQ ID NO: 315429
uguuaaauaccgcauauau

SEQ ID NO: 333554 - RNA, 19 nt, Artificial Sequence
  Description of Artificial Sequence: Synthetic oligonucleotide
  Antisense Strand to SEQ ID NO: 333553
auauaugcgguauuuaaca

SEQ ID NO: 333555 - RNA, 19 nt, Artificial Sequence
  Description of Artificial Sequence: Synthetic oligonucleotide
  Sense Strand Starting at position 188 of SEQ ID NO: 315482
ucuguauaucuguauacca

SEQ ID NO: 333556 - RNA, 19 nt, Artificial Sequence
  Description of Artificial Sequence: Synthetic oligonucleotide
  Antisense Strand to SEQ ID NO: 333555
ugguauacagauauacaga

SEQ ID NO: 333557 - RNA, 19 nt, Artificial Sequence
  Description of Artificial Sequence: Synthetic oligonucleotide
  Sense Strand Starting at position 188 of SEQ ID NO: 315484
uguauaucuguauaccaag

SEQ ID NO: 333558 - RNA, 19 nt, Artificial Sequence
  Description of Artificial Sequence: Synthetic oligonucleotide
  Antisense Strand to SEQ ID NO: 333557
cuugguauacagauauaca

SEQ ID NO: 333559 - RNA, 19 nt, Artificial Sequence
  Description of Artificial Sequence: Synthetic oligonucleotide
  Sense Strand Starting at position 188 of SEQ ID NO: 315490
ucuguauaccaagaugucu

SEQ ID NO: 333560 - RNA, 19 nt, Artificial Sequence
  Description of Artificial Sequence: Synthetic oligonucleotide
  Antisense Strand to SEQ ID NO: 333559
agacaucuugguauacaga

SEQ ID NO: 333561 - RNA, 19 nt, Artificial Sequence
  Description of Artificial Sequence: Synthetic oligonucleotide
  Sense Strand Starting at position 188 of SEQ ID NO: 315614
aucuuaaauuuacaggagu

SEQ ID NO: 333562 - RNA, 19 nt, Artificial Sequence
  Description of Artificial Sequence: Synthetic oligonucleotide
  Antisense Strand to SEQ ID NO: 333561
acuccuguaaauuuaagau

SEQ ID NO: 333563 - RNA, 19 nt, Artificial Sequence
  Description of Artificial Sequence: Synthetic oligonucleotide
  Sense Strand Starting at position 188 of SEQ ID NO: 315817
cccauauuaugucccuaga

SEQ ID NO: 333564 - RNA, 19 nt, Artificial Sequence
  Description of Artificial Sequence: Synthetic oligonucleotide
  Antisense Strand to SEQ ID NO: 333563
ucuagggacauaauauggg

SEQ ID NO: 333565 - RNA, 19 nt, Artificial Sequence
  Description of Artificial Sequence: Synthetic oligonucleotide
  Sense Strand Starting at position 188 of SEQ ID NO: 315891
aggauuaggguugguaagu

SEQ ID NO: 333566 - RNA, 19 nt, Artificial Sequence
  Description of Artificial Sequence: Synthetic oligonucleotide
  Antisense Strand to SEQ ID NO: 333565
acuuaccaacccuaauccu

SEQ ID NO: 333567 - RNA, 19 nt, Artificial Sequence
  Description of Artificial Sequence: Synthetic oligonucleotide
  Sense Strand Starting at position 188 of SEQ ID NO: 315892
ggauuaggguugguaagua

SEQ ID NO: 333568 - RNA, 19 nt, Artificial Sequence
  Description of Artificial Sequence: Synthetic oligonucleotide
  Antisense Strand to SEQ ID NO: 333567
uacuuaccaacccuaaucc

SEQ ID NO: 333569 - RNA, 19 nt, Artificial Sequence
  Description of Artificial Sequence: Synthetic oligonucleotide
  Sense Strand Starting at position 188 of SEQ ID NO: 316436
guguaaguucguccuugca

SEQ ID NO: 333570 - RNA, 19 nt, Artificial Sequence
  Description of Artificial Sequence: Synthetic oligonucleotide
  Antisense Strand to SEQ ID NO: 333569
ugcaaggacgaacuuacac

SEQ ID NO: 333571 - RNA, 19 nt, Artificial Sequence
  Description of Artificial Sequence: Synthetic oligonucleotide
  Sense Strand Starting at position 188 of SEQ ID NO: 316467
uuauguuaaucugugacaa

SEQ ID NO: 333572 - RNA, 19 nt, Artificial Sequence
  Description of Artificial Sequence: Synthetic oligonucleotide
  Antisense Strand to SEQ ID NO: 333571
uugucacagauuaacauaa

SEQ ID NO: 333573 - RNA, 19 nt, Artificial Sequence
  Description of Artificial Sequence: Synthetic oligonucleotide
  Sense Strand Starting at position 188 of SEQ ID NO: 316638
gcgcaaauaaccguugcua

SEQ ID NO: 333574 - RNA, 19 nt, Artificial Sequence
  Description of Artificial Sequence: Synthetic oligonucleotide
  Antisense Strand to SEQ ID NO: 333573
uagcaacgguuauuugcgc

SEQ ID NO: 333575 - RNA, 19 nt, Artificial Sequence
  Description of Artificial Sequence: Synthetic oligonucleotide
  Sense Strand Starting at position 188 of SEQ ID NO: 316904
gggaguguuagaggaagca

SEQ ID NO: 333576 - RNA, 19 nt, Artificial Sequence
  Description of Artificial Sequence: Synthetic oligonucleotide
  Antisense Strand to SEQ ID NO: 333575
ugcuuccucuaacacuccc

SEQ ID NO: 333577 - RNA, 19 nt, Artificial Sequence
  Description of Artificial Sequence: Synthetic oligonucleotide
  Sense Strand Starting at position 188 of SEQ ID NO: 317102
ccaggaauucgcuacucau

SEQ ID NO: 333578 - RNA, 19 nt, Artificial Sequence
  Description of Artificial Sequence: Synthetic oligonucleotide
  Antisense Strand to SEQ ID NO: 333577
augaguagcgaauuccugg

SEQ ID NO: 333579 - RNA, 19 nt, Artificial Sequence
  Description of Artificial Sequence: Synthetic oligonucleotide
  Sense Strand Starting at position 188 of SEQ ID NO: 317295
gaaacuuccgguugagaac

SEQ ID NO: 333580 - RNA, 19 nt, Artificial Sequence
  Description of Artificial Sequence: Synthetic oligonucleotide
  Antisense Strand to SEQ ID NO: 333579
guucucaaccggaaguuuc

SEQ ID NO: 333581 - RNA, 19 nt, Artificial Sequence
  Description of Artificial Sequence: Synthetic oligonucleotide
  Sense Strand Starting at position 188 of SEQ ID NO: 317296
aaacuuccgguugagaacu

SEQ ID NO: 333582 - RNA, 19 nt, Artificial Sequence
  Description of Artificial Sequence: Synthetic oligonucleotide
  Antisense Strand to SEQ ID NO: 333581
aguucucaaccggaaguuu

SEQ ID NO: 333583 - RNA, 19 nt, Artificial Sequence
  Description of Artificial Sequence: Synthetic oligonucleotide
  Sense Strand Starting at position 188 of SEQ ID NO: 317595
guuugcuguguuguguaga

SEQ ID NO: 333584 - RNA, 19 nt, Artificial Sequence
  Description of Artificial Sequence: Synthetic oligonucleotide
  Antisense Strand to SEQ ID NO: 333583
ucuacacaacacagcaaac

SEQ ID NO: 333585 - RNA, 19 nt, Artificial Sequence
  Description of Artificial Sequence: Synthetic oligonucleotide
  Sense Strand Starting at position 188 of SEQ ID NO: 317598
ugcuguguuguguagauuu

SEQ ID NO: 333586 - RNA, 19 nt, Artificial Sequence
  Description of Artificial Sequence: Synthetic oligonucleotide
  Antisense Strand to SEQ ID NO: 333585
aaaucuacacaacacagca

SEQ ID NO: 333587 - RNA, 19 nt, Artificial Sequence
  Description of Artificial Sequence: Synthetic oligonucleotide
  Sense Strand Starting at position 188 of SEQ ID NO: 317600
cuguguuguguagauuuca

SEQ ID NO: 333588 - RNA, 19 nt, Artificial Sequence
  Description of Artificial Sequence: Synthetic oligonucleotide
  Antisense Strand to SEQ ID NO: 333587
ugaaaucuacacaacacag

SEQ ID NO: 333589 - RNA, 19 nt, Artificial Sequence
  Description of Artificial Sequence: Synthetic oligonucleotide
  Sense Strand Starting at position 188 of SEQ ID NO: 317876
cauuuaaaguguggaauuu

SEQ ID NO: 333590 - RNA, 19 nt, Artificial Sequence
  Description of Artificial Sequence: Synthetic oligonucleotide
  Antisense Strand to SEQ ID NO: 333589
aaauuccacacuuuaaaug

SEQ ID NO: 333591 - RNA, 19 nt, Artificial Sequence
  Description of Artificial Sequence: Synthetic oligonucleotide
  Sense Strand Starting at position 188 of SEQ ID NO: 317896
gcauaaacgucuguauuuc

SEQ ID NO: 333592 - RNA, 19 nt, Artificial Sequence
  Description of Artificial Sequence: Synthetic oligonucleotide
  Antisense Strand to SEQ ID NO: 333591
gaaauacagacguuuaugc

SEQ ID NO: 333593 - RNA, 19 nt, Artificial Sequence
  Description of Artificial Sequence: Synthetic oligonucleotide
  Sense Strand Starting at position 188 of SEQ ID NO: 317906
cuguauuuccucugcuuga

SEQ ID NO: 333594 - RNA, 19 nt, Artificial Sequence
  Description of Artificial Sequence: Synthetic oligonucleotide
  Antisense Strand to SEQ ID NO: 333593
ucaagcagaggaaauacag

SEQ ID NO: 333595 - RNA, 19 nt, Artificial Sequence
  Description of Artificial Sequence: Synthetic oligonucleotide
  Sense Strand Starting at position 188 of SEQ ID NO: 317907
uguauuuccucugcuugaa

SEQ ID NO: 333596 - RNA, 19 nt, Artificial Sequence
  Description of Artificial Sequence: Synthetic oligonucleotide
  Antisense Strand to SEQ ID NO: 333595
uucaagcagaggaaauaca

SEQ ID NO: 333597 - RNA, 19 nt, Artificial Sequence
  Description of Artificial Sequence: Synthetic oligonucleotide
  Sense Strand Starting at position 188 of SEQ ID NO: 318041
cggguaggcauuugaguua

SEQ ID NO: 333598 - RNA, 19 nt, Artificial Sequence
  Description of Artificial Sequence: Synthetic oligonucleotide
  Antisense Strand to SEQ ID NO: 333597
uaacucaaaugccuacccg

SEQ ID NO: 333599 - RNA, 19 nt, Artificial Sequence
  Description of Artificial Sequence: Synthetic oligonucleotide
  Sense Strand Starting at position 188 of SEQ ID NO: 318068
cuuguauaguaucucagaa

SEQ ID NO: 333600 - RNA, 19 nt, Artificial Sequence
  Description of Artificial Sequence: Synthetic oligonucleotide
  Antisense Strand to SEQ ID NO: 333599
uucugagauacuauacaag

SEQ ID NO: 333601 - RNA, 19 nt, Artificial Sequence
  Description of Artificial Sequence: Synthetic oligonucleotide
  Sense Strand Starting at position 188 of SEQ ID NO: 318175
agggaugcugugcaugaau

SEQ ID NO: 333602 - RNA, 19 nt, Artificial Sequence
  Description of Artificial Sequence: Synthetic oligonucleotide
  Antisense Strand to SEQ ID NO: 333601
auucaugcacagcaucccu

SEQ ID NO: 333603 - RNA, 19 nt, Artificial Sequence
  Description of Artificial Sequence: Synthetic oligonucleotide
  Sense Strand Starting at position 188 of SEQ ID NO: 318178
gaugcugugcaugaauuaa

SEQ ID NO: 333604 - RNA, 19 nt, Artificial Sequence
  Description of Artificial Sequence: Synthetic oligonucleotide
  Antisense Strand to SEQ ID NO: 333603
uuaauucaugcacagcauc

SEQ ID NO: 333605 - RNA, 19 nt, Artificial Sequence
  Description of Artificial Sequence: Synthetic oligonucleotide
  Sense Strand Starting at position 188 of SEQ ID NO: 318444
gagcauguauugguagaag

SEQ ID NO: 333606 - RNA, 19 nt, Artificial Sequence
  Description of Artificial Sequence: Synthetic oligonucleotide
  Antisense Strand to SEQ ID NO: 333605
cuucuaccaauacaugcuc

SEQ ID NO: 333607 - RNA, 19 nt, Artificial Sequence
  Description of Artificial Sequence: Synthetic oligonucleotide
  Sense Strand Starting at position 188 of SEQ ID NO: 318447
cauguauugguagaagagu

SEQ ID NO: 333608 - RNA, 19 nt, Artificial Sequence
  Description of Artificial Sequence: Synthetic oligonucleotide
  Antisense Strand to SEQ ID NO: 333607
acucuucuaccaauacaug

SEQ ID NO: 333609 - RNA, 19 nt, Artificial Sequence
  Description of Artificial Sequence: Synthetic oligonucleotide
  Sense Strand Starting at position 188 of SEQ ID NO: 318453
uugguagaagagugguuaa

SEQ ID NO: 333610 - RNA, 19 nt, Artificial Sequence
  Description of Artificial Sequence: Synthetic oligonucleotide
  Antisense Strand to SEQ ID NO: 333609
uuaaccacucuucuaccaa

SEQ ID NO: 333611 - RNA, 19 nt, Artificial Sequence
  Description of Artificial Sequence: Synthetic oligonucleotide
  Sense Strand Starting at position 188 of SEQ ID NO: 318465
ugguuaauguuaucuaaca

SEQ ID NO: 333612 - RNA, 19 nt, Artificial Sequence
  Description of Artificial Sequence: Synthetic oligonucleotide
  Antisense Strand to SEQ ID NO: 333611
uguuagauaacauuaacca

SEQ ID NO: 333613 - RNA, 19 nt, Artificial Sequence
  Description of Artificial Sequence: Synthetic oligonucleotide
  Sense Strand Starting at position 188 of SEQ ID NO: 318466
gguuaauguuaucuaacau

SEQ ID NO: 333614 - RNA, 19 nt, Artificial Sequence
  Description of Artificial Sequence: Synthetic oligonucleotide
  Antisense Strand to SEQ ID NO: 333613
auguuagauaacauuaacc

SEQ ID NO: 333615 - RNA, 19 nt, Artificial Sequence
  Description of Artificial Sequence: Synthetic oligonucleotide
  Sense Strand Starting at position 188 of SEQ ID NO: 318555
ucauauuucgacuguccua

SEQ ID NO: 333616 - RNA, 19 nt, Artificial Sequence
  Description of Artificial Sequence: Synthetic oligonucleotide
  Antisense Strand to SEQ ID NO: 333615
uaggacagucgaaauauga

SEQ ID NO: 333617 - RNA, 19 nt, Artificial Sequence
  Description of Artificial Sequence: Synthetic oligonucleotide
  Sense Strand Starting at position 188 of SEQ ID NO: 318587
acagucgauuuguuuguca

SEQ ID NO: 333618 - RNA, 19 nt, Artificial Sequence
  Description of Artificial Sequence: Synthetic oligonucleotide
  Antisense Strand to SEQ ID NO: 333617
ugacaaacaaaucgacugu

SEQ ID NO: 333619 - RNA, 19 nt, Artificial Sequence
  Description of Artificial Sequence: Synthetic oligonucleotide
  Sense Strand Starting at position 188 of SEQ ID NO: 318590
gucgauuuguuugucacua

SEQ ID NO: 333620 - RNA, 19 nt, Artificial Sequence
  Description of Artificial Sequence: Synthetic oligonucleotide
  Antisense Strand to SEQ ID NO: 333619
uagugacaaacaaaucgac

SEQ ID NO: 333621 - RNA, 19 nt, Artificial Sequence
  Description of Artificial Sequence: Synthetic oligonucleotide
  Sense Strand Starting at position 188 of SEQ ID NO: 318591
ucgauuuguuugucacuau

SEQ ID NO: 333622 - RNA, 19 nt, Artificial Sequence
  Description of Artificial Sequence: Synthetic oligonucleotide
  Antisense Strand to SEQ ID NO: 333621
auagugacaaacaaaucga

SEQ ID NO: 333623 - RNA, 19 nt, Artificial Sequence
  Description of Artificial Sequence: Synthetic oligonucleotide
  Sense Strand Starting at position 188 of SEQ ID NO: 318594
auuuguuugucacuauagu

SEQ ID NO: 333624 - RNA, 19 nt, Artificial Sequence
  Description of Artificial Sequence: Synthetic oligonucleotide
  Antisense Strand to SEQ ID NO: 333623
acuauagugacaaacaaau

SEQ ID NO: 333625 - RNA, 19 nt, Artificial Sequence
  Description of Artificial Sequence: Synthetic oligonucleotide
  Sense Strand Starting at position 188 of SEQ ID NO: 318898
uuauguuaagaugguacau

SEQ ID NO: 333626 - RNA, 19 nt, Artificial Sequence
  Description of Artificial Sequence: Synthetic oligonucleotide
  Antisense Strand to SEQ ID NO: 333625
auguaccaucuuaacauaa

SEQ ID NO: 333627 - RNA, 19 nt, Artificial Sequence
  Description of Artificial Sequence: Synthetic oligonucleotide
  Sense Strand Starting at position 188 of SEQ ID NO: 318941
guggcaaugcugcuuucua

SEQ ID NO: 333628 - RNA, 19 nt, Artificial Sequence
  Description of Artificial Sequence: Synthetic oligonucleotide
  Antisense Strand to SEQ ID NO: 333627
uagaaagcagcauugccac

SEQ ID NO: 333629 - RNA, 19 nt, Artificial Sequence
  Description of Artificial Sequence: Synthetic oligonucleotide
  Sense Strand Starting at position 188 of SEQ ID NO: 319015
gcaaucagcccucacagaa

SEQ ID NO: 333630 - RNA, 19 nt, Artificial Sequence
  Description of Artificial Sequence: Synthetic oligonucleotide
  Antisense Strand to SEQ ID NO: 333629
uucugugagggcugauugc

SEQ ID NO: 333631 - RNA, 19 nt, Artificial Sequence
  Description of Artificial Sequence: Synthetic oligonucleotide
  Sense Strand Starting at position 189 of SEQ ID NO: 315277
cuccuuagucuugacagca

SEQ ID NO: 333632 - RNA, 19 nt, Artificial Sequence
  Description of Artificial Sequence: Synthetic oligonucleotide
  Antisense Strand to SEQ ID NO: 333631
ugcugucaagacuaaggag

SEQ ID NO: 333633 - RNA, 19 nt, Artificial Sequence
  Description of Artificial Sequence: Synthetic oligonucleotide
  Sense Strand Starting at position 189 of SEQ ID NO: 315316
aggugaaagcccuaagucu

SEQ ID NO: 333634 - RNA, 19 nt, Artificial Sequence
  Description of Artificial Sequence: Synthetic oligonucleotide
  Antisense Strand to SEQ ID NO: 333633
agacuuagggcuuucaccu

SEQ ID NO: 333635 - RNA, 19 nt, Artificial Sequence
  Description of Artificial Sequence: Synthetic oligonucleotide
  Sense Strand Starting at position 189 of SEQ ID NO: 315575
ucaaauuaaguuggcaaua

SEQ ID NO: 333636 - RNA, 19 nt, Artificial Sequence
  Description of Artificial Sequence: Synthetic oligonucleotide
  Antisense Strand to SEQ ID NO: 333635
uauugccaacuuaauuuga

SEQ ID NO: 333637 - RNA, 19 nt, Artificial Sequence
  Description of Artificial Sequence: Synthetic oligonucleotide
  Sense Strand Starting at position 189 of SEQ ID NO: 315751
cuaugcuuccuaggaccaa

SEQ ID NO: 333638 - RNA, 19 nt, Artificial Sequence
  Description of Artificial Sequence: Synthetic oligonucleotide
  Antisense Strand to SEQ ID NO: 333637
uugguccuaggaagcauag

SEQ ID NO: 333639 - RNA, 19 nt, Artificial Sequence
  Description of Artificial Sequence: Synthetic oligonucleotide
  Sense Strand Starting at position 189 of SEQ ID NO: 315882
ggcuacuugcugucagcua

SEQ ID NO: 333640 - RNA, 19 nt, Artificial Sequence
  Description of Artificial Sequence: Synthetic oligonucleotide
  Antisense Strand to SEQ ID NO: 333639
uagcugacagcaaguagcc

SEQ ID NO: 333641 - RNA, 19 nt, Artificial Sequence
  Description of Artificial Sequence: Synthetic oligonucleotide
  Sense Strand Starting at position 189 of SEQ ID NO: 315901
aagccaggucaguacuaau

SEQ ID NO: 333642 - RNA, 19 nt, Artificial Sequence
  Description of Artificial Sequence: Synthetic oligonucleotide
  Antisense Strand to SEQ ID NO: 333641
auuaguacugaccuggcuu

SEQ ID NO: 333643 - RNA, 19 nt, Artificial Sequence
  Description of Artificial Sequence: Synthetic oligonucleotide
  Sense Strand Starting at position 189 of SEQ ID NO: 317276
gauugagauuaacacagga

SEQ ID NO: 333644 - RNA, 19 nt, Artificial Sequence
  Description of Artificial Sequence: Synthetic oligonucleotide
  Antisense Strand to SEQ ID NO: 333643
uccuguguuaaucucaauc

SEQ ID NO: 333645 - RNA, 19 nt, Artificial Sequence
  Description of Artificial Sequence: Synthetic oligonucleotide
  Sense Strand Starting at position 189 of SEQ ID NO: 317355
gaugguagauggccauaaa

SEQ ID NO: 333646 - RNA, 19 nt, Artificial Sequence
  Description of Artificial Sequence: Synthetic oligonucleotide
  Antisense Strand to SEQ ID NO: 333645
uuuauggccaucuaccauc

SEQ ID NO: 333647 - RNA, 19 nt, Artificial Sequence
  Description of Artificial Sequence: Synthetic oligonucleotide
  Sense Strand Starting at position 189 of SEQ ID NO: 317487
gcaugaaugugucuaccaa

SEQ ID NO: 333648 - RNA, 19 nt, Artificial Sequence
  Description of Artificial Sequence: Synthetic oligonucleotide
  Antisense Strand to SEQ ID NO: 333647
uugguagacacauucaugc

SEQ ID NO: 333649 - RNA, 19 nt, Artificial Sequence
  Description of Artificial Sequence: Synthetic oligonucleotide
  Sense Strand Starting at position 189 of SEQ ID NO: 317488
caugaaugugucuaccaag

SEQ ID NO: 333650 - RNA, 19 nt, Artificial Sequence
  Description of Artificial Sequence: Synthetic oligonucleotide
  Antisense Strand to SEQ ID NO: 333649
cuugguagacacauucaug

SEQ ID NO: 333651 - RNA, 19 nt, Artificial Sequence
  Description of Artificial Sequence: Synthetic oligonucleotide
  Sense Strand Starting at position 189 of SEQ ID NO: 317514
uuagguacugugggugaua

SEQ ID NO: 333652 - RNA, 19 nt, Artificial Sequence
  Description of Artificial Sequence: Synthetic oligonucleotide
  Antisense Strand to SEQ ID NO: 333651
uaucacccacaguaccuaa

SEQ ID NO: 333653 - RNA, 19 nt, Artificial Sequence
  Description of Artificial Sequence: Synthetic oligonucleotide
  Sense Strand Starting at position 189 of SEQ ID NO: 317515
uagguacugugggugauaa

SEQ ID NO: 333654 - RNA, 19 nt, Artificial Sequence
  Description of Artificial Sequence: Synthetic oligonucleotide
  Antisense Strand to SEQ ID NO: 333653
uuaucacccacaguaccua

SEQ ID NO: 333655 - RNA, 19 nt, Artificial Sequence
  Description of Artificial Sequence: Synthetic oligonucleotide
  Sense Strand Starting at position 189 of SEQ ID NO: 317541
ucagacuuaucucuguuau

SEQ ID NO: 333656 - RNA, 19 nt, Artificial Sequence
  Description of Artificial Sequence: Synthetic oligonucleotide
  Antisense Strand to SEQ ID NO: 333655
auaacagagauaagucuga

SEQ ID NO: 333657 - RNA, 19 nt, Artificial Sequence
  Description of Artificial Sequence: Synthetic oligonucleotide
  Sense Strand Starting at position 189 of SEQ ID NO: 317543
agacuuaucucuguuauag

SEQ ID NO: 333658 - RNA, 19 nt, Artificial Sequence
  Description of Artificial Sequence: Synthetic oligonucleotide
  Antisense Strand to SEQ ID NO: 333657
cuauaacagagauaagucu

SEQ ID NO: 333659 - RNA, 19 nt, Artificial Sequence
  Description of Artificial Sequence: Synthetic oligonucleotide
  Sense Strand Starting at position 189 of SEQ ID NO: 317552
ucuguuauagcgcugcaca

SEQ ID NO: 333660 - RNA, 19 nt, Artificial Sequence
  Description of Artificial Sequence: Synthetic oligonucleotide
  Antisense Strand to SEQ ID NO: 333659
ugugcagcgcuauaacaga

SEQ ID NO: 333661 - RNA, 19 nt, Artificial Sequence
  Description of Artificial Sequence: Synthetic oligonucleotide
  Sense Strand Starting at position 189 of SEQ ID NO: 317554
uguuauagcgcugcacaca

SEQ ID NO: 333662 - RNA, 19 nt, Artificial Sequence
  Description of Artificial Sequence: Synthetic oligonucleotide
  Antisense Strand to SEQ ID NO: 333661
ugugugcagcgcuauaaca

SEQ ID NO: 333663 - RNA, 19 nt, Artificial Sequence
  Description of Artificial Sequence: Synthetic oligonucleotide
  Sense Strand Starting at position 189 of SEQ ID NO: 317573
uuggauuguaauugugaca

SEQ ID NO: 333664 - RNA, 19 nt, Artificial Sequence
  Description of Artificial Sequence: Synthetic oligonucleotide
  Antisense Strand to SEQ ID NO: 333663
ugucacaauuacaauccaa

SEQ ID NO: 333665 - RNA, 19 nt, Artificial Sequence
  Description of Artificial Sequence: Synthetic oligonucleotide
  Sense Strand Starting at position 189 of SEQ ID NO: 317717
augucugaaccucgagacu

SEQ ID NO: 333666 - RNA, 19 nt, Artificial Sequence
  Description of Artificial Sequence: Synthetic oligonucleotide
  Antisense Strand to SEQ ID NO: 333665
agucucgagguucagacau

SEQ ID NO: 333667 - RNA, 19 nt, Artificial Sequence
  Description of Artificial Sequence: Synthetic oligonucleotide
  Sense Strand Starting at position 189 of SEQ ID NO: 317763
ccgacauggguucaucgaa

SEQ ID NO: 333668 - RNA, 19 nt, Artificial Sequence
  Description of Artificial Sequence: Synthetic oligonucleotide
  Antisense Strand to SEQ ID NO: 333667
uucgaugaacccaugucgg

SEQ ID NO: 333669 - RNA, 19 nt, Artificial Sequence
  Description of Artificial Sequence: Synthetic oligonucleotide
  Sense Strand Starting at position 189 of SEQ ID NO: 317792
gugaccaagacaggucaaa

SEQ ID NO: 333670 - RNA, 19 nt, Artificial Sequence
  Description of Artificial Sequence: Synthetic oligonucleotide
  Antisense Strand to SEQ ID NO: 333669
uuugaccugucuuggucac

SEQ ID NO: 333671 - RNA, 19 nt, Artificial Sequence
  Description of Artificial Sequence: Synthetic oligonucleotide
  Sense Strand Starting at position 189 of SEQ ID NO: 317811
cagaauacuuuccugggua

SEQ ID NO: 333672 - RNA, 19 nt, Artificial Sequence
  Description of Artificial Sequence: Synthetic oligonucleotide
  Antisense Strand to SEQ ID NO: 333671
uacccaggaaaguauucug

SEQ ID NO: 333673 - RNA, 19 nt, Artificial Sequence
  Description of Artificial Sequence: Synthetic oligonucleotide
  Sense Strand Starting at position 189 of SEQ ID NO: 317815
auacuuuccuggguacaua

SEQ ID NO: 333674 - RNA, 19 nt, Artificial Sequence
  Description of Artificial Sequence: Synthetic oligonucleotide
  Antisense Strand to SEQ ID NO: 333673
uauguacccaggaaaguau

SEQ ID NO: 333675 - RNA, 19 nt, Artificial Sequence
  Description of Artificial Sequence: Synthetic oligonucleotide
  Sense Strand Starting at position 189 of SEQ ID NO: 317835
agaguuacauauucuguuu

SEQ ID NO: 333676 - RNA, 19 nt, Artificial Sequence
  Description of Artificial Sequence: Synthetic oligonucleotide
  Antisense Strand to SEQ ID NO: 333675
aaacagaauauguaacucu

SEQ ID NO: 333677 - RNA, 19 nt, Artificial Sequence
  Description of Artificial Sequence: Synthetic oligonucleotide
  Sense Strand Starting at position 189 of SEQ ID NO: 318132
auuugaacuugacauugaa

SEQ ID NO: 333678 - RNA, 19 nt, Artificial Sequence
  Description of Artificial Sequence: Synthetic oligonucleotide
  Antisense Strand to SEQ ID NO: 333677
uucaaugucaaguucaaau

SEQ ID NO: 333679 - RNA, 19 nt, Artificial Sequence
  Description of Artificial Sequence: Synthetic oligonucleotide
  Sense Strand Starting at position 189 of SEQ ID NO: 318376
cccagugcuaggcagagau

SEQ ID NO: 333680 - RNA, 19 nt, Artificial Sequence
  Description of Artificial Sequence: Synthetic oligonucleotide
  Antisense Strand to SEQ ID NO: 333679
aucucugccuagcacuggg

SEQ ID NO: 333681 - RNA, 19 nt, Artificial Sequence
  Description of Artificial Sequence: Synthetic oligonucleotide
  Sense Strand Starting at position 189 of SEQ ID NO: 318378
cagugcuaggcagagauaa

SEQ ID NO: 333682 - RNA, 19 nt, Artificial Sequence
  Description of Artificial Sequence: Synthetic oligonucleotide
  Antisense Strand to SEQ ID NO: 333681
uuaucucugccuagcacug

SEQ ID NO: 333683 - RNA, 19 nt, Artificial Sequence
  Description of Artificial Sequence: Synthetic oligonucleotide
  Sense Strand Starting at position 189 of SEQ ID NO: 318380
gugcuaggcagagauaaca

SEQ ID NO: 333684 - RNA, 19 nt, Artificial Sequence
  Description of Artificial Sequence: Synthetic oligonucleotide
  Antisense Strand to SEQ ID NO: 333683
uguuaucucugccuagcac

SEQ ID NO: 333685 - RNA, 19 nt, Artificial Sequence
  Description of Artificial Sequence: Synthetic oligonucleotide
  Sense Strand Starting at position 189 of SEQ ID NO: 318392
gauaacacucagcagguua

SEQ ID NO: 333686 - RNA, 19 nt, Artificial Sequence
  Description of Artificial Sequence: Synthetic oligonucleotide
  Antisense Strand to SEQ ID NO: 333685
uaaccugcugaguguuauc

SEQ ID NO: 333687 - RNA, 19 nt, Artificial Sequence
  Description of Artificial Sequence: Synthetic oligonucleotide
  Sense Strand Starting at position 189 of SEQ ID NO: 318403
gcagguuaaaugugggaau

SEQ ID NO: 333688 - RNA, 19 nt, Artificial Sequence
  Description of Artificial Sequence: Synthetic oligonucleotide
  Antisense Strand to SEQ ID NO: 333687
auucccacauuuaaccugc

SEQ ID NO: 333689 - RNA, 19 nt, Artificial Sequence
  Description of Artificial Sequence: Synthetic oligonucleotide
  Sense Strand Starting at position 189 of SEQ ID NO: 318432
ugguauuagaaagguagau

SEQ ID NO: 333690 - RNA, 19 nt, Artificial Sequence
  Description of Artificial Sequence: Synthetic oligonucleotide
  Antisense Strand to SEQ ID NO: 333689
aucuaccuuucuaauacca

SEQ ID NO: 333691 - RNA, 19 nt, Artificial Sequence
  Description of Artificial Sequence: Synthetic oligonucleotide
  Sense Strand Starting at position 189 of SEQ ID NO: 318442
aagguagauuuaugggaau

SEQ ID NO: 333692 - RNA, 19 nt, Artificial Sequence
  Description of Artificial Sequence: Synthetic oligonucleotide
  Antisense Strand to SEQ ID NO: 333691
auucccauaaaucuaccuu

SEQ ID NO: 333693 - RNA, 19 nt, Artificial Sequence
  Description of Artificial Sequence: Synthetic oligonucleotide
  Sense Strand Starting at position 189 of SEQ ID NO: 318464
uuaauuguccuguaaucua

SEQ ID NO: 333694 - RNA, 19 nt, Artificial Sequence
  Description of Artificial Sequence: Synthetic oligonucleotide
  Antisense Strand to SEQ ID NO: 333693
uagauuacaggacaauuaa

SEQ ID NO: 333695 - RNA, 19 nt, Artificial Sequence
  Description of Artificial Sequence: Synthetic oligonucleotide
  Sense Strand Starting at position 189 of SEQ ID NO: 318497
cuuccuguggucuagagaa

SEQ ID NO: 333696 - RNA, 19 nt, Artificial Sequence
  Description of Artificial Sequence: Synthetic oligonucleotide
  Antisense Strand to SEQ ID NO: 333695
uucucuagaccacaggaag

SEQ ID NO: 333697 - RNA, 19 nt, Artificial Sequence
  Description of Artificial Sequence: Synthetic oligonucleotide
  Sense Strand Starting at position 189 of SEQ ID NO: 318499
uccuguggucuagagaaua

SEQ ID NO: 333698 - RNA, 19 nt, Artificial Sequence
  Description of Artificial Sequence: Synthetic oligonucleotide
  Antisense Strand to SEQ ID NO: 333697
uauucucuagaccacagga

SEQ ID NO: 333699 - RNA, 19 nt, Artificial Sequence
  Description of Artificial Sequence: Synthetic oligonucleotide
  Sense Strand Starting at position 189 of SEQ ID NO: 318633
uccuguugugauugaccaa

SEQ ID NO: 333700 - RNA, 19 nt, Artificial Sequence
  Description of Artificial Sequence: Synthetic oligonucleotide
  Antisense Strand to SEQ ID NO: 333699
uuggucaaucacaacagga

SEQ ID NO: 333701 - RNA, 19 nt, Artificial Sequence
  Description of Artificial Sequence: Synthetic oligonucleotide
  Sense Strand Starting at position 189 of SEQ ID NO: 318693
auaucagaguauucuucuu

SEQ ID NO: 333702 - RNA, 19 nt, Artificial Sequence
  Description of Artificial Sequence: Synthetic oligonucleotide
  Antisense Strand to SEQ ID NO: 333701
aagaagaauacucugauau

SEQ ID NO: 333703 - RNA, 19 nt, Artificial Sequence
  Description of Artificial Sequence: Synthetic oligonucleotide
  Sense Strand Starting at position 189 of SEQ ID NO: 318698
agaguauucuucuuuccuu

SEQ ID NO: 333704 - RNA, 19 nt, Artificial Sequence
  Description of Artificial Sequence: Synthetic oligonucleotide
  Antisense Strand to SEQ ID NO: 333703
aaggaaagaagaauacucu

SEQ ID NO: 333705 - RNA, 19 nt, Artificial Sequence
  Description of Artificial Sequence: Synthetic oligonucleotide
  Sense Strand Starting at position 189 of SEQ ID NO: 318796
ucucaugggucucuaauaa

SEQ ID NO: 333706 - RNA, 19 nt, Artificial Sequence
  Description of Artificial Sequence: Synthetic oligonucleotide
  Antisense Strand to SEQ ID NO: 333705
uuauuagagacccaugaga

SEQ ID NO: 333707 - RNA, 19 nt, Artificial Sequence
  Description of Artificial Sequence: Synthetic oligonucleotide
  Sense Strand Starting at position 189 of SEQ ID NO: 319193
ccuguuuccuaccuagacu

SEQ ID NO: 333708 - RNA, 19 nt, Artificial Sequence
  Description of Artificial Sequence: Synthetic oligonucleotide
  Antisense Strand to SEQ ID NO: 333707
agucuagguaggaaacagg

SEQ ID NO: 333709 - RNA, 19 nt, Artificial Sequence
  Description of Artificial Sequence: Synthetic oligonucleotide
  Sense Strand Starting at position 189 of SEQ ID NO: 319205
cuagacugugacuguuaca

SEQ ID NO: 333710 - RNA, 19 nt, Artificial Sequence
  Description of Artificial Sequence: Synthetic oligonucleotide
  Antisense Strand to SEQ ID NO: 333709
uguaacagucacagucuag

SEQ ID NO: 333711 - RNA, 19 nt, Artificial Sequence
  Description of Artificial Sequence: Synthetic oligonucleotide
  Sense Strand Starting at position 190 of SEQ ID NO: 315338
uuuggugauggccauacaa

SEQ ID NO: 333712 - RNA, 19 nt, Artificial Sequence
  Description of Artificial Sequence: Synthetic oligonucleotide
  Antisense Strand to SEQ ID NO: 333711
uuguauggccaucaccaaa

SEQ ID NO: 333713 - RNA, 19 nt, Artificial Sequence
  Description of Artificial Sequence: Synthetic oligonucleotide
  Sense Strand Starting at position 190 of SEQ ID NO: 315340
uggugauggccauacaacu

SEQ ID NO: 333714 - RNA, 19 nt, Artificial Sequence
  Description of Artificial Sequence: Synthetic oligonucleotide
  Antisense Strand to SEQ ID NO: 333713
aguuguauggccaucacca

SEQ ID NO: 333715 - RNA, 19 nt, Artificial Sequence
  Description of Artificial Sequence: Synthetic oligonucleotide
  Sense Strand Starting at position 190 of SEQ ID NO: 315348
gccauacaacuuugugaau

SEQ ID NO: 333716 - RNA, 19 nt, Artificial Sequence
  Description of Artificial Sequence: Synthetic oligonucleotide
  Antisense Strand to SEQ ID NO: 333715
auucacaaaguuguauggc

SEQ ID NO: 333717 - RNA, 19 nt, Artificial Sequence
  Description of Artificial Sequence: Synthetic oligonucleotide
  Sense Strand Starting at position 190 of SEQ ID NO: 315386
guacacauugcaugaauua

SEQ ID NO: 333718 - RNA, 19 nt, Artificial Sequence
  Description of Artificial Sequence: Synthetic oligonucleotide
  Antisense Strand to SEQ ID NO: 333717
uaauucaugcaauguguac

SEQ ID NO: 333719 - RNA, 19 nt, Artificial Sequence
  Description of Artificial Sequence: Synthetic oligonucleotide
  Sense Strand Starting at position 190 of SEQ ID NO: 315395
gcaugaauuacaugguaug

SEQ ID NO: 333720 - RNA, 19 nt, Artificial Sequence
  Description of Artificial Sequence: Synthetic oligonucleotide
  Antisense Strand to SEQ ID NO: 333719
cauaccauguaauucaugc

SEQ ID NO: 333721 - RNA, 19 nt, Artificial Sequence
  Description of Artificial Sequence: Synthetic oligonucleotide
  Sense Strand Starting at position 190 of SEQ ID NO: 315500
guucuaggcucauuuauca

SEQ ID NO: 333722 - RNA, 19 nt, Artificial Sequence
  Description of Artificial Sequence: Synthetic oligonucleotide
  Antisense Strand to SEQ ID NO: 333721
ugauaaaugagccuagaac

SEQ ID NO: 333723 - RNA, 19 nt, Artificial Sequence
  Description of Artificial Sequence: Synthetic oligonucleotide
  Sense Strand Starting at position 190 of SEQ ID NO: 315594
agccuucuccaucauggau

SEQ ID NO: 333724 - RNA, 19 nt, Artificial Sequence
  Description of Artificial Sequence: Synthetic oligonucleotide
  Antisense Strand to SEQ ID NO: 333723
auccaugauggagaaggcu

SEQ ID NO: 333725 - RNA, 19 nt, Artificial Sequence
  Description of Artificial Sequence: Synthetic oligonucleotide
  Sense Strand Starting at position 190 of SEQ ID NO: 315787
acaucucuagccuggauua

SEQ ID NO: 333726 - RNA, 19 nt, Artificial Sequence
  Description of Artificial Sequence: Synthetic oligonucleotide
  Antisense Strand to SEQ ID NO: 333725
uaauccaggcuagagaugu

SEQ ID NO: 333727 - RNA, 19 nt, Artificial Sequence
  Description of Artificial Sequence: Synthetic oligonucleotide
  Sense Strand Starting at position 190 of SEQ ID NO: 315826
augucacccugcuucuauu

SEQ ID NO: 333728 - RNA, 19 nt, Artificial Sequence
  Description of Artificial Sequence: Synthetic oligonucleotide
  Antisense Strand to SEQ ID NO: 333727
aauagaagcagggugacau

SEQ ID NO: 333729 - RNA, 19 nt, Artificial Sequence
  Description of Artificial Sequence: Synthetic oligonucleotide
  Sense Strand Starting at position 190 of SEQ ID NO: 315854
acaauuuauugucagucga

SEQ ID NO: 333730 - RNA, 19 nt, Artificial Sequence
  Description of Artificial Sequence: Synthetic oligonucleotide
  Antisense Strand to SEQ ID NO: 333729
ucgacugacaauaaauugu

SEQ ID NO: 333731 - RNA, 19 nt, Artificial Sequence
  Description of Artificial Sequence: Synthetic oligonucleotide
  Sense Strand Starting at position 190 of SEQ ID NO: 315870
cgagcagucaguguuccuu

SEQ ID NO: 333732 - RNA, 19 nt, Artificial Sequence
  Description of Artificial Sequence: Synthetic oligonucleotide
  Antisense Strand to SEQ ID NO: 333731
aaggaacacugacugcucg

SEQ ID NO: 333733 - RNA, 19 nt, Artificial Sequence
  Description of Artificial Sequence: Synthetic oligonucleotide
  Sense Strand Starting at position 190 of SEQ ID NO: 315999
ggcucucauuccucucuga

SEQ ID NO: 333734 - RNA, 19 nt, Artificial Sequence
  Description of Artificial Sequence: Synthetic oligonucleotide
  Antisense Strand to SEQ ID NO: 333733
ucagagaggaaugagagcc

SEQ ID NO: 333735 - RNA, 19 nt, Artificial Sequence
  Description of Artificial Sequence: Synthetic oligonucleotide
  Sense Strand Starting at position 190 of SEQ ID NO: 316210
aucagauauggccauccca

SEQ ID NO: 333736 - RNA, 19 nt, Artificial Sequence
  Description of Artificial Sequence: Synthetic oligonucleotide
  Antisense Strand to SEQ ID NO: 333735
ugggauggccauaucugau

SEQ ID NO: 333737 - RNA, 19 nt, Artificial Sequence
  Description of Artificial Sequence: Synthetic oligonucleotide
  Sense Strand Starting at position 190 of SEQ ID NO: 316321
uugguuauagucugucuca

SEQ ID NO: 333738 - RNA, 19 nt, Artificial Sequence
  Description of Artificial Sequence: Synthetic oligonucleotide
  Antisense Strand to SEQ ID NO: 333737
ugagacagacuauaaccaa

SEQ ID NO: 333739 - RNA, 19 nt, Artificial Sequence
  Description of Artificial Sequence: Synthetic oligonucleotide
  Sense Strand Starting at position 190 of SEQ ID NO: 316352
ucagcuugguaccuacaua

SEQ ID NO: 333740 - RNA, 19 nt, Artificial Sequence
  Description of Artificial Sequence: Synthetic oligonucleotide
  Antisense Strand to SEQ ID NO: 333739
uauguagguaccaagcuga

SEQ ID NO: 333741 - RNA, 19 nt, Artificial Sequence
  Description of Artificial Sequence: Synthetic oligonucleotide
  Sense Strand Starting at position 190 of SEQ ID NO: 316839
aacagaguuguauggccau

SEQ ID NO: 333742 - RNA, 19 nt, Artificial Sequence
  Description of Artificial Sequence: Synthetic oligonucleotide
  Antisense Strand to SEQ ID NO: 333741
auggccauacaacucuguu

SEQ ID NO: 333743 - RNA, 19 nt, Artificial Sequence
  Description of Artificial Sequence: Synthetic oligonucleotide
  Sense Strand Starting at position 190 of SEQ ID NO: 316846
uuguauggccaucaccaaa

SEQ ID NO: 333744 - RNA, 19 nt, Artificial Sequence
  Description of Artificial Sequence: Synthetic oligonucleotide
  Antisense Strand to SEQ ID NO: 333743
uuuggugauggccauacaa

SEQ ID NO: 333745 - RNA, 19 nt, Artificial Sequence
  Description of Artificial Sequence: Synthetic oligonucleotide
  Sense Strand Starting at position 190 of SEQ ID NO: 316962
gcuauaggaccacgugaua

SEQ ID NO: 333746 - RNA, 19 nt, Artificial Sequence
  Description of Artificial Sequence: Synthetic oligonucleotide
  Antisense Strand to SEQ ID NO: 333745
uaucacgugguccuauagc

SEQ ID NO: 333747 - RNA, 19 nt, Artificial Sequence
  Description of Artificial Sequence: Synthetic oligonucleotide
  Sense Strand Starting at position 190 of SEQ ID NO: 317064
gcuugaagcucuuugcaca

SEQ ID NO: 333748 - RNA, 19 nt, Artificial Sequence
  Description of Artificial Sequence: Synthetic oligonucleotide
  Antisense Strand to SEQ ID NO: 333747
ugugcaaagagcuucaagc

SEQ ID NO: 333749 - RNA, 19 nt, Artificial Sequence
  Description of Artificial Sequence: Synthetic oligonucleotide
  Sense Strand Starting at position 190 of SEQ ID NO: 317065
cuugaagcucuuugcacau

SEQ ID NO: 333750 - RNA, 19 nt, Artificial Sequence
  Description of Artificial Sequence: Synthetic oligonucleotide
  Antisense Strand to SEQ ID NO: 333749
augugcaaagagcuucaag

SEQ ID NO: 333751 - RNA, 19 nt, Artificial Sequence
  Description of Artificial Sequence: Synthetic oligonucleotide
  Sense Strand Starting at position 190 of SEQ ID NO: 317140
uaggccguccgguuaagua

SEQ ID NO: 333752 - RNA, 19 nt, Artificial Sequence
  Description of Artificial Sequence: Synthetic oligonucleotide
  Antisense Strand to SEQ ID NO: 333751
uacuuaaccggacggccua

SEQ ID NO: 333753 - RNA, 19 nt, Artificial Sequence
  Description of Artificial Sequence: Synthetic oligonucleotide
  Sense Strand Starting at position 190 of SEQ ID NO: 317336
ccucgcugucuacgacaaa

SEQ ID NO: 333754 - RNA, 19 nt, Artificial Sequence
  Description of Artificial Sequence: Synthetic oligonucleotide
  Antisense Strand to SEQ ID NO: 333753
uuugucguagacagcgagg

SEQ ID NO: 333755 - RNA, 19 nt, Artificial Sequence
  Description of Artificial Sequence: Synthetic oligonucleotide
  Sense Strand Starting at position 190 of SEQ ID NO: 317425
gaagguaaguguuccggaa

SEQ ID NO: 333756 - RNA, 19 nt, Artificial Sequence
  Description of Artificial Sequence: Synthetic oligonucleotide
  Antisense Strand to SEQ ID NO: 333755
uuccggaacacuuaccuuc

SEQ ID NO: 333757 - RNA, 19 nt, Artificial Sequence
  Description of Artificial Sequence: Synthetic oligonucleotide
  Sense Strand Starting at position 190 of SEQ ID NO: 317429
guaaguguuccggaaccgu

SEQ ID NO: 333758 - RNA, 19 nt, Artificial Sequence
  Description of Artificial Sequence: Synthetic oligonucleotide
  Antisense Strand to SEQ ID NO: 333757
acgguuccggaacacuuac

SEQ ID NO: 333759 - RNA, 19 nt, Artificial Sequence
  Description of Artificial Sequence: Synthetic oligonucleotide
  Sense Strand Starting at position 190 of SEQ ID NO: 317869
agcgaauggucucuagcca

SEQ ID NO: 333760 - RNA, 19 nt, Artificial Sequence
  Description of Artificial Sequence: Synthetic oligonucleotide
  Antisense Strand to SEQ ID NO: 333759
uggcuagagaccauucgcu

SEQ ID NO: 333761 - RNA, 19 nt, Artificial Sequence
  Description of Artificial Sequence: Synthetic oligonucleotide
  Sense Strand Starting at position 190 of SEQ ID NO: 317957
ggcuuccauuccuuaggaa

SEQ ID NO: 333762 - RNA, 19 nt, Artificial Sequence
  Description of Artificial Sequence: Synthetic oligonucleotide
  Antisense Strand to SEQ ID NO: 333761
uuccuaaggaauggaagcc

SEQ ID NO: 333763 - RNA, 19 nt, Artificial Sequence
  Description of Artificial Sequence: Synthetic oligonucleotide
  Sense Strand Starting at position 190 of SEQ ID NO: 318026
acaguuaaguuucucaaag

SEQ ID NO: 333764 - RNA, 19 nt, Artificial Sequence
  Description of Artificial Sequence: Synthetic oligonucleotide
  Antisense Strand to SEQ ID NO: 333763
cuuugagaaacuuaacugu

SEQ ID NO: 333765 - RNA, 19 nt, Artificial Sequence
  Description of Artificial Sequence: Synthetic oligonucleotide
  Sense Strand Starting at position 190 of SEQ ID NO: 318044
gucugacgucguccgcaau

SEQ ID NO: 333766 - RNA, 19 nt, Artificial Sequence
  Description of Artificial Sequence: Synthetic oligonucleotide
  Antisense Strand to SEQ ID NO: 333765
auugcggacgacgucagac

SEQ ID NO: 333767 - RNA, 19 nt, Artificial Sequence
  Description of Artificial Sequence: Synthetic oligonucleotide
  Sense Strand Starting at position 190 of SEQ ID NO: 318090
ccuucuaguguuugaaccu

SEQ ID NO: 333768 - RNA, 19 nt, Artificial Sequence
  Description of Artificial Sequence: Synthetic oligonucleotide
  Antisense Strand to SEQ ID NO: 333767
agguucaaacacuagaagg

SEQ ID NO: 333769 - RNA, 19 nt, Artificial Sequence
  Description of Artificial Sequence: Synthetic oligonucleotide
  Sense Strand Starting at position 190 of SEQ ID NO: 318097
guguuugaaccuuacuuga

SEQ ID NO: 333770 - RNA, 19 nt, Artificial Sequence
  Description of Artificial Sequence: Synthetic oligonucleotide
  Antisense Strand to SEQ ID NO: 333769
ucaaguaagguucaaacac

SEQ ID NO: 333771 - RNA, 19 nt, Artificial Sequence
  Description of Artificial Sequence: Synthetic oligonucleotide
  Sense Strand Starting at position 190 of SEQ ID NO: 318099
guuugaaccuuacuugacu

SEQ ID NO: 333772 - RNA, 19 nt, Artificial Sequence
  Description of Artificial Sequence: Synthetic oligonucleotide
  Antisense Strand to SEQ ID NO: 333771
agucaaguaagguucaaac

SEQ ID NO: 333773 - RNA, 19 nt, Artificial Sequence
  Description of Artificial Sequence: Synthetic oligonucleotide
  Sense Strand Starting at position 190 of SEQ ID NO: 318613
uuucguacugcuuauauua

SEQ ID NO: 333774 - RNA, 19 nt, Artificial Sequence
  Description of Artificial Sequence: Synthetic oligonucleotide
  Antisense Strand to SEQ ID NO: 333773
uaauauaagcaguacgaaa

SEQ ID NO: 333775 - RNA, 19 nt, Artificial Sequence
  Description of Artificial Sequence: Synthetic oligonucleotide
  Sense Strand Starting at position 190 of SEQ ID NO: 318674
uggguaugccuagacuaaa

SEQ ID NO: 333776 - RNA, 19 nt, Artificial Sequence
  Description of Artificial Sequence: Synthetic oligonucleotide
  Antisense Strand to SEQ ID NO: 333775
uuuagucuaggcauaccca

SEQ ID NO: 333777 - RNA, 19 nt, Artificial Sequence
  Description of Artificial Sequence: Synthetic oligonucleotide
  Sense Strand Starting at position 190 of SEQ ID NO: 318833
ugugcaucauaagcauuau

SEQ ID NO: 333778 - RNA, 19 nt, Artificial Sequence
  Description of Artificial Sequence: Synthetic oligonucleotide
  Antisense Strand to SEQ ID NO: 333777
auaaugcuuaugaugcaca

SEQ ID NO: 333779 - RNA, 19 nt, Artificial Sequence
  Description of Artificial Sequence: Synthetic oligonucleotide
  Sense Strand Starting at position 190 of SEQ ID NO: 318916
gagccaugcuaggcaugau

SEQ ID NO: 333780 - RNA, 19 nt, Artificial Sequence
  Description of Artificial Sequence: Synthetic oligonucleotide
  Antisense Strand to SEQ ID NO: 333779
aucaugccuagcauggcuc

SEQ ID NO: 333781 - RNA, 19 nt, Artificial Sequence
  Description of Artificial Sequence: Synthetic oligonucleotide
  Sense Strand Starting at position 190 of SEQ ID NO: 318950
gggagugucaucuagggcu

SEQ ID NO: 333782 - RNA, 19 nt, Artificial Sequence
  Description of Artificial Sequence: Synthetic oligonucleotide
  Antisense Strand to SEQ ID NO: 333781
agcccuagaugacacuccc

SEQ ID NO: 333783 - RNA, 19 nt, Artificial Sequence
  Description of Artificial Sequence: Synthetic oligonucleotide
  Sense Strand Starting at position 190 of SEQ ID NO: 318988
guggguuugauccauuauu

SEQ ID NO: 333784 - RNA, 19 nt, Artificial Sequence
  Description of Artificial Sequence: Synthetic oligonucleotide
  Antisense Strand to SEQ ID NO: 333783
aauaauggaucaaacccac

SEQ ID NO: 333785 - RNA, 19 nt, Artificial Sequence
  Description of Artificial Sequence: Synthetic oligonucleotide
  Sense Strand Starting at position 190 of SEQ ID NO: 319029
uuucuagcucuugagauuc

SEQ ID NO: 333786 - RNA, 19 nt, Artificial Sequence
  Description of Artificial Sequence: Synthetic oligonucleotide
  Antisense Strand to SEQ ID NO: 333785
gaaucucaagagcuagaaa

SEQ ID NO: 333787 - RNA, 19 nt, Artificial Sequence
  Description of Artificial Sequence: Synthetic oligonucleotide
  Sense Strand Starting at position 190 of SEQ ID NO: 319113
gccuaagcaggaggauuau

SEQ ID NO: 333788 - RNA, 19 nt, Artificial Sequence
  Description of Artificial Sequence: Synthetic oligonucleotide
  Antisense Strand to SEQ ID NO: 333787
auaauccuccugcuuaggc

SEQ ID NO: 333789 - RNA, 19 nt, Artificial Sequence
  Description of Artificial Sequence: Synthetic oligonucleotide
  Sense Strand Starting at position 190 of SEQ ID NO: 319159
gggagacccugucuacaga

SEQ ID NO: 333790 - RNA, 19 nt, Artificial Sequence
  Description of Artificial Sequence: Synthetic oligonucleotide
  Antisense Strand to SEQ ID NO: 333789
ucuguagacagggucuccc

SEQ ID NO: 333791 - RNA, 19 nt, Artificial Sequence
  Description of Artificial Sequence: Synthetic oligonucleotide
  Sense Strand Starting at position 191 of SEQ ID NO: 315254
uuuaguagccuugacaaug

SEQ ID NO: 333792 - RNA, 19 nt, Artificial Sequence
  Description of Artificial Sequence: Synthetic oligonucleotide
  Antisense Strand to SEQ ID NO: 333791
cauugucaaggcuacuaaa

SEQ ID NO: 333793 - RNA, 19 nt, Artificial Sequence
  Description of Artificial Sequence: Synthetic oligonucleotide
  Sense Strand Starting at position 191 of SEQ ID NO: 315259
uagccuugacaauggguau

SEQ ID NO: 333794 - RNA, 19 nt, Artificial Sequence
  Description of Artificial Sequence: Synthetic oligonucleotide
  Antisense Strand to SEQ ID NO: 333793
auacccauugucaaggcua

SEQ ID NO: 333795 - RNA, 19 nt, Artificial Sequence
  Description of Artificial Sequence: Synthetic oligonucleotide
  Sense Strand Starting at position 191 of SEQ ID NO: 315606
aaugaagucuugucaguag

SEQ ID NO: 333796 - RNA, 19 nt, Artificial Sequence
  Description of Artificial Sequence: Synthetic oligonucleotide
  Antisense Strand to SEQ ID NO: 333795
cuacugacaagacuucauu

SEQ ID NO: 333797 - RNA, 19 nt, Artificial Sequence
  Description of Artificial Sequence: Synthetic oligonucleotide
  Sense Strand Starting at position 191 of SEQ ID NO: 315609
gaagucuugucaguagugu

SEQ ID NO: 333798 - RNA, 19 nt, Artificial Sequence
  Description of Artificial Sequence: Synthetic oligonucleotide
  Antisense Strand to SEQ ID NO: 333797
acacuacugacaagacuuc

SEQ ID NO: 333799 - RNA, 19 nt, Artificial Sequence
  Description of Artificial Sequence: Synthetic oligonucleotide
  Sense Strand Starting at position 191 of SEQ ID NO: 315610
aagucuugucaguagugua

SEQ ID NO: 333800 - RNA, 19 nt, Artificial Sequence
  Description of Artificial Sequence: Synthetic oligonucleotide
  Antisense Strand to SEQ ID NO: 333799
uacacuacugacaagacuu

SEQ ID NO: 333801 - RNA, 19 nt, Artificial Sequence
  Description of Artificial Sequence: Synthetic oligonucleotide
  Sense Strand Starting at position 191 of SEQ ID NO: 315615
uugucaguaguguauguuu

SEQ ID NO: 333802 - RNA, 19 nt, Artificial Sequence
  Description of Artificial Sequence: Synthetic oligonucleotide
  Antisense Strand to SEQ ID NO: 333801
aaacauacacuacugacaa

SEQ ID NO: 333803 - RNA, 19 nt, Artificial Sequence
  Description of Artificial Sequence: Synthetic oligonucleotide
  Sense Strand Starting at position 191 of SEQ ID NO: 315769
caggaugaguccucaugaa

SEQ ID NO: 333804 - RNA, 19 nt, Artificial Sequence
  Description of Artificial Sequence: Synthetic oligonucleotide
  Antisense Strand to SEQ ID NO: 333803
uucaugaggacucauccug

SEQ ID NO: 333805 - RNA, 19 nt, Artificial Sequence
  Description of Artificial Sequence: Synthetic oligonucleotide
  Sense Strand Starting at position 191 of SEQ ID NO: 315783
augaauugccuuugagaaa

SEQ ID NO: 333806 - RNA, 19 nt, Artificial Sequence
  Description of Artificial Sequence: Synthetic oligonucleotide
  Antisense Strand to SEQ ID NO: 333805
uuucucaaaggcaauucau

SEQ ID NO: 333807 - RNA, 19 nt, Artificial Sequence
  Description of Artificial Sequence: Synthetic oligonucleotide
  Sense Strand Starting at position 191 of SEQ ID NO: 315839
auuagaucaugugccuuaa

SEQ ID NO: 333808 - RNA, 19 nt, Artificial Sequence
  Description of Artificial Sequence: Synthetic oligonucleotide
  Antisense Strand to SEQ ID NO: 333807
uuaaggcacaugaucuaau

SEQ ID NO: 333809 - RNA, 19 nt, Artificial Sequence
  Description of Artificial Sequence: Synthetic oligonucleotide
  Sense Strand Starting at position 191 of SEQ ID NO: 315850
ugccuuaacuuacuguaga

SEQ ID NO: 333810 - RNA, 19 nt, Artificial Sequence
  Description of Artificial Sequence: Synthetic oligonucleotide
  Antisense Strand to SEQ ID NO: 333809
ucuacaguaaguuaaggca

SEQ ID NO: 333811 - RNA, 19 nt, Artificial Sequence
  Description of Artificial Sequence: Synthetic oligonucleotide
  Sense Strand Starting at position 191 of SEQ ID NO: 315931
ccacaccaaugugugaaua

SEQ ID NO: 333812 - RNA, 19 nt, Artificial Sequence
  Description of Artificial Sequence: Synthetic oligonucleotide
  Antisense Strand to SEQ ID NO: 333811
uauucacacauuggugugg

SEQ ID NO: 333813 - RNA, 19 nt, Artificial Sequence
  Description of Artificial Sequence: Synthetic oligonucleotide
  Sense Strand Starting at position 191 of SEQ ID NO: 315941
gugugaauacuuggagccu

SEQ ID NO: 333814 - RNA, 19 nt, Artificial Sequence
  Description of Artificial Sequence: Synthetic oligonucleotide
  Antisense Strand to SEQ ID NO: 333813
aggcuccaaguauucacac

SEQ ID NO: 333815 - RNA, 19 nt, Artificial Sequence
  Description of Artificial Sequence: Synthetic oligonucleotide
  Sense Strand Starting at position 191 of SEQ ID NO: 317256
aaugacugcuggcuuagaa

SEQ ID NO: 333816 - RNA, 19 nt, Artificial Sequence
  Description of Artificial Sequence: Synthetic oligonucleotide
  Antisense Strand to SEQ ID NO: 333815
uucuaagccagcagucauu

SEQ ID NO: 333817 - RNA, 19 nt, Artificial Sequence
  Description of Artificial Sequence: Synthetic oligonucleotide
  Sense Strand Starting at position 191 of SEQ ID NO: 317263
gcuggcuuagaacaaacau

SEQ ID NO: 333818 - RNA, 19 nt, Artificial Sequence
  Description of Artificial Sequence: Synthetic oligonucleotide
  Antisense Strand to SEQ ID NO: 333817
auguuuguucuaagccagc

SEQ ID NO: 333819 - RNA, 19 nt, Artificial Sequence
  Description of Artificial Sequence: Synthetic oligonucleotide
  Sense Strand Starting at position 191 of SEQ ID NO: 317486
uguaguaugccaugauggu

SEQ ID NO: 333820 - RNA, 19 nt, Artificial Sequence
  Description of Artificial Sequence: Synthetic oligonucleotide
  Antisense Strand to SEQ ID NO: 333819
accaucauggcauacuaca

SEQ ID NO: 333821 - RNA, 19 nt, Artificial Sequence
  Description of Artificial Sequence: Synthetic oligonucleotide
  Sense Strand Starting at position 191 of SEQ ID NO: 317487
guaguaugccaugauggua

SEQ ID NO: 333822 - RNA, 19 nt, Artificial Sequence
  Description of Artificial Sequence: Synthetic oligonucleotide
  Antisense Strand to SEQ ID NO: 333821
uaccaucauggcauacuac

SEQ ID NO: 333823 - RNA, 19 nt, Artificial Sequence
  Description of Artificial Sequence: Synthetic oligonucleotide
  Sense Strand Starting at position 191 of SEQ ID NO: 317596
uauugaggaucacacagau

SEQ ID NO: 333824 - RNA, 19 nt, Artificial Sequence
  Description of Artificial Sequence: Synthetic oligonucleotide
  Antisense Strand to SEQ ID NO: 333823
aucugugugauccucaaua

SEQ ID NO: 333825 - RNA, 19 nt, Artificial Sequence
  Description of Artificial Sequence: Synthetic oligonucleotide
  Sense Strand Starting at position 191 of SEQ ID NO: 317627
gguuauaucuaccuacauu

SEQ ID NO: 333826 - RNA, 19 nt, Artificial Sequence
  Description of Artificial Sequence: Synthetic oligonucleotide
  Antisense Strand to SEQ ID NO: 333825
aauguagguagauauaacc

SEQ ID NO: 333827 - RNA, 19 nt, Artificial Sequence
  Description of Artificial Sequence: Synthetic oligonucleotide
  Sense Strand Starting at position 191 of SEQ ID NO: 317664
cuaagaaagucuuagauaa

SEQ ID NO: 333828 - RNA, 19 nt, Artificial Sequence
  Description of Artificial Sequence: Synthetic oligonucleotide
  Antisense Strand to SEQ ID NO: 333827
uuaucuaagacuuucuuag

SEQ ID NO: 333829 - RNA, 19 nt, Artificial Sequence
  Description of Artificial Sequence: Synthetic oligonucleotide
  Sense Strand Starting at position 191 of SEQ ID NO: 317791
uuuacauaucugcaagugu

SEQ ID NO: 333830 - RNA, 19 nt, Artificial Sequence
  Description of Artificial Sequence: Synthetic oligonucleotide
  Antisense Strand to SEQ ID NO: 333829
acacuugcagauauguaaa

SEQ ID NO: 333831 - RNA, 19 nt, Artificial Sequence
  Description of Artificial Sequence: Synthetic oligonucleotide
  Sense Strand Starting at position 191 of SEQ ID NO: 317859
ugcauuauaucuguuguga

SEQ ID NO: 333832 - RNA, 19 nt, Artificial Sequence
  Description of Artificial Sequence: Synthetic oligonucleotide
  Antisense Strand to SEQ ID NO: 333831
ucacaacagauauaaugca

SEQ ID NO: 333833 - RNA, 19 nt, Artificial Sequence
  Description of Artificial Sequence: Synthetic oligonucleotide
  Sense Strand Starting at position 191 of SEQ ID NO: 317910
gccucauggaguuacguaa

SEQ ID NO: 333834 - RNA, 19 nt, Artificial Sequence
  Description of Artificial Sequence: Synthetic oligonucleotide
  Antisense Strand to SEQ ID NO: 333833
uuacguaacuccaugaggc

SEQ ID NO: 333835 - RNA, 19 nt, Artificial Sequence
  Description of Artificial Sequence: Synthetic oligonucleotide
  Sense Strand Starting at position 191 of SEQ ID NO: 317918
gaguuacguaaauggaaag

SEQ ID NO: 333836 - RNA, 19 nt, Artificial Sequence
  Description of Artificial Sequence: Synthetic oligonucleotide
  Antisense Strand to SEQ ID NO: 333835
cuuuccauuuacguaacuc

SEQ ID NO: 333837 - RNA, 19 nt, Artificial Sequence
  Description of Artificial Sequence: Synthetic oligonucleotide
  Sense Strand Starting at position 191 of SEQ ID NO: 317971
aggauaucauucuuugcua

SEQ ID NO: 333838 - RNA, 19 nt, Artificial Sequence
  Description of Artificial Sequence: Synthetic oligonucleotide
  Antisense Strand to SEQ ID NO: 333837
uagcaaagaaugauauccu

SEQ ID NO: 333839 - RNA, 19 nt, Artificial Sequence
  Description of Artificial Sequence: Synthetic oligonucleotide
  Sense Strand Starting at position 191 of SEQ ID NO: 317972
ggauaucauucuuugcuac

SEQ ID NO: 333840 - RNA, 19 nt, Artificial Sequence
  Description of Artificial Sequence: Synthetic oligonucleotide
  Antisense Strand to SEQ ID NO: 333839
guagcaaagaaugauaucc

SEQ ID NO: 333841 - RNA, 19 nt, Artificial Sequence
  Description of Artificial Sequence: Synthetic oligonucleotide
  Sense Strand Starting at position 191 of SEQ ID NO: 318019
uuaagaaguuagcugcaau

SEQ ID NO: 333842 - RNA, 19 nt, Artificial Sequence
  Description of Artificial Sequence: Synthetic oligonucleotide
  Antisense Strand to SEQ ID NO: 333841
auugcagcuaacuucuuaa

SEQ ID NO: 333843 - RNA, 19 nt, Artificial Sequence
  Description of Artificial Sequence: Synthetic oligonucleotide
  Sense Strand Starting at position 191 of SEQ ID NO: 318129
auguauuggucauuuggca

SEQ ID NO: 333844 - RNA, 19 nt, Artificial Sequence
  Description of Artificial Sequence: Synthetic oligonucleotide
  Antisense Strand to SEQ ID NO: 333843
ugccaaaugaccaauacau

SEQ ID NO: 333845 - RNA, 19 nt, Artificial Sequence
  Description of Artificial Sequence: Synthetic oligonucleotide
  Sense Strand Starting at position 191 of SEQ ID NO: 318134
uuggucauuuggcaaacaa

SEQ ID NO: 333846 - RNA, 19 nt, Artificial Sequence
  Description of Artificial Sequence: Synthetic oligonucleotide
  Antisense Strand to SEQ ID NO: 333845
uuguuugccaaaugaccaa

SEQ ID NO: 333847 - RNA, 19 nt, Artificial Sequence
  Description of Artificial Sequence: Synthetic oligonucleotide
  Sense Strand Starting at position 191 of SEQ ID NO: 318165
uuauguaggucuuccaaau

SEQ ID NO: 333848 - RNA, 19 nt, Artificial Sequence
  Description of Artificial Sequence: Synthetic oligonucleotide
  Antisense Strand to SEQ ID NO: 333847
auuuggaagaccuacauaa

SEQ ID NO: 333849 - RNA, 19 nt, Artificial Sequence
  Description of Artificial Sequence: Synthetic oligonucleotide
  Sense Strand Starting at position 191 of SEQ ID NO: 318182
augucaacucauuguauua

SEQ ID NO: 333850 - RNA, 19 nt, Artificial Sequence
  Description of Artificial Sequence: Synthetic oligonucleotide
  Antisense Strand to SEQ ID NO: 333849
uaauacaaugaguugacau

SEQ ID NO: 333851 - RNA, 19 nt, Artificial Sequence
  Description of Artificial Sequence: Synthetic oligonucleotide
  Sense Strand Starting at position 191 of SEQ ID NO: 318332
cuugaaauuuaucaagcug

SEQ ID NO: 333852 - RNA, 19 nt, Artificial Sequence
  Description of Artificial Sequence: Synthetic oligonucleotide
  Antisense Strand to SEQ ID NO: 333851
cagcuugauaaauuucaag

SEQ ID NO: 333853 - RNA, 19 nt, Artificial Sequence
  Description of Artificial Sequence: Synthetic oligonucleotide
  Sense Strand Starting at position 191 of SEQ ID NO: 318370
gugacagauucccuccauc

SEQ ID NO: 333854 - RNA, 19 nt, Artificial Sequence
  Description of Artificial Sequence: Synthetic oligonucleotide
  Antisense Strand to SEQ ID NO: 333853
gauggagggaaucugucac

SEQ ID NO: 333855 - RNA, 19 nt, Artificial Sequence
  Description of Artificial Sequence: Synthetic oligonucleotide
  Sense Strand Starting at position 191 of SEQ ID NO: 318508
auguacguuuccucaugaa

SEQ ID NO: 333856 - RNA, 19 nt, Artificial Sequence
  Description of Artificial Sequence: Synthetic oligonucleotide
  Antisense Strand to SEQ ID NO: 333855
uucaugaggaaacguacau

SEQ ID NO: 333857 - RNA, 19 nt, Artificial Sequence
  Description of Artificial Sequence: Synthetic oligonucleotide
  Sense Strand Starting at position 191 of SEQ ID NO: 318528
accaguauacuuuguuaag

SEQ ID NO: 333858 - RNA, 19 nt, Artificial Sequence
  Description of Artificial Sequence: Synthetic oligonucleotide
  Antisense Strand to SEQ ID NO: 333857
cuuaacaaaguauacuggu

SEQ ID NO: 333859 - RNA, 19 nt, Artificial Sequence
  Description of Artificial Sequence: Synthetic oligonucleotide
  Sense Strand Starting at position 191 of SEQ ID NO: 318654
ggacauucuugagugaaac

SEQ ID NO: 333860 - RNA, 19 nt, Artificial Sequence
  Description of Artificial Sequence: Synthetic oligonucleotide
  Antisense Strand to SEQ ID NO: 333859
guuucacucaagaaugucc

SEQ ID NO: 333861 - RNA, 19 nt, Artificial Sequence
  Description of Artificial Sequence: Synthetic oligonucleotide
  Sense Strand Starting at position 191 of SEQ ID NO: 318655
gacauucuugagugaaacu

SEQ ID NO: 333862 - RNA, 19 nt, Artificial Sequence
  Description of Artificial Sequence: Synthetic oligonucleotide
  Antisense Strand to SEQ ID NO: 333861
aguuucacucaagaauguc

SEQ ID NO: 333863 - RNA, 19 nt, Artificial Sequence
  Description of Artificial Sequence: Synthetic oligonucleotide
  Sense Strand Starting at position 191 of SEQ ID NO: 318829
aacgguguccugggauuau

SEQ ID NO: 333864 - RNA, 19 nt, Artificial Sequence
  Description of Artificial Sequence: Synthetic oligonucleotide
  Antisense Strand to SEQ ID NO: 333863
auaaucccaggacaccguu

SEQ ID NO: 333865 - RNA, 19 nt, Artificial Sequence
  Description of Artificial Sequence: Synthetic oligonucleotide
  Sense Strand Starting at position 191 of SEQ ID NO: 318877
cuuacagaguggucucaug

SEQ ID NO: 333866 - RNA, 19 nt, Artificial Sequence
  Description of Artificial Sequence: Synthetic oligonucleotide
  Antisense Strand to SEQ ID NO: 333865
caugagaccacucuguaag

SEQ ID NO: 333867 - RNA, 19 nt, Artificial Sequence
  Description of Artificial Sequence: Synthetic oligonucleotide
  Sense Strand Starting at position 191 of SEQ ID NO: 318921
gccacugccuuagaauuua

SEQ ID NO: 333868 - RNA, 19 nt, Artificial Sequence
  Description of Artificial Sequence: Synthetic oligonucleotide
  Antisense Strand to SEQ ID NO: 333867
uaaauucuaaggcaguggc

SEQ ID NO: 333869 - RNA, 19 nt, Artificial Sequence
  Description of Artificial Sequence: Synthetic oligonucleotide
  Sense Strand Starting at position 191 of SEQ ID NO: 319111
ugacguguuacucacaugu

SEQ ID NO: 333870 - RNA, 19 nt, Artificial Sequence
  Description of Artificial Sequence: Synthetic oligonucleotide
  Antisense Strand to SEQ ID NO: 333869
acaugugaguaacacguca

SEQ ID NO: 333871 - RNA, 19 nt, Artificial Sequence
  Description of Artificial Sequence: Synthetic oligonucleotide
  Sense Strand Starting at position 192 of SEQ ID NO: 315270
gagacuaguagguaucugu

SEQ ID NO: 333872 - RNA, 19 nt, Artificial Sequence
  Description of Artificial Sequence: Synthetic oligonucleotide
  Antisense Strand to SEQ ID NO: 333871
acagauaccuacuagucuc

SEQ ID NO: 333873 - RNA, 19 nt, Artificial Sequence
  Description of Artificial Sequence: Synthetic oligonucleotide
  Sense Strand Starting at position 192 of SEQ ID NO: 315337
acaugacuguaucuggaga

SEQ ID NO: 333874 - RNA, 19 nt, Artificial Sequence
  Description of Artificial Sequence: Synthetic oligonucleotide
  Antisense Strand to SEQ ID NO: 333873
ucuccagauacagucaugu

SEQ ID NO: 333875 - RNA, 19 nt, Artificial Sequence
  Description of Artificial Sequence: Synthetic oligonucleotide
  Sense Strand Starting at position 192 of SEQ ID NO: 315352
gagauagggccuugaggua

SEQ ID NO: 333876 - RNA, 19 nt, Artificial Sequence
  Description of Artificial Sequence: Synthetic oligonucleotide
  Antisense Strand to SEQ ID NO: 333875
uaccucaaggcccuaucuc

SEQ ID NO: 333877 - RNA, 19 nt, Artificial Sequence
  Description of Artificial Sequence: Synthetic oligonucleotide
  Sense Strand Starting at position 192 of SEQ ID NO: 315357
agggccuugagguauguaa

SEQ ID NO: 333878 - RNA, 19 nt, Artificial Sequence
  Description of Artificial Sequence: Synthetic oligonucleotide
  Antisense Strand to SEQ ID NO: 333877
uuacauaccucaaggcccu

SEQ ID NO: 333879 - RNA, 19 nt, Artificial Sequence
  Description of Artificial Sequence: Synthetic oligonucleotide
  Sense Strand Starting at position 192 of SEQ ID NO: 315379
agguuaaacagaggucaua

SEQ ID NO: 333880 - RNA, 19 nt, Artificial Sequence
  Description of Artificial Sequence: Synthetic oligonucleotide
  Antisense Strand to SEQ ID NO: 333879
uaugaccucuguuuaaccu

SEQ ID NO: 333881 - RNA, 19 nt, Artificial Sequence
  Description of Artificial Sequence: Synthetic oligonucleotide
  Sense Strand Starting at position 192 of SEQ ID NO: 315405
gcccuaauccgauagaacu

SEQ ID NO: 333882 - RNA, 19 nt, Artificial Sequence
  Description of Artificial Sequence: Synthetic oligonucleotide
  Antisense Strand to SEQ ID NO: 333881
aguucuaucggauuagggc

SEQ ID NO: 333883 - RNA, 19 nt, Artificial Sequence
  Description of Artificial Sequence: Synthetic oligonucleotide
  Sense Strand Starting at position 192 of SEQ ID NO: 315864
agagaagccuuacuauaac

SEQ ID NO: 333884 - RNA, 19 nt, Artificial Sequence
  Description of Artificial Sequence: Synthetic oligonucleotide
  Antisense Strand to SEQ ID NO: 333883
guuauaguaaggcuucucu

SEQ ID NO: 333885 - RNA, 19 nt, Artificial Sequence
  Description of Artificial Sequence: Synthetic oligonucleotide
  Sense Strand Starting at position 192 of SEQ ID NO: 316035
gcccuagcggacuaauaca

SEQ ID NO: 333886 - RNA, 19 nt, Artificial Sequence
  Description of Artificial Sequence: Synthetic oligonucleotide
  Antisense Strand to SEQ ID NO: 333885
uguauuaguccgcuagggc

SEQ ID NO: 333887 - RNA, 19 nt, Artificial Sequence
  Description of Artificial Sequence: Synthetic oligonucleotide
  Sense Strand Starting at position 192 of SEQ ID NO: 316275
agaggauuauuuggugaga

SEQ ID NO: 333888 - RNA, 19 nt, Artificial Sequence
  Description of Artificial Sequence: Synthetic oligonucleotide
  Antisense Strand to SEQ ID NO: 333887
ucucaccaaauaauccucu

SEQ ID NO: 333889 - RNA, 19 nt, Artificial Sequence
  Description of Artificial Sequence: Synthetic oligonucleotide
  Sense Strand Starting at position 192 of SEQ ID NO: 316415
guacaaagcuuacuacaga

SEQ ID NO: 333890 - RNA, 19 nt, Artificial Sequence
  Description of Artificial Sequence: Synthetic oligonucleotide
  Antisense Strand to SEQ ID NO: 333889
ucuguaguaagcuuuguac

SEQ ID NO: 333891 - RNA, 19 nt, Artificial Sequence
  Description of Artificial Sequence: Synthetic oligonucleotide
  Sense Strand Starting at position 192 of SEQ ID NO: 316448
aguaucuuggguuaguuaa

SEQ ID NO: 333892 - RNA, 19 nt, Artificial Sequence
  Description of Artificial Sequence: Synthetic oligonucleotide
  Antisense Strand to SEQ ID NO: 333891
uuaacuaacccaagauacu

SEQ ID NO: 333893 - RNA, 19 nt, Artificial Sequence
  Description of Artificial Sequence: Synthetic oligonucleotide
  Sense Strand Starting at position 192 of SEQ ID NO: 316752
aguaaauugcaccaaguau

SEQ ID NO: 333894 - RNA, 19 nt, Artificial Sequence
  Description of Artificial Sequence: Synthetic oligonucleotide
  Antisense Strand to SEQ ID NO: 333893
auacuuggugcaauuuacu

SEQ ID NO: 333895 - RNA, 19 nt, Artificial Sequence
  Description of Artificial Sequence: Synthetic oligonucleotide
  Sense Strand Starting at position 192 of SEQ ID NO: 316876
cugcuacaagauuguuaca

SEQ ID NO: 333896 - RNA, 19 nt, Artificial Sequence
  Description of Artificial Sequence: Synthetic oligonucleotide
  Antisense Strand to SEQ ID NO: 333895
uguaacaaucuuguagcag

SEQ ID NO: 333897 - RNA, 19 nt, Artificial Sequence
  Description of Artificial Sequence: Synthetic oligonucleotide
  Sense Strand Starting at position 192 of SEQ ID NO: 316878
gcuacaagauuguuacaau

SEQ ID NO: 333898 - RNA, 19 nt, Artificial Sequence
  Description of Artificial Sequence: Synthetic oligonucleotide
  Antisense Strand to SEQ ID NO: 333897
auuguaacaaucuuguagc

SEQ ID NO: 333899 - RNA, 19 nt, Artificial Sequence
  Description of Artificial Sequence: Synthetic oligonucleotide
  Sense Strand Starting at position 192 of SEQ ID NO: 316913
cgagcuuuaccacagcaga

SEQ ID NO: 333900 - RNA, 19 nt, Artificial Sequence
  Description of Artificial Sequence: Synthetic oligonucleotide
  Antisense Strand to SEQ ID NO: 333899
ucugcugugguaaagcucg

SEQ ID NO: 333901 - RNA, 19 nt, Artificial Sequence
  Description of Artificial Sequence: Synthetic oligonucleotide
  Sense Strand Starting at position 192 of SEQ ID NO: 316916
gcuuuaccacagcagauua

SEQ ID NO: 333902 - RNA, 19 nt, Artificial Sequence
  Description of Artificial Sequence: Synthetic oligonucleotide
  Antisense Strand to SEQ ID NO: 333901
uaaucugcugugguaaagc

SEQ ID NO: 333903 - RNA, 19 nt, Artificial Sequence
  Description of Artificial Sequence: Synthetic oligonucleotide
  Sense Strand Starting at position 192 of SEQ ID NO: 317047
ccuccaauggcucgagaaa

SEQ ID NO: 333904 - RNA, 19 nt, Artificial Sequence
  Description of Artificial Sequence: Synthetic oligonucleotide
  Antisense Strand to SEQ ID NO: 333903
uuucucgagccauuggagg

SEQ ID NO: 333905 - RNA, 19 nt, Artificial Sequence
  Description of Artificial Sequence: Synthetic oligonucleotide
  Sense Strand Starting at position 192 of SEQ ID NO: 317431
gggccagauacauggauca

SEQ ID NO: 333906 - RNA, 19 nt, Artificial Sequence
  Description of Artificial Sequence: Synthetic oligonucleotide
  Antisense Strand to SEQ ID NO: 333905
ugauccauguaucuggccc

SEQ ID NO: 333907 - RNA, 19 nt, Artificial Sequence
  Description of Artificial Sequence: Synthetic oligonucleotide
  Sense Strand Starting at position 192 of SEQ ID NO: 317468
agggacuguuuacuccaau

SEQ ID NO: 333908 - RNA, 19 nt, Artificial Sequence
  Description of Artificial Sequence: Synthetic oligonucleotide
  Antisense Strand to SEQ ID NO: 333907
auuggaguaaacagucccu

SEQ ID NO: 333909 - RNA, 19 nt, Artificial Sequence
  Description of Artificial Sequence: Synthetic oligonucleotide
  Sense Strand Starting at position 192 of SEQ ID NO: 317469
gggacuguuuacuccaauc

SEQ ID NO: 333910 - RNA, 19 nt, Artificial Sequence
  Description of Artificial Sequence: Synthetic oligonucleotide
  Antisense Strand to SEQ ID NO: 333909
gauuggaguaaacaguccc

SEQ ID NO: 333911 - RNA, 19 nt, Artificial Sequence
  Description of Artificial Sequence: Synthetic oligonucleotide
  Sense Strand Starting at position 192 of SEQ ID NO: 317542
gaaggaaaucuaggcaagu

SEQ ID NO: 333912 - RNA, 19 nt, Artificial Sequence
  Description of Artificial Sequence: Synthetic oligonucleotide
  Antisense Strand to SEQ ID NO: 333911
acuugccuagauuuccuuc

SEQ ID NO: 333913 - RNA, 19 nt, Artificial Sequence
  Description of Artificial Sequence: Synthetic oligonucleotide
  Sense Strand Starting at position 192 of SEQ ID NO: 317631
uuaagaauuugggaccacu

SEQ ID NO: 333914 - RNA, 19 nt, Artificial Sequence
  Description of Artificial Sequence: Synthetic oligonucleotide
  Antisense Strand to SEQ ID NO: 333913
aguggucccaaauucuuaa

SEQ ID NO: 333915 - RNA, 19 nt, Artificial Sequence
  Description of Artificial Sequence: Synthetic oligonucleotide
  Sense Strand Starting at position 192 of SEQ ID NO: 317687
ggguggguaugaguaaagu

SEQ ID NO: 333916 - RNA, 19 nt, Artificial Sequence
  Description of Artificial Sequence: Synthetic oligonucleotide
  Antisense Strand to SEQ ID NO: 333915
acuuuacucauacccaccc

SEQ ID NO: 333917 - RNA, 19 nt, Artificial Sequence
  Description of Artificial Sequence: Synthetic oligonucleotide
  Sense Strand Starting at position 192 of SEQ ID NO: 317696
ugaguaaaguguuuaggau

SEQ ID NO: 333918 - RNA, 19 nt, Artificial Sequence
  Description of Artificial Sequence: Synthetic oligonucleotide
  Antisense Strand to SEQ ID NO: 333917
auccuaaacacuuuacuca

SEQ ID NO: 333919 - RNA, 19 nt, Artificial Sequence
  Description of Artificial Sequence: Synthetic oligonucleotide
  Sense Strand Starting at position 192 of SEQ ID NO: 317697
gaguaaaguguuuaggaug

SEQ ID NO: 333920 - RNA, 19 nt, Artificial Sequence
  Description of Artificial Sequence: Synthetic oligonucleotide
  Antisense Strand to SEQ ID NO: 333919
cauccuaaacacuuuacuc

SEQ ID NO: 333921 - RNA, 19 nt, Artificial Sequence
  Description of Artificial Sequence: Synthetic oligonucleotide
  Sense Strand Starting at position 192 of SEQ ID NO: 317702
aaguguuuaggauggagau

SEQ ID NO: 333922 - RNA, 19 nt, Artificial Sequence
  Description of Artificial Sequence: Synthetic oligonucleotide
  Antisense Strand to SEQ ID NO: 333921
aucuccauccuaaacacuu

SEQ ID NO: 333923 - RNA, 19 nt, Artificial Sequence
  Description of Artificial Sequence: Synthetic oligonucleotide
  Sense Strand Starting at position 192 of SEQ ID NO: 317782
cucagauuagccugaggga

SEQ ID NO: 333924 - RNA, 19 nt, Artificial Sequence
  Description of Artificial Sequence: Synthetic oligonucleotide
  Antisense Strand to SEQ ID NO: 333923
ucccucaggcuaaucugag

SEQ ID NO: 333925 - RNA, 19 nt, Artificial Sequence
  Description of Artificial Sequence: Synthetic oligonucleotide
  Sense Strand Starting at position 192 of SEQ ID NO: 317824
cugagcagaguccaauuau

SEQ ID NO: 333926 - RNA, 19 nt, Artificial Sequence
  Description of Artificial Sequence: Synthetic oligonucleotide
  Antisense Strand to SEQ ID NO: 333925
auaauuggacucugcucag

SEQ ID NO: 333927 - RNA, 19 nt, Artificial Sequence
  Description of Artificial Sequence: Synthetic oligonucleotide
  Sense Strand Starting at position 192 of SEQ ID NO: 317895
cuggaauacugguuuaucu

SEQ ID NO: 333928 - RNA, 19 nt, Artificial Sequence
  Description of Artificial Sequence: Synthetic oligonucleotide
  Antisense Strand to SEQ ID NO: 333927
agauaaaccaguauuccag

SEQ ID NO: 333929 - RNA, 19 nt, Artificial Sequence
  Description of Artificial Sequence: Synthetic oligonucleotide
  Sense Strand Starting at position 192 of SEQ ID NO: 317929
uuuacagaucacgaaaguu

SEQ ID NO: 333930 - RNA, 19 nt, Artificial Sequence
  Description of Artificial Sequence: Synthetic oligonucleotide
  Antisense Strand to SEQ ID NO: 333929
aacuuucgugaucuguaaa

SEQ ID NO: 333931 - RNA, 19 nt, Artificial Sequence
  Description of Artificial Sequence: Synthetic oligonucleotide
  Sense Strand Starting at position 192 of SEQ ID NO: 318495
gagacugcccgugaauuac

SEQ ID NO: 333932 - RNA, 19 nt, Artificial Sequence
  Description of Artificial Sequence: Synthetic oligonucleotide
  Antisense Strand to SEQ ID NO: 333931
guaauucacgggcagucuc

SEQ ID NO: 333933 - RNA, 19 nt, Artificial Sequence
  Description of Artificial Sequence: Synthetic oligonucleotide
  Sense Strand Starting at position 192 of SEQ ID NO: 318715
ccuuccucucuggaguuua

SEQ ID NO: 333934 - RNA, 19 nt, Artificial Sequence
  Description of Artificial Sequence: Synthetic oligonucleotide
  Antisense Strand to SEQ ID NO: 333933
uaaacuccagagaggaagg

SEQ ID NO: 333935 - RNA, 19 nt, Artificial Sequence
  Description of Artificial Sequence: Synthetic oligonucleotide
  Sense Strand Starting at position 192 of SEQ ID NO: 318723
ucuggaguuuaucccagaa

SEQ ID NO: 333936 - RNA, 19 nt, Artificial Sequence
  Description of Artificial Sequence: Synthetic oligonucleotide
  Antisense Strand to SEQ ID NO: 333935
uucugggauaaacuccaga

SEQ ID NO: 333937 - RNA, 19 nt, Artificial Sequence
  Description of Artificial Sequence: Synthetic oligonucleotide
  Sense Strand Starting at position 192 of SEQ ID NO: 318776
gucugauuaggccaaggau

SEQ ID NO: 333938 - RNA, 19 nt, Artificial Sequence
  Description of Artificial Sequence: Synthetic oligonucleotide
  Antisense Strand to SEQ ID NO: 333937
auccuuggccuaaucagac

SEQ ID NO: 333939 - RNA, 19 nt, Artificial Sequence
  Description of Artificial Sequence: Synthetic oligonucleotide
  Sense Strand Starting at position 192 of SEQ ID NO: 318791
ggauuuaggucuuagagau

SEQ ID NO: 333940 - RNA, 19 nt, Artificial Sequence
  Description of Artificial Sequence: Synthetic oligonucleotide
  Antisense Strand to SEQ ID NO: 333939
aucucuaagaccuaaaucc

SEQ ID NO: 333941 - RNA, 19 nt, Artificial Sequence
  Description of Artificial Sequence: Synthetic oligonucleotide
  Sense Strand Starting at position 192 of SEQ ID NO: 318875
ucgaauuucuuggaggaag

SEQ ID NO: 333942 - RNA, 19 nt, Artificial Sequence
  Description of Artificial Sequence: Synthetic oligonucleotide
  Antisense Strand to SEQ ID NO: 333941
cuuccuccaagaaauucga

SEQ ID NO: 333943 - RNA, 19 nt, Artificial Sequence
  Description of Artificial Sequence: Synthetic oligonucleotide
  Sense Strand Starting at position 192 of SEQ ID NO: 318891
aaguguguaauugaaggau

SEQ ID NO: 333944 - RNA, 19 nt, Artificial Sequence
  Description of Artificial Sequence: Synthetic oligonucleotide
  Antisense Strand to SEQ ID NO: 333943
auccuucaauuacacacuu

SEQ ID NO: 333945 - RNA, 19 nt, Artificial Sequence
  Description of Artificial Sequence: Synthetic oligonucleotide
  Sense Strand Starting at position 192 of SEQ ID NO: 318900
auugaaggaucugcaguuu

SEQ ID NO: 333946 - RNA, 19 nt, Artificial Sequence
  Description of Artificial Sequence: Synthetic oligonucleotide
  Antisense Strand to SEQ ID NO: 333945
aaacugcagauccuucaau

SEQ ID NO: 333947 - RNA, 19 nt, Artificial Sequence
  Description of Artificial Sequence: Synthetic oligonucleotide
  Sense Strand Starting at position 192 of SEQ ID NO: 318925
gugguagacauuuguguga

SEQ ID NO: 333948 - RNA, 19 nt, Artificial Sequence
  Description of Artificial Sequence: Synthetic oligonucleotide
  Antisense Strand to SEQ ID NO: 333947
ucacacaaaugucuaccac

SEQ ID NO: 333949 - RNA, 19 nt, Artificial Sequence
  Description of Artificial Sequence: Synthetic oligonucleotide
  Sense Strand Starting at position 192 of SEQ ID NO: 319023
ugagaaaucagagggcuug

SEQ ID NO: 333950 - RNA, 19 nt, Artificial Sequence
  Description of Artificial Sequence: Synthetic oligonucleotide
  Antisense Strand to SEQ ID NO: 333949
caagcccucugauuucuca

SEQ ID NO: 333951 - RNA, 19 nt, Artificial Sequence
  Description of Artificial Sequence: Synthetic oligonucleotide
  Sense Strand Starting at position 193 of SEQ ID NO: 315250
cgcaauauacuggaacauu

SEQ ID NO: 333952 - RNA, 19 nt, Artificial Sequence
  Description of Artificial Sequence: Synthetic oligonucleotide
  Antisense Strand to SEQ ID NO: 333951
aauguuccaguauauugcg

SEQ ID NO: 333953 - RNA, 19 nt, Artificial Sequence
  Description of Artificial Sequence: Synthetic oligonucleotide
  Sense Strand Starting at position 193 of SEQ ID NO: 315271
auguuaugagucugaauac

SEQ ID NO: 333954 - RNA, 19 nt, Artificial Sequence
  Description of Artificial Sequence: Synthetic oligonucleotide
  Antisense Strand to SEQ ID NO: 333953
guauucagacucauaacau

SEQ ID NO: 333955 - RNA, 19 nt, Artificial Sequence
  Description of Artificial Sequence: Synthetic oligonucleotide
  Sense Strand Starting at position 193 of SEQ ID NO: 315340
ucugcagaaguuugaggaa

SEQ ID NO: 333956 - RNA, 19 nt, Artificial Sequence
  Description of Artificial Sequence: Synthetic oligonucleotide
  Antisense Strand to SEQ ID NO: 333955
uuccucaaacuucugcaga

SEQ ID NO: 333957 - RNA, 19 nt, Artificial Sequence
  Description of Artificial Sequence: Synthetic oligonucleotide
  Sense Strand Starting at position 193 of SEQ ID NO: 315950
ggagcaucgauaugacuac

SEQ ID NO: 333958 - RNA, 19 nt, Artificial Sequence
  Description of Artificial Sequence: Synthetic oligonucleotide
  Antisense Strand to SEQ ID NO: 333957
guagucauaucgaugcucc

SEQ ID NO: 333959 - RNA, 19 nt, Artificial Sequence
  Description of Artificial Sequence: Synthetic oligonucleotide
  Sense Strand Starting at position 193 of SEQ ID NO: 315987
uaguaacugcuugagcaaa

SEQ ID NO: 333960 - RNA, 19 nt, Artificial Sequence
  Description of Artificial Sequence: Synthetic oligonucleotide
  Antisense Strand to SEQ ID NO: 333959
uuugcucaagcaguuacua

SEQ ID NO: 333961 - RNA, 19 nt, Artificial Sequence
  Description of Artificial Sequence: Synthetic oligonucleotide
  Sense Strand Starting at position 193 of SEQ ID NO: 315989
guaacugcuugagcaaaga

SEQ ID NO: 333962 - RNA, 19 nt, Artificial Sequence
  Description of Artificial Sequence: Synthetic oligonucleotide
  Antisense Strand to SEQ ID NO: 333961
ucuuugcucaagcaguuac

SEQ ID NO: 333963 - RNA, 19 nt, Artificial Sequence
  Description of Artificial Sequence: Synthetic oligonucleotide
  Sense Strand Starting at position 193 of SEQ ID NO: 316058
uuuauacgugcauaucaga

SEQ ID NO: 333964 - RNA, 19 nt, Artificial Sequence
  Description of Artificial Sequence: Synthetic oligonucleotide
  Antisense Strand to SEQ ID NO: 333963
ucugauaugcacguauaaa

SEQ ID NO: 333965 - RNA, 19 nt, Artificial Sequence
  Description of Artificial Sequence: Synthetic oligonucleotide
  Sense Strand Starting at position 193 of SEQ ID NO: 316235
cugggaaaggucugauuag

SEQ ID NO: 333966 - RNA, 19 nt, Artificial Sequence
  Description of Artificial Sequence: Synthetic oligonucleotide
  Antisense Strand to SEQ ID NO: 333965
cuaaucagaccuuucccag

SEQ ID NO: 333967 - RNA, 19 nt, Artificial Sequence
  Description of Artificial Sequence: Synthetic oligonucleotide
  Sense Strand Starting at position 193 of SEQ ID NO: 316245
ucugauuaggaaugcgaaa

SEQ ID NO: 333968 - RNA, 19 nt, Artificial Sequence
  Description of Artificial Sequence: Synthetic oligonucleotide
  Antisense Strand to SEQ ID NO: 333967
uuucgcauuccuaaucaga

SEQ ID NO: 333969 - RNA, 19 nt, Artificial Sequence
  Description of Artificial Sequence: Synthetic oligonucleotide
  Sense Strand Starting at position 193 of SEQ ID NO: 316247
ugauuaggaaugcgaaauu

SEQ ID NO: 333970 - RNA, 19 nt, Artificial Sequence
  Description of Artificial Sequence: Synthetic oligonucleotide
  Antisense Strand to SEQ ID NO: 333969
aauuucgcauuccuaauca

SEQ ID NO: 333971 - RNA, 19 nt, Artificial Sequence
  Description of Artificial Sequence: Synthetic oligonucleotide
  Sense Strand Starting at position 193 of SEQ ID NO: 316390
ggugaaacgucaccaagaa

SEQ ID NO: 333972 - RNA, 19 nt, Artificial Sequence
  Description of Artificial Sequence: Synthetic oligonucleotide
  Antisense Strand to SEQ ID NO: 333971
uucuuggugacguuucacc

SEQ ID NO: 333973 - RNA, 19 nt, Artificial Sequence
  Description of Artificial Sequence: Synthetic oligonucleotide
  Sense Strand Starting at position 193 of SEQ ID NO: 316581
caaacuugcgagugaugaa

SEQ ID NO: 333974 - RNA, 19 nt, Artificial Sequence
  Description of Artificial Sequence: Synthetic oligonucleotide
  Antisense Strand to SEQ ID NO: 333973
uucaucacucgcaaguuug

SEQ ID NO: 333975 - RNA, 19 nt, Artificial Sequence
  Description of Artificial Sequence: Synthetic oligonucleotide
  Sense Strand Starting at position 193 of SEQ ID NO: 316582
aaacuugcgagugaugaag

SEQ ID NO: 333976 - RNA, 19 nt, Artificial Sequence
  Description of Artificial Sequence: Synthetic oligonucleotide
  Antisense Strand to SEQ ID NO: 333975
cuucaucacucgcaaguuu

SEQ ID NO: 333977 - RNA, 19 nt, Artificial Sequence
  Description of Artificial Sequence: Synthetic oligonucleotide
  Sense Strand Starting at position 193 of SEQ ID NO: 316821
cuaacugucucgucauuuc

SEQ ID NO: 333978 - RNA, 19 nt, Artificial Sequence
  Description of Artificial Sequence: Synthetic oligonucleotide
  Antisense Strand to SEQ ID NO: 333977
gaaaugacgagacaguuag

SEQ ID NO: 333979 - RNA, 19 nt, Artificial Sequence
  Description of Artificial Sequence: Synthetic oligonucleotide
  Sense Strand Starting at position 193 of SEQ ID NO: 316865
ccuccucauccugagguaa

SEQ ID NO: 333980 - RNA, 19 nt, Artificial Sequence
  Description of Artificial Sequence: Synthetic oligonucleotide
  Antisense Strand to SEQ ID NO: 333979
uuaccucaggaugaggagg

SEQ ID NO: 333981 - RNA, 19 nt, Artificial Sequence
  Description of Artificial Sequence: Synthetic oligonucleotide
  Sense Strand Starting at position 193 of SEQ ID NO: 316916
uaaugcuagucauuaagug

SEQ ID NO: 333982 - RNA, 19 nt, Artificial Sequence
  Description of Artificial Sequence: Synthetic oligonucleotide
  Antisense Strand to SEQ ID NO: 333981
cacuuaaugacuagcauua

SEQ ID NO: 333983 - RNA, 19 nt, Artificial Sequence
  Description of Artificial Sequence: Synthetic oligonucleotide
  Sense Strand Starting at position 193 of SEQ ID NO: 316917
aaugcuagucauuaaguga

SEQ ID NO: 333984 - RNA, 19 nt, Artificial Sequence
  Description of Artificial Sequence: Synthetic oligonucleotide
  Antisense Strand to SEQ ID NO: 333983
ucacuuaaugacuagcauu

SEQ ID NO: 333985 - RNA, 19 nt, Artificial Sequence
  Description of Artificial Sequence: Synthetic oligonucleotide
  Sense Strand Starting at position 193 of SEQ ID NO: 316979
ucgaucuucuacccgagaa

SEQ ID NO: 333986 - RNA, 19 nt, Artificial Sequence
  Description of Artificial Sequence: Synthetic oligonucleotide
  Antisense Strand to SEQ ID NO: 333985
uucucggguagaagaucga

SEQ ID NO: 333987 - RNA, 19 nt, Artificial Sequence
  Description of Artificial Sequence: Synthetic oligonucleotide
  Sense Strand Starting at position 193 of SEQ ID NO: 316980
cgaucuucuacccgagaac

SEQ ID NO: 333988 - RNA, 19 nt, Artificial Sequence
  Description of Artificial Sequence: Synthetic oligonucleotide
  Antisense Strand to SEQ ID NO: 333987
guucucggguagaagaucg

SEQ ID NO: 333989 - RNA, 19 nt, Artificial Sequence
  Description of Artificial Sequence: Synthetic oligonucleotide
  Sense Strand Starting at position 193 of SEQ ID NO: 317027
uugggaacguucuccagua

SEQ ID NO: 333990 - RNA, 19 nt, Artificial Sequence
  Description of Artificial Sequence: Synthetic oligonucleotide
  Antisense Strand to SEQ ID NO: 333989
uacuggagaacguucccaa

SEQ ID NO: 333991 - RNA, 19 nt, Artificial Sequence
  Description of Artificial Sequence: Synthetic oligonucleotide
  Sense Strand Starting at position 193 of SEQ ID NO: 317028
ugggaacguucuccaguaa

SEQ ID NO: 333992 - RNA, 19 nt, Artificial Sequence
  Description of Artificial Sequence: Synthetic oligonucleotide
  Antisense Strand to SEQ ID NO: 333991
uuacuggagaacguuccca

SEQ ID NO: 333993 - RNA, 19 nt, Artificial Sequence
  Description of Artificial Sequence: Synthetic oligonucleotide
  Sense Strand Starting at position 193 of SEQ ID NO: 317029
gggaacguucuccaguaaa

SEQ ID NO: 333994 - RNA, 19 nt, Artificial Sequence
  Description of Artificial Sequence: Synthetic oligonucleotide
  Antisense Strand to SEQ ID NO: 333993
uuuacuggagaacguuccc

SEQ ID NO: 333995 - RNA, 19 nt, Artificial Sequence
  Description of Artificial Sequence: Synthetic oligonucleotide
  Sense Strand Starting at position 193 of SEQ ID NO: 317032
aacguucuccaguaaagac

SEQ ID NO: 333996 - RNA, 19 nt, Artificial Sequence
  Description of Artificial Sequence: Synthetic oligonucleotide
  Antisense Strand to SEQ ID NO: 333995
gucuuuacuggagaacguu

SEQ ID NO: 333997 - RNA, 19 nt, Artificial Sequence
  Description of Artificial Sequence: Synthetic oligonucleotide
  Sense Strand Starting at position 193 of SEQ ID NO: 317223
gcgcuacgccaauuggaua

SEQ ID NO: 333998 - RNA, 19 nt, Artificial Sequence
  Description of Artificial Sequence: Synthetic oligonucleotide
  Antisense Strand to SEQ ID NO: 333997
uauccaauuggcguagcgc

SEQ ID NO: 333999 - RNA, 19 nt, Artificial Sequence
  Description of Artificial Sequence: Synthetic oligonucleotide
  Sense Strand Starting at position 193 of SEQ ID NO: 317410
cccggcuuaugagucuaaa

SEQ ID NO: 334000 - RNA, 19 nt, Artificial Sequence
  Description of Artificial Sequence: Synthetic oligonucleotide
  Antisense Strand to SEQ ID NO: 333999
uuuagacucauaagccggg

SEQ ID NO: 334001 - RNA, 19 nt, Artificial Sequence
  Description of Artificial Sequence: Synthetic oligonucleotide
  Sense Strand Starting at position 193 of SEQ ID NO: 317413
ggcuuaugagucuaaagcu

SEQ ID NO: 334002 - RNA, 19 nt, Artificial Sequence
  Description of Artificial Sequence: Synthetic oligonucleotide
  Antisense Strand to SEQ ID NO: 334001
agcuuuagacucauaagcc

SEQ ID NO: 334003 - RNA, 19 nt, Artificial Sequence
  Description of Artificial Sequence: Synthetic oligonucleotide
  Sense Strand Starting at position 193 of SEQ ID NO: 317573
guaaguuacagacauugua

SEQ ID NO: 334004 - RNA, 19 nt, Artificial Sequence
  Description of Artificial Sequence: Synthetic oligonucleotide
  Antisense Strand to SEQ ID NO: 334003
uacaaugucuguaacuuac

SEQ ID NO: 334005 - RNA, 19 nt, Artificial Sequence
  Description of Artificial Sequence: Synthetic oligonucleotide
  Sense Strand Starting at position 193 of SEQ ID NO: 317576
aguuacagacauuguaaca

SEQ ID NO: 334006 - RNA, 19 nt, Artificial Sequence
  Description of Artificial Sequence: Synthetic oligonucleotide
  Antisense Strand to SEQ ID NO: 334005
uguuacaaugucuguaacu

SEQ ID NO: 334007 - RNA, 19 nt, Artificial Sequence
  Description of Artificial Sequence: Synthetic oligonucleotide
  Sense Strand Starting at position 193 of SEQ ID NO: 317660
aagaauagauguucugcua

SEQ ID NO: 334008 - RNA, 19 nt, Artificial Sequence
  Description of Artificial Sequence: Synthetic oligonucleotide
  Antisense Strand to SEQ ID NO: 334007
uagcagaacaucuauucuu

SEQ ID NO: 334009 - RNA, 19 nt, Artificial Sequence
  Description of Artificial Sequence: Synthetic oligonucleotide
  Sense Strand Starting at position 193 of SEQ ID NO: 317873
gcaagagccgaucaaggau

SEQ ID NO: 334010 - RNA, 19 nt, Artificial Sequence
  Description of Artificial Sequence: Synthetic oligonucleotide
  Antisense Strand to SEQ ID NO: 334009
auccuugaucggcucuugc

SEQ ID NO: 334011 - RNA, 19 nt, Artificial Sequence
  Description of Artificial Sequence: Synthetic oligonucleotide
  Sense Strand Starting at position 193 of SEQ ID NO: 317904
uugguuguuaaguaucuuu

SEQ ID NO: 334012 - RNA, 19 nt, Artificial Sequence
  Description of Artificial Sequence: Synthetic oligonucleotide
  Antisense Strand to SEQ ID NO: 334011
aaagauacuuaacaaccaa

SEQ ID NO: 334013 - RNA, 19 nt, Artificial Sequence
  Description of Artificial Sequence: Synthetic oligonucleotide
  Sense Strand Starting at position 193 of SEQ ID NO: 318050
gugacaauuccaugauaca

SEQ ID NO: 334014 - RNA, 19 nt, Artificial Sequence
  Description of Artificial Sequence: Synthetic oligonucleotide
  Antisense Strand to SEQ ID NO: 334013
uguaucauggaauugucac

SEQ ID NO: 334015 - RNA, 19 nt, Artificial Sequence
  Description of Artificial Sequence: Synthetic oligonucleotide
  Sense Strand Starting at position 193 of SEQ ID NO: 318073
uguggaauacgccaguaua

SEQ ID NO: 334016 - RNA, 19 nt, Artificial Sequence
  Description of Artificial Sequence: Synthetic oligonucleotide
  Antisense Strand to SEQ ID NO: 334015
uauacuggcguauuccaca

SEQ ID NO: 334017 - RNA, 19 nt, Artificial Sequence
  Description of Artificial Sequence: Synthetic oligonucleotide
  Sense Strand Starting at position 193 of SEQ ID NO: 318340
ucuguuuaugauugaauag

SEQ ID NO: 334018 - RNA, 19 nt, Artificial Sequence
  Description of Artificial Sequence: Synthetic oligonucleotide
  Antisense Strand to SEQ ID NO: 334017
cuauucaaucauaaacaga

SEQ ID NO: 334019 - RNA, 19 nt, Artificial Sequence
  Description of Artificial Sequence: Synthetic oligonucleotide
  Sense Strand Starting at position 193 of SEQ ID NO: 318458
uguagugaacacugaugua

SEQ ID NO: 334020 - RNA, 19 nt, Artificial Sequence
  Description of Artificial Sequence: Synthetic oligonucleotide
  Antisense Strand to SEQ ID NO: 334019
uacaucaguguucacuaca

SEQ ID NO: 334021 - RNA, 19 nt, Artificial Sequence
  Description of Artificial Sequence: Synthetic oligonucleotide
  Sense Strand Starting at position 193 of SEQ ID NO: 318735
ccuacauugguacgaacau

SEQ ID NO: 334022 - RNA, 19 nt, Artificial Sequence
  Description of Artificial Sequence: Synthetic oligonucleotide
  Antisense Strand to SEQ ID NO: 334021
auguucguaccaauguagg

SEQ ID NO: 334023 - RNA, 19 nt, Artificial Sequence
  Description of Artificial Sequence: Synthetic oligonucleotide
  Sense Strand Starting at position 193 of SEQ ID NO: 318995
augugaaucugcuuaauuc

SEQ ID NO: 334024 - RNA, 19 nt, Artificial Sequence
  Description of Artificial Sequence: Synthetic oligonucleotide
  Antisense Strand to SEQ ID NO: 334023
gaauuaagcagauucacau

SEQ ID NO: 334025 - RNA, 19 nt, Artificial Sequence
  Description of Artificial Sequence: Synthetic oligonucleotide
  Sense Strand Starting at position 193 of SEQ ID NO: 319041
aggagaacguccuuaacuu

SEQ ID NO: 334026 - RNA, 19 nt, Artificial Sequence
  Description of Artificial Sequence: Synthetic oligonucleotide
  Antisense Strand to SEQ ID NO: 334025
aaguuaaggacguucuccu

SEQ ID NO: 334027 - RNA, 19 nt, Artificial Sequence
  Description of Artificial Sequence: Synthetic oligonucleotide
  Sense Strand Starting at position 193 of SEQ ID NO: 319042
ggagaacguccuuaacuug

SEQ ID NO: 334028 - RNA, 19 nt, Artificial Sequence
  Description of Artificial Sequence: Synthetic oligonucleotide
  Antisense Strand to SEQ ID NO: 334027
caaguuaaggacguucucc

SEQ ID NO: 334029 - RNA, 19 nt, Artificial Sequence
  Description of Artificial Sequence: Synthetic oligonucleotide
  Sense Strand Starting at position 193 of SEQ ID NO: 319045
gaacguccuuaacuugaua

SEQ ID NO: 334030 - RNA, 19 nt, Artificial Sequence
  Description of Artificial Sequence: Synthetic oligonucleotide
  Antisense Strand to SEQ ID NO: 334029
uaucaaguuaaggacguuc

SEQ ID NO: 334031 - RNA, 19 nt, Artificial Sequence
  Description of Artificial Sequence: Synthetic oligonucleotide
  Sense Strand Starting at position 194 of SEQ ID NO: 315240
ugaggaaucuggccagagu

SEQ ID NO: 334032 - RNA, 19 nt, Artificial Sequence
  Description of Artificial Sequence: Synthetic oligonucleotide
  Antisense Strand to SEQ ID NO: 334031
acucuggccagauuccuca

SEQ ID NO: 334033 - RNA, 19 nt, Artificial Sequence
  Description of Artificial Sequence: Synthetic oligonucleotide
  Sense Strand Starting at position 194 of SEQ ID NO: 315259
gagacacuuccugguguaa

SEQ ID NO: 334034 - RNA, 19 nt, Artificial Sequence
  Description of Artificial Sequence: Synthetic oligonucleotide
  Antisense Strand to SEQ ID NO: 334033
uuacaccaggaagugucuc

SEQ ID NO: 334035 - RNA, 19 nt, Artificial Sequence
  Description of Artificial Sequence: Synthetic oligonucleotide
  Sense Strand Starting at position 194 of SEQ ID NO: 315405
auuugagccugguacauuu

SEQ ID NO: 334036 - RNA, 19 nt, Artificial Sequence
  Description of Artificial Sequence: Synthetic oligonucleotide
  Antisense Strand to SEQ ID NO: 334035
aaauguaccaggcucaaau

SEQ ID NO: 334037 - RNA, 19 nt, Artificial Sequence
  Description of Artificial Sequence: Synthetic oligonucleotide
  Sense Strand Starting at position 194 of SEQ ID NO: 315462
auuacucagcucugggaau

SEQ ID NO: 334038 - RNA, 19 nt, Artificial Sequence
  Description of Artificial Sequence: Synthetic oligonucleotide
  Antisense Strand to SEQ ID NO: 334037
auucccagagcugaguaau

SEQ ID NO: 334039 - RNA, 19 nt, Artificial Sequence
  Description of Artificial Sequence: Synthetic oligonucleotide
  Sense Strand Starting at position 194 of SEQ ID NO: 315572
ucaguuugccaauggguca

SEQ ID NO: 334040 - RNA, 19 nt, Artificial Sequence
  Description of Artificial Sequence: Synthetic oligonucleotide
  Antisense Strand to SEQ ID NO: 334039
ugacccauuggcaaacuga

SEQ ID NO: 334041 - RNA, 19 nt, Artificial Sequence
  Description of Artificial Sequence: Synthetic oligonucleotide
  Sense Strand Starting at position 194 of SEQ ID NO: 315594
aaggauuccugggagagac

SEQ ID NO: 334042 - RNA, 19 nt, Artificial Sequence
  Description of Artificial Sequence: Synthetic oligonucleotide
  Antisense Strand to SEQ ID NO: 334041
gucucucccaggaauccuu

SEQ ID NO: 334043 - RNA, 19 nt, Artificial Sequence
  Description of Artificial Sequence: Synthetic oligonucleotide
  Sense Strand Starting at position 194 of SEQ ID NO: 315618
cuagcuaggauaugaguga

SEQ ID NO: 334044 - RNA, 19 nt, Artificial Sequence
  Description of Artificial Sequence: Synthetic oligonucleotide
  Antisense Strand to SEQ ID NO: 334043
ucacucauauccuagcuag

SEQ ID NO: 334045 - RNA, 19 nt, Artificial Sequence
  Description of Artificial Sequence: Synthetic oligonucleotide
  Sense Strand Starting at position 194 of SEQ ID NO: 315690
auggcuccaaagugagaaa

SEQ ID NO: 334046 - RNA, 19 nt, Artificial Sequence
  Description of Artificial Sequence: Synthetic oligonucleotide
  Antisense Strand to SEQ ID NO: 334045
uuucucacuuuggagccau

SEQ ID NO: 334047 - RNA, 19 nt, Artificial Sequence
  Description of Artificial Sequence: Synthetic oligonucleotide
  Sense Strand Starting at position 194 of SEQ ID NO: 315943
uuucuagcuccagaggcau

SEQ ID NO: 334048 - RNA, 19 nt, Artificial Sequence
  Description of Artificial Sequence: Synthetic oligonucleotide
  Antisense Strand to SEQ ID NO: 334047
augccucuggagcuagaaa

SEQ ID NO: 334049 - RNA, 19 nt, Artificial Sequence
  Description of Artificial Sequence: Synthetic oligonucleotide
  Sense Strand Starting at position 194 of SEQ ID NO: 315968
cuaaucaagagucggacuu

SEQ ID NO: 334050 - RNA, 19 nt, Artificial Sequence
  Description of Artificial Sequence: Synthetic oligonucleotide
  Antisense Strand to SEQ ID NO: 334049
aaguccgacucuugauuag

SEQ ID NO: 334051 - RNA, 19 nt, Artificial Sequence
  Description of Artificial Sequence: Synthetic oligonucleotide
  Sense Strand Starting at position 194 of SEQ ID NO: 315969
uaaucaagagucggacuuu

SEQ ID NO: 334052 - RNA, 19 nt, Artificial Sequence
  Description of Artificial Sequence: Synthetic oligonucleotide
  Antisense Strand to SEQ ID NO: 334051
aaaguccgacucuugauua

SEQ ID NO: 334053 - RNA, 19 nt, Artificial Sequence
  Description of Artificial Sequence: Synthetic oligonucleotide
  Sense Strand Starting at position 194 of SEQ ID NO: 316029
augacaucucucuaggcaa

SEQ ID NO: 334054 - RNA, 19 nt, Artificial Sequence
  Description of Artificial Sequence: Synthetic oligonucleotide
  Antisense Strand to SEQ ID NO: 334053
uugccuagagagaugucau

SEQ ID NO: 334055 - RNA, 19 nt, Artificial Sequence
  Description of Artificial Sequence: Synthetic oligonucleotide
  Sense Strand Starting at position 194 of SEQ ID NO: 316252
agcuguggacaucaaucau

SEQ ID NO: 334056 - RNA, 19 nt, Artificial Sequence
  Description of Artificial Sequence: Synthetic oligonucleotide
  Antisense Strand to SEQ ID NO: 334055
augauugauguccacagcu

SEQ ID NO: 334057 - RNA, 19 nt, Artificial Sequence
  Description of Artificial Sequence: Synthetic oligonucleotide
  Sense Strand Starting at position 194 of SEQ ID NO: 316415
gcucuaaugcagcagauga

SEQ ID NO: 334058 - RNA, 19 nt, Artificial Sequence
  Description of Artificial Sequence: Synthetic oligonucleotide
  Antisense Strand to SEQ ID NO: 334057
ucaucugcugcauuagagc

SEQ ID NO: 334059 - RNA, 19 nt, Artificial Sequence
  Description of Artificial Sequence: Synthetic oligonucleotide
  Sense Strand Starting at position 194 of SEQ ID NO: 316464
uagggcucuuuguuuggaa

SEQ ID NO: 334060 - RNA, 19 nt, Artificial Sequence
  Description of Artificial Sequence: Synthetic oligonucleotide
  Antisense Strand to SEQ ID NO: 334059
uuccaaacaaagagcccua

SEQ ID NO: 334061 - RNA, 19 nt, Artificial Sequence
  Description of Artificial Sequence: Synthetic oligonucleotide
  Sense Strand Starting at position 194 of SEQ ID NO: 316465
agggcucuuuguuuggaaa

SEQ ID NO: 334062 - RNA, 19 nt, Artificial Sequence
  Description of Artificial Sequence: Synthetic oligonucleotide
  Antisense Strand to SEQ ID NO: 334061
uuuccaaacaaagagcccu

SEQ ID NO: 334063 - RNA, 19 nt, Artificial Sequence
  Description of Artificial Sequence: Synthetic oligonucleotide
  Sense Strand Starting at position 194 of SEQ ID NO: 316466
gggcucuuuguuuggaaac

SEQ ID NO: 334064 - RNA, 19 nt, Artificial Sequence
  Description of Artificial Sequence: Synthetic oligonucleotide
  Antisense Strand to SEQ ID NO: 334063
guuuccaaacaaagagccc

SEQ ID NO: 334065 - RNA, 19 nt, Artificial Sequence
  Description of Artificial Sequence: Synthetic oligonucleotide
  Sense Strand Starting at position 194 of SEQ ID NO: 316477
uuggaaacauucuuggauc

SEQ ID NO: 334066 - RNA, 19 nt, Artificial Sequence
  Description of Artificial Sequence: Synthetic oligonucleotide
  Antisense Strand to SEQ ID NO: 334065
gauccaagaauguuuccaa

SEQ ID NO: 334067 - RNA, 19 nt, Artificial Sequence
  Description of Artificial Sequence: Synthetic oligonucleotide
  Sense Strand Starting at position 194 of SEQ ID NO: 316554
acaugacuuuaguucuuua

SEQ ID NO: 334068 - RNA, 19 nt, Artificial Sequence
  Description of Artificial Sequence: Synthetic oligonucleotide
  Antisense Strand to SEQ ID NO: 334067
uaaagaacuaaagucaugu

SEQ ID NO: 334069 - RNA, 19 nt, Artificial Sequence
  Description of Artificial Sequence: Synthetic oligonucleotide
  Sense Strand Starting at position 194 of SEQ ID NO: 316602
agagcugugaacuguagaa

SEQ ID NO: 334070 - RNA, 19 nt, Artificial Sequence
  Description of Artificial Sequence: Synthetic oligonucleotide
  Antisense Strand to SEQ ID NO: 334069
uucuacaguucacagcucu

SEQ ID NO: 334071 - RNA, 19 nt, Artificial Sequence
  Description of Artificial Sequence: Synthetic oligonucleotide
  Sense Strand Starting at position 194 of SEQ ID NO: 316604
agcugugaacuguagaaga

SEQ ID NO: 334072 - RNA, 19 nt, Artificial Sequence
  Description of Artificial Sequence: Synthetic oligonucleotide
  Antisense Strand to SEQ ID NO: 334071
ucuucuacaguucacagcu

SEQ ID NO: 334073 - RNA, 19 nt, Artificial Sequence
  Description of Artificial Sequence: Synthetic oligonucleotide
  Sense Strand Starting at position 194 of SEQ ID NO: 316727
cugggcuuucgagaagcuu

SEQ ID NO: 334074 - RNA, 19 nt, Artificial Sequence
  Description of Artificial Sequence: Synthetic oligonucleotide
  Antisense Strand to SEQ ID NO: 334073
aagcuucucgaaagcccag

SEQ ID NO: 334075 - RNA, 19 nt, Artificial Sequence
  Description of Artificial Sequence: Synthetic oligonucleotide
  Sense Strand Starting at position 194 of SEQ ID NO: 316820
gaagauagggcgugagaga

SEQ ID NO: 334076 - RNA, 19 nt, Artificial Sequence
  Description of Artificial Sequence: Synthetic oligonucleotide
  Antisense Strand to SEQ ID NO: 334075
ucucucacgcccuaucuuc

SEQ ID NO: 334077 - RNA, 19 nt, Artificial Sequence
  Description of Artificial Sequence: Synthetic oligonucleotide
  Sense Strand Starting at position 194 of SEQ ID NO: 316940
gcgaaauguacagggugaa

SEQ ID NO: 334078 - RNA, 19 nt, Artificial Sequence
  Description of Artificial Sequence: Synthetic oligonucleotide
  Antisense Strand to SEQ ID NO: 334077
uucacccuguacauuucgc

SEQ ID NO: 334079 - RNA, 19 nt, Artificial Sequence
  Description of Artificial Sequence: Synthetic oligonucleotide
  Sense Strand Starting at position 194 of SEQ ID NO: 317388
ugugcagaagucugaagaa

SEQ ID NO: 334080 - RNA, 19 nt, Artificial Sequence
  Description of Artificial Sequence: Synthetic oligonucleotide
  Antisense Strand to SEQ ID NO: 334079
uucuucagacuucugcaca

SEQ ID NO: 334081 - RNA, 19 nt, Artificial Sequence
  Description of Artificial Sequence: Synthetic oligonucleotide
  Sense Strand Starting at position 194 of SEQ ID NO: 317676
aggguaucuucuccgagga

SEQ ID NO: 334082 - RNA, 19 nt, Artificial Sequence
  Description of Artificial Sequence: Synthetic oligonucleotide
  Antisense Strand to SEQ ID NO: 334081
uccucggagaagauacccu

SEQ ID NO: 334083 - RNA, 19 nt, Artificial Sequence
  Description of Artificial Sequence: Synthetic oligonucleotide
  Sense Strand Starting at position 194 of SEQ ID NO: 317677
ggguaucuucuccgaggac

SEQ ID NO: 334084 - RNA, 19 nt, Artificial Sequence
  Description of Artificial Sequence: Synthetic oligonucleotide
  Antisense Strand to SEQ ID NO: 334083
guccucggagaagauaccc

SEQ ID NO: 334085 - RNA, 19 nt, Artificial Sequence
  Description of Artificial Sequence: Synthetic oligonucleotide
  Sense Strand Starting at position 194 of SEQ ID NO: 317821
cacugugggccugaguaua

SEQ ID NO: 334086 - RNA, 19 nt, Artificial Sequence
  Description of Artificial Sequence: Synthetic oligonucleotide
  Antisense Strand to SEQ ID NO: 334085
uauacucaggcccacagug

SEQ ID NO: 334087 - RNA, 19 nt, Artificial Sequence
  Description of Artificial Sequence: Synthetic oligonucleotide
  Sense Strand Starting at position 194 of SEQ ID NO: 317833
gaguauacuugcucaggca

SEQ ID NO: 334088 - RNA, 19 nt, Artificial Sequence
  Description of Artificial Sequence: Synthetic oligonucleotide
  Antisense Strand to SEQ ID NO: 334087
ugccugagcaaguauacuc

SEQ ID NO: 334089 - RNA, 19 nt, Artificial Sequence
  Description of Artificial Sequence: Synthetic oligonucleotide
  Sense Strand Starting at position 194 of SEQ ID NO: 318043
cugugacuucagugagagg

SEQ ID NO: 334090 - RNA, 19 nt, Artificial Sequence
  Description of Artificial Sequence: Synthetic oligonucleotide
  Antisense Strand to SEQ ID NO: 334089
ccucucacugaagucacag

SEQ ID NO: 334091 - RNA, 19 nt, Artificial Sequence
  Description of Artificial Sequence: Synthetic oligonucleotide
  Sense Strand Starting at position 194 of SEQ ID NO: 318099
uagucagagguuugcaagu

SEQ ID NO: 334092 - RNA, 19 nt, Artificial Sequence
  Description of Artificial Sequence: Synthetic oligonucleotide
  Antisense Strand to SEQ ID NO: 334091
acuugcaaaccucugacua

SEQ ID NO: 334093 - RNA, 19 nt, Artificial Sequence
  Description of Artificial Sequence: Synthetic oligonucleotide
  Sense Strand Starting at position 194 of SEQ ID NO: 318145
ugguuucauggaugaggua

SEQ ID NO: 334094 - RNA, 19 nt, Artificial Sequence
  Description of Artificial Sequence: Synthetic oligonucleotide
  Antisense Strand to SEQ ID NO: 334093
uaccucauccaugaaacca

SEQ ID NO: 334095 - RNA, 19 nt, Artificial Sequence
  Description of Artificial Sequence: Synthetic oligonucleotide
  Sense Strand Starting at position 194 of SEQ ID NO: 318204
gcagaaauauugccacaac

SEQ ID NO: 334096 - RNA, 19 nt, Artificial Sequence
  Description of Artificial Sequence: Synthetic oligonucleotide
  Antisense Strand to SEQ ID NO: 334095
guuguggcaauauuucugc

SEQ ID NO: 334097 - RNA, 19 nt, Artificial Sequence
  Description of Artificial Sequence: Synthetic oligonucleotide
  Sense Strand Starting at position 194 of SEQ ID NO: 318243
aguggugccuuauuuggua

SEQ ID NO: 334098 - RNA, 19 nt, Artificial Sequence
  Description of Artificial Sequence: Synthetic oligonucleotide
  Antisense Strand to SEQ ID NO: 334097
uaccaaauaaggcaccacu

SEQ ID NO: 334099 - RNA, 19 nt, Artificial Sequence
  Description of Artificial Sequence: Synthetic oligonucleotide
  Sense Strand Starting at position 194 of SEQ ID NO: 318709
ggccguccaugguugaaga

SEQ ID NO: 334100 - RNA, 19 nt, Artificial Sequence
  Description of Artificial Sequence: Synthetic oligonucleotide
  Antisense Strand to SEQ ID NO: 334099
ucuucaaccauggacggcc

SEQ ID NO: 334101 - RNA, 19 nt, Artificial Sequence
  Description of Artificial Sequence: Synthetic oligonucleotide
  Sense Strand Starting at position 194 of SEQ ID NO: 318711
ccguccaugguugaagauu

SEQ ID NO: 334102 - RNA, 19 nt, Artificial Sequence
  Description of Artificial Sequence: Synthetic oligonucleotide
  Antisense Strand to SEQ ID NO: 334101
aaucuucaaccauggacgg

SEQ ID NO: 334103 - RNA, 19 nt, Artificial Sequence
  Description of Artificial Sequence: Synthetic oligonucleotide
  Sense Strand Starting at position 194 of SEQ ID NO: 318910
uggugauguucagcucaga

SEQ ID NO: 334104 - RNA, 19 nt, Artificial Sequence
  Description of Artificial Sequence: Synthetic oligonucleotide
  Antisense Strand to SEQ ID NO: 334103
ucugagcugaacaucacca

SEQ ID NO: 334105 - RNA, 19 nt, Artificial Sequence
  Description of Artificial Sequence: Synthetic oligonucleotide
  Sense Strand Starting at position 194 of SEQ ID NO: 318981
gugucccuuccagacauga

SEQ ID NO: 334106 - RNA, 19 nt, Artificial Sequence
  Description of Artificial Sequence: Synthetic oligonucleotide
  Antisense Strand to SEQ ID NO: 334105
ucaugucuggaagggacac

SEQ ID NO: 334107 - RNA, 19 nt, Artificial Sequence
  Description of Artificial Sequence: Synthetic oligonucleotide
  Sense Strand Starting at position 194 of SEQ ID NO: 319013
gauagagauuagggauaag

SEQ ID NO: 334108 - RNA, 19 nt, Artificial Sequence
  Description of Artificial Sequence: Synthetic oligonucleotide
  Antisense Strand to SEQ ID NO: 334107
cuuaucccuaaucucuauc

SEQ ID NO: 334109 - RNA, 19 nt, Artificial Sequence
  Description of Artificial Sequence: Synthetic oligonucleotide
  Sense Strand Starting at position 194 of SEQ ID NO: 319095
caguaugcccuagauggaa

SEQ ID NO: 334110 - RNA, 19 nt, Artificial Sequence
  Description of Artificial Sequence: Synthetic oligonucleotide
  Antisense Strand to SEQ ID NO: 334109
uuccaucuagggcauacug

SEQ ID NO: 334111 - RNA, 19 nt, Artificial Sequence
  Description of Artificial Sequence: Synthetic oligonucleotide
  Sense Strand Starting at position 195 of SEQ ID NO: 315325
agcucaucagcuuagggau

SEQ ID NO: 334112 - RNA, 19 nt, Artificial Sequence
  Description of Artificial Sequence: Synthetic oligonucleotide
  Antisense Strand to SEQ ID NO: 334111
aucccuaagcugaugagcu

SEQ ID NO: 334113 - RNA, 19 nt, Artificial Sequence
  Description of Artificial Sequence: Synthetic oligonucleotide
  Sense Strand Starting at position 195 of SEQ ID NO: 315610
acauucuugaccgagcuga

SEQ ID NO: 334114 - RNA, 19 nt, Artificial Sequence
  Description of Artificial Sequence: Synthetic oligonucleotide
  Antisense Strand to SEQ ID NO: 334113
ucagcucggucaagaaugu

SEQ ID NO: 334115 - RNA, 19 nt, Artificial Sequence
  Description of Artificial Sequence: Synthetic oligonucleotide
  Sense Strand Starting at position 195 of SEQ ID NO: 315785
aagguuugguuccuccaga

SEQ ID NO: 334116 - RNA, 19 nt, Artificial Sequence
  Description of Artificial Sequence: Synthetic oligonucleotide
  Antisense Strand to SEQ ID NO: 334115
ucuggaggaaccaaaccuu

SEQ ID NO: 334117 - RNA, 19 nt, Artificial Sequence
  Description of Artificial Sequence: Synthetic oligonucleotide
  Sense Strand Starting at position 195 of SEQ ID NO: 315786
agguuugguuccuccagag

SEQ ID NO: 334118 - RNA, 19 nt, Artificial Sequence
  Description of Artificial Sequence: Synthetic oligonucleotide
  Antisense Strand to SEQ ID NO: 334117
cucuggaggaaccaaaccu

SEQ ID NO: 334119 - RNA, 19 nt, Artificial Sequence
  Description of Artificial Sequence: Synthetic oligonucleotide
  Sense Strand Starting at position 195 of SEQ ID NO: 315800
cagaguggaucucucaauu

SEQ ID NO: 334120 - RNA, 19 nt, Artificial Sequence
  Description of Artificial Sequence: Synthetic oligonucleotide
  Antisense Strand to SEQ ID NO: 334119
aauugagagauccacucug

SEQ ID NO: 334121 - RNA, 19 nt, Artificial Sequence
  Description of Artificial Sequence: Synthetic oligonucleotide
  Sense Strand Starting at position 195 of SEQ ID NO: 315830
cccagugugccucagaaac

SEQ ID NO: 334122 - RNA, 19 nt, Artificial Sequence
  Description of Artificial Sequence: Synthetic oligonucleotide
  Antisense Strand to SEQ ID NO: 334121
guuucugaggcacacuggg

SEQ ID NO: 334123 - RNA, 19 nt, Artificial Sequence
  Description of Artificial Sequence: Synthetic oligonucleotide
  Sense Strand Starting at position 195 of SEQ ID NO: 315930
gguucugauccacacacua

SEQ ID NO: 334124 - RNA, 19 nt, Artificial Sequence
  Description of Artificial Sequence: Synthetic oligonucleotide
  Antisense Strand to SEQ ID NO: 334123
uaguguguggaucagaacc

SEQ ID NO: 334125 - RNA, 19 nt, Artificial Sequence
  Description of Artificial Sequence: Synthetic oligonucleotide
  Sense Strand Starting at position 195 of SEQ ID NO: 316074
ggaaacagagcuggucauu

SEQ ID NO: 334126 - RNA, 19 nt, Artificial Sequence
  Description of Artificial Sequence: Synthetic oligonucleotide
  Antisense Strand to SEQ ID NO: 334125
aaugaccagcucuguuucc

SEQ ID NO: 334127 - RNA, 19 nt, Artificial Sequence
  Description of Artificial Sequence: Synthetic oligonucleotide
  Sense Strand Starting at position 195 of SEQ ID NO: 316196
cccuauaauuuguuagugu

SEQ ID NO: 334128 - RNA, 19 nt, Artificial Sequence
  Description of Artificial Sequence: Synthetic oligonucleotide
  Antisense Strand to SEQ ID NO: 334127
acacuaacaaauuauaggg

SEQ ID NO: 334129 - RNA, 19 nt, Artificial Sequence
  Description of Artificial Sequence: Synthetic oligonucleotide
  Sense Strand Starting at position 195 of SEQ ID NO: 316204
uuuguuaguguuuaacaga

SEQ ID NO: 334130 - RNA, 19 nt, Artificial Sequence
  Description of Artificial Sequence: Synthetic oligonucleotide
  Antisense Strand to SEQ ID NO: 334129
ucuguuaaacacuaacaaa

SEQ ID NO: 334131 - RNA, 19 nt, Artificial Sequence
  Description of Artificial Sequence: Synthetic oligonucleotide
  Sense Strand Starting at position 195 of SEQ ID NO: 316211
guguuuaacagagacaguu

SEQ ID NO: 334132 - RNA, 19 nt, Artificial Sequence
  Description of Artificial Sequence: Synthetic oligonucleotide
  Antisense Strand to SEQ ID NO: 334131
aacugucucuguuaaacac

SEQ ID NO: 334133 - RNA, 19 nt, Artificial Sequence
  Description of Artificial Sequence: Synthetic oligonucleotide
  Sense Strand Starting at position 195 of SEQ ID NO: 316228
uuacauuaagcaggaaauc

SEQ ID NO: 334134 - RNA, 19 nt, Artificial Sequence
  Description of Artificial Sequence: Synthetic oligonucleotide
  Antisense Strand to SEQ ID NO: 334133
gauuuccugcuuaauguaa

SEQ ID NO: 334135 - RNA, 19 nt, Artificial Sequence
  Description of Artificial Sequence: Synthetic oligonucleotide
  Sense Strand Starting at position 195 of SEQ ID NO: 316424
ggcucauagagauggaaug

SEQ ID NO: 334136 - RNA, 19 nt, Artificial Sequence
  Description of Artificial Sequence: Synthetic oligonucleotide
  Antisense Strand to SEQ ID NO: 334135
cauuccaucucuaugagcc

SEQ ID NO: 334137 - RNA, 19 nt, Artificial Sequence
  Description of Artificial Sequence: Synthetic oligonucleotide
  Sense Strand Starting at position 195 of SEQ ID NO: 316477
ccaggacaguuuccuagau

SEQ ID NO: 334138 - RNA, 19 nt, Artificial Sequence
  Description of Artificial Sequence: Synthetic oligonucleotide
  Antisense Strand to SEQ ID NO: 334137
aucuaggaaacuguccugg

SEQ ID NO: 334139 - RNA, 19 nt, Artificial Sequence
  Description of Artificial Sequence: Synthetic oligonucleotide
  Sense Strand Starting at position 195 of SEQ ID NO: 316708
ucuccauuugucugcaguu

SEQ ID NO: 334140 - RNA, 19 nt, Artificial Sequence
  Description of Artificial Sequence: Synthetic oligonucleotide
  Antisense Strand to SEQ ID NO: 334139
aacugcagacaaauggaga

SEQ ID NO: 334141 - RNA, 19 nt, Artificial Sequence
  Description of Artificial Sequence: Synthetic oligonucleotide
  Sense Strand Starting at position 195 of SEQ ID NO: 316709
cuccauuugucugcaguuu

SEQ ID NO: 334142 - RNA, 19 nt, Artificial Sequence
  Description of Artificial Sequence: Synthetic oligonucleotide
  Antisense Strand to SEQ ID NO: 334141
aaacugcagacaaauggag

SEQ ID NO: 334143 - RNA, 19 nt, Artificial Sequence
  Description of Artificial Sequence: Synthetic oligonucleotide
  Sense Strand Starting at position 195 of SEQ ID NO: 316884
cuuuguuuccgggcguaaa

SEQ ID NO: 334144 - RNA, 19 nt, Artificial Sequence
  Description of Artificial Sequence: Synthetic oligonucleotide
  Antisense Strand to SEQ ID NO: 334143
uuuacgcccggaaacaaag

SEQ ID NO: 334145 - RNA, 19 nt, Artificial Sequence
  Description of Artificial Sequence: Synthetic oligonucleotide
  Sense Strand Starting at position 195 of SEQ ID NO: 317600
gggaucauauuacuguguu

SEQ ID NO: 334146 - RNA, 19 nt, Artificial Sequence
  Description of Artificial Sequence: Synthetic oligonucleotide
  Antisense Strand to SEQ ID NO: 334145
aacacaguaauaugauccc

SEQ ID NO: 334147 - RNA, 19 nt, Artificial Sequence
  Description of Artificial Sequence: Synthetic oligonucleotide
  Sense Strand Starting at position 195 of SEQ ID NO: 317722
caggcauuaugaucucuag

SEQ ID NO: 334148 - RNA, 19 nt, Artificial Sequence
  Description of Artificial Sequence: Synthetic oligonucleotide
  Antisense Strand to SEQ ID NO: 334147
cuagagaucauaaugccug

SEQ ID NO: 334149 - RNA, 19 nt, Artificial Sequence
  Description of Artificial Sequence: Synthetic oligonucleotide
  Sense Strand Starting at position 195 of SEQ ID NO: 317840
agagacuuuagaugucuga

SEQ ID NO: 334150 - RNA, 19 nt, Artificial Sequence
  Description of Artificial Sequence: Synthetic oligonucleotide
  Antisense Strand to SEQ ID NO: 334149
ucagacaucuaaagucucu

SEQ ID NO: 334151 - RNA, 19 nt, Artificial Sequence
  Description of Artificial Sequence: Synthetic oligonucleotide
  Sense Strand Starting at position 195 of SEQ ID NO: 317849
agaugucugaagggcuuua

SEQ ID NO: 334152 - RNA, 19 nt, Artificial Sequence
  Description of Artificial Sequence: Synthetic oligonucleotide
  Antisense Strand to SEQ ID NO: 334151
uaaagcccuucagacaucu

SEQ ID NO: 334153 - RNA, 19 nt, Artificial Sequence
  Description of Artificial Sequence: Synthetic oligonucleotide
  Sense Strand Starting at position 195 of SEQ ID NO: 317865
uuaggcaauccauagaagu

SEQ ID NO: 334154 - RNA, 19 nt, Artificial Sequence
  Description of Artificial Sequence: Synthetic oligonucleotide
  Antisense Strand to SEQ ID NO: 334153
acuucuauggauugccuaa

SEQ ID NO: 334155 - RNA, 19 nt, Artificial Sequence
  Description of Artificial Sequence: Synthetic oligonucleotide
  Sense Strand Starting at position 195 of SEQ ID NO: 317879
gaaguagacuuaucagguu

SEQ ID NO: 334156 - RNA, 19 nt, Artificial Sequence
  Description of Artificial Sequence: Synthetic oligonucleotide
  Antisense Strand to SEQ ID NO: 334155
aaccugauaagucuacuuc

SEQ ID NO: 334157 - RNA, 19 nt, Artificial Sequence
  Description of Artificial Sequence: Synthetic oligonucleotide
  Sense Strand Starting at position 195 of SEQ ID NO: 317936
cugagucugccauaaggau

SEQ ID NO: 334158 - RNA, 19 nt, Artificial Sequence
  Description of Artificial Sequence: Synthetic oligonucleotide
  Antisense Strand to SEQ ID NO: 334157
auccuuauggcagacucag

SEQ ID NO: 334159 - RNA, 19 nt, Artificial Sequence
  Description of Artificial Sequence: Synthetic oligonucleotide
  Sense Strand Starting at position 195 of SEQ ID NO: 318056
aagccaggguucucagaaa

SEQ ID NO: 334160 - RNA, 19 nt, Artificial Sequence
  Description of Artificial Sequence: Synthetic oligonucleotide
  Antisense Strand to SEQ ID NO: 334159
uuucugagaacccuggcuu

SEQ ID NO: 334161 - RNA, 19 nt, Artificial Sequence
  Description of Artificial Sequence: Synthetic oligonucleotide
  Sense Strand Starting at position 195 of SEQ ID NO: 318197
cgagcauggaacugagaaa

SEQ ID NO: 334162 - RNA, 19 nt, Artificial Sequence
  Description of Artificial Sequence: Synthetic oligonucleotide
  Antisense Strand to SEQ ID NO: 334161
uuucucaguuccaugcucg

SEQ ID NO: 334163 - RNA, 19 nt, Artificial Sequence
  Description of Artificial Sequence: Synthetic oligonucleotide
  Sense Strand Starting at position 195 of SEQ ID NO: 318212
gaaaguccuguauagaggu

SEQ ID NO: 334164 - RNA, 19 nt, Artificial Sequence
  Description of Artificial Sequence: Synthetic oligonucleotide
  Antisense Strand to SEQ ID NO: 334163
accucuauacaggacuuuc

SEQ ID NO: 334165 - RNA, 19 nt, Artificial Sequence
  Description of Artificial Sequence: Synthetic oligonucleotide
  Sense Strand Starting at position 195 of SEQ ID NO: 318219
cuguauagagguuaacuau

SEQ ID NO: 334166 - RNA, 19 nt, Artificial Sequence
  Description of Artificial Sequence: Synthetic oligonucleotide
  Antisense Strand to SEQ ID NO: 334165
auaguuaaccucuauacag

SEQ ID NO: 334167 - RNA, 19 nt, Artificial Sequence
  Description of Artificial Sequence: Synthetic oligonucleotide
  Sense Strand Starting at position 195 of SEQ ID NO: 318361
guccacuggagucauagau

SEQ ID NO: 334168 - RNA, 19 nt, Artificial Sequence
  Description of Artificial Sequence: Synthetic oligonucleotide
  Antisense Strand to SEQ ID NO: 334167
aucuaugacuccaguggac

SEQ ID NO: 334169 - RNA, 19 nt, Artificial Sequence
  Description of Artificial Sequence: Synthetic oligonucleotide
  Sense Strand Starting at position 195 of SEQ ID NO: 318365
acuggagucauagauugca

SEQ ID NO: 334170 - RNA, 19 nt, Artificial Sequence
  Description of Artificial Sequence: Synthetic oligonucleotide
  Antisense Strand to SEQ ID NO: 334169
ugcaaucuaugacuccagu

SEQ ID NO: 334171 - RNA, 19 nt, Artificial Sequence
  Description of Artificial Sequence: Synthetic oligonucleotide
  Sense Strand Starting at position 195 of SEQ ID NO: 318437
gaggguccuagauguuacu

SEQ ID NO: 334172 - RNA, 19 nt, Artificial Sequence
  Description of Artificial Sequence: Synthetic oligonucleotide
  Antisense Strand to SEQ ID NO: 334171
aguaacaucuaggacccuc

SEQ ID NO: 334173 - RNA, 19 nt, Artificial Sequence
  Description of Artificial Sequence: Synthetic oligonucleotide
  Sense Strand Starting at position 195 of SEQ ID NO: 318848
uugcauuucccacauucgu

SEQ ID NO: 334174 - RNA, 19 nt, Artificial Sequence
  Description of Artificial Sequence: Synthetic oligonucleotide
  Antisense Strand to SEQ ID NO: 334173
acgaaugugggaaaugcaa

SEQ ID NO: 334175 - RNA, 19 nt, Artificial Sequence
  Description of Artificial Sequence: Synthetic oligonucleotide
  Sense Strand Starting at position 195 of SEQ ID NO: 318856
cccacauucguagaagagu

SEQ ID NO: 334176 - RNA, 19 nt, Artificial Sequence
  Description of Artificial Sequence: Synthetic oligonucleotide
  Antisense Strand to SEQ ID NO: 334175
acucuucuacgaauguggg

SEQ ID NO: 334177 - RNA, 19 nt, Artificial Sequence
  Description of Artificial Sequence: Synthetic oligonucleotide
  Sense Strand Starting at position 195 of SEQ ID NO: 318912
gaguccuacugucugggau

SEQ ID NO: 334178 - RNA, 19 nt, Artificial Sequence
  Description of Artificial Sequence: Synthetic oligonucleotide
  Antisense Strand to SEQ ID NO: 334177
aucccagacaguaggacuc

SEQ ID NO: 334179 - RNA, 19 nt, Artificial Sequence
  Description of Artificial Sequence: Synthetic oligonucleotide
  Sense Strand Starting at position 195 of SEQ ID NO: 318913
aguccuacugucugggaua

SEQ ID NO: 334180 - RNA, 19 nt, Artificial Sequence
  Description of Artificial Sequence: Synthetic oligonucleotide
  Antisense Strand to SEQ ID NO: 334179
uaucccagacaguaggacu

SEQ ID NO: 334181 - RNA, 19 nt, Artificial Sequence
  Description of Artificial Sequence: Synthetic oligonucleotide
  Sense Strand Starting at position 195 of SEQ ID NO: 318915
uccuacugucugggauaau

SEQ ID NO: 334182 - RNA, 19 nt, Artificial Sequence
  Description of Artificial Sequence: Synthetic oligonucleotide
  Antisense Strand to SEQ ID NO: 334181
auuaucccagacaguagga

SEQ ID NO: 334183 - RNA, 19 nt, Artificial Sequence
  Description of Artificial Sequence: Synthetic oligonucleotide
  Sense Strand Starting at position 195 of SEQ ID NO: 318918
uacugucugggauaauugu

SEQ ID NO: 334184 - RNA, 19 nt, Artificial Sequence
  Description of Artificial Sequence: Synthetic oligonucleotide
  Antisense Strand to SEQ ID NO: 334183
acaauuaucccagacagua

SEQ ID NO: 334185 - RNA, 19 nt, Artificial Sequence
  Description of Artificial Sequence: Synthetic oligonucleotide
  Sense Strand Starting at position 195 of SEQ ID NO: 318926
gggauaauuguguaacugu

SEQ ID NO: 334186 - RNA, 19 nt, Artificial Sequence
  Description of Artificial Sequence: Synthetic oligonucleotide
  Antisense Strand to SEQ ID NO: 334185
acaguuacacaauuauccc

SEQ ID NO: 334187 - RNA, 19 nt, Artificial Sequence
  Description of Artificial Sequence: Synthetic oligonucleotide
  Sense Strand Starting at position 195 of SEQ ID NO: 318988
uuucuugaauaagucauga

SEQ ID NO: 334188 - RNA, 19 nt, Artificial Sequence
  Description of Artificial Sequence: Synthetic oligonucleotide
  Antisense Strand to SEQ ID NO: 334187
ucaugacuuauucaagaaa

SEQ ID NO: 334189 - RNA, 19 nt, Artificial Sequence
  Description of Artificial Sequence: Synthetic oligonucleotide
  Sense Strand Starting at position 195 of SEQ ID NO: 319022
ccaugaugugcacaacauu

SEQ ID NO: 334190 - RNA, 19 nt, Artificial Sequence
  Description of Artificial Sequence: Synthetic oligonucleotide
  Antisense Strand to SEQ ID NO: 334189
aauguugugcacaucaugg

SEQ ID NO: 334191 - RNA, 19 nt, Artificial Sequence
  Description of Artificial Sequence: Synthetic oligonucleotide
  Sense Strand Starting at position 196 of SEQ ID NO: 315308
cagcgcucaggcuucgaaa

SEQ ID NO: 334192 - RNA, 19 nt, Artificial Sequence
  Description of Artificial Sequence: Synthetic oligonucleotide
  Antisense Strand to SEQ ID NO: 334191
uuucgaagccugagcgcug

SEQ ID NO: 334193 - RNA, 19 nt, Artificial Sequence
  Description of Artificial Sequence: Synthetic oligonucleotide
  Sense Strand Starting at position 196 of SEQ ID NO: 315365
ucaaguuucuauccguaaa

SEQ ID NO: 334194 - RNA, 19 nt, Artificial Sequence
  Description of Artificial Sequence: Synthetic oligonucleotide
  Antisense Strand to SEQ ID NO: 334193
uuuacggauagaaacuuga

SEQ ID NO: 334195 - RNA, 19 nt, Artificial Sequence
  Description of Artificial Sequence: Synthetic oligonucleotide
  Sense Strand Starting at position 196 of SEQ ID NO: 315624
caagaaaugucuuucgagc

SEQ ID NO: 334196 - RNA, 19 nt, Artificial Sequence
  Description of Artificial Sequence: Synthetic oligonucleotide
  Antisense Strand to SEQ ID NO: 334195
gcucgaaagacauuucuug

SEQ ID NO: 334197 - RNA, 19 nt, Artificial Sequence
  Description of Artificial Sequence: Synthetic oligonucleotide
  Sense Strand Starting at position 196 of SEQ ID NO: 315638
cgagcucucggagggaaga

SEQ ID NO: 334198 - RNA, 19 nt, Artificial Sequence
  Description of Artificial Sequence: Synthetic oligonucleotide
  Antisense Strand to SEQ ID NO: 334197
ucuucccuccgagagcucg

SEQ ID NO: 334199 - RNA, 19 nt, Artificial Sequence
  Description of Artificial Sequence: Synthetic oligonucleotide
  Sense Strand Starting at position 196 of SEQ ID NO: 315780
gcuggcuuggcguuuccaa

SEQ ID NO: 334200 - RNA, 19 nt, Artificial Sequence
  Description of Artificial Sequence: Synthetic oligonucleotide
  Antisense Strand to SEQ ID NO: 334199
uuggaaacgccaagccagc

SEQ ID NO: 334201 - RNA, 19 nt, Artificial Sequence
  Description of Artificial Sequence: Synthetic oligonucleotide
  Sense Strand Starting at position 196 of SEQ ID NO: 315874
ggcgucggccagucaugua

SEQ ID NO: 334202 - RNA, 19 nt, Artificial Sequence
  Description of Artificial Sequence: Synthetic oligonucleotide
  Antisense Strand to SEQ ID NO: 334201
uacaugacuggccgacgcc

SEQ ID NO: 334203 - RNA, 19 nt, Artificial Sequence
  Description of Artificial Sequence: Synthetic oligonucleotide
  Sense Strand Starting at position 196 of SEQ ID NO: 315879
cggccagucauguauuuac

SEQ ID NO: 334204 - RNA, 19 nt, Artificial Sequence
  Description of Artificial Sequence: Synthetic oligonucleotide
  Antisense Strand to SEQ ID NO: 334203
guaaauacaugacuggccg

SEQ ID NO: 334205 - RNA, 19 nt, Artificial Sequence
  Description of Artificial Sequence: Synthetic oligonucleotide
  Sense Strand Starting at position 196 of SEQ ID NO: 316123
gugggaaaccuaggaguuu

SEQ ID NO: 334206 - RNA, 19 nt, Artificial Sequence
  Description of Artificial Sequence: Synthetic oligonucleotide
  Antisense Strand to SEQ ID NO: 334205
aaacuccuagguuucccac

SEQ ID NO: 334207 - RNA, 19 nt, Artificial Sequence
  Description of Artificial Sequence: Synthetic oligonucleotide
  Sense Strand Starting at position 196 of SEQ ID NO: 316143
gagucuccuccgggaugga

SEQ ID NO: 334208 - RNA, 19 nt, Artificial Sequence
  Description of Artificial Sequence: Synthetic oligonucleotide
  Antisense Strand to SEQ ID NO: 334207
uccaucccggaggagacuc

SEQ ID NO: 334209 - RNA, 19 nt, Artificial Sequence
  Description of Artificial Sequence: Synthetic oligonucleotide
  Sense Strand Starting at position 196 of SEQ ID NO: 316266
gcgugauucugaaagggag

SEQ ID NO: 334210 - RNA, 19 nt, Artificial Sequence
  Description of Artificial Sequence: Synthetic oligonucleotide
  Antisense Strand to SEQ ID NO: 334209
cucccuuucagaaucacgc

SEQ ID NO: 334211 - RNA, 19 nt, Artificial Sequence
  Description of Artificial Sequence: Synthetic oligonucleotide
  Sense Strand Starting at position 196 of SEQ ID NO: 316334
cugugucggcucuuucgaa

SEQ ID NO: 334212 - RNA, 19 nt, Artificial Sequence
  Description of Artificial Sequence: Synthetic oligonucleotide
  Antisense Strand to SEQ ID NO: 334211
uucgaaagagccgacacag

SEQ ID NO: 334213 - RNA, 19 nt, Artificial Sequence
  Description of Artificial Sequence: Synthetic oligonucleotide
  Sense Strand Starting at position 196 of SEQ ID NO: 316341
ggcucuuucgaaggagaga

SEQ ID NO: 334214 - RNA, 19 nt, Artificial Sequence
  Description of Artificial Sequence: Synthetic oligonucleotide
  Antisense Strand to SEQ ID NO: 334213
ucucuccuucgaaagagcc

SEQ ID NO: 334215 - RNA, 19 nt, Artificial Sequence
  Description of Artificial Sequence: Synthetic oligonucleotide
  Sense Strand Starting at position 196 of SEQ ID NO: 316382
ucuucucagccgcauuaaa

SEQ ID NO: 334216 - RNA, 19 nt, Artificial Sequence
  Description of Artificial Sequence: Synthetic oligonucleotide
  Antisense Strand to SEQ ID NO: 334215
uuuaaugcggcugagaaga

SEQ ID NO: 334217 - RNA, 19 nt, Artificial Sequence
  Description of Artificial Sequence: Synthetic oligonucleotide
  Sense Strand Starting at position 196 of SEQ ID NO: 316433
aguguucugggucagugaa

SEQ ID NO: 334218 - RNA, 19 nt, Artificial Sequence
  Description of Artificial Sequence: Synthetic oligonucleotide
  Antisense Strand to SEQ ID NO: 334217
uucacugacccagaacacu

SEQ ID NO: 334219 - RNA, 19 nt, Artificial Sequence
  Description of Artificial Sequence: Synthetic oligonucleotide
  Sense Strand Starting at position 196 of SEQ ID NO: 316435
uguucugggucagugaaag

SEQ ID NO: 334220 - RNA, 19 nt, Artificial Sequence
  Description of Artificial Sequence: Synthetic oligonucleotide
  Antisense Strand to SEQ ID NO: 334219
cuuucacugacccagaaca

SEQ ID NO: 334221 - RNA, 19 nt, Artificial Sequence
  Description of Artificial Sequence: Synthetic oligonucleotide
  Sense Strand Starting at position 196 of SEQ ID NO: 316540
aggaauccgguuugggaaa

SEQ ID NO: 334222 - RNA, 19 nt, Artificial Sequence
  Description of Artificial Sequence: Synthetic oligonucleotide
  Antisense Strand to SEQ ID NO: 334221
uuucccaaaccggauuccu

SEQ ID NO: 334223 - RNA, 19 nt, Artificial Sequence
  Description of Artificial Sequence: Synthetic oligonucleotide
  Sense Strand Starting at position 196 of SEQ ID NO: 316926
ccugaaacccuuugaguuc

SEQ ID NO: 334224 - RNA, 19 nt, Artificial Sequence
  Description of Artificial Sequence: Synthetic oligonucleotide
  Antisense Strand to SEQ ID NO: 334223
gaacucaaaggguuucagg

SEQ ID NO: 334225 - RNA, 19 nt, Artificial Sequence
  Description of Artificial Sequence: Synthetic oligonucleotide
  Sense Strand Starting at position 196 of SEQ ID NO: 317233
uggaauucccucuggaaug

SEQ ID NO: 334226 - RNA, 19 nt, Artificial Sequence
  Description of Artificial Sequence: Synthetic oligonucleotide
  Antisense Strand to SEQ ID NO: 334225
cauuccagagggaauucca

SEQ ID NO: 334227 - RNA, 19 nt, Artificial Sequence
  Description of Artificial Sequence: Synthetic oligonucleotide
  Sense Strand Starting at position 196 of SEQ ID NO: 317388
gggcaacauguuugaaaga

SEQ ID NO: 334228 - RNA, 19 nt, Artificial Sequence
  Description of Artificial Sequence: Synthetic oligonucleotide
  Antisense Strand to SEQ ID NO: 334227
ucuuucaaacauguugccc

SEQ ID NO: 334229 - RNA, 19 nt, Artificial Sequence
  Description of Artificial Sequence: Synthetic oligonucleotide
  Sense Strand Starting at position 196 of SEQ ID NO: 317397
guuugaaagagcugaagcu

SEQ ID NO: 334230 - RNA, 19 nt, Artificial Sequence
  Description of Artificial Sequence: Synthetic oligonucleotide
  Antisense Strand to SEQ ID NO: 334229
agcuucagcucuuucaaac

SEQ ID NO: 334231 - RNA, 19 nt, Artificial Sequence
  Description of Artificial Sequence: Synthetic oligonucleotide
  Sense Strand Starting at position 196 of SEQ ID NO: 317406
agcugaagcugauuaaaug

SEQ ID NO: 334232 - RNA, 19 nt, Artificial Sequence
  Description of Artificial Sequence: Synthetic oligonucleotide
  Antisense Strand to SEQ ID NO: 334231
cauuuaaucagcuucagcu

SEQ ID NO: 334233 - RNA, 19 nt, Artificial Sequence
  Description of Artificial Sequence: Synthetic oligonucleotide
  Sense Strand Starting at position 196 of SEQ ID NO: 317447
gccugcuaagguuugugua

SEQ ID NO: 334234 - RNA, 19 nt, Artificial Sequence
  Description of Artificial Sequence: Synthetic oligonucleotide
  Antisense Strand to SEQ ID NO: 334233
uacacaaaccuuagcaggc

SEQ ID NO: 334235 - RNA, 19 nt, Artificial Sequence
  Description of Artificial Sequence: Synthetic oligonucleotide
  Sense Strand Starting at position 196 of SEQ ID NO: 317460
uguguaguucaguugcgaa

SEQ ID NO: 334236 - RNA, 19 nt, Artificial Sequence
  Description of Artificial Sequence: Synthetic oligonucleotide
  Antisense Strand to SEQ ID NO: 334235
uucgcaacugaacuacaca

SEQ ID NO: 334237 - RNA, 19 nt, Artificial Sequence
  Description of Artificial Sequence: Synthetic oligonucleotide
  Sense Strand Starting at position 196 of SEQ ID NO: 317486
cuuauuugugauuguggca

SEQ ID NO: 334238 - RNA, 19 nt, Artificial Sequence
  Description of Artificial Sequence: Synthetic oligonucleotide
  Antisense Strand to SEQ ID NO: 334237
ugccacaaucacaaauaag

SEQ ID NO: 334239 - RNA, 19 nt, Artificial Sequence
  Description of Artificial Sequence: Synthetic oligonucleotide
  Sense Strand Starting at position 196 of SEQ ID NO: 317502
gcaagacaugucuggaaac

SEQ ID NO: 334240 - RNA, 19 nt, Artificial Sequence
  Description of Artificial Sequence: Synthetic oligonucleotide
  Antisense Strand to SEQ ID NO: 334239
guuuccagacaugucuugc

SEQ ID NO: 334241 - RNA, 19 nt, Artificial Sequence
  Description of Artificial Sequence: Synthetic oligonucleotide
  Sense Strand Starting at position 196 of SEQ ID NO: 317960
ugccuuuccuucuuugaga

SEQ ID NO: 334242 - RNA, 19 nt, Artificial Sequence
  Description of Artificial Sequence: Synthetic oligonucleotide
  Antisense Strand to SEQ ID NO: 334241
ucucaaagaaggaaaggca

SEQ ID NO: 334243 - RNA, 19 nt, Artificial Sequence
  Description of Artificial Sequence: Synthetic oligonucleotide
  Sense Strand Starting at position 196 of SEQ ID NO: 318321
ugagaucauuucuauagaa

SEQ ID NO: 334244 - RNA, 19 nt, Artificial Sequence
  Description of Artificial Sequence: Synthetic oligonucleotide
  Antisense Strand to SEQ ID NO: 334243
uucuauagaaaugaucuca

SEQ ID NO: 334245 - RNA, 19 nt, Artificial Sequence
  Description of Artificial Sequence: Synthetic oligonucleotide
  Sense Strand Starting at position 196 of SEQ ID NO: 318822
ccuguugcugcucaggaaa

SEQ ID NO: 334246 - RNA, 19 nt, Artificial Sequence
  Description of Artificial Sequence: Synthetic oligonucleotide
  Antisense Strand to SEQ ID NO: 334245
uuuccugagcagcaacagg

SEQ ID NO: 334247 - RNA, 19 nt, Artificial Sequence
  Description of Artificial Sequence: Synthetic oligonucleotide
  Sense Strand Starting at position 196 of SEQ ID NO: 318856
ggacuuggugacugagacu

SEQ ID NO: 334248 - RNA, 19 nt, Artificial Sequence
  Description of Artificial Sequence: Synthetic oligonucleotide
  Antisense Strand to SEQ ID NO: 334247
agucucagucaccaagucc

SEQ ID NO: 334249 - RNA, 19 nt, Artificial Sequence
  Description of Artificial Sequence: Synthetic oligonucleotide
  Sense Strand Starting at position 196 of SEQ ID NO: 318868
ugagacugaccuugaguuu

SEQ ID NO: 334250 - RNA, 19 nt, Artificial Sequence
  Description of Artificial Sequence: Synthetic oligonucleotide
  Antisense Strand to SEQ ID NO: 334249
aaacucaaggucagucuca

SEQ ID NO: 334251 - RNA, 19 nt, Artificial Sequence
  Description of Artificial Sequence: Synthetic oligonucleotide
  Sense Strand Starting at position 196 of SEQ ID NO: 318881
gaguuuccaggcugggaga

SEQ ID NO: 334252 - RNA, 19 nt, Artificial Sequence
  Description of Artificial Sequence: Synthetic oligonucleotide
  Antisense Strand to SEQ ID NO: 334251
ucucccagccuggaaacuc

SEQ ID NO: 334253 - RNA, 19 nt, Artificial Sequence
  Description of Artificial Sequence: Synthetic oligonucleotide
  Sense Strand Starting at position 196 of SEQ ID NO: 318911
gguagaguauuauccaaga

SEQ ID NO: 334254 - RNA, 19 nt, Artificial Sequence
  Description of Artificial Sequence: Synthetic oligonucleotide
  Antisense Strand to SEQ ID NO: 334253
ucuuggauaauacucuacc

SEQ ID NO: 334255 - RNA, 19 nt, Artificial Sequence
  Description of Artificial Sequence: Synthetic oligonucleotide
  Sense Strand Starting at position 196 of SEQ ID NO: 318995
ggguaaugaguccaguaug

SEQ ID NO: 334256 - RNA, 19 nt, Artificial Sequence
  Description of Artificial Sequence: Synthetic oligonucleotide
  Antisense Strand to SEQ ID NO: 334255
cauacuggacucauuaccc

SEQ ID NO: 334257 - RNA, 19 nt, Artificial Sequence
  Description of Artificial Sequence: Synthetic oligonucleotide
  Sense Strand Starting at position 196 of SEQ ID NO: 319000
augaguccaguaugggauu

SEQ ID NO: 334258 - RNA, 19 nt, Artificial Sequence
  Description of Artificial Sequence: Synthetic oligonucleotide
  Antisense Strand to SEQ ID NO: 334257
aaucccauacuggacucau

SEQ ID NO: 334259 - RNA, 19 nt, Artificial Sequence
  Description of Artificial Sequence: Synthetic oligonucleotide
  Sense Strand Starting at position 196 of SEQ ID NO: 319006
ccaguaugggauugguuga

SEQ ID NO: 334260 - RNA, 19 nt, Artificial Sequence
  Description of Artificial Sequence: Synthetic oligonucleotide
  Antisense Strand to SEQ ID NO: 334259
ucaaccaaucccauacugg

SEQ ID NO: 334261 - RNA, 19 nt, Artificial Sequence
  Description of Artificial Sequence: Synthetic oligonucleotide
  Sense Strand Starting at position 196 of SEQ ID NO: 319007
caguaugggauugguugau

SEQ ID NO: 334262 - RNA, 19 nt, Artificial Sequence
  Description of Artificial Sequence: Synthetic oligonucleotide
  Antisense Strand to SEQ ID NO: 334261
aucaaccaaucccauacug

SEQ ID NO: 334263 - RNA, 19 nt, Artificial Sequence
  Description of Artificial Sequence: Synthetic oligonucleotide
  Sense Strand Starting at position 196 of SEQ ID NO: 319011
augggauugguugaucguu

SEQ ID NO: 334264 - RNA, 19 nt, Artificial Sequence
  Description of Artificial Sequence: Synthetic oligonucleotide
  Antisense Strand to SEQ ID NO: 334263
aacgaucaaccaaucccau

SEQ ID NO: 334265 - RNA, 19 nt, Artificial Sequence
  Description of Artificial Sequence: Synthetic oligonucleotide
  Sense Strand Starting at position 196 of SEQ ID NO: 319017
uugguugaucguuugugca

SEQ ID NO: 334266 - RNA, 19 nt, Artificial Sequence
  Description of Artificial Sequence: Synthetic oligonucleotide
  Antisense Strand to SEQ ID NO: 334265
ugcacaaacgaucaaccaa

SEQ ID NO: 334267 - RNA, 19 nt, Artificial Sequence
  Description of Artificial Sequence: Synthetic oligonucleotide
  Sense Strand Starting at position 196 of SEQ ID NO: 319038
gacagucuaggaggaguuu

SEQ ID NO: 334268 - RNA, 19 nt, Artificial Sequence
  Description of Artificial Sequence: Synthetic oligonucleotide
  Antisense Strand to SEQ ID NO: 334267
aaacuccuccuagacuguc

SEQ ID NO: 334269 - RNA, 19 nt, Artificial Sequence
  Description of Artificial Sequence: Synthetic oligonucleotide
  Sense Strand Starting at position 196 of SEQ ID NO: 319060
agccuuuguccugagcaga

SEQ ID NO: 334270 - RNA, 19 nt, Artificial Sequence
  Description of Artificial Sequence: Synthetic oligonucleotide
  Antisense Strand to SEQ ID NO: 334269
ucugcucaggacaaaggcu

SEQ ID NO: 334271 - RNA, 19 nt, Artificial Sequence
  Description of Artificial Sequence: Synthetic oligonucleotide
  Sense Strand Starting at position 197 of SEQ ID NO: 315833
guguuuguacuguucagca

SEQ ID NO: 334272 - RNA, 19 nt, Artificial Sequence
  Description of Artificial Sequence: Synthetic oligonucleotide
  Antisense Strand to SEQ ID NO: 334271
ugcugaacaguacaaacac

SEQ ID NO: 334273 - RNA, 19 nt, Artificial Sequence
  Description of Artificial Sequence: Synthetic oligonucleotide
  Sense Strand Starting at position 197 of SEQ ID NO: 315928
gcaugauuccuauggguca

SEQ ID NO: 334274 - RNA, 19 nt, Artificial Sequence
  Description of Artificial Sequence: Synthetic oligonucleotide
  Antisense Strand to SEQ ID NO: 334273
ugacccauaggaaucaugc

SEQ ID NO: 334275 - RNA, 19 nt, Artificial Sequence
  Description of Artificial Sequence: Synthetic oligonucleotide
  Sense Strand Starting at position 197 of SEQ ID NO: 315931
ugauuccuaugggucacaa

SEQ ID NO: 334276 - RNA, 19 nt, Artificial Sequence
  Description of Artificial Sequence: Synthetic oligonucleotide
  Antisense Strand to SEQ ID NO: 334275
uugugacccauaggaauca

SEQ ID NO: 334277 - RNA, 19 nt, Artificial Sequence
  Description of Artificial Sequence: Synthetic oligonucleotide
  Sense Strand Starting at position 197 of SEQ ID NO: 316008
cuagccucaggucagaauu

SEQ ID NO: 334278 - RNA, 19 nt, Artificial Sequence
  Description of Artificial Sequence: Synthetic oligonucleotide
  Antisense Strand to SEQ ID NO: 334277
aauucugaccugaggcuag

SEQ ID NO: 334279 - RNA, 19 nt, Artificial Sequence
  Description of Artificial Sequence: Synthetic oligonucleotide
  Sense Strand Starting at position 197 of SEQ ID NO: 316051
gcugcugaaucaccuuauu

SEQ ID NO: 334280 - RNA, 19 nt, Artificial Sequence
  Description of Artificial Sequence: Synthetic oligonucleotide
  Antisense Strand to SEQ ID NO: 334279
aauaaggugauucagcagc

SEQ ID NO: 334281 - RNA, 19 nt, Artificial Sequence
  Description of Artificial Sequence: Synthetic oligonucleotide
  Sense Strand Starting at position 197 of SEQ ID NO: 316073
ggagaaagacuuugaugcu

SEQ ID NO: 334282 - RNA, 19 nt, Artificial Sequence
  Description of Artificial Sequence: Synthetic oligonucleotide
  Antisense Strand to SEQ ID NO: 334281
agcaucaaagucuuucucc

SEQ ID NO: 334283 - RNA, 19 nt, Artificial Sequence
  Description of Artificial Sequence: Synthetic oligonucleotide
  Sense Strand Starting at position 197 of SEQ ID NO: 316127
ugaccaucucugcaacagu

SEQ ID NO: 334284 - RNA, 19 nt, Artificial Sequence
  Description of Artificial Sequence: Synthetic oligonucleotide
  Antisense Strand to SEQ ID NO: 334283
acuguugcagagaugguca

SEQ ID NO: 334285 - RNA, 19 nt, Artificial Sequence
  Description of Artificial Sequence: Synthetic oligonucleotide
  Sense Strand Starting at position 197 of SEQ ID NO: 316161
accucucuuguuggguaau

SEQ ID NO: 334286 - RNA, 19 nt, Artificial Sequence
  Description of Artificial Sequence: Synthetic oligonucleotide
  Antisense Strand to SEQ ID NO: 334285
auuacccaacaagagaggu

SEQ ID NO: 334287 - RNA, 19 nt, Artificial Sequence
  Description of Artificial Sequence: Synthetic oligonucleotide
  Sense Strand Starting at position 197 of SEQ ID NO: 316163
cucucuuguuggguaauaa

SEQ ID NO: 334288 - RNA, 19 nt, Artificial Sequence
  Description of Artificial Sequence: Synthetic oligonucleotide
  Antisense Strand to SEQ ID NO: 334287
uuauuacccaacaagagag

SEQ ID NO: 334289 - RNA, 19 nt, Artificial Sequence
  Description of Artificial Sequence: Synthetic oligonucleotide
  Sense Strand Starting at position 197 of SEQ ID NO: 316164
ucucuuguuggguaauaau

SEQ ID NO: 334290 - RNA, 19 nt, Artificial Sequence
  Description of Artificial Sequence: Synthetic oligonucleotide
  Antisense Strand to SEQ ID NO: 334289
auuauuacccaacaagaga

SEQ ID NO: 334291 - RNA, 19 nt, Artificial Sequence
  Description of Artificial Sequence: Synthetic oligonucleotide
  Sense Strand Starting at position 197 of SEQ ID NO: 316174
gguaauaauuuguaaguca

SEQ ID NO: 334292 - RNA, 19 nt, Artificial Sequence
  Description of Artificial Sequence: Synthetic oligonucleotide
  Antisense Strand to SEQ ID NO: 334291
ugacuuacaaauuauuacc

SEQ ID NO: 334293 - RNA, 19 nt, Artificial Sequence
  Description of Artificial Sequence: Synthetic oligonucleotide
  Sense Strand Starting at position 197 of SEQ ID NO: 316187
aagucauugcaaggagaac

SEQ ID NO: 334294 - RNA, 19 nt, Artificial Sequence
  Description of Artificial Sequence: Synthetic oligonucleotide
  Antisense Strand to SEQ ID NO: 334293
guucuccuugcaaugacuu

SEQ ID NO: 334295 - RNA, 19 nt, Artificial Sequence
  Description of Artificial Sequence: Synthetic oligonucleotide
  Sense Strand Starting at position 197 of SEQ ID NO: 316235
uuacauacuuugguggaaa

SEQ ID NO: 334296 - RNA, 19 nt, Artificial Sequence
  Description of Artificial Sequence: Synthetic oligonucleotide
  Antisense Strand to SEQ ID NO: 334295
uuuccaccaaaguauguaa

SEQ ID NO: 334297 - RNA, 19 nt, Artificial Sequence
  Description of Artificial Sequence: Synthetic oligonucleotide
  Sense Strand Starting at position 197 of SEQ ID NO: 316298
caggcauucucagcauuga

SEQ ID NO: 334298 - RNA, 19 nt, Artificial Sequence
  Description of Artificial Sequence: Synthetic oligonucleotide
  Antisense Strand to SEQ ID NO: 334297
ucaaugcugagaaugccug

SEQ ID NO: 334299 - RNA, 19 nt, Artificial Sequence
  Description of Artificial Sequence: Synthetic oligonucleotide
  Sense Strand Starting at position 197 of SEQ ID NO: 316318
cccuuccugcuagaggauu

SEQ ID NO: 334300 - RNA, 19 nt, Artificial Sequence
  Description of Artificial Sequence: Synthetic oligonucleotide
  Antisense Strand to SEQ ID NO: 334299
aauccucuagcaggaaggg

SEQ ID NO: 334301 - RNA, 19 nt, Artificial Sequence
  Description of Artificial Sequence: Synthetic oligonucleotide
  Sense Strand Starting at position 197 of SEQ ID NO: 316720
ggauguaucuugccagcag

SEQ ID NO: 334302 - RNA, 19 nt, Artificial Sequence
  Description of Artificial Sequence: Synthetic oligonucleotide
  Antisense Strand to SEQ ID NO: 334301
cugcuggcaagauacaucc

SEQ ID NO: 334303 - RNA, 19 nt, Artificial Sequence
  Description of Artificial Sequence: Synthetic oligonucleotide
  Sense Strand Starting at position 197 of SEQ ID NO: 317110
ccuggcuggucuuugggaa

SEQ ID NO: 334304 - RNA, 19 nt, Artificial Sequence
  Description of Artificial Sequence: Synthetic oligonucleotide
  Antisense Strand to SEQ ID NO: 334303
uucccaaagaccagccagg

SEQ ID NO: 334305 - RNA, 19 nt, Artificial Sequence
  Description of Artificial Sequence: Synthetic oligonucleotide
  Sense Strand Starting at position 197 of SEQ ID NO: 317169
ccguguugagcagaaggaa

SEQ ID NO: 334306 - RNA, 19 nt, Artificial Sequence
  Description of Artificial Sequence: Synthetic oligonucleotide
  Antisense Strand to SEQ ID NO: 334305
uuccuucugcucaacacgg

SEQ ID NO: 334307 - RNA, 19 nt, Artificial Sequence
  Description of Artificial Sequence: Synthetic oligonucleotide
  Sense Strand Starting at position 197 of SEQ ID NO: 317197
uuuccuaaaguuugaggaa

SEQ ID NO: 334308 - RNA, 19 nt, Artificial Sequence
  Description of Artificial Sequence: Synthetic oligonucleotide
  Antisense Strand to SEQ ID NO: 334307
uuccucaaacuuuaggaaa

SEQ ID NO: 334309 - RNA, 19 nt, Artificial Sequence
  Description of Artificial Sequence: Synthetic oligonucleotide
  Sense Strand Starting at position 197 of SEQ ID NO: 317209
ugaggaaguguuugcagag

SEQ ID NO: 334310 - RNA, 19 nt, Artificial Sequence
  Description of Artificial Sequence: Synthetic oligonucleotide
  Antisense Strand to SEQ ID NO: 334309
cucugcaaacacuuccuca

SEQ ID NO: 334311 - RNA, 19 nt, Artificial Sequence
  Description of Artificial Sequence: Synthetic oligonucleotide
  Sense Strand Starting at position 197 of SEQ ID NO: 317210
gaggaaguguuugcagagu

SEQ ID NO: 334312 - RNA, 19 nt, Artificial Sequence
  Description of Artificial Sequence: Synthetic oligonucleotide
  Antisense Strand to SEQ ID NO: 334311
acucugcaaacacuuccuc

SEQ ID NO: 334313 - RNA, 19 nt, Artificial Sequence
  Description of Artificial Sequence: Synthetic oligonucleotide
  Sense Strand Starting at position 197 of SEQ ID NO: 317304
gaagacuccgugggagaaa

SEQ ID NO: 334314 - RNA, 19 nt, Artificial Sequence
  Description of Artificial Sequence: Synthetic oligonucleotide
  Antisense Strand to SEQ ID NO: 334313
uuucucccacggagucuuc

SEQ ID NO: 334315 - RNA, 19 nt, Artificial Sequence
  Description of Artificial Sequence: Synthetic oligonucleotide
  Sense Strand Starting at position 197 of SEQ ID NO: 317457
caaaguguacgugggaaau

SEQ ID NO: 334316 - RNA, 19 nt, Artificial Sequence
  Description of Artificial Sequence: Synthetic oligonucleotide
  Antisense Strand to SEQ ID NO: 334315
auuucccacguacacuuug

SEQ ID NO: 334317 - RNA, 19 nt, Artificial Sequence
  Description of Artificial Sequence: Synthetic oligonucleotide
  Sense Strand Starting at position 197 of SEQ ID NO: 317531
cagcgcucaggcuucgaaa

SEQ ID NO: 334318 - RNA, 19 nt, Artificial Sequence
  Description of Artificial Sequence: Synthetic oligonucleotide
  Antisense Strand to SEQ ID NO: 334317
uuucgaagccugagcgcug

SEQ ID NO: 334319 - RNA, 19 nt, Artificial Sequence
  Description of Artificial Sequence: Synthetic oligonucleotide
  Sense Strand Starting at position 197 of SEQ ID NO: 317588
ucaaguuucuauccguaaa

SEQ ID NO: 334320 - RNA, 19 nt, Artificial Sequence
  Description of Artificial Sequence: Synthetic oligonucleotide
  Antisense Strand to SEQ ID NO: 334319
uuuacggauagaaacuuga

SEQ ID NO: 334321 - RNA, 19 nt, Artificial Sequence
  Description of Artificial Sequence: Synthetic oligonucleotide
  Sense Strand Starting at position 197 of SEQ ID NO: 317847
caagaaaugucuuucgagc

SEQ ID NO: 334322 - RNA, 19 nt, Artificial Sequence
  Description of Artificial Sequence: Synthetic oligonucleotide
  Antisense Strand to SEQ ID NO: 334321
gcucgaaagacauuucuug

SEQ ID NO: 334323 - RNA, 19 nt, Artificial Sequence
  Description of Artificial Sequence: Synthetic oligonucleotide
  Sense Strand Starting at position 197 of SEQ ID NO: 317861
cgagcucucggagggaaga

SEQ ID NO: 334324 - RNA, 19 nt, Artificial Sequence
  Description of Artificial Sequence: Synthetic oligonucleotide
  Antisense Strand to SEQ ID NO: 334323
ucuucccuccgagagcucg

SEQ ID NO: 334325 - RNA, 19 nt, Artificial Sequence
  Description of Artificial Sequence: Synthetic oligonucleotide
  Sense Strand Starting at position 197 of SEQ ID NO: 318003
gcuggcuuggcguuuccaa

SEQ ID NO: 334326 - RNA, 19 nt, Artificial Sequence
  Description of Artificial Sequence: Synthetic oligonucleotide
  Antisense Strand to SEQ ID NO: 334325
uuggaaacgccaagccagc

SEQ ID NO: 334327 - RNA, 19 nt, Artificial Sequence
  Description of Artificial Sequence: Synthetic oligonucleotide
  Sense Strand Starting at position 197 of SEQ ID NO: 318097
ggcgucggccagucaugua

SEQ ID NO: 334328 - RNA, 19 nt, Artificial Sequence
  Description of Artificial Sequence: Synthetic oligonucleotide
  Antisense Strand to SEQ ID NO: 334327
uacaugacuggccgacgcc

SEQ ID NO: 334329 - RNA, 19 nt, Artificial Sequence
  Description of Artificial Sequence: Synthetic oligonucleotide
  Sense Strand Starting at position 197 of SEQ ID NO: 318102
cggccagucauguauuuac

SEQ ID NO: 334330 - RNA, 19 nt, Artificial Sequence
  Description of Artificial Sequence: Synthetic oligonucleotide
  Antisense Strand to SEQ ID NO: 334329
guaaauacaugacuggccg

SEQ ID NO: 334331 - RNA, 19 nt, Artificial Sequence
  Description of Artificial Sequence: Synthetic oligonucleotide
  Sense Strand Starting at position 197 of SEQ ID NO: 318346
gugggaaaccuaggaguuu

SEQ ID NO: 334332 - RNA, 19 nt, Artificial Sequence
  Description of Artificial Sequence: Synthetic oligonucleotide
  Antisense Strand to SEQ ID NO: 334331
aaacuccuagguuucccac

SEQ ID NO: 334333 - RNA, 19 nt, Artificial Sequence
  Description of Artificial Sequence: Synthetic oligonucleotide
  Sense Strand Starting at position 197 of SEQ ID NO: 318366
gagucuccuccgggaugga

SEQ ID NO: 334334 - RNA, 19 nt, Artificial Sequence
  Description of Artificial Sequence: Synthetic oligonucleotide
  Antisense Strand to SEQ ID NO: 334333
uccaucccggaggagacuc

SEQ ID NO: 334335 - RNA, 19 nt, Artificial Sequence
  Description of Artificial Sequence: Synthetic oligonucleotide
  Sense Strand Starting at position 197 of SEQ ID NO: 318489
gcgugauucugaaagggag

SEQ ID NO: 334336 - RNA, 19 nt, Artificial Sequence
  Description of Artificial Sequence: Synthetic oligonucleotide
  Antisense Strand to SEQ ID NO: 334335
cucccuuucagaaucacgc

SEQ ID NO: 334337 - RNA, 19 nt, Artificial Sequence
  Description of Artificial Sequence: Synthetic oligonucleotide
  Sense Strand Starting at position 197 of SEQ ID NO: 318557
cugugucggcucuuucgaa

SEQ ID NO: 334338 - RNA, 19 nt, Artificial Sequence
  Description of Artificial Sequence: Synthetic oligonucleotide
  Antisense Strand to SEQ ID NO: 334337
uucgaaagagccgacacag

SEQ ID NO: 334339 - RNA, 19 nt, Artificial Sequence
  Description of Artificial Sequence: Synthetic oligonucleotide
  Sense Strand Starting at position 197 of SEQ ID NO: 318564
ggcucuuucgaaggagaga

SEQ ID NO: 334340 - RNA, 19 nt, Artificial Sequence
  Description of Artificial Sequence: Synthetic oligonucleotide
  Antisense Strand to SEQ ID NO: 334339
ucucuccuucgaaagagcc

SEQ ID NO: 334341 - RNA, 19 nt, Artificial Sequence
  Description of Artificial Sequence: Synthetic oligonucleotide
  Sense Strand Starting at position 197 of SEQ ID NO: 318605
ucuucucagccgcauuaaa

SEQ ID NO: 334342 - RNA, 19 nt, Artificial Sequence
  Description of Artificial Sequence: Synthetic oligonucleotide
  Antisense Strand to SEQ ID NO: 334341
uuuaaugcggcugagaaga

SEQ ID NO: 334343 - RNA, 19 nt, Artificial Sequence
  Description of Artificial Sequence: Synthetic oligonucleotide
  Sense Strand Starting at position 197 of SEQ ID NO: 318656
aguguucugggucagugaa

SEQ ID NO: 334344 - RNA, 19 nt, Artificial Sequence
  Description of Artificial Sequence: Synthetic oligonucleotide
  Antisense Strand to SEQ ID NO: 334343
uucacugacccagaacacu

SEQ ID NO: 334345 - RNA, 19 nt, Artificial Sequence
  Description of Artificial Sequence: Synthetic oligonucleotide
  Sense Strand Starting at position 197 of SEQ ID NO: 318658
uguucugggucagugaaag

SEQ ID NO: 334346 - RNA, 19 nt, Artificial Sequence
  Description of Artificial Sequence: Synthetic oligonucleotide
  Antisense Strand to SEQ ID NO: 334345
cuuucacugacccagaaca

SEQ ID NO: 334347 - RNA, 19 nt, Artificial Sequence
  Description of Artificial Sequence: Synthetic oligonucleotide
  Sense Strand Starting at position 197 of SEQ ID NO: 318763
aggaauccgguuugggaaa

SEQ ID NO: 334348 - RNA, 19 nt, Artificial Sequence
  Description of Artificial Sequence: Synthetic oligonucleotide
  Antisense Strand to SEQ ID NO: 334347
uuucccaaaccggauuccu

SEQ ID NO: 334349 - RNA, 19 nt, Artificial Sequence
  Description of Artificial Sequence: Synthetic oligonucleotide
  Sense Strand Starting at position 197 of SEQ ID NO: 319149
ccugaaacccuuugaguuc

SEQ ID NO: 334350 - RNA, 19 nt, Artificial Sequence
  Description of Artificial Sequence: Synthetic oligonucleotide
  Antisense Strand to SEQ ID NO: 334349
gaacucaaaggguuucagg

SEQ ID NO: 334351 - RNA, 19 nt, Artificial Sequence
  Description of Artificial Sequence: Synthetic oligonucleotide
  Sense Strand Starting at position 198 of SEQ ID NO: 315367
gcaguagcaagagauacua

SEQ ID NO: 334352 - RNA, 19 nt, Artificial Sequence
  Description of Artificial Sequence: Synthetic oligonucleotide
  Antisense Strand to SEQ ID NO: 334351
uaguaucucuugcuacugc

SEQ ID NO: 334353 - RNA, 19 nt, Artificial Sequence
  Description of Artificial Sequence: Synthetic oligonucleotide
  Sense Strand Starting at position 198 of SEQ ID NO: 315465
cuaggugcuucuucgauuu

SEQ ID NO: 334354 - RNA, 19 nt, Artificial Sequence
  Description of Artificial Sequence: Synthetic oligonucleotide
  Antisense Strand to SEQ ID NO: 334353
aaaucgaagaagcaccuag

SEQ ID NO: 334355 - RNA, 19 nt, Artificial Sequence
  Description of Artificial Sequence: Synthetic oligonucleotide
  Sense Strand Starting at position 198 of SEQ ID NO: 315631
gccguaagucuaccagcua

SEQ ID NO: 334356 - RNA, 19 nt, Artificial Sequence
  Description of Artificial Sequence: Synthetic oligonucleotide
  Antisense Strand to SEQ ID NO: 334355
uagcugguagacuuacggc

SEQ ID NO: 334357 - RNA, 19 nt, Artificial Sequence
  Description of Artificial Sequence: Synthetic oligonucleotide
  Sense Strand Starting at position 198 of SEQ ID NO: 315720
gaguucugcauuugguuga

SEQ ID NO: 334358 - RNA, 19 nt, Artificial Sequence
  Description of Artificial Sequence: Synthetic oligonucleotide
  Antisense Strand to SEQ ID NO: 334357
ucaaccaaaugcagaacuc

SEQ ID NO: 334359 - RNA, 19 nt, Artificial Sequence
  Description of Artificial Sequence: Synthetic oligonucleotide
  Sense Strand Starting at position 198 of SEQ ID NO: 315766
uuaggcucgugaucgauuu

SEQ ID NO: 334360 - RNA, 19 nt, Artificial Sequence
  Description of Artificial Sequence: Synthetic oligonucleotide
  Antisense Strand to SEQ ID NO: 334359
aaaucgaucacgagccuaa

SEQ ID NO: 334361 - RNA, 19 nt, Artificial Sequence
  Description of Artificial Sequence: Synthetic oligonucleotide
  Sense Strand Starting at position 198 of SEQ ID NO: 315818
gagugagaaguagguacaa

SEQ ID NO: 334362 - RNA, 19 nt, Artificial Sequence
  Description of Artificial Sequence: Synthetic oligonucleotide
  Antisense Strand to SEQ ID NO: 334361
uuguaccuacuucucacuc

SEQ ID NO: 334363 - RNA, 19 nt, Artificial Sequence
  Description of Artificial Sequence: Synthetic oligonucleotide
  Sense Strand Starting at position 198 of SEQ ID NO: 315963
acgaaagauuuggaguaga

SEQ ID NO: 334364 - RNA, 19 nt, Artificial Sequence
  Description of Artificial Sequence: Synthetic oligonucleotide
  Antisense Strand to SEQ ID NO: 334363
ucuacuccaaaucuuucgu

SEQ ID NO: 334365 - RNA, 19 nt, Artificial Sequence
  Description of Artificial Sequence: Synthetic oligonucleotide
  Sense Strand Starting at position 198 of SEQ ID NO: 316387
ugcguaaguccgucucacu

SEQ ID NO: 334366 - RNA, 19 nt, Artificial Sequence
  Description of Artificial Sequence: Synthetic oligonucleotide
  Antisense Strand to SEQ ID NO: 334365
agugagacggacuuacgca

SEQ ID NO: 334367 - RNA, 19 nt, Artificial Sequence
  Description of Artificial Sequence: Synthetic oligonucleotide
  Sense Strand Starting at position 198 of SEQ ID NO: 316459
gaaucagagaguggucgau

SEQ ID NO: 334368 - RNA, 19 nt, Artificial Sequence
  Description of Artificial Sequence: Synthetic oligonucleotide
  Antisense Strand to SEQ ID NO: 334367
aucgaccacucucugauuc

SEQ ID NO: 334369 - RNA, 19 nt, Artificial Sequence
  Description of Artificial Sequence: Synthetic oligonucleotide
  Sense Strand Starting at position 198 of SEQ ID NO: 316463
cagagaguggucgauggua

SEQ ID NO: 334370 - RNA, 19 nt, Artificial Sequence
  Description of Artificial Sequence: Synthetic oligonucleotide
  Antisense Strand to SEQ ID NO: 334369
uaccaucgaccacucucug

SEQ ID NO: 334371 - RNA, 19 nt, Artificial Sequence
  Description of Artificial Sequence: Synthetic oligonucleotide
  Sense Strand Starting at position 198 of SEQ ID NO: 316465
gagaguggucgaugguaag

SEQ ID NO: 334372 - RNA, 19 nt, Artificial Sequence
  Description of Artificial Sequence: Synthetic oligonucleotide
  Antisense Strand to SEQ ID NO: 334371
cuuaccaucgaccacucuc

SEQ ID NO: 334373 - RNA, 19 nt, Artificial Sequence
  Description of Artificial Sequence: Synthetic oligonucleotide
  Sense Strand Starting at position 198 of SEQ ID NO: 316602
gcagcaguagcugucgaau

SEQ ID NO: 334374 - RNA, 19 nt, Artificial Sequence
  Description of Artificial Sequence: Synthetic oligonucleotide
  Antisense Strand to SEQ ID NO: 334373
auucgacagcuacugcugc

SEQ ID NO: 334375 - RNA, 19 nt, Artificial Sequence
  Description of Artificial Sequence: Synthetic oligonucleotide
  Sense Strand Starting at position 198 of SEQ ID NO: 316894
ggaggccuucucuagccaa

SEQ ID NO: 334376 - RNA, 19 nt, Artificial Sequence
  Description of Artificial Sequence: Synthetic oligonucleotide
  Antisense Strand to SEQ ID NO: 334375
uuggcuagagaaggccucc

SEQ ID NO: 334377 - RNA, 19 nt, Artificial Sequence
  Description of Artificial Sequence: Synthetic oligonucleotide
  Sense Strand Starting at position 198 of SEQ ID NO: 316921
gaaaccaccuuguuuguga

SEQ ID NO: 334378 - RNA, 19 nt, Artificial Sequence
  Description of Artificial Sequence: Synthetic oligonucleotide
  Antisense Strand to SEQ ID NO: 334377
ucacaaacaaggugguuuc

SEQ ID NO: 334379 - RNA, 19 nt, Artificial Sequence
  Description of Artificial Sequence: Synthetic oligonucleotide
  Sense Strand Starting at position 198 of SEQ ID NO: 316934
uugugauagccacacgaau

SEQ ID NO: 334380 - RNA, 19 nt, Artificial Sequence
  Description of Artificial Sequence: Synthetic oligonucleotide
  Antisense Strand to SEQ ID NO: 334379
auucguguggcuaucacaa

SEQ ID NO: 334381 - RNA, 19 nt, Artificial Sequence
  Description of Artificial Sequence: Synthetic oligonucleotide
  Sense Strand Starting at position 198 of SEQ ID NO: 316936
gugauagccacacgaauaa

SEQ ID NO: 334382 - RNA, 19 nt, Artificial Sequence
  Description of Artificial Sequence: Synthetic oligonucleotide
  Antisense Strand to SEQ ID NO: 334381
uuauucguguggcuaucac

SEQ ID NO: 334383 - RNA, 19 nt, Artificial Sequence
  Description of Artificial Sequence: Synthetic oligonucleotide
  Sense Strand Starting at position 198 of SEQ ID NO: 316945
acacgaauaacggagcuuu

SEQ ID NO: 334384 - RNA, 19 nt, Artificial Sequence
  Description of Artificial Sequence: Synthetic oligonucleotide
  Antisense Strand to SEQ ID NO: 334383
aaagcuccguuauucgugu

SEQ ID NO: 334385 - RNA, 19 nt, Artificial Sequence
  Description of Artificial Sequence: Synthetic oligonucleotide
  Sense Strand Starting at position 198 of SEQ ID NO: 317198
uuuacaguauuugaagaac

SEQ ID NO: 334386 - RNA, 19 nt, Artificial Sequence
  Description of Artificial Sequence: Synthetic oligonucleotide
  Antisense Strand to SEQ ID NO: 334385
guucuucaaauacuguaaa

SEQ ID NO: 334387 - RNA, 19 nt, Artificial Sequence
  Description of Artificial Sequence: Synthetic oligonucleotide
  Sense Strand Starting at position 198 of SEQ ID NO: 317313
gcgagaguggcugcuuuca

SEQ ID NO: 334388 - RNA, 19 nt, Artificial Sequence
  Description of Artificial Sequence: Synthetic oligonucleotide
  Antisense Strand to SEQ ID NO: 334387
ugaaagcagccacucucgc

SEQ ID NO: 334389 - RNA, 19 nt, Artificial Sequence
  Description of Artificial Sequence: Synthetic oligonucleotide
  Sense Strand Starting at position 198 of SEQ ID NO: 317559
uuuccugaaccuugaagua

SEQ ID NO: 334390 - RNA, 19 nt, Artificial Sequence
  Description of Artificial Sequence: Synthetic oligonucleotide
  Antisense Strand to SEQ ID NO: 334389
uacuucaagguucaggaaa

SEQ ID NO: 334391 - RNA, 19 nt, Artificial Sequence
  Description of Artificial Sequence: Synthetic oligonucleotide
  Sense Strand Starting at position 198 of SEQ ID NO: 317623
aaaggaaugcaucacguuu

SEQ ID NO: 334392 - RNA, 19 nt, Artificial Sequence
  Description of Artificial Sequence: Synthetic oligonucleotide
  Antisense Strand to SEQ ID NO: 334391
aaacgugaugcauuccuuu

SEQ ID NO: 334393 - RNA, 19 nt, Artificial Sequence
  Description of Artificial Sequence: Synthetic oligonucleotide
  Sense Strand Starting at position 198 of SEQ ID NO: 317643
acucuugacgcucagaaag

SEQ ID NO: 334394 - RNA, 19 nt, Artificial Sequence
  Description of Artificial Sequence: Synthetic oligonucleotide
  Antisense Strand to SEQ ID NO: 334393
cuuucugagcgucaagagu

SEQ ID NO: 334395 - RNA, 19 nt, Artificial Sequence
  Description of Artificial Sequence: Synthetic oligonucleotide
  Sense Strand Starting at position 198 of SEQ ID NO: 317751
ggagguacucucugaaauu

SEQ ID NO: 334396 - RNA, 19 nt, Artificial Sequence
  Description of Artificial Sequence: Synthetic oligonucleotide
  Antisense Strand to SEQ ID NO: 334395
aauuucagagaguaccucc

SEQ ID NO: 334397 - RNA, 19 nt, Artificial Sequence
  Description of Artificial Sequence: Synthetic oligonucleotide
  Sense Strand Starting at position 198 of SEQ ID NO: 317752
gagguacucucugaaauuu

SEQ ID NO: 334398 - RNA, 19 nt, Artificial Sequence
  Description of Artificial Sequence: Synthetic oligonucleotide
  Antisense Strand to SEQ ID NO: 334397
aaauuucagagaguaccuc

SEQ ID NO: 334399 - RNA, 19 nt, Artificial Sequence
  Description of Artificial Sequence: Synthetic oligonucleotide
  Sense Strand Starting at position 198 of SEQ ID NO: 317769
uuccuuuccugacuagaga

SEQ ID NO: 334400 - RNA, 19 nt, Artificial Sequence
  Description of Artificial Sequence: Synthetic oligonucleotide
  Antisense Strand to SEQ ID NO: 334399
ucucuagucaggaaaggaa

SEQ ID NO: 334401 - RNA, 19 nt, Artificial Sequence
  Description of Artificial Sequence: Synthetic oligonucleotide
  Sense Strand Starting at position 198 of SEQ ID NO: 317783
agagaagccucuuuguaga

SEQ ID NO: 334402 - RNA, 19 nt, Artificial Sequence
  Description of Artificial Sequence: Synthetic oligonucleotide
  Antisense Strand to SEQ ID NO: 334401
ucuacaaagaggcuucucu

SEQ ID NO: 334403 - RNA, 19 nt, Artificial Sequence
  Description of Artificial Sequence: Synthetic oligonucleotide
  Sense Strand Starting at position 198 of SEQ ID NO: 317788
agccucuuuguagaagaau

SEQ ID NO: 334404 - RNA, 19 nt, Artificial Sequence
  Description of Artificial Sequence: Synthetic oligonucleotide
  Antisense Strand to SEQ ID NO: 334403
auucuucuacaaagaggcu

SEQ ID NO: 334405 - RNA, 19 nt, Artificial Sequence
  Description of Artificial Sequence: Synthetic oligonucleotide
  Sense Strand Starting at position 198 of SEQ ID NO: 318038
uaagcuacuggguaaucau

SEQ ID NO: 334406 - RNA, 19 nt, Artificial Sequence
  Description of Artificial Sequence: Synthetic oligonucleotide
  Antisense Strand to SEQ ID NO: 334405
augauuacccaguagcuua

SEQ ID NO: 334407 - RNA, 19 nt, Artificial Sequence
  Description of Artificial Sequence: Synthetic oligonucleotide
  Sense Strand Starting at position 198 of SEQ ID NO: 318442
gccuuaucaguugauuaag

SEQ ID NO: 334408 - RNA, 19 nt, Artificial Sequence
  Description of Artificial Sequence: Synthetic oligonucleotide
  Antisense Strand to SEQ ID NO: 334407
cuuaaucaacugauaaggc

SEQ ID NO: 334409 - RNA, 19 nt, Artificial Sequence
  Description of Artificial Sequence: Synthetic oligonucleotide
  Sense Strand Starting at position 198 of SEQ ID NO: 318445
uuaucaguugauuaaguga

SEQ ID NO: 334410 - RNA, 19 nt, Artificial Sequence
  Description of Artificial Sequence: Synthetic oligonucleotide
  Antisense Strand to SEQ ID NO: 334409
ucacuuaaucaacugauaa

SEQ ID NO: 334411 - RNA, 19 nt, Artificial Sequence
  Description of Artificial Sequence: Synthetic oligonucleotide
  Sense Strand Starting at position 198 of SEQ ID NO: 318570
cugucuucgagugauugga

SEQ ID NO: 334412 - RNA, 19 nt, Artificial Sequence
  Description of Artificial Sequence: Synthetic oligonucleotide
  Antisense Strand to SEQ ID NO: 334411
uccaaucacucgaagacag

SEQ ID NO: 334413 - RNA, 19 nt, Artificial Sequence
  Description of Artificial Sequence: Synthetic oligonucleotide
  Sense Strand Starting at position 198 of SEQ ID NO: 318578
gagugauuggaauguacag

SEQ ID NO: 334414 - RNA, 19 nt, Artificial Sequence
  Description of Artificial Sequence: Synthetic oligonucleotide
  Antisense Strand to SEQ ID NO: 334413
cuguacauuccaaucacuc

SEQ ID NO: 334415 - RNA, 19 nt, Artificial Sequence
  Description of Artificial Sequence: Synthetic oligonucleotide
  Sense Strand Starting at position 198 of SEQ ID NO: 318594
cagccaagagaguguaauu

SEQ ID NO: 334416 - RNA, 19 nt, Artificial Sequence
  Description of Artificial Sequence: Synthetic oligonucleotide
  Antisense Strand to SEQ ID NO: 334415
aauuacacucucuuggcug

SEQ ID NO: 334417 - RNA, 19 nt, Artificial Sequence
  Description of Artificial Sequence: Synthetic oligonucleotide
  Sense Strand Starting at position 198 of SEQ ID NO: 318599
aagagaguguaauuauggu

SEQ ID NO: 334418 - RNA, 19 nt, Artificial Sequence
  Description of Artificial Sequence: Synthetic oligonucleotide
  Antisense Strand to SEQ ID NO: 334417
accauaauuacacucucuu

SEQ ID NO: 334419 - RNA, 19 nt, Artificial Sequence
  Description of Artificial Sequence: Synthetic oligonucleotide
  Sense Strand Starting at position 198 of SEQ ID NO: 318628
guauuaaccuaucuggaug

SEQ ID NO: 334420 - RNA, 19 nt, Artificial Sequence
  Description of Artificial Sequence: Synthetic oligonucleotide
  Antisense Strand to SEQ ID NO: 334419
cauccagauagguuaauac

SEQ ID NO: 334421 - RNA, 19 nt, Artificial Sequence
  Description of Artificial Sequence: Synthetic oligonucleotide
  Sense Strand Starting at position 198 of SEQ ID NO: 318671
gcugcuuccagggaaucuu

SEQ ID NO: 334422 - RNA, 19 nt, Artificial Sequence
  Description of Artificial Sequence: Synthetic oligonucleotide
  Antisense Strand to SEQ ID NO: 334421
aagauucccuggaagcagc

SEQ ID NO: 334423 - RNA, 19 nt, Artificial Sequence
  Description of Artificial Sequence: Synthetic oligonucleotide
  Sense Strand Starting at position 198 of SEQ ID NO: 318949
gguugugugagauauuauc

SEQ ID NO: 334424 - RNA, 19 nt, Artificial Sequence
  Description of Artificial Sequence: Synthetic oligonucleotide
  Antisense Strand to SEQ ID NO: 334423
gauaauaucucacacaacc

SEQ ID NO: 334425 - RNA, 19 nt, Artificial Sequence
  Description of Artificial Sequence: Synthetic oligonucleotide
  Sense Strand Starting at position 198 of SEQ ID NO: 318991
auaggaguagucuaucuuu

SEQ ID NO: 334426 - RNA, 19 nt, Artificial Sequence
  Description of Artificial Sequence: Synthetic oligonucleotide
  Antisense Strand to SEQ ID NO: 334425
aaagauagacuacuccuau

SEQ ID NO: 334427 - RNA, 19 nt, Artificial Sequence
  Description of Artificial Sequence: Synthetic oligonucleotide
  Sense Strand Starting at position 198 of SEQ ID NO: 319106
uuuguaaugacuugagagu

SEQ ID NO: 334428 - RNA, 19 nt, Artificial Sequence
  Description of Artificial Sequence: Synthetic oligonucleotide
  Antisense Strand to SEQ ID NO: 334427
acucucaagucauuacaaa

SEQ ID NO: 334429 - RNA, 19 nt, Artificial Sequence
  Description of Artificial Sequence: Synthetic oligonucleotide
  Sense Strand Starting at position 198 of SEQ ID NO: 319200
auggcuuaaugucucagaa

SEQ ID NO: 334430 - RNA, 19 nt, Artificial Sequence
  Description of Artificial Sequence: Synthetic oligonucleotide
  Antisense Strand to SEQ ID NO: 334429
uucugagacauuaagccau

SEQ ID NO: 334431 - RNA, 19 nt, Artificial Sequence
  Description of Artificial Sequence: Synthetic oligonucleotide
  Sense Strand Starting at position 199 of SEQ ID NO: 315285
gcuaacggucacuaacaaa

SEQ ID NO: 334432 - RNA, 19 nt, Artificial Sequence
  Description of Artificial Sequence: Synthetic oligonucleotide
  Antisense Strand to SEQ ID NO: 334431
uuuguuagugaccguuagc

SEQ ID NO: 334433 - RNA, 19 nt, Artificial Sequence
  Description of Artificial Sequence: Synthetic oligonucleotide
  Sense Strand Starting at position 199 of SEQ ID NO: 315397
cagguuaacaguggaagua

SEQ ID NO: 334434 - RNA, 19 nt, Artificial Sequence
  Description of Artificial Sequence: Synthetic oligonucleotide
  Antisense Strand to SEQ ID NO: 334433
uacuuccacuguuaaccug

SEQ ID NO: 334435 - RNA, 19 nt, Artificial Sequence
  Description of Artificial Sequence: Synthetic oligonucleotide
  Sense Strand Starting at position 199 of SEQ ID NO: 315398
agguuaacaguggaaguau

SEQ ID NO: 334436 - RNA, 19 nt, Artificial Sequence
  Description of Artificial Sequence: Synthetic oligonucleotide
  Antisense Strand to SEQ ID NO: 334435
auacuuccacuguuaaccu

SEQ ID NO: 334437 - RNA, 19 nt, Artificial Sequence
  Description of Artificial Sequence: Synthetic oligonucleotide
  Sense Strand Starting at position 199 of SEQ ID NO: 315415
augcaaauagcuuggaaag

SEQ ID NO: 334438 - RNA, 19 nt, Artificial Sequence
  Description of Artificial Sequence: Synthetic oligonucleotide
  Antisense Strand to SEQ ID NO: 334437
cuuuccaagcuauuugcau

SEQ ID NO: 334439 - RNA, 19 nt, Artificial Sequence
  Description of Artificial Sequence: Synthetic oligonucleotide
  Sense Strand Starting at position 199 of SEQ ID NO: 315455
gccugaucccaugagucca

SEQ ID NO: 334440 - RNA, 19 nt, Artificial Sequence
  Description of Artificial Sequence: Synthetic oligonucleotide
  Antisense Strand to SEQ ID NO: 334439
uggacucaugggaucaggc

SEQ ID NO: 334441 - RNA, 19 nt, Artificial Sequence
  Description of Artificial Sequence: Synthetic oligonucleotide
  Sense Strand Starting at position 199 of SEQ ID NO: 315813
ugaagucucugagcagaga

SEQ ID NO: 334442 - RNA, 19 nt, Artificial Sequence
  Description of Artificial Sequence: Synthetic oligonucleotide
  Antisense Strand to SEQ ID NO: 334441
ucucugcucagagacuuca

SEQ ID NO: 334443 - RNA, 19 nt, Artificial Sequence
  Description of Artificial Sequence: Synthetic oligonucleotide
  Sense Strand Starting at position 199 of SEQ ID NO: 315950
gcuugaaacugaccacagu

SEQ ID NO: 334444 - RNA, 19 nt, Artificial Sequence
  Description of Artificial Sequence: Synthetic oligonucleotide
  Antisense Strand to SEQ ID NO: 334443
acuguggucaguuucaagc

SEQ ID NO: 334445 - RNA, 19 nt, Artificial Sequence
  Description of Artificial Sequence: Synthetic oligonucleotide
  Sense Strand Starting at position 199 of SEQ ID NO: 315971
gggcauuuauaccaugaaa

SEQ ID NO: 334446 - RNA, 19 nt, Artificial Sequence
  Description of Artificial Sequence: Synthetic oligonucleotide
  Antisense Strand to SEQ ID NO: 334445
uuucaugguauaaaugccc

SEQ ID NO: 334447 - RNA, 19 nt, Artificial Sequence
  Description of Artificial Sequence: Synthetic oligonucleotide
  Sense Strand Starting at position 199 of SEQ ID NO: 316000
guuauaaagcagggaucuu

SEQ ID NO: 334448 - RNA, 19 nt, Artificial Sequence
  Description of Artificial Sequence: Synthetic oligonucleotide
  Antisense Strand to SEQ ID NO: 334447
aagaucccugcuuuauaac

SEQ ID NO: 334449 - RNA, 19 nt, Artificial Sequence
  Description of Artificial Sequence: Synthetic oligonucleotide
  Sense Strand Starting at position 199 of SEQ ID NO: 316025
agaagagucaguuguugaa

SEQ ID NO: 334450 - RNA, 19 nt, Artificial Sequence
  Description of Artificial Sequence: Synthetic oligonucleotide
  Antisense Strand to SEQ ID NO: 334449
uucaacaacugacucuucu

SEQ ID NO: 334451 - RNA, 19 nt, Artificial Sequence
  Description of Artificial Sequence: Synthetic oligonucleotide
  Sense Strand Starting at position 199 of SEQ ID NO: 316027
aagagucaguuguugaaca

SEQ ID NO: 334452 - RNA, 19 nt, Artificial Sequence
  Description of Artificial Sequence: Synthetic oligonucleotide
  Antisense Strand to SEQ ID NO: 334451
uguucaacaacugacucuu

SEQ ID NO: 334453 - RNA, 19 nt, Artificial Sequence
  Description of Artificial Sequence: Synthetic oligonucleotide
  Sense Strand Starting at position 199 of SEQ ID NO: 316029
gagucaguuguugaacauu

SEQ ID NO: 334454 - RNA, 19 nt, Artificial Sequence
  Description of Artificial Sequence: Synthetic oligonucleotide
  Antisense Strand to SEQ ID NO: 334453
aauguucaacaacugacuc

SEQ ID NO: 334455 - RNA, 19 nt, Artificial Sequence
  Description of Artificial Sequence: Synthetic oligonucleotide
  Sense Strand Starting at position 199 of SEQ ID NO: 316187
cuuugaaaucugggaccca

SEQ ID NO: 334456 - RNA, 19 nt, Artificial Sequence
  Description of Artificial Sequence: Synthetic oligonucleotide
  Antisense Strand to SEQ ID NO: 334455
ugggucccagauuucaaag

SEQ ID NO: 334457 - RNA, 19 nt, Artificial Sequence
  Description of Artificial Sequence: Synthetic oligonucleotide
  Sense Strand Starting at position 199 of SEQ ID NO: 316406
gucuucuuaagagauaggu

SEQ ID NO: 334458 - RNA, 19 nt, Artificial Sequence
  Description of Artificial Sequence: Synthetic oligonucleotide
  Antisense Strand to SEQ ID NO: 334457
accuaucucuuaagaagac

SEQ ID NO: 334459 - RNA, 19 nt, Artificial Sequence
  Description of Artificial Sequence: Synthetic oligonucleotide
  Sense Strand Starting at position 199 of SEQ ID NO: 316732
ucaccauauggccaggauu

SEQ ID NO: 334460 - RNA, 19 nt, Artificial Sequence
  Description of Artificial Sequence: Synthetic oligonucleotide
  Antisense Strand to SEQ ID NO: 334459
aauccuggccauaugguga

SEQ ID NO: 334461 - RNA, 19 nt, Artificial Sequence
  Description of Artificial Sequence: Synthetic oligonucleotide
  Sense Strand Starting at position 199 of SEQ ID NO: 316847
uugaauagguuuccacaga

SEQ ID NO: 334462 - RNA, 19 nt, Artificial Sequence
  Description of Artificial Sequence: Synthetic oligonucleotide
  Antisense Strand to SEQ ID NO: 334461
ucuguggaaaccuauucaa

SEQ ID NO: 334463 - RNA, 19 nt, Artificial Sequence
  Description of Artificial Sequence: Synthetic oligonucleotide
  Sense Strand Starting at position 199 of SEQ ID NO: 317015
auuaauugccuuggagaug

SEQ ID NO: 334464 - RNA, 19 nt, Artificial Sequence
  Description of Artificial Sequence: Synthetic oligonucleotide
  Antisense Strand to SEQ ID NO: 334463
caucuccaaggcaauuaau

SEQ ID NO: 334465 - RNA, 19 nt, Artificial Sequence
  Description of Artificial Sequence: Synthetic oligonucleotide
  Sense Strand Starting at position 199 of SEQ ID NO: 317282
cugugugaugauggagaau

SEQ ID NO: 334466 - RNA, 19 nt, Artificial Sequence
  Description of Artificial Sequence: Synthetic oligonucleotide
  Antisense Strand to SEQ ID NO: 334465
auucuccaucaucacacag

SEQ ID NO: 334467 - RNA, 19 nt, Artificial Sequence
  Description of Artificial Sequence: Synthetic oligonucleotide
  Sense Strand Starting at position 199 of SEQ ID NO: 317295
gagaauuggcuccaguuuc

SEQ ID NO: 334468 - RNA, 19 nt, Artificial Sequence
  Description of Artificial Sequence: Synthetic oligonucleotide
  Antisense Strand to SEQ ID NO: 334467
gaaacuggagccaauucuc

SEQ ID NO: 334469 - RNA, 19 nt, Artificial Sequence
  Description of Artificial Sequence: Synthetic oligonucleotide
  Sense Strand Starting at position 199 of SEQ ID NO: 317473
ggagcucagccuuaaggga

SEQ ID NO: 334470 - RNA, 19 nt, Artificial Sequence
  Description of Artificial Sequence: Synthetic oligonucleotide
  Antisense Strand to SEQ ID NO: 334469
ucccuuaaggcugagcucc

SEQ ID NO: 334471 - RNA, 19 nt, Artificial Sequence
  Description of Artificial Sequence: Synthetic oligonucleotide
  Sense Strand Starting at position 199 of SEQ ID NO: 317556
gagcaauugaaguguggga

SEQ ID NO: 334472 - RNA, 19 nt, Artificial Sequence
  Description of Artificial Sequence: Synthetic oligonucleotide
  Antisense Strand to SEQ ID NO: 334471
ucccacacuucaauugcuc

SEQ ID NO: 334473 - RNA, 19 nt, Artificial Sequence
  Description of Artificial Sequence: Synthetic oligonucleotide
  Sense Strand Starting at position 199 of SEQ ID NO: 317643
cuucuuaaagauugugaau

SEQ ID NO: 334474 - RNA, 19 nt, Artificial Sequence
  Description of Artificial Sequence: Synthetic oligonucleotide
  Antisense Strand to SEQ ID NO: 334473
auucacaaucuuuaagaag

SEQ ID NO: 334475 - RNA, 19 nt, Artificial Sequence
  Description of Artificial Sequence: Synthetic oligonucleotide
  Sense Strand Starting at position 199 of SEQ ID NO: 317918
uuacgugauggucaaacau

SEQ ID NO: 334476 - RNA, 19 nt, Artificial Sequence
  Description of Artificial Sequence: Synthetic oligonucleotide
  Antisense Strand to SEQ ID NO: 334475
auguuugaccaucacguaa

SEQ ID NO: 334477 - RNA, 19 nt, Artificial Sequence
  Description of Artificial Sequence: Synthetic oligonucleotide
  Sense Strand Starting at position 199 of SEQ ID NO: 317967
gugacaugggcagaucacu

SEQ ID NO: 334478 - RNA, 19 nt, Artificial Sequence
  Description of Artificial Sequence: Synthetic oligonucleotide
  Antisense Strand to SEQ ID NO: 334477
agugaucugcccaugucac

SEQ ID NO: 334479 - RNA, 19 nt, Artificial Sequence
  Description of Artificial Sequence: Synthetic oligonucleotide
  Sense Strand Starting at position 199 of SEQ ID NO: 318021
gggaguauugaaugcuuac

SEQ ID NO: 334480 - RNA, 19 nt, Artificial Sequence
  Description of Artificial Sequence: Synthetic oligonucleotide
  Antisense Strand to SEQ ID NO: 334479
guaagcauucaauacuccc

SEQ ID NO: 334481 - RNA, 19 nt, Artificial Sequence
  Description of Artificial Sequence: Synthetic oligonucleotide
  Sense Strand Starting at position 199 of SEQ ID NO: 318027
auugaaugcuuaccucaga

SEQ ID NO: 334482 - RNA, 19 nt, Artificial Sequence
  Description of Artificial Sequence: Synthetic oligonucleotide
  Antisense Strand to SEQ ID NO: 334481
ucugagguaagcauucaau

SEQ ID NO: 334483 - RNA, 19 nt, Artificial Sequence
  Description of Artificial Sequence: Synthetic oligonucleotide
  Sense Strand Starting at position 199 of SEQ ID NO: 318111
gacaaaugaugaguacugu

SEQ ID NO: 334484 - RNA, 19 nt, Artificial Sequence
  Description of Artificial Sequence: Synthetic oligonucleotide
  Antisense Strand to SEQ ID NO: 334483
acaguacucaucauuuguc

SEQ ID NO: 334485 - RNA, 19 nt, Artificial Sequence
  Description of Artificial Sequence: Synthetic oligonucleotide
  Sense Strand Starting at position 199 of SEQ ID NO: 318236
cagaaaucaucagugugaa

SEQ ID NO: 334486 - RNA, 19 nt, Artificial Sequence
  Description of Artificial Sequence: Synthetic oligonucleotide
  Antisense Strand to SEQ ID NO: 334485
uucacacugaugauuucug

SEQ ID NO: 334487 - RNA, 19 nt, Artificial Sequence
  Description of Artificial Sequence: Synthetic oligonucleotide
  Sense Strand Starting at position 199 of SEQ ID NO: 318237
agaaaucaucagugugaau

SEQ ID NO: 334488 - RNA, 19 nt, Artificial Sequence
  Description of Artificial Sequence: Synthetic oligonucleotide
  Antisense Strand to SEQ ID NO: 334487
auucacacugaugauuucu

SEQ ID NO: 334489 - RNA, 19 nt, Artificial Sequence
  Description of Artificial Sequence: Synthetic oligonucleotide
  Sense Strand Starting at position 199 of SEQ ID NO: 318421
guggaucaguuuccaaaga

SEQ ID NO: 334490 - RNA, 19 nt, Artificial Sequence
  Description of Artificial Sequence: Synthetic oligonucleotide
  Antisense Strand to SEQ ID NO: 334489
ucuuuggaaacugauccac

SEQ ID NO: 334491 - RNA, 19 nt, Artificial Sequence
  Description of Artificial Sequence: Synthetic oligonucleotide
  Sense Strand Starting at position 199 of SEQ ID NO: 318469
cuugauccugucuaaagua

SEQ ID NO: 334492 - RNA, 19 nt, Artificial Sequence
  Description of Artificial Sequence: Synthetic oligonucleotide
  Antisense Strand to SEQ ID NO: 334491
uacuuuagacaggaucaag

SEQ ID NO: 334493 - RNA, 19 nt, Artificial Sequence
  Description of Artificial Sequence: Synthetic oligonucleotide
  Sense Strand Starting at position 199 of SEQ ID NO: 318556
ggauguaccaggcaaaucu

SEQ ID NO: 334494 - RNA, 19 nt, Artificial Sequence
  Description of Artificial Sequence: Synthetic oligonucleotide
  Antisense Strand to SEQ ID NO: 334493
agauuugccugguacaucc

SEQ ID NO: 334495 - RNA, 19 nt, Artificial Sequence
  Description of Artificial Sequence: Synthetic oligonucleotide
  Sense Strand Starting at position 199 of SEQ ID NO: 318637
uugggauauaguggugaag

SEQ ID NO: 334496 - RNA, 19 nt, Artificial Sequence
  Description of Artificial Sequence: Synthetic oligonucleotide
  Antisense Strand to SEQ ID NO: 334495
cuucaccacuauaucccaa

SEQ ID NO: 334497 - RNA, 19 nt, Artificial Sequence
  Description of Artificial Sequence: Synthetic oligonucleotide
  Sense Strand Starting at position 199 of SEQ ID NO: 318663
cuggauccauucuuugaga

SEQ ID NO: 334498 - RNA, 19 nt, Artificial Sequence
  Description of Artificial Sequence: Synthetic oligonucleotide
  Antisense Strand to SEQ ID NO: 334497
ucucaaagaauggauccag

SEQ ID NO: 334499 - RNA, 19 nt, Artificial Sequence
  Description of Artificial Sequence: Synthetic oligonucleotide
  Sense Strand Starting at position 199 of SEQ ID NO: 318678
gagagcuuauagcuuagga

SEQ ID NO: 334500 - RNA, 19 nt, Artificial Sequence
  Description of Artificial Sequence: Synthetic oligonucleotide
  Antisense Strand to SEQ ID NO: 334499
uccuaagcuauaagcucuc

SEQ ID NO: 334501 - RNA, 19 nt, Artificial Sequence
  Description of Artificial Sequence: Synthetic oligonucleotide
  Sense Strand Starting at position 199 of SEQ ID NO: 318680
gagcuuauagcuuaggaag

SEQ ID NO: 334502 - RNA, 19 nt, Artificial Sequence
  Description of Artificial Sequence: Synthetic oligonucleotide
  Antisense Strand to SEQ ID NO: 334501
cuuccuaagcuauaagcuc

SEQ ID NO: 334503 - RNA, 19 nt, Artificial Sequence
  Description of Artificial Sequence: Synthetic oligonucleotide
  Sense Strand Starting at position 199 of SEQ ID NO: 318753
ugggaaauacccugggcua

SEQ ID NO: 334504 - RNA, 19 nt, Artificial Sequence
  Description of Artificial Sequence: Synthetic oligonucleotide
  Antisense Strand to SEQ ID NO: 334503
uagcccaggguauuuccca

SEQ ID NO: 334505 - RNA, 19 nt, Artificial Sequence
  Description of Artificial Sequence: Synthetic oligonucleotide
  Sense Strand Starting at position 199 of SEQ ID NO: 318754
gggaaauacccugggcuaa

SEQ ID NO: 334506 - RNA, 19 nt, Artificial Sequence
  Description of Artificial Sequence: Synthetic oligonucleotide
  Antisense Strand to SEQ ID NO: 334505
uuagcccaggguauuuccc

SEQ ID NO: 334507 - RNA, 19 nt, Artificial Sequence
  Description of Artificial Sequence: Synthetic oligonucleotide
  Sense Strand Starting at position 199 of SEQ ID NO: 318857
ucacauucccugggacauu

SEQ ID NO: 334508 - RNA, 19 nt, Artificial Sequence
  Description of Artificial Sequence: Synthetic oligonucleotide
  Antisense Strand to SEQ ID NO: 334507
aaugucccagggaauguga

SEQ ID NO: 334509 - RNA, 19 nt, Artificial Sequence
  Description of Artificial Sequence: Synthetic oligonucleotide
  Sense Strand Starting at position 199 of SEQ ID NO: 318896
gguuacaugccagauauac

SEQ ID NO: 334510 - RNA, 19 nt, Artificial Sequence
  Description of Artificial Sequence: Synthetic oligonucleotide
  Antisense Strand to SEQ ID NO: 334509
guauaucuggcauguaacc

SEQ ID NO: 334511 - RNA, 19 nt, Artificial Sequence
  Description of Artificial Sequence: Synthetic oligonucleotide
  Sense Strand Starting at position 200 of SEQ ID NO: 315250
ugaguuccaccucauagau

SEQ ID NO: 334512 - RNA, 19 nt, Artificial Sequence
  Description of Artificial Sequence: Synthetic oligonucleotide
  Antisense Strand to SEQ ID NO: 334511
aucuaugagguggaacuca

SEQ ID NO: 334513 - RNA, 19 nt, Artificial Sequence
  Description of Artificial Sequence: Synthetic oligonucleotide
  Sense Strand Starting at position 200 of SEQ ID NO: 315418
auugaauagucacucuuag

SEQ ID NO: 334514 - RNA, 19 nt, Artificial Sequence
  Description of Artificial Sequence: Synthetic oligonucleotide
  Antisense Strand to SEQ ID NO: 334513
cuaagagugacuauucaau

SEQ ID NO: 334515 - RNA, 19 nt, Artificial Sequence
  Description of Artificial Sequence: Synthetic oligonucleotide
  Sense Strand Starting at position 200 of SEQ ID NO: 315447
ccaguagcccuaugacuua

SEQ ID NO: 334516 - RNA, 19 nt, Artificial Sequence
  Description of Artificial Sequence: Synthetic oligonucleotide
  Antisense Strand to SEQ ID NO: 334515
uaagucauagggcuacugg

SEQ ID NO: 334517 - RNA, 19 nt, Artificial Sequence
  Description of Artificial Sequence: Synthetic oligonucleotide
  Sense Strand Starting at position 200 of SEQ ID NO: 315450
guagcccuaugacuuauau

SEQ ID NO: 334518 - RNA, 19 nt, Artificial Sequence
  Description of Artificial Sequence: Synthetic oligonucleotide
  Antisense Strand to SEQ ID NO: 334517
auauaagucauagggcuac

SEQ ID NO: 334519 - RNA, 19 nt, Artificial Sequence
  Description of Artificial Sequence: Synthetic oligonucleotide
  Sense Strand Starting at position 200 of SEQ ID NO: 315468
uguggugggcuucaaagau

SEQ ID NO: 334520 - RNA, 19 nt, Artificial Sequence
  Description of Artificial Sequence: Synthetic oligonucleotide
  Antisense Strand to SEQ ID NO: 334519
aucuuugaagcccaccaca

SEQ ID NO: 334521 - RNA, 19 nt, Artificial Sequence
  Description of Artificial Sequence: Synthetic oligonucleotide
  Sense Strand Starting at position 200 of SEQ ID NO: 315668
aaugauuggugagcuucua

SEQ ID NO: 334522 - RNA, 19 nt, Artificial Sequence
  Description of Artificial Sequence: Synthetic oligonucleotide
  Antisense Strand to SEQ ID NO: 334521
uagaagcucaccaaucauu

SEQ ID NO: 334523 - RNA, 19 nt, Artificial Sequence
  Description of Artificial Sequence: Synthetic oligonucleotide
  Sense Strand Starting at position 200 of SEQ ID NO: 315725
ugugaagccuaaucuguau

SEQ ID NO: 334524 - RNA, 19 nt, Artificial Sequence
  Description of Artificial Sequence: Synthetic oligonucleotide
  Antisense Strand to SEQ ID NO: 334523
auacagauuaggcuucaca

SEQ ID NO: 334525 - RNA, 19 nt, Artificial Sequence
  Description of Artificial Sequence: Synthetic oligonucleotide
  Sense Strand Starting at position 200 of SEQ ID NO: 315736
aucuguauccucugucaua

SEQ ID NO: 334526 - RNA, 19 nt, Artificial Sequence
  Description of Artificial Sequence: Synthetic oligonucleotide
  Antisense Strand to SEQ ID NO: 334525
uaugacagaggauacagau

SEQ ID NO: 334527 - RNA, 19 nt, Artificial Sequence
  Description of Artificial Sequence: Synthetic oligonucleotide
  Sense Strand Starting at position 200 of SEQ ID NO: 315817
acagcauguuccucaagau

SEQ ID NO: 334528 - RNA, 19 nt, Artificial Sequence
  Description of Artificial Sequence: Synthetic oligonucleotide
  Antisense Strand to SEQ ID NO: 334527
aucuugaggaacaugcugu

SEQ ID NO: 334529 - RNA, 19 nt, Artificial Sequence
  Description of Artificial Sequence: Synthetic oligonucleotide
  Sense Strand Starting at position 200 of SEQ ID NO: 315841
acuggauuaugcuucuauu

SEQ ID NO: 334530 - RNA, 19 nt, Artificial Sequence
  Description of Artificial Sequence: Synthetic oligonucleotide
  Antisense Strand to SEQ ID NO: 334529
aauagaagcauaauccagu

SEQ ID NO: 334531 - RNA, 19 nt, Artificial Sequence
  Description of Artificial Sequence: Synthetic oligonucleotide
  Sense Strand Starting at position 200 of SEQ ID NO: 315868
uuaugauaguaccuggcua

SEQ ID NO: 334532 - RNA, 19 nt, Artificial Sequence
  Description of Artificial Sequence: Synthetic oligonucleotide
  Antisense Strand to SEQ ID NO: 334531
uagccagguacuaucauaa

SEQ ID NO: 334533 - RNA, 19 nt, Artificial Sequence
  Description of Artificial Sequence: Synthetic oligonucleotide
  Sense Strand Starting at position 200 of SEQ ID NO: 315870
augauaguaccuggcuaaa

SEQ ID NO: 334534 - RNA, 19 nt, Artificial Sequence
  Description of Artificial Sequence: Synthetic oligonucleotide
  Antisense Strand to SEQ ID NO: 334533
uuuagccagguacuaucau

SEQ ID NO: 334535 - RNA, 19 nt, Artificial Sequence
  Description of Artificial Sequence: Synthetic oligonucleotide
  Sense Strand Starting at position 200 of SEQ ID NO: 316082
ucauaucacugagccagau

SEQ ID NO: 334536 - RNA, 19 nt, Artificial Sequence
  Description of Artificial Sequence: Synthetic oligonucleotide
  Antisense Strand to SEQ ID NO: 334535
aucuggcucagugauauga

SEQ ID NO: 334537 - RNA, 19 nt, Artificial Sequence
  Description of Artificial Sequence: Synthetic oligonucleotide
  Sense Strand Starting at position 200 of SEQ ID NO: 316091
ugagccagauucuugaaau

SEQ ID NO: 334538 - RNA, 19 nt, Artificial Sequence
  Description of Artificial Sequence: Synthetic oligonucleotide
  Antisense Strand to SEQ ID NO: 334537
auuucaagaaucuggcuca

SEQ ID NO: 334539 - RNA, 19 nt, Artificial Sequence
  Description of Artificial Sequence: Synthetic oligonucleotide
  Sense Strand Starting at position 200 of SEQ ID NO: 316167
gaaucacaacuguggucau

SEQ ID NO: 334540 - RNA, 19 nt, Artificial Sequence
  Description of Artificial Sequence: Synthetic oligonucleotide
  Antisense Strand to SEQ ID NO: 334539
augaccacaguugugauuc

SEQ ID NO: 334541 - RNA, 19 nt, Artificial Sequence
  Description of Artificial Sequence: Synthetic oligonucleotide
  Sense Strand Starting at position 200 of SEQ ID NO: 316170
ucacaacuguggucauuaa

SEQ ID NO: 334542 - RNA, 19 nt, Artificial Sequence
  Description of Artificial Sequence: Synthetic oligonucleotide
  Antisense Strand to SEQ ID NO: 334541
uuaaugaccacaguuguga

SEQ ID NO: 334543 - RNA, 19 nt, Artificial Sequence
  Description of Artificial Sequence: Synthetic oligonucleotide
  Sense Strand Starting at position 200 of SEQ ID NO: 316182
ucauuaauugagugcuccu

SEQ ID NO: 334544 - RNA, 19 nt, Artificial Sequence
  Description of Artificial Sequence: Synthetic oligonucleotide
  Antisense Strand to SEQ ID NO: 334543
aggagcacucaauuaauga

SEQ ID NO: 334545 - RNA, 19 nt, Artificial Sequence
  Description of Artificial Sequence: Synthetic oligonucleotide
  Sense Strand Starting at position 200 of SEQ ID NO: 316185
uuaauugagugcuccugaa

SEQ ID NO: 334546 - RNA, 19 nt, Artificial Sequence
  Description of Artificial Sequence: Synthetic oligonucleotide
  Antisense Strand to SEQ ID NO: 334545
uucaggagcacucaauuaa

SEQ ID NO: 334547 - RNA, 19 nt, Artificial Sequence
  Description of Artificial Sequence: Synthetic oligonucleotide
  Sense Strand Starting at position 200 of SEQ ID NO: 316205
cucagaugcuauguuaaau

SEQ ID NO: 334548 - RNA, 19 nt, Artificial Sequence
  Description of Artificial Sequence: Synthetic oligonucleotide
  Antisense Strand to SEQ ID NO: 334547
auuuaacauagcaucugag

SEQ ID NO: 334549 - RNA, 19 nt, Artificial Sequence
  Description of Artificial Sequence: Synthetic oligonucleotide
  Sense Strand Starting at position 200 of SEQ ID NO: 316292
ugagcaagaugccugaaau

SEQ ID NO: 334550 - RNA, 19 nt, Artificial Sequence
  Description of Artificial Sequence: Synthetic oligonucleotide
  Antisense Strand to SEQ ID NO: 334549
auuucaggcaucuugcuca

SEQ ID NO: 334551 - RNA, 19 nt, Artificial Sequence
  Description of Artificial Sequence: Synthetic oligonucleotide
  Sense Strand Starting at position 200 of SEQ ID NO: 316293
gagcaagaugccugaaaug

SEQ ID NO: 334552 - RNA, 19 nt, Artificial Sequence
  Description of Artificial Sequence: Synthetic oligonucleotide
  Antisense Strand to SEQ ID NO: 334551
cauuucaggcaucuugcuc

SEQ ID NO: 334553 - RNA, 19 nt, Artificial Sequence
  Description of Artificial Sequence: Synthetic oligonucleotide
  Sense Strand Starting at position 200 of SEQ ID NO: 316405
uguggaucuccugaguuga

SEQ ID NO: 334554 - RNA, 19 nt, Artificial Sequence
  Description of Artificial Sequence: Synthetic oligonucleotide
  Antisense Strand to SEQ ID NO: 334553
ucaacucaggagauccaca

SEQ ID NO: 334555 - RNA, 19 nt, Artificial Sequence
  Description of Artificial Sequence: Synthetic oligonucleotide
  Sense Strand Starting at position 200 of SEQ ID NO: 316447
gagcuuggaugguccuaua

SEQ ID NO: 334556 - RNA, 19 nt, Artificial Sequence
  Description of Artificial Sequence: Synthetic oligonucleotide
  Antisense Strand to SEQ ID NO: 334555
uauaggaccauccaagcuc

SEQ ID NO: 334557 - RNA, 19 nt, Artificial Sequence
  Description of Artificial Sequence: Synthetic oligonucleotide
  Sense Strand Starting at position 200 of SEQ ID NO: 316450
cuuggaugguccuauauuu

SEQ ID NO: 334558 - RNA, 19 nt, Artificial Sequence
  Description of Artificial Sequence: Synthetic oligonucleotide
  Antisense Strand to SEQ ID NO: 334557
aaauauaggaccauccaag

SEQ ID NO: 334559 - RNA, 19 nt, Artificial Sequence
  Description of Artificial Sequence: Synthetic oligonucleotide
  Sense Strand Starting at position 200 of SEQ ID NO: 317243
uggugauaguggaggaagu

SEQ ID NO: 334560 - RNA, 19 nt, Artificial Sequence
  Description of Artificial Sequence: Synthetic oligonucleotide
  Antisense Strand to SEQ ID NO: 334559
acuuccuccacuaucacca

SEQ ID NO: 334561 - RNA, 19 nt, Artificial Sequence
  Description of Artificial Sequence: Synthetic oligonucleotide
  Sense Strand Starting at position 200 of SEQ ID NO: 317244
ggugauaguggaggaagua

SEQ ID NO: 334562 - RNA, 19 nt, Artificial Sequence
  Description of Artificial Sequence: Synthetic oligonucleotide
  Antisense Strand to SEQ ID NO: 334561
uacuuccuccacuaucacc

SEQ ID NO: 334563 - RNA, 19 nt, Artificial Sequence
  Description of Artificial Sequence: Synthetic oligonucleotide
  Sense Strand Starting at position 200 of SEQ ID NO: 317279
cgaucaugugugcugguuu

SEQ ID NO: 334564 - RNA, 19 nt, Artificial Sequence
  Description of Artificial Sequence: Synthetic oligonucleotide
  Antisense Strand to SEQ ID NO: 334563
aaaccagcacacaugaucg

SEQ ID NO: 334565 - RNA, 19 nt, Artificial Sequence
  Description of Artificial Sequence: Synthetic oligonucleotide
  Sense Strand Starting at position 200 of SEQ ID NO: 317316
agaaucugguuagaaauuu

SEQ ID NO: 334566 - RNA, 19 nt, Artificial Sequence
  Description of Artificial Sequence: Synthetic oligonucleotide
  Antisense Strand to SEQ ID NO: 334565
aaauuucuaaccagauucu

SEQ ID NO: 334567 - RNA, 19 nt, Artificial Sequence
  Description of Artificial Sequence: Synthetic oligonucleotide
  Sense Strand Starting at position 200 of SEQ ID NO: 317917
ucacgugguauuugucuau

SEQ ID NO: 334568 - RNA, 19 nt, Artificial Sequence
  Description of Artificial Sequence: Synthetic oligonucleotide
  Antisense Strand to SEQ ID NO: 334567
auagacaaauaccacguga

SEQ ID NO: 334569 - RNA, 19 nt, Artificial Sequence
  Description of Artificial Sequence: Synthetic oligonucleotide
  Sense Strand Starting at position 200 of SEQ ID NO: 318044
ucaggaacguccuuagcaa

SEQ ID NO: 334570 - RNA, 19 nt, Artificial Sequence
  Description of Artificial Sequence: Synthetic oligonucleotide
  Antisense Strand to SEQ ID NO: 334569
uugcuaaggacguuccuga

SEQ ID NO: 334571 - RNA, 19 nt, Artificial Sequence
  Description of Artificial Sequence: Synthetic oligonucleotide
  Sense Strand Starting at position 200 of SEQ ID NO: 318148
cuaggagcauuccuaagau

SEQ ID NO: 334572 - RNA, 19 nt, Artificial Sequence
  Description of Artificial Sequence: Synthetic oligonucleotide
  Antisense Strand to SEQ ID NO: 334571
aucuuaggaaugcuccuag

SEQ ID NO: 334573 - RNA, 19 nt, Artificial Sequence
  Description of Artificial Sequence: Synthetic oligonucleotide
  Sense Strand Starting at position 200 of SEQ ID NO: 318158
uccuaagauugugcagaga

SEQ ID NO: 334574 - RNA, 19 nt, Artificial Sequence
  Description of Artificial Sequence: Synthetic oligonucleotide
  Antisense Strand to SEQ ID NO: 334573
ucucugcacaaucuuagga

SEQ ID NO: 334575 - RNA, 19 nt, Artificial Sequence
  Description of Artificial Sequence: Synthetic oligonucleotide
  Sense Strand Starting at position 200 of SEQ ID NO: 318404
cagagugccagagguugaa

SEQ ID NO: 334576 - RNA, 19 nt, Artificial Sequence
  Description of Artificial Sequence: Synthetic oligonucleotide
  Antisense Strand to SEQ ID NO: 334575
uucaaccucuggcacucug

SEQ ID NO: 334577 - RNA, 19 nt, Artificial Sequence
  Description of Artificial Sequence: Synthetic oligonucleotide
  Sense Strand Starting at position 200 of SEQ ID NO: 318423
ggaugcauccacugcuaga

SEQ ID NO: 334578 - RNA, 19 nt, Artificial Sequence
  Description of Artificial Sequence: Synthetic oligonucleotide
  Antisense Strand to SEQ ID NO: 334577
ucuagcaguggaugcaucc

SEQ ID NO: 334579 - RNA, 19 nt, Artificial Sequence
  Description of Artificial Sequence: Synthetic oligonucleotide
  Sense Strand Starting at position 200 of SEQ ID NO: 318528
guuguuguuguguuauguu

SEQ ID NO: 334580 - RNA, 19 nt, Artificial Sequence
  Description of Artificial Sequence: Synthetic oligonucleotide
  Antisense Strand to SEQ ID NO: 334579
aacauaacacaacaacaac

SEQ ID NO: 334581 - RNA, 19 nt, Artificial Sequence
  Description of Artificial Sequence: Synthetic oligonucleotide
  Sense Strand Starting at position 200 of SEQ ID NO: 318859
cuguguaagaccugguaua

SEQ ID NO: 334582 - RNA, 19 nt, Artificial Sequence
  Description of Artificial Sequence: Synthetic oligonucleotide
  Antisense Strand to SEQ ID NO: 334581
uauaccaggucuuacacag

SEQ ID NO: 334583 - RNA, 19 nt, Artificial Sequence
  Description of Artificial Sequence: Synthetic oligonucleotide
  Sense Strand Starting at position 200 of SEQ ID NO: 318860
uguguaagaccugguauau

SEQ ID NO: 334584 - RNA, 19 nt, Artificial Sequence
  Description of Artificial Sequence: Synthetic oligonucleotide
  Antisense Strand to SEQ ID NO: 334583
auauaccaggucuuacaca

SEQ ID NO: 334585 - RNA, 19 nt, Artificial Sequence
  Description of Artificial Sequence: Synthetic oligonucleotide
  Sense Strand Starting at position 200 of SEQ ID NO: 318999
uggagcauaucucugagau

SEQ ID NO: 334586 - RNA, 19 nt, Artificial Sequence
  Description of Artificial Sequence: Synthetic oligonucleotide
  Antisense Strand to SEQ ID NO: 334585
aucucagagauaugcucca

SEQ ID NO: 334587 - RNA, 19 nt, Artificial Sequence
  Description of Artificial Sequence: Synthetic oligonucleotide
  Sense Strand Starting at position 200 of SEQ ID NO: 319000
ggagcauaucucugagauu

SEQ ID NO: 334588 - RNA, 19 nt, Artificial Sequence
  Description of Artificial Sequence: Synthetic oligonucleotide
  Antisense Strand to SEQ ID NO: 334587
aaucucagagauaugcucc

SEQ ID NO: 334589 - RNA, 19 nt, Artificial Sequence
  Description of Artificial Sequence: Synthetic oligonucleotide
  Sense Strand Starting at position 200 of SEQ ID NO: 319001
gagcauaucucugagauuu

SEQ ID NO: 334590 - RNA, 19 nt, Artificial Sequence
  Description of Artificial Sequence: Synthetic oligonucleotide
  Antisense Strand to SEQ ID NO: 334589
aaaucucagagauaugcuc

SEQ ID NO: 334591 - RNA, 19 nt, Artificial Sequence
  Description of Artificial Sequence: Synthetic oligonucleotide
  Sense Strand Starting at position 201 of SEQ ID NO: 315238
gcgcaugaaagauaguaca

SEQ ID NO: 334592 - RNA, 19 nt, Artificial Sequence
  Description of Artificial Sequence: Synthetic oligonucleotide
  Antisense Strand to SEQ ID NO: 334591
uguacuaucuuucaugcgc

SEQ ID NO: 334593 - RNA, 19 nt, Artificial Sequence
  Description of Artificial Sequence: Synthetic oligonucleotide
  Sense Strand Starting at position 201 of SEQ ID NO: 315251
aguacacuuguauaucauu

SEQ ID NO: 334594 - RNA, 19 nt, Artificial Sequence
  Description of Artificial Sequence: Synthetic oligonucleotide
  Antisense Strand to SEQ ID NO: 334593
aaugauauacaaguguacu

SEQ ID NO: 334595 - RNA, 19 nt, Artificial Sequence
  Description of Artificial Sequence: Synthetic oligonucleotide
  Sense Strand Starting at position 201 of SEQ ID NO: 315564
uccagaaaguguguaacaa

SEQ ID NO: 334596 - RNA, 19 nt, Artificial Sequence
  Description of Artificial Sequence: Synthetic oligonucleotide
  Antisense Strand to SEQ ID NO: 334595
uuguuacacacuuucugga

SEQ ID NO: 334597 - RNA, 19 nt, Artificial Sequence
  Description of Artificial Sequence: Synthetic oligonucleotide
  Sense Strand Starting at position 201 of SEQ ID NO: 315565
ccagaaaguguguaacaau

SEQ ID NO: 334598 - RNA, 19 nt, Artificial Sequence
  Description of Artificial Sequence: Synthetic oligonucleotide
  Antisense Strand to SEQ ID NO: 334597
auuguuacacacuuucugg

SEQ ID NO: 334599 - RNA, 19 nt, Artificial Sequence
  Description of Artificial Sequence: Synthetic oligonucleotide
  Sense Strand Starting at position 201 of SEQ ID NO: 315625
gcaagcauccaucaauaug

SEQ ID NO: 334600 - RNA, 19 nt, Artificial Sequence
  Description of Artificial Sequence: Synthetic oligonucleotide
  Antisense Strand to SEQ ID NO: 334599
cauauugauggaugcuugc

SEQ ID NO: 334601 - RNA, 19 nt, Artificial Sequence
  Description of Artificial Sequence: Synthetic oligonucleotide
  Sense Strand Starting at position 201 of SEQ ID NO: 315675
ggccaauuagaugggcaaa

SEQ ID NO: 334602 - RNA, 19 nt, Artificial Sequence
  Description of Artificial Sequence: Synthetic oligonucleotide
  Antisense Strand to SEQ ID NO: 334601
uuugcccaucuaauuggcc

SEQ ID NO: 334603 - RNA, 19 nt, Artificial Sequence
  Description of Artificial Sequence: Synthetic oligonucleotide
  Sense Strand Starting at position 201 of SEQ ID NO: 315770
uuucccuuccugugauuua

SEQ ID NO: 334604 - RNA, 19 nt, Artificial Sequence
  Description of Artificial Sequence: Synthetic oligonucleotide
  Antisense Strand to SEQ ID NO: 334603
uaaaucacaggaagggaaa

SEQ ID NO: 334605 - RNA, 19 nt, Artificial Sequence
  Description of Artificial Sequence: Synthetic oligonucleotide
  Sense Strand Starting at position 201 of SEQ ID NO: 315780
ugugauuuaucucuuugug

SEQ ID NO: 334606 - RNA, 19 nt, Artificial Sequence
  Description of Artificial Sequence: Synthetic oligonucleotide
  Antisense Strand to SEQ ID NO: 334605
cacaaagagauaaaucaca

SEQ ID NO: 334607 - RNA, 19 nt, Artificial Sequence
  Description of Artificial Sequence: Synthetic oligonucleotide
  Sense Strand Starting at position 201 of SEQ ID NO: 315963
auaccacauccauguggaa

SEQ ID NO: 334608 - RNA, 19 nt, Artificial Sequence
  Description of Artificial Sequence: Synthetic oligonucleotide
  Antisense Strand to SEQ ID NO: 334607
uuccacauggaugugguau

SEQ ID NO: 334609 - RNA, 19 nt, Artificial Sequence
  Description of Artificial Sequence: Synthetic oligonucleotide
  Sense Strand Starting at position 201 of SEQ ID NO: 316269
ggguuccacauuuguguau

SEQ ID NO: 334610 - RNA, 19 nt, Artificial Sequence
  Description of Artificial Sequence: Synthetic oligonucleotide
  Antisense Strand to SEQ ID NO: 334609
auacacaaauguggaaccc

SEQ ID NO: 334611 - RNA, 19 nt, Artificial Sequence
  Description of Artificial Sequence: Synthetic oligonucleotide
  Sense Strand Starting at position 201 of SEQ ID NO: 316401
ucuguaugcguuguauuag

SEQ ID NO: 334612 - RNA, 19 nt, Artificial Sequence
  Description of Artificial Sequence: Synthetic oligonucleotide
  Antisense Strand to SEQ ID NO: 334611
cuaauacaacgcauacaga

SEQ ID NO: 334613 - RNA, 19 nt, Artificial Sequence
  Description of Artificial Sequence: Synthetic oligonucleotide
  Sense Strand Starting at position 201 of SEQ ID NO: 316404
guaugcguuguauuaggua

SEQ ID NO: 334614 - RNA, 19 nt, Artificial Sequence
  Description of Artificial Sequence: Synthetic oligonucleotide
  Antisense Strand to SEQ ID NO: 334613
uaccuaauacaacgcauac

SEQ ID NO: 334615 - RNA, 19 nt, Artificial Sequence
  Description of Artificial Sequence: Synthetic oligonucleotide
  Sense Strand Starting at position 201 of SEQ ID NO: 316425
acaaguaaucuagguacuu

SEQ ID NO: 334616 - RNA, 19 nt, Artificial Sequence
  Description of Artificial Sequence: Synthetic oligonucleotide
  Antisense Strand to SEQ ID NO: 334615
aaguaccuagauuacuugu

SEQ ID NO: 334617 - RNA, 19 nt, Artificial Sequence
  Description of Artificial Sequence: Synthetic oligonucleotide
  Sense Strand Starting at position 201 of SEQ ID NO: 316426
caaguaaucuagguacuug

SEQ ID NO: 334618 - RNA, 19 nt, Artificial Sequence
  Description of Artificial Sequence: Synthetic oligonucleotide
  Antisense Strand to SEQ ID NO: 334617
caaguaccuagauuacuug

SEQ ID NO: 334619 - RNA, 19 nt, Artificial Sequence
  Description of Artificial Sequence: Synthetic oligonucleotide
  Sense Strand Starting at position 201 of SEQ ID NO: 316471
guagguuaucagcaaauac

SEQ ID NO: 334620 - RNA, 19 nt, Artificial Sequence
  Description of Artificial Sequence: Synthetic oligonucleotide
  Antisense Strand to SEQ ID NO: 334619
guauuugcugauaaccuac

SEQ ID NO: 334621 - RNA, 19 nt, Artificial Sequence
  Description of Artificial Sequence: Synthetic oligonucleotide
  Sense Strand Starting at position 201 of SEQ ID NO: 316572
gagggaggacuuuguauau

SEQ ID NO: 334622 - RNA, 19 nt, Artificial Sequence
  Description of Artificial Sequence: Synthetic oligonucleotide
  Antisense Strand to SEQ ID NO: 334621
auauacaaaguccucccuc

SEQ ID NO: 334623 - RNA, 19 nt, Artificial Sequence
  Description of Artificial Sequence: Synthetic oligonucleotide
  Sense Strand Starting at position 201 of SEQ ID NO: 316747
augcacauaguugagaauu

SEQ ID NO: 334624 - RNA, 19 nt, Artificial Sequence
  Description of Artificial Sequence: Synthetic oligonucleotide
  Antisense Strand to SEQ ID NO: 334623
aauucucaacuaugugcau

SEQ ID NO: 334625 - RNA, 19 nt, Artificial Sequence
  Description of Artificial Sequence: Synthetic oligonucleotide
  Sense Strand Starting at position 201 of SEQ ID NO: 316800
guugacuaaagagguauaa

SEQ ID NO: 334626 - RNA, 19 nt, Artificial Sequence
  Description of Artificial Sequence: Synthetic oligonucleotide
  Antisense Strand to SEQ ID NO: 334625
uuauaccucuuuagucaac

SEQ ID NO: 334627 - RNA, 19 nt, Artificial Sequence
  Description of Artificial Sequence: Synthetic oligonucleotide
  Sense Strand Starting at position 201 of SEQ ID NO: 316812
gguauaaagggccaaguuu

SEQ ID NO: 334628 - RNA, 19 nt, Artificial Sequence
  Description of Artificial Sequence: Synthetic oligonucleotide
  Antisense Strand to SEQ ID NO: 334627
aaacuuggcccuuuauacc

SEQ ID NO: 334629 - RNA, 19 nt, Artificial Sequence
  Description of Artificial Sequence: Synthetic oligonucleotide
  Sense Strand Starting at position 201 of SEQ ID NO: 316853
uaucauuguguggauggga

SEQ ID NO: 334630 - RNA, 19 nt, Artificial Sequence
  Description of Artificial Sequence: Synthetic oligonucleotide
  Antisense Strand to SEQ ID NO: 334629
ucccauccacacaaugaua

SEQ ID NO: 334631 - RNA, 19 nt, Artificial Sequence
  Description of Artificial Sequence: Synthetic oligonucleotide
  Sense Strand Starting at position 201 of SEQ ID NO: 316909
ggagauauguggccauauu

SEQ ID NO: 334632 - RNA, 19 nt, Artificial Sequence
  Description of Artificial Sequence: Synthetic oligonucleotide
  Antisense Strand to SEQ ID NO: 334631
aauauggccacauaucucc

SEQ ID NO: 334633 - RNA, 19 nt, Artificial Sequence
  Description of Artificial Sequence: Synthetic oligonucleotide
  Sense Strand Starting at position 201 of SEQ ID NO: 316996
agagcacugcuggaaguua

SEQ ID NO: 334634 - RNA, 19 nt, Artificial Sequence
  Description of Artificial Sequence: Synthetic oligonucleotide
  Antisense Strand to SEQ ID NO: 334633
uaacuuccagcagugcucu

SEQ ID NO: 334635 - RNA, 19 nt, Artificial Sequence
  Description of Artificial Sequence: Synthetic oligonucleotide
  Sense Strand Starting at position 201 of SEQ ID NO: 317384
cugagaaauccuugcaauu

SEQ ID NO: 334636 - RNA, 19 nt, Artificial Sequence
  Description of Artificial Sequence: Synthetic oligonucleotide
  Antisense Strand to SEQ ID NO: 334635
aauugcaaggauuucucag

SEQ ID NO: 334637 - RNA, 19 nt, Artificial Sequence
  Description of Artificial Sequence: Synthetic oligonucleotide
  Sense Strand Starting at position 201 of SEQ ID NO: 317710
gcgagucucggccuccuaa

SEQ ID NO: 334638 - RNA, 19 nt, Artificial Sequence
  Description of Artificial Sequence: Synthetic oligonucleotide
  Antisense Strand to SEQ ID NO: 334637
uuaggaggccgagacucgc

SEQ ID NO: 334639 - RNA, 19 nt, Artificial Sequence
  Description of Artificial Sequence: Synthetic oligonucleotide
  Sense Strand Starting at position 201 of SEQ ID NO: 317872
gcugcaaagguuuagacaa

SEQ ID NO: 334640 - RNA, 19 nt, Artificial Sequence
  Description of Artificial Sequence: Synthetic oligonucleotide
  Antisense Strand to SEQ ID NO: 334639
uugucuaaaccuuugcagc

SEQ ID NO: 334641 - RNA, 19 nt, Artificial Sequence
  Description of Artificial Sequence: Synthetic oligonucleotide
  Sense Strand Starting at position 201 of SEQ ID NO: 317897
aagacuugaguuugaguuu

SEQ ID NO: 334642 - RNA, 19 nt, Artificial Sequence
  Description of Artificial Sequence: Synthetic oligonucleotide
  Antisense Strand to SEQ ID NO: 334641
aaacucaaacucaagucuu

SEQ ID NO: 334643 - RNA, 19 nt, Artificial Sequence
  Description of Artificial Sequence: Synthetic oligonucleotide
  Sense Strand Starting at position 201 of SEQ ID NO: 318244
caauauuugugggaagaac

SEQ ID NO: 334644 - RNA, 19 nt, Artificial Sequence
  Description of Artificial Sequence: Synthetic oligonucleotide
  Antisense Strand to SEQ ID NO: 334643
guucuucccacaaauauug

SEQ ID NO: 334645 - RNA, 19 nt, Artificial Sequence
  Description of Artificial Sequence: Synthetic oligonucleotide
  Sense Strand Starting at position 201 of SEQ ID NO: 318275
ugaagugaucuuugauaca

SEQ ID NO: 334646 - RNA, 19 nt, Artificial Sequence
  Description of Artificial Sequence: Synthetic oligonucleotide
  Antisense Strand to SEQ ID NO: 334645
uguaucaaagaucacuuca

SEQ ID NO: 334647 - RNA, 19 nt, Artificial Sequence
  Description of Artificial Sequence: Synthetic oligonucleotide
  Sense Strand Starting at position 201 of SEQ ID NO: 318303
ucgacaaaugaguguaaug

SEQ ID NO: 334648 - RNA, 19 nt, Artificial Sequence
  Description of Artificial Sequence: Synthetic oligonucleotide
  Antisense Strand to SEQ ID NO: 334647
cauuacacucauuugucga

SEQ ID NO: 334649 - RNA, 19 nt, Artificial Sequence
  Description of Artificial Sequence: Synthetic oligonucleotide
  Sense Strand Starting at position 201 of SEQ ID NO: 318305
gacaaaugaguguaaugca

SEQ ID NO: 334650 - RNA, 19 nt, Artificial Sequence
  Description of Artificial Sequence: Synthetic oligonucleotide
  Antisense Strand to SEQ ID NO: 334649
ugcauuacacucauuuguc

SEQ ID NO: 334651 - RNA, 19 nt, Artificial Sequence
  Description of Artificial Sequence: Synthetic oligonucleotide
  Sense Strand Starting at position 201 of SEQ ID NO: 318313
aguguaaugcaccaaagug

SEQ ID NO: 334652 - RNA, 19 nt, Artificial Sequence
  Description of Artificial Sequence: Synthetic oligonucleotide
  Antisense Strand to SEQ ID NO: 334651
cacuuuggugcauuacacu

SEQ ID NO: 334653 - RNA, 19 nt, Artificial Sequence
  Description of Artificial Sequence: Synthetic oligonucleotide
  Sense Strand Starting at position 201 of SEQ ID NO: 318344
uugauauguguguaggacu

SEQ ID NO: 334654 - RNA, 19 nt, Artificial Sequence
  Description of Artificial Sequence: Synthetic oligonucleotide
  Antisense Strand to SEQ ID NO: 334653
aguccuacacacauaucaa

SEQ ID NO: 334655 - RNA, 19 nt, Artificial Sequence
  Description of Artificial Sequence: Synthetic oligonucleotide
  Sense Strand Starting at position 201 of SEQ ID NO: 318556
aaccuuguuggugaucaga

SEQ ID NO: 334656 - RNA, 19 nt, Artificial Sequence
  Description of Artificial Sequence: Synthetic oligonucleotide
  Antisense Strand to SEQ ID NO: 334655
ucugaucaccaacaagguu

SEQ ID NO: 334657 - RNA, 19 nt, Artificial Sequence
  Description of Artificial Sequence: Synthetic oligonucleotide
  Sense Strand Starting at position 201 of SEQ ID NO: 318763
ccgcuuaauagggauauca

SEQ ID NO: 334658 - RNA, 19 nt, Artificial Sequence
  Description of Artificial Sequence: Synthetic oligonucleotide
  Antisense Strand to SEQ ID NO: 334657
ugauaucccuauuaagcgg

SEQ ID NO: 334659 - RNA, 19 nt, Artificial Sequence
  Description of Artificial Sequence: Synthetic oligonucleotide
  Sense Strand Starting at position 201 of SEQ ID NO: 318814
cagcgugcucuacugcaaa

SEQ ID NO: 334660 - RNA, 19 nt, Artificial Sequence
  Description of Artificial Sequence: Synthetic oligonucleotide
  Antisense Strand to SEQ ID NO: 334659
uuugcaguagagcacgcug

SEQ ID NO: 334661 - RNA, 19 nt, Artificial Sequence
  Description of Artificial Sequence: Synthetic oligonucleotide
  Sense Strand Starting at position 201 of SEQ ID NO: 318939
cauaguugucaugacagac

SEQ ID NO: 334662 - RNA, 19 nt, Artificial Sequence
  Description of Artificial Sequence: Synthetic oligonucleotide
  Antisense Strand to SEQ ID NO: 334661
gucugucaugacaacuaug

SEQ ID NO: 334663 - RNA, 19 nt, Artificial Sequence
  Description of Artificial Sequence: Synthetic oligonucleotide
  Sense Strand Starting at position 201 of SEQ ID NO: 318954
agacccucucagugagaaa

SEQ ID NO: 334664 - RNA, 19 nt, Artificial Sequence
  Description of Artificial Sequence: Synthetic oligonucleotide
  Antisense Strand to SEQ ID NO: 334663
uuucucacugagagggucu

SEQ ID NO: 334665 - RNA, 19 nt, Artificial Sequence
  Description of Artificial Sequence: Synthetic oligonucleotide
  Sense Strand Starting at position 201 of SEQ ID NO: 318981
cacucaggguggucugaaa

SEQ ID NO: 334666 - RNA, 19 nt, Artificial Sequence
  Description of Artificial Sequence: Synthetic oligonucleotide
  Antisense Strand to SEQ ID NO: 334665
uuucagaccacccugagug

SEQ ID NO: 334667 - RNA, 19 nt, Artificial Sequence
  Description of Artificial Sequence: Synthetic oligonucleotide
  Sense Strand Starting at position 201 of SEQ ID NO: 318988
gguggucugaaauauagua

SEQ ID NO: 334668 - RNA, 19 nt, Artificial Sequence
  Description of Artificial Sequence: Synthetic oligonucleotide
  Antisense Strand to SEQ ID NO: 334667
uacuauauuucagaccacc

SEQ ID NO: 334669 - RNA, 19 nt, Artificial Sequence
  Description of Artificial Sequence: Synthetic oligonucleotide
  Sense Strand Starting at position 201 of SEQ ID NO: 319045
augcaaguucuacaggguu

SEQ ID NO: 334670 - RNA, 19 nt, Artificial Sequence
  Description of Artificial Sequence: Synthetic oligonucleotide
  Antisense Strand to SEQ ID NO: 334669
aacccuguagaacuugcau

SEQ ID NO: 334671 - RNA, 19 nt, Artificial Sequence
  Description of Artificial Sequence: Synthetic oligonucleotide
  Sense Strand Starting at position 202 of SEQ ID NO: 315456
aaaggagauuucugugaga

SEQ ID NO: 334672 - RNA, 19 nt, Artificial Sequence
  Description of Artificial Sequence: Synthetic oligonucleotide
  Antisense Strand to SEQ ID NO: 334671
ucucacagaaaucuccuuu

SEQ ID NO: 334673 - RNA, 19 nt, Artificial Sequence
  Description of Artificial Sequence: Synthetic oligonucleotide
  Sense Strand Starting at position 202 of SEQ ID NO: 315461
agauuucugugagaacaaa

SEQ ID NO: 334674 - RNA, 19 nt, Artificial Sequence
  Description of Artificial Sequence: Synthetic oligonucleotide
  Antisense Strand to SEQ ID NO: 334673
uuuguucucacagaaaucu

SEQ ID NO: 334675 - RNA, 19 nt, Artificial Sequence
  Description of Artificial Sequence: Synthetic oligonucleotide
  Sense Strand Starting at position 202 of SEQ ID NO: 315485
accaaaguauugcuaaaug

SEQ ID NO: 334676 - RNA, 19 nt, Artificial Sequence
  Description of Artificial Sequence: Synthetic oligonucleotide
  Antisense Strand to SEQ ID NO: 334675
cauuuagcaauacuuuggu

SEQ ID NO: 334677 - RNA, 19 nt, Artificial Sequence
  Description of Artificial Sequence: Synthetic oligonucleotide
  Sense Strand Starting at position 202 of SEQ ID NO: 315539
guauaugccuuucccaaga

SEQ ID NO: 334678 - RNA, 19 nt, Artificial Sequence
  Description of Artificial Sequence: Synthetic oligonucleotide
  Antisense Strand to SEQ ID NO: 334677
ucuugggaaaggcauauac

SEQ ID NO: 334679 - RNA, 19 nt, Artificial Sequence
  Description of Artificial Sequence: Synthetic oligonucleotide
  Sense Strand Starting at position 202 of SEQ ID NO: 315544
ugccuuucccaagaugaag

SEQ ID NO: 334680 - RNA, 19 nt, Artificial Sequence
  Description of Artificial Sequence: Synthetic oligonucleotide
  Antisense Strand to SEQ ID NO: 334679
cuucaucuugggaaaggca

SEQ ID NO: 334681 - RNA, 19 nt, Artificial Sequence
  Description of Artificial Sequence: Synthetic oligonucleotide
  Sense Strand Starting at position 202 of SEQ ID NO: 315555
agaugaagggcucgauuac

SEQ ID NO: 334682 - RNA, 19 nt, Artificial Sequence
  Description of Artificial Sequence: Synthetic oligonucleotide
  Antisense Strand to SEQ ID NO: 334681
guaaucgagcccuucaucu

SEQ ID NO: 334683 - RNA, 19 nt, Artificial Sequence
  Description of Artificial Sequence: Synthetic oligonucleotide
  Sense Strand Starting at position 202 of SEQ ID NO: 315556
gaugaagggcucgauuacu

SEQ ID NO: 334684 - RNA, 19 nt, Artificial Sequence
  Description of Artificial Sequence: Synthetic oligonucleotide
  Antisense Strand to SEQ ID NO: 334683
aguaaucgagcccuucauc

SEQ ID NO: 334685 - RNA, 19 nt, Artificial Sequence
  Description of Artificial Sequence: Synthetic oligonucleotide
  Sense Strand Starting at position 202 of SEQ ID NO: 315697
uuuguaagugaggaucgua

SEQ ID NO: 334686 - RNA, 19 nt, Artificial Sequence
  Description of Artificial Sequence: Synthetic oligonucleotide
  Antisense Strand to SEQ ID NO: 334685
uacgauccucacuuacaaa

SEQ ID NO: 334687 - RNA, 19 nt, Artificial Sequence
  Description of Artificial Sequence: Synthetic oligonucleotide
  Sense Strand Starting at position 202 of SEQ ID NO: 315813
guugaacaauucucaauug

SEQ ID NO: 334688 - RNA, 19 nt, Artificial Sequence
  Description of Artificial Sequence: Synthetic oligonucleotide
  Antisense Strand to SEQ ID NO: 334687
caauugagaauuguucaac

SEQ ID NO: 334689 - RNA, 19 nt, Artificial Sequence
  Description of Artificial Sequence: Synthetic oligonucleotide
  Sense Strand Starting at position 202 of SEQ ID NO: 315895
auccuauuagagugggaau

SEQ ID NO: 334690 - RNA, 19 nt, Artificial Sequence
  Description of Artificial Sequence: Synthetic oligonucleotide
  Antisense Strand to SEQ ID NO: 334689
auucccacucuaauaggau

SEQ ID NO: 334691 - RNA, 19 nt, Artificial Sequence
  Description of Artificial Sequence: Synthetic oligonucleotide
  Sense Strand Starting at position 202 of SEQ ID NO: 315896
uccuauuagagugggaauu

SEQ ID NO: 334692 - RNA, 19 nt, Artificial Sequence
  Description of Artificial Sequence: Synthetic oligonucleotide
  Antisense Strand to SEQ ID NO: 334691
aauucccacucuaauagga

SEQ ID NO: 334693 - RNA, 19 nt, Artificial Sequence
  Description of Artificial Sequence: Synthetic oligonucleotide
  Sense Strand Starting at position 202 of SEQ ID NO: 315987
cuaucuaaauuggcagaua

SEQ ID NO: 334694 - RNA, 19 nt, Artificial Sequence
  Description of Artificial Sequence: Synthetic oligonucleotide
  Antisense Strand to SEQ ID NO: 334693
uaucugccaauuuagauag

SEQ ID NO: 334695 - RNA, 19 nt, Artificial Sequence
  Description of Artificial Sequence: Synthetic oligonucleotide
  Sense Strand Starting at position 202 of SEQ ID NO: 316038
ugcugacauguguaucaga

SEQ ID NO: 334696 - RNA, 19 nt, Artificial Sequence
  Description of Artificial Sequence: Synthetic oligonucleotide
  Antisense Strand to SEQ ID NO: 334695
ucugauacacaugucagca

SEQ ID NO: 334697 - RNA, 19 nt, Artificial Sequence
  Description of Artificial Sequence: Synthetic oligonucleotide
  Sense Strand Starting at position 202 of SEQ ID NO: 316217
cccaaacuguguuucucaa

SEQ ID NO: 334698 - RNA, 19 nt, Artificial Sequence
  Description of Artificial Sequence: Synthetic oligonucleotide
  Antisense Strand to SEQ ID NO: 334697
uugagaaacacaguuuggg

SEQ ID NO: 334699 - RNA, 19 nt, Artificial Sequence
  Description of Artificial Sequence: Synthetic oligonucleotide
  Sense Strand Starting at position 202 of SEQ ID NO: 316654
aaguuuguugaaugacuaa

SEQ ID NO: 334700 - RNA, 19 nt, Artificial Sequence
  Description of Artificial Sequence: Synthetic oligonucleotide
  Antisense Strand to SEQ ID NO: 334699
uuagucauucaacaaacuu

SEQ ID NO: 334701 - RNA, 19 nt, Artificial Sequence
  Description of Artificial Sequence: Synthetic oligonucleotide
  Sense Strand Starting at position 202 of SEQ ID NO: 316736
uuaggaaauuaucaggaga

SEQ ID NO: 334702 - RNA, 19 nt, Artificial Sequence
  Description of Artificial Sequence: Synthetic oligonucleotide
  Antisense Strand to SEQ ID NO: 334701
ucuccugauaauuuccuaa

SEQ ID NO: 334703 - RNA, 19 nt, Artificial Sequence
  Description of Artificial Sequence: Synthetic oligonucleotide
  Sense Strand Starting at position 202 of SEQ ID NO: 316789
ggaauuauucuguaggccu

SEQ ID NO: 334704 - RNA, 19 nt, Artificial Sequence
  Description of Artificial Sequence: Synthetic oligonucleotide
  Antisense Strand to SEQ ID NO: 334703
aggccuacagaauaauucc

SEQ ID NO: 334705 - RNA, 19 nt, Artificial Sequence
  Description of Artificial Sequence: Synthetic oligonucleotide
  Sense Strand Starting at position 202 of SEQ ID NO: 316818
guauuucuugccugggagu

SEQ ID NO: 334706 - RNA, 19 nt, Artificial Sequence
  Description of Artificial Sequence: Synthetic oligonucleotide
  Antisense Strand to SEQ ID NO: 334705
acucccaggcaagaaauac

SEQ ID NO: 334707 - RNA, 19 nt, Artificial Sequence
  Description of Artificial Sequence: Synthetic oligonucleotide
  Sense Strand Starting at position 202 of SEQ ID NO: 316829
cugggagucuugcuagaag

SEQ ID NO: 334708 - RNA, 19 nt, Artificial Sequence
  Description of Artificial Sequence: Synthetic oligonucleotide
  Antisense Strand to SEQ ID NO: 334707
cuucuagcaagacucccag

SEQ ID NO: 334709 - RNA, 19 nt, Artificial Sequence
  Description of Artificial Sequence: Synthetic oligonucleotide
  Sense Strand Starting at position 202 of SEQ ID NO: 316832
ggagucuugcuagaagcaa

SEQ ID NO: 334710 - RNA, 19 nt, Artificial Sequence
  Description of Artificial Sequence: Synthetic oligonucleotide
  Antisense Strand to SEQ ID NO: 334709
uugcuucuagcaagacucc

SEQ ID NO: 334711 - RNA, 19 nt, Artificial Sequence
  Description of Artificial Sequence: Synthetic oligonucleotide
  Sense Strand Starting at position 202 of SEQ ID NO: 316931
gagaguccugcauaaauua

SEQ ID NO: 334712 - RNA, 19 nt, Artificial Sequence
  Description of Artificial Sequence: Synthetic oligonucleotide
  Antisense Strand to SEQ ID NO: 334711
uaauuuaugcaggacucuc

SEQ ID NO: 334713 - RNA, 19 nt, Artificial Sequence
  Description of Artificial Sequence: Synthetic oligonucleotide
  Sense Strand Starting at position 202 of SEQ ID NO: 316946
auuagugcccaucagauga

SEQ ID NO: 334714 - RNA, 19 nt, Artificial Sequence
  Description of Artificial Sequence: Synthetic oligonucleotide
  Antisense Strand to SEQ ID NO: 334713
ucaucugaugggcacuaau

SEQ ID NO: 334715 - RNA, 19 nt, Artificial Sequence
  Description of Artificial Sequence: Synthetic oligonucleotide
  Sense Strand Starting at position 202 of SEQ ID NO: 317829
cuaguuucucaucauggau

SEQ ID NO: 334716 - RNA, 19 nt, Artificial Sequence
  Description of Artificial Sequence: Synthetic oligonucleotide
  Antisense Strand to SEQ ID NO: 334715
auccaugaugagaaacuag

SEQ ID NO: 334717 - RNA, 19 nt, Artificial Sequence
  Description of Artificial Sequence: Synthetic oligonucleotide
  Sense Strand Starting at position 202 of SEQ ID NO: 317832
guuucucaucauggauaug

SEQ ID NO: 334718 - RNA, 19 nt, Artificial Sequence
  Description of Artificial Sequence: Synthetic oligonucleotide
  Antisense Strand to SEQ ID NO: 334717
cauauccaugaugagaaac

SEQ ID NO: 334719 - RNA, 19 nt, Artificial Sequence
  Description of Artificial Sequence: Synthetic oligonucleotide
  Sense Strand Starting at position 202 of SEQ ID NO: 317862
aaucaagaugugcaauguu

SEQ ID NO: 334720 - RNA, 19 nt, Artificial Sequence
  Description of Artificial Sequence: Synthetic oligonucleotide
  Antisense Strand to SEQ ID NO: 334719
aacauugcacaucuugauu

SEQ ID NO: 334721 - RNA, 19 nt, Artificial Sequence
  Description of Artificial Sequence: Synthetic oligonucleotide
  Sense Strand Starting at position 202 of SEQ ID NO: 317989
gucugugagugacuuggaa

SEQ ID NO: 334722 - RNA, 19 nt, Artificial Sequence
  Description of Artificial Sequence: Synthetic oligonucleotide
  Antisense Strand to SEQ ID NO: 334721
uuccaagucacucacagac

SEQ ID NO: 334723 - RNA, 19 nt, Artificial Sequence
  Description of Artificial Sequence: Synthetic oligonucleotide
  Sense Strand Starting at position 202 of SEQ ID NO: 318049
gccucaaaccagugugaag

SEQ ID NO: 334724 - RNA, 19 nt, Artificial Sequence
  Description of Artificial Sequence: Synthetic oligonucleotide
  Antisense Strand to SEQ ID NO: 334723
cuucacacugguuugaggc

SEQ ID NO: 334725 - RNA, 19 nt, Artificial Sequence
  Description of Artificial Sequence: Synthetic oligonucleotide
  Sense Strand Starting at position 202 of SEQ ID NO: 318167
ggcugaggucuugaucuuc

SEQ ID NO: 334726 - RNA, 19 nt, Artificial Sequence
  Description of Artificial Sequence: Synthetic oligonucleotide
  Antisense Strand to SEQ ID NO: 334725
gaagaucaagaccucagcc

SEQ ID NO: 334727 - RNA, 19 nt, Artificial Sequence
  Description of Artificial Sequence: Synthetic oligonucleotide
  Sense Strand Starting at position 202 of SEQ ID NO: 318221
ugacaugagcccuaagucu

SEQ ID NO: 334728 - RNA, 19 nt, Artificial Sequence
  Description of Artificial Sequence: Synthetic oligonucleotide
  Antisense Strand to SEQ ID NO: 334727
agacuuagggcucauguca

SEQ ID NO: 334729 - RNA, 19 nt, Artificial Sequence
  Description of Artificial Sequence: Synthetic oligonucleotide
  Sense Strand Starting at position 202 of SEQ ID NO: 318258
uggcaacuuccagaugcuu

SEQ ID NO: 334730 - RNA, 19 nt, Artificial Sequence
  Description of Artificial Sequence: Synthetic oligonucleotide
  Antisense Strand to SEQ ID NO: 334729
aagcaucuggaaguugcca

SEQ ID NO: 334731 - RNA, 19 nt, Artificial Sequence
  Description of Artificial Sequence: Synthetic oligonucleotide
  Sense Strand Starting at position 202 of SEQ ID NO: 318375
cugagcuagaaugguguua

SEQ ID NO: 334732 - RNA, 19 nt, Artificial Sequence
  Description of Artificial Sequence: Synthetic oligonucleotide
  Antisense Strand to SEQ ID NO: 334731
uaacaccauucuagcucag

SEQ ID NO: 334733 - RNA, 19 nt, Artificial Sequence
  Description of Artificial Sequence: Synthetic oligonucleotide
  Sense Strand Starting at position 202 of SEQ ID NO: 318609
gaaugcacgaguuagagua

SEQ ID NO: 334734 - RNA, 19 nt, Artificial Sequence
  Description of Artificial Sequence: Synthetic oligonucleotide
  Antisense Strand to SEQ ID NO: 334733
uacucuaacucgugcauuc

SEQ ID NO: 334735 - RNA, 19 nt, Artificial Sequence
  Description of Artificial Sequence: Synthetic oligonucleotide
  Sense Strand Starting at position 202 of SEQ ID NO: 318616
cgaguuagaguagagagua

SEQ ID NO: 334736 - RNA, 19 nt, Artificial Sequence
  Description of Artificial Sequence: Synthetic oligonucleotide
  Antisense Strand to SEQ ID NO: 334735
uacucucuacucuaacucg

SEQ ID NO: 334737 - RNA, 19 nt, Artificial Sequence
  Description of Artificial Sequence: Synthetic oligonucleotide
  Sense Strand Starting at position 202 of SEQ ID NO: 319031
gguuucuaauggguagagu

SEQ ID NO: 334738 - RNA, 19 nt, Artificial Sequence
  Description of Artificial Sequence: Synthetic oligonucleotide
  Antisense Strand to SEQ ID NO: 334737
acucuacccauuagaaacc

SEQ ID NO: 334739 - RNA, 19 nt, Artificial Sequence
  Description of Artificial Sequence: Synthetic oligonucleotide
  Sense Strand Starting at position 202 of SEQ ID NO: 319061
gcuaaaguccuacaaugca

SEQ ID NO: 334740 - RNA, 19 nt, Artificial Sequence
  Description of Artificial Sequence: Synthetic oligonucleotide
  Antisense Strand to SEQ ID NO: 334739
ugcauuguaggacuuuagc

SEQ ID NO: 334741 - RNA, 19 nt, Artificial Sequence
  Description of Artificial Sequence: Synthetic oligonucleotide
  Sense Strand Starting at position 202 of SEQ ID NO: 319094
acagcaaagaguugucuga

SEQ ID NO: 334742 - RNA, 19 nt, Artificial Sequence
  Description of Artificial Sequence: Synthetic oligonucleotide
  Antisense Strand to SEQ ID NO: 334741
ucagacaacucuuugcugu

SEQ ID NO: 334743 - RNA, 19 nt, Artificial Sequence
  Description of Artificial Sequence: Synthetic oligonucleotide
  Sense Strand Starting at position 202 of SEQ ID NO: 319098
caaagaguugucugaccaa

SEQ ID NO: 334744 - RNA, 19 nt, Artificial Sequence
  Description of Artificial Sequence: Synthetic oligonucleotide
  Antisense Strand to SEQ ID NO: 334743
uuggucagacaacucuuug

SEQ ID NO: 334745 - RNA, 19 nt, Artificial Sequence
  Description of Artificial Sequence: Synthetic oligonucleotide
  Sense Strand Starting at position 202 of SEQ ID NO: 319101
agaguugucugaccaagaa

SEQ ID NO: 334746 - RNA, 19 nt, Artificial Sequence
  Description of Artificial Sequence: Synthetic oligonucleotide
  Antisense Strand to SEQ ID NO: 334745
uucuuggucagacaacucu

SEQ ID NO: 334747 - RNA, 19 nt, Artificial Sequence
  Description of Artificial Sequence: Synthetic oligonucleotide
  Sense Strand Starting at position 202 of SEQ ID NO: 319149
gagcuagagcaaugagcua

SEQ ID NO: 334748 - RNA, 19 nt, Artificial Sequence
  Description of Artificial Sequence: Synthetic oligonucleotide
  Antisense Strand to SEQ ID NO: 334747
uagcucauugcucuagcuc

SEQ ID NO: 334749 - RNA, 19 nt, Artificial Sequence
  Description of Artificial Sequence: Synthetic oligonucleotide
  Sense Strand Starting at position 202 of SEQ ID NO: 319156
agcaaugagcuagagcaau

SEQ ID NO: 334750 - RNA, 19 nt, Artificial Sequence
  Description of Artificial Sequence: Synthetic oligonucleotide
  Antisense Strand to SEQ ID NO: 334749
auugcucuagcucauugcu

SEQ ID NO: 334751 - RNA, 19 nt, Artificial Sequence
  Description of Artificial Sequence: Synthetic oligonucleotide
  Sense Strand Starting at position 203 of SEQ ID NO: 315290
ccuuaugaggcaggaaaua

SEQ ID NO: 334752 - RNA, 19 nt, Artificial Sequence
  Description of Artificial Sequence: Synthetic oligonucleotide
  Antisense Strand to SEQ ID NO: 334751
uauuuccugccucauaagg

SEQ ID NO: 334753 - RNA, 19 nt, Artificial Sequence
  Description of Artificial Sequence: Synthetic oligonucleotide
  Sense Strand Starting at position 203 of SEQ ID NO: 315476
aucagauguuuggugacau

SEQ ID NO: 334754 - RNA, 19 nt, Artificial Sequence
  Description of Artificial Sequence: Synthetic oligonucleotide
  Antisense Strand to SEQ ID NO: 334753
augucaccaaacaucugau

SEQ ID NO: 334755 - RNA, 19 nt, Artificial Sequence
  Description of Artificial Sequence: Synthetic oligonucleotide
  Sense Strand Starting at position 203 of SEQ ID NO: 315491
acaugauguagucagagug

SEQ ID NO: 334756 - RNA, 19 nt, Artificial Sequence
  Description of Artificial Sequence: Synthetic oligonucleotide
  Antisense Strand to SEQ ID NO: 334755
cacucugacuacaucaugu

SEQ ID NO: 334757 - RNA, 19 nt, Artificial Sequence
  Description of Artificial Sequence: Synthetic oligonucleotide
  Sense Strand Starting at position 203 of SEQ ID NO: 315592
guguuuguaguuucugagu

SEQ ID NO: 334758 - RNA, 19 nt, Artificial Sequence
  Description of Artificial Sequence: Synthetic oligonucleotide
  Antisense Strand to SEQ ID NO: 334757
acucagaaacuacaaacac

SEQ ID NO: 334759 - RNA, 19 nt, Artificial Sequence
  Description of Artificial Sequence: Synthetic oligonucleotide
  Sense Strand Starting at position 203 of SEQ ID NO: 315729
ugccuagucuauuuaaguu

SEQ ID NO: 334760 - RNA, 19 nt, Artificial Sequence
  Description of Artificial Sequence: Synthetic oligonucleotide
  Antisense Strand to SEQ ID NO: 334759
aacuuaaauagacuaggca

SEQ ID NO: 334761 - RNA, 19 nt, Artificial Sequence
  Description of Artificial Sequence: Synthetic oligonucleotide
  Sense Strand Starting at position 203 of SEQ ID NO: 315922
uggcguuuguaauuuaaua

SEQ ID NO: 334762 - RNA, 19 nt, Artificial Sequence
  Description of Artificial Sequence: Synthetic oligonucleotide
  Antisense Strand to SEQ ID NO: 334761
uauuaaauuacaaacgcca

SEQ ID NO: 334763 - RNA, 19 nt, Artificial Sequence
  Description of Artificial Sequence: Synthetic oligonucleotide
  Sense Strand Starting at position 203 of SEQ ID NO: 316062
uucuccuuagcagaagaua

SEQ ID NO: 334764 - RNA, 19 nt, Artificial Sequence
  Description of Artificial Sequence: Synthetic oligonucleotide
  Antisense Strand to SEQ ID NO: 334763
uaucuucugcuaaggagaa

SEQ ID NO: 334765 - RNA, 19 nt, Artificial Sequence
  Description of Artificial Sequence: Synthetic oligonucleotide
  Sense Strand Starting at position 203 of SEQ ID NO: 316131
agagguaaggauuguuagu

SEQ ID NO: 334766 - RNA, 19 nt, Artificial Sequence
  Description of Artificial Sequence: Synthetic oligonucleotide
  Antisense Strand to SEQ ID NO: 334765
acuaacaauccuuaccucu

SEQ ID NO: 334767 - RNA, 19 nt, Artificial Sequence
  Description of Artificial Sequence: Synthetic oligonucleotide
  Sense Strand Starting at position 203 of SEQ ID NO: 316133
agguaaggauuguuaguua

SEQ ID NO: 334768 - RNA, 19 nt, Artificial Sequence
  Description of Artificial Sequence: Synthetic oligonucleotide
  Antisense Strand to SEQ ID NO: 334767
uaacuaacaauccuuaccu

SEQ ID NO: 334769 - RNA, 19 nt, Artificial Sequence
  Description of Artificial Sequence: Synthetic oligonucleotide
  Sense Strand Starting at position 203 of SEQ ID NO: 316275
aagauaauuguaugagcac

SEQ ID NO: 334770 - RNA, 19 nt, Artificial Sequence
  Description of Artificial Sequence: Synthetic oligonucleotide
  Antisense Strand to SEQ ID NO: 334769
gugcucauacaauuaucuu

SEQ ID NO: 334771 - RNA, 19 nt, Artificial Sequence
  Description of Artificial Sequence: Synthetic oligonucleotide
  Sense Strand Starting at position 203 of SEQ ID NO: 317028
acaaccuguugucuaaaga

SEQ ID NO: 334772 - RNA, 19 nt, Artificial Sequence
  Description of Artificial Sequence: Synthetic oligonucleotide
  Antisense Strand to SEQ ID NO: 334771
ucuuuagacaacagguugu

SEQ ID NO: 334773 - RNA, 19 nt, Artificial Sequence
  Description of Artificial Sequence: Synthetic oligonucleotide
  Sense Strand Starting at position 203 of SEQ ID NO: 317029
caaccuguugucuaaagag

SEQ ID NO: 334774 - RNA, 19 nt, Artificial Sequence
  Description of Artificial Sequence: Synthetic oligonucleotide
  Antisense Strand to SEQ ID NO: 334773
cucuuuagacaacagguug

SEQ ID NO: 334775 - RNA, 19 nt, Artificial Sequence
  Description of Artificial Sequence: Synthetic oligonucleotide
  Sense Strand Starting at position 203 of SEQ ID NO: 317261
uaaguauauggucaaguuc

SEQ ID NO: 334776 - RNA, 19 nt, Artificial Sequence
  Description of Artificial Sequence: Synthetic oligonucleotide
  Antisense Strand to SEQ ID NO: 334775
gaacuugaccauauacuua

SEQ ID NO: 334777 - RNA, 19 nt, Artificial Sequence
  Description of Artificial Sequence: Synthetic oligonucleotide
  Sense Strand Starting at position 203 of SEQ ID NO: 317281
gguucuuuaugacuauacu

SEQ ID NO: 334778 - RNA, 19 nt, Artificial Sequence
  Description of Artificial Sequence: Synthetic oligonucleotide
  Antisense Strand to SEQ ID NO: 334777
aguauagucauaaagaacc

SEQ ID NO: 334779 - RNA, 19 nt, Artificial Sequence
  Description of Artificial Sequence: Synthetic oligonucleotide
  Sense Strand Starting at position 203 of SEQ ID NO: 317282
guucuuuaugacuauacua

SEQ ID NO: 334780 - RNA, 19 nt, Artificial Sequence
  Description of Artificial Sequence: Synthetic oligonucleotide
  Antisense Strand to SEQ ID NO: 334779
uaguauagucauaaagaac

SEQ ID NO: 334781 - RNA, 19 nt, Artificial Sequence
  Description of Artificial Sequence: Synthetic oligonucleotide
  Sense Strand Starting at position 203 of SEQ ID NO: 317423
ugaccuuggcucuagaaua

SEQ ID NO: 334782 - RNA, 19 nt, Artificial Sequence
  Description of Artificial Sequence: Synthetic oligonucleotide
  Antisense Strand to SEQ ID NO: 334781
uauucuagagccaagguca

SEQ ID NO: 334783 - RNA, 19 nt, Artificial Sequence
  Description of Artificial Sequence: Synthetic oligonucleotide
  Sense Strand Starting at position 203 of SEQ ID NO: 317452
gcuugugaucucuaagaag

SEQ ID NO: 334784 - RNA, 19 nt, Artificial Sequence
  Description of Artificial Sequence: Synthetic oligonucleotide
  Antisense Strand to SEQ ID NO: 334783
cuucuuagagaucacaagc

SEQ ID NO: 334785 - RNA, 19 nt, Artificial Sequence
  Description of Artificial Sequence: Synthetic oligonucleotide
  Sense Strand Starting at position 203 of SEQ ID NO: 317604
uggguauugggcugaauga

SEQ ID NO: 334786 - RNA, 19 nt, Artificial Sequence
  Description of Artificial Sequence: Synthetic oligonucleotide
  Antisense Strand to SEQ ID NO: 334785
ucauucagcccaauaccca

SEQ ID NO: 334787 - RNA, 19 nt, Artificial Sequence
  Description of Artificial Sequence: Synthetic oligonucleotide
  Sense Strand Starting at position 203 of SEQ ID NO: 317614
gcugaaugacaguagucau

SEQ ID NO: 334788 - RNA, 19 nt, Artificial Sequence
  Description of Artificial Sequence: Synthetic oligonucleotide
  Antisense Strand to SEQ ID NO: 334787
augacuacugucauucagc

SEQ ID NO: 334789 - RNA, 19 nt, Artificial Sequence
  Description of Artificial Sequence: Synthetic oligonucleotide
  Sense Strand Starting at position 203 of SEQ ID NO: 317634
ucaugaguuguugggagga

SEQ ID NO: 334790 - RNA, 19 nt, Artificial Sequence
  Description of Artificial Sequence: Synthetic oligonucleotide
  Antisense Strand to SEQ ID NO: 334789
uccucccaacaacucauga

SEQ ID NO: 334791 - RNA, 19 nt, Artificial Sequence
  Description of Artificial Sequence: Synthetic oligonucleotide
  Sense Strand Starting at position 203 of SEQ ID NO: 317639
aguuguugggaggauucua

SEQ ID NO: 334792 - RNA, 19 nt, Artificial Sequence
  Description of Artificial Sequence: Synthetic oligonucleotide
  Antisense Strand to SEQ ID NO: 334791
uagaauccucccaacaacu

SEQ ID NO: 334793 - RNA, 19 nt, Artificial Sequence
  Description of Artificial Sequence: Synthetic oligonucleotide
  Sense Strand Starting at position 203 of SEQ ID NO: 317746
gagaguuuauuugaucaaa

SEQ ID NO: 334794 - RNA, 19 nt, Artificial Sequence
  Description of Artificial Sequence: Synthetic oligonucleotide
  Antisense Strand to SEQ ID NO: 334793
uuugaucaaauaaacucuc

SEQ ID NO: 334795 - RNA, 19 nt, Artificial Sequence
  Description of Artificial Sequence: Synthetic oligonucleotide
  Sense Strand Starting at position 203 of SEQ ID NO: 317901
auagaaauagcccagcgau

SEQ ID NO: 334796 - RNA, 19 nt, Artificial Sequence
  Description of Artificial Sequence: Synthetic oligonucleotide
  Antisense Strand to SEQ ID NO: 334795
aucgcugggcuauuucuau

SEQ ID NO: 334797 - RNA, 19 nt, Artificial Sequence
  Description of Artificial Sequence: Synthetic oligonucleotide
  Sense Strand Starting at position 203 of SEQ ID NO: 317955
augucugugcuacaacaga

SEQ ID NO: 334798 - RNA, 19 nt, Artificial Sequence
  Description of Artificial Sequence: Synthetic oligonucleotide
  Antisense Strand to SEQ ID NO: 334797
ucuguuguagcacagacau

SEQ ID NO: 334799 - RNA, 19 nt, Artificial Sequence
  Description of Artificial Sequence: Synthetic oligonucleotide
  Sense Strand Starting at position 203 of SEQ ID NO: 317998
gacagcgaaucaucgagaa

SEQ ID NO: 334800 - RNA, 19 nt, Artificial Sequence
  Description of Artificial Sequence: Synthetic oligonucleotide
  Antisense Strand to SEQ ID NO: 334799
uucucgaugauucgcuguc

SEQ ID NO: 334801 - RNA, 19 nt, Artificial Sequence
  Description of Artificial Sequence: Synthetic oligonucleotide
  Sense Strand Starting at position 203 of SEQ ID NO: 318058
gauuaagaacugcagucau

SEQ ID NO: 334802 - RNA, 19 nt, Artificial Sequence
  Description of Artificial Sequence: Synthetic oligonucleotide
  Antisense Strand to SEQ ID NO: 334801
augacugcaguucuuaauc

SEQ ID NO: 334803 - RNA, 19 nt, Artificial Sequence
  Description of Artificial Sequence: Synthetic oligonucleotide
  Sense Strand Starting at position 203 of SEQ ID NO: 318112
cuuggcucugaccaaauua

SEQ ID NO: 334804 - RNA, 19 nt, Artificial Sequence
  Description of Artificial Sequence: Synthetic oligonucleotide
  Antisense Strand to SEQ ID NO: 334803
uaauuuggucagagccaag

SEQ ID NO: 334805 - RNA, 19 nt, Artificial Sequence
  Description of Artificial Sequence: Synthetic oligonucleotide
  Sense Strand Starting at position 203 of SEQ ID NO: 318134
aagcucugugccuuaguuu

SEQ ID NO: 334806 - RNA, 19 nt, Artificial Sequence
  Description of Artificial Sequence: Synthetic oligonucleotide
  Antisense Strand to SEQ ID NO: 334805
aaacuaaggcacagagcuu

SEQ ID NO: 334807 - RNA, 19 nt, Artificial Sequence
  Description of Artificial Sequence: Synthetic oligonucleotide
  Sense Strand Starting at position 203 of SEQ ID NO: 318269
acuguuuaagcagggaaau

SEQ ID NO: 334808 - RNA, 19 nt, Artificial Sequence
  Description of Artificial Sequence: Synthetic oligonucleotide
  Antisense Strand to SEQ ID NO: 334807
auuucccugcuuaaacagu

SEQ ID NO: 334809 - RNA, 19 nt, Artificial Sequence
  Description of Artificial Sequence: Synthetic oligonucleotide
  Sense Strand Starting at position 203 of SEQ ID NO: 318270
cuguuuaagcagggaaaua

SEQ ID NO: 334810 - RNA, 19 nt, Artificial Sequence
  Description of Artificial Sequence: Synthetic oligonucleotide
  Antisense Strand to SEQ ID NO: 334809
uauuucccugcuuaaacag

SEQ ID NO: 334811 - RNA, 19 nt, Artificial Sequence
  Description of Artificial Sequence: Synthetic oligonucleotide
  Sense Strand Starting at position 203 of SEQ ID NO: 318387
aaagauagauagccuugua

SEQ ID NO: 334812 - RNA, 19 nt, Artificial Sequence
  Description of Artificial Sequence: Synthetic oligonucleotide
  Antisense Strand to SEQ ID NO: 334811
uacaaggcuaucuaucuuu

SEQ ID NO: 334813 - RNA, 19 nt, Artificial Sequence
  Description of Artificial Sequence: Synthetic oligonucleotide
  Sense Strand Starting at position 203 of SEQ ID NO: 318458
guauuucuguuuguggcaa

SEQ ID NO: 334814 - RNA, 19 nt, Artificial Sequence
  Description of Artificial Sequence: Synthetic oligonucleotide
  Antisense Strand to SEQ ID NO: 334813
uugccacaaacagaaauac

SEQ ID NO: 334815 - RNA, 19 nt, Artificial Sequence
  Description of Artificial Sequence: Synthetic oligonucleotide
  Sense Strand Starting at position 203 of SEQ ID NO: 318532
cugucauuaggguauugga

SEQ ID NO: 334816 - RNA, 19 nt, Artificial Sequence
  Description of Artificial Sequence: Synthetic oligonucleotide
  Antisense Strand to SEQ ID NO: 334815
uccaauacccuaaugacag

SEQ ID NO: 334817 - RNA, 19 nt, Artificial Sequence
  Description of Artificial Sequence: Synthetic oligonucleotide
  Sense Strand Starting at position 203 of SEQ ID NO: 318633
ugcugugugaccucggcaa

SEQ ID NO: 334818 - RNA, 19 nt, Artificial Sequence
  Description of Artificial Sequence: Synthetic oligonucleotide
  Antisense Strand to SEQ ID NO: 334817
uugccgaggucacacagca

SEQ ID NO: 334819 - RNA, 19 nt, Artificial Sequence
  Description of Artificial Sequence: Synthetic oligonucleotide
  Sense Strand Starting at position 203 of SEQ ID NO: 318736
ugauucuauggccaaguua

SEQ ID NO: 334820 - RNA, 19 nt, Artificial Sequence
  Description of Artificial Sequence: Synthetic oligonucleotide
  Antisense Strand to SEQ ID NO: 334819
uaacuuggccauagaauca

SEQ ID NO: 334821 - RNA, 19 nt, Artificial Sequence
  Description of Artificial Sequence: Synthetic oligonucleotide
  Sense Strand Starting at position 203 of SEQ ID NO: 318953
aaugaaauguuguucugga

SEQ ID NO: 334822 - RNA, 19 nt, Artificial Sequence
  Description of Artificial Sequence: Synthetic oligonucleotide
  Antisense Strand to SEQ ID NO: 334821
uccagaacaacauuucauu

SEQ ID NO: 334823 - RNA, 19 nt, Artificial Sequence
  Description of Artificial Sequence: Synthetic oligonucleotide
  Sense Strand Starting at position 203 of SEQ ID NO: 318954
augaaauguuguucuggau

SEQ ID NO: 334824 - RNA, 19 nt, Artificial Sequence
  Description of Artificial Sequence: Synthetic oligonucleotide
  Antisense Strand to SEQ ID NO: 334823
auccagaacaacauuucau

SEQ ID NO: 334825 - RNA, 19 nt, Artificial Sequence
  Description of Artificial Sequence: Synthetic oligonucleotide
  Sense Strand Starting at position 203 of SEQ ID NO: 318958
aauguuguucuggauacaa

SEQ ID NO: 334826 - RNA, 19 nt, Artificial Sequence
  Description of Artificial Sequence: Synthetic oligonucleotide
  Antisense Strand to SEQ ID NO: 334825
uuguauccagaacaacauu

SEQ ID NO: 334827 - RNA, 19 nt, Artificial Sequence
  Description of Artificial Sequence: Synthetic oligonucleotide
  Sense Strand Starting at position 203 of SEQ ID NO: 318960
uguuguucuggauacaaua

SEQ ID NO: 334828 - RNA, 19 nt, Artificial Sequence
  Description of Artificial Sequence: Synthetic oligonucleotide
  Antisense Strand to SEQ ID NO: 334827
uauuguauccagaacaaca

SEQ ID NO: 334829 - RNA, 19 nt, Artificial Sequence
  Description of Artificial Sequence: Synthetic oligonucleotide
  Sense Strand Starting at position 203 of SEQ ID NO: 319126
aucacuuugucacucuaga

SEQ ID NO: 334830 - RNA, 19 nt, Artificial Sequence
  Description of Artificial Sequence: Synthetic oligonucleotide
  Antisense Strand to SEQ ID NO: 334829
ucuagagugacaaagugau

SEQ ID NO: 334831 - RNA, 19 nt, Artificial Sequence
  Description of Artificial Sequence: Synthetic oligonucleotide
  Sense Strand Starting at position 204 of SEQ ID NO: 315395
uugcaaugacucgagauca

SEQ ID NO: 334832 - RNA, 19 nt, Artificial Sequence
  Description of Artificial Sequence: Synthetic oligonucleotide
  Antisense Strand to SEQ ID NO: 334831
ugaucucgagucauugcaa

SEQ ID NO: 334833 - RNA, 19 nt, Artificial Sequence
  Description of Artificial Sequence: Synthetic oligonucleotide
  Sense Strand Starting at position 204 of SEQ ID NO: 315510
gaacuaguguccuuaacag

SEQ ID NO: 334834 - RNA, 19 nt, Artificial Sequence
  Description of Artificial Sequence: Synthetic oligonucleotide
  Antisense Strand to SEQ ID NO: 334833
cuguuaaggacacuaguuc

SEQ ID NO: 334835 - RNA, 19 nt, Artificial Sequence
  Description of Artificial Sequence: Synthetic oligonucleotide
  Sense Strand Starting at position 204 of SEQ ID NO: 315601
ggcugaaaucagcaagcca

SEQ ID NO: 334836 - RNA, 19 nt, Artificial Sequence
  Description of Artificial Sequence: Synthetic oligonucleotide
  Antisense Strand to SEQ ID NO: 334835
uggcuugcugauuucagcc

SEQ ID NO: 334837 - RNA, 19 nt, Artificial Sequence
  Description of Artificial Sequence: Synthetic oligonucleotide
  Sense Strand Starting at position 204 of SEQ ID NO: 315669
acuuccagccuuuagaagu

SEQ ID NO: 334838 - RNA, 19 nt, Artificial Sequence
  Description of Artificial Sequence: Synthetic oligonucleotide
  Antisense Strand to SEQ ID NO: 334837
acuucuaaaggcuggaagu

SEQ ID NO: 334839 - RNA, 19 nt, Artificial Sequence
  Description of Artificial Sequence: Synthetic oligonucleotide
  Sense Strand Starting at position 204 of SEQ ID NO: 315677
ccuuuagaaguauguuaaa

SEQ ID NO: 334840 - RNA, 19 nt, Artificial Sequence
  Description of Artificial Sequence: Synthetic oligonucleotide
  Antisense Strand to SEQ ID NO: 334839
uuuaacauacuucuaaagg

SEQ ID NO: 334841 - RNA, 19 nt, Artificial Sequence
  Description of Artificial Sequence: Synthetic oligonucleotide
  Sense Strand Starting at position 204 of SEQ ID NO: 315751
aagggagucagcugagaug

SEQ ID NO: 334842 - RNA, 19 nt, Artificial Sequence
  Description of Artificial Sequence: Synthetic oligonucleotide
  Antisense Strand to SEQ ID NO: 334841
caucucagcugacucccuu

SEQ ID NO: 334843 - RNA, 19 nt, Artificial Sequence
  Description of Artificial Sequence: Synthetic oligonucleotide
  Sense Strand Starting at position 204 of SEQ ID NO: 316038
ugguauguaucauuccaaa

SEQ ID NO: 334844 - RNA, 19 nt, Artificial Sequence
  Description of Artificial Sequence: Synthetic oligonucleotide
  Antisense Strand to SEQ ID NO: 334843
uuuggaaugauacauacca

SEQ ID NO: 334845 - RNA, 19 nt, Artificial Sequence
  Description of Artificial Sequence: Synthetic oligonucleotide
  Sense Strand Starting at position 204 of SEQ ID NO: 316201
agagauauaucugcaugau

SEQ ID NO: 334846 - RNA, 19 nt, Artificial Sequence
  Description of Artificial Sequence: Synthetic oligonucleotide
  Antisense Strand to SEQ ID NO: 334845
aucaugcagauauaucucu

SEQ ID NO: 334847 - RNA, 19 nt, Artificial Sequence
  Description of Artificial Sequence: Synthetic oligonucleotide
  Sense Strand Starting at position 204 of SEQ ID NO: 316324
cuagcauuacuaggaauaa

SEQ ID NO: 334848 - RNA, 19 nt, Artificial Sequence
  Description of Artificial Sequence: Synthetic oligonucleotide
  Antisense Strand to SEQ ID NO: 334847
uuauuccuaguaaugcuag

SEQ ID NO: 334849 - RNA, 19 nt, Artificial Sequence
  Description of Artificial Sequence: Synthetic oligonucleotide
  Sense Strand Starting at position 204 of SEQ ID NO: 316448
aaggcauuuguuugcuuua

SEQ ID NO: 334850 - RNA, 19 nt, Artificial Sequence
  Description of Artificial Sequence: Synthetic oligonucleotide
  Antisense Strand to SEQ ID NO: 334849
uaaagcaaacaaaugccuu

SEQ ID NO: 334851 - RNA, 19 nt, Artificial Sequence
  Description of Artificial Sequence: Synthetic oligonucleotide
  Sense Strand Starting at position 204 of SEQ ID NO: 316450
ggcauuuguuugcuuuaca

SEQ ID NO: 334852 - RNA, 19 nt, Artificial Sequence
  Description of Artificial Sequence: Synthetic oligonucleotide
  Antisense Strand to SEQ ID NO: 334851
uguaaagcaaacaaaugcc

SEQ ID NO: 334853 - RNA, 19 nt, Artificial Sequence
  Description of Artificial Sequence: Synthetic oligonucleotide
  Sense Strand Starting at position 204 of SEQ ID NO: 316451
gcauuuguuugcuuuacau

SEQ ID NO: 334854 - RNA, 19 nt, Artificial Sequence
  Description of Artificial Sequence: Synthetic oligonucleotide
  Antisense Strand to SEQ ID NO: 334853
auguaaagcaaacaaaugc

SEQ ID NO: 334855 - RNA, 19 nt, Artificial Sequence
  Description of Artificial Sequence: Synthetic oligonucleotide
  Sense Strand Starting at position 204 of SEQ ID NO: 316497
uuucuaugauuugaaagca

SEQ ID NO: 334856 - RNA, 19 nt, Artificial Sequence
  Description of Artificial Sequence: Synthetic oligonucleotide
  Antisense Strand to SEQ ID NO: 334855
ugcuuucaaaucauagaaa

SEQ ID NO: 334857 - RNA, 19 nt, Artificial Sequence
  Description of Artificial Sequence: Synthetic oligonucleotide
  Sense Strand Starting at position 204 of SEQ ID NO: 316711
gaaaguuugcucgcuggcu

SEQ ID NO: 334858 - RNA, 19 nt, Artificial Sequence
  Description of Artificial Sequence: Synthetic oligonucleotide
  Antisense Strand to SEQ ID NO: 334857
agccagcgagcaaacuuuc

SEQ ID NO: 334859 - RNA, 19 nt, Artificial Sequence
  Description of Artificial Sequence: Synthetic oligonucleotide
  Sense Strand Starting at position 204 of SEQ ID NO: 316726
ggcuucuuuccuuaagaac

SEQ ID NO: 334860 - RNA, 19 nt, Artificial Sequence
  Description of Artificial Sequence: Synthetic oligonucleotide
  Antisense Strand to SEQ ID NO: 334859
guucuuaaggaaagaagcc

SEQ ID NO: 334861 - RNA, 19 nt, Artificial Sequence
  Description of Artificial Sequence: Synthetic oligonucleotide
  Sense Strand Starting at position 204 of SEQ ID NO: 317005
gugcuagaccucugaaauu

SEQ ID NO: 334862 - RNA, 19 nt, Artificial Sequence
  Description of Artificial Sequence: Synthetic oligonucleotide
  Antisense Strand to SEQ ID NO: 334861
aauuucagaggucuagcac

SEQ ID NO: 334863 - RNA, 19 nt, Artificial Sequence
  Description of Artificial Sequence: Synthetic oligonucleotide
  Sense Strand Starting at position 204 of SEQ ID NO: 317297
ggaggcaaugaggguuaaa

SEQ ID NO: 334864 - RNA, 19 nt, Artificial Sequence
  Description of Artificial Sequence: Synthetic oligonucleotide
  Antisense Strand to SEQ ID NO: 334863
uuuaacccucauugccucc

SEQ ID NO: 334865 - RNA, 19 nt, Artificial Sequence
  Description of Artificial Sequence: Synthetic oligonucleotide
  Sense Strand Starting at position 204 of SEQ ID NO: 317356
gucuccuagguagaggaau

SEQ ID NO: 334866 - RNA, 19 nt, Artificial Sequence
  Description of Artificial Sequence: Synthetic oligonucleotide
  Antisense Strand to SEQ ID NO: 334865
auuccucuaccuaggagac

SEQ ID NO: 334867 - RNA, 19 nt, Artificial Sequence
  Description of Artificial Sequence: Synthetic oligonucleotide
  Sense Strand Starting at position 204 of SEQ ID NO: 317447
gccaucugcaaguaaggua

SEQ ID NO: 334868 - RNA, 19 nt, Artificial Sequence
  Description of Artificial Sequence: Synthetic oligonucleotide
  Antisense Strand to SEQ ID NO: 334867
uaccuuacuugcagauggc

SEQ ID NO: 334869 - RNA, 19 nt, Artificial Sequence
  Description of Artificial Sequence: Synthetic oligonucleotide
  Sense Strand Starting at position 204 of SEQ ID NO: 317579
gaaguccuagcagacuaau

SEQ ID NO: 334870 - RNA, 19 nt, Artificial Sequence
  Description of Artificial Sequence: Synthetic oligonucleotide
  Antisense Strand to SEQ ID NO: 334869
auuagucugcuaggacuuc

SEQ ID NO: 334871 - RNA, 19 nt, Artificial Sequence
  Description of Artificial Sequence: Synthetic oligonucleotide
  Sense Strand Starting at position 204 of SEQ ID NO: 317754
cuggcuuuccuccauggua

SEQ ID NO: 334872 - RNA, 19 nt, Artificial Sequence
  Description of Artificial Sequence: Synthetic oligonucleotide
  Antisense Strand to SEQ ID NO: 334871
uaccauggaggaaagccag

SEQ ID NO: 334873 - RNA, 19 nt, Artificial Sequence
  Description of Artificial Sequence: Synthetic oligonucleotide
  Sense Strand Starting at position 204 of SEQ ID NO: 317768
ugguauguagcauacacaa

SEQ ID NO: 334874 - RNA, 19 nt, Artificial Sequence
  Description of Artificial Sequence: Synthetic oligonucleotide
  Antisense Strand to SEQ ID NO: 334873
uuguguaugcuacauacca

SEQ ID NO: 334875 - RNA, 19 nt, Artificial Sequence
  Description of Artificial Sequence: Synthetic oligonucleotide
  Sense Strand Starting at position 204 of SEQ ID NO: 317888
acaugagucccagaauugu

SEQ ID NO: 334876 - RNA, 19 nt, Artificial Sequence
  Description of Artificial Sequence: Synthetic oligonucleotide
  Antisense Strand to SEQ ID NO: 334875
acaauucugggacucaugu

SEQ ID NO: 334877 - RNA, 19 nt, Artificial Sequence
  Description of Artificial Sequence: Synthetic oligonucleotide
  Sense Strand Starting at position 204 of SEQ ID NO: 317896
cccagaauuguugggagga

SEQ ID NO: 334878 - RNA, 19 nt, Artificial Sequence
  Description of Artificial Sequence: Synthetic oligonucleotide
  Antisense Strand to SEQ ID NO: 334877
uccucccaacaauucuggg

SEQ ID NO: 334879 - RNA, 19 nt, Artificial Sequence
  Description of Artificial Sequence: Synthetic oligonucleotide
  Sense Strand Starting at position 204 of SEQ ID NO: 317950
ccacucauuccuggagaaa

SEQ ID NO: 334880 - RNA, 19 nt, Artificial Sequence
  Description of Artificial Sequence: Synthetic oligonucleotide
  Antisense Strand to SEQ ID NO: 334879
uuucuccaggaaugagugg

SEQ ID NO: 334881 - RNA, 19 nt, Artificial Sequence
  Description of Artificial Sequence: Synthetic oligonucleotide
  Sense Strand Starting at position 204 of SEQ ID NO: 317972
aguagaaauaucugcugga

SEQ ID NO: 334882 - RNA, 19 nt, Artificial Sequence
  Description of Artificial Sequence: Synthetic oligonucleotide
  Antisense Strand to SEQ ID NO: 334881
uccagcagauauuucuacu

SEQ ID NO: 334883 - RNA, 19 nt, Artificial Sequence
  Description of Artificial Sequence: Synthetic oligonucleotide
  Sense Strand Starting at position 204 of SEQ ID NO: 317973
guagaaauaucugcuggau

SEQ ID NO: 334884 - RNA, 19 nt, Artificial Sequence
  Description of Artificial Sequence: Synthetic oligonucleotide
  Antisense Strand to SEQ ID NO: 334883
auccagcagauauuucuac

SEQ ID NO: 334885 - RNA, 19 nt, Artificial Sequence
  Description of Artificial Sequence: Synthetic oligonucleotide
  Sense Strand Starting at position 204 of SEQ ID NO: 318256
agagaucugaucugauggu

SEQ ID NO: 334886 - RNA, 19 nt, Artificial Sequence
  Description of Artificial Sequence: Synthetic oligonucleotide
  Antisense Strand to SEQ ID NO: 334885
accaucagaucagaucucu

SEQ ID NO: 334887 - RNA, 19 nt, Artificial Sequence
  Description of Artificial Sequence: Synthetic oligonucleotide
  Sense Strand Starting at position 204 of SEQ ID NO: 318447
uuggucuuucuuuauagca

SEQ ID NO: 334888 - RNA, 19 nt, Artificial Sequence
  Description of Artificial Sequence: Synthetic oligonucleotide
  Antisense Strand to SEQ ID NO: 334887
ugcuauaaagaaagaccaa

SEQ ID NO: 334889 - RNA, 19 nt, Artificial Sequence
  Description of Artificial Sequence: Synthetic oligonucleotide
  Sense Strand Starting at position 204 of SEQ ID NO: 318476
ggacuaaugcaucaucugu

SEQ ID NO: 334890 - RNA, 19 nt, Artificial Sequence
  Description of Artificial Sequence: Synthetic oligonucleotide
  Antisense Strand to SEQ ID NO: 334889
acagaugaugcauuagucc

SEQ ID NO: 334891 - RNA, 19 nt, Artificial Sequence
  Description of Artificial Sequence: Synthetic oligonucleotide
  Sense Strand Starting at position 204 of SEQ ID NO: 318595
ugaggugagcuaugauuga

SEQ ID NO: 334892 - RNA, 19 nt, Artificial Sequence
  Description of Artificial Sequence: Synthetic oligonucleotide
  Antisense Strand to SEQ ID NO: 334891
ucaaucauagcucaccuca

SEQ ID NO: 334893 - RNA, 19 nt, Artificial Sequence
  Description of Artificial Sequence: Synthetic oligonucleotide
  Sense Strand Starting at position 204 of SEQ ID NO: 318617
acugaccugucucuaaaga

SEQ ID NO: 334894 - RNA, 19 nt, Artificial Sequence
  Description of Artificial Sequence: Synthetic oligonucleotide
  Antisense Strand to SEQ ID NO: 334893
ucuuuagagacaggucagu

SEQ ID NO: 334895 - RNA, 19 nt, Artificial Sequence
  Description of Artificial Sequence: Synthetic oligonucleotide
  Sense Strand Starting at position 204 of SEQ ID NO: 318644
aaggaaauaucugcuggua

SEQ ID NO: 334896 - RNA, 19 nt, Artificial Sequence
  Description of Artificial Sequence: Synthetic oligonucleotide
  Antisense Strand to SEQ ID NO: 334895
uaccagcagauauuuccuu

SEQ ID NO: 334897 - RNA, 19 nt, Artificial Sequence
  Description of Artificial Sequence: Synthetic oligonucleotide
  Sense Strand Starting at position 204 of SEQ ID NO: 318647
gaaauaucugcugguaccu

SEQ ID NO: 334898 - RNA, 19 nt, Artificial Sequence
  Description of Artificial Sequence: Synthetic oligonucleotide
  Antisense Strand to SEQ ID NO: 334897
agguaccagcagauauuuc

SEQ ID NO: 334899 - RNA, 19 nt, Artificial Sequence
  Description of Artificial Sequence: Synthetic oligonucleotide
  Sense Strand Starting at position 204 of SEQ ID NO: 318751
guaugugauaagcaaagau

SEQ ID NO: 334900 - RNA, 19 nt, Artificial Sequence
  Description of Artificial Sequence: Synthetic oligonucleotide
  Antisense Strand to SEQ ID NO: 334899
aucuuugcuuaucacauac

SEQ ID NO: 334901 - RNA, 19 nt, Artificial Sequence
  Description of Artificial Sequence: Synthetic oligonucleotide
  Sense Strand Starting at position 204 of SEQ ID NO: 318805
guauuacuaguccauguca

SEQ ID NO: 334902 - RNA, 19 nt, Artificial Sequence
  Description of Artificial Sequence: Synthetic oligonucleotide
  Antisense Strand to SEQ ID NO: 334901
ugacauggacuaguaauac

SEQ ID NO: 334903 - RNA, 19 nt, Artificial Sequence
  Description of Artificial Sequence: Synthetic oligonucleotide
  Sense Strand Starting at position 204 of SEQ ID NO: 318807
auuacuaguccaugucaug

SEQ ID NO: 334904 - RNA, 19 nt, Artificial Sequence
  Description of Artificial Sequence: Synthetic oligonucleotide
  Antisense Strand to SEQ ID NO: 334903
caugacauggacuaguaau

SEQ ID NO: 334905 - RNA, 19 nt, Artificial Sequence
  Description of Artificial Sequence: Synthetic oligonucleotide
  Sense Strand Starting at position 204 of SEQ ID NO: 318988
ucaguuccugaggauucuu

SEQ ID NO: 334906 - RNA, 19 nt, Artificial Sequence
  Description of Artificial Sequence: Synthetic oligonucleotide
  Antisense Strand to SEQ ID NO: 334905
aagaauccucaggaacuga

SEQ ID NO: 334907 - RNA, 19 nt, Artificial Sequence
  Description of Artificial Sequence: Synthetic oligonucleotide
  Sense Strand Starting at position 204 of SEQ ID NO: 319096
agauguggagucuggugaa

SEQ ID NO: 334908 - RNA, 19 nt, Artificial Sequence
  Description of Artificial Sequence: Synthetic oligonucleotide
  Antisense Strand to SEQ ID NO: 334907
uucaccagacuccacaucu

SEQ ID NO: 334909 - RNA, 19 nt, Artificial Sequence
  Description of Artificial Sequence: Synthetic oligonucleotide
  Sense Strand Starting at position 204 of SEQ ID NO: 319100
guggagucuggugaagagu

SEQ ID NO: 334910 - RNA, 19 nt, Artificial Sequence
  Description of Artificial Sequence: Synthetic oligonucleotide
  Antisense Strand to SEQ ID NO: 334909
acucuucaccagacuccac

SEQ ID NO: 334911 - RNA, 19 nt, Artificial Sequence
  Description of Artificial Sequence: Synthetic oligonucleotide
  Sense Strand Starting at position 205 of SEQ ID NO: 315251
uguguaagacaugauccau

SEQ ID NO: 334912 - RNA, 19 nt, Artificial Sequence
  Description of Artificial Sequence: Synthetic oligonucleotide
  Antisense Strand to SEQ ID NO: 334911
auggaucaugucuuacaca

SEQ ID NO: 334913 - RNA, 19 nt, Artificial Sequence
  Description of Artificial Sequence: Synthetic oligonucleotide
  Sense Strand Starting at position 205 of SEQ ID NO: 315262
ugauccauguccucaagaa

SEQ ID NO: 334914 - RNA, 19 nt, Artificial Sequence
  Description of Artificial Sequence: Synthetic oligonucleotide
  Antisense Strand to SEQ ID NO: 334913
uucuugaggacauggauca

SEQ ID NO: 334915 - RNA, 19 nt, Artificial Sequence
  Description of Artificial Sequence: Synthetic oligonucleotide
  Sense Strand Starting at position 205 of SEQ ID NO: 315330
gggaaagugcuaugaguug

SEQ ID NO: 334916 - RNA, 19 nt, Artificial Sequence
  Description of Artificial Sequence: Synthetic oligonucleotide
  Antisense Strand to SEQ ID NO: 334915
caacucauagcacuuuccc

SEQ ID NO: 334917 - RNA, 19 nt, Artificial Sequence
  Description of Artificial Sequence: Synthetic oligonucleotide
  Sense Strand Starting at position 205 of SEQ ID NO: 315404
ggcuucauugaagagguga

SEQ ID NO: 334918 - RNA, 19 nt, Artificial Sequence
  Description of Artificial Sequence: Synthetic oligonucleotide
  Antisense Strand to SEQ ID NO: 334917
ucaccucuucaaugaagcc

SEQ ID NO: 334919 - RNA, 19 nt, Artificial Sequence
  Description of Artificial Sequence: Synthetic oligonucleotide
  Sense Strand Starting at position 205 of SEQ ID NO: 315566
aagggagagagcugcuaau

SEQ ID NO: 334920 - RNA, 19 nt, Artificial Sequence
  Description of Artificial Sequence: Synthetic oligonucleotide
  Antisense Strand to SEQ ID NO: 334919
auuagcagcucucucccuu

SEQ ID NO: 334921 - RNA, 19 nt, Artificial Sequence
  Description of Artificial Sequence: Synthetic oligonucleotide
  Sense Strand Starting at position 205 of SEQ ID NO: 315670
uuacguagccaacaugaaa

SEQ ID NO: 334922 - RNA, 19 nt, Artificial Sequence
  Description of Artificial Sequence: Synthetic oligonucleotide
  Antisense Strand to SEQ ID NO: 334921
uuucauguuggcuacguaa

SEQ ID NO: 334923 - RNA, 19 nt, Artificial Sequence
  Description of Artificial Sequence: Synthetic oligonucleotide
  Sense Strand Starting at position 205 of SEQ ID NO: 315888
gggucucugagccaucuau

SEQ ID NO: 334924 - RNA, 19 nt, Artificial Sequence
  Description of Artificial Sequence: Synthetic oligonucleotide
  Antisense Strand to SEQ ID NO: 334923
auagauggcucagagaccc

SEQ ID NO: 334925 - RNA, 19 nt, Artificial Sequence
  Description of Artificial Sequence: Synthetic oligonucleotide
  Sense Strand Starting at position 205 of SEQ ID NO: 315920
ucaccaugccuggaucaga

SEQ ID NO: 334926 - RNA, 19 nt, Artificial Sequence
  Description of Artificial Sequence: Synthetic oligonucleotide
  Antisense Strand to SEQ ID NO: 334925
ucugauccaggcaugguga

SEQ ID NO: 334927 - RNA, 19 nt, Artificial Sequence
  Description of Artificial Sequence: Synthetic oligonucleotide
  Sense Strand Starting at position 205 of SEQ ID NO: 315997
gugagugaggccuacacaa

SEQ ID NO: 334928 - RNA, 19 nt, Artificial Sequence
  Description of Artificial Sequence: Synthetic oligonucleotide
  Antisense Strand to SEQ ID NO: 334927
uuguguaggccucacucac

SEQ ID NO: 334929 - RNA, 19 nt, Artificial Sequence
  Description of Artificial Sequence: Synthetic oligonucleotide
  Sense Strand Starting at position 205 of SEQ ID NO: 316411
auuguuaaguuucugagau

SEQ ID NO: 334930 - RNA, 19 nt, Artificial Sequence
  Description of Artificial Sequence: Synthetic oligonucleotide
  Antisense Strand to SEQ ID NO: 334929
aucucagaaacuuaacaau

SEQ ID NO: 334931 - RNA, 19 nt, Artificial Sequence
  Description of Artificial Sequence: Synthetic oligonucleotide
  Sense Strand Starting at position 205 of SEQ ID NO: 316423
cugagauacuuccuuucug

SEQ ID NO: 334932 - RNA, 19 nt, Artificial Sequence
  Description of Artificial Sequence: Synthetic oligonucleotide
  Antisense Strand to SEQ ID NO: 334931
cagaaaggaaguaucucag

SEQ ID NO: 334933 - RNA, 19 nt, Artificial Sequence
  Description of Artificial Sequence: Synthetic oligonucleotide
  Sense Strand Starting at position 205 of SEQ ID NO: 316424
ugagauacuuccuuucuga

SEQ ID NO: 334934 - RNA, 19 nt, Artificial Sequence
  Description of Artificial Sequence: Synthetic oligonucleotide
  Antisense Strand to SEQ ID NO: 334933
ucagaaaggaaguaucuca

SEQ ID NO: 334935 - RNA, 19 nt, Artificial Sequence
  Description of Artificial Sequence: Synthetic oligonucleotide
  Sense Strand Starting at position 205 of SEQ ID NO: 316619
ggcugcuguguauuccauu

SEQ ID NO: 334936 - RNA, 19 nt, Artificial Sequence
  Description of Artificial Sequence: Synthetic oligonucleotide
  Antisense Strand to SEQ ID NO: 334935
aauggaauacacagcagcc

SEQ ID NO: 334937 - RNA, 19 nt, Artificial Sequence
  Description of Artificial Sequence: Synthetic oligonucleotide
  Sense Strand Starting at position 205 of SEQ ID NO: 316628
guauuccauugucuagaua

SEQ ID NO: 334938 - RNA, 19 nt, Artificial Sequence
  Description of Artificial Sequence: Synthetic oligonucleotide
  Antisense Strand to SEQ ID NO: 334937
uaucuagacaauggaauac

SEQ ID NO: 334939 - RNA, 19 nt, Artificial Sequence
  Description of Artificial Sequence: Synthetic oligonucleotide
  Sense Strand Starting at position 205 of SEQ ID NO: 316631
uuccauugucuagauacau

SEQ ID NO: 334940 - RNA, 19 nt, Artificial Sequence
  Description of Artificial Sequence: Synthetic oligonucleotide
  Antisense Strand to SEQ ID NO: 334939
auguaucuagacaauggaa

SEQ ID NO: 334941 - RNA, 19 nt, Artificial Sequence
  Description of Artificial Sequence: Synthetic oligonucleotide
  Sense Strand Starting at position 205 of SEQ ID NO: 316966
gcccaugaccucugaacaa

SEQ ID NO: 334942 - RNA, 19 nt, Artificial Sequence
  Description of Artificial Sequence: Synthetic oligonucleotide
  Antisense Strand to SEQ ID NO: 334941
uuguucagaggucaugggc

SEQ ID NO: 334943 - RNA, 19 nt, Artificial Sequence
  Description of Artificial Sequence: Synthetic oligonucleotide
  Sense Strand Starting at position 205 of SEQ ID NO: 317003
uuuagaagccaucauagca

SEQ ID NO: 334944 - RNA, 19 nt, Artificial Sequence
  Description of Artificial Sequence: Synthetic oligonucleotide
  Antisense Strand to SEQ ID NO: 334943
ugcuaugauggcuucuaaa

SEQ ID NO: 334945 - RNA, 19 nt, Artificial Sequence
  Description of Artificial Sequence: Synthetic oligonucleotide
  Sense Strand Starting at position 205 of SEQ ID NO: 317072
gagcaauacucacugugga

SEQ ID NO: 334946 - RNA, 19 nt, Artificial Sequence
  Description of Artificial Sequence: Synthetic oligonucleotide
  Antisense Strand to SEQ ID NO: 334945
uccacagugaguauugcuc

SEQ ID NO: 334947 - RNA, 19 nt, Artificial Sequence
  Description of Artificial Sequence: Synthetic oligonucleotide
  Sense Strand Starting at position 205 of SEQ ID NO: 317307
cagcaaucagcggagucaa

SEQ ID NO: 334948 - RNA, 19 nt, Artificial Sequence
  Description of Artificial Sequence: Synthetic oligonucleotide
  Antisense Strand to SEQ ID NO: 334947
uugacuccgcugauugcug

SEQ ID NO: 334949 - RNA, 19 nt, Artificial Sequence
  Description of Artificial Sequence: Synthetic oligonucleotide
  Sense Strand Starting at position 205 of SEQ ID NO: 317372
gaaacugucucaucugaag

SEQ ID NO: 334950 - RNA, 19 nt, Artificial Sequence
  Description of Artificial Sequence: Synthetic oligonucleotide
  Antisense Strand to SEQ ID NO: 334949
cuucagaugagacaguuuc

SEQ ID NO: 334951 - RNA, 19 nt, Artificial Sequence
  Description of Artificial Sequence: Synthetic oligonucleotide
  Sense Strand Starting at position 205 of SEQ ID NO: 317393
gcacauacagacugaugau

SEQ ID NO: 334952 - RNA, 19 nt, Artificial Sequence
  Description of Artificial Sequence: Synthetic oligonucleotide
  Antisense Strand to SEQ ID NO: 334951
aucaucagucuguaugugc

SEQ ID NO: 334953 - RNA, 19 nt, Artificial Sequence
  Description of Artificial Sequence: Synthetic oligonucleotide
  Sense Strand Starting at position 205 of SEQ ID NO: 317748
gucccagcacucugagaga

SEQ ID NO: 334954 - RNA, 19 nt, Artificial Sequence
  Description of Artificial Sequence: Synthetic oligonucleotide
  Antisense Strand to SEQ ID NO: 334953
ucucucagagugcugggac

SEQ ID NO: 334955 - RNA, 19 nt, Artificial Sequence
  Description of Artificial Sequence: Synthetic oligonucleotide
  Sense Strand Starting at position 205 of SEQ ID NO: 318085
uggcuaucccaauggacaa

SEQ ID NO: 334956 - RNA, 19 nt, Artificial Sequence
  Description of Artificial Sequence: Synthetic oligonucleotide
  Antisense Strand to SEQ ID NO: 334955
uuguccauugggauagcca

SEQ ID NO: 334957 - RNA, 19 nt, Artificial Sequence
  Description of Artificial Sequence: Synthetic oligonucleotide
  Sense Strand Starting at position 205 of SEQ ID NO: 318142
auugaaaggcacugcuuua

SEQ ID NO: 334958 - RNA, 19 nt, Artificial Sequence
  Description of Artificial Sequence: Synthetic oligonucleotide
  Antisense Strand to SEQ ID NO: 334957
uaaagcagugccuuucaau

SEQ ID NO: 334959 - RNA, 19 nt, Artificial Sequence
  Description of Artificial Sequence: Synthetic oligonucleotide
  Sense Strand Starting at position 205 of SEQ ID NO: 318147
aaggcacugcuuuagaaag

SEQ ID NO: 334960 - RNA, 19 nt, Artificial Sequence
  Description of Artificial Sequence: Synthetic oligonucleotide
  Antisense Strand to SEQ ID NO: 334959
cuuucuaaagcagugccuu

SEQ ID NO: 334961 - RNA, 19 nt, Artificial Sequence
  Description of Artificial Sequence: Synthetic oligonucleotide
  Sense Strand Starting at position 205 of SEQ ID NO: 318173
gugagauguagcuaggaac

SEQ ID NO: 334962 - RNA, 19 nt, Artificial Sequence
  Description of Artificial Sequence: Synthetic oligonucleotide
  Antisense Strand to SEQ ID NO: 334961
guuccuagcuacaucucac

SEQ ID NO: 334963 - RNA, 19 nt, Artificial Sequence
  Description of Artificial Sequence: Synthetic oligonucleotide
  Sense Strand Starting at position 205 of SEQ ID NO: 318367
gacgaagucuucccaucca

SEQ ID NO: 334964 - RNA, 19 nt, Artificial Sequence
  Description of Artificial Sequence: Synthetic oligonucleotide
  Antisense Strand to SEQ ID NO: 334963
uggaugggaagacuucguc

SEQ ID NO: 334965 - RNA, 19 nt, Artificial Sequence
  Description of Artificial Sequence: Synthetic oligonucleotide
  Sense Strand Starting at position 205 of SEQ ID NO: 318487
uacacucuuguggauguua

SEQ ID NO: 334966 - RNA, 19 nt, Artificial Sequence
  Description of Artificial Sequence: Synthetic oligonucleotide
  Antisense Strand to SEQ ID NO: 334965
uaacauccacaagagugua

SEQ ID NO: 334967 - RNA, 19 nt, Artificial Sequence
  Description of Artificial Sequence: Synthetic oligonucleotide
  Sense Strand Starting at position 205 of SEQ ID NO: 318511
caccucuugguguauugau

SEQ ID NO: 334968 - RNA, 19 nt, Artificial Sequence
  Description of Artificial Sequence: Synthetic oligonucleotide
  Antisense Strand to SEQ ID NO: 334967
aucaauacaccaagaggug

SEQ ID NO: 334969 - RNA, 19 nt, Artificial Sequence
  Description of Artificial Sequence: Synthetic oligonucleotide
  Sense Strand Starting at position 205 of SEQ ID NO: 318524
auugauugucccgaggacu

SEQ ID NO: 334970 - RNA, 19 nt, Artificial Sequence
  Description of Artificial Sequence: Synthetic oligonucleotide
  Antisense Strand to SEQ ID NO: 334969
aguccucgggacaaucaau

SEQ ID NO: 334971 - RNA, 19 nt, Artificial Sequence
  Description of Artificial Sequence: Synthetic oligonucleotide
  Sense Strand Starting at position 205 of SEQ ID NO: 318527
gauugucccgaggacucaa

SEQ ID NO: 334972 - RNA, 19 nt, Artificial Sequence
  Description of Artificial Sequence: Synthetic oligonucleotide
  Antisense Strand to SEQ ID NO: 334971
uugaguccucgggacaauc

SEQ ID NO: 334973 - RNA, 19 nt, Artificial Sequence
  Description of Artificial Sequence: Synthetic oligonucleotide
  Sense Strand Starting at position 205 of SEQ ID NO: 318636
uggguuuauugucuaaaug

SEQ ID NO: 334974 - RNA, 19 nt, Artificial Sequence
  Description of Artificial Sequence: Synthetic oligonucleotide
  Antisense Strand to SEQ ID NO: 334973
cauuuagacaauaaaccca

SEQ ID NO: 334975 - RNA, 19 nt, Artificial Sequence
  Description of Artificial Sequence: Synthetic oligonucleotide
  Sense Strand Starting at position 205 of SEQ ID NO: 318637
ggguuuauugucuaaaugg

SEQ ID NO: 334976 - RNA, 19 nt, Artificial Sequence
  Description of Artificial Sequence: Synthetic oligonucleotide
  Antisense Strand to SEQ ID NO: 334975
ccauuuagacaauaaaccc

SEQ ID NO: 334977 - RNA, 19 nt, Artificial Sequence
  Description of Artificial Sequence: Synthetic oligonucleotide
  Sense Strand Starting at position 205 of SEQ ID NO: 318706
gaacgaaagaggugucuga

SEQ ID NO: 334978 - RNA, 19 nt, Artificial Sequence
  Description of Artificial Sequence: Synthetic oligonucleotide
  Antisense Strand to SEQ ID NO: 334977
ucagacaccucuuucguuc

SEQ ID NO: 334979 - RNA, 19 nt, Artificial Sequence
  Description of Artificial Sequence: Synthetic oligonucleotide
  Sense Strand Starting at position 205 of SEQ ID NO: 318796
aauaaauggugucugaaac

SEQ ID NO: 334980 - RNA, 19 nt, Artificial Sequence
  Description of Artificial Sequence: Synthetic oligonucleotide
  Antisense Strand to SEQ ID NO: 334979
guuucagacaccauuuauu

SEQ ID NO: 334981 - RNA, 19 nt, Artificial Sequence
  Description of Artificial Sequence: Synthetic oligonucleotide
  Sense Strand Starting at position 205 of SEQ ID NO: 318797
auaaauggugucugaaacu

SEQ ID NO: 334982 - RNA, 19 nt, Artificial Sequence
  Description of Artificial Sequence: Synthetic oligonucleotide
  Antisense Strand to SEQ ID NO: 334981
aguuucagacaccauuuau

SEQ ID NO: 334983 - RNA, 19 nt, Artificial Sequence
  Description of Artificial Sequence: Synthetic oligonucleotide
  Sense Strand Starting at position 205 of SEQ ID NO: 318906
ggaagaagauguucccuua

SEQ ID NO: 334984 - RNA, 19 nt, Artificial Sequence
  Description of Artificial Sequence: Synthetic oligonucleotide
  Antisense Strand to SEQ ID NO: 334983
uaagggaacaucuucuucc

SEQ ID NO: 334985 - RNA, 19 nt, Artificial Sequence
  Description of Artificial Sequence: Synthetic oligonucleotide
  Sense Strand Starting at position 205 of SEQ ID NO: 318909
agaagauguucccuuacuu

SEQ ID NO: 334986 - RNA, 19 nt, Artificial Sequence
  Description of Artificial Sequence: Synthetic oligonucleotide
  Antisense Strand to SEQ ID NO: 334985
aaguaagggaacaucuucu

SEQ ID NO: 334987 - RNA, 19 nt, Artificial Sequence
  Description of Artificial Sequence: Synthetic oligonucleotide
  Sense Strand Starting at position 205 of SEQ ID NO: 318991
aggugagacacgcacuauu

SEQ ID NO: 334988 - RNA, 19 nt, Artificial Sequence
  Description of Artificial Sequence: Synthetic oligonucleotide
  Antisense Strand to SEQ ID NO: 334987
aauagugcgugucucaccu

SEQ ID NO: 334989 - RNA, 19 nt, Artificial Sequence
  Description of Artificial Sequence: Synthetic oligonucleotide
  Sense Strand Starting at position 205 of SEQ ID NO: 319063
cuguuuccucaucagguaa

SEQ ID NO: 334990 - RNA, 19 nt, Artificial Sequence
  Description of Artificial Sequence: Synthetic oligonucleotide
  Antisense Strand to SEQ ID NO: 334989
uuaccugaugaggaaacag

SEQ ID NO: 334991 - RNA, 19 nt, Artificial Sequence
  Description of Artificial Sequence: Synthetic oligonucleotide
  Sense Strand Starting at position 206 of SEQ ID NO: 316718
cagacugcccuguggagaa

SEQ ID NO: 334992 - RNA, 19 nt, Artificial Sequence
  Description of Artificial Sequence: Synthetic oligonucleotide
  Antisense Strand to SEQ ID NO: 334991
uucuccacagggcagucug

SEQ ID NO: 334993 - RNA, 19 nt, Artificial Sequence
  Description of Artificial Sequence: Synthetic oligonucleotide
  Sense Strand Starting at position 206 of SEQ ID NO: 316720
gacugcccuguggagaaau

SEQ ID NO: 334994 - RNA, 19 nt, Artificial Sequence
  Description of Artificial Sequence: Synthetic oligonucleotide
  Antisense Strand to SEQ ID NO: 334993
auuucuccacagggcaguc

SEQ ID NO: 334995 - RNA, 19 nt, Artificial Sequence
  Description of Artificial Sequence: Synthetic oligonucleotide
  Sense Strand Starting at position 206 of SEQ ID NO: 316764
cugccuuauccuggaggaa

SEQ ID NO: 334996 - RNA, 19 nt, Artificial Sequence
  Description of Artificial Sequence: Synthetic oligonucleotide
  Antisense Strand to SEQ ID NO: 334995
uuccuccaggauaaggcag

SEQ ID NO: 334997 - RNA, 19 nt, Artificial Sequence
  Description of Artificial Sequence: Synthetic oligonucleotide
  Sense Strand Starting at position 206 of SEQ ID NO: 316919
uucccaaucuaguuguuaa

SEQ ID NO: 334998 - RNA, 19 nt, Artificial Sequence
  Description of Artificial Sequence: Synthetic oligonucleotide
  Antisense Strand to SEQ ID NO: 334997
uuaacaacuagauugggaa

SEQ ID NO: 334999 - RNA, 19 nt, Artificial Sequence
  Description of Artificial Sequence: Synthetic oligonucleotide
  Sense Strand Starting at position 206 of SEQ ID NO: 316922
ccaaucuaguuguuaagca

SEQ ID NO: 335000 - RNA, 19 nt, Artificial Sequence
  Description of Artificial Sequence: Synthetic oligonucleotide
  Antisense Strand to SEQ ID NO: 334999
ugcuuaacaacuagauugg

SEQ ID NO: 335001 - RNA, 19 nt, Artificial Sequence
  Description of Artificial Sequence: Synthetic oligonucleotide
  Sense Strand Starting at position 206 of SEQ ID NO: 316926
ucuaguuguuaagcaugua

SEQ ID NO: 335002 - RNA, 19 nt, Artificial Sequence
  Description of Artificial Sequence: Synthetic oligonucleotide
  Antisense Strand to SEQ ID NO: 335001
uacaugcuuaacaacuaga

SEQ ID NO: 335003 - RNA, 19 nt, Artificial Sequence
  Description of Artificial Sequence: Synthetic oligonucleotide
  Sense Strand Starting at position 206 of SEQ ID NO: 316929
aguuguuaagcauguaagu

SEQ ID NO: 335004 - RNA, 19 nt, Artificial Sequence
  Description of Artificial Sequence: Synthetic oligonucleotide
  Antisense Strand to SEQ ID NO: 335003
acuuacaugcuuaacaacu

SEQ ID NO: 335005 - RNA, 19 nt, Artificial Sequence
  Description of Artificial Sequence: Synthetic oligonucleotide
  Sense Strand Starting at position 206 of SEQ ID NO: 316939
cauguaagugcuuagcagu

SEQ ID NO: 335006 - RNA, 19 nt, Artificial Sequence
  Description of Artificial Sequence: Synthetic oligonucleotide
  Antisense Strand to SEQ ID NO: 335005
acugcuaagcacuuacaug

SEQ ID NO: 335007 - RNA, 19 nt, Artificial Sequence
  Description of Artificial Sequence: Synthetic oligonucleotide
  Sense Strand Starting at position 206 of SEQ ID NO: 316961
ccaggugccacgggaaaua

SEQ ID NO: 335008 - RNA, 19 nt, Artificial Sequence
  Description of Artificial Sequence: Synthetic oligonucleotide
  Antisense Strand to SEQ ID NO: 335007
uauuucccguggcaccugg

SEQ ID NO: 335009 - RNA, 19 nt, Artificial Sequence
  Description of Artificial Sequence: Synthetic oligonucleotide
  Sense Strand Starting at position 206 of SEQ ID NO: 316973
ggaaauaaagcuggcauga

SEQ ID NO: 335010 - RNA, 19 nt, Artificial Sequence
  Description of Artificial Sequence: Synthetic oligonucleotide
  Antisense Strand to SEQ ID NO: 335009
ucaugccagcuuuauuucc

SEQ ID NO: 335011 - RNA, 19 nt, Artificial Sequence
  Description of Artificial Sequence: Synthetic oligonucleotide
  Sense Strand Starting at position 206 of SEQ ID NO: 317001
gguagaacuuaccuucuuu

SEQ ID NO: 335012 - RNA, 19 nt, Artificial Sequence
  Description of Artificial Sequence: Synthetic oligonucleotide
  Antisense Strand to SEQ ID NO: 335011
aaagaagguaaguucuacc

SEQ ID NO: 335013 - RNA, 19 nt, Artificial Sequence
  Description of Artificial Sequence: Synthetic oligonucleotide
  Sense Strand Starting at position 206 of SEQ ID NO: 317223
gugaaaccaugcucagcau

SEQ ID NO: 335014 - RNA, 19 nt, Artificial Sequence
  Description of Artificial Sequence: Synthetic oligonucleotide
  Antisense Strand to SEQ ID NO: 335013
augcugagcaugguuucac

SEQ ID NO: 335015 - RNA, 19 nt, Artificial Sequence
  Description of Artificial Sequence: Synthetic oligonucleotide
  Sense Strand Starting at position 206 of SEQ ID NO: 317583
gccuuugauuucccuguga

SEQ ID NO: 335016 - RNA, 19 nt, Artificial Sequence
  Description of Artificial Sequence: Synthetic oligonucleotide
  Antisense Strand to SEQ ID NO: 335015
ucacagggaaaucaaaggc

SEQ ID NO: 335017 - RNA, 19 nt, Artificial Sequence
  Description of Artificial Sequence: Synthetic oligonucleotide
  Sense Strand Starting at position 206 of SEQ ID NO: 317588
ugauuucccugugaccuuu

SEQ ID NO: 335018 - RNA, 19 nt, Artificial Sequence
  Description of Artificial Sequence: Synthetic oligonucleotide
  Antisense Strand to SEQ ID NO: 335017
aaaggucacagggaaauca

SEQ ID NO: 335019 - RNA, 19 nt, Artificial Sequence
  Description of Artificial Sequence: Synthetic oligonucleotide
  Sense Strand Starting at position 206 of SEQ ID NO: 317679
ugucaaggugcugagaacu

SEQ ID NO: 335020 - RNA, 19 nt, Artificial Sequence
  Description of Artificial Sequence: Synthetic oligonucleotide
  Antisense Strand to SEQ ID NO: 335019
aguucucagcaccuugaca

SEQ ID NO: 335021 - RNA, 19 nt, Artificial Sequence
  Description of Artificial Sequence: Synthetic oligonucleotide
  Sense Strand Starting at position 206 of SEQ ID NO: 317710
uggcuuguggcaugugaca

SEQ ID NO: 335022 - RNA, 19 nt, Artificial Sequence
  Description of Artificial Sequence: Synthetic oligonucleotide
  Antisense Strand to SEQ ID NO: 335021
ugucacaugccacaagcca

SEQ ID NO: 335023 - RNA, 19 nt, Artificial Sequence
  Description of Artificial Sequence: Synthetic oligonucleotide
  Sense Strand Starting at position 206 of SEQ ID NO: 317723
gugacacucugaguaggua

SEQ ID NO: 335024 - RNA, 19 nt, Artificial Sequence
  Description of Artificial Sequence: Synthetic oligonucleotide
  Antisense Strand to SEQ ID NO: 335023
uaccuacucagagugucac

SEQ ID NO: 335025 - RNA, 19 nt, Artificial Sequence
  Description of Artificial Sequence: Synthetic oligonucleotide
  Sense Strand Starting at position 206 of SEQ ID NO: 317829
ucaccaguguucgcagaaa

SEQ ID NO: 335026 - RNA, 19 nt, Artificial Sequence
  Description of Artificial Sequence: Synthetic oligonucleotide
  Antisense Strand to SEQ ID NO: 335025
uuucugcgaacacugguga

SEQ ID NO: 335027 - RNA, 19 nt, Artificial Sequence
  Description of Artificial Sequence: Synthetic oligonucleotide
  Sense Strand Starting at position 206 of SEQ ID NO: 317932
cacugugugcuuugguuaa

SEQ ID NO: 335028 - RNA, 19 nt, Artificial Sequence
  Description of Artificial Sequence: Synthetic oligonucleotide
  Antisense Strand to SEQ ID NO: 335027
uuaaccaaagcacacagug

SEQ ID NO: 335029 - RNA, 19 nt, Artificial Sequence
  Description of Artificial Sequence: Synthetic oligonucleotide
  Sense Strand Starting at position 206 of SEQ ID NO: 317934
cugugugcuuugguuaaga

SEQ ID NO: 335030 - RNA, 19 nt, Artificial Sequence
  Description of Artificial Sequence: Synthetic oligonucleotide
  Antisense Strand to SEQ ID NO: 335029
ucuuaaccaaagcacacag

SEQ ID NO: 335031 - RNA, 19 nt, Artificial Sequence
  Description of Artificial Sequence: Synthetic oligonucleotide
  Sense Strand Starting at position 206 of SEQ ID NO: 317936
gugugcuuugguuaagacu

SEQ ID NO: 335032 - RNA, 19 nt, Artificial Sequence
  Description of Artificial Sequence: Synthetic oligonucleotide
  Antisense Strand to SEQ ID NO: 335031
agucuuaaccaaagcacac

SEQ ID NO: 335033 - RNA, 19 nt, Artificial Sequence
  Description of Artificial Sequence: Synthetic oligonucleotide
  Sense Strand Starting at position 206 of SEQ ID NO: 317995
ggugaugucagcugggaaa

SEQ ID NO: 335034 - RNA, 19 nt, Artificial Sequence
  Description of Artificial Sequence: Synthetic oligonucleotide
  Antisense Strand to SEQ ID NO: 335033
uuucccagcugacaucacc

SEQ ID NO: 335035 - RNA, 19 nt, Artificial Sequence
  Description of Artificial Sequence: Synthetic oligonucleotide
  Sense Strand Starting at position 206 of SEQ ID NO: 318065
gggugucaacacugaggaa

SEQ ID NO: 335036 - RNA, 19 nt, Artificial Sequence
  Description of Artificial Sequence: Synthetic oligonucleotide
  Antisense Strand to SEQ ID NO: 335035
uuccucaguguugacaccc

SEQ ID NO: 335037 - RNA, 19 nt, Artificial Sequence
  Description of Artificial Sequence: Synthetic oligonucleotide
  Sense Strand Starting at position 206 of SEQ ID NO: 318104
gccagaagugauuggugcu

SEQ ID NO: 335038 - RNA, 19 nt, Artificial Sequence
  Description of Artificial Sequence: Synthetic oligonucleotide
  Antisense Strand to SEQ ID NO: 335037
agcaccaaucacuucuggc

SEQ ID NO: 335039 - RNA, 19 nt, Artificial Sequence
  Description of Artificial Sequence: Synthetic oligonucleotide
  Sense Strand Starting at position 206 of SEQ ID NO: 318289
gaaggaaauugagagaaca

SEQ ID NO: 335040 - RNA, 19 nt, Artificial Sequence
  Description of Artificial Sequence: Synthetic oligonucleotide
  Antisense Strand to SEQ ID NO: 335039
uguucucucaauuuccuuc

SEQ ID NO: 335041 - RNA, 19 nt, Artificial Sequence
  Description of Artificial Sequence: Synthetic oligonucleotide
  Sense Strand Starting at position 206 of SEQ ID NO: 318439
ugagcuucucuugggucaa

SEQ ID NO: 335042 - RNA, 19 nt, Artificial Sequence
  Description of Artificial Sequence: Synthetic oligonucleotide
  Antisense Strand to SEQ ID NO: 335041
uugacccaagagaagcuca

SEQ ID NO: 335043 - RNA, 19 nt, Artificial Sequence
  Description of Artificial Sequence: Synthetic oligonucleotide
  Sense Strand Starting at position 206 of SEQ ID NO: 318467
agcugugacuaaccuaauu

SEQ ID NO: 335044 - RNA, 19 nt, Artificial Sequence
  Description of Artificial Sequence: Synthetic oligonucleotide
  Antisense Strand to SEQ ID NO: 335043
aauuagguuagucacagcu

SEQ ID NO: 335045 - RNA, 19 nt, Artificial Sequence
  Description of Artificial Sequence: Synthetic oligonucleotide
  Sense Strand Starting at position 206 of SEQ ID NO: 318546
caaagaugugucugaggua

SEQ ID NO: 335046 - RNA, 19 nt, Artificial Sequence
  Description of Artificial Sequence: Synthetic oligonucleotide
  Antisense Strand to SEQ ID NO: 335045
uaccucagacacaucuuug

SEQ ID NO: 335047 - RNA, 19 nt, Artificial Sequence
  Description of Artificial Sequence: Synthetic oligonucleotide
  Sense Strand Starting at position 206 of SEQ ID NO: 318551
augugucugagguaggauu

SEQ ID NO: 335048 - RNA, 19 nt, Artificial Sequence
  Description of Artificial Sequence: Synthetic oligonucleotide
  Antisense Strand to SEQ ID NO: 335047
aauccuaccucagacacau

SEQ ID NO: 335049 - RNA, 19 nt, Artificial Sequence
  Description of Artificial Sequence: Synthetic oligonucleotide
  Sense Strand Starting at position 206 of SEQ ID NO: 318553
gugucugagguaggauuga

SEQ ID NO: 335050 - RNA, 19 nt, Artificial Sequence
  Description of Artificial Sequence: Synthetic oligonucleotide
  Antisense Strand to SEQ ID NO: 335049
ucaauccuaccucagacac

SEQ ID NO: 335051 - RNA, 19 nt, Artificial Sequence
  Description of Artificial Sequence: Synthetic oligonucleotide
  Sense Strand Starting at position 206 of SEQ ID NO: 318718
uagugagaucccggaucua

SEQ ID NO: 335052 - RNA, 19 nt, Artificial Sequence
  Description of Artificial Sequence: Synthetic oligonucleotide
  Antisense Strand to SEQ ID NO: 335051
uagauccgggaucucacua

SEQ ID NO: 335053 - RNA, 19 nt, Artificial Sequence
  Description of Artificial Sequence: Synthetic oligonucleotide
  Sense Strand Starting at position 206 of SEQ ID NO: 318994
agacaaauaugugauugag

SEQ ID NO: 335054 - RNA, 19 nt, Artificial Sequence
  Description of Artificial Sequence: Synthetic oligonucleotide
  Antisense Strand to SEQ ID NO: 335053
cucaaucacauauuugucu

SEQ ID NO: 335055 - RNA, 19 nt, Artificial Sequence
  Description of Artificial Sequence: Synthetic oligonucleotide
  Sense Strand Starting at position 206 of SEQ ID NO: 318996
acaaauaugugauugagca

SEQ ID NO: 335056 - RNA, 19 nt, Artificial Sequence
  Description of Artificial Sequence: Synthetic oligonucleotide
  Antisense Strand to SEQ ID NO: 335055
ugcucaaucacauauuugu

SEQ ID NO: 335057 - RNA, 19 nt, Artificial Sequence
  Description of Artificial Sequence: Synthetic oligonucleotide
  Sense Strand Starting at position 206 of SEQ ID NO: 318997
caaauaugugauugagcau

SEQ ID NO: 335058 - RNA, 19 nt, Artificial Sequence
  Description of Artificial Sequence: Synthetic oligonucleotide
  Antisense Strand to SEQ ID NO: 335057
augcucaaucacauauuug

SEQ ID NO: 335059 - RNA, 19 nt, Artificial Sequence
  Description of Artificial Sequence: Synthetic oligonucleotide
  Sense Strand Starting at position 206 of SEQ ID NO: 319000
auaugugauugagcauuaa

SEQ ID NO: 335060 - RNA, 19 nt, Artificial Sequence
  Description of Artificial Sequence: Synthetic oligonucleotide
  Antisense Strand to SEQ ID NO: 335059
uuaaugcucaaucacauau

SEQ ID NO: 335061 - RNA, 19 nt, Artificial Sequence
  Description of Artificial Sequence: Synthetic oligonucleotide
  Sense Strand Starting at position 206 of SEQ ID NO: 319057
gaaacacaaugauguuuga

SEQ ID NO: 335062 - RNA, 19 nt, Artificial Sequence
  Description of Artificial Sequence: Synthetic oligonucleotide
  Antisense Strand to SEQ ID NO: 335061
ucaaacaucauuguguuuc

SEQ ID NO: 335063 - RNA, 19 nt, Artificial Sequence
  Description of Artificial Sequence: Synthetic oligonucleotide
  Sense Strand Starting at position 206 of SEQ ID NO: 319067
gauguuugauggcagagga

SEQ ID NO: 335064 - RNA, 19 nt, Artificial Sequence
  Description of Artificial Sequence: Synthetic oligonucleotide
  Antisense Strand to SEQ ID NO: 335063
uccucugccaucaaacauc

SEQ ID NO: 335065 - RNA, 19 nt, Artificial Sequence
  Description of Artificial Sequence: Synthetic oligonucleotide
  Sense Strand Starting at position 206 of SEQ ID NO: 319134
gugggucuccugugaguga

SEQ ID NO: 335066 - RNA, 19 nt, Artificial Sequence
  Description of Artificial Sequence: Synthetic oligonucleotide
  Antisense Strand to SEQ ID NO: 335065
ucacucacaggagacccac

SEQ ID NO: 335067 - RNA, 19 nt, Artificial Sequence
  Description of Artificial Sequence: Synthetic oligonucleotide
  Sense Strand Starting at position 206 of SEQ ID NO: 319136
gggucuccugugagugagu

SEQ ID NO: 335068 - RNA, 19 nt, Artificial Sequence
  Description of Artificial Sequence: Synthetic oligonucleotide
  Antisense Strand to SEQ ID NO: 335067
acucacucacaggagaccc

SEQ ID NO: 335069 - RNA, 19 nt, Artificial Sequence
  Description of Artificial Sequence: Synthetic oligonucleotide
  Sense Strand Starting at position 206 of SEQ ID NO: 319138
gucuccugugagugaguga

SEQ ID NO: 335070 - RNA, 19 nt, Artificial Sequence
  Description of Artificial Sequence: Synthetic oligonucleotide
  Antisense Strand to SEQ ID NO: 335069
ucacucacucacaggagac

SEQ ID NO: 335071 - RNA, 19 nt, Artificial Sequence
  Description of Artificial Sequence: Synthetic oligonucleotide
  Sense Strand Starting at position 207 of SEQ ID NO: 316390
cagacugcccuguggagaa

SEQ ID NO: 335072 - RNA, 19 nt, Artificial Sequence
  Description of Artificial Sequence: Synthetic oligonucleotide
  Antisense Strand to SEQ ID NO: 335071
uucuccacagggcagucug

SEQ ID NO: 335073 - RNA, 19 nt, Artificial Sequence
  Description of Artificial Sequence: Synthetic oligonucleotide
  Sense Strand Starting at position 207 of SEQ ID NO: 316392
gacugcccuguggagaaau

SEQ ID NO: 335074 - RNA, 19 nt, Artificial Sequence
  Description of Artificial Sequence: Synthetic oligonucleotide
  Antisense Strand to SEQ ID NO: 335073
auuucuccacagggcaguc

SEQ ID NO: 335075 - RNA, 19 nt, Artificial Sequence
  Description of Artificial Sequence: Synthetic oligonucleotide
  Sense Strand Starting at position 207 of SEQ ID NO: 316436
cugccuuauccuggaggaa

SEQ ID NO: 335076 - RNA, 19 nt, Artificial Sequence
  Description of Artificial Sequence: Synthetic oligonucleotide
  Antisense Strand to SEQ ID NO: 335075
uuccuccaggauaaggcag

SEQ ID NO: 335077 - RNA, 19 nt, Artificial Sequence
  Description of Artificial Sequence: Synthetic oligonucleotide
  Sense Strand Starting at position 207 of SEQ ID NO: 316591
uucccaaucuaguuguuaa

SEQ ID NO: 335078 - RNA, 19 nt, Artificial Sequence
  Description of Artificial Sequence: Synthetic oligonucleotide
  Antisense Strand to SEQ ID NO: 335077
uuaacaacuagauugggaa

SEQ ID NO: 335079 - RNA, 19 nt, Artificial Sequence
  Description of Artificial Sequence: Synthetic oligonucleotide
  Sense Strand Starting at position 207 of SEQ ID NO: 316594
ccaaucuaguuguuaagca

SEQ ID NO: 335080 - RNA, 19 nt, Artificial Sequence
  Description of Artificial Sequence: Synthetic oligonucleotide
  Antisense Strand to SEQ ID NO: 335079
ugcuuaacaacuagauugg

SEQ ID NO: 335081 - RNA, 19 nt, Artificial Sequence
  Description of Artificial Sequence: Synthetic oligonucleotide
  Sense Strand Starting at position 207 of SEQ ID NO: 316633
ccaggugccacgggaaaua

SEQ ID NO: 335082 - RNA, 19 nt, Artificial Sequence
  Description of Artificial Sequence: Synthetic oligonucleotide
  Antisense Strand to SEQ ID NO: 335081
uauuucccguggcaccugg

SEQ ID NO: 335083 - RNA, 19 nt, Artificial Sequence
  Description of Artificial Sequence: Synthetic oligonucleotide
  Sense Strand Starting at position 207 of SEQ ID NO: 316645
ggaaauaaagcuggcauga

SEQ ID NO: 335084 - RNA, 19 nt, Artificial Sequence
  Description of Artificial Sequence: Synthetic oligonucleotide
  Antisense Strand to SEQ ID NO: 335083
ucaugccagcuuuauuucc

SEQ ID NO: 335085 - RNA, 19 nt, Artificial Sequence
  Description of Artificial Sequence: Synthetic oligonucleotide
  Sense Strand Starting at position 207 of SEQ ID NO: 316673
gguagaacuuaccuucuuu

SEQ ID NO: 335086 - RNA, 19 nt, Artificial Sequence
  Description of Artificial Sequence: Synthetic oligonucleotide
  Antisense Strand to SEQ ID NO: 335085
aaagaagguaaguucuacc

SEQ ID NO: 335087 - RNA, 19 nt, Artificial Sequence
  Description of Artificial Sequence: Synthetic oligonucleotide
  Sense Strand Starting at position 207 of SEQ ID NO: 316895
gugaaaccaugcucagcau

SEQ ID NO: 335088 - RNA, 19 nt, Artificial Sequence
  Description of Artificial Sequence: Synthetic oligonucleotide
  Antisense Strand to SEQ ID NO: 335087
augcugagcaugguuucac

SEQ ID NO: 335089 - RNA, 19 nt, Artificial Sequence
  Description of Artificial Sequence: Synthetic oligonucleotide
  Sense Strand Starting at position 207 of SEQ ID NO: 317255
gccuuugauuucccuguga

SEQ ID NO: 335090 - RNA, 19 nt, Artificial Sequence
  Description of Artificial Sequence: Synthetic oligonucleotide
  Antisense Strand to SEQ ID NO: 335089
ucacagggaaaucaaaggc

SEQ ID NO: 335091 - RNA, 19 nt, Artificial Sequence
  Description of Artificial Sequence: Synthetic oligonucleotide
  Sense Strand Starting at position 207 of SEQ ID NO: 317351
ugucaaggugcugagaacu

SEQ ID NO: 335092 - RNA, 19 nt, Artificial Sequence
  Description of Artificial Sequence: Synthetic oligonucleotide
  Antisense Strand to SEQ ID NO: 335091
aguucucagcaccuugaca

SEQ ID NO: 335093 - RNA, 19 nt, Artificial Sequence
  Description of Artificial Sequence: Synthetic oligonucleotide
  Sense Strand Starting at position 207 of SEQ ID NO: 317395
gugacacucugaguaggua

SEQ ID NO: 335094 - RNA, 19 nt, Artificial Sequence
  Description of Artificial Sequence: Synthetic oligonucleotide
  Antisense Strand to SEQ ID NO: 335093
uaccuacucagagugucac

SEQ ID NO: 335095 - RNA, 19 nt, Artificial Sequence
  Description of Artificial Sequence: Synthetic oligonucleotide
  Sense Strand Starting at position 207 of SEQ ID NO: 317501
ucaccaguguucgcagaaa

SEQ ID NO: 335096 - RNA, 19 nt, Artificial Sequence
  Description of Artificial Sequence: Synthetic oligonucleotide
  Antisense Strand to SEQ ID NO: 335095
uuucugcgaacacugguga

SEQ ID NO: 335097 - RNA, 19 nt, Artificial Sequence
  Description of Artificial Sequence: Synthetic oligonucleotide
  Sense Strand Starting at position 207 of SEQ ID NO: 317608
gugugcuuugguuaagacu

SEQ ID NO: 335098 - RNA, 19 nt, Artificial Sequence
  Description of Artificial Sequence: Synthetic oligonucleotide
  Antisense Strand to SEQ ID NO: 335097
agucuuaaccaaagcacac

SEQ ID NO: 335099 - RNA, 19 nt, Artificial Sequence
  Description of Artificial Sequence: Synthetic oligonucleotide
  Sense Strand Starting at position 207 of SEQ ID NO: 317667
ggugaugucagcugggaaa

SEQ ID NO: 335100 - RNA, 19 nt, Artificial Sequence
  Description of Artificial Sequence: Synthetic oligonucleotide
  Antisense Strand to SEQ ID NO: 335099
uuucccagcugacaucacc

SEQ ID NO: 335101 - RNA, 19 nt, Artificial Sequence
  Description of Artificial Sequence: Synthetic oligonucleotide
  Sense Strand Starting at position 207 of SEQ ID NO: 317737
gggugucaacacugaggaa

SEQ ID NO: 335102 - RNA, 19 nt, Artificial Sequence
  Description of Artificial Sequence: Synthetic oligonucleotide
  Antisense Strand to SEQ ID NO: 335101
uuccucaguguugacaccc

SEQ ID NO: 335103 - RNA, 19 nt, Artificial Sequence
  Description of Artificial Sequence: Synthetic oligonucleotide
  Sense Strand Starting at position 207 of SEQ ID NO: 317961
gaaggaaauugagagaaca

SEQ ID NO: 335104 - RNA, 19 nt, Artificial Sequence
  Description of Artificial Sequence: Synthetic oligonucleotide
  Antisense Strand to SEQ ID NO: 335103
uguucucucaauuuccuuc

SEQ ID NO: 335105 - RNA, 19 nt, Artificial Sequence
  Description of Artificial Sequence: Synthetic oligonucleotide
  Sense Strand Starting at position 207 of SEQ ID NO: 318111
ugagcuucucuugggucaa

SEQ ID NO: 335106 - RNA, 19 nt, Artificial Sequence
  Description of Artificial Sequence: Synthetic oligonucleotide
  Antisense Strand to SEQ ID NO: 335105
uugacccaagagaagcuca

SEQ ID NO: 335107 - RNA, 19 nt, Artificial Sequence
  Description of Artificial Sequence: Synthetic oligonucleotide
  Sense Strand Starting at position 207 of SEQ ID NO: 318139
agcugugacuaaccuaauu

SEQ ID NO: 335108 - RNA, 19 nt, Artificial Sequence
  Description of Artificial Sequence: Synthetic oligonucleotide
  Antisense Strand to SEQ ID NO: 335107
aauuagguuagucacagcu

SEQ ID NO: 335109 - RNA, 19 nt, Artificial Sequence
  Description of Artificial Sequence: Synthetic oligonucleotide
  Sense Strand Starting at position 207 of SEQ ID NO: 318218
caaagaugugucugaggua

SEQ ID NO: 335110 - RNA, 19 nt, Artificial Sequence
  Description of Artificial Sequence: Synthetic oligonucleotide
  Antisense Strand to SEQ ID NO: 335109
uaccucagacacaucuuug

SEQ ID NO: 335111 - RNA, 19 nt, Artificial Sequence
  Description of Artificial Sequence: Synthetic oligonucleotide
  Sense Strand Starting at position 207 of SEQ ID NO: 318223
augugucugagguaggauu

SEQ ID NO: 335112 - RNA, 19 nt, Artificial Sequence
  Description of Artificial Sequence: Synthetic oligonucleotide
  Antisense Strand to SEQ ID NO: 335111
aauccuaccucagacacau

SEQ ID NO: 335113 - RNA, 19 nt, Artificial Sequence
  Description of Artificial Sequence: Synthetic oligonucleotide
  Sense Strand Starting at position 207 of SEQ ID NO: 318225
gugucugagguaggauuga

SEQ ID NO: 335114 - RNA, 19 nt, Artificial Sequence
  Description of Artificial Sequence: Synthetic oligonucleotide
  Antisense Strand to SEQ ID NO: 335113
ucaauccuaccucagacac

SEQ ID NO: 335115 - RNA, 19 nt, Artificial Sequence
  Description of Artificial Sequence: Synthetic oligonucleotide
  Sense Strand Starting at position 207 of SEQ ID NO: 318390
uagugagaucccggaucua

SEQ ID NO: 335116 - RNA, 19 nt, Artificial Sequence
  Description of Artificial Sequence: Synthetic oligonucleotide
  Antisense Strand to SEQ ID NO: 335115
uagauccgggaucucacua

SEQ ID NO: 335117 - RNA, 19 nt, Artificial Sequence
  Description of Artificial Sequence: Synthetic oligonucleotide
  Sense Strand Starting at position 207 of SEQ ID NO: 318666
agacaaauaugugauugag

SEQ ID NO: 335118 - RNA, 19 nt, Artificial Sequence
  Description of Artificial Sequence: Synthetic oligonucleotide
  Antisense Strand to SEQ ID NO: 335117
cucaaucacauauuugucu

SEQ ID NO: 335119 - RNA, 19 nt, Artificial Sequence
  Description of Artificial Sequence: Synthetic oligonucleotide
  Sense Strand Starting at position 207 of SEQ ID NO: 318668
acaaauaugugauugagca

SEQ ID NO: 335120 - RNA, 19 nt, Artificial Sequence
  Description of Artificial Sequence: Synthetic oligonucleotide
  Antisense Strand to SEQ ID NO: 335119
ugcucaaucacauauuugu

SEQ ID NO: 335121 - RNA, 19 nt, Artificial Sequence
  Description of Artificial Sequence: Synthetic oligonucleotide
  Sense Strand Starting at position 207 of SEQ ID NO: 318669
caaauaugugauugagcau

SEQ ID NO: 335122 - RNA, 19 nt, Artificial Sequence
  Description of Artificial Sequence: Synthetic oligonucleotide
  Antisense Strand to SEQ ID NO: 335121
augcucaaucacauauuug

SEQ ID NO: 335123 - RNA, 19 nt, Artificial Sequence
  Description of Artificial Sequence: Synthetic oligonucleotide
  Sense Strand Starting at position 207 of SEQ ID NO: 318672
auaugugauugagcauuaa

SEQ ID NO: 335124 - RNA, 19 nt, Artificial Sequence
  Description of Artificial Sequence: Synthetic oligonucleotide
  Antisense Strand to SEQ ID NO: 335123
uuaaugcucaaucacauau

SEQ ID NO: 335125 - RNA, 19 nt, Artificial Sequence
  Description of Artificial Sequence: Synthetic oligonucleotide
  Sense Strand Starting at position 207 of SEQ ID NO: 318808
gggucuccugugagugagu

SEQ ID NO: 335126 - RNA, 19 nt, Artificial Sequence
  Description of Artificial Sequence: Synthetic oligonucleotide
  Antisense Strand to SEQ ID NO: 335125
acucacucacaggagaccc

SEQ ID NO: 335127 - RNA, 19 nt, Artificial Sequence
  Description of Artificial Sequence: Synthetic oligonucleotide
  Sense Strand Starting at position 207 of SEQ ID NO: 318973
ucgauacucauggaucagu

SEQ ID NO: 335128 - RNA, 19 nt, Artificial Sequence
  Description of Artificial Sequence: Synthetic oligonucleotide
  Antisense Strand to SEQ ID NO: 335127
acugauccaugaguaucga

SEQ ID NO: 335129 - RNA, 19 nt, Artificial Sequence
  Description of Artificial Sequence: Synthetic oligonucleotide
  Sense Strand Starting at position 207 of SEQ ID NO: 319055
acucuuccucauuaguaga

SEQ ID NO: 335130 - RNA, 19 nt, Artificial Sequence
  Description of Artificial Sequence: Synthetic oligonucleotide
  Antisense Strand to SEQ ID NO: 335129
ucuacuaaugaggaagagu

SEQ ID NO: 335131 - RNA, 19 nt, Artificial Sequence
  Description of Artificial Sequence: Synthetic oligonucleotide
  Sense Strand Starting at position 207 of SEQ ID NO: 319105
ccgcaugucacagagucau

SEQ ID NO: 335132 - RNA, 19 nt, Artificial Sequence
  Description of Artificial Sequence: Synthetic oligonucleotide
  Antisense Strand to SEQ ID NO: 335131
augacucugugacaugcgg

SEQ ID NO: 335133 - RNA, 19 nt, Artificial Sequence
  Description of Artificial Sequence: Synthetic oligonucleotide
  Sense Strand Starting at position 207 of SEQ ID NO: 319113
cacagagucaugugagaug

SEQ ID NO: 335134 - RNA, 19 nt, Artificial Sequence
  Description of Artificial Sequence: Synthetic oligonucleotide
  Antisense Strand to SEQ ID NO: 335133
caucucacaugacucugug

SEQ ID NO: 335135 - RNA, 19 nt, Artificial Sequence
  Description of Artificial Sequence: Synthetic oligonucleotide
  Sense Strand Starting at position 207 of SEQ ID NO: 319118
agucaugugagaugugaaa

SEQ ID NO: 335136 - RNA, 19 nt, Artificial Sequence
  Description of Artificial Sequence: Synthetic oligonucleotide
  Antisense Strand to SEQ ID NO: 335135
uuucacaucucacaugacu

SEQ ID NO: 335137 - RNA, 19 nt, Artificial Sequence
  Description of Artificial Sequence: Synthetic oligonucleotide
  Sense Strand Starting at position 207 of SEQ ID NO: 319120
ucaugugagaugugaaauu

SEQ ID NO: 335138 - RNA, 19 nt, Artificial Sequence
  Description of Artificial Sequence: Synthetic oligonucleotide
  Antisense Strand to SEQ ID NO: 335137
aauuucacaucucacauga

SEQ ID NO: 335139 - RNA, 19 nt, Artificial Sequence
  Description of Artificial Sequence: Synthetic oligonucleotide
  Sense Strand Starting at position 207 of SEQ ID NO: 319130
ugugaaauuucccaaguaa

SEQ ID NO: 335140 - RNA, 19 nt, Artificial Sequence
  Description of Artificial Sequence: Synthetic oligonucleotide
  Antisense Strand to SEQ ID NO: 335139
uuacuugggaaauuucaca

SEQ ID NO: 335141 - RNA, 19 nt, Artificial Sequence
  Description of Artificial Sequence: Synthetic oligonucleotide
  Sense Strand Starting at position 207 of SEQ ID NO: 319152
cacagaaucaugugaggug

SEQ ID NO: 335142 - RNA, 19 nt, Artificial Sequence
  Description of Artificial Sequence: Synthetic oligonucleotide
  Antisense Strand to SEQ ID NO: 335141
caccucacaugauucugug

SEQ ID NO: 335143 - RNA, 19 nt, Artificial Sequence
  Description of Artificial Sequence: Synthetic oligonucleotide
  Sense Strand Starting at position 207 of SEQ ID NO: 319157
aaucaugugaggugugaaa

SEQ ID NO: 335144 - RNA, 19 nt, Artificial Sequence
  Description of Artificial Sequence: Synthetic oligonucleotide
  Antisense Strand to SEQ ID NO: 335143
uuucacaccucacaugauu

SEQ ID NO: 335145 - RNA, 19 nt, Artificial Sequence
  Description of Artificial Sequence: Synthetic oligonucleotide
  Sense Strand Starting at position 207 of SEQ ID NO: 319159
ucaugugaggugugaaauu

SEQ ID NO: 335146 - RNA, 19 nt, Artificial Sequence
  Description of Artificial Sequence: Synthetic oligonucleotide
  Antisense Strand to SEQ ID NO: 335145
aauuucacaccucacauga

SEQ ID NO: 335147 - RNA, 19 nt, Artificial Sequence
  Description of Artificial Sequence: Synthetic oligonucleotide
  Sense Strand Starting at position 207 of SEQ ID NO: 319169
ugugaaauuucccaaagaa

SEQ ID NO: 335148 - RNA, 19 nt, Artificial Sequence
  Description of Artificial Sequence: Synthetic oligonucleotide
  Antisense Strand to SEQ ID NO: 335147
uucuuugggaaauuucaca

SEQ ID NO: 335149 - RNA, 19 nt, Artificial Sequence
  Description of Artificial Sequence: Synthetic oligonucleotide
  Sense Strand Starting at position 207 of SEQ ID NO: 319203
ucaggaucacccuggcuua

SEQ ID NO: 335150 - RNA, 19 nt, Artificial Sequence
  Description of Artificial Sequence: Synthetic oligonucleotide
  Antisense Strand to SEQ ID NO: 335149
uaagccagggugauccuga

SEQ ID NO: 335151 - RNA, 19 nt, Artificial Sequence
  Description of Artificial Sequence: Synthetic oligonucleotide
  Sense Strand Starting at position 208 of SEQ ID NO: 315321
cguggaaauccaggcucua

SEQ ID NO: 335152 - RNA, 19 nt, Artificial Sequence
  Description of Artificial Sequence: Synthetic oligonucleotide
  Antisense Strand to SEQ ID NO: 335151
uagagccuggauuuccacg

SEQ ID NO: 335153 - RNA, 19 nt, Artificial Sequence
  Description of Artificial Sequence: Synthetic oligonucleotide
  Sense Strand Starting at position 208 of SEQ ID NO: 315502
aggaaagccuuacucuuaa

SEQ ID NO: 335154 - RNA, 19 nt, Artificial Sequence
  Description of Artificial Sequence: Synthetic oligonucleotide
  Antisense Strand to SEQ ID NO: 335153
uuaagaguaaggcuuuccu

SEQ ID NO: 335155 - RNA, 19 nt, Artificial Sequence
  Description of Artificial Sequence: Synthetic oligonucleotide
  Sense Strand Starting at position 208 of SEQ ID NO: 315844
uaguauagagccuagguua

SEQ ID NO: 335156 - RNA, 19 nt, Artificial Sequence
  Description of Artificial Sequence: Synthetic oligonucleotide
  Antisense Strand to SEQ ID NO: 335155
uaaccuaggcucuauacua

SEQ ID NO: 335157 - RNA, 19 nt, Artificial Sequence
  Description of Artificial Sequence: Synthetic oligonucleotide
  Sense Strand Starting at position 208 of SEQ ID NO: 315875
auacguguuagguagcuaa

SEQ ID NO: 335158 - RNA, 19 nt, Artificial Sequence
  Description of Artificial Sequence: Synthetic oligonucleotide
  Antisense Strand to SEQ ID NO: 335157
uuagcuaccuaacacguau

SEQ ID NO: 335159 - RNA, 19 nt, Artificial Sequence
  Description of Artificial Sequence: Synthetic oligonucleotide
  Sense Strand Starting at position 208 of SEQ ID NO: 316056
gcaaguuucuauguccaaa

SEQ ID NO: 335160 - RNA, 19 nt, Artificial Sequence
  Description of Artificial Sequence: Synthetic oligonucleotide
  Antisense Strand to SEQ ID NO: 335159
uuuggacauagaaacuugc

SEQ ID NO: 335161 - RNA, 19 nt, Artificial Sequence
  Description of Artificial Sequence: Synthetic oligonucleotide
  Sense Strand Starting at position 208 of SEQ ID NO: 316116
cagccuuuccgccuguuua

SEQ ID NO: 335162 - RNA, 19 nt, Artificial Sequence
  Description of Artificial Sequence: Synthetic oligonucleotide
  Antisense Strand to SEQ ID NO: 335161
uaaacaggcggaaaggcug

SEQ ID NO: 335163 - RNA, 19 nt, Artificial Sequence
  Description of Artificial Sequence: Synthetic oligonucleotide
  Sense Strand Starting at position 208 of SEQ ID NO: 316165
gaaggauaguuacaaagaa

SEQ ID NO: 335164 - RNA, 19 nt, Artificial Sequence
  Description of Artificial Sequence: Synthetic oligonucleotide
  Antisense Strand to SEQ ID NO: 335163
uucuuuguaacuauccuuc

SEQ ID NO: 335165 - RNA, 19 nt, Artificial Sequence
  Description of Artificial Sequence: Synthetic oligonucleotide
  Sense Strand Starting at position 208 of SEQ ID NO: 316251
cagugaaaucauuggcuau

SEQ ID NO: 335166 - RNA, 19 nt, Artificial Sequence
  Description of Artificial Sequence: Synthetic oligonucleotide
  Antisense Strand to SEQ ID NO: 335165
auagccaaugauuucacug

SEQ ID NO: 335167 - RNA, 19 nt, Artificial Sequence
  Description of Artificial Sequence: Synthetic oligonucleotide
  Sense Strand Starting at position 208 of SEQ ID NO: 316252
agugaaaucauuggcuaug

SEQ ID NO: 335168 - RNA, 19 nt, Artificial Sequence
  Description of Artificial Sequence: Synthetic oligonucleotide
  Antisense Strand to SEQ ID NO: 335167
cauagccaaugauuucacu

SEQ ID NO: 335169 - RNA, 19 nt, Artificial Sequence
  Description of Artificial Sequence: Synthetic oligonucleotide
  Sense Strand Starting at position 208 of SEQ ID NO: 316253
gugaaaucauuggcuaugu

SEQ ID NO: 335170 - RNA, 19 nt, Artificial Sequence
  Description of Artificial Sequence: Synthetic oligonucleotide
  Antisense Strand to SEQ ID NO: 335169
acauagccaaugauuucac

SEQ ID NO: 335171 - RNA, 19 nt, Artificial Sequence
  Description of Artificial Sequence: Synthetic oligonucleotide
  Sense Strand Starting at position 208 of SEQ ID NO: 316362
auauaccaaugggauauau

SEQ ID NO: 335172 - RNA, 19 nt, Artificial Sequence
  Description of Artificial Sequence: Synthetic oligonucleotide
  Antisense Strand to SEQ ID NO: 335171
auauaucccauugguauau

SEQ ID NO: 335173 - RNA, 19 nt, Artificial Sequence
  Description of Artificial Sequence: Synthetic oligonucleotide
  Sense Strand Starting at position 208 of SEQ ID NO: 316410
gcugguuccgaauaaacaa

SEQ ID NO: 335174 - RNA, 19 nt, Artificial Sequence
  Description of Artificial Sequence: Synthetic oligonucleotide
  Antisense Strand to SEQ ID NO: 335173
uuguuuauucggaaccagc

SEQ ID NO: 335175 - RNA, 19 nt, Artificial Sequence
  Description of Artificial Sequence: Synthetic oligonucleotide
  Sense Strand Starting at position 208 of SEQ ID NO: 316430
augucuguuucucuagaua

SEQ ID NO: 335176 - RNA, 19 nt, Artificial Sequence
  Description of Artificial Sequence: Synthetic oligonucleotide
  Antisense Strand to SEQ ID NO: 335175
uaucuagagaaacagacau

SEQ ID NO: 335177 - RNA, 19 nt, Artificial Sequence
  Description of Artificial Sequence: Synthetic oligonucleotide
  Sense Strand Starting at position 208 of SEQ ID NO: 316592
aggagcucucccggagaaa

SEQ ID NO: 335178 - RNA, 19 nt, Artificial Sequence
  Description of Artificial Sequence: Synthetic oligonucleotide
  Antisense Strand to SEQ ID NO: 335177
uuucuccgggagagcuccu

SEQ ID NO: 335179 - RNA, 19 nt, Artificial Sequence
  Description of Artificial Sequence: Synthetic oligonucleotide
  Sense Strand Starting at position 208 of SEQ ID NO: 316593
ggagcucucccggagaaag

SEQ ID NO: 335180 - RNA, 19 nt, Artificial Sequence
  Description of Artificial Sequence: Synthetic oligonucleotide
  Antisense Strand to SEQ ID NO: 335179
cuuucuccgggagagcucc

SEQ ID NO: 335181 - RNA, 19 nt, Artificial Sequence
  Description of Artificial Sequence: Synthetic oligonucleotide
  Sense Strand Starting at position 208 of SEQ ID NO: 316896
auccguuucucagcaagag

SEQ ID NO: 335182 - RNA, 19 nt, Artificial Sequence
  Description of Artificial Sequence: Synthetic oligonucleotide
  Antisense Strand to SEQ ID NO: 335181
cucuugcugagaaacggau

SEQ ID NO: 335183 - RNA, 19 nt, Artificial Sequence
  Description of Artificial Sequence: Synthetic oligonucleotide
  Sense Strand Starting at position 208 of SEQ ID NO: 316897
uccguuucucagcaagaga

SEQ ID NO: 335184 - RNA, 19 nt, Artificial Sequence
  Description of Artificial Sequence: Synthetic oligonucleotide
  Antisense Strand to SEQ ID NO: 335183
ucucuugcugagaaacgga

SEQ ID NO: 335185 - RNA, 19 nt, Artificial Sequence
  Description of Artificial Sequence: Synthetic oligonucleotide
  Sense Strand Starting at position 208 of SEQ ID NO: 317354
cugacaaaguguuuggaaa

SEQ ID NO: 335186 - RNA, 19 nt, Artificial Sequence
  Description of Artificial Sequence: Synthetic oligonucleotide
  Antisense Strand to SEQ ID NO: 335185
uuuccaaacacuuugucag

SEQ ID NO: 335187 - RNA, 19 nt, Artificial Sequence
  Description of Artificial Sequence: Synthetic oligonucleotide
  Sense Strand Starting at position 208 of SEQ ID NO: 317403
ugcuaccuggacugagaaa

SEQ ID NO: 335188 - RNA, 19 nt, Artificial Sequence
  Description of Artificial Sequence: Synthetic oligonucleotide
  Antisense Strand to SEQ ID NO: 335187
uuucucaguccagguagca

SEQ ID NO: 335189 - RNA, 19 nt, Artificial Sequence
  Description of Artificial Sequence: Synthetic oligonucleotide
  Sense Strand Starting at position 208 of SEQ ID NO: 317443
ggagaucaguuguugaccu

SEQ ID NO: 335190 - RNA, 19 nt, Artificial Sequence
  Description of Artificial Sequence: Synthetic oligonucleotide
  Antisense Strand to SEQ ID NO: 335189
aggucaacaacugaucucc

SEQ ID NO: 335191 - RNA, 19 nt, Artificial Sequence
  Description of Artificial Sequence: Synthetic oligonucleotide
  Sense Strand Starting at position 208 of SEQ ID NO: 317447
aucaguuguugaccuguua

SEQ ID NO: 335192 - RNA, 19 nt, Artificial Sequence
  Description of Artificial Sequence: Synthetic oligonucleotide
  Antisense Strand to SEQ ID NO: 335191
uaacaggucaacaacugau

SEQ ID NO: 335193 - RNA, 19 nt, Artificial Sequence
  Description of Artificial Sequence: Synthetic oligonucleotide
  Sense Strand Starting at position 208 of SEQ ID NO: 317460
cuguuagcucuugauguag

SEQ ID NO: 335194 - RNA, 19 nt, Artificial Sequence
  Description of Artificial Sequence: Synthetic oligonucleotide
  Antisense Strand to SEQ ID NO: 335193
cuacaucaagagcuaacag

SEQ ID NO: 335195 - RNA, 19 nt, Artificial Sequence
  Description of Artificial Sequence: Synthetic oligonucleotide
  Sense Strand Starting at position 208 of SEQ ID NO: 317579
uuaagcaauuccguaauga

SEQ ID NO: 335196 - RNA, 19 nt, Artificial Sequence
  Description of Artificial Sequence: Synthetic oligonucleotide
  Antisense Strand to SEQ ID NO: 335195
ucauuacggaauugcuuaa

SEQ ID NO: 335197 - RNA, 19 nt, Artificial Sequence
  Description of Artificial Sequence: Synthetic oligonucleotide
  Sense Strand Starting at position 208 of SEQ ID NO: 317607
ucaugaugugaucaauucu

SEQ ID NO: 335198 - RNA, 19 nt, Artificial Sequence
  Description of Artificial Sequence: Synthetic oligonucleotide
  Antisense Strand to SEQ ID NO: 335197
agaauugaucacaucauga

SEQ ID NO: 335199 - RNA, 19 nt, Artificial Sequence
  Description of Artificial Sequence: Synthetic oligonucleotide
  Sense Strand Starting at position 208 of SEQ ID NO: 317614
gugaucaauucuuugguga

SEQ ID NO: 335200 - RNA, 19 nt, Artificial Sequence
  Description of Artificial Sequence: Synthetic oligonucleotide
  Antisense Strand to SEQ ID NO: 335199
ucaccaaagaauugaucac

SEQ ID NO: 335201 - RNA, 19 nt, Artificial Sequence
  Description of Artificial Sequence: Synthetic oligonucleotide
  Sense Strand Starting at position 208 of SEQ ID NO: 317615
ugaucaauucuuuggugaa

SEQ ID NO: 335202 - RNA, 19 nt, Artificial Sequence
  Description of Artificial Sequence: Synthetic oligonucleotide
  Antisense Strand to SEQ ID NO: 335201
uucaccaaagaauugauca

SEQ ID NO: 335203 - RNA, 19 nt, Artificial Sequence
  Description of Artificial Sequence: Synthetic oligonucleotide
  Sense Strand Starting at position 208 of SEQ ID NO: 317628
ggugaagaguuuccuucca

SEQ ID NO: 335204 - RNA, 19 nt, Artificial Sequence
  Description of Artificial Sequence: Synthetic oligonucleotide
  Antisense Strand to SEQ ID NO: 335203
uggaaggaaacucuucacc

SEQ ID NO: 335205 - RNA, 19 nt, Artificial Sequence
  Description of Artificial Sequence: Synthetic oligonucleotide
  Sense Strand Starting at position 208 of SEQ ID NO: 317630
ugaagaguuuccuuccacu

SEQ ID NO: 335206 - RNA, 19 nt, Artificial Sequence
  Description of Artificial Sequence: Synthetic oligonucleotide
  Antisense Strand to SEQ ID NO: 335205
aguggaaggaaacucuuca

SEQ ID NO: 335207 - RNA, 19 nt, Artificial Sequence
  Description of Artificial Sequence: Synthetic oligonucleotide
  Sense Strand Starting at position 208 of SEQ ID NO: 318096
cuucuuguuccagaguucu

SEQ ID NO: 335208 - RNA, 19 nt, Artificial Sequence
  Description of Artificial Sequence: Synthetic oligonucleotide
  Antisense Strand to SEQ ID NO: 335207
agaacucuggaacaagaag

SEQ ID NO: 335209 - RNA, 19 nt, Artificial Sequence
  Description of Artificial Sequence: Synthetic oligonucleotide
  Sense Strand Starting at position 208 of SEQ ID NO: 318106
cagaguucuuggcucuuaa

SEQ ID NO: 335210 - RNA, 19 nt, Artificial Sequence
  Description of Artificial Sequence: Synthetic oligonucleotide
  Antisense Strand to SEQ ID NO: 335209
uuaagagccaagaacucug

SEQ ID NO: 335211 - RNA, 19 nt, Artificial Sequence
  Description of Artificial Sequence: Synthetic oligonucleotide
  Sense Strand Starting at position 208 of SEQ ID NO: 318347
aguagcuagaaugauaguu

SEQ ID NO: 335212 - RNA, 19 nt, Artificial Sequence
  Description of Artificial Sequence: Synthetic oligonucleotide
  Antisense Strand to SEQ ID NO: 335211
aacuaucauucuagcuacu

SEQ ID NO: 335213 - RNA, 19 nt, Artificial Sequence
  Description of Artificial Sequence: Synthetic oligonucleotide
  Sense Strand Starting at position 208 of SEQ ID NO: 318352
cuagaaugauaguugugca

SEQ ID NO: 335214 - RNA, 19 nt, Artificial Sequence
  Description of Artificial Sequence: Synthetic oligonucleotide
  Antisense Strand to SEQ ID NO: 335213
ugcacaacuaucauucuag

SEQ ID NO: 335215 - RNA, 19 nt, Artificial Sequence
  Description of Artificial Sequence: Synthetic oligonucleotide
  Sense Strand Starting at position 208 of SEQ ID NO: 318866
agacuaggcucaccugauu

SEQ ID NO: 335216 - RNA, 19 nt, Artificial Sequence
  Description of Artificial Sequence: Synthetic oligonucleotide
  Antisense Strand to SEQ ID NO: 335215
aaucaggugagccuagucu

SEQ ID NO: 335217 - RNA, 19 nt, Artificial Sequence
  Description of Artificial Sequence: Synthetic oligonucleotide
  Sense Strand Starting at position 208 of SEQ ID NO: 318971
auguuauugccuguagugu

SEQ ID NO: 335218 - RNA, 19 nt, Artificial Sequence
  Description of Artificial Sequence: Synthetic oligonucleotide
  Antisense Strand to SEQ ID NO: 335217
acacuacaggcaauaacau

SEQ ID NO: 335219 - RNA, 19 nt, Artificial Sequence
  Description of Artificial Sequence: Synthetic oligonucleotide
  Sense Strand Starting at position 208 of SEQ ID NO: 318979
gccuguaguguggcuuauu

SEQ ID NO: 335220 - RNA, 19 nt, Artificial Sequence
  Description of Artificial Sequence: Synthetic oligonucleotide
  Antisense Strand to SEQ ID NO: 335219
aauaagccacacuacaggc

SEQ ID NO: 335221 - RNA, 19 nt, Artificial Sequence
  Description of Artificial Sequence: Synthetic oligonucleotide
  Sense Strand Starting at position 208 of SEQ ID NO: 319013
auaguauccuauucuguaa

SEQ ID NO: 335222 - RNA, 19 nt, Artificial Sequence
  Description of Artificial Sequence: Synthetic oligonucleotide
  Antisense Strand to SEQ ID NO: 335221
uuacagaauaggauacuau

SEQ ID NO: 335223 - RNA, 19 nt, Artificial Sequence
  Description of Artificial Sequence: Synthetic oligonucleotide
  Sense Strand Starting at position 208 of SEQ ID NO: 319016
guauccuauucuguaaaua

SEQ ID NO: 335224 - RNA, 19 nt, Artificial Sequence
  Description of Artificial Sequence: Synthetic oligonucleotide
  Antisense Strand to SEQ ID NO: 335223
uauuuacagaauaggauac

SEQ ID NO: 335225 - RNA, 19 nt, Artificial Sequence
  Description of Artificial Sequence: Synthetic oligonucleotide
  Sense Strand Starting at position 208 of SEQ ID NO: 319027
uguaaauacugucuauuac

SEQ ID NO: 335226 - RNA, 19 nt, Artificial Sequence
  Description of Artificial Sequence: Synthetic oligonucleotide
  Antisense Strand to SEQ ID NO: 335225
guaauagacaguauuuaca

SEQ ID NO: 335227 - RNA, 19 nt, Artificial Sequence
  Description of Artificial Sequence: Synthetic oligonucleotide
  Sense Strand Starting at position 208 of SEQ ID NO: 319028
guaaauacugucuauuaca

SEQ ID NO: 335228 - RNA, 19 nt, Artificial Sequence
  Description of Artificial Sequence: Synthetic oligonucleotide
  Antisense Strand to SEQ ID NO: 335227
uguaauagacaguauuuac

SEQ ID NO: 335229 - RNA, 19 nt, Artificial Sequence
  Description of Artificial Sequence: Synthetic oligonucleotide
  Sense Strand Starting at position 208 of SEQ ID NO: 319151
gcauauguacaucauucua

SEQ ID NO: 335230 - RNA, 19 nt, Artificial Sequence
  Description of Artificial Sequence: Synthetic oligonucleotide
  Antisense Strand to SEQ ID NO: 335229
uagaaugauguacauaugc

SEQ ID NO: 335231 - RNA, 19 nt, Artificial Sequence
  Description of Artificial Sequence: Synthetic oligonucleotide
  Sense Strand Starting at position 209 of SEQ ID NO: 315309
agugcaauuugacauaaac

SEQ ID NO: 335232 - RNA, 19 nt, Artificial Sequence
  Description of Artificial Sequence: Synthetic oligonucleotide
  Antisense Strand to SEQ ID NO: 335231
guuuaugucaaauugcacu

SEQ ID NO: 335233 - RNA, 19 nt, Artificial Sequence
  Description of Artificial Sequence: Synthetic oligonucleotide
  Sense Strand Starting at position 209 of SEQ ID NO: 315565
cuuacugauguauaucauu

SEQ ID NO: 335234 - RNA, 19 nt, Artificial Sequence
  Description of Artificial Sequence: Synthetic oligonucleotide
  Antisense Strand to SEQ ID NO: 335233
aaugauauacaucaguaag

SEQ ID NO: 335235 - RNA, 19 nt, Artificial Sequence
  Description of Artificial Sequence: Synthetic oligonucleotide
  Sense Strand Starting at position 209 of SEQ ID NO: 315570
ugauguauaucauuacuga

SEQ ID NO: 335236 - RNA, 19 nt, Artificial Sequence
  Description of Artificial Sequence: Synthetic oligonucleotide
  Antisense Strand to SEQ ID NO: 335235
ucaguaaugauauacauca

SEQ ID NO: 335237 - RNA, 19 nt, Artificial Sequence
  Description of Artificial Sequence: Synthetic oligonucleotide
  Sense Strand Starting at position 209 of SEQ ID NO: 315578
aucauuacugauugugauu

SEQ ID NO: 335238 - RNA, 19 nt, Artificial Sequence
  Description of Artificial Sequence: Synthetic oligonucleotide
  Antisense Strand to SEQ ID NO: 335237
aaucacaaucaguaaugau

SEQ ID NO: 335239 - RNA, 19 nt, Artificial Sequence
  Description of Artificial Sequence: Synthetic oligonucleotide
  Sense Strand Starting at position 209 of SEQ ID NO: 315591
gugauucuggcacauacua

SEQ ID NO: 335240 - RNA, 19 nt, Artificial Sequence
  Description of Artificial Sequence: Synthetic oligonucleotide
  Antisense Strand to SEQ ID NO: 335239
uaguaugugccagaaucac

SEQ ID NO: 335241 - RNA, 19 nt, Artificial Sequence
  Description of Artificial Sequence: Synthetic oligonucleotide
  Sense Strand Starting at position 209 of SEQ ID NO: 315599
ggcacauacuagucauauc

SEQ ID NO: 335242 - RNA, 19 nt, Artificial Sequence
  Description of Artificial Sequence: Synthetic oligonucleotide
  Antisense Strand to SEQ ID NO: 335241
gauaugacuaguaugugcc

SEQ ID NO: 335243 - RNA, 19 nt, Artificial Sequence
  Description of Artificial Sequence: Synthetic oligonucleotide
  Sense Strand Starting at position 209 of SEQ ID NO: 315756
ggugcagucaaagagugua

SEQ ID NO: 335244 - RNA, 19 nt, Artificial Sequence
  Description of Artificial Sequence: Synthetic oligonucleotide
  Antisense Strand to SEQ ID NO: 335243
uacacucuuugacugcacc

SEQ ID NO: 335245 - RNA, 19 nt, Artificial Sequence
  Description of Artificial Sequence: Synthetic oligonucleotide
  Sense Strand Starting at position 209 of SEQ ID NO: 315761
agucaaagaguguaguuau

SEQ ID NO: 335246 - RNA, 19 nt, Artificial Sequence
  Description of Artificial Sequence: Synthetic oligonucleotide
  Antisense Strand to SEQ ID NO: 335245
auaacuacacucuuugacu

SEQ ID NO: 335247 - RNA, 19 nt, Artificial Sequence
  Description of Artificial Sequence: Synthetic oligonucleotide
  Sense Strand Starting at position 209 of SEQ ID NO: 315797
guaagauuaacauguggaa

SEQ ID NO: 335248 - RNA, 19 nt, Artificial Sequence
  Description of Artificial Sequence: Synthetic oligonucleotide
  Antisense Strand to SEQ ID NO: 335247
uuccacauguuaaucuuac

SEQ ID NO: 335249 - RNA, 19 nt, Artificial Sequence
  Description of Artificial Sequence: Synthetic oligonucleotide
  Sense Strand Starting at position 209 of SEQ ID NO: 316068
ugaagagucuguucucuaa

SEQ ID NO: 335250 - RNA, 19 nt, Artificial Sequence
  Description of Artificial Sequence: Synthetic oligonucleotide
  Antisense Strand to SEQ ID NO: 335249
uuagagaacagacucuuca

SEQ ID NO: 335251 - RNA, 19 nt, Artificial Sequence
  Description of Artificial Sequence: Synthetic oligonucleotide
  Sense Strand Starting at position 209 of SEQ ID NO: 316184
ugccuaaucaucgaaagug

SEQ ID NO: 335252 - RNA, 19 nt, Artificial Sequence
  Description of Artificial Sequence: Synthetic oligonucleotide
  Antisense Strand to SEQ ID NO: 335251
cacuuucgaugauuaggca

SEQ ID NO: 335253 - RNA, 19 nt, Artificial Sequence
  Description of Artificial Sequence: Synthetic oligonucleotide
  Sense Strand Starting at position 209 of SEQ ID NO: 316243
uguggaccuaaaugaguua

SEQ ID NO: 335254 - RNA, 19 nt, Artificial Sequence
  Description of Artificial Sequence: Synthetic oligonucleotide
  Antisense Strand to SEQ ID NO: 335253
uaacucauuuagguccaca

SEQ ID NO: 335255 - RNA, 19 nt, Artificial Sequence
  Description of Artificial Sequence: Synthetic oligonucleotide
  Sense Strand Starting at position 209 of SEQ ID NO: 316248
accuaaaugaguuagcguu

SEQ ID NO: 335256 - RNA, 19 nt, Artificial Sequence
  Description of Artificial Sequence: Synthetic oligonucleotide
  Antisense Strand to SEQ ID NO: 335255
aacgcuaacucauuuaggu

SEQ ID NO: 335257 - RNA, 19 nt, Artificial Sequence
  Description of Artificial Sequence: Synthetic oligonucleotide
  Sense Strand Starting at position 209 of SEQ ID NO: 316496
gcuugagaccuggaguuac

SEQ ID NO: 335258 - RNA, 19 nt, Artificial Sequence
  Description of Artificial Sequence: Synthetic oligonucleotide
  Antisense Strand to SEQ ID NO: 335257
guaacuccaggucucaagc

SEQ ID NO: 335259 - RNA, 19 nt, Artificial Sequence
  Description of Artificial Sequence: Synthetic oligonucleotide
  Sense Strand Starting at position 209 of SEQ ID NO: 316636
gcugcuaguauguauuuga

SEQ ID NO: 335260 - RNA, 19 nt, Artificial Sequence
  Description of Artificial Sequence: Synthetic oligonucleotide
  Antisense Strand to SEQ ID NO: 335259
ucaaauacauacuagcagc

SEQ ID NO: 335261 - RNA, 19 nt, Artificial Sequence
  Description of Artificial Sequence: Synthetic oligonucleotide
  Sense Strand Starting at position 209 of SEQ ID NO: 316715
uagagaucuguauauugua

SEQ ID NO: 335262 - RNA, 19 nt, Artificial Sequence
  Description of Artificial Sequence: Synthetic oligonucleotide
  Antisense Strand to SEQ ID NO: 335261
uacaauauacagaucucua

SEQ ID NO: 335263 - RNA, 19 nt, Artificial Sequence
  Description of Artificial Sequence: Synthetic oligonucleotide
  Sense Strand Starting at position 209 of SEQ ID NO: 316725
uauauuguaguaggauaca

SEQ ID NO: 335264 - RNA, 19 nt, Artificial Sequence
  Description of Artificial Sequence: Synthetic oligonucleotide
  Antisense Strand to SEQ ID NO: 335263
uguauccuacuacaauaua

SEQ ID NO: 335265 - RNA, 19 nt, Artificial Sequence
  Description of Artificial Sequence: Synthetic oligonucleotide
  Sense Strand Starting at position 209 of SEQ ID NO: 316783
guaaacuagauaugggagu

SEQ ID NO: 335266 - RNA, 19 nt, Artificial Sequence
  Description of Artificial Sequence: Synthetic oligonucleotide
  Antisense Strand to SEQ ID NO: 335265
acucccauaucuaguuuac

SEQ ID NO: 335267 - RNA, 19 nt, Artificial Sequence
  Description of Artificial Sequence: Synthetic oligonucleotide
  Sense Strand Starting at position 209 of SEQ ID NO: 317245
guaugaagcccugaagcaa

SEQ ID NO: 335268 - RNA, 19 nt, Artificial Sequence
  Description of Artificial Sequence: Synthetic oligonucleotide
  Antisense Strand to SEQ ID NO: 335267
uugcuucagggcuucauac

SEQ ID NO: 335269 - RNA, 19 nt, Artificial Sequence
  Description of Artificial Sequence: Synthetic oligonucleotide
  Sense Strand Starting at position 209 of SEQ ID NO: 317272
gaagcagauugauugaauu

SEQ ID NO: 335270 - RNA, 19 nt, Artificial Sequence
  Description of Artificial Sequence: Synthetic oligonucleotide
  Antisense Strand to SEQ ID NO: 335269
aauucaaucaaucugcuuc

SEQ ID NO: 335271 - RNA, 19 nt, Artificial Sequence
  Description of Artificial Sequence: Synthetic oligonucleotide
  Sense Strand Starting at position 209 of SEQ ID NO: 317353
cauugaacguguccaagau

SEQ ID NO: 335272 - RNA, 19 nt, Artificial Sequence
  Description of Artificial Sequence: Synthetic oligonucleotide
  Antisense Strand to SEQ ID NO: 335271
aucuuggacacguucaaug

SEQ ID NO: 335273 - RNA, 19 nt, Artificial Sequence
  Description of Artificial Sequence: Synthetic oligonucleotide
  Sense Strand Starting at position 209 of SEQ ID NO: 317354
auugaacguguccaagaua

SEQ ID NO: 335274 - RNA, 19 nt, Artificial Sequence
  Description of Artificial Sequence: Synthetic oligonucleotide
  Antisense Strand to SEQ ID NO: 335273
uaucuuggacacguucaau

SEQ ID NO: 335275 - RNA, 19 nt, Artificial Sequence
  Description of Artificial Sequence: Synthetic oligonucleotide
  Sense Strand Starting at position 209 of SEQ ID NO: 317357
gaacguguccaagauaaac

SEQ ID NO: 335276 - RNA, 19 nt, Artificial Sequence
  Description of Artificial Sequence: Synthetic oligonucleotide
  Antisense Strand to SEQ ID NO: 335275
guuuaucuuggacacguuc

SEQ ID NO: 335277 - RNA, 19 nt, Artificial Sequence
  Description of Artificial Sequence: Synthetic oligonucleotide
  Sense Strand Starting at position 209 of SEQ ID NO: 317467
aggcuuucuccagguugaa

SEQ ID NO: 335278 - RNA, 19 nt, Artificial Sequence
  Description of Artificial Sequence: Synthetic oligonucleotide
  Antisense Strand to SEQ ID NO: 335277
uucaaccuggagaaagccu

SEQ ID NO: 335279 - RNA, 19 nt, Artificial Sequence
  Description of Artificial Sequence: Synthetic oligonucleotide
  Sense Strand Starting at position 209 of SEQ ID NO: 317495
ggccuuaguauuugagucu

SEQ ID NO: 335280 - RNA, 19 nt, Artificial Sequence
  Description of Artificial Sequence: Synthetic oligonucleotide
  Antisense Strand to SEQ ID NO: 335279
agacucaaauacuaaggcc

SEQ ID NO: 335281 - RNA, 19 nt, Artificial Sequence
  Description of Artificial Sequence: Synthetic oligonucleotide
  Sense Strand Starting at position 209 of SEQ ID NO: 317555
cugucuauaaugggaguca

SEQ ID NO: 335282 - RNA, 19 nt, Artificial Sequence
  Description of Artificial Sequence: Synthetic oligonucleotide
  Antisense Strand to SEQ ID NO: 335281
ugacucccauuauagacag

SEQ ID NO: 335283 - RNA, 19 nt, Artificial Sequence
  Description of Artificial Sequence: Synthetic oligonucleotide
  Sense Strand Starting at position 209 of SEQ ID NO: 317582
cccuguaaacaucauaugu

SEQ ID NO: 335284 - RNA, 19 nt, Artificial Sequence
  Description of Artificial Sequence: Synthetic oligonucleotide
  Antisense Strand to SEQ ID NO: 335283
acauaugauguuuacaggg

SEQ ID NO: 335285 - RNA, 19 nt, Artificial Sequence
  Description of Artificial Sequence: Synthetic oligonucleotide
  Sense Strand Starting at position 209 of SEQ ID NO: 317590
acaucauauguguauuagu

SEQ ID NO: 335286 - RNA, 19 nt, Artificial Sequence
  Description of Artificial Sequence: Synthetic oligonucleotide
  Antisense Strand to SEQ ID NO: 335285
acuaauacacauaugaugu

SEQ ID NO: 335287 - RNA, 19 nt, Artificial Sequence
  Description of Artificial Sequence: Synthetic oligonucleotide
  Sense Strand Starting at position 209 of SEQ ID NO: 318013
cgguaauucggacauaggu

SEQ ID NO: 335288 - RNA, 19 nt, Artificial Sequence
  Description of Artificial Sequence: Synthetic oligonucleotide
  Antisense Strand to SEQ ID NO: 335287
accuauguccgaauuaccg

SEQ ID NO: 335289 - RNA, 19 nt, Artificial Sequence
  Description of Artificial Sequence: Synthetic oligonucleotide
  Sense Strand Starting at position 209 of SEQ ID NO: 318015
guaauucggacauagguau

SEQ ID NO: 335290 - RNA, 19 nt, Artificial Sequence
  Description of Artificial Sequence: Synthetic oligonucleotide
  Antisense Strand to SEQ ID NO: 335289
auaccuauguccgaauuac

SEQ ID NO: 335291 - RNA, 19 nt, Artificial Sequence
  Description of Artificial Sequence: Synthetic oligonucleotide
  Sense Strand Starting at position 209 of SEQ ID NO: 318022
ggacauagguaucuaccuu

SEQ ID NO: 335292 - RNA, 19 nt, Artificial Sequence
  Description of Artificial Sequence: Synthetic oligonucleotide
  Antisense Strand to SEQ ID NO: 335291
aagguagauaccuaugucc

SEQ ID NO: 335293 - RNA, 19 nt, Artificial Sequence
  Description of Artificial Sequence: Synthetic oligonucleotide
  Sense Strand Starting at position 209 of SEQ ID NO: 318051
agggcauucuguuuaucag

SEQ ID NO: 335294 - RNA, 19 nt, Artificial Sequence
  Description of Artificial Sequence: Synthetic oligonucleotide
  Antisense Strand to SEQ ID NO: 335293
cugauaaacagaaugcccu

SEQ ID NO: 335295 - RNA, 19 nt, Artificial Sequence
  Description of Artificial Sequence: Synthetic oligonucleotide
  Sense Strand Starting at position 209 of SEQ ID NO: 318052
gggcauucuguuuaucaga

SEQ ID NO: 335296 - RNA, 19 nt, Artificial Sequence
  Description of Artificial Sequence: Synthetic oligonucleotide
  Antisense Strand to SEQ ID NO: 335295
ucugauaaacagaaugccc

SEQ ID NO: 335297 - RNA, 19 nt, Artificial Sequence
  Description of Artificial Sequence: Synthetic oligonucleotide
  Sense Strand Starting at position 209 of SEQ ID NO: 318265
uuaaguuaugucugagaga

SEQ ID NO: 335298 - RNA, 19 nt, Artificial Sequence
  Description of Artificial Sequence: Synthetic oligonucleotide
  Antisense Strand to SEQ ID NO: 335297
ucucucagacauaacuuaa

SEQ ID NO: 335299 - RNA, 19 nt, Artificial Sequence
  Description of Artificial Sequence: Synthetic oligonucleotide
  Sense Strand Starting at position 209 of SEQ ID NO: 318290
aaucuucuaugugcugaga

SEQ ID NO: 335300 - RNA, 19 nt, Artificial Sequence
  Description of Artificial Sequence: Synthetic oligonucleotide
  Antisense Strand to SEQ ID NO: 335299
ucucagcacauagaagauu

SEQ ID NO: 335301 - RNA, 19 nt, Artificial Sequence
  Description of Artificial Sequence: Synthetic oligonucleotide
  Sense Strand Starting at position 209 of SEQ ID NO: 318529
aaggguaugagcugugaca

SEQ ID NO: 335302 - RNA, 19 nt, Artificial Sequence
  Description of Artificial Sequence: Synthetic oligonucleotide
  Antisense Strand to SEQ ID NO: 335301
ugucacagcucauacccuu

SEQ ID NO: 335303 - RNA, 19 nt, Artificial Sequence
  Description of Artificial Sequence: Synthetic oligonucleotide
  Sense Strand Starting at position 209 of SEQ ID NO: 318531
ggguaugagcugugacaau

SEQ ID NO: 335304 - RNA, 19 nt, Artificial Sequence
  Description of Artificial Sequence: Synthetic oligonucleotide
  Antisense Strand to SEQ ID NO: 335303
auugucacagcucauaccc

SEQ ID NO: 335305 - RNA, 19 nt, Artificial Sequence
  Description of Artificial Sequence: Synthetic oligonucleotide
  Sense Strand Starting at position 209 of SEQ ID NO: 318993
uuacuaguccagugauacu

SEQ ID NO: 335306 - RNA, 19 nt, Artificial Sequence
  Description of Artificial Sequence: Synthetic oligonucleotide
  Antisense Strand to SEQ ID NO: 335305
aguaucacuggacuaguaa

SEQ ID NO: 335307 - RNA, 19 nt, Artificial Sequence
  Description of Artificial Sequence: Synthetic oligonucleotide
  Sense Strand Starting at position 209 of SEQ ID NO: 319010
cugggaaaguuucuuacuc

SEQ ID NO: 335308 - RNA, 19 nt, Artificial Sequence
  Description of Artificial Sequence: Synthetic oligonucleotide
  Antisense Strand to SEQ ID NO: 335307
gaguaagaaacuuucccag

SEQ ID NO: 335309 - RNA, 19 nt, Artificial Sequence
  Description of Artificial Sequence: Synthetic oligonucleotide
  Sense Strand Starting at position 209 of SEQ ID NO: 319011
ugggaaaguuucuuacuca

SEQ ID NO: 335310 - RNA, 19 nt, Artificial Sequence
  Description of Artificial Sequence: Synthetic oligonucleotide
  Antisense Strand to SEQ ID NO: 335309
ugaguaagaaacuuuccca

SEQ ID NO: 335311 - RNA, 19 nt, Artificial Sequence
  Description of Artificial Sequence: Synthetic oligonucleotide
  Sense Strand Starting at position 210 of SEQ ID NO: 315346
uuucuaauccuguggaaag

SEQ ID NO: 335312 - RNA, 19 nt, Artificial Sequence
  Description of Artificial Sequence: Synthetic oligonucleotide
  Antisense Strand to SEQ ID NO: 335311
cuuuccacaggauuagaaa

SEQ ID NO: 335313 - RNA, 19 nt, Artificial Sequence
  Description of Artificial Sequence: Synthetic oligonucleotide
  Sense Strand Starting at position 210 of SEQ ID NO: 315375
uuaauaauaguuggagacu

SEQ ID NO: 335314 - RNA, 19 nt, Artificial Sequence
  Description of Artificial Sequence: Synthetic oligonucleotide
  Antisense Strand to SEQ ID NO: 335313
agucuccaacuauuauuaa

SEQ ID NO: 335315 - RNA, 19 nt, Artificial Sequence
  Description of Artificial Sequence: Synthetic oligonucleotide
  Sense Strand Starting at position 210 of SEQ ID NO: 316415
agaguacuagcuggauuaa

SEQ ID NO: 335316 - RNA, 19 nt, Artificial Sequence
  Description of Artificial Sequence: Synthetic oligonucleotide
  Antisense Strand to SEQ ID NO: 335315
uuaauccagcuaguacucu

SEQ ID NO: 335317 - RNA, 19 nt, Artificial Sequence
  Description of Artificial Sequence: Synthetic oligonucleotide
  Sense Strand Starting at position 210 of SEQ ID NO: 316416
gaguacuagcuggauuaac

SEQ ID NO: 335318 - RNA, 19 nt, Artificial Sequence
  Description of Artificial Sequence: Synthetic oligonucleotide
  Antisense Strand to SEQ ID NO: 335317
guuaauccagcuaguacuc

SEQ ID NO: 335319 - RNA, 19 nt, Artificial Sequence
  Description of Artificial Sequence: Synthetic oligonucleotide
  Sense Strand Starting at position 210 of SEQ ID NO: 316517
aauguccucggagacuauu

SEQ ID NO: 335320 - RNA, 19 nt, Artificial Sequence
  Description of Artificial Sequence: Synthetic oligonucleotide
  Antisense Strand to SEQ ID NO: 335319
aauagucuccgaggacauu

SEQ ID NO: 335321 - RNA, 19 nt, Artificial Sequence
  Description of Artificial Sequence: Synthetic oligonucleotide
  Sense Strand Starting at position 210 of SEQ ID NO: 316520
guccucggagacuauuaua

SEQ ID NO: 335322 - RNA, 19 nt, Artificial Sequence
  Description of Artificial Sequence: Synthetic oligonucleotide
  Antisense Strand to SEQ ID NO: 335321
uauaauagucuccgaggac

SEQ ID NO: 335323 - RNA, 19 nt, Artificial Sequence
  Description of Artificial Sequence: Synthetic oligonucleotide
  Sense Strand Starting at position 210 of SEQ ID NO: 316786
ucaguacaccacugggaua

SEQ ID NO: 335324 - RNA, 19 nt, Artificial Sequence
  Description of Artificial Sequence: Synthetic oligonucleotide
  Antisense Strand to SEQ ID NO: 335323
uaucccagugguguacuga

SEQ ID NO: 335325 - RNA, 19 nt, Artificial Sequence
  Description of Artificial Sequence: Synthetic oligonucleotide
  Sense Strand Starting at position 210 of SEQ ID NO: 316951
guaucagacuuaccagaca

SEQ ID NO: 335326 - RNA, 19 nt, Artificial Sequence
  Description of Artificial Sequence: Synthetic oligonucleotide
  Antisense Strand to SEQ ID NO: 335325
ugucugguaagucugauac

SEQ ID NO: 335327 - RNA, 19 nt, Artificial Sequence
  Description of Artificial Sequence: Synthetic oligonucleotide
  Sense Strand Starting at position 210 of SEQ ID NO: 317002
gcugacaucuucccuaaag

SEQ ID NO: 335328 - RNA, 19 nt, Artificial Sequence
  Description of Artificial Sequence: Synthetic oligonucleotide
  Antisense Strand to SEQ ID NO: 335327
cuuuagggaagaugucagc

SEQ ID NO: 335329 - RNA, 19 nt, Artificial Sequence
  Description of Artificial Sequence: Synthetic oligonucleotide
  Sense Strand Starting at position 210 of SEQ ID NO: 317070
aucaacagacuuggugaau

SEQ ID NO: 335330 - RNA, 19 nt, Artificial Sequence
  Description of Artificial Sequence: Synthetic oligonucleotide
  Antisense Strand to SEQ ID NO: 335329
auucaccaagucuguugau

SEQ ID NO: 335331 - RNA, 19 nt, Artificial Sequence
  Description of Artificial Sequence: Synthetic oligonucleotide
  Sense Strand Starting at position 210 of SEQ ID NO: 317214
ugggaaaugucagugaguu

SEQ ID NO: 335332 - RNA, 19 nt, Artificial Sequence
  Description of Artificial Sequence: Synthetic oligonucleotide
  Antisense Strand to SEQ ID NO: 335331
aacucacugacauuuccca

SEQ ID NO: 335333 - RNA, 19 nt, Artificial Sequence
  Description of Artificial Sequence: Synthetic oligonucleotide
  Sense Strand Starting at position 210 of SEQ ID NO: 317370
aacaaaucuugaguguaug

SEQ ID NO: 335334 - RNA, 19 nt, Artificial Sequence
  Description of Artificial Sequence: Synthetic oligonucleotide
  Antisense Strand to SEQ ID NO: 335333
cauacacucaagauuuguu

SEQ ID NO: 335335 - RNA, 19 nt, Artificial Sequence
  Description of Artificial Sequence: Synthetic oligonucleotide
  Sense Strand Starting at position 210 of SEQ ID NO: 317373
aaaucuugaguguaugguu

SEQ ID NO: 335336 - RNA, 19 nt, Artificial Sequence
  Description of Artificial Sequence: Synthetic oligonucleotide
  Antisense Strand to SEQ ID NO: 335335
aaccauacacucaagauuu

SEQ ID NO: 335337 - RNA, 19 nt, Artificial Sequence
  Description of Artificial Sequence: Synthetic oligonucleotide
  Sense Strand Starting at position 210 of SEQ ID NO: 317380
gaguguaugguuugaugaa

SEQ ID NO: 335338 - RNA, 19 nt, Artificial Sequence
  Description of Artificial Sequence: Synthetic oligonucleotide
  Antisense Strand to SEQ ID NO: 335337
uucaucaaaccauacacuc

SEQ ID NO: 335339 - RNA, 19 nt, Artificial Sequence
  Description of Artificial Sequence: Synthetic oligonucleotide
  Sense Strand Starting at position 210 of SEQ ID NO: 317509
ucaucuccuccagagaagu

SEQ ID NO: 335340 - RNA, 19 nt, Artificial Sequence
  Description of Artificial Sequence: Synthetic oligonucleotide
  Antisense Strand to SEQ ID NO: 335339
acuucucuggaggagauga

SEQ ID NO: 335341 - RNA, 19 nt, Artificial Sequence
  Description of Artificial Sequence: Synthetic oligonucleotide
  Sense Strand Starting at position 210 of SEQ ID NO: 317592
gcaugaaauucuuugcaaa

SEQ ID NO: 335342 - RNA, 19 nt, Artificial Sequence
  Description of Artificial Sequence: Synthetic oligonucleotide
  Antisense Strand to SEQ ID NO: 335341
uuugcaaagaauuucaugc

SEQ ID NO: 335343 - RNA, 19 nt, Artificial Sequence
  Description of Artificial Sequence: Synthetic oligonucleotide
  Sense Strand Starting at position 210 of SEQ ID NO: 317789
ggaauuaaauuguuggguu

SEQ ID NO: 335344 - RNA, 19 nt, Artificial Sequence
  Description of Artificial Sequence: Synthetic oligonucleotide
  Antisense Strand to SEQ ID NO: 335343
aacccaacaauuuaauucc

SEQ ID NO: 335345 - RNA, 19 nt, Artificial Sequence
  Description of Artificial Sequence: Synthetic oligonucleotide
  Sense Strand Starting at position 210 of SEQ ID NO: 317805
guuauaagauagucauaug

SEQ ID NO: 335346 - RNA, 19 nt, Artificial Sequence
  Description of Artificial Sequence: Synthetic oligonucleotide
  Antisense Strand to SEQ ID NO: 335345
cauaugacuaucuuauaac

SEQ ID NO: 335347 - RNA, 19 nt, Artificial Sequence
  Description of Artificial Sequence: Synthetic oligonucleotide
  Sense Strand Starting at position 210 of SEQ ID NO: 317844
ucagucaugguugaauagu

SEQ ID NO: 335348 - RNA, 19 nt, Artificial Sequence
  Description of Artificial Sequence: Synthetic oligonucleotide
  Antisense Strand to SEQ ID NO: 335347
acuauucaaccaugacuga

SEQ ID NO: 335349 - RNA, 19 nt, Artificial Sequence
  Description of Artificial Sequence: Synthetic oligonucleotide
  Sense Strand Starting at position 210 of SEQ ID NO: 317976
ugaaauagauuggucccua

SEQ ID NO: 335350 - RNA, 19 nt, Artificial Sequence
  Description of Artificial Sequence: Synthetic oligonucleotide
  Antisense Strand to SEQ ID NO: 335349
uagggaccaaucuauuuca

SEQ ID NO: 335351 - RNA, 19 nt, Artificial Sequence
  Description of Artificial Sequence: Synthetic oligonucleotide
  Sense Strand Starting at position 210 of SEQ ID NO: 317977
gaaauagauuggucccuaa

SEQ ID NO: 335352 - RNA, 19 nt, Artificial Sequence
  Description of Artificial Sequence: Synthetic oligonucleotide
  Antisense Strand to SEQ ID NO: 335351
uuagggaccaaucuauuuc

SEQ ID NO: 335353 - RNA, 19 nt, Artificial Sequence
  Description of Artificial Sequence: Synthetic oligonucleotide
  Sense Strand Starting at position 210 of SEQ ID NO: 318132
gagugauguuucuucuaca

SEQ ID NO: 335354 - RNA, 19 nt, Artificial Sequence
  Description of Artificial Sequence: Synthetic oligonucleotide
  Antisense Strand to SEQ ID NO: 335353
uguagaagaaacaucacuc

SEQ ID NO: 335355 - RNA, 19 nt, Artificial Sequence
  Description of Artificial Sequence: Synthetic oligonucleotide
  Sense Strand Starting at position 210 of SEQ ID NO: 318133
agugauguuucuucuacaa

SEQ ID NO: 335356 - RNA, 19 nt, Artificial Sequence
  Description of Artificial Sequence: Synthetic oligonucleotide
  Antisense Strand to SEQ ID NO: 335355
uuguagaagaaacaucacu

SEQ ID NO: 335357 - RNA, 19 nt, Artificial Sequence
  Description of Artificial Sequence: Synthetic oligonucleotide
  Sense Strand Starting at position 210 of SEQ ID NO: 318400
uauauaugguaauuggagu

SEQ ID NO: 335358 - RNA, 19 nt, Artificial Sequence
  Description of Artificial Sequence: Synthetic oligonucleotide
  Antisense Strand to SEQ ID NO: 335357
acuccaauuaccauauaua

SEQ ID NO: 335359 - RNA, 19 nt, Artificial Sequence
  Description of Artificial Sequence: Synthetic oligonucleotide
  Sense Strand Starting at position 210 of SEQ ID NO: 318401
auauaugguaauuggagua

SEQ ID NO: 335360 - RNA, 19 nt, Artificial Sequence
  Description of Artificial Sequence: Synthetic oligonucleotide
  Antisense Strand to SEQ ID NO: 335359
uacuccaauuaccauauau

SEQ ID NO: 335361 - RNA, 19 nt, Artificial Sequence
  Description of Artificial Sequence: Synthetic oligonucleotide
  Sense Strand Starting at position 210 of SEQ ID NO: 318419
agaauuagguuuccugaga

SEQ ID NO: 335362 - RNA, 19 nt, Artificial Sequence
  Description of Artificial Sequence: Synthetic oligonucleotide
  Antisense Strand to SEQ ID NO: 335361
ucucaggaaaccuaauucu

SEQ ID NO: 335363 - RNA, 19 nt, Artificial Sequence
  Description of Artificial Sequence: Synthetic oligonucleotide
  Sense Strand Starting at position 210 of SEQ ID NO: 318420
gaauuagguuuccugagaa

SEQ ID NO: 335364 - RNA, 19 nt, Artificial Sequence
  Description of Artificial Sequence: Synthetic oligonucleotide
  Antisense Strand to SEQ ID NO: 335363
uucucaggaaaccuaauuc

SEQ ID NO: 335365 - RNA, 19 nt, Artificial Sequence
  Description of Artificial Sequence: Synthetic oligonucleotide
  Sense Strand Starting at position 210 of SEQ ID NO: 318467
ucacaagcucuaggacaua

SEQ ID NO: 335366 - RNA, 19 nt, Artificial Sequence
  Description of Artificial Sequence: Synthetic oligonucleotide
  Antisense Strand to SEQ ID NO: 335365
uauguccuagagcuuguga

SEQ ID NO: 335367 - RNA, 19 nt, Artificial Sequence
  Description of Artificial Sequence: Synthetic oligonucleotide
  Sense Strand Starting at position 210 of SEQ ID NO: 318528
gggcaauuagggcagguau

SEQ ID NO: 335368 - RNA, 19 nt, Artificial Sequence
  Description of Artificial Sequence: Synthetic oligonucleotide
  Antisense Strand to SEQ ID NO: 335367
auaccugcccuaauugccc

SEQ ID NO: 335369 - RNA, 19 nt, Artificial Sequence
  Description of Artificial Sequence: Synthetic oligonucleotide
  Sense Strand Starting at position 210 of SEQ ID NO: 318695
ucuugaucuccacauuagu

SEQ ID NO: 335370 - RNA, 19 nt, Artificial Sequence
  Description of Artificial Sequence: Synthetic oligonucleotide
  Antisense Strand to SEQ ID NO: 335369
acuaauguggagaucaaga

SEQ ID NO: 335371 - RNA, 19 nt, Artificial Sequence
  Description of Artificial Sequence: Synthetic oligonucleotide
  Sense Strand Starting at position 210 of SEQ ID NO: 318711
aguguuaagcuugauuacu

SEQ ID NO: 335372 - RNA, 19 nt, Artificial Sequence
  Description of Artificial Sequence: Synthetic oligonucleotide
  Antisense Strand to SEQ ID NO: 335371
aguaaucaagcuuaacacu

SEQ ID NO: 335373 - RNA, 19 nt, Artificial Sequence
  Description of Artificial Sequence: Synthetic oligonucleotide
  Sense Strand Starting at position 210 of SEQ ID NO: 318745
gccuaaguuguagagcaga

SEQ ID NO: 335374 - RNA, 19 nt, Artificial Sequence
  Description of Artificial Sequence: Synthetic oligonucleotide
  Antisense Strand to SEQ ID NO: 335373
ucugcucuacaacuuaggc

SEQ ID NO: 335375 - RNA, 19 nt, Artificial Sequence
  Description of Artificial Sequence: Synthetic oligonucleotide
  Sense Strand Starting at position 210 of SEQ ID NO: 318748
uaaguuguagagcagaguu

SEQ ID NO: 335376 - RNA, 19 nt, Artificial Sequence
  Description of Artificial Sequence: Synthetic oligonucleotide
  Antisense Strand to SEQ ID NO: 335375
aacucugcucuacaacuua

SEQ ID NO: 335377 - RNA, 19 nt, Artificial Sequence
  Description of Artificial Sequence: Synthetic oligonucleotide
  Sense Strand Starting at position 210 of SEQ ID NO: 318768
uaguaaguagugcauacau

SEQ ID NO: 335378 - RNA, 19 nt, Artificial Sequence
  Description of Artificial Sequence: Synthetic oligonucleotide
  Antisense Strand to SEQ ID NO: 335377
auguaugcacuacuuacua

SEQ ID NO: 335379 - RNA, 19 nt, Artificial Sequence
  Description of Artificial Sequence: Synthetic oligonucleotide
  Sense Strand Starting at position 210 of SEQ ID NO: 319008
gguaaucucuugguacauu

SEQ ID NO: 335380 - RNA, 19 nt, Artificial Sequence
  Description of Artificial Sequence: Synthetic oligonucleotide
  Antisense Strand to SEQ ID NO: 335379
aauguaccaagagauuacc

SEQ ID NO: 335381 - RNA, 19 nt, Artificial Sequence
  Description of Artificial Sequence: Synthetic oligonucleotide
  Sense Strand Starting at position 210 of SEQ ID NO: 319074
gaaguuaguuaaguaaggu

SEQ ID NO: 335382 - RNA, 19 nt, Artificial Sequence
  Description of Artificial Sequence: Synthetic oligonucleotide
  Antisense Strand to SEQ ID NO: 335381
accuuacuuaacuaacuuc

SEQ ID NO: 335383 - RNA, 19 nt, Artificial Sequence
  Description of Artificial Sequence: Synthetic oligonucleotide
  Sense Strand Starting at position 210 of SEQ ID NO: 319080
aguuaaguaagguauaugu

SEQ ID NO: 335384 - RNA, 19 nt, Artificial Sequence
  Description of Artificial Sequence: Synthetic oligonucleotide
  Antisense Strand to SEQ ID NO: 335383
acauauaccuuacuuaacu

SEQ ID NO: 335385 - RNA, 19 nt, Artificial Sequence
  Description of Artificial Sequence: Synthetic oligonucleotide
  Sense Strand Starting at position 210 of SEQ ID NO: 319110
acguuuguaaccuagagga

SEQ ID NO: 335386 - RNA, 19 nt, Artificial Sequence
  Description of Artificial Sequence: Synthetic oligonucleotide
  Antisense Strand to SEQ ID NO: 335385
uccucuagguuacaaacgu

SEQ ID NO: 335387 - RNA, 19 nt, Artificial Sequence
  Description of Artificial Sequence: Synthetic oligonucleotide
  Sense Strand Starting at position 210 of SEQ ID NO: 319182
uggaauggaaagugucaga

SEQ ID NO: 335388 - RNA, 19 nt, Artificial Sequence
  Description of Artificial Sequence: Synthetic oligonucleotide
  Antisense Strand to SEQ ID NO: 335387
ucugacacuuuccauucca

SEQ ID NO: 335389 - RNA, 19 nt, Artificial Sequence
  Description of Artificial Sequence: Synthetic oligonucleotide
  Sense Strand Starting at position 210 of SEQ ID NO: 319189
gaaagugucagaggaggua

SEQ ID NO: 335390 - RNA, 19 nt, Artificial Sequence
  Description of Artificial Sequence: Synthetic oligonucleotide
  Antisense Strand to SEQ ID NO: 335389
uaccuccucugacacuuuc

SEQ ID NO: 335391 - RNA, 19 nt, Artificial Sequence
  Description of Artificial Sequence: Synthetic oligonucleotide
  Sense Strand Starting at position 211 of SEQ ID NO: 315337
cugcauaaugccuguauuu

SEQ ID NO: 335392 - RNA, 19 nt, Artificial Sequence
  Description of Artificial Sequence: Synthetic oligonucleotide
  Antisense Strand to SEQ ID NO: 335391
aaauacaggcauuaugcag

SEQ ID NO: 335393 - RNA, 19 nt, Artificial Sequence
  Description of Artificial Sequence: Synthetic oligonucleotide
  Sense Strand Starting at position 211 of SEQ ID NO: 315405
uucugaauucgaugacucu

SEQ ID NO: 335394 - RNA, 19 nt, Artificial Sequence
  Description of Artificial Sequence: Synthetic oligonucleotide
  Antisense Strand to SEQ ID NO: 335393
agagucaucgaauucagaa

SEQ ID NO: 335395 - RNA, 19 nt, Artificial Sequence
  Description of Artificial Sequence: Synthetic oligonucleotide
  Sense Strand Starting at position 211 of SEQ ID NO: 315406
ucugaauucgaugacucua

SEQ ID NO: 335396 - RNA, 19 nt, Artificial Sequence
  Description of Artificial Sequence: Synthetic oligonucleotide
  Antisense Strand to SEQ ID NO: 335395
uagagucaucgaauucaga

SEQ ID NO: 335397 - RNA, 19 nt, Artificial Sequence
  Description of Artificial Sequence: Synthetic oligonucleotide
  Sense Strand Starting at position 211 of SEQ ID NO: 315455
acgagugcuaauuacauga

SEQ ID NO: 335398 - RNA, 19 nt, Artificial Sequence
  Description of Artificial Sequence: Synthetic oligonucleotide
  Antisense Strand to SEQ ID NO: 335397
ucauguaauuagcacucgu

SEQ ID NO: 335399 - RNA, 19 nt, Artificial Sequence
  Description of Artificial Sequence: Synthetic oligonucleotide
  Sense Strand Starting at position 211 of SEQ ID NO: 315534
aguucuaaacuacgugauu

SEQ ID NO: 335400 - RNA, 19 nt, Artificial Sequence
  Description of Artificial Sequence: Synthetic oligonucleotide
  Antisense Strand to SEQ ID NO: 335399
aaucacguaguuuagaacu

SEQ ID NO: 335401 - RNA, 19 nt, Artificial Sequence
  Description of Artificial Sequence: Synthetic oligonucleotide
  Sense Strand Starting at position 211 of SEQ ID NO: 315535
guucuaaacuacgugauuu

SEQ ID NO: 335402 - RNA, 19 nt, Artificial Sequence
  Description of Artificial Sequence: Synthetic oligonucleotide
  Antisense Strand to SEQ ID NO: 335401
aaaucacguaguuuagaac

SEQ ID NO: 335403 - RNA, 19 nt, Artificial Sequence
  Description of Artificial Sequence: Synthetic oligonucleotide
  Sense Strand Starting at position 211 of SEQ ID NO: 315661
gcguucugaaauuauuaug

SEQ ID NO: 335404 - RNA, 19 nt, Artificial Sequence
  Description of Artificial Sequence: Synthetic oligonucleotide
  Antisense Strand to SEQ ID NO: 335403
cauaauaauuucagaacgc

SEQ ID NO: 335405 - RNA, 19 nt, Artificial Sequence
  Description of Artificial Sequence: Synthetic oligonucleotide
  Sense Strand Starting at position 211 of SEQ ID NO: 315679
gcgauuauacaacacaucu

SEQ ID NO: 335406 - RNA, 19 nt, Artificial Sequence
  Description of Artificial Sequence: Synthetic oligonucleotide
  Antisense Strand to SEQ ID NO: 335405
agauguguuguauaaucgc

SEQ ID NO: 335407 - RNA, 19 nt, Artificial Sequence
  Description of Artificial Sequence: Synthetic oligonucleotide
  Sense Strand Starting at position 211 of SEQ ID NO: 315696
cucugaaagcaguauuauu

SEQ ID NO: 335408 - RNA, 19 nt, Artificial Sequence
  Description of Artificial Sequence: Synthetic oligonucleotide
  Antisense Strand to SEQ ID NO: 335407
aauaauacugcuuucagag

SEQ ID NO: 335409 - RNA, 19 nt, Artificial Sequence
  Description of Artificial Sequence: Synthetic oligonucleotide
  Sense Strand Starting at position 211 of SEQ ID NO: 315845
gugguaagcagagacuuaa

SEQ ID NO: 335410 - RNA, 19 nt, Artificial Sequence
  Description of Artificial Sequence: Synthetic oligonucleotide
  Antisense Strand to SEQ ID NO: 335409
uuaagucucugcuuaccac

SEQ ID NO: 335411 - RNA, 19 nt, Artificial Sequence
  Description of Artificial Sequence: Synthetic oligonucleotide
  Sense Strand Starting at position 211 of SEQ ID NO: 315915
ggcuaauaaucaguuuaaa

SEQ ID NO: 335412 - RNA, 19 nt, Artificial Sequence
  Description of Artificial Sequence: Synthetic oligonucleotide
  Antisense Strand to SEQ ID NO: 335411
uuuaaacugauuauuagcc

SEQ ID NO: 335413 - RNA, 19 nt, Artificial Sequence
  Description of Artificial Sequence: Synthetic oligonucleotide
  Sense Strand Starting at position 211 of SEQ ID NO: 315947
agcauucuagaauaaaugu

SEQ ID NO: 335414 - RNA, 19 nt, Artificial Sequence
  Description of Artificial Sequence: Synthetic oligonucleotide
  Antisense Strand to SEQ ID NO: 335413
acauuuauucuagaaugcu

SEQ ID NO: 335415 - RNA, 19 nt, Artificial Sequence
  Description of Artificial Sequence: Synthetic oligonucleotide
  Sense Strand Starting at position 211 of SEQ ID NO: 316025
gcucuauggaugugaagug

SEQ ID NO: 335416 - RNA, 19 nt, Artificial Sequence
  Description of Artificial Sequence: Synthetic oligonucleotide
  Antisense Strand to SEQ ID NO: 335415
cacuucacauccauagagc

SEQ ID NO: 335417 - RNA, 19 nt, Artificial Sequence
  Description of Artificial Sequence: Synthetic oligonucleotide
  Sense Strand Starting at position 211 of SEQ ID NO: 316030
auggaugugaagugugaca

SEQ ID NO: 335418 - RNA, 19 nt, Artificial Sequence
  Description of Artificial Sequence: Synthetic oligonucleotide
  Antisense Strand to SEQ ID NO: 335417
ugucacacuucacauccau

SEQ ID NO: 335419 - RNA, 19 nt, Artificial Sequence
  Description of Artificial Sequence: Synthetic oligonucleotide
  Sense Strand Starting at position 211 of SEQ ID NO: 316221
ggagguuacugucuuccua

SEQ ID NO: 335420 - RNA, 19 nt, Artificial Sequence
  Description of Artificial Sequence: Synthetic oligonucleotide
  Antisense Strand to SEQ ID NO: 335419
uaggaagacaguaaccucc

SEQ ID NO: 335421 - RNA, 19 nt, Artificial Sequence
  Description of Artificial Sequence: Synthetic oligonucleotide
  Sense Strand Starting at position 211 of SEQ ID NO: 316223
agguuacugucuuccuauu

SEQ ID NO: 335422 - RNA, 19 nt, Artificial Sequence
  Description of Artificial Sequence: Synthetic oligonucleotide
  Antisense Strand to SEQ ID NO: 335421
aauaggaagacaguaaccu

SEQ ID NO: 335423 - RNA, 19 nt, Artificial Sequence
  Description of Artificial Sequence: Synthetic oligonucleotide
  Sense Strand Starting at position 211 of SEQ ID NO: 316302
acguacaauuuagaaugua

SEQ ID NO: 335424 - RNA, 19 nt, Artificial Sequence
  Description of Artificial Sequence: Synthetic oligonucleotide
  Antisense Strand to SEQ ID NO: 335423
uacauucuaaauuguacgu

SEQ ID NO: 335425 - RNA, 19 nt, Artificial Sequence
  Description of Artificial Sequence: Synthetic oligonucleotide
  Sense Strand Starting at position 211 of SEQ ID NO: 316355
aaggaagaguuuccagcaa

SEQ ID NO: 335426 - RNA, 19 nt, Artificial Sequence
  Description of Artificial Sequence: Synthetic oligonucleotide
  Antisense Strand to SEQ ID NO: 335425
uugcuggaaacucuuccuu

SEQ ID NO: 335427 - RNA, 19 nt, Artificial Sequence
  Description of Artificial Sequence: Synthetic oligonucleotide
  Sense Strand Starting at position 211 of SEQ ID NO: 316359
aagaguuuccagcaagcuu

SEQ ID NO: 335428 - RNA, 19 nt, Artificial Sequence
  Description of Artificial Sequence: Synthetic oligonucleotide
  Antisense Strand to SEQ ID NO: 335427
aagcuugcuggaaacucuu

SEQ ID NO: 335429 - RNA, 19 nt, Artificial Sequence
  Description of Artificial Sequence: Synthetic oligonucleotide
  Sense Strand Starting at position 211 of SEQ ID NO: 316406
auuacacggccggaagauu

SEQ ID NO: 335430 - RNA, 19 nt, Artificial Sequence
  Description of Artificial Sequence: Synthetic oligonucleotide
  Antisense Strand to SEQ ID NO: 335429
aaucuuccggccguguaau

SEQ ID NO: 335431 - RNA, 19 nt, Artificial Sequence
  Description of Artificial Sequence: Synthetic oligonucleotide
  Sense Strand Starting at position 211 of SEQ ID NO: 316414
gccggaagauucuucugau

SEQ ID NO: 335432 - RNA, 19 nt, Artificial Sequence
  Description of Artificial Sequence: Synthetic oligonucleotide
  Antisense Strand to SEQ ID NO: 335431
aucagaagaaucuuccggc

SEQ ID NO: 335433 - RNA, 19 nt, Artificial Sequence
  Description of Artificial Sequence: Synthetic oligonucleotide
  Sense Strand Starting at position 211 of SEQ ID NO: 316415
ccggaagauucuucugauu

SEQ ID NO: 335434 - RNA, 19 nt, Artificial Sequence
  Description of Artificial Sequence: Synthetic oligonucleotide
  Antisense Strand to SEQ ID NO: 335433
aaucagaagaaucuuccgg

SEQ ID NO: 335435 - RNA, 19 nt, Artificial Sequence
  Description of Artificial Sequence: Synthetic oligonucleotide
  Sense Strand Starting at position 211 of SEQ ID NO: 316420
agauucuucugauugaaug

SEQ ID NO: 335436 - RNA, 19 nt, Artificial Sequence
  Description of Artificial Sequence: Synthetic oligonucleotide
  Antisense Strand to SEQ ID NO: 335435
cauucaaucagaagaaucu

SEQ ID NO: 335437 - RNA, 19 nt, Artificial Sequence
  Description of Artificial Sequence: Synthetic oligonucleotide
  Sense Strand Starting at position 211 of SEQ ID NO: 316431
auugaaugcugaguugaaa

SEQ ID NO: 335438 - RNA, 19 nt, Artificial Sequence
  Description of Artificial Sequence: Synthetic oligonucleotide
  Antisense Strand to SEQ ID NO: 335437
uuucaacucagcauucaau

SEQ ID NO: 335439 - RNA, 19 nt, Artificial Sequence
  Description of Artificial Sequence: Synthetic oligonucleotide
  Sense Strand Starting at position 211 of SEQ ID NO: 316455
acuuaauuguguccuuuac

SEQ ID NO: 335440 - RNA, 19 nt, Artificial Sequence
  Description of Artificial Sequence: Synthetic oligonucleotide
  Antisense Strand to SEQ ID NO: 335439
guaaaggacacaauuaagu

SEQ ID NO: 335441 - RNA, 19 nt, Artificial Sequence
  Description of Artificial Sequence: Synthetic oligonucleotide
  Sense Strand Starting at position 211 of SEQ ID NO: 316736
gugugcauuuggagaugga

SEQ ID NO: 335442 - RNA, 19 nt, Artificial Sequence
  Description of Artificial Sequence: Synthetic oligonucleotide
  Antisense Strand to SEQ ID NO: 335441
uccaucuccaaaugcacac

SEQ ID NO: 335443 - RNA, 19 nt, Artificial Sequence
  Description of Artificial Sequence: Synthetic oligonucleotide
  Sense Strand Starting at position 211 of SEQ ID NO: 317904
uccucugaucaggguuaau

SEQ ID NO: 335444 - RNA, 19 nt, Artificial Sequence
  Description of Artificial Sequence: Synthetic oligonucleotide
  Antisense Strand to SEQ ID NO: 335443
auuaacccugaucagagga

SEQ ID NO: 335445 - RNA, 19 nt, Artificial Sequence
  Description of Artificial Sequence: Synthetic oligonucleotide
  Sense Strand Starting at position 211 of SEQ ID NO: 317986
gcgagcauugucgcaaaca

SEQ ID NO: 335446 - RNA, 19 nt, Artificial Sequence
  Description of Artificial Sequence: Synthetic oligonucleotide
  Antisense Strand to SEQ ID NO: 335445
uguuugcgacaaugcucgc

SEQ ID NO: 335447 - RNA, 19 nt, Artificial Sequence
  Description of Artificial Sequence: Synthetic oligonucleotide
  Sense Strand Starting at position 211 of SEQ ID NO: 318094
uuggguuuaacaugcuuga

SEQ ID NO: 335448 - RNA, 19 nt, Artificial Sequence
  Description of Artificial Sequence: Synthetic oligonucleotide
  Antisense Strand to SEQ ID NO: 335447
ucaagcauguuaaacccaa

SEQ ID NO: 335449 - RNA, 19 nt, Artificial Sequence
  Description of Artificial Sequence: Synthetic oligonucleotide
  Sense Strand Starting at position 211 of SEQ ID NO: 318120
guucgaaauguggccgcaa

SEQ ID NO: 335450 - RNA, 19 nt, Artificial Sequence
  Description of Artificial Sequence: Synthetic oligonucleotide
  Antisense Strand to SEQ ID NO: 335449
uugcggccacauuucgaac

SEQ ID NO: 335451 - RNA, 19 nt, Artificial Sequence
  Description of Artificial Sequence: Synthetic oligonucleotide
  Sense Strand Starting at position 211 of SEQ ID NO: 318433
aaauccagcguaugaaagu

SEQ ID NO: 335452 - RNA, 19 nt, Artificial Sequence
  Description of Artificial Sequence: Synthetic oligonucleotide
  Antisense Strand to SEQ ID NO: 335451
acuuucauacgcuggauuu

SEQ ID NO: 335453 - RNA, 19 nt, Artificial Sequence
  Description of Artificial Sequence: Synthetic oligonucleotide
  Sense Strand Starting at position 211 of SEQ ID NO: 318469
ucuguaccaguguauugua

SEQ ID NO: 335454 - RNA, 19 nt, Artificial Sequence
  Description of Artificial Sequence: Synthetic oligonucleotide
  Antisense Strand to SEQ ID NO: 335453
uacaauacacugguacaga

SEQ ID NO: 335455 - RNA, 19 nt, Artificial Sequence
  Description of Artificial Sequence: Synthetic oligonucleotide
  Sense Strand Starting at position 211 of SEQ ID NO: 318622
ggguuuaauaaauguguug

SEQ ID NO: 335456 - RNA, 19 nt, Artificial Sequence
  Description of Artificial Sequence: Synthetic oligonucleotide
  Antisense Strand to SEQ ID NO: 335455
caacacauuuauuaaaccc

SEQ ID NO: 335457 - RNA, 19 nt, Artificial Sequence
  Description of Artificial Sequence: Synthetic oligonucleotide
  Sense Strand Starting at position 211 of SEQ ID NO: 318654
caggcauugcucuagugaa

SEQ ID NO: 335458 - RNA, 19 nt, Artificial Sequence
  Description of Artificial Sequence: Synthetic oligonucleotide
  Antisense Strand to SEQ ID NO: 335457
uucacuagagcaaugccug

SEQ ID NO: 335459 - RNA, 19 nt, Artificial Sequence
  Description of Artificial Sequence: Synthetic oligonucleotide
  Sense Strand Starting at position 211 of SEQ ID NO: 318744
aauaauuauggugguaaug

SEQ ID NO: 335460 - RNA, 19 nt, Artificial Sequence
  Description of Artificial Sequence: Synthetic oligonucleotide
  Antisense Strand to SEQ ID NO: 335459
cauuaccaccauaauuauu

SEQ ID NO: 335461 - RNA, 19 nt, Artificial Sequence
  Description of Artificial Sequence: Synthetic oligonucleotide
  Sense Strand Starting at position 211 of SEQ ID NO: 318825
gcugcuuauguggauacaa

SEQ ID NO: 335462 - RNA, 19 nt, Artificial Sequence
  Description of Artificial Sequence: Synthetic oligonucleotide
  Antisense Strand to SEQ ID NO: 335461
uuguauccacauaagcagc

SEQ ID NO: 335463 - RNA, 19 nt, Artificial Sequence
  Description of Artificial Sequence: Synthetic oligonucleotide
  Sense Strand Starting at position 211 of SEQ ID NO: 318918
ucagcugucccugauacca

SEQ ID NO: 335464 - RNA, 19 nt, Artificial Sequence
  Description of Artificial Sequence: Synthetic oligonucleotide
  Antisense Strand to SEQ ID NO: 335463
ugguaucagggacagcuga

SEQ ID NO: 335465 - RNA, 19 nt, Artificial Sequence
  Description of Artificial Sequence: Synthetic oligonucleotide
  Sense Strand Starting at position 211 of SEQ ID NO: 318952
gcugaagagugacuagaaa

SEQ ID NO: 335466 - RNA, 19 nt, Artificial Sequence
  Description of Artificial Sequence: Synthetic oligonucleotide
  Antisense Strand to SEQ ID NO: 335465
uuucuagucacucuucagc

SEQ ID NO: 335467 - RNA, 19 nt, Artificial Sequence
  Description of Artificial Sequence: Synthetic oligonucleotide
  Sense Strand Starting at position 211 of SEQ ID NO: 319024
gggagcuacugagcuauau

SEQ ID NO: 335468 - RNA, 19 nt, Artificial Sequence
  Description of Artificial Sequence: Synthetic oligonucleotide
  Antisense Strand to SEQ ID NO: 335467
auauagcucaguagcuccc

SEQ ID NO: 335469 - RNA, 19 nt, Artificial Sequence
  Description of Artificial Sequence: Synthetic oligonucleotide
  Sense Strand Starting at position 211 of SEQ ID NO: 319205
cugagauaaccuuaagcuc

SEQ ID NO: 335470 - RNA, 19 nt, Artificial Sequence
  Description of Artificial Sequence: Synthetic oligonucleotide
  Antisense Strand to SEQ ID NO: 335469
gagcuuaagguuaucucag

SEQ ID NO: 335471 - RNA, 19 nt, Artificial Sequence
  Description of Artificial Sequence: Synthetic oligonucleotide
  Sense Strand Starting at position 212 of SEQ ID NO: 315266
gcugaaagaaauugaggua

SEQ ID NO: 335472 - RNA, 19 nt, Artificial Sequence
  Description of Artificial Sequence: Synthetic oligonucleotide
  Antisense Strand to SEQ ID NO: 335471
uaccucaauuucuuucagc

SEQ ID NO: 335473 - RNA, 19 nt, Artificial Sequence
  Description of Artificial Sequence: Synthetic oligonucleotide
  Sense Strand Starting at position 212 of SEQ ID NO: 315650
gggcgugacccugaggaaa

SEQ ID NO: 335474 - RNA, 19 nt, Artificial Sequence
  Description of Artificial Sequence: Synthetic oligonucleotide
  Antisense Strand to SEQ ID NO: 335473
uuuccucagggucacgccc

SEQ ID NO: 335475 - RNA, 19 nt, Artificial Sequence
  Description of Artificial Sequence: Synthetic oligonucleotide
  Sense Strand Starting at position 212 of SEQ ID NO: 315751
gggugaagauuugguuaga

SEQ ID NO: 335476 - RNA, 19 nt, Artificial Sequence
  Description of Artificial Sequence: Synthetic oligonucleotide
  Antisense Strand to SEQ ID NO: 335475
ucuaaccaaaucuucaccc

SEQ ID NO: 335477 - RNA, 19 nt, Artificial Sequence
  Description of Artificial Sequence: Synthetic oligonucleotide
  Sense Strand Starting at position 212 of SEQ ID NO: 315756
aagauuugguuagaaacag

SEQ ID NO: 335478 - RNA, 19 nt, Artificial Sequence
  Description of Artificial Sequence: Synthetic oligonucleotide
  Antisense Strand to SEQ ID NO: 335477
cuguuucuaaccaaaucuu

SEQ ID NO: 335479 - RNA, 19 nt, Artificial Sequence
  Description of Artificial Sequence: Synthetic oligonucleotide
  Sense Strand Starting at position 212 of SEQ ID NO: 316048
ugcagacguuacuuaucaa

SEQ ID NO: 335480 - RNA, 19 nt, Artificial Sequence
  Description of Artificial Sequence: Synthetic oligonucleotide
  Antisense Strand to SEQ ID NO: 335479
uugauaaguaacgucugca

SEQ ID NO: 335481 - RNA, 19 nt, Artificial Sequence
  Description of Artificial Sequence: Synthetic oligonucleotide
  Sense Strand Starting at position 212 of SEQ ID NO: 316309
agccaagaugauugcaaca

SEQ ID NO: 335482 - RNA, 19 nt, Artificial Sequence
  Description of Artificial Sequence: Synthetic oligonucleotide
  Antisense Strand to SEQ ID NO: 335481
uguugcaaucaucuuggcu

SEQ ID NO: 335483 - RNA, 19 nt, Artificial Sequence
  Description of Artificial Sequence: Synthetic oligonucleotide
  Sense Strand Starting at position 212 of SEQ ID NO: 316401
gugagguggcuagggauua

SEQ ID NO: 335484 - RNA, 19 nt, Artificial Sequence
  Description of Artificial Sequence: Synthetic oligonucleotide
  Antisense Strand to SEQ ID NO: 335483
uaaucccuagccaccucac

SEQ ID NO: 335485 - RNA, 19 nt, Artificial Sequence
  Description of Artificial Sequence: Synthetic oligonucleotide
  Sense Strand Starting at position 212 of SEQ ID NO: 316519
cagagaaugcuugaguguc

SEQ ID NO: 335486 - RNA, 19 nt, Artificial Sequence
  Description of Artificial Sequence: Synthetic oligonucleotide
  Antisense Strand to SEQ ID NO: 335485
gacacucaagcauucucug

SEQ ID NO: 335487 - RNA, 19 nt, Artificial Sequence
  Description of Artificial Sequence: Synthetic oligonucleotide
  Sense Strand Starting at position 212 of SEQ ID NO: 316531
gaguguccucuuuggagac

SEQ ID NO: 335488 - RNA, 19 nt, Artificial Sequence
  Description of Artificial Sequence: Synthetic oligonucleotide
  Antisense Strand to SEQ ID NO: 335487
gucuccaaagaggacacuc

SEQ ID NO: 335489 - RNA, 19 nt, Artificial Sequence
  Description of Artificial Sequence: Synthetic oligonucleotide
  Sense Strand Starting at position 212 of SEQ ID NO: 316838
gggccacaauucucacuau

SEQ ID NO: 335490 - RNA, 19 nt, Artificial Sequence
  Description of Artificial Sequence: Synthetic oligonucleotide
  Antisense Strand to SEQ ID NO: 335489
auagugagaauuguggccc

SEQ ID NO: 335491 - RNA, 19 nt, Artificial Sequence
  Description of Artificial Sequence: Synthetic oligonucleotide
  Sense Strand Starting at position 212 of SEQ ID NO: 316864
caaauaugucgggaagcca

SEQ ID NO: 335492 - RNA, 19 nt, Artificial Sequence
  Description of Artificial Sequence: Synthetic oligonucleotide
  Antisense Strand to SEQ ID NO: 335491
uggcuucccgacauauuug

SEQ ID NO: 335493 - RNA, 19 nt, Artificial Sequence
  Description of Artificial Sequence: Synthetic oligonucleotide
  Sense Strand Starting at position 212 of SEQ ID NO: 316951
agagguauuguuuguuuaa

SEQ ID NO: 335494 - RNA, 19 nt, Artificial Sequence
  Description of Artificial Sequence: Synthetic oligonucleotide
  Antisense Strand to SEQ ID NO: 335493
uuaaacaaacaauaccucu

SEQ ID NO: 335495 - RNA, 19 nt, Artificial Sequence
  Description of Artificial Sequence: Synthetic oligonucleotide
  Sense Strand Starting at position 212 of SEQ ID NO: 316952
gagguauuguuuguuuaaa

SEQ ID NO: 335496 - RNA, 19 nt, Artificial Sequence
  Description of Artificial Sequence: Synthetic oligonucleotide
  Antisense Strand to SEQ ID NO: 335495
uuuaaacaaacaauaccuc

SEQ ID NO: 335497 - RNA, 19 nt, Artificial Sequence
  Description of Artificial Sequence: Synthetic oligonucleotide
  Sense Strand Starting at position 212 of SEQ ID NO: 317032
uguacuuacuugcugaaga

SEQ ID NO: 335498 - RNA, 19 nt, Artificial Sequence
  Description of Artificial Sequence: Synthetic oligonucleotide
  Antisense Strand to SEQ ID NO: 335497
ucuucagcaaguaaguaca

SEQ ID NO: 335499 - RNA, 19 nt, Artificial Sequence
  Description of Artificial Sequence: Synthetic oligonucleotide
  Sense Strand Starting at position 212 of SEQ ID NO: 317102
cugagauguucucuucuua

SEQ ID NO: 335500 - RNA, 19 nt, Artificial Sequence
  Description of Artificial Sequence: Synthetic oligonucleotide
  Antisense Strand to SEQ ID NO: 335499
uaagaagagaacaucucag

SEQ ID NO: 335501 - RNA, 19 nt, Artificial Sequence
  Description of Artificial Sequence: Synthetic oligonucleotide
  Sense Strand Starting at position 212 of SEQ ID NO: 317196
uguuacuuuacagaggguu

SEQ ID NO: 335502 - RNA, 19 nt, Artificial Sequence
  Description of Artificial Sequence: Synthetic oligonucleotide
  Antisense Strand to SEQ ID NO: 335501
aacccucuguaaaguaaca

SEQ ID NO: 335503 - RNA, 19 nt, Artificial Sequence
  Description of Artificial Sequence: Synthetic oligonucleotide
  Sense Strand Starting at position 212 of SEQ ID NO: 317406
gaagaauggugcccgagaa

SEQ ID NO: 335504 - RNA, 19 nt, Artificial Sequence
  Description of Artificial Sequence: Synthetic oligonucleotide
  Antisense Strand to SEQ ID NO: 335503
uucucgggcaccauucuuc

SEQ ID NO: 335505 - RNA, 19 nt, Artificial Sequence
  Description of Artificial Sequence: Synthetic oligonucleotide
  Sense Strand Starting at position 212 of SEQ ID NO: 317410
aauggugcccgagaagagu

SEQ ID NO: 335506 - RNA, 19 nt, Artificial Sequence
  Description of Artificial Sequence: Synthetic oligonucleotide
  Antisense Strand to SEQ ID NO: 335505
acucuucucgggcaccauu

SEQ ID NO: 335507 - RNA, 19 nt, Artificial Sequence
  Description of Artificial Sequence: Synthetic oligonucleotide
  Sense Strand Starting at position 212 of SEQ ID NO: 317532
ugagucccugcaggaauaa

SEQ ID NO: 335508 - RNA, 19 nt, Artificial Sequence
  Description of Artificial Sequence: Synthetic oligonucleotide
  Antisense Strand to SEQ ID NO: 335507
uuauuccugcagggacuca

SEQ ID NO: 335509 - RNA, 19 nt, Artificial Sequence
  Description of Artificial Sequence: Synthetic oligonucleotide
  Sense Strand Starting at position 212 of SEQ ID NO: 317541
gcaggaauaagcugucaac

SEQ ID NO: 335510 - RNA, 19 nt, Artificial Sequence
  Description of Artificial Sequence: Synthetic oligonucleotide
  Antisense Strand to SEQ ID NO: 335509
guugacagcuuauuccugc

SEQ ID NO: 335511 - RNA, 19 nt, Artificial Sequence
  Description of Artificial Sequence: Synthetic oligonucleotide
  Sense Strand Starting at position 212 of SEQ ID NO: 317676
agugaauucuggucacccu

SEQ ID NO: 335512 - RNA, 19 nt, Artificial Sequence
  Description of Artificial Sequence: Synthetic oligonucleotide
  Antisense Strand to SEQ ID NO: 335511
agggugaccagaauucacu

SEQ ID NO: 335513 - RNA, 19 nt, Artificial Sequence
  Description of Artificial Sequence: Synthetic oligonucleotide
  Sense Strand Starting at position 212 of SEQ ID NO: 317677
gugaauucuggucacccua

SEQ ID NO: 335514 - RNA, 19 nt, Artificial Sequence
  Description of Artificial Sequence: Synthetic oligonucleotide
  Antisense Strand to SEQ ID NO: 335513
uagggugaccagaauucac

SEQ ID NO: 335515 - RNA, 19 nt, Artificial Sequence
  Description of Artificial Sequence: Synthetic oligonucleotide
  Sense Strand Starting at position 212 of SEQ ID NO: 317734
uuuagucaugcccaucacu

SEQ ID NO: 335516 - RNA, 19 nt, Artificial Sequence
  Description of Artificial Sequence: Synthetic oligonucleotide
  Antisense Strand to SEQ ID NO: 335515
agugaugggcaugacuaaa

SEQ ID NO: 335517 - RNA, 19 nt, Artificial Sequence
  Description of Artificial Sequence: Synthetic oligonucleotide
  Sense Strand Starting at position 212 of SEQ ID NO: 317850
cuuguuugcacagguggaa

SEQ ID NO: 335518 - RNA, 19 nt, Artificial Sequence
  Description of Artificial Sequence: Synthetic oligonucleotide
  Antisense Strand to SEQ ID NO: 335517
uuccaccugugcaaacaag

SEQ ID NO: 335519 - RNA, 19 nt, Artificial Sequence
  Description of Artificial Sequence: Synthetic oligonucleotide
  Sense Strand Starting at position 212 of SEQ ID NO: 317915
uacaauccagcuuggguaa

SEQ ID NO: 335520 - RNA, 19 nt, Artificial Sequence
  Description of Artificial Sequence: Synthetic oligonucleotide
  Antisense Strand to SEQ ID NO: 335519
uuacccaagcuggauugua

SEQ ID NO: 335521 - RNA, 19 nt, Artificial Sequence
  Description of Artificial Sequence: Synthetic oligonucleotide
  Sense Strand Starting at position 212 of SEQ ID NO: 318009
aaccgugugggugagaaau

SEQ ID NO: 335522 - RNA, 19 nt, Artificial Sequence
  Description of Artificial Sequence: Synthetic oligonucleotide
  Antisense Strand to SEQ ID NO: 335521
auuucucacccacacgguu

SEQ ID NO: 335523 - RNA, 19 nt, Artificial Sequence
  Description of Artificial Sequence: Synthetic oligonucleotide
  Sense Strand Starting at position 212 of SEQ ID NO: 318064
aaguuuguggcagagcuua

SEQ ID NO: 335524 - RNA, 19 nt, Artificial Sequence
  Description of Artificial Sequence: Synthetic oligonucleotide
  Antisense Strand to SEQ ID NO: 335523
uaagcucugccacaaacuu

SEQ ID NO: 335525 - RNA, 19 nt, Artificial Sequence
  Description of Artificial Sequence: Synthetic oligonucleotide
  Sense Strand Starting at position 212 of SEQ ID NO: 318070
guggcagagcuuaguggau

SEQ ID NO: 335526 - RNA, 19 nt, Artificial Sequence
  Description of Artificial Sequence: Synthetic oligonucleotide
  Antisense Strand to SEQ ID NO: 335525
auccacuaagcucugccac

SEQ ID NO: 335527 - RNA, 19 nt, Artificial Sequence
  Description of Artificial Sequence: Synthetic oligonucleotide
  Sense Strand Starting at position 212 of SEQ ID NO: 318101
accugagauuuggaauacu

SEQ ID NO: 335528 - RNA, 19 nt, Artificial Sequence
  Description of Artificial Sequence: Synthetic oligonucleotide
  Antisense Strand to SEQ ID NO: 335527
aguauuccaaaucucaggu

SEQ ID NO: 335529 - RNA, 19 nt, Artificial Sequence
  Description of Artificial Sequence: Synthetic oligonucleotide
  Sense Strand Starting at position 212 of SEQ ID NO: 318268
gaauauggaugugacaauu

SEQ ID NO: 335530 - RNA, 19 nt, Artificial Sequence
  Description of Artificial Sequence: Synthetic oligonucleotide
  Antisense Strand to SEQ ID NO: 335529
aauugucacauccauauuc

SEQ ID NO: 335531 - RNA, 19 nt, Artificial Sequence
  Description of Artificial Sequence: Synthetic oligonucleotide
  Sense Strand Starting at position 212 of SEQ ID NO: 318288
cugccuuaccucuaguaga

SEQ ID NO: 335532 - RNA, 19 nt, Artificial Sequence
  Description of Artificial Sequence: Synthetic oligonucleotide
  Antisense Strand to SEQ ID NO: 335531
ucuacuagagguaaggcag

SEQ ID NO: 335533 - RNA, 19 nt, Artificial Sequence
  Description of Artificial Sequence: Synthetic oligonucleotide
  Sense Strand Starting at position 212 of SEQ ID NO: 318332
gaacauagauuggagguaa

SEQ ID NO: 335534 - RNA, 19 nt, Artificial Sequence
  Description of Artificial Sequence: Synthetic oligonucleotide
  Antisense Strand to SEQ ID NO: 335533
uuaccuccaaucuauguuc

SEQ ID NO: 335535 - RNA, 19 nt, Artificial Sequence
  Description of Artificial Sequence: Synthetic oligonucleotide
  Sense Strand Starting at position 212 of SEQ ID NO: 318957
uugccauuagcgcuuugau

SEQ ID NO: 335536 - RNA, 19 nt, Artificial Sequence
  Description of Artificial Sequence: Synthetic oligonucleotide
  Antisense Strand to SEQ ID NO: 335535
aucaaagcgcuaauggcaa

SEQ ID NO: 335537 - RNA, 19 nt, Artificial Sequence
  Description of Artificial Sequence: Synthetic oligonucleotide
  Sense Strand Starting at position 212 of SEQ ID NO: 318958
ugccauuagcgcuuugaug

SEQ ID NO: 335538 - RNA, 19 nt, Artificial Sequence
  Description of Artificial Sequence: Synthetic oligonucleotide
  Antisense Strand to SEQ ID NO: 335537
caucaaagcgcuaauggca

SEQ ID NO: 335539 - RNA, 19 nt, Artificial Sequence
  Description of Artificial Sequence: Synthetic oligonucleotide
  Sense Strand Starting at position 212 of SEQ ID NO: 318959
gccauuagcgcuuugaugu

SEQ ID NO: 335540 - RNA, 19 nt, Artificial Sequence
  Description of Artificial Sequence: Synthetic oligonucleotide
  Antisense Strand to SEQ ID NO: 335539
acaucaaagcgcuaauggc

SEQ ID NO: 335541 - RNA, 19 nt, Artificial Sequence
  Description of Artificial Sequence: Synthetic oligonucleotide
  Sense Strand Starting at position 212 of SEQ ID NO: 319081
guacuaaugggauguguuu

SEQ ID NO: 335542 - RNA, 19 nt, Artificial Sequence
  Description of Artificial Sequence: Synthetic oligonucleotide
  Antisense Strand to SEQ ID NO: 335541
aaacacaucccauuaguac

SEQ ID NO: 335543 - RNA, 19 nt, Artificial Sequence
  Description of Artificial Sequence: Synthetic oligonucleotide
  Sense Strand Starting at position 212 of SEQ ID NO: 319083
acuaaugggauguguuuaa

SEQ ID NO: 335544 - RNA, 19 nt, Artificial Sequence
  Description of Artificial Sequence: Synthetic oligonucleotide
  Antisense Strand to SEQ ID NO: 335543
uuaaacacaucccauuagu

SEQ ID NO: 335545 - RNA, 19 nt, Artificial Sequence
  Description of Artificial Sequence: Synthetic oligonucleotide
  Sense Strand Starting at position 212 of SEQ ID NO: 319090
ggauguguuuaauuccucu

SEQ ID NO: 335546 - RNA, 19 nt, Artificial Sequence
  Description of Artificial Sequence: Synthetic oligonucleotide
  Antisense Strand to SEQ ID NO: 335545
agaggaauuaaacacaucc

SEQ ID NO: 335547 - RNA, 19 nt, Artificial Sequence
  Description of Artificial Sequence: Synthetic oligonucleotide
  Sense Strand Starting at position 212 of SEQ ID NO: 319144
accacagauuucuaaggua

SEQ ID NO: 335548 - RNA, 19 nt, Artificial Sequence
  Description of Artificial Sequence: Synthetic oligonucleotide
  Antisense Strand to SEQ ID NO: 335547
uaccuuagaaaucuguggu

SEQ ID NO: 335549 - RNA, 19 nt, Artificial Sequence
  Description of Artificial Sequence: Synthetic oligonucleotide
  Sense Strand Starting at position 212 of SEQ ID NO: 319158
agguaaauuucuggacacu

SEQ ID NO: 335550 - RNA, 19 nt, Artificial Sequence
  Description of Artificial Sequence: Synthetic oligonucleotide
  Antisense Strand to SEQ ID NO: 335549
aguguccagaaauuuaccu

SEQ ID NO: 335551 - RNA, 19 nt, Artificial Sequence
  Description of Artificial Sequence: Synthetic oligonucleotide
  Sense Strand Starting at position 213 of SEQ ID NO: 315244
acacguaaauuguuucuaa

SEQ ID NO: 335552 - RNA, 19 nt, Artificial Sequence
  Description of Artificial Sequence: Synthetic oligonucleotide
  Antisense Strand to SEQ ID NO: 335551
uuagaaacaauuuacgugu

SEQ ID NO: 335553 - RNA, 19 nt, Artificial Sequence
  Description of Artificial Sequence: Synthetic oligonucleotide
  Sense Strand Starting at position 213 of SEQ ID NO: 315245
cacguaaauuguuucuaag

SEQ ID NO: 335554 - RNA, 19 nt, Artificial Sequence
  Description of Artificial Sequence: Synthetic oligonucleotide
  Antisense Strand to SEQ ID NO: 335553
cuuagaaacaauuuacgug

SEQ ID NO: 335555 - RNA, 19 nt, Artificial Sequence
  Description of Artificial Sequence: Synthetic oligonucleotide
  Sense Strand Starting at position 213 of SEQ ID NO: 315247
cguaaauuguuucuaagau

SEQ ID NO: 335556 - RNA, 19 nt, Artificial Sequence
  Description of Artificial Sequence: Synthetic oligonucleotide
  Antisense Strand to SEQ ID NO: 335555
aucuuagaaacaauuuacg

SEQ ID NO: 335557 - RNA, 19 nt, Artificial Sequence
  Description of Artificial Sequence: Synthetic oligonucleotide
  Sense Strand Starting at position 213 of SEQ ID NO: 315355
ggugaauugcuugguuaaa

SEQ ID NO: 335558 - RNA, 19 nt, Artificial Sequence
  Description of Artificial Sequence: Synthetic oligonucleotide
  Antisense Strand to SEQ ID NO: 335557
uuuaaccaagcaauucacc

SEQ ID NO: 335559 - RNA, 19 nt, Artificial Sequence
  Description of Artificial Sequence: Synthetic oligonucleotide
  Sense Strand Starting at position 213 of SEQ ID NO: 315356
gugaauugcuugguuaaag

SEQ ID NO: 335560 - RNA, 19 nt, Artificial Sequence
  Description of Artificial Sequence: Synthetic oligonucleotide
  Antisense Strand to SEQ ID NO: 335559
cuuuaaccaagcaauucac

SEQ ID NO: 335561 - RNA, 19 nt, Artificial Sequence
  Description of Artificial Sequence: Synthetic oligonucleotide
  Sense Strand Starting at position 213 of SEQ ID NO: 315398
ugauauguaucacuagauu

SEQ ID NO: 335562 - RNA, 19 nt, Artificial Sequence
  Description of Artificial Sequence: Synthetic oligonucleotide
  Antisense Strand to SEQ ID NO: 335561
aaucuagugauacauauca

SEQ ID NO: 335563 - RNA, 19 nt, Artificial Sequence
  Description of Artificial Sequence: Synthetic oligonucleotide
  Sense Strand Starting at position 213 of SEQ ID NO: 315409
acuagauuauuguccagaa

SEQ ID NO: 335564 - RNA, 19 nt, Artificial Sequence
  Description of Artificial Sequence: Synthetic oligonucleotide
  Antisense Strand to SEQ ID NO: 335563
uucuggacaauaaucuagu

SEQ ID NO: 335565 - RNA, 19 nt, Artificial Sequence
  Description of Artificial Sequence: Synthetic oligonucleotide
  Sense Strand Starting at position 213 of SEQ ID NO: 315410
cuagauuauuguccagaaa

SEQ ID NO: 335566 - RNA, 19 nt, Artificial Sequence
  Description of Artificial Sequence: Synthetic oligonucleotide
  Antisense Strand to SEQ ID NO: 335565
uuucuggacaauaaucuag

SEQ ID NO: 335567 - RNA, 19 nt, Artificial Sequence
  Description of Artificial Sequence: Synthetic oligonucleotide
  Sense Strand Starting at position 213 of SEQ ID NO: 315485
gauagaggguucuugauug

SEQ ID NO: 335568 - RNA, 19 nt, Artificial Sequence
  Description of Artificial Sequence: Synthetic oligonucleotide
  Antisense Strand to SEQ ID NO: 335567
caaucaagaacccucuauc

SEQ ID NO: 335569 - RNA, 19 nt, Artificial Sequence
  Description of Artificial Sequence: Synthetic oligonucleotide
  Sense Strand Starting at position 213 of SEQ ID NO: 315524
auuuaucucuuugauagag

SEQ ID NO: 335570 - RNA, 19 nt, Artificial Sequence
  Description of Artificial Sequence: Synthetic oligonucleotide
  Antisense Strand to SEQ ID NO: 335569
cucuaucaaagagauaaau

SEQ ID NO: 335571 - RNA, 19 nt, Artificial Sequence
  Description of Artificial Sequence: Synthetic oligonucleotide
  Sense Strand Starting at position 213 of SEQ ID NO: 315605
uuguuuaauggcuauuacu

SEQ ID NO: 335572 - RNA, 19 nt, Artificial Sequence
  Description of Artificial Sequence: Synthetic oligonucleotide
  Antisense Strand to SEQ ID NO: 335571
aguaauagccauuaaacaa

SEQ ID NO: 335573 - RNA, 19 nt, Artificial Sequence
  Description of Artificial Sequence: Synthetic oligonucleotide
  Sense Strand Starting at position 213 of SEQ ID NO: 315897
caguaagcacuggguagau

SEQ ID NO: 335574 - RNA, 19 nt, Artificial Sequence
  Description of Artificial Sequence: Synthetic oligonucleotide
  Antisense Strand to SEQ ID NO: 335573
aucuacccagugcuuacug

SEQ ID NO: 335575 - RNA, 19 nt, Artificial Sequence
  Description of Artificial Sequence: Synthetic oligonucleotide
  Sense Strand Starting at position 213 of SEQ ID NO: 315912
agaugaaaguuacuucgau

SEQ ID NO: 335576 - RNA, 19 nt, Artificial Sequence
  Description of Artificial Sequence: Synthetic oligonucleotide
  Antisense Strand to SEQ ID NO: 335575
aucgaaguaacuuucaucu

SEQ ID NO: 335577 - RNA, 19 nt, Artificial Sequence
  Description of Artificial Sequence: Synthetic oligonucleotide
  Sense Strand Starting at position 213 of SEQ ID NO: 315913
gaugaaaguuacuucgauu

SEQ ID NO: 335578 - RNA, 19 nt, Artificial Sequence
  Description of Artificial Sequence: Synthetic oligonucleotide
  Antisense Strand to SEQ ID NO: 335577
aaucgaaguaacuuucauc

SEQ ID NO: 335579 - RNA, 19 nt, Artificial Sequence
  Description of Artificial Sequence: Synthetic oligonucleotide
  Sense Strand Starting at position 213 of SEQ ID NO: 316404
uuaugaauagugugaacuu

SEQ ID NO: 335580 - RNA, 19 nt, Artificial Sequence
  Description of Artificial Sequence: Synthetic oligonucleotide
  Antisense Strand to SEQ ID NO: 335579
aaguucacacuauucauaa

SEQ ID NO: 335581 - RNA, 19 nt, Artificial Sequence
  Description of Artificial Sequence: Synthetic oligonucleotide
  Sense Strand Starting at position 213 of SEQ ID NO: 316464
gaaugaugaugucuuucca

SEQ ID NO: 335582 - RNA, 19 nt, Artificial Sequence
  Description of Artificial Sequence: Synthetic oligonucleotide
  Antisense Strand to SEQ ID NO: 335581
uggaaagacaucaucauuc

SEQ ID NO: 335583 - RNA, 19 nt, Artificial Sequence
  Description of Artificial Sequence: Synthetic oligonucleotide
  Sense Strand Starting at position 213 of SEQ ID NO: 316628
augacauauuaacugaguu

SEQ ID NO: 335584 - RNA, 19 nt, Artificial Sequence
  Description of Artificial Sequence: Synthetic oligonucleotide
  Antisense Strand to SEQ ID NO: 335583
aacucaguuaauaugucau

SEQ ID NO: 335585 - RNA, 19 nt, Artificial Sequence
  Description of Artificial Sequence: Synthetic oligonucleotide
  Sense Strand Starting at position 213 of SEQ ID NO: 316768
cccuguuauuugucauucu

SEQ ID NO: 335586 - RNA, 19 nt, Artificial Sequence
  Description of Artificial Sequence: Synthetic oligonucleotide
  Antisense Strand to SEQ ID NO: 335585
agaaugacaaauaacaggg

SEQ ID NO: 335587 - RNA, 19 nt, Artificial Sequence
  Description of Artificial Sequence: Synthetic oligonucleotide
  Sense Strand Starting at position 213 of SEQ ID NO: 316778
ugucauucuuaugcagaua

SEQ ID NO: 335588 - RNA, 19 nt, Artificial Sequence
  Description of Artificial Sequence: Synthetic oligonucleotide
  Antisense Strand to SEQ ID NO: 335587
uaucugcauaagaaugaca

SEQ ID NO: 335589 - RNA, 19 nt, Artificial Sequence
  Description of Artificial Sequence: Synthetic oligonucleotide
  Sense Strand Starting at position 213 of SEQ ID NO: 317249
agcuaacuuucuuuaagag

SEQ ID NO: 335590 - RNA, 19 nt, Artificial Sequence
  Description of Artificial Sequence: Synthetic oligonucleotide
  Antisense Strand to SEQ ID NO: 335589
cucuuaaagaaaguuagcu

SEQ ID NO: 335591 - RNA, 19 nt, Artificial Sequence
  Description of Artificial Sequence: Synthetic oligonucleotide
  Sense Strand Starting at position 213 of SEQ ID NO: 317250
gcuaacuuucuuuaagaga

SEQ ID NO: 335592 - RNA, 19 nt, Artificial Sequence
  Description of Artificial Sequence: Synthetic oligonucleotide
  Antisense Strand to SEQ ID NO: 335591
ucucuuaaagaaaguuagc

SEQ ID NO: 335593 - RNA, 19 nt, Artificial Sequence
  Description of Artificial Sequence: Synthetic oligonucleotide
  Sense Strand Starting at position 213 of SEQ ID NO: 317263
aagagaagcuguuccucuu

SEQ ID NO: 335594 - RNA, 19 nt, Artificial Sequence
  Description of Artificial Sequence: Synthetic oligonucleotide
  Antisense Strand to SEQ ID NO: 335593
aagaggaacagcuucucuu

SEQ ID NO: 335595 - RNA, 19 nt, Artificial Sequence
  Description of Artificial Sequence: Synthetic oligonucleotide
  Sense Strand Starting at position 213 of SEQ ID NO: 317334
aguuuaaacucauugacgu

SEQ ID NO: 335596 - RNA, 19 nt, Artificial Sequence
  Description of Artificial Sequence: Synthetic oligonucleotide
  Antisense Strand to SEQ ID NO: 335595
acgucaaugaguuuaaacu

SEQ ID NO: 335597 - RNA, 19 nt, Artificial Sequence
  Description of Artificial Sequence: Synthetic oligonucleotide
  Sense Strand Starting at position 213 of SEQ ID NO: 317348
gacguaggucuauauguau

SEQ ID NO: 335598 - RNA, 19 nt, Artificial Sequence
  Description of Artificial Sequence: Synthetic oligonucleotide
  Antisense Strand to SEQ ID NO: 335597
auacauauagaccuacguc

SEQ ID NO: 335599 - RNA, 19 nt, Artificial Sequence
  Description of Artificial Sequence: Synthetic oligonucleotide
  Sense Strand Starting at position 213 of SEQ ID NO: 317388
gcuugaguuccagacauga

SEQ ID NO: 335600 - RNA, 19 nt, Artificial Sequence
  Description of Artificial Sequence: Synthetic oligonucleotide
  Antisense Strand to SEQ ID NO: 335599
ucaugucuggaacucaagc

SEQ ID NO: 335601 - RNA, 19 nt, Artificial Sequence
  Description of Artificial Sequence: Synthetic oligonucleotide
  Sense Strand Starting at position 213 of SEQ ID NO: 317392
gaguuccagacaugacguu

SEQ ID NO: 335602 - RNA, 19 nt, Artificial Sequence
  Description of Artificial Sequence: Synthetic oligonucleotide
  Antisense Strand to SEQ ID NO: 335601
aacgucaugucuggaacuc

SEQ ID NO: 335603 - RNA, 19 nt, Artificial Sequence
  Description of Artificial Sequence: Synthetic oligonucleotide
  Sense Strand Starting at position 213 of SEQ ID NO: 317409
uuaagaugagccugaauaa

SEQ ID NO: 335604 - RNA, 19 nt, Artificial Sequence
  Description of Artificial Sequence: Synthetic oligonucleotide
  Antisense Strand to SEQ ID NO: 335603
uuauucaggcucaucuuaa

SEQ ID NO: 335605 - RNA, 19 nt, Artificial Sequence
  Description of Artificial Sequence: Synthetic oligonucleotide
  Sense Strand Starting at position 213 of SEQ ID NO: 317625
uggagaguuucacugagcu

SEQ ID NO: 335606 - RNA, 19 nt, Artificial Sequence
  Description of Artificial Sequence: Synthetic oligonucleotide
  Antisense Strand to SEQ ID NO: 335605
agcucagugaaacucucca

SEQ ID NO: 335607 - RNA, 19 nt, Artificial Sequence
  Description of Artificial Sequence: Synthetic oligonucleotide
  Sense Strand Starting at position 213 of SEQ ID NO: 317665
gggagauguucuguaagga

SEQ ID NO: 335608 - RNA, 19 nt, Artificial Sequence
  Description of Artificial Sequence: Synthetic oligonucleotide
  Antisense Strand to SEQ ID NO: 335607
uccuuacagaacaucuccc

SEQ ID NO: 335609 - RNA, 19 nt, Artificial Sequence
  Description of Artificial Sequence: Synthetic oligonucleotide
  Sense Strand Starting at position 213 of SEQ ID NO: 317673
uucuguaaggacugcauaa

SEQ ID NO: 335610 - RNA, 19 nt, Artificial Sequence
  Description of Artificial Sequence: Synthetic oligonucleotide
  Antisense Strand to SEQ ID NO: 335609
uuaugcaguccuuacagaa

SEQ ID NO: 335611 - RNA, 19 nt, Artificial Sequence
  Description of Artificial Sequence: Synthetic oligonucleotide
  Sense Strand Starting at position 213 of SEQ ID NO: 317761
gaaagcgaauauucugaaa

SEQ ID NO: 335612 - RNA, 19 nt, Artificial Sequence
  Description of Artificial Sequence: Synthetic oligonucleotide
  Antisense Strand to SEQ ID NO: 335611
uuucagaauauucgcuuuc

SEQ ID NO: 335613 - RNA, 19 nt, Artificial Sequence
  Description of Artificial Sequence: Synthetic oligonucleotide
  Sense Strand Starting at position 213 of SEQ ID NO: 317910
acucaaacuguuuagugua

SEQ ID NO: 335614 - RNA, 19 nt, Artificial Sequence
  Description of Artificial Sequence: Synthetic oligonucleotide
  Antisense Strand to SEQ ID NO: 335613
uacacuaaacaguuugagu

SEQ ID NO: 335615 - RNA, 19 nt, Artificial Sequence
  Description of Artificial Sequence: Synthetic oligonucleotide
  Sense Strand Starting at position 213 of SEQ ID NO: 318147
gugucaagucaauagaaau

SEQ ID NO: 335616 - RNA, 19 nt, Artificial Sequence
  Description of Artificial Sequence: Synthetic oligonucleotide
  Antisense Strand to SEQ ID NO: 335615
auuucuauugacuugacac

SEQ ID NO: 335617 - RNA, 19 nt, Artificial Sequence
  Description of Artificial Sequence: Synthetic oligonucleotide
  Sense Strand Starting at position 213 of SEQ ID NO: 318160
agaaauaugucaccaagca

SEQ ID NO: 335618 - RNA, 19 nt, Artificial Sequence
  Description of Artificial Sequence: Synthetic oligonucleotide
  Antisense Strand to SEQ ID NO: 335617
ugcuuggugacauauuucu

SEQ ID NO: 335619 - RNA, 19 nt, Artificial Sequence
  Description of Artificial Sequence: Synthetic oligonucleotide
  Sense Strand Starting at position 213 of SEQ ID NO: 318289
uggagaagccauggcugaa

SEQ ID NO: 335620 - RNA, 19 nt, Artificial Sequence
  Description of Artificial Sequence: Synthetic oligonucleotide
  Antisense Strand to SEQ ID NO: 335619
uucagccauggcuucucca

SEQ ID NO: 335621 - RNA, 19 nt, Artificial Sequence
  Description of Artificial Sequence: Synthetic oligonucleotide
  Sense Strand Starting at position 213 of SEQ ID NO: 318330
gcaaguuaaacauggagaa

SEQ ID NO: 335622 - RNA, 19 nt, Artificial Sequence
  Description of Artificial Sequence: Synthetic oligonucleotide
  Antisense Strand to SEQ ID NO: 335621
uucuccauguuuaacuugc

SEQ ID NO: 335623 - RNA, 19 nt, Artificial Sequence
  Description of Artificial Sequence: Synthetic oligonucleotide
  Sense Strand Starting at position 213 of SEQ ID NO: 318452
agaugacaucacugcuaac

SEQ ID NO: 335624 - RNA, 19 nt, Artificial Sequence
  Description of Artificial Sequence: Synthetic oligonucleotide
  Antisense Strand to SEQ ID NO: 335623
guuagcagugaugucaucu

SEQ ID NO: 335625 - RNA, 19 nt, Artificial Sequence
  Description of Artificial Sequence: Synthetic oligonucleotide
  Sense Strand Starting at position 213 of SEQ ID NO: 318733
aaagguaugggaugucauu

SEQ ID NO: 335626 - RNA, 19 nt, Artificial Sequence
  Description of Artificial Sequence: Synthetic oligonucleotide
  Antisense Strand to SEQ ID NO: 335625
aaugacaucccauaccuuu

SEQ ID NO: 335627 - RNA, 19 nt, Artificial Sequence
  Description of Artificial Sequence: Synthetic oligonucleotide
  Sense Strand Starting at position 213 of SEQ ID NO: 318901
ucaaguauacacugugaaa

SEQ ID NO: 335628 - RNA, 19 nt, Artificial Sequence
  Description of Artificial Sequence: Synthetic oligonucleotide
  Antisense Strand to SEQ ID NO: 335627
uuucacaguguauacuuga

SEQ ID NO: 335629 - RNA, 19 nt, Artificial Sequence
  Description of Artificial Sequence: Synthetic oligonucleotide
  Sense Strand Starting at position 213 of SEQ ID NO: 319020
augagaccuugucucauac

SEQ ID NO: 335630 - RNA, 19 nt, Artificial Sequence
  Description of Artificial Sequence: Synthetic oligonucleotide
  Antisense Strand to SEQ ID NO: 335629
guaugagacaaggucucau

SEQ ID NO: 335631 - RNA, 19 nt, Artificial Sequence
  Description of Artificial Sequence: Synthetic oligonucleotide
  Sense Strand Starting at position 214 of SEQ ID NO: 315524
guggauugccagcacuaga

SEQ ID NO: 335632 - RNA, 19 nt, Artificial Sequence
  Description of Artificial Sequence: Synthetic oligonucleotide
  Antisense Strand to SEQ ID NO: 335631
ucuagugcuggcaauccac

SEQ ID NO: 335633 - RNA, 19 nt, Artificial Sequence
  Description of Artificial Sequence: Synthetic oligonucleotide
  Sense Strand Starting at position 214 of SEQ ID NO: 315710
ugaagaaucuggcuuggcu

SEQ ID NO: 335634 - RNA, 19 nt, Artificial Sequence
  Description of Artificial Sequence: Synthetic oligonucleotide
  Antisense Strand to SEQ ID NO: 335633
agccaagccagauucuuca

SEQ ID NO: 335635 - RNA, 19 nt, Artificial Sequence
  Description of Artificial Sequence: Synthetic oligonucleotide
  Sense Strand Starting at position 214 of SEQ ID NO: 315712
aagaaucuggcuuggcuua

SEQ ID NO: 335636 - RNA, 19 nt, Artificial Sequence
  Description of Artificial Sequence: Synthetic oligonucleotide
  Antisense Strand to SEQ ID NO: 335635
uaagccaagccagauucuu

SEQ ID NO: 335637 - RNA, 19 nt, Artificial Sequence
  Description of Artificial Sequence: Synthetic oligonucleotide
  Sense Strand Starting at position 214 of SEQ ID NO: 315855
aaugcaaaggcuugguaau

SEQ ID NO: 335638 - RNA, 19 nt, Artificial Sequence
  Description of Artificial Sequence: Synthetic oligonucleotide
  Antisense Strand to SEQ ID NO: 335637
auuaccaagccuuugcauu

SEQ ID NO: 335639 - RNA, 19 nt, Artificial Sequence
  Description of Artificial Sequence: Synthetic oligonucleotide
  Sense Strand Starting at position 214 of SEQ ID NO: 315868
gguaauuaaucagcugaua

SEQ ID NO: 335640 - RNA, 19 nt, Artificial Sequence
  Description of Artificial Sequence: Synthetic oligonucleotide
  Antisense Strand to SEQ ID NO: 335639
uaucagcugauuaauuacc

SEQ ID NO: 335641 - RNA, 19 nt, Artificial Sequence
  Description of Artificial Sequence: Synthetic oligonucleotide
  Sense Strand Starting at position 214 of SEQ ID NO: 315945
gugugauuaaauuaaugug

SEQ ID NO: 335642 - RNA, 19 nt, Artificial Sequence
  Description of Artificial Sequence: Synthetic oligonucleotide
  Antisense Strand to SEQ ID NO: 335641
cacauuaauuuaaucacac

SEQ ID NO: 335643 - RNA, 19 nt, Artificial Sequence
  Description of Artificial Sequence: Synthetic oligonucleotide
  Sense Strand Starting at position 214 of SEQ ID NO: 316030
ucccuaguaccuggaacau

SEQ ID NO: 335644 - RNA, 19 nt, Artificial Sequence
  Description of Artificial Sequence: Synthetic oligonucleotide
  Antisense Strand to SEQ ID NO: 335643
auguuccagguacuaggga

SEQ ID NO: 335645 - RNA, 19 nt, Artificial Sequence
  Description of Artificial Sequence: Synthetic oligonucleotide
  Sense Strand Starting at position 214 of SEQ ID NO: 316390
auagguucaccguauguga

SEQ ID NO: 335646 - RNA, 19 nt, Artificial Sequence
  Description of Artificial Sequence: Synthetic oligonucleotide
  Antisense Strand to SEQ ID NO: 335645
ucacauacggugaaccuau

SEQ ID NO: 335647 - RNA, 19 nt, Artificial Sequence
  Description of Artificial Sequence: Synthetic oligonucleotide
  Sense Strand Starting at position 214 of SEQ ID NO: 316685
uuggacugcuucuucuaga

SEQ ID NO: 335648 - RNA, 19 nt, Artificial Sequence
  Description of Artificial Sequence: Synthetic oligonucleotide
  Antisense Strand to SEQ ID NO: 335647
ucuagaagaagcaguccaa

SEQ ID NO: 335649 - RNA, 19 nt, Artificial Sequence
  Description of Artificial Sequence: Synthetic oligonucleotide
  Sense Strand Starting at position 214 of SEQ ID NO: 316690
cugcuucuucuagagcaga

SEQ ID NO: 335650 - RNA, 19 nt, Artificial Sequence
  Description of Artificial Sequence: Synthetic oligonucleotide
  Antisense Strand to SEQ ID NO: 335649
ucugcucuagaagaagcag

SEQ ID NO: 335651 - RNA, 19 nt, Artificial Sequence
  Description of Artificial Sequence: Synthetic oligonucleotide
  Sense Strand Starting at position 214 of SEQ ID NO: 316747
gcugccaauuauuugguaa

SEQ ID NO: 335652 - RNA, 19 nt, Artificial Sequence
  Description of Artificial Sequence: Synthetic oligonucleotide
  Antisense Strand to SEQ ID NO: 335651
uuaccaaauaauuggcagc

SEQ ID NO: 335653 - RNA, 19 nt, Artificial Sequence
  Description of Artificial Sequence: Synthetic oligonucleotide
  Sense Strand Starting at position 214 of SEQ ID NO: 316793
ugucucuuagcucacgaaa

SEQ ID NO: 335654 - RNA, 19 nt, Artificial Sequence
  Description of Artificial Sequence: Synthetic oligonucleotide
  Antisense Strand to SEQ ID NO: 335653
uuucgugagcuaagagaca

SEQ ID NO: 335655 - RNA, 19 nt, Artificial Sequence
  Description of Artificial Sequence: Synthetic oligonucleotide
  Sense Strand Starting at position 214 of SEQ ID NO: 317360
aguguaaagcccugggaaa

SEQ ID NO: 335656 - RNA, 19 nt, Artificial Sequence
  Description of Artificial Sequence: Synthetic oligonucleotide
  Antisense Strand to SEQ ID NO: 335655
uuucccagggcuuuacacu

SEQ ID NO: 335657 - RNA, 19 nt, Artificial Sequence
  Description of Artificial Sequence: Synthetic oligonucleotide
  Sense Strand Starting at position 214 of SEQ ID NO: 317413
agacaccuucccugacaga

SEQ ID NO: 335658 - RNA, 19 nt, Artificial Sequence
  Description of Artificial Sequence: Synthetic oligonucleotide
  Antisense Strand to SEQ ID NO: 335657
ucugucagggaaggugucu

SEQ ID NO: 335659 - RNA, 19 nt, Artificial Sequence
  Description of Artificial Sequence: Synthetic oligonucleotide
  Sense Strand Starting at position 214 of SEQ ID NO: 317458
gccuuugaagcccauagau

SEQ ID NO: 335660 - RNA, 19 nt, Artificial Sequence
  Description of Artificial Sequence: Synthetic oligonucleotide
  Antisense Strand to SEQ ID NO: 335659
aucuaugggcuucaaaggc

SEQ ID NO: 335661 - RNA, 19 nt, Artificial Sequence
  Description of Artificial Sequence: Synthetic oligonucleotide
  Sense Strand Starting at position 214 of SEQ ID NO: 317733
uacacuauuccuggaagug

SEQ ID NO: 335662 - RNA, 19 nt, Artificial Sequence
  Description of Artificial Sequence: Synthetic oligonucleotide
  Antisense Strand to SEQ ID NO: 335661
cacuuccaggaauagugua

SEQ ID NO: 335663 - RNA, 19 nt, Artificial Sequence
  Description of Artificial Sequence: Synthetic oligonucleotide
  Sense Strand Starting at position 214 of SEQ ID NO: 317760
ucuugaguuuggcuacaag

SEQ ID NO: 335664 - RNA, 19 nt, Artificial Sequence
  Description of Artificial Sequence: Synthetic oligonucleotide
  Antisense Strand to SEQ ID NO: 335663
cuuguagccaaacucaaga

SEQ ID NO: 335665 - RNA, 19 nt, Artificial Sequence
  Description of Artificial Sequence: Synthetic oligonucleotide
  Sense Strand Starting at position 214 of SEQ ID NO: 317763
ugaguuuggcuacaaguca

SEQ ID NO: 335666 - RNA, 19 nt, Artificial Sequence
  Description of Artificial Sequence: Synthetic oligonucleotide
  Antisense Strand to SEQ ID NO: 335665
ugacuuguagccaaacuca

SEQ ID NO: 335667 - RNA, 19 nt, Artificial Sequence
  Description of Artificial Sequence: Synthetic oligonucleotide
  Sense Strand Starting at position 214 of SEQ ID NO: 317791
gugggaaagguguguaaau

SEQ ID NO: 335668 - RNA, 19 nt, Artificial Sequence
  Description of Artificial Sequence: Synthetic oligonucleotide
  Antisense Strand to SEQ ID NO: 335667
auuuacacaccuuucccac

SEQ ID NO: 335669 - RNA, 19 nt, Artificial Sequence
  Description of Artificial Sequence: Synthetic oligonucleotide
  Sense Strand Starting at position 214 of SEQ ID NO: 317792
ugggaaagguguguaaaug

SEQ ID NO: 335670 - RNA, 19 nt, Artificial Sequence
  Description of Artificial Sequence: Synthetic oligonucleotide
  Antisense Strand to SEQ ID NO: 335669
cauuuacacaccuuuccca

SEQ ID NO: 335671 - RNA, 19 nt, Artificial Sequence
  Description of Artificial Sequence: Synthetic oligonucleotide
  Sense Strand Starting at position 214 of SEQ ID NO: 317801
uguguaaaugcccaguaga

SEQ ID NO: 335672 - RNA, 19 nt, Artificial Sequence
  Description of Artificial Sequence: Synthetic oligonucleotide
  Antisense Strand to SEQ ID NO: 335671
ucuacugggcauuuacaca

SEQ ID NO: 335673 - RNA, 19 nt, Artificial Sequence
  Description of Artificial Sequence: Synthetic oligonucleotide
  Sense Strand Starting at position 214 of SEQ ID NO: 318029
gcuagcuguguccugugaa

SEQ ID NO: 335674 - RNA, 19 nt, Artificial Sequence
  Description of Artificial Sequence: Synthetic oligonucleotide
  Antisense Strand to SEQ ID NO: 335673
uucacaggacacagcuagc

SEQ ID NO: 335675 - RNA, 19 nt, Artificial Sequence
  Description of Artificial Sequence: Synthetic oligonucleotide
  Sense Strand Starting at position 214 of SEQ ID NO: 318196
gggccaguuauugaacaug

SEQ ID NO: 335676 - RNA, 19 nt, Artificial Sequence
  Description of Artificial Sequence: Synthetic oligonucleotide
  Antisense Strand to SEQ ID NO: 335675
cauguucaauaacuggccc

SEQ ID NO: 335677 - RNA, 19 nt, Artificial Sequence
  Description of Artificial Sequence: Synthetic oligonucleotide
  Sense Strand Starting at position 214 of SEQ ID NO: 318199
ccaguuauugaacauguuu

SEQ ID NO: 335678 - RNA, 19 nt, Artificial Sequence
  Description of Artificial Sequence: Synthetic oligonucleotide
  Antisense Strand to SEQ ID NO: 335677
aaacauguucaauaacugg

SEQ ID NO: 335679 - RNA, 19 nt, Artificial Sequence
  Description of Artificial Sequence: Synthetic oligonucleotide
  Sense Strand Starting at position 214 of SEQ ID NO: 318204
uauugaacauguuugaaug

SEQ ID NO: 335680 - RNA, 19 nt, Artificial Sequence
  Description of Artificial Sequence: Synthetic oligonucleotide
  Antisense Strand to SEQ ID NO: 335679
cauucaaacauguucaaua

SEQ ID NO: 335681 - RNA, 19 nt, Artificial Sequence
  Description of Artificial Sequence: Synthetic oligonucleotide
  Sense Strand Starting at position 214 of SEQ ID NO: 318205
auugaacauguuugaaugu

SEQ ID NO: 335682 - RNA, 19 nt, Artificial Sequence
  Description of Artificial Sequence: Synthetic oligonucleotide
  Antisense Strand to SEQ ID NO: 335681
acauucaaacauguucaau

SEQ ID NO: 335683 - RNA, 19 nt, Artificial Sequence
  Description of Artificial Sequence: Synthetic oligonucleotide
  Sense Strand Starting at position 214 of SEQ ID NO: 318223
ucagucuucucacuuauga

SEQ ID NO: 335684 - RNA, 19 nt, Artificial Sequence
  Description of Artificial Sequence: Synthetic oligonucleotide
  Antisense Strand to SEQ ID NO: 335683
ucauaagugagaagacuga

SEQ ID NO: 335685 - RNA, 19 nt, Artificial Sequence
  Description of Artificial Sequence: Synthetic oligonucleotide
  Sense Strand Starting at position 214 of SEQ ID NO: 318289
ggaaaccuugccuguaaau

SEQ ID NO: 335686 - RNA, 19 nt, Artificial Sequence
  Description of Artificial Sequence: Synthetic oligonucleotide
  Antisense Strand to SEQ ID NO: 335685
auuuacaggcaagguuucc

SEQ ID NO: 335687 - RNA, 19 nt, Artificial Sequence
  Description of Artificial Sequence: Synthetic oligonucleotide
  Sense Strand Starting at position 214 of SEQ ID NO: 318300
cuguaaaucauguggcaga

SEQ ID NO: 335688 - RNA, 19 nt, Artificial Sequence
  Description of Artificial Sequence: Synthetic oligonucleotide
  Antisense Strand to SEQ ID NO: 335687
ucugccacaugauuuacag

SEQ ID NO: 335689 - RNA, 19 nt, Artificial Sequence
  Description of Artificial Sequence: Synthetic oligonucleotide
  Sense Strand Starting at position 214 of SEQ ID NO: 318390
uugaccuuugcacaaagau

SEQ ID NO: 335690 - RNA, 19 nt, Artificial Sequence
  Description of Artificial Sequence: Synthetic oligonucleotide
  Antisense Strand to SEQ ID NO: 335689
aucuuugugcaaaggucaa

SEQ ID NO: 335691 - RNA, 19 nt, Artificial Sequence
  Description of Artificial Sequence: Synthetic oligonucleotide
  Sense Strand Starting at position 214 of SEQ ID NO: 318410
ucccuucugucacuacaga

SEQ ID NO: 335692 - RNA, 19 nt, Artificial Sequence
  Description of Artificial Sequence: Synthetic oligonucleotide
  Antisense Strand to SEQ ID NO: 335691
ucuguagugacagaaggga

SEQ ID NO: 335693 - RNA, 19 nt, Artificial Sequence
  Description of Artificial Sequence: Synthetic oligonucleotide
  Sense Strand Starting at position 214 of SEQ ID NO: 318421
acuacagaggucuguaaac

SEQ ID NO: 335694 - RNA, 19 nt, Artificial Sequence
  Description of Artificial Sequence: Synthetic oligonucleotide
  Antisense Strand to SEQ ID NO: 335693
guuuacagaccucuguagu

SEQ ID NO: 335695 - RNA, 19 nt, Artificial Sequence
  Description of Artificial Sequence: Synthetic oligonucleotide
  Sense Strand Starting at position 214 of SEQ ID NO: 318666
ugugacauaugaucaauua

SEQ ID NO: 335696 - RNA, 19 nt, Artificial Sequence
  Description of Artificial Sequence: Synthetic oligonucleotide
  Antisense Strand to SEQ ID NO: 335695
uaauugaucauaugucaca

SEQ ID NO: 335697 - RNA, 19 nt, Artificial Sequence
  Description of Artificial Sequence: Synthetic oligonucleotide
  Sense Strand Starting at position 214 of SEQ ID NO: 318786
uugaaaggcuagcuaucaa

SEQ ID NO: 335698 - RNA, 19 nt, Artificial Sequence
  Description of Artificial Sequence: Synthetic oligonucleotide
  Antisense Strand to SEQ ID NO: 335697
uugauagcuagccuuucaa

SEQ ID NO: 335699 - RNA, 19 nt, Artificial Sequence
  Description of Artificial Sequence: Synthetic oligonucleotide
  Sense Strand Starting at position 214 of SEQ ID NO: 318956
auuagaaagcaguaucauu

SEQ ID NO: 335700 - RNA, 19 nt, Artificial Sequence
  Description of Artificial Sequence: Synthetic oligonucleotide
  Antisense Strand to SEQ ID NO: 335699
aaugauacugcuuucuaau

SEQ ID NO: 335701 - RNA, 19 nt, Artificial Sequence
  Description of Artificial Sequence: Synthetic oligonucleotide
  Sense Strand Starting at position 214 of SEQ ID NO: 319012
gcacuuuggagucauagag

SEQ ID NO: 335702 - RNA, 19 nt, Artificial Sequence
  Description of Artificial Sequence: Synthetic oligonucleotide
  Antisense Strand to SEQ ID NO: 335701
cucuaugacuccaaagugc

SEQ ID NO: 335703 - RNA, 19 nt, Artificial Sequence
  Description of Artificial Sequence: Synthetic oligonucleotide
  Sense Strand Starting at position 214 of SEQ ID NO: 319145
ugucaugacgguuaaauaa

SEQ ID NO: 335704 - RNA, 19 nt, Artificial Sequence
  Description of Artificial Sequence: Synthetic oligonucleotide
  Antisense Strand to SEQ ID NO: 335703
uuauuuaaccgucaugaca

SEQ ID NO: 335705 - RNA, 19 nt, Artificial Sequence
  Description of Artificial Sequence: Synthetic oligonucleotide
  Sense Strand Starting at position 214 of SEQ ID NO: 319155
guuaaauaacauggcauau

SEQ ID NO: 335706 - RNA, 19 nt, Artificial Sequence
  Description of Artificial Sequence: Synthetic oligonucleotide
  Antisense Strand to SEQ ID NO: 335705
auaugccauguuauuuaac

SEQ ID NO: 335707 - RNA, 19 nt, Artificial Sequence
  Description of Artificial Sequence: Synthetic oligonucleotide
  Sense Strand Starting at position 214 of SEQ ID NO: 319172
auauauggugcuuagcaca

SEQ ID NO: 335708 - RNA, 19 nt, Artificial Sequence
  Description of Artificial Sequence: Synthetic oligonucleotide
  Antisense Strand to SEQ ID NO: 335707
ugugcuaagcaccauauau

SEQ ID NO: 335709 - RNA, 19 nt, Artificial Sequence
  Description of Artificial Sequence: Synthetic oligonucleotide
  Sense Strand Starting at position 214 of SEQ ID NO: 319185
agcacagauccuggcaaua

SEQ ID NO: 335710 - RNA, 19 nt, Artificial Sequence
  Description of Artificial Sequence: Synthetic oligonucleotide
  Antisense Strand to SEQ ID NO: 335709
uauugccaggaucugugcu

SEQ ID NO: 335711 - RNA, 19 nt, Artificial Sequence
  Description of Artificial Sequence: Synthetic oligonucleotide
  Sense Strand Starting at position 215 of SEQ ID NO: 315242
cccucauaaguauaacagu

SEQ ID NO: 335712 - RNA, 19 nt, Artificial Sequence
  Description of Artificial Sequence: Synthetic oligonucleotide
  Antisense Strand to SEQ ID NO: 335711
acuguuauacuuaugaggg

SEQ ID NO: 335713 - RNA, 19 nt, Artificial Sequence
  Description of Artificial Sequence: Synthetic oligonucleotide
  Sense Strand Starting at position 215 of SEQ ID NO: 315358
ggcugcugacucugacaaa

SEQ ID NO: 335714 - RNA, 19 nt, Artificial Sequence
  Description of Artificial Sequence: Synthetic oligonucleotide
  Antisense Strand to SEQ ID NO: 335713
uuugucagagucagcagcc

SEQ ID NO: 335715 - RNA, 19 nt, Artificial Sequence
  Description of Artificial Sequence: Synthetic oligonucleotide
  Sense Strand Starting at position 215 of SEQ ID NO: 315502
ccagucaaucuugaagcua

SEQ ID NO: 335716 - RNA, 19 nt, Artificial Sequence
  Description of Artificial Sequence: Synthetic oligonucleotide
  Antisense Strand to SEQ ID NO: 335715
uagcuucaagauugacugg

SEQ ID NO: 335717 - RNA, 19 nt, Artificial Sequence
  Description of Artificial Sequence: Synthetic oligonucleotide
  Sense Strand Starting at position 215 of SEQ ID NO: 315794
agucuaguugauuagagua

SEQ ID NO: 335718 - RNA, 19 nt, Artificial Sequence
  Description of Artificial Sequence: Synthetic oligonucleotide
  Antisense Strand to SEQ ID NO: 335717
uacucuaaucaacuagacu

SEQ ID NO: 335719 - RNA, 19 nt, Artificial Sequence
  Description of Artificial Sequence: Synthetic oligonucleotide
  Sense Strand Starting at position 215 of SEQ ID NO: 315889
ucuaaucgauggucugaaa

SEQ ID NO: 335720 - RNA, 19 nt, Artificial Sequence
  Description of Artificial Sequence: Synthetic oligonucleotide
  Antisense Strand to SEQ ID NO: 335719
uuucagaccaucgauuaga

SEQ ID NO: 335721 - RNA, 19 nt, Artificial Sequence
  Description of Artificial Sequence: Synthetic oligonucleotide
  Sense Strand Starting at position 215 of SEQ ID NO: 315939
agcagucugacugagugau

SEQ ID NO: 335722 - RNA, 19 nt, Artificial Sequence
  Description of Artificial Sequence: Synthetic oligonucleotide
  Antisense Strand to SEQ ID NO: 335721
aucacucagucagacugcu

SEQ ID NO: 335723 - RNA, 19 nt, Artificial Sequence
  Description of Artificial Sequence: Synthetic oligonucleotide
  Sense Strand Starting at position 215 of SEQ ID NO: 315949
cugagugauacaggacacu

SEQ ID NO: 335724 - RNA, 19 nt, Artificial Sequence
  Description of Artificial Sequence: Synthetic oligonucleotide
  Antisense Strand to SEQ ID NO: 335723
aguguccuguaucacucag

SEQ ID NO: 335725 - RNA, 19 nt, Artificial Sequence
  Description of Artificial Sequence: Synthetic oligonucleotide
  Sense Strand Starting at position 215 of SEQ ID NO: 315974
guguuaagcauugagacug

SEQ ID NO: 335726 - RNA, 19 nt, Artificial Sequence
  Description of Artificial Sequence: Synthetic oligonucleotide
  Antisense Strand to SEQ ID NO: 335725
cagucucaaugcuuaacac

SEQ ID NO: 335727 - RNA, 19 nt, Artificial Sequence
  Description of Artificial Sequence: Synthetic oligonucleotide
  Sense Strand Starting at position 215 of SEQ ID NO: 315979
aagcauugagacugugaca

SEQ ID NO: 335728 - RNA, 19 nt, Artificial Sequence
  Description of Artificial Sequence: Synthetic oligonucleotide
  Antisense Strand to SEQ ID NO: 335727
ugucacagucucaaugcuu

SEQ ID NO: 335729 - RNA, 19 nt, Artificial Sequence
  Description of Artificial Sequence: Synthetic oligonucleotide
  Sense Strand Starting at position 215 of SEQ ID NO: 316176
cauacuucuguggaugcaa

SEQ ID NO: 335730 - RNA, 19 nt, Artificial Sequence
  Description of Artificial Sequence: Synthetic oligonucleotide
  Antisense Strand to SEQ ID NO: 335729
uugcauccacagaaguaug

SEQ ID NO: 335731 - RNA, 19 nt, Artificial Sequence
  Description of Artificial Sequence: Synthetic oligonucleotide
  Sense Strand Starting at position 215 of SEQ ID NO: 316212
guuaguacaguuuaaugua

SEQ ID NO: 335732 - RNA, 19 nt, Artificial Sequence
  Description of Artificial Sequence: Synthetic oligonucleotide
  Antisense Strand to SEQ ID NO: 335731
uacauuaaacuguacuaac

SEQ ID NO: 335733 - RNA, 19 nt, Artificial Sequence
  Description of Artificial Sequence: Synthetic oligonucleotide
  Sense Strand Starting at position 215 of SEQ ID NO: 316372
ucaggcuuacuaugauacu

SEQ ID NO: 335734 - RNA, 19 nt, Artificial Sequence
  Description of Artificial Sequence: Synthetic oligonucleotide
  Antisense Strand to SEQ ID NO: 335733
aguaucauaguaagccuga

SEQ ID NO: 335735 - RNA, 19 nt, Artificial Sequence
  Description of Artificial Sequence: Synthetic oligonucleotide
  Sense Strand Starting at position 215 of SEQ ID NO: 316388
acucucauacuguggaaua

SEQ ID NO: 335736 - RNA, 19 nt, Artificial Sequence
  Description of Artificial Sequence: Synthetic oligonucleotide
  Antisense Strand to SEQ ID NO: 335735
uauuccacaguaugagagu

SEQ ID NO: 335737 - RNA, 19 nt, Artificial Sequence
  Description of Artificial Sequence: Synthetic oligonucleotide
  Sense Strand Starting at position 215 of SEQ ID NO: 316553
guauuuggaugagaaauac

SEQ ID NO: 335738 - RNA, 19 nt, Artificial Sequence
  Description of Artificial Sequence: Synthetic oligonucleotide
  Antisense Strand to SEQ ID NO: 335737
guauuucucauccaaauac

SEQ ID NO: 335739 - RNA, 19 nt, Artificial Sequence
  Description of Artificial Sequence: Synthetic oligonucleotide
  Sense Strand Starting at position 215 of SEQ ID NO: 316635
guugauggcuuuguaauuu

SEQ ID NO: 335740 - RNA, 19 nt, Artificial Sequence
  Description of Artificial Sequence: Synthetic oligonucleotide
  Antisense Strand to SEQ ID NO: 335739
aaauuacaaagccaucaac

SEQ ID NO: 335741 - RNA, 19 nt, Artificial Sequence
  Description of Artificial Sequence: Synthetic oligonucleotide
  Sense Strand Starting at position 215 of SEQ ID NO: 316718
ugccaauuacuccagagau

SEQ ID NO: 335742 - RNA, 19 nt, Artificial Sequence
  Description of Artificial Sequence: Synthetic oligonucleotide
  Antisense Strand to SEQ ID NO: 335741
aucucuggaguaauuggca

SEQ ID NO: 335743 - RNA, 19 nt, Artificial Sequence
  Description of Artificial Sequence: Synthetic oligonucleotide
  Sense Strand Starting at position 215 of SEQ ID NO: 316889
ugauuuguccuuuggugau

SEQ ID NO: 335744 - RNA, 19 nt, Artificial Sequence
  Description of Artificial Sequence: Synthetic oligonucleotide
  Antisense Strand to SEQ ID NO: 335743
aucaccaaaggacaaauca

SEQ ID NO: 335745 - RNA, 19 nt, Artificial Sequence
  Description of Artificial Sequence: Synthetic oligonucleotide
  Sense Strand Starting at position 215 of SEQ ID NO: 316893
uuguccuuuggugaucaau

SEQ ID NO: 335746 - RNA, 19 nt, Artificial Sequence
  Description of Artificial Sequence: Synthetic oligonucleotide
  Antisense Strand to SEQ ID NO: 335745
auugaucaccaaaggacaa

SEQ ID NO: 335747 - RNA, 19 nt, Artificial Sequence
  Description of Artificial Sequence: Synthetic oligonucleotide
  Sense Strand Starting at position 215 of SEQ ID NO: 316993
cuggaagucuuacccuuga

SEQ ID NO: 335748 - RNA, 19 nt, Artificial Sequence
  Description of Artificial Sequence: Synthetic oligonucleotide
  Antisense Strand to SEQ ID NO: 335747
ucaaggguaagacuuccag

SEQ ID NO: 335749 - RNA, 19 nt, Artificial Sequence
  Description of Artificial Sequence: Synthetic oligonucleotide
  Sense Strand Starting at position 215 of SEQ ID NO: 317237
aguaaugugguucaggacu

SEQ ID NO: 335750 - RNA, 19 nt, Artificial Sequence
  Description of Artificial Sequence: Synthetic oligonucleotide
  Antisense Strand to SEQ ID NO: 335749
aguccugaaccacauuacu

SEQ ID NO: 335751 - RNA, 19 nt, Artificial Sequence
  Description of Artificial Sequence: Synthetic oligonucleotide
  Sense Strand Starting at position 215 of SEQ ID NO: 317243
gugguucaggacugaguau

SEQ ID NO: 335752 - RNA, 19 nt, Artificial Sequence
  Description of Artificial Sequence: Synthetic oligonucleotide
  Antisense Strand to SEQ ID NO: 335751
auacucaguccugaaccac

SEQ ID NO: 335753 - RNA, 19 nt, Artificial Sequence
  Description of Artificial Sequence: Synthetic oligonucleotide
  Sense Strand Starting at position 215 of SEQ ID NO: 317259
uauaacguucgacagaaca

SEQ ID NO: 335754 - RNA, 19 nt, Artificial Sequence
  Description of Artificial Sequence: Synthetic oligonucleotide
  Antisense Strand to SEQ ID NO: 335753
uguucugucgaacguuaua

SEQ ID NO: 335755 - RNA, 19 nt, Artificial Sequence
  Description of Artificial Sequence: Synthetic oligonucleotide
  Sense Strand Starting at position 215 of SEQ ID NO: 317267
ucgacagaacaauguugaa

SEQ ID NO: 335756 - RNA, 19 nt, Artificial Sequence
  Description of Artificial Sequence: Synthetic oligonucleotide
  Antisense Strand to SEQ ID NO: 335755
uucaacauuguucugucga

SEQ ID NO: 335757 - RNA, 19 nt, Artificial Sequence
  Description of Artificial Sequence: Synthetic oligonucleotide
  Sense Strand Starting at position 215 of SEQ ID NO: 317279
uguugaaauuguucucuga

SEQ ID NO: 335758 - RNA, 19 nt, Artificial Sequence
  Description of Artificial Sequence: Synthetic oligonucleotide
  Antisense Strand to SEQ ID NO: 335757
ucagagaacaauuucaaca

SEQ ID NO: 335759 - RNA, 19 nt, Artificial Sequence
  Description of Artificial Sequence: Synthetic oligonucleotide
  Sense Strand Starting at position 215 of SEQ ID NO: 317281
uugaaauuguucucugaaa

SEQ ID NO: 335760 - RNA, 19 nt, Artificial Sequence
  Description of Artificial Sequence: Synthetic oligonucleotide
  Antisense Strand to SEQ ID NO: 335759
uuucagagaacaauuucaa

SEQ ID NO: 335761 - RNA, 19 nt, Artificial Sequence
  Description of Artificial Sequence: Synthetic oligonucleotide
  Sense Strand Starting at position 215 of SEQ ID NO: 317282
ugaaauuguucucugaaau

SEQ ID NO: 335762 - RNA, 19 nt, Artificial Sequence
  Description of Artificial Sequence: Synthetic oligonucleotide
  Antisense Strand to SEQ ID NO: 335761
auuucagagaacaauuuca

SEQ ID NO: 335763 - RNA, 19 nt, Artificial Sequence
  Description of Artificial Sequence: Synthetic oligonucleotide
  Sense Strand Starting at position 215 of SEQ ID NO: 317397
ggauaucacgcagagcagu

SEQ ID NO: 335764 - RNA, 19 nt, Artificial Sequence
  Description of Artificial Sequence: Synthetic oligonucleotide
  Antisense Strand to SEQ ID NO: 335763
acugcucugcgugauaucc

SEQ ID NO: 335765 - RNA, 19 nt, Artificial Sequence
  Description of Artificial Sequence: Synthetic oligonucleotide
  Sense Strand Starting at position 215 of SEQ ID NO: 317599
ggaauagugucagcuauca

SEQ ID NO: 335766 - RNA, 19 nt, Artificial Sequence
  Description of Artificial Sequence: Synthetic oligonucleotide
  Antisense Strand to SEQ ID NO: 335765
ugauagcugacacuauucc

SEQ ID NO: 335767 - RNA, 19 nt, Artificial Sequence
  Description of Artificial Sequence: Synthetic oligonucleotide
  Sense Strand Starting at position 215 of SEQ ID NO: 317635
ucuccucuugcagggaaau

SEQ ID NO: 335768 - RNA, 19 nt, Artificial Sequence
  Description of Artificial Sequence: Synthetic oligonucleotide
  Antisense Strand to SEQ ID NO: 335767
auuucccugcaagaggaga

SEQ ID NO: 335769 - RNA, 19 nt, Artificial Sequence
  Description of Artificial Sequence: Synthetic oligonucleotide
  Sense Strand Starting at position 215 of SEQ ID NO: 317785
agaguuuauccaugccuaa

SEQ ID NO: 335770 - RNA, 19 nt, Artificial Sequence
  Description of Artificial Sequence: Synthetic oligonucleotide
  Antisense Strand to SEQ ID NO: 335769
uuaggcauggauaaacucu

SEQ ID NO: 335771 - RNA, 19 nt, Artificial Sequence
  Description of Artificial Sequence: Synthetic oligonucleotide
  Sense Strand Starting at position 215 of SEQ ID NO: 317860
agcuauuaggcuuauuaca

SEQ ID NO: 335772 - RNA, 19 nt, Artificial Sequence
  Description of Artificial Sequence: Synthetic oligonucleotide
  Antisense Strand to SEQ ID NO: 335771
uguaauaagccuaauagcu

SEQ ID NO: 335773 - RNA, 19 nt, Artificial Sequence
  Description of Artificial Sequence: Synthetic oligonucleotide
  Sense Strand Starting at position 215 of SEQ ID NO: 318079
ggacuacuguaaguuugau

SEQ ID NO: 335774 - RNA, 19 nt, Artificial Sequence
  Description of Artificial Sequence: Synthetic oligonucleotide
  Antisense Strand to SEQ ID NO: 335773
aucaaacuuacaguagucc

SEQ ID NO: 335775 - RNA, 19 nt, Artificial Sequence
  Description of Artificial Sequence: Synthetic oligonucleotide
  Sense Strand Starting at position 215 of SEQ ID NO: 318134
cauacaaccguaugaauga

SEQ ID NO: 335776 - RNA, 19 nt, Artificial Sequence
  Description of Artificial Sequence: Synthetic oligonucleotide
  Antisense Strand to SEQ ID NO: 335775
ucauucauacgguuguaug

SEQ ID NO: 335777 - RNA, 19 nt, Artificial Sequence
  Description of Artificial Sequence: Synthetic oligonucleotide
  Sense Strand Starting at position 215 of SEQ ID NO: 318231
aguuguaauccugagaugg

SEQ ID NO: 335778 - RNA, 19 nt, Artificial Sequence
  Description of Artificial Sequence: Synthetic oligonucleotide
  Antisense Strand to SEQ ID NO: 335777
ccaucucaggauuacaacu

SEQ ID NO: 335779 - RNA, 19 nt, Artificial Sequence
  Description of Artificial Sequence: Synthetic oligonucleotide
  Sense Strand Starting at position 215 of SEQ ID NO: 318284
ucagguugucaucauguau

SEQ ID NO: 335780 - RNA, 19 nt, Artificial Sequence
  Description of Artificial Sequence: Synthetic oligonucleotide
  Antisense Strand to SEQ ID NO: 335779
auacaugaugacaaccuga

SEQ ID NO: 335781 - RNA, 19 nt, Artificial Sequence
  Description of Artificial Sequence: Synthetic oligonucleotide
  Sense Strand Starting at position 215 of SEQ ID NO: 318333
gugaauauggacgaugcua

SEQ ID NO: 335782 - RNA, 19 nt, Artificial Sequence
  Description of Artificial Sequence: Synthetic oligonucleotide
  Antisense Strand to SEQ ID NO: 335781
uagcaucguccauauucac

SEQ ID NO: 335783 - RNA, 19 nt, Artificial Sequence
  Description of Artificial Sequence: Synthetic oligonucleotide
  Sense Strand Starting at position 215 of SEQ ID NO: 318713
agacauaacugcucugggu

SEQ ID NO: 335784 - RNA, 19 nt, Artificial Sequence
  Description of Artificial Sequence: Synthetic oligonucleotide
  Antisense Strand to SEQ ID NO: 335783
acccagagcaguuaugucu

SEQ ID NO: 335785 - RNA, 19 nt, Artificial Sequence
  Description of Artificial Sequence: Synthetic oligonucleotide
  Sense Strand Starting at position 215 of SEQ ID NO: 318865
acauuacaagccuggagaa

SEQ ID NO: 335786 - RNA, 19 nt, Artificial Sequence
  Description of Artificial Sequence: Synthetic oligonucleotide
  Antisense Strand to SEQ ID NO: 335785
uucuccaggcuuguaaugu

SEQ ID NO: 335787 - RNA, 19 nt, Artificial Sequence
  Description of Artificial Sequence: Synthetic oligonucleotide
  Sense Strand Starting at position 215 of SEQ ID NO: 319028
gugaaacaguuguuccaaa

SEQ ID NO: 335788 - RNA, 19 nt, Artificial Sequence
  Description of Artificial Sequence: Synthetic oligonucleotide
  Antisense Strand to SEQ ID NO: 335787
uuuggaacaacuguuucac

SEQ ID NO: 335789 - RNA, 19 nt, Artificial Sequence
  Description of Artificial Sequence: Synthetic oligonucleotide
  Sense Strand Starting at position 215 of SEQ ID NO: 319142
cuaccugagccaugcauuu

SEQ ID NO: 335790 - RNA, 19 nt, Artificial Sequence
  Description of Artificial Sequence: Synthetic oligonucleotide
  Antisense Strand to SEQ ID NO: 335789
aaaugcauggcucagguag

SEQ ID NO: 335791 - RNA, 19 nt, Artificial Sequence
  Description of Artificial Sequence: Synthetic oligonucleotide
  Sense Strand Starting at position 216 of SEQ ID NO: 315525
ugccaugacuuccucaagu

SEQ ID NO: 335792 - RNA, 19 nt, Artificial Sequence
  Description of Artificial Sequence: Synthetic oligonucleotide
  Antisense Strand to SEQ ID NO: 335791
acuugaggaagucauggca

SEQ ID NO: 335793 - RNA, 19 nt, Artificial Sequence
  Description of Artificial Sequence: Synthetic oligonucleotide
  Sense Strand Starting at position 216 of SEQ ID NO: 315554
acuaaccuccugggugaaa

SEQ ID NO: 335794 - RNA, 19 nt, Artificial Sequence
  Description of Artificial Sequence: Synthetic oligonucleotide
  Antisense Strand to SEQ ID NO: 335793
uuucacccaggagguuagu

SEQ ID NO: 335795 - RNA, 19 nt, Artificial Sequence
  Description of Artificial Sequence: Synthetic oligonucleotide
  Sense Strand Starting at position 216 of SEQ ID NO: 315647
gagcccauucucugcagau

SEQ ID NO: 335796 - RNA, 19 nt, Artificial Sequence
  Description of Artificial Sequence: Synthetic oligonucleotide
  Antisense Strand to SEQ ID NO: 335795
aucugcagagaaugggcuc

SEQ ID NO: 335797 - RNA, 19 nt, Artificial Sequence
  Description of Artificial Sequence: Synthetic oligonucleotide
  Sense Strand Starting at position 216 of SEQ ID NO: 315648
agcccauucucugcagauu

SEQ ID NO: 335798 - RNA, 19 nt, Artificial Sequence
  Description of Artificial Sequence: Synthetic oligonucleotide
  Antisense Strand to SEQ ID NO: 335797
aaucugcagagaaugggcu

SEQ ID NO: 335799 - RNA, 19 nt, Artificial Sequence
  Description of Artificial Sequence: Synthetic oligonucleotide
  Sense Strand Starting at position 216 of SEQ ID NO: 315649
gcccauucucugcagauua

SEQ ID NO: 335800 - RNA, 19 nt, Artificial Sequence
  Description of Artificial Sequence: Synthetic oligonucleotide
  Antisense Strand to SEQ ID NO: 335799
uaaucugcagagaaugggc

SEQ ID NO: 335801 - RNA, 19 nt, Artificial Sequence
  Description of Artificial Sequence: Synthetic oligonucleotide
  Sense Strand Starting at position 216 of SEQ ID NO: 315683
uccagugguugcucauaau

SEQ ID NO: 335802 - RNA, 19 nt, Artificial Sequence
  Description of Artificial Sequence: Synthetic oligonucleotide
  Antisense Strand to SEQ ID NO: 335801
auuaugagcaaccacugga

SEQ ID NO: 335803 - RNA, 19 nt, Artificial Sequence
  Description of Artificial Sequence: Synthetic oligonucleotide
  Sense Strand Starting at position 216 of SEQ ID NO: 315689
gguugcucauaaucacuga

SEQ ID NO: 335804 - RNA, 19 nt, Artificial Sequence
  Description of Artificial Sequence: Synthetic oligonucleotide
  Antisense Strand to SEQ ID NO: 335803
ucagugauuaugagcaacc

SEQ ID NO: 335805 - RNA, 19 nt, Artificial Sequence
  Description of Artificial Sequence: Synthetic oligonucleotide
  Sense Strand Starting at position 216 of SEQ ID NO: 315753
aggucacaugcaggagaua

SEQ ID NO: 335806 - RNA, 19 nt, Artificial Sequence
  Description of Artificial Sequence: Synthetic oligonucleotide
  Antisense Strand to SEQ ID NO: 335805
uaucuccugcaugugaccu

SEQ ID NO: 335807 - RNA, 19 nt, Artificial Sequence
  Description of Artificial Sequence: Synthetic oligonucleotide
  Sense Strand Starting at position 216 of SEQ ID NO: 315765
ggagauaggccaugagauu

SEQ ID NO: 335808 - RNA, 19 nt, Artificial Sequence
  Description of Artificial Sequence: Synthetic oligonucleotide
  Antisense Strand to SEQ ID NO: 335807
aaucucauggccuaucucc

SEQ ID NO: 335809 - RNA, 19 nt, Artificial Sequence
  Description of Artificial Sequence: Synthetic oligonucleotide
  Sense Strand Starting at position 216 of SEQ ID NO: 315927
gguuaugauggcuauggca

SEQ ID NO: 335810 - RNA, 19 nt, Artificial Sequence
  Description of Artificial Sequence: Synthetic oligonucleotide
  Antisense Strand to SEQ ID NO: 335809
ugccauagccaucauaacc

SEQ ID NO: 335811 - RNA, 19 nt, Artificial Sequence
  Description of Artificial Sequence: Synthetic oligonucleotide
  Sense Strand Starting at position 216 of SEQ ID NO: 315929
uuaugauggcuauggcaaa

SEQ ID NO: 335812 - RNA, 19 nt, Artificial Sequence
  Description of Artificial Sequence: Synthetic oligonucleotide
  Antisense Strand to SEQ ID NO: 335811
uuugccauagccaucauaa

SEQ ID NO: 335813 - RNA, 19 nt, Artificial Sequence
  Description of Artificial Sequence: Synthetic oligonucleotide
  Sense Strand Starting at position 216 of SEQ ID NO: 315995
cagagucgggaugaaaguu

SEQ ID NO: 335814 - RNA, 19 nt, Artificial Sequence
  Description of Artificial Sequence: Synthetic oligonucleotide
  Antisense Strand to SEQ ID NO: 335813
aacuuucaucccgacucug

SEQ ID NO: 335815 - RNA, 19 nt, Artificial Sequence
  Description of Artificial Sequence: Synthetic oligonucleotide
  Sense Strand Starting at position 216 of SEQ ID NO: 316051
gcacaagacaugugcuuag

SEQ ID NO: 335816 - RNA, 19 nt, Artificial Sequence
  Description of Artificial Sequence: Synthetic oligonucleotide
  Antisense Strand to SEQ ID NO: 335815
cuaagcacaugucuugugc

SEQ ID NO: 335817 - RNA, 19 nt, Artificial Sequence
  Description of Artificial Sequence: Synthetic oligonucleotide
  Sense Strand Starting at position 216 of SEQ ID NO: 316054
caagacaugugcuuagcaa

SEQ ID NO: 335818 - RNA, 19 nt, Artificial Sequence
  Description of Artificial Sequence: Synthetic oligonucleotide
  Antisense Strand to SEQ ID NO: 335817
uugcuaagcacaugucuug

SEQ ID NO: 335819 - RNA, 19 nt, Artificial Sequence
  Description of Artificial Sequence: Synthetic oligonucleotide
  Sense Strand Starting at position 216 of SEQ ID NO: 316101
agcucuuccgcgggaaaca

SEQ ID NO: 335820 - RNA, 19 nt, Artificial Sequence
  Description of Artificial Sequence: Synthetic oligonucleotide
  Antisense Strand to SEQ ID NO: 335819
uguuucccgcggaagagcu

SEQ ID NO: 335821 - RNA, 19 nt, Artificial Sequence
  Description of Artificial Sequence: Synthetic oligonucleotide
  Sense Strand Starting at position 216 of SEQ ID NO: 316153
ccaggaagcuuucugaaag

SEQ ID NO: 335822 - RNA, 19 nt, Artificial Sequence
  Description of Artificial Sequence: Synthetic oligonucleotide
  Antisense Strand to SEQ ID NO: 335821
cuuucagaaagcuuccugg

SEQ ID NO: 335823 - RNA, 19 nt, Artificial Sequence
  Description of Artificial Sequence: Synthetic oligonucleotide
  Sense Strand Starting at position 216 of SEQ ID NO: 316161
cuuucugaaaguuggguaa

SEQ ID NO: 335824 - RNA, 19 nt, Artificial Sequence
  Description of Artificial Sequence: Synthetic oligonucleotide
  Antisense Strand to SEQ ID NO: 335823
uuacccaacuuucagaaag

SEQ ID NO: 335825 - RNA, 19 nt, Artificial Sequence
  Description of Artificial Sequence: Synthetic oligonucleotide
  Sense Strand Starting at position 216 of SEQ ID NO: 316278
caugguccuuuguugagaa

SEQ ID NO: 335826 - RNA, 19 nt, Artificial Sequence
  Description of Artificial Sequence: Synthetic oligonucleotide
  Antisense Strand to SEQ ID NO: 335825
uucucaacaaaggaccaug

SEQ ID NO: 335827 - RNA, 19 nt, Artificial Sequence
  Description of Artificial Sequence: Synthetic oligonucleotide
  Sense Strand Starting at position 216 of SEQ ID NO: 316314
aaacgaagauccugaggau

SEQ ID NO: 335828 - RNA, 19 nt, Artificial Sequence
  Description of Artificial Sequence: Synthetic oligonucleotide
  Antisense Strand to SEQ ID NO: 335827
auccucaggaucuucguuu

SEQ ID NO: 335829 - RNA, 19 nt, Artificial Sequence
  Description of Artificial Sequence: Synthetic oligonucleotide
  Sense Strand Starting at position 216 of SEQ ID NO: 316320
agauccugaggaugguuua

SEQ ID NO: 335830 - RNA, 19 nt, Artificial Sequence
  Description of Artificial Sequence: Synthetic oligonucleotide
  Antisense Strand to SEQ ID NO: 335829
uaaaccauccucaggaucu

SEQ ID NO: 335831 - RNA, 19 nt, Artificial Sequence
  Description of Artificial Sequence: Synthetic oligonucleotide
  Sense Strand Starting at position 216 of SEQ ID NO: 316332
ugguuuagcaaagggugaa

SEQ ID NO: 335832 - RNA, 19 nt, Artificial Sequence
  Description of Artificial Sequence: Synthetic oligonucleotide
  Antisense Strand to SEQ ID NO: 335831
uucacccuuugcuaaacca

SEQ ID NO: 335833 - RNA, 19 nt, Artificial Sequence
  Description of Artificial Sequence: Synthetic oligonucleotide
  Sense Strand Starting at position 216 of SEQ ID NO: 316333
gguuuagcaaagggugaaa

SEQ ID NO: 335834 - RNA, 19 nt, Artificial Sequence
  Description of Artificial Sequence: Synthetic oligonucleotide
  Antisense Strand to SEQ ID NO: 335833
uuucacccuuugcuaaacc

SEQ ID NO: 335835 - RNA, 19 nt, Artificial Sequence
  Description of Artificial Sequence: Synthetic oligonucleotide
  Sense Strand Starting at position 216 of SEQ ID NO: 316623
guccguuuccuggccugau

SEQ ID NO: 335836 - RNA, 19 nt, Artificial Sequence
  Description of Artificial Sequence: Synthetic oligonucleotide
  Antisense Strand to SEQ ID NO: 335835
aucaggccaggaaacggac

SEQ ID NO: 335837 - RNA, 19 nt, Artificial Sequence
  Description of Artificial Sequence: Synthetic oligonucleotide
  Sense Strand Starting at position 216 of SEQ ID NO: 317314
cggccuuucgcgguaauag

SEQ ID NO: 335838 - RNA, 19 nt, Artificial Sequence
  Description of Artificial Sequence: Synthetic oligonucleotide
  Antisense Strand to SEQ ID NO: 335837
cuauuaccgcgaaaggccg

SEQ ID NO: 335839 - RNA, 19 nt, Artificial Sequence
  Description of Artificial Sequence: Synthetic oligonucleotide
  Sense Strand Starting at position 216 of SEQ ID NO: 317323
gcgguaauagcggcucagu

SEQ ID NO: 335840 - RNA, 19 nt, Artificial Sequence
  Description of Artificial Sequence: Synthetic oligonucleotide
  Antisense Strand to SEQ ID NO: 335839
acugagccgcuauuaccgc

SEQ ID NO: 335841 - RNA, 19 nt, Artificial Sequence
  Description of Artificial Sequence: Synthetic oligonucleotide
  Sense Strand Starting at position 216 of SEQ ID NO: 317655
gcgagcugccguccaguua

SEQ ID NO: 335842 - RNA, 19 nt, Artificial Sequence
  Description of Artificial Sequence: Synthetic oligonucleotide
  Antisense Strand to SEQ ID NO: 335841
uaacuggacggcagcucgc

SEQ ID NO: 335843 - RNA, 19 nt, Artificial Sequence
  Description of Artificial Sequence: Synthetic oligonucleotide
  Sense Strand Starting at position 216 of SEQ ID NO: 317791
gccucuaaccgugcaguau

SEQ ID NO: 335844 - RNA, 19 nt, Artificial Sequence
  Description of Artificial Sequence: Synthetic oligonucleotide
  Antisense Strand to SEQ ID NO: 335843
auacugcacgguuagaggc

SEQ ID NO: 335845 - RNA, 19 nt, Artificial Sequence
  Description of Artificial Sequence: Synthetic oligonucleotide
  Sense Strand Starting at position 216 of SEQ ID NO: 317792
ccucuaaccgugcaguauu

SEQ ID NO: 335846 - RNA, 19 nt, Artificial Sequence
  Description of Artificial Sequence: Synthetic oligonucleotide
  Antisense Strand to SEQ ID NO: 335845
aauacugcacgguuagagg

SEQ ID NO: 335847 - RNA, 19 nt, Artificial Sequence
  Description of Artificial Sequence: Synthetic oligonucleotide
  Sense Strand Starting at position 216 of SEQ ID NO: 318019
cuuauuggaugcucuuaga

SEQ ID NO: 335848 - RNA, 19 nt, Artificial Sequence
  Description of Artificial Sequence: Synthetic oligonucleotide
  Antisense Strand to SEQ ID NO: 335847
ucuaagagcauccaauaag

SEQ ID NO: 335849 - RNA, 19 nt, Artificial Sequence
  Description of Artificial Sequence: Synthetic oligonucleotide
  Sense Strand Starting at position 216 of SEQ ID NO: 318112
agcaaauaauagcuaaagu

SEQ ID NO: 335850 - RNA, 19 nt, Artificial Sequence
  Description of Artificial Sequence: Synthetic oligonucleotide
  Antisense Strand to SEQ ID NO: 335849
acuuuagcuauuauuugcu

SEQ ID NO: 335851 - RNA, 19 nt, Artificial Sequence
  Description of Artificial Sequence: Synthetic oligonucleotide
  Sense Strand Starting at position 216 of SEQ ID NO: 318156
cuguucccaguguguuaau

SEQ ID NO: 335852 - RNA, 19 nt, Artificial Sequence
  Description of Artificial Sequence: Synthetic oligonucleotide
  Antisense Strand to SEQ ID NO: 335851
auuaacacacugggaacag

SEQ ID NO: 335853 - RNA, 19 nt, Artificial Sequence
  Description of Artificial Sequence: Synthetic oligonucleotide
  Sense Strand Starting at position 216 of SEQ ID NO: 318165
guguguuaaucuguauuaa

SEQ ID NO: 335854 - RNA, 19 nt, Artificial Sequence
  Description of Artificial Sequence: Synthetic oligonucleotide
  Antisense Strand to SEQ ID NO: 335853
uuaauacagauuaacacac

SEQ ID NO: 335855 - RNA, 19 nt, Artificial Sequence
  Description of Artificial Sequence: Synthetic oligonucleotide
  Sense Strand Starting at position 216 of SEQ ID NO: 318198
acaacucugugacauagga

SEQ ID NO: 335856 - RNA, 19 nt, Artificial Sequence
  Description of Artificial Sequence: Synthetic oligonucleotide
  Antisense Strand to SEQ ID NO: 335855
uccuaugucacagaguugu

SEQ ID NO: 335857 - RNA, 19 nt, Artificial Sequence
  Description of Artificial Sequence: Synthetic oligonucleotide
  Sense Strand Starting at position 216 of SEQ ID NO: 318292
gggccauaagugcaugauu

SEQ ID NO: 335858 - RNA, 19 nt, Artificial Sequence
  Description of Artificial Sequence: Synthetic oligonucleotide
  Antisense Strand to SEQ ID NO: 335857
aaucaugcacuuauggccc

SEQ ID NO: 335859 - RNA, 19 nt, Artificial Sequence
  Description of Artificial Sequence: Synthetic oligonucleotide
  Sense Strand Starting at position 216 of SEQ ID NO: 318294
gccauaagugcaugauuua

SEQ ID NO: 335860 - RNA, 19 nt, Artificial Sequence
  Description of Artificial Sequence: Synthetic oligonucleotide
  Antisense Strand to SEQ ID NO: 335859
uaaaucaugcacuuauggc

SEQ ID NO: 335861 - RNA, 19 nt, Artificial Sequence
  Description of Artificial Sequence: Synthetic oligonucleotide
  Sense Strand Starting at position 216 of SEQ ID NO: 318677
aauaguucucccugucgua

SEQ ID NO: 335862 - RNA, 19 nt, Artificial Sequence
  Description of Artificial Sequence: Synthetic oligonucleotide
  Antisense Strand to SEQ ID NO: 335861
uacgacagggagaacuauu

SEQ ID NO: 335863 - RNA, 19 nt, Artificial Sequence
  Description of Artificial Sequence: Synthetic oligonucleotide
  Sense Strand Starting at position 216 of SEQ ID NO: 318687
ccugucguaucucugaaua

SEQ ID NO: 335864 - RNA, 19 nt, Artificial Sequence
  Description of Artificial Sequence: Synthetic oligonucleotide
  Antisense Strand to SEQ ID NO: 335863
uauucagagauacgacagg

SEQ ID NO: 335865 - RNA, 19 nt, Artificial Sequence
  Description of Artificial Sequence: Synthetic oligonucleotide
  Sense Strand Starting at position 216 of SEQ ID NO: 318732
gguuuaauacuuggcucaa

SEQ ID NO: 335866 - RNA, 19 nt, Artificial Sequence
  Description of Artificial Sequence: Synthetic oligonucleotide
  Antisense Strand to SEQ ID NO: 335865
uugagccaaguauuaaacc

SEQ ID NO: 335867 - RNA, 19 nt, Artificial Sequence
  Description of Artificial Sequence: Synthetic oligonucleotide
  Sense Strand Starting at position 216 of SEQ ID NO: 318733
guuuaauacuuggcucaac

SEQ ID NO: 335868 - RNA, 19 nt, Artificial Sequence
  Description of Artificial Sequence: Synthetic oligonucleotide
  Antisense Strand to SEQ ID NO: 335867
guugagccaaguauuaaac

SEQ ID NO: 335869 - RNA, 19 nt, Artificial Sequence
  Description of Artificial Sequence: Synthetic oligonucleotide
  Sense Strand Starting at position 216 of SEQ ID NO: 319196
uggaauuauuaccaugaca

SEQ ID NO: 335870 - RNA, 19 nt, Artificial Sequence
  Description of Artificial Sequence: Synthetic oligonucleotide
  Antisense Strand to SEQ ID NO: 335869
ugucaugguaauaauucca

SEQ ID NO: 335871 - RNA, 19 nt, Artificial Sequence
  Description of Artificial Sequence: Synthetic oligonucleotide
  Sense Strand Starting at position 217 of SEQ ID NO: 315282
cuagguuucuacguauuua

SEQ ID NO: 335872 - RNA, 19 nt, Artificial Sequence
  Description of Artificial Sequence: Synthetic oligonucleotide
  Antisense Strand to SEQ ID NO: 335871
uaaauacguagaaaccuag

SEQ ID NO: 335873 - RNA, 19 nt, Artificial Sequence
  Description of Artificial Sequence: Synthetic oligonucleotide
  Sense Strand Starting at position 217 of SEQ ID NO: 315286
guuucuacguauuuaugua

SEQ ID NO: 335874 - RNA, 19 nt, Artificial Sequence
  Description of Artificial Sequence: Synthetic oligonucleotide
  Antisense Strand to SEQ ID NO: 335873
uacauaaauacguagaaac

SEQ ID NO: 335875 - RNA, 19 nt, Artificial Sequence
  Description of Artificial Sequence: Synthetic oligonucleotide
  Sense Strand Starting at position 217 of SEQ ID NO: 315290
cuacguauuuauguauuga

SEQ ID NO: 335876 - RNA, 19 nt, Artificial Sequence
  Description of Artificial Sequence: Synthetic oligonucleotide
  Antisense Strand to SEQ ID NO: 335875
ucaauacauaaauacguag

SEQ ID NO: 335877 - RNA, 19 nt, Artificial Sequence
  Description of Artificial Sequence: Synthetic oligonucleotide
  Sense Strand Starting at position 217 of SEQ ID NO: 315347
aagggacuccauuggaguu

SEQ ID NO: 335878 - RNA, 19 nt, Artificial Sequence
  Description of Artificial Sequence: Synthetic oligonucleotide
  Antisense Strand to SEQ ID NO: 335877
aacuccaauggagucccuu

SEQ ID NO: 335879 - RNA, 19 nt, Artificial Sequence
  Description of Artificial Sequence: Synthetic oligonucleotide
  Sense Strand Starting at position 217 of SEQ ID NO: 315348
agggacuccauuggaguua

SEQ ID NO: 335880 - RNA, 19 nt, Artificial Sequence
  Description of Artificial Sequence: Synthetic oligonucleotide
  Antisense Strand to SEQ ID NO: 335879
uaacuccaauggagucccu

SEQ ID NO: 335881 - RNA, 19 nt, Artificial Sequence
  Description of Artificial Sequence: Synthetic oligonucleotide
  Sense Strand Starting at position 217 of SEQ ID NO: 315357
auuggaguuacuggaccaa

SEQ ID NO: 335882 - RNA, 19 nt, Artificial Sequence
  Description of Artificial Sequence: Synthetic oligonucleotide
  Antisense Strand to SEQ ID NO: 335881
uugguccaguaacuccaau

SEQ ID NO: 335883 - RNA, 19 nt, Artificial Sequence
  Description of Artificial Sequence: Synthetic oligonucleotide
  Sense Strand Starting at position 217 of SEQ ID NO: 315380
gcagccuucccagaucaca

SEQ ID NO: 335884 - RNA, 19 nt, Artificial Sequence
  Description of Artificial Sequence: Synthetic oligonucleotide
  Antisense Strand to SEQ ID NO: 335883
ugugaucugggaaggcugc

SEQ ID NO: 335885 - RNA, 19 nt, Artificial Sequence
  Description of Artificial Sequence: Synthetic oligonucleotide
  Sense Strand Starting at position 217 of SEQ ID NO: 315455
cccuguucugacuggaaga

SEQ ID NO: 335886 - RNA, 19 nt, Artificial Sequence
  Description of Artificial Sequence: Synthetic oligonucleotide
  Antisense Strand to SEQ ID NO: 335885
ucuuccagucagaacaggg

SEQ ID NO: 335887 - RNA, 19 nt, Artificial Sequence
  Description of Artificial Sequence: Synthetic oligonucleotide
  Sense Strand Starting at position 217 of SEQ ID NO: 315456
ccuguucugacuggaagag

SEQ ID NO: 335888 - RNA, 19 nt, Artificial Sequence
  Description of Artificial Sequence: Synthetic oligonucleotide
  Antisense Strand to SEQ ID NO: 335887
cucuuccagucagaacagg

SEQ ID NO: 335889 - RNA, 19 nt, Artificial Sequence
  Description of Artificial Sequence: Synthetic oligonucleotide
  Sense Strand Starting at position 217 of SEQ ID NO: 315457
cuguucugacuggaagagu

SEQ ID NO: 335890 - RNA, 19 nt, Artificial Sequence
  Description of Artificial Sequence: Synthetic oligonucleotide
  Antisense Strand to SEQ ID NO: 335889
acucuuccagucagaacag

SEQ ID NO: 335891 - RNA, 19 nt, Artificial Sequence
  Description of Artificial Sequence: Synthetic oligonucleotide
  Sense Strand Starting at position 217 of SEQ ID NO: 315508
cucagauaauucccagagu

SEQ ID NO: 335892 - RNA, 19 nt, Artificial Sequence
  Description of Artificial Sequence: Synthetic oligonucleotide
  Antisense Strand to SEQ ID NO: 335891
acucugggaauuaucugag

SEQ ID NO: 335893 - RNA, 19 nt, Artificial Sequence
  Description of Artificial Sequence: Synthetic oligonucleotide
  Sense Strand Starting at position 217 of SEQ ID NO: 315831
caugccaugguuuaaauga

SEQ ID NO: 335894 - RNA, 19 nt, Artificial Sequence
  Description of Artificial Sequence: Synthetic oligonucleotide
  Antisense Strand to SEQ ID NO: 335893
ucauuuaaaccauggcaug

SEQ ID NO: 335895 - RNA, 19 nt, Artificial Sequence
  Description of Artificial Sequence: Synthetic oligonucleotide
  Sense Strand Starting at position 217 of SEQ ID NO: 315876
agcaauaugucaccugaug

SEQ ID NO: 335896 - RNA, 19 nt, Artificial Sequence
  Description of Artificial Sequence: Synthetic oligonucleotide
  Antisense Strand to SEQ ID NO: 335895
caucaggugacauauugcu

SEQ ID NO: 335897 - RNA, 19 nt, Artificial Sequence
  Description of Artificial Sequence: Synthetic oligonucleotide
  Sense Strand Starting at position 217 of SEQ ID NO: 315885
ucaccugauguuggagaau

SEQ ID NO: 335898 - RNA, 19 nt, Artificial Sequence
  Description of Artificial Sequence: Synthetic oligonucleotide
  Antisense Strand to SEQ ID NO: 335897
auucuccaacaucagguga

SEQ ID NO: 335899 - RNA, 19 nt, Artificial Sequence
  Description of Artificial Sequence: Synthetic oligonucleotide
  Sense Strand Starting at position 217 of SEQ ID NO: 315911
gaaguauuccuggagcuua

SEQ ID NO: 335900 - RNA, 19 nt, Artificial Sequence
  Description of Artificial Sequence: Synthetic oligonucleotide
  Antisense Strand to SEQ ID NO: 335899
uaagcuccaggaauacuuc

SEQ ID NO: 335901 - RNA, 19 nt, Artificial Sequence
  Description of Artificial Sequence: Synthetic oligonucleotide
  Sense Strand Starting at position 217 of SEQ ID NO: 315949
ccugucuuguauuuguaaa

SEQ ID NO: 335902 - RNA, 19 nt, Artificial Sequence
  Description of Artificial Sequence: Synthetic oligonucleotide
  Antisense Strand to SEQ ID NO: 335901
uuuacaaauacaagacagg

SEQ ID NO: 335903 - RNA, 19 nt, Artificial Sequence
  Description of Artificial Sequence: Synthetic oligonucleotide
  Sense Strand Starting at position 217 of SEQ ID NO: 315950
cugucuuguauuuguaaag

SEQ ID NO: 335904 - RNA, 19 nt, Artificial Sequence
  Description of Artificial Sequence: Synthetic oligonucleotide
  Antisense Strand to SEQ ID NO: 335903
cuuuacaaauacaagacag

SEQ ID NO: 335905 - RNA, 19 nt, Artificial Sequence
  Description of Artificial Sequence: Synthetic oligonucleotide
  Sense Strand Starting at position 217 of SEQ ID NO: 316082
ccacauggcuuccuggaga

SEQ ID NO: 335906 - RNA, 19 nt, Artificial Sequence
  Description of Artificial Sequence: Synthetic oligonucleotide
  Antisense Strand to SEQ ID NO: 335905
ucuccaggaagccaugugg

SEQ ID NO: 335907 - RNA, 19 nt, Artificial Sequence
  Description of Artificial Sequence: Synthetic oligonucleotide
  Sense Strand Starting at position 217 of SEQ ID NO: 316184
gguuauuuacuacguucua

SEQ ID NO: 335908 - RNA, 19 nt, Artificial Sequence
  Description of Artificial Sequence: Synthetic oligonucleotide
  Antisense Strand to SEQ ID NO: 335907
uagaacguaguaaauaacc

SEQ ID NO: 335909 - RNA, 19 nt, Artificial Sequence
  Description of Artificial Sequence: Synthetic oligonucleotide
  Sense Strand Starting at position 217 of SEQ ID NO: 316185
guuauuuacuacguucuaa

SEQ ID NO: 335910 - RNA, 19 nt, Artificial Sequence
  Description of Artificial Sequence: Synthetic oligonucleotide
  Antisense Strand to SEQ ID NO: 335909
uuagaacguaguaaauaac

SEQ ID NO: 335911 - RNA, 19 nt, Artificial Sequence
  Description of Artificial Sequence: Synthetic oligonucleotide
  Sense Strand Starting at position 217 of SEQ ID NO: 317418
ccuucccaagucugagaau

SEQ ID NO: 335912 - RNA, 19 nt, Artificial Sequence
  Description of Artificial Sequence: Synthetic oligonucleotide
  Antisense Strand to SEQ ID NO: 335911
auucucagacuugggaagg

SEQ ID NO: 335913 - RNA, 19 nt, Artificial Sequence
  Description of Artificial Sequence: Synthetic oligonucleotide
  Sense Strand Starting at position 217 of SEQ ID NO: 317540
ggagaagaauccuauuugu

SEQ ID NO: 335914 - RNA, 19 nt, Artificial Sequence
  Description of Artificial Sequence: Synthetic oligonucleotide
  Antisense Strand to SEQ ID NO: 335913
acaaauaggauucuucucc

SEQ ID NO: 335915 - RNA, 19 nt, Artificial Sequence
  Description of Artificial Sequence: Synthetic oligonucleotide
  Sense Strand Starting at position 217 of SEQ ID NO: 317638
cuaguauuugcaggacggu

SEQ ID NO: 335916 - RNA, 19 nt, Artificial Sequence
  Description of Artificial Sequence: Synthetic oligonucleotide
  Antisense Strand to SEQ ID NO: 335915
accguccugcaaauacuag

SEQ ID NO: 335917 - RNA, 19 nt, Artificial Sequence
  Description of Artificial Sequence: Synthetic oligonucleotide
  Sense Strand Starting at position 217 of SEQ ID NO: 317677
acacaucaccugcaguauu

SEQ ID NO: 335918 - RNA, 19 nt, Artificial Sequence
  Description of Artificial Sequence: Synthetic oligonucleotide
  Antisense Strand to SEQ ID NO: 335917
aauacugcaggugaugugu

SEQ ID NO: 335919 - RNA, 19 nt, Artificial Sequence
  Description of Artificial Sequence: Synthetic oligonucleotide
  Sense Strand Starting at position 217 of SEQ ID NO: 317763
uugaauugugaguagagua

SEQ ID NO: 335920 - RNA, 19 nt, Artificial Sequence
  Description of Artificial Sequence: Synthetic oligonucleotide
  Antisense Strand to SEQ ID NO: 335919
uacucuacucacaauucaa

SEQ ID NO: 335921 - RNA, 19 nt, Artificial Sequence
  Description of Artificial Sequence: Synthetic oligonucleotide
  Sense Strand Starting at position 217 of SEQ ID NO: 317768
uugugaguagaguaguaug

SEQ ID NO: 335922 - RNA, 19 nt, Artificial Sequence
  Description of Artificial Sequence: Synthetic oligonucleotide
  Antisense Strand to SEQ ID NO: 335921
cauacuacucuacucacaa

SEQ ID NO: 335923 - RNA, 19 nt, Artificial Sequence
  Description of Artificial Sequence: Synthetic oligonucleotide
  Sense Strand Starting at position 217 of SEQ ID NO: 317816
guaugugcccuucucgagu

SEQ ID NO: 335924 - RNA, 19 nt, Artificial Sequence
  Description of Artificial Sequence: Synthetic oligonucleotide
  Antisense Strand to SEQ ID NO: 335923
acucgagaagggcacauac

SEQ ID NO: 335925 - RNA, 19 nt, Artificial Sequence
  Description of Artificial Sequence: Synthetic oligonucleotide
  Sense Strand Starting at position 217 of SEQ ID NO: 317821
ugcccuucucgaguuguau

SEQ ID NO: 335926 - RNA, 19 nt, Artificial Sequence
  Description of Artificial Sequence: Synthetic oligonucleotide
  Antisense Strand to SEQ ID NO: 335925
auacaacucgagaagggca

SEQ ID NO: 335927 - RNA, 19 nt, Artificial Sequence
  Description of Artificial Sequence: Synthetic oligonucleotide
  Sense Strand Starting at position 217 of SEQ ID NO: 317822
gcccuucucgaguuguauu

SEQ ID NO: 335928 - RNA, 19 nt, Artificial Sequence
  Description of Artificial Sequence: Synthetic oligonucleotide
  Antisense Strand to SEQ ID NO: 335927
aauacaacucgagaagggc

SEQ ID NO: 335929 - RNA, 19 nt, Artificial Sequence
  Description of Artificial Sequence: Synthetic oligonucleotide
  Sense Strand Starting at position 217 of SEQ ID NO: 317836
guauuauaaauggaguagu

SEQ ID NO: 335930 - RNA, 19 nt, Artificial Sequence
  Description of Artificial Sequence: Synthetic oligonucleotide
  Antisense Strand to SEQ ID NO: 335929
acuacuccauuuauaauac

SEQ ID NO: 335931 - RNA, 19 nt, Artificial Sequence
  Description of Artificial Sequence: Synthetic oligonucleotide
  Sense Strand Starting at position 217 of SEQ ID NO: 318057
ggaguucuuagcuagcaga

SEQ ID NO: 335932 - RNA, 19 nt, Artificial Sequence
  Description of Artificial Sequence: Synthetic oligonucleotide
  Antisense Strand to SEQ ID NO: 335931
ucugcuagcuaagaacucc

SEQ ID NO: 335933 - RNA, 19 nt, Artificial Sequence
  Description of Artificial Sequence: Synthetic oligonucleotide
  Sense Strand Starting at position 217 of SEQ ID NO: 318078
uggguucugccagaaugac

SEQ ID NO: 335934 - RNA, 19 nt, Artificial Sequence
  Description of Artificial Sequence: Synthetic oligonucleotide
  Antisense Strand to SEQ ID NO: 335933
gucauucuggcagaaccca

SEQ ID NO: 335935 - RNA, 19 nt, Artificial Sequence
  Description of Artificial Sequence: Synthetic oligonucleotide
  Sense Strand Starting at position 217 of SEQ ID NO: 318340
ugagaauagagcuagcucu

SEQ ID NO: 335936 - RNA, 19 nt, Artificial Sequence
  Description of Artificial Sequence: Synthetic oligonucleotide
  Antisense Strand to SEQ ID NO: 335935
agagcuagcucuauucuca

SEQ ID NO: 335937 - RNA, 19 nt, Artificial Sequence
  Description of Artificial Sequence: Synthetic oligonucleotide
  Sense Strand Starting at position 217 of SEQ ID NO: 318805
agaaauauugcuugacaag

SEQ ID NO: 335938 - RNA, 19 nt, Artificial Sequence
  Description of Artificial Sequence: Synthetic oligonucleotide
  Antisense Strand to SEQ ID NO: 335937
cuugucaagcaauauuucu

SEQ ID NO: 335939 - RNA, 19 nt, Artificial Sequence
  Description of Artificial Sequence: Synthetic oligonucleotide
  Sense Strand Starting at position 217 of SEQ ID NO: 318806
gaaauauugcuugacaagu

SEQ ID NO: 335940 - RNA, 19 nt, Artificial Sequence
  Description of Artificial Sequence: Synthetic oligonucleotide
  Antisense Strand to SEQ ID NO: 335939
acuugucaagcaauauuuc

SEQ ID NO: 335941 - RNA, 19 nt, Artificial Sequence
  Description of Artificial Sequence: Synthetic oligonucleotide
  Sense Strand Starting at position 217 of SEQ ID NO: 318884
ucuuucuugggauaguuga

SEQ ID NO: 335942 - RNA, 19 nt, Artificial Sequence
  Description of Artificial Sequence: Synthetic oligonucleotide
  Antisense Strand to SEQ ID NO: 335941
ucaacuaucccaagaaaga

SEQ ID NO: 335943 - RNA, 19 nt, Artificial Sequence
  Description of Artificial Sequence: Synthetic oligonucleotide
  Sense Strand Starting at position 217 of SEQ ID NO: 318922
gaaugagagucacuaauuc

SEQ ID NO: 335944 - RNA, 19 nt, Artificial Sequence
  Description of Artificial Sequence: Synthetic oligonucleotide
  Antisense Strand to SEQ ID NO: 335943
gaauuagugacucucauuc

SEQ ID NO: 335945 - RNA, 19 nt, Artificial Sequence
  Description of Artificial Sequence: Synthetic oligonucleotide
  Sense Strand Starting at position 217 of SEQ ID NO: 319048
aaguaaagauguccugaca

SEQ ID NO: 335946 - RNA, 19 nt, Artificial Sequence
  Description of Artificial Sequence: Synthetic oligonucleotide
  Antisense Strand to SEQ ID NO: 335945
ugucaggacaucuuuacuu

SEQ ID NO: 335947 - RNA, 19 nt, Artificial Sequence
  Description of Artificial Sequence: Synthetic oligonucleotide
  Sense Strand Starting at position 217 of SEQ ID NO: 319141
ggcugaauggaaggaguaa

SEQ ID NO: 335948 - RNA, 19 nt, Artificial Sequence
  Description of Artificial Sequence: Synthetic oligonucleotide
  Antisense Strand to SEQ ID NO: 335947
uuacuccuuccauucagcc

SEQ ID NO: 335949 - RNA, 19 nt, Artificial Sequence
  Description of Artificial Sequence: Synthetic oligonucleotide
  Sense Strand Starting at position 217 of SEQ ID NO: 319190
caacguagguaacuauaau

SEQ ID NO: 335950 - RNA, 19 nt, Artificial Sequence
  Description of Artificial Sequence: Synthetic oligonucleotide
  Antisense Strand to SEQ ID NO: 335949
auuauaguuaccuacguug

SEQ ID NO: 335951 - RNA, 19 nt, Artificial Sequence
  Description of Artificial Sequence: Synthetic oligonucleotide
  Sense Strand Starting at position 218 of SEQ ID NO: 315610
ggccauuaccuacauguuu

SEQ ID NO: 335952 - RNA, 19 nt, Artificial Sequence
  Description of Artificial Sequence: Synthetic oligonucleotide
  Antisense Strand to SEQ ID NO: 335951
aaacauguagguaauggcc

SEQ ID NO: 335953 - RNA, 19 nt, Artificial Sequence
  Description of Artificial Sequence: Synthetic oligonucleotide
  Sense Strand Starting at position 218 of SEQ ID NO: 315661
acagaauugucauaaagaa

SEQ ID NO: 335954 - RNA, 19 nt, Artificial Sequence
  Description of Artificial Sequence: Synthetic oligonucleotide
  Antisense Strand to SEQ ID NO: 335953
uucuuuaugacaauucugu

SEQ ID NO: 335955 - RNA, 19 nt, Artificial Sequence
  Description of Artificial Sequence: Synthetic oligonucleotide
  Sense Strand Starting at position 218 of SEQ ID NO: 316098
gaacauacaucauguagag

SEQ ID NO: 335956 - RNA, 19 nt, Artificial Sequence
  Description of Artificial Sequence: Synthetic oligonucleotide
  Antisense Strand to SEQ ID NO: 335955
cucuacaugauguauguuc

SEQ ID NO: 335957 - RNA, 19 nt, Artificial Sequence
  Description of Artificial Sequence: Synthetic oligonucleotide
  Sense Strand Starting at position 218 of SEQ ID NO: 316108
cauguagaggcucaucuau

SEQ ID NO: 335958 - RNA, 19 nt, Artificial Sequence
  Description of Artificial Sequence: Synthetic oligonucleotide
  Antisense Strand to SEQ ID NO: 335957
auagaugagccucuacaug

SEQ ID NO: 335959 - RNA, 19 nt, Artificial Sequence
  Description of Artificial Sequence: Synthetic oligonucleotide
  Sense Strand Starting at position 218 of SEQ ID NO: 316469
gagugagcccuccaucaca

SEQ ID NO: 335960 - RNA, 19 nt, Artificial Sequence
  Description of Artificial Sequence: Synthetic oligonucleotide
  Antisense Strand to SEQ ID NO: 335959
ugugauggagggcucacuc

SEQ ID NO: 335961 - RNA, 19 nt, Artificial Sequence
  Description of Artificial Sequence: Synthetic oligonucleotide
  Sense Strand Starting at position 218 of SEQ ID NO: 316487
augguugccacaugugaac

SEQ ID NO: 335962 - RNA, 19 nt, Artificial Sequence
  Description of Artificial Sequence: Synthetic oligonucleotide
  Antisense Strand to SEQ ID NO: 335961
guucacauguggcaaccau

SEQ ID NO: 335963 - RNA, 19 nt, Artificial Sequence
  Description of Artificial Sequence: Synthetic oligonucleotide
  Sense Strand Starting at position 218 of SEQ ID NO: 316489
gguugccacaugugaacuu

SEQ ID NO: 335964 - RNA, 19 nt, Artificial Sequence
  Description of Artificial Sequence: Synthetic oligonucleotide
  Antisense Strand to SEQ ID NO: 335963
aaguucacauguggcaacc

SEQ ID NO: 335965 - RNA, 19 nt, Artificial Sequence
  Description of Artificial Sequence: Synthetic oligonucleotide
  Sense Strand Starting at position 218 of SEQ ID NO: 316841
gcugcagaggucugugaag

SEQ ID NO: 335966 - RNA, 19 nt, Artificial Sequence
  Description of Artificial Sequence: Synthetic oligonucleotide
  Antisense Strand to SEQ ID NO: 335965
cuucacagaccucugcagc

SEQ ID NO: 335967 - RNA, 19 nt, Artificial Sequence
  Description of Artificial Sequence: Synthetic oligonucleotide
  Sense Strand Starting at position 218 of SEQ ID NO: 316843
ugcagaggucugugaagag

SEQ ID NO: 335968 - RNA, 19 nt, Artificial Sequence
  Description of Artificial Sequence: Synthetic oligonucleotide
  Antisense Strand to SEQ ID NO: 335967
cucuucacagaccucugca

SEQ ID NO: 335969 - RNA, 19 nt, Artificial Sequence
  Description of Artificial Sequence: Synthetic oligonucleotide
  Sense Strand Starting at position 218 of SEQ ID NO: 317107
augguagcuuaucugggaa

SEQ ID NO: 335970 - RNA, 19 nt, Artificial Sequence
  Description of Artificial Sequence: Synthetic oligonucleotide
  Antisense Strand to SEQ ID NO: 335969
uucccagauaagcuaccau

SEQ ID NO: 335971 - RNA, 19 nt, Artificial Sequence
  Description of Artificial Sequence: Synthetic oligonucleotide
  Sense Strand Starting at position 218 of SEQ ID NO: 317260
ucagaaagcuaggcuguuu

SEQ ID NO: 335972 - RNA, 19 nt, Artificial Sequence
  Description of Artificial Sequence: Synthetic oligonucleotide
  Antisense Strand to SEQ ID NO: 335971
aaacagccuagcuuucuga

SEQ ID NO: 335973 - RNA, 19 nt, Artificial Sequence
  Description of Artificial Sequence: Synthetic oligonucleotide
  Sense Strand Starting at position 218 of SEQ ID NO: 317298
caggucaguugcucaaaca

SEQ ID NO: 335974 - RNA, 19 nt, Artificial Sequence
  Description of Artificial Sequence: Synthetic oligonucleotide
  Antisense Strand to SEQ ID NO: 335973
uguuugagcaacugaccug

SEQ ID NO: 335975 - RNA, 19 nt, Artificial Sequence
  Description of Artificial Sequence: Synthetic oligonucleotide
  Sense Strand Starting at position 218 of SEQ ID NO: 317299
aggucaguugcucaaacau

SEQ ID NO: 335976 - RNA, 19 nt, Artificial Sequence
  Description of Artificial Sequence: Synthetic oligonucleotide
  Antisense Strand to SEQ ID NO: 335975
auguuugagcaacugaccu

SEQ ID NO: 335977 - RNA, 19 nt, Artificial Sequence
  Description of Artificial Sequence: Synthetic oligonucleotide
  Sense Strand Starting at position 218 of SEQ ID NO: 317374
gacugaguucuagaccucu

SEQ ID NO: 335978 - RNA, 19 nt, Artificial Sequence
  Description of Artificial Sequence: Synthetic oligonucleotide
  Antisense Strand to SEQ ID NO: 335977
agaggucuagaacucaguc

SEQ ID NO: 335979 - RNA, 19 nt, Artificial Sequence
  Description of Artificial Sequence: Synthetic oligonucleotide
  Sense Strand Starting at position 218 of SEQ ID NO: 317488
ugaggaaacuggucaugca

SEQ ID NO: 335980 - RNA, 19 nt, Artificial Sequence
  Description of Artificial Sequence: Synthetic oligonucleotide
  Antisense Strand to SEQ ID NO: 335979
ugcaugaccaguuuccuca

SEQ ID NO: 335981 - RNA, 19 nt, Artificial Sequence
  Description of Artificial Sequence: Synthetic oligonucleotide
  Sense Strand Starting at position 218 of SEQ ID NO: 317500
ucaugcaauccguggagau

SEQ ID NO: 335982 - RNA, 19 nt, Artificial Sequence
  Description of Artificial Sequence: Synthetic oligonucleotide
  Antisense Strand to SEQ ID NO: 335981
aucuccacggauugcauga

SEQ ID NO: 335983 - RNA, 19 nt, Artificial Sequence
  Description of Artificial Sequence: Synthetic oligonucleotide
  Sense Strand Starting at position 218 of SEQ ID NO: 317501
caugcaauccguggagaua

SEQ ID NO: 335984 - RNA, 19 nt, Artificial Sequence
  Description of Artificial Sequence: Synthetic oligonucleotide
  Antisense Strand to SEQ ID NO: 335983
uaucuccacggauugcaug

SEQ ID NO: 335985 - RNA, 19 nt, Artificial Sequence
  Description of Artificial Sequence: Synthetic oligonucleotide
  Sense Strand Starting at position 218 of SEQ ID NO: 317982
aggaauccuuuaugauaga

SEQ ID NO: 335986 - RNA, 19 nt, Artificial Sequence
  Description of Artificial Sequence: Synthetic oligonucleotide
  Antisense Strand to SEQ ID NO: 335985
ucuaucauaaaggauuccu

SEQ ID NO: 335987 - RNA, 19 nt, Artificial Sequence
  Description of Artificial Sequence: Synthetic oligonucleotide
  Sense Strand Starting at position 218 of SEQ ID NO: 317983
ggaauccuuuaugauagaa

SEQ ID NO: 335988 - RNA, 19 nt, Artificial Sequence
  Description of Artificial Sequence: Synthetic oligonucleotide
  Antisense Strand to SEQ ID NO: 335987
uucuaucauaaaggauucc

SEQ ID NO: 335989 - RNA, 19 nt, Artificial Sequence
  Description of Artificial Sequence: Synthetic oligonucleotide
  Sense Strand Starting at position 218 of SEQ ID NO: 318010
acugguuaccguugggaau

SEQ ID NO: 335990 - RNA, 19 nt, Artificial Sequence
  Description of Artificial Sequence: Synthetic oligonucleotide
  Antisense Strand to SEQ ID NO: 335989
auucccaacgguaaccagu

SEQ ID NO: 335991 - RNA, 19 nt, Artificial Sequence
  Description of Artificial Sequence: Synthetic oligonucleotide
  Sense Strand Starting at position 218 of SEQ ID NO: 318011
cugguuaccguugggaaua

SEQ ID NO: 335992 - RNA, 19 nt, Artificial Sequence
  Description of Artificial Sequence: Synthetic oligonucleotide
  Antisense Strand to SEQ ID NO: 335991
uauucccaacgguaaccag

SEQ ID NO: 335993 - RNA, 19 nt, Artificial Sequence
  Description of Artificial Sequence: Synthetic oligonucleotide
  Sense Strand Starting at position 218 of SEQ ID NO: 318016
uaccguugggaauaucagu

SEQ ID NO: 335994 - RNA, 19 nt, Artificial Sequence
  Description of Artificial Sequence: Synthetic oligonucleotide
  Antisense Strand to SEQ ID NO: 335993
acugauauucccaacggua

SEQ ID NO: 335995 - RNA, 19 nt, Artificial Sequence
  Description of Artificial Sequence: Synthetic oligonucleotide
  Sense Strand Starting at position 218 of SEQ ID NO: 318021
uugggaauaucaguuggau

SEQ ID NO: 335996 - RNA, 19 nt, Artificial Sequence
  Description of Artificial Sequence: Synthetic oligonucleotide
  Antisense Strand to SEQ ID NO: 335995
auccaacugauauucccaa

SEQ ID NO: 335997 - RNA, 19 nt, Artificial Sequence
  Description of Artificial Sequence: Synthetic oligonucleotide
  Sense Strand Starting at position 218 of SEQ ID NO: 318065
ugcugaggauguucuauau

SEQ ID NO: 335998 - RNA, 19 nt, Artificial Sequence
  Description of Artificial Sequence: Synthetic oligonucleotide
  Antisense Strand to SEQ ID NO: 335997
auauagaacauccucagca

SEQ ID NO: 335999 - RNA, 19 nt, Artificial Sequence
  Description of Artificial Sequence: Synthetic oligonucleotide
  Sense Strand Starting at position 218 of SEQ ID NO: 318075
guucuauaucuggguggca

SEQ ID NO: 336000 - RNA, 19 nt, Artificial Sequence
  Description of Artificial Sequence: Synthetic oligonucleotide
  Antisense Strand to SEQ ID NO: 335999
ugccacccagauauagaac

SEQ ID NO: 336001 - RNA, 19 nt, Artificial Sequence
  Description of Artificial Sequence: Synthetic oligonucleotide
  Sense Strand Starting at position 218 of SEQ ID NO: 318096
ugcacaagugucuacagau

SEQ ID NO: 336002 - RNA, 19 nt, Artificial Sequence
  Description of Artificial Sequence: Synthetic oligonucleotide
  Antisense Strand to SEQ ID NO: 336001
aucuguagacacuugugca

SEQ ID NO: 336003 - RNA, 19 nt, Artificial Sequence
  Description of Artificial Sequence: Synthetic oligonucleotide
  Sense Strand Starting at position 218 of SEQ ID NO: 318203
ggcuuaugccuguauggga

SEQ ID NO: 336004 - RNA, 19 nt, Artificial Sequence
  Description of Artificial Sequence: Synthetic oligonucleotide
  Antisense Strand to SEQ ID NO: 336003
ucccauacaggcauaagcc

SEQ ID NO: 336005 - RNA, 19 nt, Artificial Sequence
  Description of Artificial Sequence: Synthetic oligonucleotide
  Sense Strand Starting at position 218 of SEQ ID NO: 318581
caggguucccagugaccua

SEQ ID NO: 336006 - RNA, 19 nt, Artificial Sequence
  Description of Artificial Sequence: Synthetic oligonucleotide
  Antisense Strand to SEQ ID NO: 336005
uaggucacugggaacccug

SEQ ID NO: 336007 - RNA, 19 nt, Artificial Sequence
  Description of Artificial Sequence: Synthetic oligonucleotide
  Sense Strand Starting at position 218 of SEQ ID NO: 318582
aggguucccagugaccuau

SEQ ID NO: 336008 - RNA, 19 nt, Artificial Sequence
  Description of Artificial Sequence: Synthetic oligonucleotide
  Antisense Strand to SEQ ID NO: 336007
auaggucacugggaacccu

SEQ ID NO: 336009 - RNA, 19 nt, Artificial Sequence
  Description of Artificial Sequence: Synthetic oligonucleotide
  Sense Strand Starting at position 218 of SEQ ID NO: 318712
cugcucagcuucuuugaua

SEQ ID NO: 336010 - RNA, 19 nt, Artificial Sequence
  Description of Artificial Sequence: Synthetic oligonucleotide
  Antisense Strand to SEQ ID NO: 336009
uaucaaagaagcugagcag

SEQ ID NO: 336011 - RNA, 19 nt, Artificial Sequence
  Description of Artificial Sequence: Synthetic oligonucleotide
  Sense Strand Starting at position 218 of SEQ ID NO: 318840
ggccuauggccuuacauac

SEQ ID NO: 336012 - RNA, 19 nt, Artificial Sequence
  Description of Artificial Sequence: Synthetic oligonucleotide
  Antisense Strand to SEQ ID NO: 336011
guauguaaggccauaggcc

SEQ ID NO: 336013 - RNA, 19 nt, Artificial Sequence
  Description of Artificial Sequence: Synthetic oligonucleotide
  Sense Strand Starting at position 218 of SEQ ID NO: 318912
uccugaaguccagagucau

SEQ ID NO: 336014 - RNA, 19 nt, Artificial Sequence
  Description of Artificial Sequence: Synthetic oligonucleotide
  Antisense Strand to SEQ ID NO: 336013
augacucuggacuucagga

SEQ ID NO: 336015 - RNA, 19 nt, Artificial Sequence
  Description of Artificial Sequence: Synthetic oligonucleotide
  Sense Strand Starting at position 218 of SEQ ID NO: 318953
acuccucuuggaugucuaa

SEQ ID NO: 336016 - RNA, 19 nt, Artificial Sequence
  Description of Artificial Sequence: Synthetic oligonucleotide
  Antisense Strand to SEQ ID NO: 336015
uuagacauccaagaggagu

SEQ ID NO: 336017 - RNA, 19 nt, Artificial Sequence
  Description of Artificial Sequence: Synthetic oligonucleotide
  Sense Strand Starting at position 218 of SEQ ID NO: 318983
aggguuacguguccauaaa

SEQ ID NO: 336018 - RNA, 19 nt, Artificial Sequence
  Description of Artificial Sequence: Synthetic oligonucleotide
  Antisense Strand to SEQ ID NO: 336017
uuuauggacacguaacccu

SEQ ID NO: 336019 - RNA, 19 nt, Artificial Sequence
  Description of Artificial Sequence: Synthetic oligonucleotide
  Sense Strand Starting at position 218 of SEQ ID NO: 318984
ggguuacguguccauaaau

SEQ ID NO: 336020 - RNA, 19 nt, Artificial Sequence
  Description of Artificial Sequence: Synthetic oligonucleotide
  Antisense Strand to SEQ ID NO: 336019
auuuauggacacguaaccc

SEQ ID NO: 336021 - RNA, 19 nt, Artificial Sequence
  Description of Artificial Sequence: Synthetic oligonucleotide
  Sense Strand Starting at position 218 of SEQ ID NO: 319035
ucuccagucuuucccagau

SEQ ID NO: 336022 - RNA, 19 nt, Artificial Sequence
  Description of Artificial Sequence: Synthetic oligonucleotide
  Antisense Strand to SEQ ID NO: 336021
aucugggaaagacuggaga

SEQ ID NO: 336023 - RNA, 19 nt, Artificial Sequence
  Description of Artificial Sequence: Synthetic oligonucleotide
  Sense Strand Starting at position 218 of SEQ ID NO: 319047
cccagaucaguuuauggca

SEQ ID NO: 336024 - RNA, 19 nt, Artificial Sequence
  Description of Artificial Sequence: Synthetic oligonucleotide
  Antisense Strand to SEQ ID NO: 336023
ugccauaaacugaucuggg

SEQ ID NO: 336025 - RNA, 19 nt, Artificial Sequence
  Description of Artificial Sequence: Synthetic oligonucleotide
  Sense Strand Starting at position 218 of SEQ ID NO: 319081
cuguuaaugccagaaaugu

SEQ ID NO: 336026 - RNA, 19 nt, Artificial Sequence
  Description of Artificial Sequence: Synthetic oligonucleotide
  Antisense Strand to SEQ ID NO: 336025
acauuucuggcauuaacag

SEQ ID NO: 336027 - RNA, 19 nt, Artificial Sequence
  Description of Artificial Sequence: Synthetic oligonucleotide
  Sense Strand Starting at position 218 of SEQ ID NO: 319089
gccagaaauguaggaguca

SEQ ID NO: 336028 - RNA, 19 nt, Artificial Sequence
  Description of Artificial Sequence: Synthetic oligonucleotide
  Antisense Strand to SEQ ID NO: 336027
ugacuccuacauuucuggc

SEQ ID NO: 336029 - RNA, 19 nt, Artificial Sequence
  Description of Artificial Sequence: Synthetic oligonucleotide
  Sense Strand Starting at position 218 of SEQ ID NO: 319090
ccagaaauguaggagucau

SEQ ID NO: 336030 - RNA, 19 nt, Artificial Sequence
  Description of Artificial Sequence: Synthetic oligonucleotide
  Antisense Strand to SEQ ID NO: 336029
augacuccuacauuucugg

SEQ ID NO: 336031 - RNA, 19 nt, Artificial Sequence
  Description of Artificial Sequence: Synthetic oligonucleotide
  Sense Strand Starting at position 219 of SEQ ID NO: 315287
ccucuaucucucuguaagu

SEQ ID NO: 336032 - RNA, 19 nt, Artificial Sequence
  Description of Artificial Sequence: Synthetic oligonucleotide
  Antisense Strand to SEQ ID NO: 336031
acuuacagagagauagagg

SEQ ID NO: 336033 - RNA, 19 nt, Artificial Sequence
  Description of Artificial Sequence: Synthetic oligonucleotide
  Sense Strand Starting at position 219 of SEQ ID NO: 315288
cucuaucucucuguaagua

SEQ ID NO: 336034 - RNA, 19 nt, Artificial Sequence
  Description of Artificial Sequence: Synthetic oligonucleotide
  Antisense Strand to SEQ ID NO: 336033
uacuuacagagagauagag

SEQ ID NO: 336035 - RNA, 19 nt, Artificial Sequence
  Description of Artificial Sequence: Synthetic oligonucleotide
  Sense Strand Starting at position 219 of SEQ ID NO: 315289
ucuaucucucuguaaguau

SEQ ID NO: 336036 - RNA, 19 nt, Artificial Sequence
  Description of Artificial Sequence: Synthetic oligonucleotide
  Antisense Strand to SEQ ID NO: 336035
auacuuacagagagauaga

SEQ ID NO: 336037 - RNA, 19 nt, Artificial Sequence
  Description of Artificial Sequence: Synthetic oligonucleotide
  Sense Strand Starting at position 219 of SEQ ID NO: 315292
aucucucuguaaguaugau

SEQ ID NO: 336038 - RNA, 19 nt, Artificial Sequence
  Description of Artificial Sequence: Synthetic oligonucleotide
  Antisense Strand to SEQ ID NO: 336037
aucauacuuacagagagau

SEQ ID NO: 336039 - RNA, 19 nt, Artificial Sequence
  Description of Artificial Sequence: Synthetic oligonucleotide
  Sense Strand Starting at position 219 of SEQ ID NO: 315547
gccuccauggagugagaaa

SEQ ID NO: 336040 - RNA, 19 nt, Artificial Sequence
  Description of Artificial Sequence: Synthetic oligonucleotide
  Antisense Strand to SEQ ID NO: 336039
uuucucacuccauggaggc

SEQ ID NO: 336041 - RNA, 19 nt, Artificial Sequence
  Description of Artificial Sequence: Synthetic oligonucleotide
  Sense Strand Starting at position 219 of SEQ ID NO: 315579
ccauuugaguccuaauaag

SEQ ID NO: 336042 - RNA, 19 nt, Artificial Sequence
  Description of Artificial Sequence: Synthetic oligonucleotide
  Antisense Strand to SEQ ID NO: 336041
cuuauuaggacucaaaugg

SEQ ID NO: 336043 - RNA, 19 nt, Artificial Sequence
  Description of Artificial Sequence: Synthetic oligonucleotide
  Sense Strand Starting at position 219 of SEQ ID NO: 315888
cuaaguauguacuugucuu

SEQ ID NO: 336044 - RNA, 19 nt, Artificial Sequence
  Description of Artificial Sequence: Synthetic oligonucleotide
  Antisense Strand to SEQ ID NO: 336043
aagacaaguacauacuuag

SEQ ID NO: 336045 - RNA, 19 nt, Artificial Sequence
  Description of Artificial Sequence: Synthetic oligonucleotide
  Sense Strand Starting at position 219 of SEQ ID NO: 317346
cgaagcucuuaggugacaa

SEQ ID NO: 336046 - RNA, 19 nt, Artificial Sequence
  Description of Artificial Sequence: Synthetic oligonucleotide
  Antisense Strand to SEQ ID NO: 336045
uugucaccuaagagcuucg

SEQ ID NO: 336047 - RNA, 19 nt, Artificial Sequence
  Description of Artificial Sequence: Synthetic oligonucleotide
  Sense Strand Starting at position 219 of SEQ ID NO: 317357
ggugacaaucccugaccca

SEQ ID NO: 336048 - RNA, 19 nt, Artificial Sequence
  Description of Artificial Sequence: Synthetic oligonucleotide
  Antisense Strand to SEQ ID NO: 336047
ugggucagggauugucacc

SEQ ID NO: 336049 - RNA, 19 nt, Artificial Sequence
  Description of Artificial Sequence: Synthetic oligonucleotide
  Sense Strand Starting at position 219 of SEQ ID NO: 317456
ccgauuggccgaggguuua

SEQ ID NO: 336050 - RNA, 19 nt, Artificial Sequence
  Description of Artificial Sequence: Synthetic oligonucleotide
  Antisense Strand to SEQ ID NO: 336049
uaaacccucggccaaucgg

SEQ ID NO: 336051 - RNA, 19 nt, Artificial Sequence
  Description of Artificial Sequence: Synthetic oligonucleotide
  Sense Strand Starting at position 219 of SEQ ID NO: 317502
gguugaugacuuggcuaaa

SEQ ID NO: 336052 - RNA, 19 nt, Artificial Sequence
  Description of Artificial Sequence: Synthetic oligonucleotide
  Antisense Strand to SEQ ID NO: 336051
uuuagccaagucaucaacc

SEQ ID NO: 336053 - RNA, 19 nt, Artificial Sequence
  Description of Artificial Sequence: Synthetic oligonucleotide
  Sense Strand Starting at position 219 of SEQ ID NO: 317503
guugaugacuuggcuaaag

SEQ ID NO: 336054 - RNA, 19 nt, Artificial Sequence
  Description of Artificial Sequence: Synthetic oligonucleotide
  Antisense Strand to SEQ ID NO: 336053
cuuuagccaagucaucaac

SEQ ID NO: 336055 - RNA, 19 nt, Artificial Sequence
  Description of Artificial Sequence: Synthetic oligonucleotide
  Sense Strand Starting at position 219 of SEQ ID NO: 317576
uguguuuccuggcccagaa

SEQ ID NO: 336056 - RNA, 19 nt, Artificial Sequence
  Description of Artificial Sequence: Synthetic oligonucleotide
  Antisense Strand to SEQ ID NO: 336055
uucugggccaggaaacaca

SEQ ID NO: 336057 - RNA, 19 nt, Artificial Sequence
  Description of Artificial Sequence: Synthetic oligonucleotide
  Sense Strand Starting at position 219 of SEQ ID NO: 317609
auaguagucguuugaacug

SEQ ID NO: 336058 - RNA, 19 nt, Artificial Sequence
  Description of Artificial Sequence: Synthetic oligonucleotide
  Antisense Strand to SEQ ID NO: 336057
caguucaaacgacuacuau

SEQ ID NO: 336059 - RNA, 19 nt, Artificial Sequence
  Description of Artificial Sequence: Synthetic oligonucleotide
  Sense Strand Starting at position 219 of SEQ ID NO: 317616
ucguuugaacugucgcgaa

SEQ ID NO: 336060 - RNA, 19 nt, Artificial Sequence
  Description of Artificial Sequence: Synthetic oligonucleotide
  Antisense Strand to SEQ ID NO: 336059
uucgcgacaguucaaacga

SEQ ID NO: 336061 - RNA, 19 nt, Artificial Sequence
  Description of Artificial Sequence: Synthetic oligonucleotide
  Sense Strand Starting at position 219 of SEQ ID NO: 317648
gcguuaagccaacuguguu

SEQ ID NO: 336062 - RNA, 19 nt, Artificial Sequence
  Description of Artificial Sequence: Synthetic oligonucleotide
  Antisense Strand to SEQ ID NO: 336061
aacacaguuggcuuaacgc

SEQ ID NO: 336063 - RNA, 19 nt, Artificial Sequence
  Description of Artificial Sequence: Synthetic oligonucleotide
  Sense Strand Starting at position 219 of SEQ ID NO: 317649
cguuaagccaacuguguua

SEQ ID NO: 336064 - RNA, 19 nt, Artificial Sequence
  Description of Artificial Sequence: Synthetic oligonucleotide
  Antisense Strand to SEQ ID NO: 336063
uaacacaguuggcuuaacg

SEQ ID NO: 336065 - RNA, 19 nt, Artificial Sequence
  Description of Artificial Sequence: Synthetic oligonucleotide
  Sense Strand Starting at position 219 of SEQ ID NO: 317651
uuaagccaacuguguuaaa

SEQ ID NO: 336066 - RNA, 19 nt, Artificial Sequence
  Description of Artificial Sequence: Synthetic oligonucleotide
  Antisense Strand to SEQ ID NO: 336065
uuuaacacaguuggcuuaa

SEQ ID NO: 336067 - RNA, 19 nt, Artificial Sequence
  Description of Artificial Sequence: Synthetic oligonucleotide
  Sense Strand Starting at position 219 of SEQ ID NO: 317663
uguuaaagauuguuccucu

SEQ ID NO: 336068 - RNA, 19 nt, Artificial Sequence
  Description of Artificial Sequence: Synthetic oligonucleotide
  Antisense Strand to SEQ ID NO: 336067
agaggaacaaucuuuaaca

SEQ ID NO: 336069 - RNA, 19 nt, Artificial Sequence
  Description of Artificial Sequence: Synthetic oligonucleotide
  Sense Strand Starting at position 219 of SEQ ID NO: 317745
gguugauugugaaagugag

SEQ ID NO: 336070 - RNA, 19 nt, Artificial Sequence
  Description of Artificial Sequence: Synthetic oligonucleotide
  Antisense Strand to SEQ ID NO: 336069
cucacuuucacaaucaacc

SEQ ID NO: 336071 - RNA, 19 nt, Artificial Sequence
  Description of Artificial Sequence: Synthetic oligonucleotide
  Sense Strand Starting at position 219 of SEQ ID NO: 317767
agcagugagccugaaguuu

SEQ ID NO: 336072 - RNA, 19 nt, Artificial Sequence
  Description of Artificial Sequence: Synthetic oligonucleotide
  Antisense Strand to SEQ ID NO: 336071
aaacuucaggcucacugcu

SEQ ID NO: 336073 - RNA, 19 nt, Artificial Sequence
  Description of Artificial Sequence: Synthetic oligonucleotide
  Sense Strand Starting at position 219 of SEQ ID NO: 317816
gcugguugguagguagaaa

SEQ ID NO: 336074 - RNA, 19 nt, Artificial Sequence
  Description of Artificial Sequence: Synthetic oligonucleotide
  Antisense Strand to SEQ ID NO: 336073
uuucuaccuaccaaccagc

SEQ ID NO: 336075 - RNA, 19 nt, Artificial Sequence
  Description of Artificial Sequence: Synthetic oligonucleotide
  Sense Strand Starting at position 219 of SEQ ID NO: 317858
ucuggauuauguuuaccaa

SEQ ID NO: 336076 - RNA, 19 nt, Artificial Sequence
  Description of Artificial Sequence: Synthetic oligonucleotide
  Antisense Strand to SEQ ID NO: 336075
uugguaaacauaauccaga

SEQ ID NO: 336077 - RNA, 19 nt, Artificial Sequence
  Description of Artificial Sequence: Synthetic oligonucleotide
  Sense Strand Starting at position 219 of SEQ ID NO: 317861
ggauuauguuuaccaaggu

SEQ ID NO: 336078 - RNA, 19 nt, Artificial Sequence
  Description of Artificial Sequence: Synthetic oligonucleotide
  Antisense Strand to SEQ ID NO: 336077
accuugguaaacauaaucc

SEQ ID NO: 336079 - RNA, 19 nt, Artificial Sequence
  Description of Artificial Sequence: Synthetic oligonucleotide
  Sense Strand Starting at position 219 of SEQ ID NO: 317904
agucccuaaucuguaaagu

SEQ ID NO: 336080 - RNA, 19 nt, Artificial Sequence
  Description of Artificial Sequence: Synthetic oligonucleotide
  Antisense Strand to SEQ ID NO: 336079
acuuuacagauuagggacu

SEQ ID NO: 336081 - RNA, 19 nt, Artificial Sequence
  Description of Artificial Sequence: Synthetic oligonucleotide
  Sense Strand Starting at position 219 of SEQ ID NO: 317913
ucuguaaaguggguauacu

SEQ ID NO: 336082 - RNA, 19 nt, Artificial Sequence
  Description of Artificial Sequence: Synthetic oligonucleotide
  Antisense Strand to SEQ ID NO: 336081
aguauacccacuuuacaga

SEQ ID NO: 336083 - RNA, 19 nt, Artificial Sequence
  Description of Artificial Sequence: Synthetic oligonucleotide
  Sense Strand Starting at position 219 of SEQ ID NO: 317914
cuguaaaguggguauacua

SEQ ID NO: 336084 - RNA, 19 nt, Artificial Sequence
  Description of Artificial Sequence: Synthetic oligonucleotide
  Antisense Strand to SEQ ID NO: 336083
uaguauacccacuuuacag

SEQ ID NO: 336085 - RNA, 19 nt, Artificial Sequence
  Description of Artificial Sequence: Synthetic oligonucleotide
  Sense Strand Starting at position 219 of SEQ ID NO: 318029
aguuuauccuuagcuucua

SEQ ID NO: 336086 - RNA, 19 nt, Artificial Sequence
  Description of Artificial Sequence: Synthetic oligonucleotide
  Antisense Strand to SEQ ID NO: 336085
uagaagcuaaggauaaacu

SEQ ID NO: 336087 - RNA, 19 nt, Artificial Sequence
  Description of Artificial Sequence: Synthetic oligonucleotide
  Sense Strand Starting at position 219 of SEQ ID NO: 318102
aggcgaaagccagguuuaa

SEQ ID NO: 336088 - RNA, 19 nt, Artificial Sequence
  Description of Artificial Sequence: Synthetic oligonucleotide
  Antisense Strand to SEQ ID NO: 336087
uuaaaccuggcuuucgccu

SEQ ID NO: 336089 - RNA, 19 nt, Artificial Sequence
  Description of Artificial Sequence: Synthetic oligonucleotide
  Sense Strand Starting at position 219 of SEQ ID NO: 318111
ccagguuuaaauggguuua

SEQ ID NO: 336090 - RNA, 19 nt, Artificial Sequence
  Description of Artificial Sequence: Synthetic oligonucleotide
  Antisense Strand to SEQ ID NO: 336089
uaaacccauuuaaaccugg

SEQ ID NO: 336091 - RNA, 19 nt, Artificial Sequence
  Description of Artificial Sequence: Synthetic oligonucleotide
  Sense Strand Starting at position 219 of SEQ ID NO: 318113
agguuuaaauggguuuaaa

SEQ ID NO: 336092 - RNA, 19 nt, Artificial Sequence
  Description of Artificial Sequence: Synthetic oligonucleotide
  Antisense Strand to SEQ ID NO: 336091
uuuaaacccauuuaaaccu

SEQ ID NO: 336093 - RNA, 19 nt, Artificial Sequence
  Description of Artificial Sequence: Synthetic oligonucleotide
  Sense Strand Starting at position 219 of SEQ ID NO: 318189
ggucuaaaguaagcucuua

SEQ ID NO: 336094 - RNA, 19 nt, Artificial Sequence
  Description of Artificial Sequence: Synthetic oligonucleotide
  Antisense Strand to SEQ ID NO: 336093
uaagagcuuacuuuagacc

SEQ ID NO: 336095 - RNA, 19 nt, Artificial Sequence
  Description of Artificial Sequence: Synthetic oligonucleotide
  Sense Strand Starting at position 219 of SEQ ID NO: 318247
ugucacaaccauugaggaa

SEQ ID NO: 336096 - RNA, 19 nt, Artificial Sequence
  Description of Artificial Sequence: Synthetic oligonucleotide
  Antisense Strand to SEQ ID NO: 336095
uuccucaaugguugugaca

SEQ ID NO: 336097 - RNA, 19 nt, Artificial Sequence
  Description of Artificial Sequence: Synthetic oligonucleotide
  Sense Strand Starting at position 219 of SEQ ID NO: 318321
uggagagacuucuucgucu

SEQ ID NO: 336098 - RNA, 19 nt, Artificial Sequence
  Description of Artificial Sequence: Synthetic oligonucleotide
  Antisense Strand to SEQ ID NO: 336097
agacgaagaagucucucca

SEQ ID NO: 336099 - RNA, 19 nt, Artificial Sequence
  Description of Artificial Sequence: Synthetic oligonucleotide
  Sense Strand Starting at position 219 of SEQ ID NO: 318323
gagagacuucuucgucuuu

SEQ ID NO: 336100 - RNA, 19 nt, Artificial Sequence
  Description of Artificial Sequence: Synthetic oligonucleotide
  Antisense Strand to SEQ ID NO: 336099
aaagacgaagaagucucuc

SEQ ID NO: 336101 - RNA, 19 nt, Artificial Sequence
  Description of Artificial Sequence: Synthetic oligonucleotide
  Sense Strand Starting at position 219 of SEQ ID NO: 318643
gagaucgccucauugcaau

SEQ ID NO: 336102 - RNA, 19 nt, Artificial Sequence
  Description of Artificial Sequence: Synthetic oligonucleotide
  Antisense Strand to SEQ ID NO: 336101
auugcaaugaggcgaucuc

SEQ ID NO: 336103 - RNA, 19 nt, Artificial Sequence
  Description of Artificial Sequence: Synthetic oligonucleotide
  Sense Strand Starting at position 219 of SEQ ID NO: 318758
caaguagcuugagcuuaua

SEQ ID NO: 336104 - RNA, 19 nt, Artificial Sequence
  Description of Artificial Sequence: Synthetic oligonucleotide
  Antisense Strand to SEQ ID NO: 336103
uauaagcucaagcuacuug

SEQ ID NO: 336105 - RNA, 19 nt, Artificial Sequence
  Description of Artificial Sequence: Synthetic oligonucleotide
  Sense Strand Starting at position 219 of SEQ ID NO: 318761
guagcuugagcuuauacau

SEQ ID NO: 336106 - RNA, 19 nt, Artificial Sequence
  Description of Artificial Sequence: Synthetic oligonucleotide
  Antisense Strand to SEQ ID NO: 336105
auguauaagcucaagcuac

SEQ ID NO: 336107 - RNA, 19 nt, Artificial Sequence
  Description of Artificial Sequence: Synthetic oligonucleotide
  Sense Strand Starting at position 219 of SEQ ID NO: 318831
acauauaucuuccugugau

SEQ ID NO: 336108 - RNA, 19 nt, Artificial Sequence
  Description of Artificial Sequence: Synthetic oligonucleotide
  Antisense Strand to SEQ ID NO: 336107
aucacaggaagauauaugu

SEQ ID NO: 336109 - RNA, 19 nt, Artificial Sequence
  Description of Artificial Sequence: Synthetic oligonucleotide
  Sense Strand Starting at position 219 of SEQ ID NO: 319090
gcaugucagcucgcugcaa

SEQ ID NO: 336110 - RNA, 19 nt, Artificial Sequence
  Description of Artificial Sequence: Synthetic oligonucleotide
  Antisense Strand to SEQ ID NO: 336109
uugcagcgagcugacaugc

SEQ ID NO: 336111 - RNA, 19 nt, Artificial Sequence
  Description of Artificial Sequence: Synthetic oligonucleotide
  Sense Strand Starting at position 220 of SEQ ID NO: 315347
ccaacaagugguugggaau

SEQ ID NO: 336112 - RNA, 19 nt, Artificial Sequence
  Description of Artificial Sequence: Synthetic oligonucleotide
  Antisense Strand to SEQ ID NO: 336111
auucccaaccacuuguugg

SEQ ID NO: 336113 - RNA, 19 nt, Artificial Sequence
  Description of Artificial Sequence: Synthetic oligonucleotide
  Sense Strand Starting at position 220 of SEQ ID NO: 315425
aagccaucguuccugaaag

SEQ ID NO: 336114 - RNA, 19 nt, Artificial Sequence
  Description of Artificial Sequence: Synthetic oligonucleotide
  Antisense Strand to SEQ ID NO: 336113
cuuucaggaacgauggcuu

SEQ ID NO: 336115 - RNA, 19 nt, Artificial Sequence
  Description of Artificial Sequence: Synthetic oligonucleotide
  Sense Strand Starting at position 220 of SEQ ID NO: 315508
gacauuaaugccuagcugu

SEQ ID NO: 336116 - RNA, 19 nt, Artificial Sequence
  Description of Artificial Sequence: Synthetic oligonucleotide
  Antisense Strand to SEQ ID NO: 336115
acagcuaggcauuaauguc

SEQ ID NO: 336117 - RNA, 19 nt, Artificial Sequence
  Description of Artificial Sequence: Synthetic oligonucleotide
  Sense Strand Starting at position 220 of SEQ ID NO: 315525
gugguagguguucaacaaa

SEQ ID NO: 336118 - RNA, 19 nt, Artificial Sequence
  Description of Artificial Sequence: Synthetic oligonucleotide
  Antisense Strand to SEQ ID NO: 336117
uuuguugaacaccuaccac

SEQ ID NO: 336119 - RNA, 19 nt, Artificial Sequence
  Description of Artificial Sequence: Synthetic oligonucleotide
  Sense Strand Starting at position 220 of SEQ ID NO: 315568
uugaguaaguuaucuaaag

SEQ ID NO: 336120 - RNA, 19 nt, Artificial Sequence
  Description of Artificial Sequence: Synthetic oligonucleotide
  Antisense Strand to SEQ ID NO: 336119
cuuuagauaacuuacucaa

SEQ ID NO: 336121 - RNA, 19 nt, Artificial Sequence
  Description of Artificial Sequence: Synthetic oligonucleotide
  Sense Strand Starting at position 220 of SEQ ID NO: 315569
ugaguaaguuaucuaaagc

SEQ ID NO: 336122 - RNA, 19 nt, Artificial Sequence
  Description of Artificial Sequence: Synthetic oligonucleotide
  Antisense Strand to SEQ ID NO: 336121
gcuuuagauaacuuacuca

SEQ ID NO: 336123 - RNA, 19 nt, Artificial Sequence
  Description of Artificial Sequence: Synthetic oligonucleotide
  Sense Strand Starting at position 220 of SEQ ID NO: 315726
uucuuuaaaccgggagcaa

SEQ ID NO: 336124 - RNA, 19 nt, Artificial Sequence
  Description of Artificial Sequence: Synthetic oligonucleotide
  Antisense Strand to SEQ ID NO: 336123
uugcucccgguuuaaagaa

SEQ ID NO: 336125 - RNA, 19 nt, Artificial Sequence
  Description of Artificial Sequence: Synthetic oligonucleotide
  Sense Strand Starting at position 220 of SEQ ID NO: 315727
ucuuuaaaccgggagcaaa

SEQ ID NO: 336126 - RNA, 19 nt, Artificial Sequence
  Description of Artificial Sequence: Synthetic oligonucleotide
  Antisense Strand to SEQ ID NO: 336125
uuugcucccgguuuaaaga

SEQ ID NO: 336127 - RNA, 19 nt, Artificial Sequence
  Description of Artificial Sequence: Synthetic oligonucleotide
  Sense Strand Starting at position 220 of SEQ ID NO: 315837
cuuaaaguugacugccaua

SEQ ID NO: 336128 - RNA, 19 nt, Artificial Sequence
  Description of Artificial Sequence: Synthetic oligonucleotide
  Antisense Strand to SEQ ID NO: 336127
uauggcagucaacuuuaag

SEQ ID NO: 336129 - RNA, 19 nt, Artificial Sequence
  Description of Artificial Sequence: Synthetic oligonucleotide
  Sense Strand Starting at position 220 of SEQ ID NO: 315995
uuagaauagugguuauguu

SEQ ID NO: 336130 - RNA, 19 nt, Artificial Sequence
  Description of Artificial Sequence: Synthetic oligonucleotide
  Antisense Strand to SEQ ID NO: 336129
aacauaaccacuauucuaa

SEQ ID NO: 336131 - RNA, 19 nt, Artificial Sequence
  Description of Artificial Sequence: Synthetic oligonucleotide
  Sense Strand Starting at position 220 of SEQ ID NO: 316005
gguuauguugaaggugaau

SEQ ID NO: 336132 - RNA, 19 nt, Artificial Sequence
  Description of Artificial Sequence: Synthetic oligonucleotide
  Antisense Strand to SEQ ID NO: 336131
auucaccuucaacauaacc

SEQ ID NO: 336133 - RNA, 19 nt, Artificial Sequence
  Description of Artificial Sequence: Synthetic oligonucleotide
  Sense Strand Starting at position 220 of SEQ ID NO: 316016
aggugaaugcagugaguau

SEQ ID NO: 336134 - RNA, 19 nt, Artificial Sequence
  Description of Artificial Sequence: Synthetic oligonucleotide
  Antisense Strand to SEQ ID NO: 336133
auacucacugcauucaccu

SEQ ID NO: 336135 - RNA, 19 nt, Artificial Sequence
  Description of Artificial Sequence: Synthetic oligonucleotide
  Sense Strand Starting at position 220 of SEQ ID NO: 316017
ggugaaugcagugaguaug

SEQ ID NO: 336136 - RNA, 19 nt, Artificial Sequence
  Description of Artificial Sequence: Synthetic oligonucleotide
  Antisense Strand to SEQ ID NO: 336135
cauacucacugcauucacc

SEQ ID NO: 336137 - RNA, 19 nt, Artificial Sequence
  Description of Artificial Sequence: Synthetic oligonucleotide
  Sense Strand Starting at position 220 of SEQ ID NO: 316025
cagugaguauguguuagga

SEQ ID NO: 336138 - RNA, 19 nt, Artificial Sequence
  Description of Artificial Sequence: Synthetic oligonucleotide
  Antisense Strand to SEQ ID NO: 336137
uccuaacacauacucacug

SEQ ID NO: 336139 - RNA, 19 nt, Artificial Sequence
  Description of Artificial Sequence: Synthetic oligonucleotide
  Sense Strand Starting at position 220 of SEQ ID NO: 316133
ucuaucucucuguaaguau

SEQ ID NO: 336140 - RNA, 19 nt, Artificial Sequence
  Description of Artificial Sequence: Synthetic oligonucleotide
  Antisense Strand to SEQ ID NO: 336139
auacuuacagagagauaga

SEQ ID NO: 336141 - RNA, 19 nt, Artificial Sequence
  Description of Artificial Sequence: Synthetic oligonucleotide
  Sense Strand Starting at position 220 of SEQ ID NO: 316136
aucucucuguaaguaugau

SEQ ID NO: 336142 - RNA, 19 nt, Artificial Sequence
  Description of Artificial Sequence: Synthetic oligonucleotide
  Antisense Strand to SEQ ID NO: 336141
aucauacuuacagagagau

SEQ ID NO: 336143 - RNA, 19 nt, Artificial Sequence
  Description of Artificial Sequence: Synthetic oligonucleotide
  Sense Strand Starting at position 220 of SEQ ID NO: 316391
gccuccauggagugagaaa

SEQ ID NO: 336144 - RNA, 19 nt, Artificial Sequence
  Description of Artificial Sequence: Synthetic oligonucleotide
  Antisense Strand to SEQ ID NO: 336143
uuucucacuccauggaggc

SEQ ID NO: 336145 - RNA, 19 nt, Artificial Sequence
  Description of Artificial Sequence: Synthetic oligonucleotide
  Sense Strand Starting at position 220 of SEQ ID NO: 316423
ccauuugaguccuaauaag

SEQ ID NO: 336146 - RNA, 19 nt, Artificial Sequence
  Description of Artificial Sequence: Synthetic oligonucleotide
  Antisense Strand to SEQ ID NO: 336145
cuuauuaggacucaaaugg

SEQ ID NO: 336147 - RNA, 19 nt, Artificial Sequence
  Description of Artificial Sequence: Synthetic oligonucleotide
  Sense Strand Starting at position 220 of SEQ ID NO: 318190
cgaagcucuuaggugacaa

SEQ ID NO: 336148 - RNA, 19 nt, Artificial Sequence
  Description of Artificial Sequence: Synthetic oligonucleotide
  Antisense Strand to SEQ ID NO: 336147
uugucaccuaagagcuucg

SEQ ID NO: 336149 - RNA, 19 nt, Artificial Sequence
  Description of Artificial Sequence: Synthetic oligonucleotide
  Sense Strand Starting at position 220 of SEQ ID NO: 318201
ggugacaaucccugaccca

SEQ ID NO: 336150 - RNA, 19 nt, Artificial Sequence
  Description of Artificial Sequence: Synthetic oligonucleotide
  Antisense Strand to SEQ ID NO: 336149
ugggucagggauugucacc

SEQ ID NO: 336151 - RNA, 19 nt, Artificial Sequence
  Description of Artificial Sequence: Synthetic oligonucleotide
  Sense Strand Starting at position 220 of SEQ ID NO: 318346
gguugaugacuuggcuaaa

SEQ ID NO: 336152 - RNA, 19 nt, Artificial Sequence
  Description of Artificial Sequence: Synthetic oligonucleotide
  Antisense Strand to SEQ ID NO: 336151
uuuagccaagucaucaacc

SEQ ID NO: 336153 - RNA, 19 nt, Artificial Sequence
  Description of Artificial Sequence: Synthetic oligonucleotide
  Sense Strand Starting at position 220 of SEQ ID NO: 318347
guugaugacuuggcuaaag

SEQ ID NO: 336154 - RNA, 19 nt, Artificial Sequence
  Description of Artificial Sequence: Synthetic oligonucleotide
  Antisense Strand to SEQ ID NO: 336153
cuuuagccaagucaucaac

SEQ ID NO: 336155 - RNA, 19 nt, Artificial Sequence
  Description of Artificial Sequence: Synthetic oligonucleotide
  Sense Strand Starting at position 220 of SEQ ID NO: 318460
ucguuugaacugucgcgaa

SEQ ID NO: 336156 - RNA, 19 nt, Artificial Sequence
  Description of Artificial Sequence: Synthetic oligonucleotide
  Antisense Strand to SEQ ID NO: 336155
uucgcgacaguucaaacga

SEQ ID NO: 336157 - RNA, 19 nt, Artificial Sequence
  Description of Artificial Sequence: Synthetic oligonucleotide
  Sense Strand Starting at position 220 of SEQ ID NO: 318492
gcguuaagccaacuguguu

SEQ ID NO: 336158 - RNA, 19 nt, Artificial Sequence
  Description of Artificial Sequence: Synthetic oligonucleotide
  Antisense Strand to SEQ ID NO: 336157
aacacaguuggcuuaacgc

SEQ ID NO: 336159 - RNA, 19 nt, Artificial Sequence
  Description of Artificial Sequence: Synthetic oligonucleotide
  Sense Strand Starting at position 220 of SEQ ID NO: 318495
uuaagccaacuguguuaaa

SEQ ID NO: 336160 - RNA, 19 nt, Artificial Sequence
  Description of Artificial Sequence: Synthetic oligonucleotide
  Antisense Strand to SEQ ID NO: 336159
uuuaacacaguuggcuuaa

SEQ ID NO: 336161 - RNA, 19 nt, Artificial Sequence
  Description of Artificial Sequence: Synthetic oligonucleotide
  Sense Strand Starting at position 220 of SEQ ID NO: 318507
uguuaaagauuguuccucu

SEQ ID NO: 336162 - RNA, 19 nt, Artificial Sequence
  Description of Artificial Sequence: Synthetic oligonucleotide
  Antisense Strand to SEQ ID NO: 336161
agaggaacaaucuuuaaca

SEQ ID NO: 336163 - RNA, 19 nt, Artificial Sequence
  Description of Artificial Sequence: Synthetic oligonucleotide
  Sense Strand Starting at position 220 of SEQ ID NO: 318589
gguugauugugaaagugag

SEQ ID NO: 336164 - RNA, 19 nt, Artificial Sequence
  Description of Artificial Sequence: Synthetic oligonucleotide
  Antisense Strand to SEQ ID NO: 336163
cucacuuucacaaucaacc

SEQ ID NO: 336165 - RNA, 19 nt, Artificial Sequence
  Description of Artificial Sequence: Synthetic oligonucleotide
  Sense Strand Starting at position 220 of SEQ ID NO: 318611
agcagugagccugaaguuu

SEQ ID NO: 336166 - RNA, 19 nt, Artificial Sequence
  Description of Artificial Sequence: Synthetic oligonucleotide
  Antisense Strand to SEQ ID NO: 336165
aaacuucaggcucacugcu

SEQ ID NO: 336167 - RNA, 19 nt, Artificial Sequence
  Description of Artificial Sequence: Synthetic oligonucleotide
  Sense Strand Starting at position 220 of SEQ ID NO: 318660
gcugguugguagguagaaa

SEQ ID NO: 336168 - RNA, 19 nt, Artificial Sequence
  Description of Artificial Sequence: Synthetic oligonucleotide
  Antisense Strand to SEQ ID NO: 336167
uuucuaccuaccaaccagc

SEQ ID NO: 336169 - RNA, 19 nt, Artificial Sequence
  Description of Artificial Sequence: Synthetic oligonucleotide
  Sense Strand Starting at position 220 of SEQ ID NO: 318702
ucuggauuauguuuaccaa

SEQ ID NO: 336170 - RNA, 19 nt, Artificial Sequence
  Description of Artificial Sequence: Synthetic oligonucleotide
  Antisense Strand to SEQ ID NO: 336169
uugguaaacauaauccaga

SEQ ID NO: 336171 - RNA, 19 nt, Artificial Sequence
  Description of Artificial Sequence: Synthetic oligonucleotide
  Sense Strand Starting at position 220 of SEQ ID NO: 318705
ggauuauguuuaccaaggu

SEQ ID NO: 336172 - RNA, 19 nt, Artificial Sequence
  Description of Artificial Sequence: Synthetic oligonucleotide
  Antisense Strand to SEQ ID NO: 336171
accuugguaaacauaaucc

SEQ ID NO: 336173 - RNA, 19 nt, Artificial Sequence
  Description of Artificial Sequence: Synthetic oligonucleotide
  Sense Strand Starting at position 220 of SEQ ID NO: 318748
agucccuaaucuguaaagu

SEQ ID NO: 336174 - RNA, 19 nt, Artificial Sequence
  Description of Artificial Sequence: Synthetic oligonucleotide
  Antisense Strand to SEQ ID NO: 336173
acuuuacagauuagggacu

SEQ ID NO: 336175 - RNA, 19 nt, Artificial Sequence
  Description of Artificial Sequence: Synthetic oligonucleotide
  Sense Strand Starting at position 220 of SEQ ID NO: 318757
ucuguaaaguggguauacu

SEQ ID NO: 336176 - RNA, 19 nt, Artificial Sequence
  Description of Artificial Sequence: Synthetic oligonucleotide
  Antisense Strand to SEQ ID NO: 336175
aguauacccacuuuacaga

SEQ ID NO: 336177 - RNA, 19 nt, Artificial Sequence
  Description of Artificial Sequence: Synthetic oligonucleotide
  Sense Strand Starting at position 220 of SEQ ID NO: 318758
cuguaaaguggguauacua

SEQ ID NO: 336178 - RNA, 19 nt, Artificial Sequence
  Description of Artificial Sequence: Synthetic oligonucleotide
  Antisense Strand to SEQ ID NO: 336177
uaguauacccacuuuacag

SEQ ID NO: 336179 - RNA, 19 nt, Artificial Sequence
  Description of Artificial Sequence: Synthetic oligonucleotide
  Sense Strand Starting at position 220 of SEQ ID NO: 318955
ccagguuuaaauggguuua

SEQ ID NO: 336180 - RNA, 19 nt, Artificial Sequence
  Description of Artificial Sequence: Synthetic oligonucleotide
  Antisense Strand to SEQ ID NO: 336179
uaaacccauuuaaaccugg

SEQ ID NO: 336181 - RNA, 19 nt, Artificial Sequence
  Description of Artificial Sequence: Synthetic oligonucleotide
  Sense Strand Starting at position 220 of SEQ ID NO: 318957
agguuuaaauggguuuaaa

SEQ ID NO: 336182 - RNA, 19 nt, Artificial Sequence
  Description of Artificial Sequence: Synthetic oligonucleotide
  Antisense Strand to SEQ ID NO: 336181
uuuaaacccauuuaaaccu

SEQ ID NO: 336183 - RNA, 19 nt, Artificial Sequence
  Description of Artificial Sequence: Synthetic oligonucleotide
  Sense Strand Starting at position 220 of SEQ ID NO: 319033
ggucuaaaguaagcucuua

SEQ ID NO: 336184 - RNA, 19 nt, Artificial Sequence
  Description of Artificial Sequence: Synthetic oligonucleotide
  Antisense Strand to SEQ ID NO: 336183
uaagagcuuacuuuagacc

SEQ ID NO: 336185 - RNA, 19 nt, Artificial Sequence
  Description of Artificial Sequence: Synthetic oligonucleotide
  Sense Strand Starting at position 220 of SEQ ID NO: 319091
ugucacaaccauugaggaa

SEQ ID NO: 336186 - RNA, 19 nt, Artificial Sequence
  Description of Artificial Sequence: Synthetic oligonucleotide
  Antisense Strand to SEQ ID NO: 336185
uuccucaaugguugugaca

SEQ ID NO: 336187 - RNA, 19 nt, Artificial Sequence
  Description of Artificial Sequence: Synthetic oligonucleotide
  Sense Strand Starting at position 220 of SEQ ID NO: 319165
uggagagacuucuucgucu

SEQ ID NO: 336188 - RNA, 19 nt, Artificial Sequence
  Description of Artificial Sequence: Synthetic oligonucleotide
  Antisense Strand to SEQ ID NO: 336187
agacgaagaagucucucca

SEQ ID NO: 336189 - RNA, 19 nt, Artificial Sequence
  Description of Artificial Sequence: Synthetic oligonucleotide
  Sense Strand Starting at position 220 of SEQ ID NO: 319167
gagagacuucuucgucuuu

SEQ ID NO: 336190 - RNA, 19 nt, Artificial Sequence
  Description of Artificial Sequence: Synthetic oligonucleotide
  Antisense Strand to SEQ ID NO: 336189
aaagacgaagaagucucuc

SEQ ID NO: 336191 - RNA, 19 nt, Artificial Sequence
  Description of Artificial Sequence: Synthetic oligonucleotide
  Sense Strand Starting at position 221 of SEQ ID NO: 315308
gcgcuucucgcugaacuga

SEQ ID NO: 336192 - RNA, 19 nt, Artificial Sequence
  Description of Artificial Sequence: Synthetic oligonucleotide
  Antisense Strand to SEQ ID NO: 336191
ucaguucagcgagaagcgc

SEQ ID NO: 336193 - RNA, 19 nt, Artificial Sequence
  Description of Artificial Sequence: Synthetic oligonucleotide
  Sense Strand Starting at position 221 of SEQ ID NO: 315327
ggagcauugucguucucgu

SEQ ID NO: 336194 - RNA, 19 nt, Artificial Sequence
  Description of Artificial Sequence: Synthetic oligonucleotide
  Antisense Strand to SEQ ID NO: 336193
acgagaacgacaaugcucc

SEQ ID NO: 336195 - RNA, 19 nt, Artificial Sequence
  Description of Artificial Sequence: Synthetic oligonucleotide
  Sense Strand Starting at position 221 of SEQ ID NO: 315335
gucguucucgucuagcaca

SEQ ID NO: 336196 - RNA, 19 nt, Artificial Sequence
  Description of Artificial Sequence: Synthetic oligonucleotide
  Antisense Strand to SEQ ID NO: 336195
ugugcuagacgagaacgac

SEQ ID NO: 336197 - RNA, 19 nt, Artificial Sequence
  Description of Artificial Sequence: Synthetic oligonucleotide
  Sense Strand Starting at position 221 of SEQ ID NO: 315340
ucucgucuagcacaguuau

SEQ ID NO: 336198 - RNA, 19 nt, Artificial Sequence
  Description of Artificial Sequence: Synthetic oligonucleotide
  Antisense Strand to SEQ ID NO: 336197
auaacugugcuagacgaga

SEQ ID NO: 336199 - RNA, 19 nt, Artificial Sequence
  Description of Artificial Sequence: Synthetic oligonucleotide
  Sense Strand Starting at position 221 of SEQ ID NO: 315475
ggccggagcguggaucaau

SEQ ID NO: 336200 - RNA, 19 nt, Artificial Sequence
  Description of Artificial Sequence: Synthetic oligonucleotide
  Antisense Strand to SEQ ID NO: 336199
auugauccacgcuccggcc

SEQ ID NO: 336201 - RNA, 19 nt, Artificial Sequence
  Description of Artificial Sequence: Synthetic oligonucleotide
  Sense Strand Starting at position 221 of SEQ ID NO: 315616
ccacauucucgcgaagggu

SEQ ID NO: 336202 - RNA, 19 nt, Artificial Sequence
  Description of Artificial Sequence: Synthetic oligonucleotide
  Antisense Strand to SEQ ID NO: 336201
acccuucgcgagaaugugg

SEQ ID NO: 336203 - RNA, 19 nt, Artificial Sequence
  Description of Artificial Sequence: Synthetic oligonucleotide
  Sense Strand Starting at position 221 of SEQ ID NO: 315640
gguacugcgcuugcucaaa

SEQ ID NO: 336204 - RNA, 19 nt, Artificial Sequence
  Description of Artificial Sequence: Synthetic oligonucleotide
  Antisense Strand to SEQ ID NO: 336203
uuugagcaagcgcaguacc

SEQ ID NO: 336205 - RNA, 19 nt, Artificial Sequence
  Description of Artificial Sequence: Synthetic oligonucleotide
  Sense Strand Starting at position 221 of SEQ ID NO: 315965
guaguuguacugcggaaac

SEQ ID NO: 336206 - RNA, 19 nt, Artificial Sequence
  Description of Artificial Sequence: Synthetic oligonucleotide
  Antisense Strand to SEQ ID NO: 336205
guuuccgcaguacaacuac

SEQ ID NO: 336207 - RNA, 19 nt, Artificial Sequence
  Description of Artificial Sequence: Synthetic oligonucleotide
  Sense Strand Starting at position 221 of SEQ ID NO: 316017
gcccgguucgccgagguua

SEQ ID NO: 336208 - RNA, 19 nt, Artificial Sequence
  Description of Artificial Sequence: Synthetic oligonucleotide
  Antisense Strand to SEQ ID NO: 336207
uaaccucggcgaaccgggc

SEQ ID NO: 336209 - RNA, 19 nt, Artificial Sequence
  Description of Artificial Sequence: Synthetic oligonucleotide
  Sense Strand Starting at position 221 of SEQ ID NO: 316146
ucgggagcuguccgagacu

SEQ ID NO: 336210 - RNA, 19 nt, Artificial Sequence
  Description of Artificial Sequence: Synthetic oligonucleotide
  Antisense Strand to SEQ ID NO: 336209
agucucggacagcucccga

SEQ ID NO: 336211 - RNA, 19 nt, Artificial Sequence
  Description of Artificial Sequence: Synthetic oligonucleotide
  Sense Strand Starting at position 221 of SEQ ID NO: 316316
gcucccuguugcccauaau

SEQ ID NO: 336212 - RNA, 19 nt, Artificial Sequence
  Description of Artificial Sequence: Synthetic oligonucleotide
  Antisense Strand to SEQ ID NO: 336211
auuaugggcaacagggagc

SEQ ID NO: 336213 - RNA, 19 nt, Artificial Sequence
  Description of Artificial Sequence: Synthetic oligonucleotide
  Sense Strand Starting at position 221 of SEQ ID NO: 316411
gaccguggugccgaaucaa

SEQ ID NO: 336214 - RNA, 19 nt, Artificial Sequence
  Description of Artificial Sequence: Synthetic oligonucleotide
  Antisense Strand to SEQ ID NO: 336213
uugauucggcaccacgguc

SEQ ID NO: 336215 - RNA, 19 nt, Artificial Sequence
  Description of Artificial Sequence: Synthetic oligonucleotide
  Sense Strand Starting at position 221 of SEQ ID NO: 316497
agacuaccucuuugcaaag

SEQ ID NO: 336216 - RNA, 19 nt, Artificial Sequence
  Description of Artificial Sequence: Synthetic oligonucleotide
  Antisense Strand to SEQ ID NO: 336215
cuuugcaaagagguagucu

SEQ ID NO: 336217 - RNA, 19 nt, Artificial Sequence
  Description of Artificial Sequence: Synthetic oligonucleotide
  Sense Strand Starting at position 221 of SEQ ID NO: 316606
gcuggacgccguguucaau

SEQ ID NO: 336218 - RNA, 19 nt, Artificial Sequence
  Description of Artificial Sequence: Synthetic oligonucleotide
  Antisense Strand to SEQ ID NO: 336217
auugaacacggcguccagc

SEQ ID NO: 336219 - RNA, 19 nt, Artificial Sequence
  Description of Artificial Sequence: Synthetic oligonucleotide
  Sense Strand Starting at position 221 of SEQ ID NO: 316659
cgacuauuccgggcgcuuu

SEQ ID NO: 336220 - RNA, 19 nt, Artificial Sequence
  Description of Artificial Sequence: Synthetic oligonucleotide
  Antisense Strand to SEQ ID NO: 336219
aaagcgcccggaauagucg

SEQ ID NO: 336221 - RNA, 19 nt, Artificial Sequence
  Description of Artificial Sequence: Synthetic oligonucleotide
  Sense Strand Starting at position 221 of SEQ ID NO: 316749
ccggaagacuccggacaaa

SEQ ID NO: 336222 - RNA, 19 nt, Artificial Sequence
  Description of Artificial Sequence: Synthetic oligonucleotide
  Antisense Strand to SEQ ID NO: 336221
uuuguccggagucuuccgg

SEQ ID NO: 336223 - RNA, 19 nt, Artificial Sequence
  Description of Artificial Sequence: Synthetic oligonucleotide
  Sense Strand Starting at position 221 of SEQ ID NO: 317311
ccgccaucuuuauugagga

SEQ ID NO: 336224 - RNA, 19 nt, Artificial Sequence
  Description of Artificial Sequence: Synthetic oligonucleotide
  Antisense Strand to SEQ ID NO: 336223
uccucaauaaagauggcgg

SEQ ID NO: 336225 - RNA, 19 nt, Artificial Sequence
  Description of Artificial Sequence: Synthetic oligonucleotide
  Sense Strand Starting at position 221 of SEQ ID NO: 317316
aucuuuauugaggacguga

SEQ ID NO: 336226 - RNA, 19 nt, Artificial Sequence
  Description of Artificial Sequence: Synthetic oligonucleotide
  Antisense Strand to SEQ ID NO: 336225
ucacguccucaauaaagau

SEQ ID NO: 336227 - RNA, 19 nt, Artificial Sequence
  Description of Artificial Sequence: Synthetic oligonucleotide
  Sense Strand Starting at position 221 of SEQ ID NO: 317546
ugcccaugagcguucucau

SEQ ID NO: 336228 - RNA, 19 nt, Artificial Sequence
  Description of Artificial Sequence: Synthetic oligonucleotide
  Antisense Strand to SEQ ID NO: 336227
augagaacgcucaugggca

SEQ ID NO: 336229 - RNA, 19 nt, Artificial Sequence
  Description of Artificial Sequence: Synthetic oligonucleotide
  Sense Strand Starting at position 221 of SEQ ID NO: 317855
ucccgagugcucugggaug

SEQ ID NO: 336230 - RNA, 19 nt, Artificial Sequence
  Description of Artificial Sequence: Synthetic oligonucleotide
  Antisense Strand to SEQ ID NO: 336229
caucccagagcacucggga

SEQ ID NO: 336231 - RNA, 19 nt, Artificial Sequence
  Description of Artificial Sequence: Synthetic oligonucleotide
  Sense Strand Starting at position 221 of SEQ ID NO: 318013
uccagcucucccugcguaa

SEQ ID NO: 336232 - RNA, 19 nt, Artificial Sequence
  Description of Artificial Sequence: Synthetic oligonucleotide
  Antisense Strand to SEQ ID NO: 336231
uuacgcagggagagcugga

SEQ ID NO: 336233 - RNA, 19 nt, Artificial Sequence
  Description of Artificial Sequence: Synthetic oligonucleotide
  Sense Strand Starting at position 221 of SEQ ID NO: 318124
acuccaaucggucagucau

SEQ ID NO: 336234 - RNA, 19 nt, Artificial Sequence
  Description of Artificial Sequence: Synthetic oligonucleotide
  Antisense Strand to SEQ ID NO: 336233
augacugaccgauuggagu

SEQ ID NO: 336235 - RNA, 19 nt, Artificial Sequence
  Description of Artificial Sequence: Synthetic oligonucleotide
  Sense Strand Starting at position 221 of SEQ ID NO: 318134
gucagucauuguuucuauu

SEQ ID NO: 336236 - RNA, 19 nt, Artificial Sequence
  Description of Artificial Sequence: Synthetic oligonucleotide
  Antisense Strand to SEQ ID NO: 336235
aauagaaacaaugacugac

SEQ ID NO: 336237 - RNA, 19 nt, Artificial Sequence
  Description of Artificial Sequence: Synthetic oligonucleotide
  Sense Strand Starting at position 221 of SEQ ID NO: 318142
uuguuucuauuggcacaau

SEQ ID NO: 336238 - RNA, 19 nt, Artificial Sequence
  Description of Artificial Sequence: Synthetic oligonucleotide
  Antisense Strand to SEQ ID NO: 336237
auugugccaauagaaacaa

SEQ ID NO: 336239 - RNA, 19 nt, Artificial Sequence
  Description of Artificial Sequence: Synthetic oligonucleotide
  Sense Strand Starting at position 221 of SEQ ID NO: 318218
gccggcuaaccgugagaga

SEQ ID NO: 336240 - RNA, 19 nt, Artificial Sequence
  Description of Artificial Sequence: Synthetic oligonucleotide
  Antisense Strand to SEQ ID NO: 336239
ucucucacgguuagccggc

SEQ ID NO: 336241 - RNA, 19 nt, Artificial Sequence
  Description of Artificial Sequence: Synthetic oligonucleotide
  Sense Strand Starting at position 221 of SEQ ID NO: 318220
cggcuaaccgugagagagu

SEQ ID NO: 336242 - RNA, 19 nt, Artificial Sequence
  Description of Artificial Sequence: Synthetic oligonucleotide
  Antisense Strand to SEQ ID NO: 336241
acucucucacgguuagccg

SEQ ID NO: 336243 - RNA, 19 nt, Artificial Sequence
  Description of Artificial Sequence: Synthetic oligonucleotide
  Sense Strand Starting at position 221 of SEQ ID NO: 318389
gguggauccugguucuaac

SEQ ID NO: 336244 - RNA, 19 nt, Artificial Sequence
  Description of Artificial Sequence: Synthetic oligonucleotide
  Antisense Strand to SEQ ID NO: 336243
guuagaaccaggauccacc

SEQ ID NO: 336245 - RNA, 19 nt, Artificial Sequence
  Description of Artificial Sequence: Synthetic oligonucleotide
  Sense Strand Starting at position 221 of SEQ ID NO: 318399
gguucuaacaggcgaggaa

SEQ ID NO: 336246 - RNA, 19 nt, Artificial Sequence
  Description of Artificial Sequence: Synthetic oligonucleotide
  Antisense Strand to SEQ ID NO: 336245
uuccucgccuguuagaacc

SEQ ID NO: 336247 - RNA, 19 nt, Artificial Sequence
  Description of Artificial Sequence: Synthetic oligonucleotide
  Sense Strand Starting at position 221 of SEQ ID NO: 318444
ccgaacggucccuaugaca

SEQ ID NO: 336248 - RNA, 19 nt, Artificial Sequence
  Description of Artificial Sequence: Synthetic oligonucleotide
  Antisense Strand to SEQ ID NO: 336247
ugucauagggaccguucgg

SEQ ID NO: 336249 - RNA, 19 nt, Artificial Sequence
  Description of Artificial Sequence: Synthetic oligonucleotide
  Sense Strand Starting at position 221 of SEQ ID NO: 318598
cccucuccugucuacgaau

SEQ ID NO: 336250 - RNA, 19 nt, Artificial Sequence
  Description of Artificial Sequence: Synthetic oligonucleotide
  Antisense Strand to SEQ ID NO: 336249
auucguagacaggagaggg

SEQ ID NO: 336251 - RNA, 19 nt, Artificial Sequence
  Description of Artificial Sequence: Synthetic oligonucleotide
  Sense Strand Starting at position 221 of SEQ ID NO: 318638
gagcucugggccugauaca

SEQ ID NO: 336252 - RNA, 19 nt, Artificial Sequence
  Description of Artificial Sequence: Synthetic oligonucleotide
  Antisense Strand to SEQ ID NO: 336251
uguaucaggcccagagcuc

SEQ ID NO: 336253 - RNA, 19 nt, Artificial Sequence
  Description of Artificial Sequence: Synthetic oligonucleotide
  Sense Strand Starting at position 221 of SEQ ID NO: 318901
acggguacaugucaucaca

SEQ ID NO: 336254 - RNA, 19 nt, Artificial Sequence
  Description of Artificial Sequence: Synthetic oligonucleotide
  Antisense Strand to SEQ ID NO: 336253
ugugaugacauguacccgu

SEQ ID NO: 336255 - RNA, 19 nt, Artificial Sequence
  Description of Artificial Sequence: Synthetic oligonucleotide
  Sense Strand Starting at position 221 of SEQ ID NO: 318903
ggguacaugucaucacacu

SEQ ID NO: 336256 - RNA, 19 nt, Artificial Sequence
  Description of Artificial Sequence: Synthetic oligonucleotide
  Antisense Strand to SEQ ID NO: 336255
agugugaugacauguaccc

SEQ ID NO: 336257 - RNA, 19 nt, Artificial Sequence
  Description of Artificial Sequence: Synthetic oligonucleotide
  Sense Strand Starting at position 221 of SEQ ID NO: 318958
caccauguaggccagauua

SEQ ID NO: 336258 - RNA, 19 nt, Artificial Sequence
  Description of Artificial Sequence: Synthetic oligonucleotide
  Antisense Strand to SEQ ID NO: 336257
uaaucuggccuacauggug

SEQ ID NO: 336259 - RNA, 19 nt, Artificial Sequence
  Description of Artificial Sequence: Synthetic oligonucleotide
  Sense Strand Starting at position 221 of SEQ ID NO: 318960
ccauguaggccagauuagu

SEQ ID NO: 336260 - RNA, 19 nt, Artificial Sequence
  Description of Artificial Sequence: Synthetic oligonucleotide
  Antisense Strand to SEQ ID NO: 336259
acuaaucuggccuacaugg

SEQ ID NO: 336261 - RNA, 19 nt, Artificial Sequence
  Description of Artificial Sequence: Synthetic oligonucleotide
  Sense Strand Starting at position 221 of SEQ ID NO: 318966
aggccagauuagucuugaa

SEQ ID NO: 336262 - RNA, 19 nt, Artificial Sequence
  Description of Artificial Sequence: Synthetic oligonucleotide
  Antisense Strand to SEQ ID NO: 336261
uucaagacuaaucuggccu

SEQ ID NO: 336263 - RNA, 19 nt, Artificial Sequence
  Description of Artificial Sequence: Synthetic oligonucleotide
  Sense Strand Starting at position 221 of SEQ ID NO: 319087
agcgcuuucuguguccaca

SEQ ID NO: 336264 - RNA, 19 nt, Artificial Sequence
  Description of Artificial Sequence: Synthetic oligonucleotide
  Antisense Strand to SEQ ID NO: 336263
uguggacacagaaagcgcu

SEQ ID NO: 336265 - RNA, 19 nt, Artificial Sequence
  Description of Artificial Sequence: Synthetic oligonucleotide
  Sense Strand Starting at position 221 of SEQ ID NO: 319088
gcgcuuucuguguccacaa

SEQ ID NO: 336266 - RNA, 19 nt, Artificial Sequence
  Description of Artificial Sequence: Synthetic oligonucleotide
  Antisense Strand to SEQ ID NO: 336265
uuguggacacagaaagcgc

SEQ ID NO: 336267 - RNA, 19 nt, Artificial Sequence
  Description of Artificial Sequence: Synthetic oligonucleotide
  Sense Strand Starting at position 221 of SEQ ID NO: 319089
cgcuuucuguguccacaau

SEQ ID NO: 336268 - RNA, 19 nt, Artificial Sequence
  Description of Artificial Sequence: Synthetic oligonucleotide
  Antisense Strand to SEQ ID NO: 336267
auuguggacacagaaagcg

SEQ ID NO: 336269 - RNA, 19 nt, Artificial Sequence
  Description of Artificial Sequence: Synthetic oligonucleotide
  Sense Strand Starting at position 221 of SEQ ID NO: 319218
ugggacgccuucuugcaua

SEQ ID NO: 336270 - RNA, 19 nt, Artificial Sequence
  Description of Artificial Sequence: Synthetic oligonucleotide
  Antisense Strand to SEQ ID NO: 336269
uaugcaagaaggcguccca

SEQ ID NO: 336271 - RNA, 19 nt, Artificial Sequence
  Description of Artificial Sequence: Synthetic oligonucleotide
  Sense Strand Starting at position 222 of SEQ ID NO: 315765
gcaugauacgccuauucuu

SEQ ID NO: 336272 - RNA, 19 nt, Artificial Sequence
  Description of Artificial Sequence: Synthetic oligonucleotide
  Antisense Strand to SEQ ID NO: 336271
aagaauaggcguaucaugc

SEQ ID NO: 336273 - RNA, 19 nt, Artificial Sequence
  Description of Artificial Sequence: Synthetic oligonucleotide
  Sense Strand Starting at position 222 of SEQ ID NO: 315768
ugauacgccuauucuuaaa

SEQ ID NO: 336274 - RNA, 19 nt, Artificial Sequence
  Description of Artificial Sequence: Synthetic oligonucleotide
  Antisense Strand to SEQ ID NO: 336273
uuuaagaauaggcguauca

SEQ ID NO: 336275 - RNA, 19 nt, Artificial Sequence
  Description of Artificial Sequence: Synthetic oligonucleotide
  Sense Strand Starting at position 222 of SEQ ID NO: 316003
ggcuguacucgucaaagau

SEQ ID NO: 336276 - RNA, 19 nt, Artificial Sequence
  Description of Artificial Sequence: Synthetic oligonucleotide
  Antisense Strand to SEQ ID NO: 336275
aucuuugacgaguacagcc

SEQ ID NO: 336277 - RNA, 19 nt, Artificial Sequence
  Description of Artificial Sequence: Synthetic oligonucleotide
  Sense Strand Starting at position 222 of SEQ ID NO: 316007
guacucgucaaagauguau

SEQ ID NO: 336278 - RNA, 19 nt, Artificial Sequence
  Description of Artificial Sequence: Synthetic oligonucleotide
  Antisense Strand to SEQ ID NO: 336277
auacaucuuugacgaguac

SEQ ID NO: 336279 - RNA, 19 nt, Artificial Sequence
  Description of Artificial Sequence: Synthetic oligonucleotide
  Sense Strand Starting at position 222 of SEQ ID NO: 316013
gucaaagauguaugcaguu

SEQ ID NO: 336280 - RNA, 19 nt, Artificial Sequence
  Description of Artificial Sequence: Synthetic oligonucleotide
  Antisense Strand to SEQ ID NO: 336279
aacugcauacaucuuugac

SEQ ID NO: 336281 - RNA, 19 nt, Artificial Sequence
  Description of Artificial Sequence: Synthetic oligonucleotide
  Sense Strand Starting at position 222 of SEQ ID NO: 316025
ugcaguugguacucaaaua

SEQ ID NO: 336282 - RNA, 19 nt, Artificial Sequence
  Description of Artificial Sequence: Synthetic oligonucleotide
  Antisense Strand to SEQ ID NO: 336281
uauuugaguaccaacugca

SEQ ID NO: 336283 - RNA, 19 nt, Artificial Sequence
  Description of Artificial Sequence: Synthetic oligonucleotide
  Sense Strand Starting at position 222 of SEQ ID NO: 316129
uucuaugaggcuuauaaca

SEQ ID NO: 336284 - RNA, 19 nt, Artificial Sequence
  Description of Artificial Sequence: Synthetic oligonucleotide
  Antisense Strand to SEQ ID NO: 336283
uguuauaagccucauagaa

SEQ ID NO: 336285 - RNA, 19 nt, Artificial Sequence
  Description of Artificial Sequence: Synthetic oligonucleotide
  Sense Strand Starting at position 222 of SEQ ID NO: 316501
aggugauucgcccaaagug

SEQ ID NO: 336286 - RNA, 19 nt, Artificial Sequence
  Description of Artificial Sequence: Synthetic oligonucleotide
  Antisense Strand to SEQ ID NO: 336285
cacuuugggcgaaucaccu

SEQ ID NO: 336287 - RNA, 19 nt, Artificial Sequence
  Description of Artificial Sequence: Synthetic oligonucleotide
  Sense Strand Starting at position 222 of SEQ ID NO: 316588
ucuguuuccucuuugagac

SEQ ID NO: 336288 - RNA, 19 nt, Artificial Sequence
  Description of Artificial Sequence: Synthetic oligonucleotide
  Antisense Strand to SEQ ID NO: 336287
gucucaaagaggaaacaga

SEQ ID NO: 336289 - RNA, 19 nt, Artificial Sequence
  Description of Artificial Sequence: Synthetic oligonucleotide
  Sense Strand Starting at position 222 of SEQ ID NO: 316589
cuguuuccucuuugagaca

SEQ ID NO: 336290 - RNA, 19 nt, Artificial Sequence
  Description of Artificial Sequence: Synthetic oligonucleotide
  Antisense Strand to SEQ ID NO: 336289
ugucucaaagaggaaacag

SEQ ID NO: 336291 - RNA, 19 nt, Artificial Sequence
  Description of Artificial Sequence: Synthetic oligonucleotide
  Sense Strand Starting at position 222 of SEQ ID NO: 316670
auuccacucuguuuaggaa

SEQ ID NO: 336292 - RNA, 19 nt, Artificial Sequence
  Description of Artificial Sequence: Synthetic oligonucleotide
  Antisense Strand to SEQ ID NO: 336291
uuccuaaacagaguggaau

SEQ ID NO: 336293 - RNA, 19 nt, Artificial Sequence
  Description of Artificial Sequence: Synthetic oligonucleotide
  Sense Strand Starting at position 222 of SEQ ID NO: 316711
uuauucuuccuggacacga

SEQ ID NO: 336294 - RNA, 19 nt, Artificial Sequence
  Description of Artificial Sequence: Synthetic oligonucleotide
  Antisense Strand to SEQ ID NO: 336293
ucguguccaggaagaauaa

SEQ ID NO: 336295 - RNA, 19 nt, Artificial Sequence
  Description of Artificial Sequence: Synthetic oligonucleotide
  Sense Strand Starting at position 222 of SEQ ID NO: 316713
auucuuccuggacacgaau

SEQ ID NO: 336296 - RNA, 19 nt, Artificial Sequence
  Description of Artificial Sequence: Synthetic oligonucleotide
  Antisense Strand to SEQ ID NO: 336295
auucguguccaggaagaau

SEQ ID NO: 336297 - RNA, 19 nt, Artificial Sequence
  Description of Artificial Sequence: Synthetic oligonucleotide
  Sense Strand Starting at position 222 of SEQ ID NO: 316759
cccacaaucuuguuaggaa

SEQ ID NO: 336298 - RNA, 19 nt, Artificial Sequence
  Description of Artificial Sequence: Synthetic oligonucleotide
  Antisense Strand to SEQ ID NO: 336297
uuccuaacaagauuguggg

SEQ ID NO: 336299 - RNA, 19 nt, Artificial Sequence
  Description of Artificial Sequence: Synthetic oligonucleotide
  Sense Strand Starting at position 222 of SEQ ID NO: 316817
agacgauucucucccuacu

SEQ ID NO: 336300 - RNA, 19 nt, Artificial Sequence
  Description of Artificial Sequence: Synthetic oligonucleotide
  Antisense Strand to SEQ ID NO: 336299
aguagggagagaaucgucu

SEQ ID NO: 336301 - RNA, 19 nt, Artificial Sequence
  Description of Artificial Sequence: Synthetic oligonucleotide
  Sense Strand Starting at position 222 of SEQ ID NO: 316858
uggcuuucuuacccuuaga

SEQ ID NO: 336302 - RNA, 19 nt, Artificial Sequence
  Description of Artificial Sequence: Synthetic oligonucleotide
  Antisense Strand to SEQ ID NO: 336301
ucuaaggguaagaaagcca

SEQ ID NO: 336303 - RNA, 19 nt, Artificial Sequence
  Description of Artificial Sequence: Synthetic oligonucleotide
  Sense Strand Starting at position 222 of SEQ ID NO: 317892
cgaagcuucugaucaccaa

SEQ ID NO: 336304 - RNA, 19 nt, Artificial Sequence
  Description of Artificial Sequence: Synthetic oligonucleotide
  Antisense Strand to SEQ ID NO: 336303
uuggugaucagaagcuucg

SEQ ID NO: 336305 - RNA, 19 nt, Artificial Sequence
  Description of Artificial Sequence: Synthetic oligonucleotide
  Sense Strand Starting at position 222 of SEQ ID NO: 317933
cccugugaggccugagaau

SEQ ID NO: 336306 - RNA, 19 nt, Artificial Sequence
  Description of Artificial Sequence: Synthetic oligonucleotide
  Antisense Strand to SEQ ID NO: 336305
auucucaggccucacaggg

SEQ ID NO: 336307 - RNA, 19 nt, Artificial Sequence
  Description of Artificial Sequence: Synthetic oligonucleotide
  Sense Strand Starting at position 222 of SEQ ID NO: 317986
cuaguuguucgugcaagua

SEQ ID NO: 336308 - RNA, 19 nt, Artificial Sequence
  Description of Artificial Sequence: Synthetic oligonucleotide
  Antisense Strand to SEQ ID NO: 336307
uacuugcacgaacaacuag

SEQ ID NO: 336309 - RNA, 19 nt, Artificial Sequence
  Description of Artificial Sequence: Synthetic oligonucleotide
  Sense Strand Starting at position 222 of SEQ ID NO: 317989
guuguucgugcaaguagua

SEQ ID NO: 336310 - RNA, 19 nt, Artificial Sequence
  Description of Artificial Sequence: Synthetic oligonucleotide
  Antisense Strand to SEQ ID NO: 336309
uacuacuugcacgaacaac

SEQ ID NO: 336311 - RNA, 19 nt, Artificial Sequence
  Description of Artificial Sequence: Synthetic oligonucleotide
  Sense Strand Starting at position 222 of SEQ ID NO: 318010
uggcaaacugcuuguacua

SEQ ID NO: 336312 - RNA, 19 nt, Artificial Sequence
  Description of Artificial Sequence: Synthetic oligonucleotide
  Antisense Strand to SEQ ID NO: 336311
uaguacaagcaguuugcca

SEQ ID NO: 336313 - RNA, 19 nt, Artificial Sequence
  Description of Artificial Sequence: Synthetic oligonucleotide
  Sense Strand Starting at position 222 of SEQ ID NO: 318036
gggcaagugcgggaauaau

SEQ ID NO: 336314 - RNA, 19 nt, Artificial Sequence
  Description of Artificial Sequence: Synthetic oligonucleotide
  Antisense Strand to SEQ ID NO: 336313
auuauucccgcacuugccc

SEQ ID NO: 336315 - RNA, 19 nt, Artificial Sequence
  Description of Artificial Sequence: Synthetic oligonucleotide
  Sense Strand Starting at position 222 of SEQ ID NO: 318045
cgggaauaauuacaauaaa

SEQ ID NO: 336316 - RNA, 19 nt, Artificial Sequence
  Description of Artificial Sequence: Synthetic oligonucleotide
  Antisense Strand to SEQ ID NO: 336315
uuuauuguaauuauucccg

SEQ ID NO: 336317 - RNA, 19 nt, Artificial Sequence
  Description of Artificial Sequence: Synthetic oligonucleotide
  Sense Strand Starting at position 222 of SEQ ID NO: 318066
guaagguuugaugggagga

SEQ ID NO: 336318 - RNA, 19 nt, Artificial Sequence
  Description of Artificial Sequence: Synthetic oligonucleotide
  Antisense Strand to SEQ ID NO: 336317
uccucccaucaaaccuuac

SEQ ID NO: 336319 - RNA, 19 nt, Artificial Sequence
  Description of Artificial Sequence: Synthetic oligonucleotide
  Sense Strand Starting at position 222 of SEQ ID NO: 318068
aagguuugaugggaggaaa

SEQ ID NO: 336320 - RNA, 19 nt, Artificial Sequence
  Description of Artificial Sequence: Synthetic oligonucleotide
  Antisense Strand to SEQ ID NO: 336319
uuuccucccaucaaaccuu

SEQ ID NO: 336321 - RNA, 19 nt, Artificial Sequence
  Description of Artificial Sequence: Synthetic oligonucleotide
  Sense Strand Starting at position 222 of SEQ ID NO: 318146
ucauuuagauccguuuagu

SEQ ID NO: 336322 - RNA, 19 nt, Artificial Sequence
  Description of Artificial Sequence: Synthetic oligonucleotide
  Antisense Strand to SEQ ID NO: 336321
acuaaacggaucuaaauga

SEQ ID NO: 336323 - RNA, 19 nt, Artificial Sequence
  Description of Artificial Sequence: Synthetic oligonucleotide
  Sense Strand Starting at position 222 of SEQ ID NO: 318149
uuuagauccguuuaguauc

SEQ ID NO: 336324 - RNA, 19 nt, Artificial Sequence
  Description of Artificial Sequence: Synthetic oligonucleotide
  Antisense Strand to SEQ ID NO: 336323
gauacuaaacggaucuaaa

SEQ ID NO: 336325 - RNA, 19 nt, Artificial Sequence
  Description of Artificial Sequence: Synthetic oligonucleotide
  Sense Strand Starting at position 222 of SEQ ID NO: 318163
guaucugucaaucagugca

SEQ ID NO: 336326 - RNA, 19 nt, Artificial Sequence
  Description of Artificial Sequence: Synthetic oligonucleotide
  Antisense Strand to SEQ ID NO: 336325
ugcacugauugacagauac

SEQ ID NO: 336327 - RNA, 19 nt, Artificial Sequence
  Description of Artificial Sequence: Synthetic oligonucleotide
  Sense Strand Starting at position 222 of SEQ ID NO: 318179
gcaguucugcuuguguguu

SEQ ID NO: 336328 - RNA, 19 nt, Artificial Sequence
  Description of Artificial Sequence: Synthetic oligonucleotide
  Antisense Strand to SEQ ID NO: 336327
aacacacaagcagaacugc

SEQ ID NO: 336329 - RNA, 19 nt, Artificial Sequence
  Description of Artificial Sequence: Synthetic oligonucleotide
  Sense Strand Starting at position 222 of SEQ ID NO: 318184
ucugcuuguguguuuacau

SEQ ID NO: 336330 - RNA, 19 nt, Artificial Sequence
  Description of Artificial Sequence: Synthetic oligonucleotide
  Antisense Strand to SEQ ID NO: 336329
auguaaacacacaagcaga

SEQ ID NO: 336331 - RNA, 19 nt, Artificial Sequence
  Description of Artificial Sequence: Synthetic oligonucleotide
  Sense Strand Starting at position 222 of SEQ ID NO: 318533
cuaccaugcucggccagaa

SEQ ID NO: 336332 - RNA, 19 nt, Artificial Sequence
  Description of Artificial Sequence: Synthetic oligonucleotide
  Antisense Strand to SEQ ID NO: 336331
uucuggccgagcaugguag

SEQ ID NO: 336333 - RNA, 19 nt, Artificial Sequence
  Description of Artificial Sequence: Synthetic oligonucleotide
  Sense Strand Starting at position 222 of SEQ ID NO: 318537
caugcucggccagaagaau

SEQ ID NO: 336334 - RNA, 19 nt, Artificial Sequence
  Description of Artificial Sequence: Synthetic oligonucleotide
  Antisense Strand to SEQ ID NO: 336333
auucuucuggccgagcaug

SEQ ID NO: 336335 - RNA, 19 nt, Artificial Sequence
  Description of Artificial Sequence: Synthetic oligonucleotide
  Sense Strand Starting at position 222 of SEQ ID NO: 318573
ugguaaucuguagaggcuu

SEQ ID NO: 336336 - RNA, 19 nt, Artificial Sequence
  Description of Artificial Sequence: Synthetic oligonucleotide
  Antisense Strand to SEQ ID NO: 336335
aagccucuacagauuacca

SEQ ID NO: 336337 - RNA, 19 nt, Artificial Sequence
  Description of Artificial Sequence: Synthetic oligonucleotide
  Sense Strand Starting at position 222 of SEQ ID NO: 318837
aguaauaguuaagaggaaa

SEQ ID NO: 336338 - RNA, 19 nt, Artificial Sequence
  Description of Artificial Sequence: Synthetic oligonucleotide
  Antisense Strand to SEQ ID NO: 336337
uuuccucuuaacuauuacu

SEQ ID NO: 336339 - RNA, 19 nt, Artificial Sequence
  Description of Artificial Sequence: Synthetic oligonucleotide
  Sense Strand Starting at position 222 of SEQ ID NO: 318938
gcuguacuauuuguaaauu

SEQ ID NO: 336340 - RNA, 19 nt, Artificial Sequence
  Description of Artificial Sequence: Synthetic oligonucleotide
  Antisense Strand to SEQ ID NO: 336339
aauuuacaaauaguacagc

SEQ ID NO: 336341 - RNA, 19 nt, Artificial Sequence
  Description of Artificial Sequence: Synthetic oligonucleotide
  Sense Strand Starting at position 222 of SEQ ID NO: 318994
uguacauaccaguagaauu

SEQ ID NO: 336342 - RNA, 19 nt, Artificial Sequence
  Description of Artificial Sequence: Synthetic oligonucleotide
  Antisense Strand to SEQ ID NO: 336341
aauucuacugguauguaca

SEQ ID NO: 336343 - RNA, 19 nt, Artificial Sequence
  Description of Artificial Sequence: Synthetic oligonucleotide
  Sense Strand Starting at position 222 of SEQ ID NO: 319043
aauuuauaguuggauagca

SEQ ID NO: 336344 - RNA, 19 nt, Artificial Sequence
  Description of Artificial Sequence: Synthetic oligonucleotide
  Antisense Strand to SEQ ID NO: 336343
ugcuauccaacuauaaauu

SEQ ID NO: 336345 - RNA, 19 nt, Artificial Sequence
  Description of Artificial Sequence: Synthetic oligonucleotide
  Sense Strand Starting at position 222 of SEQ ID NO: 319045
uuuauaguuggauagcagu

SEQ ID NO: 336346 - RNA, 19 nt, Artificial Sequence
  Description of Artificial Sequence: Synthetic oligonucleotide
  Antisense Strand to SEQ ID NO: 336345
acugcuauccaacuauaaa

SEQ ID NO: 336347 - RNA, 19 nt, Artificial Sequence
  Description of Artificial Sequence: Synthetic oligonucleotide
  Sense Strand Starting at position 222 of SEQ ID NO: 319104
gaagaaagaucuggauuug

SEQ ID NO: 336348 - RNA, 19 nt, Artificial Sequence
  Description of Artificial Sequence: Synthetic oligonucleotide
  Antisense Strand to SEQ ID NO: 336347
caaauccagaucuuucuuc

SEQ ID NO: 336349 - RNA, 19 nt, Artificial Sequence
  Description of Artificial Sequence: Synthetic oligonucleotide
  Sense Strand Starting at position 222 of SEQ ID NO: 319115
uggauuugugcugggcaca

SEQ ID NO: 336350 - RNA, 19 nt, Artificial Sequence
  Description of Artificial Sequence: Synthetic oligonucleotide
  Antisense Strand to SEQ ID NO: 336349
ugugcccagcacaaaucca

SEQ ID NO: 336351 - RNA, 19 nt, Artificial Sequence
  Description of Artificial Sequence: Synthetic oligonucleotide
  Sense Strand Starting at position 223 of SEQ ID NO: 315343
cugaaaccuucugucaaug

SEQ ID NO: 336352 - RNA, 19 nt, Artificial Sequence
  Description of Artificial Sequence: Synthetic oligonucleotide
  Antisense Strand to SEQ ID NO: 336351
cauugacagaagguuucag

SEQ ID NO: 336353 - RNA, 19 nt, Artificial Sequence
  Description of Artificial Sequence: Synthetic oligonucleotide
  Sense Strand Starting at position 223 of SEQ ID NO: 315361
guuggcuuuagcugaauuu

SEQ ID NO: 336354 - RNA, 19 nt, Artificial Sequence
  Description of Artificial Sequence: Synthetic oligonucleotide
  Antisense Strand to SEQ ID NO: 336353
aaauucagcuaaagccaac

SEQ ID NO: 336355 - RNA, 19 nt, Artificial Sequence
  Description of Artificial Sequence: Synthetic oligonucleotide
  Sense Strand Starting at position 223 of SEQ ID NO: 315589
ggcagugugccuguuuaua

SEQ ID NO: 336356 - RNA, 19 nt, Artificial Sequence
  Description of Artificial Sequence: Synthetic oligonucleotide
  Antisense Strand to SEQ ID NO: 336355
uauaaacaggcacacugcc

SEQ ID NO: 336357 - RNA, 19 nt, Artificial Sequence
  Description of Artificial Sequence: Synthetic oligonucleotide
  Sense Strand Starting at position 223 of SEQ ID NO: 315654
cugauaaugccacagucaa

SEQ ID NO: 336358 - RNA, 19 nt, Artificial Sequence
  Description of Artificial Sequence: Synthetic oligonucleotide
  Antisense Strand to SEQ ID NO: 336357
uugacuguggcauuaucag

SEQ ID NO: 336359 - RNA, 19 nt, Artificial Sequence
  Description of Artificial Sequence: Synthetic oligonucleotide
  Sense Strand Starting at position 223 of SEQ ID NO: 315780
uccuuaugauuuccucgua

SEQ ID NO: 336360 - RNA, 19 nt, Artificial Sequence
  Description of Artificial Sequence: Synthetic oligonucleotide
  Antisense Strand to SEQ ID NO: 336359
uacgaggaaaucauaagga

SEQ ID NO: 336361 - RNA, 19 nt, Artificial Sequence
  Description of Artificial Sequence: Synthetic oligonucleotide
  Sense Strand Starting at position 223 of SEQ ID NO: 315781
ccuuaugauuuccucguau

SEQ ID NO: 336362 - RNA, 19 nt, Artificial Sequence
  Description of Artificial Sequence: Synthetic oligonucleotide
  Antisense Strand to SEQ ID NO: 336361
auacgaggaaaucauaagg

SEQ ID NO: 336363 - RNA, 19 nt, Artificial Sequence
  Description of Artificial Sequence: Synthetic oligonucleotide
  Sense Strand Starting at position 223 of SEQ ID NO: 315783
uuaugauuuccucguaucu

SEQ ID NO: 336364 - RNA, 19 nt, Artificial Sequence
  Description of Artificial Sequence: Synthetic oligonucleotide
  Antisense Strand to SEQ ID NO: 336363
agauacgaggaaaucauaa

SEQ ID NO: 336365 - RNA, 19 nt, Artificial Sequence
  Description of Artificial Sequence: Synthetic oligonucleotide
  Sense Strand Starting at position 223 of SEQ ID NO: 315842
gggcaucuacccuacaaua

SEQ ID NO: 336366 - RNA, 19 nt, Artificial Sequence
  Description of Artificial Sequence: Synthetic oligonucleotide
  Antisense Strand to SEQ ID NO: 336365
uauuguaggguagaugccc

SEQ ID NO: 336367 - RNA, 19 nt, Artificial Sequence
  Description of Artificial Sequence: Synthetic oligonucleotide
  Sense Strand Starting at position 223 of SEQ ID NO: 315964
gacgaccugucucugacau

SEQ ID NO: 336368 - RNA, 19 nt, Artificial Sequence
  Description of Artificial Sequence: Synthetic oligonucleotide
  Antisense Strand to SEQ ID NO: 336367
augucagagacaggucguc

SEQ ID NO: 336369 - RNA, 19 nt, Artificial Sequence
  Description of Artificial Sequence: Synthetic oligonucleotide
  Sense Strand Starting at position 223 of SEQ ID NO: 316008
ucguaagggacguaagaaa

SEQ ID NO: 336370 - RNA, 19 nt, Artificial Sequence
  Description of Artificial Sequence: Synthetic oligonucleotide
  Antisense Strand to SEQ ID NO: 336369
uuucuuacgucccuuacga

SEQ ID NO: 336371 - RNA, 19 nt, Artificial Sequence
  Description of Artificial Sequence: Synthetic oligonucleotide
  Sense Strand Starting at position 223 of SEQ ID NO: 316061
guaucuccaugauuaaagu

SEQ ID NO: 336372 - RNA, 19 nt, Artificial Sequence
  Description of Artificial Sequence: Synthetic oligonucleotide
  Antisense Strand to SEQ ID NO: 336371
acuuuaaucauggagauac

SEQ ID NO: 336373 - RNA, 19 nt, Artificial Sequence
  Description of Artificial Sequence: Synthetic oligonucleotide
  Sense Strand Starting at position 223 of SEQ ID NO: 316072
auuaaaguguuccuaagaa

SEQ ID NO: 336374 - RNA, 19 nt, Artificial Sequence
  Description of Artificial Sequence: Synthetic oligonucleotide
  Antisense Strand to SEQ ID NO: 336373
uucuuaggaacacuuuaau

SEQ ID NO: 336375 - RNA, 19 nt, Artificial Sequence
  Description of Artificial Sequence: Synthetic oligonucleotide
  Sense Strand Starting at position 223 of SEQ ID NO: 316093
cguccuuauuucuuucuau

SEQ ID NO: 336376 - RNA, 19 nt, Artificial Sequence
  Description of Artificial Sequence: Synthetic oligonucleotide
  Antisense Strand to SEQ ID NO: 336375
auagaaagaaauaaggacg

SEQ ID NO: 336377 - RNA, 19 nt, Artificial Sequence
  Description of Artificial Sequence: Synthetic oligonucleotide
  Sense Strand Starting at position 223 of SEQ ID NO: 316113
ccucauuugugugcaugga

SEQ ID NO: 336378 - RNA, 19 nt, Artificial Sequence
  Description of Artificial Sequence: Synthetic oligonucleotide
  Antisense Strand to SEQ ID NO: 336377
uccaugcacacaaaugagg

SEQ ID NO: 336379 - RNA, 19 nt, Artificial Sequence
  Description of Artificial Sequence: Synthetic oligonucleotide
  Sense Strand Starting at position 223 of SEQ ID NO: 316193
guacuaacauaaccguuua

SEQ ID NO: 336380 - RNA, 19 nt, Artificial Sequence
  Description of Artificial Sequence: Synthetic oligonucleotide
  Antisense Strand to SEQ ID NO: 336379
uaaacgguuauguuaguac

SEQ ID NO: 336381 - RNA, 19 nt, Artificial Sequence
  Description of Artificial Sequence: Synthetic oligonucleotide
  Sense Strand Starting at position 223 of SEQ ID NO: 317289
cgaggcucauuucuagcaa

SEQ ID NO: 336382 - RNA, 19 nt, Artificial Sequence
  Description of Artificial Sequence: Synthetic oligonucleotide
  Antisense Strand to SEQ ID NO: 336381
uugcuagaaaugagccucg

SEQ ID NO: 336383 - RNA, 19 nt, Artificial Sequence
  Description of Artificial Sequence: Synthetic oligonucleotide
  Sense Strand Starting at position 223 of SEQ ID NO: 317466
augcucugugcuuagggaa

SEQ ID NO: 336384 - RNA, 19 nt, Artificial Sequence
  Description of Artificial Sequence: Synthetic oligonucleotide
  Antisense Strand to SEQ ID NO: 336383
uucccuaagcacagagcau

SEQ ID NO: 336385 - RNA, 19 nt, Artificial Sequence
  Description of Artificial Sequence: Synthetic oligonucleotide
  Sense Strand Starting at position 223 of SEQ ID NO: 317642
acugucacgugaguaagaa

SEQ ID NO: 336386 - RNA, 19 nt, Artificial Sequence
  Description of Artificial Sequence: Synthetic oligonucleotide
  Antisense Strand to SEQ ID NO: 336385
uucuuacucacgugacagu

SEQ ID NO: 336387 - RNA, 19 nt, Artificial Sequence
  Description of Artificial Sequence: Synthetic oligonucleotide
  Sense Strand Starting at position 223 of SEQ ID NO: 317643
cugucacgugaguaagaaa

SEQ ID NO: 336388 - RNA, 19 nt, Artificial Sequence
  Description of Artificial Sequence: Synthetic oligonucleotide
  Antisense Strand to SEQ ID NO: 336387
uuucuuacucacgugacag

SEQ ID NO: 336389 - RNA, 19 nt, Artificial Sequence
  Description of Artificial Sequence: Synthetic oligonucleotide
  Sense Strand Starting at position 223 of SEQ ID NO: 317745
gggcauugauuaucuugau

SEQ ID NO: 336390 - RNA, 19 nt, Artificial Sequence
  Description of Artificial Sequence: Synthetic oligonucleotide
  Antisense Strand to SEQ ID NO: 336389
aucaagauaaucaaugccc

SEQ ID NO: 336391 - RNA, 19 nt, Artificial Sequence
  Description of Artificial Sequence: Synthetic oligonucleotide
  Sense Strand Starting at position 223 of SEQ ID NO: 317746
ggcauugauuaucuugaug

SEQ ID NO: 336392 - RNA, 19 nt, Artificial Sequence
  Description of Artificial Sequence: Synthetic oligonucleotide
  Antisense Strand to SEQ ID NO: 336391
caucaagauaaucaaugcc

SEQ ID NO: 336393 - RNA, 19 nt, Artificial Sequence
  Description of Artificial Sequence: Synthetic oligonucleotide
  Sense Strand Starting at position 223 of SEQ ID NO: 317749
auugauuaucuugaugcuu

SEQ ID NO: 336394 - RNA, 19 nt, Artificial Sequence
  Description of Artificial Sequence: Synthetic oligonucleotide
  Antisense Strand to SEQ ID NO: 336393
aagcaucaagauaaucaau

SEQ ID NO: 336395 - RNA, 19 nt, Artificial Sequence
  Description of Artificial Sequence: Synthetic oligonucleotide
  Sense Strand Starting at position 223 of SEQ ID NO: 317851
ugcguuuaucuugaaagga

SEQ ID NO: 336396 - RNA, 19 nt, Artificial Sequence
  Description of Artificial Sequence: Synthetic oligonucleotide
  Antisense Strand to SEQ ID NO: 336395
uccuuucaagauaaacgca

SEQ ID NO: 336397 - RNA, 19 nt, Artificial Sequence
  Description of Artificial Sequence: Synthetic oligonucleotide
  Sense Strand Starting at position 223 of SEQ ID NO: 317931
gguuggagguguuuggaga

SEQ ID NO: 336398 - RNA, 19 nt, Artificial Sequence
  Description of Artificial Sequence: Synthetic oligonucleotide
  Antisense Strand to SEQ ID NO: 336397
ucuccaaacaccuccaacc

SEQ ID NO: 336399 - RNA, 19 nt, Artificial Sequence
  Description of Artificial Sequence: Synthetic oligonucleotide
  Sense Strand Starting at position 223 of SEQ ID NO: 318022
guaacaguuggaggcaaua

SEQ ID NO: 336400 - RNA, 19 nt, Artificial Sequence
  Description of Artificial Sequence: Synthetic oligonucleotide
  Antisense Strand to SEQ ID NO: 336399
uauugccuccaacuguuac

SEQ ID NO: 336401 - RNA, 19 nt, Artificial Sequence
  Description of Artificial Sequence: Synthetic oligonucleotide
  Sense Strand Starting at position 223 of SEQ ID NO: 318035
gcaauaauaccugagcaau

SEQ ID NO: 336402 - RNA, 19 nt, Artificial Sequence
  Description of Artificial Sequence: Synthetic oligonucleotide
  Antisense Strand to SEQ ID NO: 336401
auugcucagguauuauugc

SEQ ID NO: 336403 - RNA, 19 nt, Artificial Sequence
  Description of Artificial Sequence: Synthetic oligonucleotide
  Sense Strand Starting at position 223 of SEQ ID NO: 318045
cugagcaauugaccacaaa

SEQ ID NO: 336404 - RNA, 19 nt, Artificial Sequence
  Description of Artificial Sequence: Synthetic oligonucleotide
  Antisense Strand to SEQ ID NO: 336403
uuuguggucaauugcucag

SEQ ID NO: 336405 - RNA, 19 nt, Artificial Sequence
  Description of Artificial Sequence: Synthetic oligonucleotide
  Sense Strand Starting at position 223 of SEQ ID NO: 318073
gcuuguuuaguagauuaag

SEQ ID NO: 336406 - RNA, 19 nt, Artificial Sequence
  Description of Artificial Sequence: Synthetic oligonucleotide
  Antisense Strand to SEQ ID NO: 336405
cuuaaucuacuaaacaagc

SEQ ID NO: 336407 - RNA, 19 nt, Artificial Sequence
  Description of Artificial Sequence: Synthetic oligonucleotide
  Sense Strand Starting at position 223 of SEQ ID NO: 318188
gaaagucagguuuggauca

SEQ ID NO: 336408 - RNA, 19 nt, Artificial Sequence
  Description of Artificial Sequence: Synthetic oligonucleotide
  Antisense Strand to SEQ ID NO: 336407
ugauccaaaccugacuuuc

SEQ ID NO: 336409 - RNA, 19 nt, Artificial Sequence
  Description of Artificial Sequence: Synthetic oligonucleotide
  Sense Strand Starting at position 223 of SEQ ID NO: 318319
cuucgucuugcuuugaguu

SEQ ID NO: 336410 - RNA, 19 nt, Artificial Sequence
  Description of Artificial Sequence: Synthetic oligonucleotide
  Antisense Strand to SEQ ID NO: 336409
aacucaaagcaagacgaag

SEQ ID NO: 336411 - RNA, 19 nt, Artificial Sequence
  Description of Artificial Sequence: Synthetic oligonucleotide
  Sense Strand Starting at position 223 of SEQ ID NO: 318332
ugaguuauccacuggguag

SEQ ID NO: 336412 - RNA, 19 nt, Artificial Sequence
  Description of Artificial Sequence: Synthetic oligonucleotide
  Antisense Strand to SEQ ID NO: 336411
cuacccaguggauaacuca

SEQ ID NO: 336413 - RNA, 19 nt, Artificial Sequence
  Description of Artificial Sequence: Synthetic oligonucleotide
  Sense Strand Starting at position 223 of SEQ ID NO: 318355
cgguuaauuauugaguacu

SEQ ID NO: 336414 - RNA, 19 nt, Artificial Sequence
  Description of Artificial Sequence: Synthetic oligonucleotide
  Antisense Strand to SEQ ID NO: 336413
aguacucaauaauuaaccg

SEQ ID NO: 336415 - RNA, 19 nt, Artificial Sequence
  Description of Artificial Sequence: Synthetic oligonucleotide
  Sense Strand Starting at position 223 of SEQ ID NO: 318476
ccacaccaaucuguguaua

SEQ ID NO: 336416 - RNA, 19 nt, Artificial Sequence
  Description of Artificial Sequence: Synthetic oligonucleotide
  Antisense Strand to SEQ ID NO: 336415
uauacacagauuggugugg

SEQ ID NO: 336417 - RNA, 19 nt, Artificial Sequence
  Description of Artificial Sequence: Synthetic oligonucleotide
  Sense Strand Starting at position 223 of SEQ ID NO: 318478
acaccaaucuguguauaau

SEQ ID NO: 336418 - RNA, 19 nt, Artificial Sequence
  Description of Artificial Sequence: Synthetic oligonucleotide
  Antisense Strand to SEQ ID NO: 336417
auuauacacagauuggugu

SEQ ID NO: 336419 - RNA, 19 nt, Artificial Sequence
  Description of Artificial Sequence: Synthetic oligonucleotide
  Sense Strand Starting at position 223 of SEQ ID NO: 318503
caagguguuagggauaucu

SEQ ID NO: 336420 - RNA, 19 nt, Artificial Sequence
  Description of Artificial Sequence: Synthetic oligonucleotide
  Antisense Strand to SEQ ID NO: 336419
agauaucccuaacaccuug

SEQ ID NO: 336421 - RNA, 19 nt, Artificial Sequence
  Description of Artificial Sequence: Synthetic oligonucleotide
  Sense Strand Starting at position 223 of SEQ ID NO: 318505
agguguuagggauaucuug

SEQ ID NO: 336422 - RNA, 19 nt, Artificial Sequence
  Description of Artificial Sequence: Synthetic oligonucleotide
  Antisense Strand to SEQ ID NO: 336421
caagauaucccuaacaccu

SEQ ID NO: 336423 - RNA, 19 nt, Artificial Sequence
  Description of Artificial Sequence: Synthetic oligonucleotide
  Sense Strand Starting at position 223 of SEQ ID NO: 319015
caagacgaugucugaaguu

SEQ ID NO: 336424 - RNA, 19 nt, Artificial Sequence
  Description of Artificial Sequence: Synthetic oligonucleotide
  Antisense Strand to SEQ ID NO: 336423
aacuucagacaucgucuug

SEQ ID NO: 336425 - RNA, 19 nt, Artificial Sequence
  Description of Artificial Sequence: Synthetic oligonucleotide
  Sense Strand Starting at position 223 of SEQ ID NO: 319027
ugaaguugagcuuguaaag

SEQ ID NO: 336426 - RNA, 19 nt, Artificial Sequence
  Description of Artificial Sequence: Synthetic oligonucleotide
  Antisense Strand to SEQ ID NO: 336425
cuuuacaagcucaacuuca

SEQ ID NO: 336427 - RNA, 19 nt, Artificial Sequence
  Description of Artificial Sequence: Synthetic oligonucleotide
  Sense Strand Starting at position 223 of SEQ ID NO: 319152
gagucuccauagucucaga

SEQ ID NO: 336428 - RNA, 19 nt, Artificial Sequence
  Description of Artificial Sequence: Synthetic oligonucleotide
  Antisense Strand to SEQ ID NO: 336427
ucugagacuauggagacuc

SEQ ID NO: 336429 - RNA, 19 nt, Artificial Sequence
  Description of Artificial Sequence: Synthetic oligonucleotide
  Sense Strand Starting at position 223 of SEQ ID NO: 319171
aacugagaguaccuuugau

SEQ ID NO: 336430 - RNA, 19 nt, Artificial Sequence
  Description of Artificial Sequence: Synthetic oligonucleotide
  Antisense Strand to SEQ ID NO: 336429
aucaaagguacucucaguu

SEQ ID NO: 336431 - RNA, 19 nt, Artificial Sequence
  Description of Artificial Sequence: Synthetic oligonucleotide
  Sense Strand Starting at position 224 of SEQ ID NO: 315321
gugcgaugcaaucugcuaa

SEQ ID NO: 336432 - RNA, 19 nt, Artificial Sequence
  Description of Artificial Sequence: Synthetic oligonucleotide
  Antisense Strand to SEQ ID NO: 336431
uuagcagauugcaucgcac

SEQ ID NO: 336433 - RNA, 19 nt, Artificial Sequence
  Description of Artificial Sequence: Synthetic oligonucleotide
  Sense Strand Starting at position 224 of SEQ ID NO: 315364
gggcuaaucccauagcuau

SEQ ID NO: 336434 - RNA, 19 nt, Artificial Sequence
  Description of Artificial Sequence: Synthetic oligonucleotide
  Antisense Strand to SEQ ID NO: 336433
auagcuaugggauuagccc

SEQ ID NO: 336435 - RNA, 19 nt, Artificial Sequence
  Description of Artificial Sequence: Synthetic oligonucleotide
  Sense Strand Starting at position 224 of SEQ ID NO: 315376
uagcuauaacuaugaggga

SEQ ID NO: 336436 - RNA, 19 nt, Artificial Sequence
  Description of Artificial Sequence: Synthetic oligonucleotide
  Antisense Strand to SEQ ID NO: 336435
ucccucauaguuauagcua

SEQ ID NO: 336437 - RNA, 19 nt, Artificial Sequence
  Description of Artificial Sequence: Synthetic oligonucleotide
  Sense Strand Starting at position 224 of SEQ ID NO: 315503
aguugaagaaaucguuauc

SEQ ID NO: 336438 - RNA, 19 nt, Artificial Sequence
  Description of Artificial Sequence: Synthetic oligonucleotide
  Antisense Strand to SEQ ID NO: 336437
gauaacgauuucuucaacu

SEQ ID NO: 336439 - RNA, 19 nt, Artificial Sequence
  Description of Artificial Sequence: Synthetic oligonucleotide
  Sense Strand Starting at position 224 of SEQ ID NO: 315508
aagaaaucguuaucugacu

SEQ ID NO: 336440 - RNA, 19 nt, Artificial Sequence
  Description of Artificial Sequence: Synthetic oligonucleotide
  Antisense Strand to SEQ ID NO: 336439
agucagauaacgauuucuu

SEQ ID NO: 336441 - RNA, 19 nt, Artificial Sequence
  Description of Artificial Sequence: Synthetic oligonucleotide
  Sense Strand Starting at position 224 of SEQ ID NO: 315513
aucguuaucugacuggaua

SEQ ID NO: 336442 - RNA, 19 nt, Artificial Sequence
  Description of Artificial Sequence: Synthetic oligonucleotide
  Antisense Strand to SEQ ID NO: 336441
uauccagucagauaacgau

SEQ ID NO: 336443 - RNA, 19 nt, Artificial Sequence
  Description of Artificial Sequence: Synthetic oligonucleotide
  Sense Strand Starting at position 224 of SEQ ID NO: 315555
auuuguguauguguaauga

SEQ ID NO: 336444 - RNA, 19 nt, Artificial Sequence
  Description of Artificial Sequence: Synthetic oligonucleotide
  Antisense Strand to SEQ ID NO: 336443
ucauuacacauacacaaau

SEQ ID NO: 336445 - RNA, 19 nt, Artificial Sequence
  Description of Artificial Sequence: Synthetic oligonucleotide
  Sense Strand Starting at position 224 of SEQ ID NO: 315665
cugaaaccuucugucaaug

SEQ ID NO: 336446 - RNA, 19 nt, Artificial Sequence
  Description of Artificial Sequence: Synthetic oligonucleotide
  Antisense Strand to SEQ ID NO: 336445
cauugacagaagguuucag

SEQ ID NO: 336447 - RNA, 19 nt, Artificial Sequence
  Description of Artificial Sequence: Synthetic oligonucleotide
  Sense Strand Starting at position 224 of SEQ ID NO: 315683
guuggcuuuagcugaauuu

SEQ ID NO: 336448 - RNA, 19 nt, Artificial Sequence
  Description of Artificial Sequence: Synthetic oligonucleotide
  Antisense Strand to SEQ ID NO: 336447
aaauucagcuaaagccaac

SEQ ID NO: 336449 - RNA, 19 nt, Artificial Sequence
  Description of Artificial Sequence: Synthetic oligonucleotide
  Sense Strand Starting at position 224 of SEQ ID NO: 315911
ggcagugugccuguuuaua

SEQ ID NO: 336450 - RNA, 19 nt, Artificial Sequence
  Description of Artificial Sequence: Synthetic oligonucleotide
  Antisense Strand to SEQ ID NO: 336449
uauaaacaggcacacugcc

SEQ ID NO: 336451 - RNA, 19 nt, Artificial Sequence
  Description of Artificial Sequence: Synthetic oligonucleotide
  Sense Strand Starting at position 224 of SEQ ID NO: 315976
cugauaaugccacagucaa

SEQ ID NO: 336452 - RNA, 19 nt, Artificial Sequence
  Description of Artificial Sequence: Synthetic oligonucleotide
  Antisense Strand to SEQ ID NO: 336451
uugacuguggcauuaucag

SEQ ID NO: 336453 - RNA, 19 nt, Artificial Sequence
  Description of Artificial Sequence: Synthetic oligonucleotide
  Sense Strand Starting at position 224 of SEQ ID NO: 316102
uccuuaugauuuccucgua

SEQ ID NO: 336454 - RNA, 19 nt, Artificial Sequence
  Description of Artificial Sequence: Synthetic oligonucleotide
  Antisense Strand to SEQ ID NO: 336453
uacgaggaaaucauaagga

SEQ ID NO: 336455 - RNA, 19 nt, Artificial Sequence
  Description of Artificial Sequence: Synthetic oligonucleotide
  Sense Strand Starting at position 224 of SEQ ID NO: 316103
ccuuaugauuuccucguau

SEQ ID NO: 336456 - RNA, 19 nt, Artificial Sequence
  Description of Artificial Sequence: Synthetic oligonucleotide
  Antisense Strand to SEQ ID NO: 336455
auacgaggaaaucauaagg

SEQ ID NO: 336457 - RNA, 19 nt, Artificial Sequence
  Description of Artificial Sequence: Synthetic oligonucleotide
  Sense Strand Starting at position 224 of SEQ ID NO: 316105
uuaugauuuccucguaucu

SEQ ID NO: 336458 - RNA, 19 nt, Artificial Sequence
  Description of Artificial Sequence: Synthetic oligonucleotide
  Antisense Strand to SEQ ID NO: 336457
agauacgaggaaaucauaa

SEQ ID NO: 336459 - RNA, 19 nt, Artificial Sequence
  Description of Artificial Sequence: Synthetic oligonucleotide
  Sense Strand Starting at position 224 of SEQ ID NO: 316164
gggcaucuacccuacaaua

SEQ ID NO: 336460 - RNA, 19 nt, Artificial Sequence
  Description of Artificial Sequence: Synthetic oligonucleotide
  Antisense Strand to SEQ ID NO: 336459
uauuguaggguagaugccc

SEQ ID NO: 336461 - RNA, 19 nt, Artificial Sequence
  Description of Artificial Sequence: Synthetic oligonucleotide
  Sense Strand Starting at position 224 of SEQ ID NO: 316330
ucguaagggacguaagaaa

SEQ ID NO: 336462 - RNA, 19 nt, Artificial Sequence
  Description of Artificial Sequence: Synthetic oligonucleotide
  Antisense Strand to SEQ ID NO: 336461
uuucuuacgucccuuacga

SEQ ID NO: 336463 - RNA, 19 nt, Artificial Sequence
  Description of Artificial Sequence: Synthetic oligonucleotide
  Sense Strand Starting at position 224 of SEQ ID NO: 316383
guaucuccaugauuaaagu

SEQ ID NO: 336464 - RNA, 19 nt, Artificial Sequence
  Description of Artificial Sequence: Synthetic oligonucleotide
  Antisense Strand to SEQ ID NO: 336463
acuuuaaucauggagauac

SEQ ID NO: 336465 - RNA, 19 nt, Artificial Sequence
  Description of Artificial Sequence: Synthetic oligonucleotide
  Sense Strand Starting at position 224 of SEQ ID NO: 316394
auuaaaguguuccuaagaa

SEQ ID NO: 336466 - RNA, 19 nt, Artificial Sequence
  Description of Artificial Sequence: Synthetic oligonucleotide
  Antisense Strand to SEQ ID NO: 336465
uucuuaggaacacuuuaau

SEQ ID NO: 336467 - RNA, 19 nt, Artificial Sequence
  Description of Artificial Sequence: Synthetic oligonucleotide
  Sense Strand Starting at position 224 of SEQ ID NO: 316415
cguccuuauuucuuucuau

SEQ ID NO: 336468 - RNA, 19 nt, Artificial Sequence
  Description of Artificial Sequence: Synthetic oligonucleotide
  Antisense Strand to SEQ ID NO: 336467
auagaaagaaauaaggacg

SEQ ID NO: 336469 - RNA, 19 nt, Artificial Sequence
  Description of Artificial Sequence: Synthetic oligonucleotide
  Sense Strand Starting at position 224 of SEQ ID NO: 316435
ccucauuugugugcaugga

SEQ ID NO: 336470 - RNA, 19 nt, Artificial Sequence
  Description of Artificial Sequence: Synthetic oligonucleotide
  Antisense Strand to SEQ ID NO: 336469
uccaugcacacaaaugagg

SEQ ID NO: 336471 - RNA, 19 nt, Artificial Sequence
  Description of Artificial Sequence: Synthetic oligonucleotide
  Sense Strand Starting at position 224 of SEQ ID NO: 317611
cgaggcucauuucuagcaa

SEQ ID NO: 336472 - RNA, 19 nt, Artificial Sequence
  Description of Artificial Sequence: Synthetic oligonucleotide
  Antisense Strand to SEQ ID NO: 336471
uugcuagaaaugagccucg

SEQ ID NO: 336473 - RNA, 19 nt, Artificial Sequence
  Description of Artificial Sequence: Synthetic oligonucleotide
  Sense Strand Starting at position 224 of SEQ ID NO: 317788
augcucugugcuuagggaa

SEQ ID NO: 336474 - RNA, 19 nt, Artificial Sequence
  Description of Artificial Sequence: Synthetic oligonucleotide
  Antisense Strand to SEQ ID NO: 336473
uucccuaagcacagagcau

SEQ ID NO: 336475 - RNA, 19 nt, Artificial Sequence
  Description of Artificial Sequence: Synthetic oligonucleotide
  Sense Strand Starting at position 224 of SEQ ID NO: 317965
cugucacgugaguaagaaa

SEQ ID NO: 336476 - RNA, 19 nt, Artificial Sequence
  Description of Artificial Sequence: Synthetic oligonucleotide
  Antisense Strand to SEQ ID NO: 336475
uuucuuacucacgugacag

SEQ ID NO: 336477 - RNA, 19 nt, Artificial Sequence
  Description of Artificial Sequence: Synthetic oligonucleotide
  Sense Strand Starting at position 224 of SEQ ID NO: 318067
gggcauugauuaucuugau

SEQ ID NO: 336478 - RNA, 19 nt, Artificial Sequence
  Description of Artificial Sequence: Synthetic oligonucleotide
  Antisense Strand to SEQ ID NO: 336477
aucaagauaaucaaugccc

SEQ ID NO: 336479 - RNA, 19 nt, Artificial Sequence
  Description of Artificial Sequence: Synthetic oligonucleotide
  Sense Strand Starting at position 224 of SEQ ID NO: 318068
ggcauugauuaucuugaug

SEQ ID NO: 336480 - RNA, 19 nt, Artificial Sequence
  Description of Artificial Sequence: Synthetic oligonucleotide
  Antisense Strand to SEQ ID NO: 336479
caucaagauaaucaaugcc

SEQ ID NO: 336481 - RNA, 19 nt, Artificial Sequence
  Description of Artificial Sequence: Synthetic oligonucleotide
  Sense Strand Starting at position 224 of SEQ ID NO: 318071
auugauuaucuugaugcuu

SEQ ID NO: 336482 - RNA, 19 nt, Artificial Sequence
  Description of Artificial Sequence: Synthetic oligonucleotide
  Antisense Strand to SEQ ID NO: 336481
aagcaucaagauaaucaau

SEQ ID NO: 336483 - RNA, 19 nt, Artificial Sequence
  Description of Artificial Sequence: Synthetic oligonucleotide
  Sense Strand Starting at position 224 of SEQ ID NO: 318173
ugcguuuaucuugaaagga

SEQ ID NO: 336484 - RNA, 19 nt, Artificial Sequence
  Description of Artificial Sequence: Synthetic oligonucleotide
  Antisense Strand to SEQ ID NO: 336483
uccuuucaagauaaacgca

SEQ ID NO: 336485 - RNA, 19 nt, Artificial Sequence
  Description of Artificial Sequence: Synthetic oligonucleotide
  Sense Strand Starting at position 224 of SEQ ID NO: 318253
gguuggagguguuuggaga

SEQ ID NO: 336486 - RNA, 19 nt, Artificial Sequence
  Description of Artificial Sequence: Synthetic oligonucleotide
  Antisense Strand to SEQ ID NO: 336485
ucuccaaacaccuccaacc

SEQ ID NO: 336487 - RNA, 19 nt, Artificial Sequence
  Description of Artificial Sequence: Synthetic oligonucleotide
  Sense Strand Starting at position 224 of SEQ ID NO: 318344
guaacaguuggaggcaaua

SEQ ID NO: 336488 - RNA, 19 nt, Artificial Sequence
  Description of Artificial Sequence: Synthetic oligonucleotide
  Antisense Strand to SEQ ID NO: 336487
uauugccuccaacuguuac

SEQ ID NO: 336489 - RNA, 19 nt, Artificial Sequence
  Description of Artificial Sequence: Synthetic oligonucleotide
  Sense Strand Starting at position 224 of SEQ ID NO: 318357
gcaauaauaccugagcaau

SEQ ID NO: 336490 - RNA, 19 nt, Artificial Sequence
  Description of Artificial Sequence: Synthetic oligonucleotide
  Antisense Strand to SEQ ID NO: 336489
auugcucagguauuauugc

SEQ ID NO: 336491 - RNA, 19 nt, Artificial Sequence
  Description of Artificial Sequence: Synthetic oligonucleotide
  Sense Strand Starting at position 224 of SEQ ID NO: 318367
cugagcaauugaccacaaa

SEQ ID NO: 336492 - RNA, 19 nt, Artificial Sequence
  Description of Artificial Sequence: Synthetic oligonucleotide
  Antisense Strand to SEQ ID NO: 336491
uuuguggucaauugcucag

SEQ ID NO: 336493 - RNA, 19 nt, Artificial Sequence
  Description of Artificial Sequence: Synthetic oligonucleotide
  Sense Strand Starting at position 224 of SEQ ID NO: 318395
gcuuguuuaguagauuaag

SEQ ID NO: 336494 - RNA, 19 nt, Artificial Sequence
  Description of Artificial Sequence: Synthetic oligonucleotide
  Antisense Strand to SEQ ID NO: 336493
cuuaaucuacuaaacaagc

SEQ ID NO: 336495 - RNA, 19 nt, Artificial Sequence
  Description of Artificial Sequence: Synthetic oligonucleotide
  Sense Strand Starting at position 224 of SEQ ID NO: 318510
gaaagucagguuuggauca

SEQ ID NO: 336496 - RNA, 19 nt, Artificial Sequence
  Description of Artificial Sequence: Synthetic oligonucleotide
  Antisense Strand to SEQ ID NO: 336495
ugauccaaaccugacuuuc

SEQ ID NO: 336497 - RNA, 19 nt, Artificial Sequence
  Description of Artificial Sequence: Synthetic oligonucleotide
  Sense Strand Starting at position 224 of SEQ ID NO: 318641
cuucgucuugcuuugaguu

SEQ ID NO: 336498 - RNA, 19 nt, Artificial Sequence
  Description of Artificial Sequence: Synthetic oligonucleotide
  Antisense Strand to SEQ ID NO: 336497
aacucaaagcaagacgaag

SEQ ID NO: 336499 - RNA, 19 nt, Artificial Sequence
  Description of Artificial Sequence: Synthetic oligonucleotide
  Sense Strand Starting at position 224 of SEQ ID NO: 318654
ugaguuauccacuggguag

SEQ ID NO: 336500 - RNA, 19 nt, Artificial Sequence
  Description of Artificial Sequence: Synthetic oligonucleotide
  Antisense Strand to SEQ ID NO: 336499
cuacccaguggauaacuca

SEQ ID NO: 336501 - RNA, 19 nt, Artificial Sequence
  Description of Artificial Sequence: Synthetic oligonucleotide
  Sense Strand Starting at position 224 of SEQ ID NO: 318677
cgguuaauuauugaguacu

SEQ ID NO: 336502 - RNA, 19 nt, Artificial Sequence
  Description of Artificial Sequence: Synthetic oligonucleotide
  Antisense Strand to SEQ ID NO: 336501
aguacucaauaauuaaccg

SEQ ID NO: 336503 - RNA, 19 nt, Artificial Sequence
  Description of Artificial Sequence: Synthetic oligonucleotide
  Sense Strand Starting at position 224 of SEQ ID NO: 318798
ccacaccaaucuguguaua

SEQ ID NO: 336504 - RNA, 19 nt, Artificial Sequence
  Description of Artificial Sequence: Synthetic oligonucleotide
  Antisense Strand to SEQ ID NO: 336503
uauacacagauuggugugg

SEQ ID NO: 336505 - RNA, 19 nt, Artificial Sequence
  Description of Artificial Sequence: Synthetic oligonucleotide
  Sense Strand Starting at position 224 of SEQ ID NO: 318800
acaccaaucuguguauaau

SEQ ID NO: 336506 - RNA, 19 nt, Artificial Sequence
  Description of Artificial Sequence: Synthetic oligonucleotide
  Antisense Strand to SEQ ID NO: 336505
auuauacacagauuggugu

SEQ ID NO: 336507 - RNA, 19 nt, Artificial Sequence
  Description of Artificial Sequence: Synthetic oligonucleotide
  Sense Strand Starting at position 224 of SEQ ID NO: 318825
caagguguuagggauaucu

SEQ ID NO: 336508 - RNA, 19 nt, Artificial Sequence
  Description of Artificial Sequence: Synthetic oligonucleotide
  Antisense Strand to SEQ ID NO: 336507
agauaucccuaacaccuug

SEQ ID NO: 336509 - RNA, 19 nt, Artificial Sequence
  Description of Artificial Sequence: Synthetic oligonucleotide
  Sense Strand Starting at position 224 of SEQ ID NO: 318827
agguguuagggauaucuug

SEQ ID NO: 336510 - RNA, 19 nt, Artificial Sequence
  Description of Artificial Sequence: Synthetic oligonucleotide
  Antisense Strand to SEQ ID NO: 336509
caagauaucccuaacaccu

SEQ ID NO: 336511 - RNA, 19 nt, Artificial Sequence
  Description of Artificial Sequence: Synthetic oligonucleotide
  Sense Strand Starting at position 225 of SEQ ID NO: 315471
gugcgaugcaaucugcuaa

SEQ ID NO: 336512 - RNA, 19 nt, Artificial Sequence
  Description of Artificial Sequence: Synthetic oligonucleotide
  Antisense Strand to SEQ ID NO: 336511
uuagcagauugcaucgcac

SEQ ID NO: 336513 - RNA, 19 nt, Artificial Sequence
  Description of Artificial Sequence: Synthetic oligonucleotide
  Sense Strand Starting at position 225 of SEQ ID NO: 315514
gggcuaaucccauagcuau

SEQ ID NO: 336514 - RNA, 19 nt, Artificial Sequence
  Description of Artificial Sequence: Synthetic oligonucleotide
  Antisense Strand to SEQ ID NO: 336513
auagcuaugggauuagccc

SEQ ID NO: 336515 - RNA, 19 nt, Artificial Sequence
  Description of Artificial Sequence: Synthetic oligonucleotide
  Sense Strand Starting at position 225 of SEQ ID NO: 315526
uagcuauaacuaugaggga

SEQ ID NO: 336516 - RNA, 19 nt, Artificial Sequence
  Description of Artificial Sequence: Synthetic oligonucleotide
  Antisense Strand to SEQ ID NO: 336515
ucccucauaguuauagcua

SEQ ID NO: 336517 - RNA, 19 nt, Artificial Sequence
  Description of Artificial Sequence: Synthetic oligonucleotide
  Sense Strand Starting at position 225 of SEQ ID NO: 315653
aguugaagaaaucguuauc

SEQ ID NO: 336518 - RNA, 19 nt, Artificial Sequence
  Description of Artificial Sequence: Synthetic oligonucleotide
  Antisense Strand to SEQ ID NO: 336517
gauaacgauuucuucaacu

SEQ ID NO: 336519 - RNA, 19 nt, Artificial Sequence
  Description of Artificial Sequence: Synthetic oligonucleotide
  Sense Strand Starting at position 225 of SEQ ID NO: 315658
aagaaaucguuaucugacu

SEQ ID NO: 336520 - RNA, 19 nt, Artificial Sequence
  Description of Artificial Sequence: Synthetic oligonucleotide
  Antisense Strand to SEQ ID NO: 336519
agucagauaacgauuucuu

SEQ ID NO: 336521 - RNA, 19 nt, Artificial Sequence
  Description of Artificial Sequence: Synthetic oligonucleotide
  Sense Strand Starting at position 225 of SEQ ID NO: 315663
aucguuaucugacuggaua

SEQ ID NO: 336522 - RNA, 19 nt, Artificial Sequence
  Description of Artificial Sequence: Synthetic oligonucleotide
  Antisense Strand to SEQ ID NO: 336521
uauccagucagauaacgau

SEQ ID NO: 336523 - RNA, 19 nt, Artificial Sequence
  Description of Artificial Sequence: Synthetic oligonucleotide
  Sense Strand Starting at position 225 of SEQ ID NO: 315705
auuuguguauguguaauga

SEQ ID NO: 336524 - RNA, 19 nt, Artificial Sequence
  Description of Artificial Sequence: Synthetic oligonucleotide
  Antisense Strand to SEQ ID NO: 336523
ucauuacacauacacaaau

SEQ ID NO: 336525 - RNA, 19 nt, Artificial Sequence
  Description of Artificial Sequence: Synthetic oligonucleotide
  Sense Strand Starting at position 225 of SEQ ID NO: 315815
cugaaaccuucugucaaug

SEQ ID NO: 336526 - RNA, 19 nt, Artificial Sequence
  Description of Artificial Sequence: Synthetic oligonucleotide
  Antisense Strand to SEQ ID NO: 336525
cauugacagaagguuucag

SEQ ID NO: 336527 - RNA, 19 nt, Artificial Sequence
  Description of Artificial Sequence: Synthetic oligonucleotide
  Sense Strand Starting at position 225 of SEQ ID NO: 315833
guuggcuuuagcugaauuu

SEQ ID NO: 336528 - RNA, 19 nt, Artificial Sequence
  Description of Artificial Sequence: Synthetic oligonucleotide
  Antisense Strand to SEQ ID NO: 336527
aaauucagcuaaagccaac

SEQ ID NO: 336529 - RNA, 19 nt, Artificial Sequence
  Description of Artificial Sequence: Synthetic oligonucleotide
  Sense Strand Starting at position 225 of SEQ ID NO: 316061
ggcagugugccuguuuaua

SEQ ID NO: 336530 - RNA, 19 nt, Artificial Sequence
  Description of Artificial Sequence: Synthetic oligonucleotide
  Antisense Strand to SEQ ID NO: 336529
uauaaacaggcacacugcc

SEQ ID NO: 336531 - RNA, 19 nt, Artificial Sequence
  Description of Artificial Sequence: Synthetic oligonucleotide
  Sense Strand Starting at position 225 of SEQ ID NO: 316126
cugauaaugccacagucaa

SEQ ID NO: 336532 - RNA, 19 nt, Artificial Sequence
  Description of Artificial Sequence: Synthetic oligonucleotide
  Antisense Strand to SEQ ID NO: 336531
uugacuguggcauuaucag

SEQ ID NO: 336533 - RNA, 19 nt, Artificial Sequence
  Description of Artificial Sequence: Synthetic oligonucleotide
  Sense Strand Starting at position 225 of SEQ ID NO: 316252
uccuuaugauuuccucgua

SEQ ID NO: 336534 - RNA, 19 nt, Artificial Sequence
  Description of Artificial Sequence: Synthetic oligonucleotide
  Antisense Strand to SEQ ID NO: 336533
uacgaggaaaucauaagga

SEQ ID NO: 336535 - RNA, 19 nt, Artificial Sequence
  Description of Artificial Sequence: Synthetic oligonucleotide
  Sense Strand Starting at position 225 of SEQ ID NO: 316253
ccuuaugauuuccucguau

SEQ ID NO: 336536 - RNA, 19 nt, Artificial Sequence
  Description of Artificial Sequence: Synthetic oligonucleotide
  Antisense Strand to SEQ ID NO: 336535
auacgaggaaaucauaagg

SEQ ID NO: 336537 - RNA, 19 nt, Artificial Sequence
  Description of Artificial Sequence: Synthetic oligonucleotide
  Sense Strand Starting at position 225 of SEQ ID NO: 316255
uuaugauuuccucguaucu

SEQ ID NO: 336538 - RNA, 19 nt, Artificial Sequence
  Description of Artificial Sequence: Synthetic oligonucleotide
  Antisense Strand to SEQ ID NO: 336537
agauacgaggaaaucauaa

SEQ ID NO: 336539 - RNA, 19 nt, Artificial Sequence
  Description of Artificial Sequence: Synthetic oligonucleotide
  Sense Strand Starting at position 225 of SEQ ID NO: 316314
gggcaucuacccuacaaua

SEQ ID NO: 336540 - RNA, 19 nt, Artificial Sequence
  Description of Artificial Sequence: Synthetic oligonucleotide
  Antisense Strand to SEQ ID NO: 336539
uauuguaggguagaugccc

SEQ ID NO: 336541 - RNA, 19 nt, Artificial Sequence
  Description of Artificial Sequence: Synthetic oligonucleotide
  Sense Strand Starting at position 225 of SEQ ID NO: 316480
ucguaagggacguaagaaa

SEQ ID NO: 336542 - RNA, 19 nt, Artificial Sequence
  Description of Artificial Sequence: Synthetic oligonucleotide
  Antisense Strand to SEQ ID NO: 336541
uuucuuacgucccuuacga

SEQ ID NO: 336543 - RNA, 19 nt, Artificial Sequence
  Description of Artificial Sequence: Synthetic oligonucleotide
  Sense Strand Starting at position 225 of SEQ ID NO: 316533
guaucuccaugauuaaagu

SEQ ID NO: 336544 - RNA, 19 nt, Artificial Sequence
  Description of Artificial Sequence: Synthetic oligonucleotide
  Antisense Strand to SEQ ID NO: 336543
acuuuaaucauggagauac

SEQ ID NO: 336545 - RNA, 19 nt, Artificial Sequence
  Description of Artificial Sequence: Synthetic oligonucleotide
  Sense Strand Starting at position 225 of SEQ ID NO: 316544
auuaaaguguuccuaagaa

SEQ ID NO: 336546 - RNA, 19 nt, Artificial Sequence
  Description of Artificial Sequence: Synthetic oligonucleotide
  Antisense Strand to SEQ ID NO: 336545
uucuuaggaacacuuuaau

SEQ ID NO: 336547 - RNA, 19 nt, Artificial Sequence
  Description of Artificial Sequence: Synthetic oligonucleotide
  Sense Strand Starting at position 225 of SEQ ID NO: 316565
cguccuuauuucuuucuau

SEQ ID NO: 336548 - RNA, 19 nt, Artificial Sequence
  Description of Artificial Sequence: Synthetic oligonucleotide
  Antisense Strand to SEQ ID NO: 336547
auagaaagaaauaaggacg

SEQ ID NO: 336549 - RNA, 19 nt, Artificial Sequence
  Description of Artificial Sequence: Synthetic oligonucleotide
  Sense Strand Starting at position 225 of SEQ ID NO: 316585
ccucauuugugugcaugga

SEQ ID NO: 336550 - RNA, 19 nt, Artificial Sequence
  Description of Artificial Sequence: Synthetic oligonucleotide
  Antisense Strand to SEQ ID NO: 336549
uccaugcacacaaaugagg

SEQ ID NO: 336551 - RNA, 19 nt, Artificial Sequence
  Description of Artificial Sequence: Synthetic oligonucleotide
  Sense Strand Starting at position 225 of SEQ ID NO: 317761
cgaggcucauuucuagcaa

SEQ ID NO: 336552 - RNA, 19 nt, Artificial Sequence
  Description of Artificial Sequence: Synthetic oligonucleotide
  Antisense Strand to SEQ ID NO: 336551
uugcuagaaaugagccucg

SEQ ID NO: 336553 - RNA, 19 nt, Artificial Sequence
  Description of Artificial Sequence: Synthetic oligonucleotide
  Sense Strand Starting at position 225 of SEQ ID NO: 317938
augcucugugcuuagggaa

SEQ ID NO: 336554 - RNA, 19 nt, Artificial Sequence
  Description of Artificial Sequence: Synthetic oligonucleotide
  Antisense Strand to SEQ ID NO: 336553
uucccuaagcacagagcau

SEQ ID NO: 336555 - RNA, 19 nt, Artificial Sequence
  Description of Artificial Sequence: Synthetic oligonucleotide
  Sense Strand Starting at position 225 of SEQ ID NO: 318115
cugucacgugaguaagaaa

SEQ ID NO: 336556 - RNA, 19 nt, Artificial Sequence
  Description of Artificial Sequence: Synthetic oligonucleotide
  Antisense Strand to SEQ ID NO: 336555
uuucuuacucacgugacag

SEQ ID NO: 336557 - RNA, 19 nt, Artificial Sequence
  Description of Artificial Sequence: Synthetic oligonucleotide
  Sense Strand Starting at position 225 of SEQ ID NO: 318217
gggcauugauuaucuugau

SEQ ID NO: 336558 - RNA, 19 nt, Artificial Sequence
  Description of Artificial Sequence: Synthetic oligonucleotide
  Antisense Strand to SEQ ID NO: 336557
aucaagauaaucaaugccc

SEQ ID NO: 336559 - RNA, 19 nt, Artificial Sequence
  Description of Artificial Sequence: Synthetic oligonucleotide
  Sense Strand Starting at position 225 of SEQ ID NO: 318218
ggcauugauuaucuugaug

SEQ ID NO: 336560 - RNA, 19 nt, Artificial Sequence
  Description of Artificial Sequence: Synthetic oligonucleotide
  Antisense Strand to SEQ ID NO: 336559
caucaagauaaucaaugcc

SEQ ID NO: 336561 - RNA, 19 nt, Artificial Sequence
  Description of Artificial Sequence: Synthetic oligonucleotide
  Sense Strand Starting at position 225 of SEQ ID NO: 318221
auugauuaucuugaugcuu

SEQ ID NO: 336562 - RNA, 19 nt, Artificial Sequence
  Description of Artificial Sequence: Synthetic oligonucleotide
  Antisense Strand to SEQ ID NO: 336561
aagcaucaagauaaucaau

SEQ ID NO: 336563 - RNA, 19 nt, Artificial Sequence
  Description of Artificial Sequence: Synthetic oligonucleotide
  Sense Strand Starting at position 225 of SEQ ID NO: 318323
ugcguuuaucuugaaagga

SEQ ID NO: 336564 - RNA, 19 nt, Artificial Sequence
  Description of Artificial Sequence: Synthetic oligonucleotide
  Antisense Strand to SEQ ID NO: 336563
uccuuucaagauaaacgca

SEQ ID NO: 336565 - RNA, 19 nt, Artificial Sequence
  Description of Artificial Sequence: Synthetic oligonucleotide
  Sense Strand Starting at position 225 of SEQ ID NO: 318403
gguuggagguguuuggaga

SEQ ID NO: 336566 - RNA, 19 nt, Artificial Sequence
  Description of Artificial Sequence: Synthetic oligonucleotide
  Antisense Strand to SEQ ID NO: 336565
ucuccaaacaccuccaacc

SEQ ID NO: 336567 - RNA, 19 nt, Artificial Sequence
  Description of Artificial Sequence: Synthetic oligonucleotide
  Sense Strand Starting at position 225 of SEQ ID NO: 318494
guaacaguuggaggcaaua

SEQ ID NO: 336568 - RNA, 19 nt, Artificial Sequence
  Description of Artificial Sequence: Synthetic oligonucleotide
  Antisense Strand to SEQ ID NO: 336567
uauugccuccaacuguuac

SEQ ID NO: 336569 - RNA, 19 nt, Artificial Sequence
  Description of Artificial Sequence: Synthetic oligonucleotide
  Sense Strand Starting at position 225 of SEQ ID NO: 318507
gcaauaauaccugagcaau

SEQ ID NO: 336570 - RNA, 19 nt, Artificial Sequence
  Description of Artificial Sequence: Synthetic oligonucleotide
  Antisense Strand to SEQ ID NO: 336569
auugcucagguauuauugc

SEQ ID NO: 336571 - RNA, 19 nt, Artificial Sequence
  Description of Artificial Sequence: Synthetic oligonucleotide
  Sense Strand Starting at position 225 of SEQ ID NO: 318517
cugagcaauugaccacaaa

SEQ ID NO: 336572 - RNA, 19 nt, Artificial Sequence
  Description of Artificial Sequence: Synthetic oligonucleotide
  Antisense Strand to SEQ ID NO: 336571
uuuguggucaauugcucag

SEQ ID NO: 336573 - RNA, 19 nt, Artificial Sequence
  Description of Artificial Sequence: Synthetic oligonucleotide
  Sense Strand Starting at position 225 of SEQ ID NO: 318545
gcuuguuuaguagauuaag

SEQ ID NO: 336574 - RNA, 19 nt, Artificial Sequence
  Description of Artificial Sequence: Synthetic oligonucleotide
  Antisense Strand to SEQ ID NO: 336573
cuuaaucuacuaaacaagc

SEQ ID NO: 336575 - RNA, 19 nt, Artificial Sequence
  Description of Artificial Sequence: Synthetic oligonucleotide
  Sense Strand Starting at position 225 of SEQ ID NO: 318660
gaaagucagguuuggauca

SEQ ID NO: 336576 - RNA, 19 nt, Artificial Sequence
  Description of Artificial Sequence: Synthetic oligonucleotide
  Antisense Strand to SEQ ID NO: 336575
ugauccaaaccugacuuuc

SEQ ID NO: 336577 - RNA, 19 nt, Artificial Sequence
  Description of Artificial Sequence: Synthetic oligonucleotide
  Sense Strand Starting at position 225 of SEQ ID NO: 318791
cuucgucuugcuuugaguu

SEQ ID NO: 336578 - RNA, 19 nt, Artificial Sequence
  Description of Artificial Sequence: Synthetic oligonucleotide
  Antisense Strand to SEQ ID NO: 336577
aacucaaagcaagacgaag

SEQ ID NO: 336579 - RNA, 19 nt, Artificial Sequence
  Description of Artificial Sequence: Synthetic oligonucleotide
  Sense Strand Starting at position 225 of SEQ ID NO: 318804
ugaguuauccacuggguag

SEQ ID NO: 336580 - RNA, 19 nt, Artificial Sequence
  Description of Artificial Sequence: Synthetic oligonucleotide
  Antisense Strand to SEQ ID NO: 336579
cuacccaguggauaacuca

SEQ ID NO: 336581 - RNA, 19 nt, Artificial Sequence
  Description of Artificial Sequence: Synthetic oligonucleotide
  Sense Strand Starting at position 225 of SEQ ID NO: 318827
cgguuaauuauugaguacu

SEQ ID NO: 336582 - RNA, 19 nt, Artificial Sequence
  Description of Artificial Sequence: Synthetic oligonucleotide
  Antisense Strand to SEQ ID NO: 336581
aguacucaauaauuaaccg

SEQ ID NO: 336583 - RNA, 19 nt, Artificial Sequence
  Description of Artificial Sequence: Synthetic oligonucleotide
  Sense Strand Starting at position 225 of SEQ ID NO: 318948
ccacaccaaucuguguaua

SEQ ID NO: 336584 - RNA, 19 nt, Artificial Sequence
  Description of Artificial Sequence: Synthetic oligonucleotide
  Antisense Strand to SEQ ID NO: 336583
uauacacagauuggugugg

SEQ ID NO: 336585 - RNA, 19 nt, Artificial Sequence
  Description of Artificial Sequence: Synthetic oligonucleotide
  Sense Strand Starting at position 225 of SEQ ID NO: 318950
acaccaaucuguguauaau

SEQ ID NO: 336586 - RNA, 19 nt, Artificial Sequence
  Description of Artificial Sequence: Synthetic oligonucleotide
  Antisense Strand to SEQ ID NO: 336585
auuauacacagauuggugu

SEQ ID NO: 336587 - RNA, 19 nt, Artificial Sequence
  Description of Artificial Sequence: Synthetic oligonucleotide
  Sense Strand Starting at position 225 of SEQ ID NO: 318975
caagguguuagggauaucu

SEQ ID NO: 336588 - RNA, 19 nt, Artificial Sequence
  Description of Artificial Sequence: Synthetic oligonucleotide
  Antisense Strand to SEQ ID NO: 336587
agauaucccuaacaccuug

SEQ ID NO: 336589 - RNA, 19 nt, Artificial Sequence
  Description of Artificial Sequence: Synthetic oligonucleotide
  Sense Strand Starting at position 225 of SEQ ID NO: 318977
agguguuagggauaucuug

SEQ ID NO: 336590 - RNA, 19 nt, Artificial Sequence
  Description of Artificial Sequence: Synthetic oligonucleotide
  Antisense Strand to SEQ ID NO: 336589
caagauaucccuaacaccu

SEQ ID NO: 336591 - RNA, 19 nt, Artificial Sequence
  Description of Artificial Sequence: Synthetic oligonucleotide
  Sense Strand Starting at position 226 of SEQ ID NO: 315452
ggcauaguaagccaagcau

SEQ ID NO: 336592 - RNA, 19 nt, Artificial Sequence
  Description of Artificial Sequence: Synthetic oligonucleotide
  Antisense Strand to SEQ ID NO: 336591
augcuuggcuuacuaugcc

SEQ ID NO: 336593 - RNA, 19 nt, Artificial Sequence
  Description of Artificial Sequence: Synthetic oligonucleotide
  Sense Strand Starting at position 226 of SEQ ID NO: 315536
ugcccuuuauaggucugaa

SEQ ID NO: 336594 - RNA, 19 nt, Artificial Sequence
  Description of Artificial Sequence: Synthetic oligonucleotide
  Antisense Strand to SEQ ID NO: 336593
uucagaccuauaaagggca

SEQ ID NO: 336595 - RNA, 19 nt, Artificial Sequence
  Description of Artificial Sequence: Synthetic oligonucleotide
  Sense Strand Starting at position 226 of SEQ ID NO: 315907
ggcagaaccuugcuuugaa

SEQ ID NO: 336596 - RNA, 19 nt, Artificial Sequence
  Description of Artificial Sequence: Synthetic oligonucleotide
  Antisense Strand to SEQ ID NO: 336595
uucaaagcaagguucugcc

SEQ ID NO: 336597 - RNA, 19 nt, Artificial Sequence
  Description of Artificial Sequence: Synthetic oligonucleotide
  Sense Strand Starting at position 226 of SEQ ID NO: 315908
gcagaaccuugcuuugaag

SEQ ID NO: 336598 - RNA, 19 nt, Artificial Sequence
  Description of Artificial Sequence: Synthetic oligonucleotide
  Antisense Strand to SEQ ID NO: 336597
cuucaaagcaagguucugc

SEQ ID NO: 336599 - RNA, 19 nt, Artificial Sequence
  Description of Artificial Sequence: Synthetic oligonucleotide
  Sense Strand Starting at position 226 of SEQ ID NO: 315910
agaaccuugcuuugaagca

SEQ ID NO: 336600 - RNA, 19 nt, Artificial Sequence
  Description of Artificial Sequence: Synthetic oligonucleotide
  Antisense Strand to SEQ ID NO: 336599
ugcuucaaagcaagguucu

SEQ ID NO: 336601 - RNA, 19 nt, Artificial Sequence
  Description of Artificial Sequence: Synthetic oligonucleotide
  Sense Strand Starting at position 226 of SEQ ID NO: 315990
cagagucuacuuggcaaua

SEQ ID NO: 336602 - RNA, 19 nt, Artificial Sequence
  Description of Artificial Sequence: Synthetic oligonucleotide
  Antisense Strand to SEQ ID NO: 336601
uauugccaaguagacucug

SEQ ID NO: 336603 - RNA, 19 nt, Artificial Sequence
  Description of Artificial Sequence: Synthetic oligonucleotide
  Sense Strand Starting at position 226 of SEQ ID NO: 315991
agagucuacuuggcaauau

SEQ ID NO: 336604 - RNA, 19 nt, Artificial Sequence
  Description of Artificial Sequence: Synthetic oligonucleotide
  Antisense Strand to SEQ ID NO: 336603
auauugccaaguagacucu

SEQ ID NO: 336605 - RNA, 19 nt, Artificial Sequence
  Description of Artificial Sequence: Synthetic oligonucleotide
  Sense Strand Starting at position 226 of SEQ ID NO: 316034
gcuugaaaccaauaugggu

SEQ ID NO: 336606 - RNA, 19 nt, Artificial Sequence
  Description of Artificial Sequence: Synthetic oligonucleotide
  Antisense Strand to SEQ ID NO: 336605
acccauauugguuucaagc

SEQ ID NO: 336607 - RNA, 19 nt, Artificial Sequence
  Description of Artificial Sequence: Synthetic oligonucleotide
  Sense Strand Starting at position 226 of SEQ ID NO: 316049
ggguaaugccugcacagag

SEQ ID NO: 336608 - RNA, 19 nt, Artificial Sequence
  Description of Artificial Sequence: Synthetic oligonucleotide
  Antisense Strand to SEQ ID NO: 336607
cucugugcaggcauuaccc

SEQ ID NO: 336609 - RNA, 19 nt, Artificial Sequence
  Description of Artificial Sequence: Synthetic oligonucleotide
  Sense Strand Starting at position 226 of SEQ ID NO: 316058
cugcacagaguuuaauaua

SEQ ID NO: 336610 - RNA, 19 nt, Artificial Sequence
  Description of Artificial Sequence: Synthetic oligonucleotide
  Antisense Strand to SEQ ID NO: 336609
uauauuaaacucugugcag

SEQ ID NO: 336611 - RNA, 19 nt, Artificial Sequence
  Description of Artificial Sequence: Synthetic oligonucleotide
  Sense Strand Starting at position 226 of SEQ ID NO: 316365
gcgcccugccuguuuaaua

SEQ ID NO: 336612 - RNA, 19 nt, Artificial Sequence
  Description of Artificial Sequence: Synthetic oligonucleotide
  Antisense Strand to SEQ ID NO: 336611
uauuaaacaggcagggcgc

SEQ ID NO: 336613 - RNA, 19 nt, Artificial Sequence
  Description of Artificial Sequence: Synthetic oligonucleotide
  Sense Strand Starting at position 226 of SEQ ID NO: 316416
aggaaacucugauuggucu

SEQ ID NO: 336614 - RNA, 19 nt, Artificial Sequence
  Description of Artificial Sequence: Synthetic oligonucleotide
  Antisense Strand to SEQ ID NO: 336613
agaccaaucagaguuuccu

SEQ ID NO: 336615 - RNA, 19 nt, Artificial Sequence
  Description of Artificial Sequence: Synthetic oligonucleotide
  Sense Strand Starting at position 226 of SEQ ID NO: 316484
ccuauuaggcccuguauaa

SEQ ID NO: 336616 - RNA, 19 nt, Artificial Sequence
  Description of Artificial Sequence: Synthetic oligonucleotide
  Antisense Strand to SEQ ID NO: 336615
uuauacagggccuaauagg

SEQ ID NO: 336617 - RNA, 19 nt, Artificial Sequence
  Description of Artificial Sequence: Synthetic oligonucleotide
  Sense Strand Starting at position 226 of SEQ ID NO: 316950
gggucagucugaccacuuu

SEQ ID NO: 336618 - RNA, 19 nt, Artificial Sequence
  Description of Artificial Sequence: Synthetic oligonucleotide
  Antisense Strand to SEQ ID NO: 336617
aaaguggucagacugaccc

SEQ ID NO: 336619 - RNA, 19 nt, Artificial Sequence
  Description of Artificial Sequence: Synthetic oligonucleotide
  Sense Strand Starting at position 226 of SEQ ID NO: 317382
gaggcuuauuugcccggaa

SEQ ID NO: 336620 - RNA, 19 nt, Artificial Sequence
  Description of Artificial Sequence: Synthetic oligonucleotide
  Antisense Strand to SEQ ID NO: 336619
uuccgggcaaauaagccuc

SEQ ID NO: 336621 - RNA, 19 nt, Artificial Sequence
  Description of Artificial Sequence: Synthetic oligonucleotide
  Sense Strand Starting at position 226 of SEQ ID NO: 317384
ggcuuauuugcccggaaga

SEQ ID NO: 336622 - RNA, 19 nt, Artificial Sequence
  Description of Artificial Sequence: Synthetic oligonucleotide
  Antisense Strand to SEQ ID NO: 336621
ucuuccgggcaaauaagcc

SEQ ID NO: 336623 - RNA, 19 nt, Artificial Sequence
  Description of Artificial Sequence: Synthetic oligonucleotide
  Sense Strand Starting at position 226 of SEQ ID NO: 317385
gcuuauuugcccggaagac

SEQ ID NO: 336624 - RNA, 19 nt, Artificial Sequence
  Description of Artificial Sequence: Synthetic oligonucleotide
  Antisense Strand to SEQ ID NO: 336623
gucuuccgggcaaauaagc

SEQ ID NO: 336625 - RNA, 19 nt, Artificial Sequence
  Description of Artificial Sequence: Synthetic oligonucleotide
  Sense Strand Starting at position 226 of SEQ ID NO: 317394
cccggaagacgucagaaau

SEQ ID NO: 336626 - RNA, 19 nt, Artificial Sequence
  Description of Artificial Sequence: Synthetic oligonucleotide
  Antisense Strand to SEQ ID NO: 336625
auuucugacgucuuccggg

SEQ ID NO: 336627 - RNA, 19 nt, Artificial Sequence
  Description of Artificial Sequence: Synthetic oligonucleotide
  Sense Strand Starting at position 226 of SEQ ID NO: 317429
gaaagugaagccuggguua

SEQ ID NO: 336628 - RNA, 19 nt, Artificial Sequence
  Description of Artificial Sequence: Synthetic oligonucleotide
  Antisense Strand to SEQ ID NO: 336627
uaacccaggcuucacuuuc

SEQ ID NO: 336629 - RNA, 19 nt, Artificial Sequence
  Description of Artificial Sequence: Synthetic oligonucleotide
  Sense Strand Starting at position 226 of SEQ ID NO: 317531
cucgauguuccagaccuga

SEQ ID NO: 336630 - RNA, 19 nt, Artificial Sequence
  Description of Artificial Sequence: Synthetic oligonucleotide
  Antisense Strand to SEQ ID NO: 336629
ucaggucuggaacaucgag

SEQ ID NO: 336631 - RNA, 19 nt, Artificial Sequence
  Description of Artificial Sequence: Synthetic oligonucleotide
  Sense Strand Starting at position 226 of SEQ ID NO: 317681
uugucauuguaucuuauag

SEQ ID NO: 336632 - RNA, 19 nt, Artificial Sequence
  Description of Artificial Sequence: Synthetic oligonucleotide
  Antisense Strand to SEQ ID NO: 336631
cuauaagauacaaugacaa

SEQ ID NO: 336633 - RNA, 19 nt, Artificial Sequence
  Description of Artificial Sequence: Synthetic oligonucleotide
  Sense Strand Starting at position 226 of SEQ ID NO: 317739
agucaaaugauguaggucu

SEQ ID NO: 336634 - RNA, 19 nt, Artificial Sequence
  Description of Artificial Sequence: Synthetic oligonucleotide
  Antisense Strand to SEQ ID NO: 336633
agaccuacaucauuugacu

SEQ ID NO: 336635 - RNA, 19 nt, Artificial Sequence
  Description of Artificial Sequence: Synthetic oligonucleotide
  Sense Strand Starting at position 226 of SEQ ID NO: 317756
cuguguuacagucaaaugu

SEQ ID NO: 336636 - RNA, 19 nt, Artificial Sequence
  Description of Artificial Sequence: Synthetic oligonucleotide
  Antisense Strand to SEQ ID NO: 336635
acauuugacuguaacacag

SEQ ID NO: 336637 - RNA, 19 nt, Artificial Sequence
  Description of Artificial Sequence: Synthetic oligonucleotide
  Sense Strand Starting at position 226 of SEQ ID NO: 317784
cuguguugcagucaaauga

SEQ ID NO: 336638 - RNA, 19 nt, Artificial Sequence
  Description of Artificial Sequence: Synthetic oligonucleotide
  Antisense Strand to SEQ ID NO: 336637
ucauuugacugcaacacag

SEQ ID NO: 336639 - RNA, 19 nt, Artificial Sequence
  Description of Artificial Sequence: Synthetic oligonucleotide
  Sense Strand Starting at position 226 of SEQ ID NO: 317879
gcucuuggagcucaauacu

SEQ ID NO: 336640 - RNA, 19 nt, Artificial Sequence
  Description of Artificial Sequence: Synthetic oligonucleotide
  Antisense Strand to SEQ ID NO: 336639
aguauugagcuccaagagc

SEQ ID NO: 336641 - RNA, 19 nt, Artificial Sequence
  Description of Artificial Sequence: Synthetic oligonucleotide
  Sense Strand Starting at position 226 of SEQ ID NO: 318007
ugcuuuccauaccuggaua

SEQ ID NO: 336642 - RNA, 19 nt, Artificial Sequence
  Description of Artificial Sequence: Synthetic oligonucleotide
  Antisense Strand to SEQ ID NO: 336641
uauccagguauggaaagca

SEQ ID NO: 336643 - RNA, 19 nt, Artificial Sequence
  Description of Artificial Sequence: Synthetic oligonucleotide
  Sense Strand Starting at position 226 of SEQ ID NO: 318039
cgguuagcagauugcauuu

SEQ ID NO: 336644 - RNA, 19 nt, Artificial Sequence
  Description of Artificial Sequence: Synthetic oligonucleotide
  Antisense Strand to SEQ ID NO: 336643
aaaugcaaucugcuaaccg

SEQ ID NO: 336645 - RNA, 19 nt, Artificial Sequence
  Description of Artificial Sequence: Synthetic oligonucleotide
  Sense Strand Starting at position 226 of SEQ ID NO: 318131
gagaauggcugcccuaauu

SEQ ID NO: 336646 - RNA, 19 nt, Artificial Sequence
  Description of Artificial Sequence: Synthetic oligonucleotide
  Antisense Strand to SEQ ID NO: 336645
aauuagggcagccauucuc

SEQ ID NO: 336647 - RNA, 19 nt, Artificial Sequence
  Description of Artificial Sequence: Synthetic oligonucleotide
  Sense Strand Starting at position 226 of SEQ ID NO: 318155
ggccaaacaucuuugaguc

SEQ ID NO: 336648 - RNA, 19 nt, Artificial Sequence
  Description of Artificial Sequence: Synthetic oligonucleotide
  Antisense Strand to SEQ ID NO: 336647
gacucaaagauguuuggcc

SEQ ID NO: 336649 - RNA, 19 nt, Artificial Sequence
  Description of Artificial Sequence: Synthetic oligonucleotide
  Sense Strand Starting at position 226 of SEQ ID NO: 318156
gccaaacaucuuugaguca

SEQ ID NO: 336650 - RNA, 19 nt, Artificial Sequence
  Description of Artificial Sequence: Synthetic oligonucleotide
  Antisense Strand to SEQ ID NO: 336649
ugacucaaagauguuuggc

SEQ ID NO: 336651 - RNA, 19 nt, Artificial Sequence
  Description of Artificial Sequence: Synthetic oligonucleotide
  Sense Strand Starting at position 226 of SEQ ID NO: 318163
aucuuugagucaguuauua

SEQ ID NO: 336652 - RNA, 19 nt, Artificial Sequence
  Description of Artificial Sequence: Synthetic oligonucleotide
  Antisense Strand to SEQ ID NO: 336651
uaauaacugacucaaagau

SEQ ID NO: 336653 - RNA, 19 nt, Artificial Sequence
  Description of Artificial Sequence: Synthetic oligonucleotide
  Sense Strand Starting at position 226 of SEQ ID NO: 318186
uuuggaugcacgugauaua

SEQ ID NO: 336654 - RNA, 19 nt, Artificial Sequence
  Description of Artificial Sequence: Synthetic oligonucleotide
  Antisense Strand to SEQ ID NO: 336653
uauaucacgugcauccaaa

SEQ ID NO: 336655 - RNA, 19 nt, Artificial Sequence
  Description of Artificial Sequence: Synthetic oligonucleotide
  Sense Strand Starting at position 226 of SEQ ID NO: 318213
guuaaacugucuuccuaaa

SEQ ID NO: 336656 - RNA, 19 nt, Artificial Sequence
  Description of Artificial Sequence: Synthetic oligonucleotide
  Antisense Strand to SEQ ID NO: 336655
uuuaggaagacaguuuaac

SEQ ID NO: 336657 - RNA, 19 nt, Artificial Sequence
  Description of Artificial Sequence: Synthetic oligonucleotide
  Sense Strand Starting at position 226 of SEQ ID NO: 318245
gcuuaucucgcauaacaga

SEQ ID NO: 336658 - RNA, 19 nt, Artificial Sequence
  Description of Artificial Sequence: Synthetic oligonucleotide
  Antisense Strand to SEQ ID NO: 336657
ucuguuaugcgagauaagc

SEQ ID NO: 336659 - RNA, 19 nt, Artificial Sequence
  Description of Artificial Sequence: Synthetic oligonucleotide
  Sense Strand Starting at position 226 of SEQ ID NO: 318396
ccagaugucuacuuggaga

SEQ ID NO: 336660 - RNA, 19 nt, Artificial Sequence
  Description of Artificial Sequence: Synthetic oligonucleotide
  Antisense Strand to SEQ ID NO: 336659
ucuccaaguagacaucugg

SEQ ID NO: 336661 - RNA, 19 nt, Artificial Sequence
  Description of Artificial Sequence: Synthetic oligonucleotide
  Sense Strand Starting at position 226 of SEQ ID NO: 318508
ccaguaacugccugggaaa

SEQ ID NO: 336662 - RNA, 19 nt, Artificial Sequence
  Description of Artificial Sequence: Synthetic oligonucleotide
  Antisense Strand to SEQ ID NO: 336661
uuucccaggcaguuacugg

SEQ ID NO: 336663 - RNA, 19 nt, Artificial Sequence
  Description of Artificial Sequence: Synthetic oligonucleotide
  Sense Strand Starting at position 226 of SEQ ID NO: 318509
caguaacugccugggaaau

SEQ ID NO: 336664 - RNA, 19 nt, Artificial Sequence
  Description of Artificial Sequence: Synthetic oligonucleotide
  Antisense Strand to SEQ ID NO: 336663
auuucccaggcaguuacug

SEQ ID NO: 336665 - RNA, 19 nt, Artificial Sequence
  Description of Artificial Sequence: Synthetic oligonucleotide
  Sense Strand Starting at position 226 of SEQ ID NO: 318593
gugucagugcucuuugagu

SEQ ID NO: 336666 - RNA, 19 nt, Artificial Sequence
  Description of Artificial Sequence: Synthetic oligonucleotide
  Antisense Strand to SEQ ID NO: 336665
acucaaagagcacugacac

SEQ ID NO: 336667 - RNA, 19 nt, Artificial Sequence
  Description of Artificial Sequence: Synthetic oligonucleotide
  Sense Strand Starting at position 226 of SEQ ID NO: 318604
cuuugagucacaugaguug

SEQ ID NO: 336668 - RNA, 19 nt, Artificial Sequence
  Description of Artificial Sequence: Synthetic oligonucleotide
  Antisense Strand to SEQ ID NO: 336667
caacucaugugacucaaag

SEQ ID NO: 336669 - RNA, 19 nt, Artificial Sequence
  Description of Artificial Sequence: Synthetic oligonucleotide
  Sense Strand Starting at position 226 of SEQ ID NO: 318691
gauggaugaucaccaguau

SEQ ID NO: 336670 - RNA, 19 nt, Artificial Sequence
  Description of Artificial Sequence: Synthetic oligonucleotide
  Antisense Strand to SEQ ID NO: 336669
auacuggugaucauccauc

SEQ ID NO: 336671 - RNA, 19 nt, Artificial Sequence
  Description of Artificial Sequence: Synthetic oligonucleotide
  Sense Strand Starting at position 227 of SEQ ID NO: 315350
uaagcauagggcuggaauu

SEQ ID NO: 336672 - RNA, 19 nt, Artificial Sequence
  Description of Artificial Sequence: Synthetic oligonucleotide
  Antisense Strand to SEQ ID NO: 336671
aauuccagcccuaugcuua

SEQ ID NO: 336673 - RNA, 19 nt, Artificial Sequence
  Description of Artificial Sequence: Synthetic oligonucleotide
  Sense Strand Starting at position 227 of SEQ ID NO: 315351
aagcauagggcuggaauua

SEQ ID NO: 336674 - RNA, 19 nt, Artificial Sequence
  Description of Artificial Sequence: Synthetic oligonucleotide
  Antisense Strand to SEQ ID NO: 336673
uaauuccagcccuaugcuu

SEQ ID NO: 336675 - RNA, 19 nt, Artificial Sequence
  Description of Artificial Sequence: Synthetic oligonucleotide
  Sense Strand Starting at position 227 of SEQ ID NO: 315352
agcauagggcuggaauuau

SEQ ID NO: 336676 - RNA, 19 nt, Artificial Sequence
  Description of Artificial Sequence: Synthetic oligonucleotide
  Antisense Strand to SEQ ID NO: 336675
auaauuccagcccuaugcu

SEQ ID NO: 336677 - RNA, 19 nt, Artificial Sequence
  Description of Artificial Sequence: Synthetic oligonucleotide
  Sense Strand Starting at position 227 of SEQ ID NO: 315448
aguucuaaaugaccagauu

SEQ ID NO: 336678 - RNA, 19 nt, Artificial Sequence
  Description of Artificial Sequence: Synthetic oligonucleotide
  Antisense Strand to SEQ ID NO: 336677
aaucuggucauuuagaacu

SEQ ID NO: 336679 - RNA, 19 nt, Artificial Sequence
  Description of Artificial Sequence: Synthetic oligonucleotide
  Sense Strand Starting at position 227 of SEQ ID NO: 315501
aaacuagacgugugauauu

SEQ ID NO: 336680 - RNA, 19 nt, Artificial Sequence
  Description of Artificial Sequence: Synthetic oligonucleotide
  Antisense Strand to SEQ ID NO: 336679
aauaucacacgucuaguuu

SEQ ID NO: 336681 - RNA, 19 nt, Artificial Sequence
  Description of Artificial Sequence: Synthetic oligonucleotide
  Sense Strand Starting at position 227 of SEQ ID NO: 315510
gugugauauucuccucaag

SEQ ID NO: 336682 - RNA, 19 nt, Artificial Sequence
  Description of Artificial Sequence: Synthetic oligonucleotide
  Antisense Strand to SEQ ID NO: 336681
cuugaggagaauaucacac

SEQ ID NO: 336683 - RNA, 19 nt, Artificial Sequence
  Description of Artificial Sequence: Synthetic oligonucleotide
  Sense Strand Starting at position 227 of SEQ ID NO: 315513
ugauauucuccucaaguug

SEQ ID NO: 336684 - RNA, 19 nt, Artificial Sequence
  Description of Artificial Sequence: Synthetic oligonucleotide
  Antisense Strand to SEQ ID NO: 336683
caacuugaggagaauauca

SEQ ID NO: 336685 - RNA, 19 nt, Artificial Sequence
  Description of Artificial Sequence: Synthetic oligonucleotide
  Sense Strand Starting at position 227 of SEQ ID NO: 315556
acauuuaaauauggacgau

SEQ ID NO: 336686 - RNA, 19 nt, Artificial Sequence
  Description of Artificial Sequence: Synthetic oligonucleotide
  Antisense Strand to SEQ ID NO: 336685
aucguccauauuuaaaugu

SEQ ID NO: 336687 - RNA, 19 nt, Artificial Sequence
  Description of Artificial Sequence: Synthetic oligonucleotide
  Sense Strand Starting at position 227 of SEQ ID NO: 315752
uuucccuagcuugauauga

SEQ ID NO: 336688 - RNA, 19 nt, Artificial Sequence
  Description of Artificial Sequence: Synthetic oligonucleotide
  Antisense Strand to SEQ ID NO: 336687
ucauaucaagcuagggaaa

SEQ ID NO: 336689 - RNA, 19 nt, Artificial Sequence
  Description of Artificial Sequence: Synthetic oligonucleotide
  Sense Strand Starting at position 227 of SEQ ID NO: 315834
ggcacuuuaguauaacaua

SEQ ID NO: 336690 - RNA, 19 nt, Artificial Sequence
  Description of Artificial Sequence: Synthetic oligonucleotide
  Antisense Strand to SEQ ID NO: 336689
uauguuauacuaaagugcc

SEQ ID NO: 336691 - RNA, 19 nt, Artificial Sequence
  Description of Artificial Sequence: Synthetic oligonucleotide
  Sense Strand Starting at position 227 of SEQ ID NO: 315874
ccaauuaaccauuguggua

SEQ ID NO: 336692 - RNA, 19 nt, Artificial Sequence
  Description of Artificial Sequence: Synthetic oligonucleotide
  Antisense Strand to SEQ ID NO: 336691
uaccacaaugguuaauugg

SEQ ID NO: 336693 - RNA, 19 nt, Artificial Sequence
  Description of Artificial Sequence: Synthetic oligonucleotide
  Sense Strand Starting at position 227 of SEQ ID NO: 315887
gugguauauuaggcaaauu

SEQ ID NO: 336694 - RNA, 19 nt, Artificial Sequence
  Description of Artificial Sequence: Synthetic oligonucleotide
  Antisense Strand to SEQ ID NO: 336693
aauuugccuaauauaccac

SEQ ID NO: 336695 - RNA, 19 nt, Artificial Sequence
  Description of Artificial Sequence: Synthetic oligonucleotide
  Sense Strand Starting at position 227 of SEQ ID NO: 316200
auaauuaugccagauugcu

SEQ ID NO: 336696 - RNA, 19 nt, Artificial Sequence
  Description of Artificial Sequence: Synthetic oligonucleotide
  Antisense Strand to SEQ ID NO: 336695
agcaaucuggcauaauuau

SEQ ID NO: 336697 - RNA, 19 nt, Artificial Sequence
  Description of Artificial Sequence: Synthetic oligonucleotide
  Sense Strand Starting at position 227 of SEQ ID NO: 316212
gauugcucuccuggaggau

SEQ ID NO: 336698 - RNA, 19 nt, Artificial Sequence
  Description of Artificial Sequence: Synthetic oligonucleotide
  Antisense Strand to SEQ ID NO: 336697
auccuccaggagagcaauc

SEQ ID NO: 336699 - RNA, 19 nt, Artificial Sequence
  Description of Artificial Sequence: Synthetic oligonucleotide
  Sense Strand Starting at position 227 of SEQ ID NO: 316213
auugcucuccuggaggauu

SEQ ID NO: 336700 - RNA, 19 nt, Artificial Sequence
  Description of Artificial Sequence: Synthetic oligonucleotide
  Antisense Strand to SEQ ID NO: 336699
aauccuccaggagagcaau

SEQ ID NO: 336701 - RNA, 19 nt, Artificial Sequence
  Description of Artificial Sequence: Synthetic oligonucleotide
  Sense Strand Starting at position 227 of SEQ ID NO: 316428
uggucuaagccaugaagac

SEQ ID NO: 336702 - RNA, 19 nt, Artificial Sequence
  Description of Artificial Sequence: Synthetic oligonucleotide
  Antisense Strand to SEQ ID NO: 336701
gucuucauggcuuagacca

SEQ ID NO: 336703 - RNA, 19 nt, Artificial Sequence
  Description of Artificial Sequence: Synthetic oligonucleotide
  Sense Strand Starting at position 227 of SEQ ID NO: 316664
ucuggaucaucccuuagau

SEQ ID NO: 336704 - RNA, 19 nt, Artificial Sequence
  Description of Artificial Sequence: Synthetic oligonucleotide
  Antisense Strand to SEQ ID NO: 336703
aucuaagggaugauccaga

SEQ ID NO: 336705 - RNA, 19 nt, Artificial Sequence
  Description of Artificial Sequence: Synthetic oligonucleotide
  Sense Strand Starting at position 227 of SEQ ID NO: 316789
agaugugugaagcgaaaga

SEQ ID NO: 336706 - RNA, 19 nt, Artificial Sequence
  Description of Artificial Sequence: Synthetic oligonucleotide
  Antisense Strand to SEQ ID NO: 336705
ucuuucgcuucacacaucu

SEQ ID NO: 336707 - RNA, 19 nt, Artificial Sequence
  Description of Artificial Sequence: Synthetic oligonucleotide
  Sense Strand Starting at position 227 of SEQ ID NO: 317043
accacagauccgcaucaaa

SEQ ID NO: 336708 - RNA, 19 nt, Artificial Sequence
  Description of Artificial Sequence: Synthetic oligonucleotide
  Antisense Strand to SEQ ID NO: 336707
uuugaugcggaucuguggu

SEQ ID NO: 336709 - RNA, 19 nt, Artificial Sequence
  Description of Artificial Sequence: Synthetic oligonucleotide
  Sense Strand Starting at position 227 of SEQ ID NO: 317347
ugaugugaagcuggaguua

SEQ ID NO: 336710 - RNA, 19 nt, Artificial Sequence
  Description of Artificial Sequence: Synthetic oligonucleotide
  Antisense Strand to SEQ ID NO: 336709
uaacuccagcuucacauca

SEQ ID NO: 336711 - RNA, 19 nt, Artificial Sequence
  Description of Artificial Sequence: Synthetic oligonucleotide
  Sense Strand Starting at position 227 of SEQ ID NO: 317359
ggaguuagaaucugagggu

SEQ ID NO: 336712 - RNA, 19 nt, Artificial Sequence
  Description of Artificial Sequence: Synthetic oligonucleotide
  Antisense Strand to SEQ ID NO: 336711
acccucagauucuaacucc

SEQ ID NO: 336713 - RNA, 19 nt, Artificial Sequence
  Description of Artificial Sequence: Synthetic oligonucleotide
  Sense Strand Starting at position 227 of SEQ ID NO: 317396
ggcccacucgcuuauuuga

SEQ ID NO: 336714 - RNA, 19 nt, Artificial Sequence
  Description of Artificial Sequence: Synthetic oligonucleotide
  Antisense Strand to SEQ ID NO: 336713
ucaaauaagcgagugggcc

SEQ ID NO: 336715 - RNA, 19 nt, Artificial Sequence
  Description of Artificial Sequence: Synthetic oligonucleotide
  Sense Strand Starting at position 227 of SEQ ID NO: 317429
gcguuauuagaugaucauu

SEQ ID NO: 336716 - RNA, 19 nt, Artificial Sequence
  Description of Artificial Sequence: Synthetic oligonucleotide
  Antisense Strand to SEQ ID NO: 336715
aaugaucaucuaauaacgc

SEQ ID NO: 336717 - RNA, 19 nt, Artificial Sequence
  Description of Artificial Sequence: Synthetic oligonucleotide
  Sense Strand Starting at position 227 of SEQ ID NO: 317466
guuugcgaaauuugacacu

SEQ ID NO: 336718 - RNA, 19 nt, Artificial Sequence
  Description of Artificial Sequence: Synthetic oligonucleotide
  Antisense Strand to SEQ ID NO: 336717
agugucaaauuucgcaaac

SEQ ID NO: 336719 - RNA, 19 nt, Artificial Sequence
  Description of Artificial Sequence: Synthetic oligonucleotide
  Sense Strand Starting at position 227 of SEQ ID NO: 317486
uuaccaucgggaugauugu

SEQ ID NO: 336720 - RNA, 19 nt, Artificial Sequence
  Description of Artificial Sequence: Synthetic oligonucleotide
  Antisense Strand to SEQ ID NO: 336719
acaaucaucccgaugguaa

SEQ ID NO: 336721 - RNA, 19 nt, Artificial Sequence
  Description of Artificial Sequence: Synthetic oligonucleotide
  Sense Strand Starting at position 227 of SEQ ID NO: 317493
cgggaugauuguaaggaag

SEQ ID NO: 336722 - RNA, 19 nt, Artificial Sequence
  Description of Artificial Sequence: Synthetic oligonucleotide
  Antisense Strand to SEQ ID NO: 336721
cuuccuuacaaucaucccg

SEQ ID NO: 336723 - RNA, 19 nt, Artificial Sequence
  Description of Artificial Sequence: Synthetic oligonucleotide
  Sense Strand Starting at position 227 of SEQ ID NO: 317537
aacucauugcuggaagucu

SEQ ID NO: 336724 - RNA, 19 nt, Artificial Sequence
  Description of Artificial Sequence: Synthetic oligonucleotide
  Antisense Strand to SEQ ID NO: 336723
agacuuccagcaaugaguu

SEQ ID NO: 336725 - RNA, 19 nt, Artificial Sequence
  Description of Artificial Sequence: Synthetic oligonucleotide
  Sense Strand Starting at position 227 of SEQ ID NO: 317585
uugugaauaaguugaaagu

SEQ ID NO: 336726 - RNA, 19 nt, Artificial Sequence
  Description of Artificial Sequence: Synthetic oligonucleotide
  Antisense Strand to SEQ ID NO: 336725
acuuucaacuuauucacaa

SEQ ID NO: 336727 - RNA, 19 nt, Artificial Sequence
  Description of Artificial Sequence: Synthetic oligonucleotide
  Sense Strand Starting at position 227 of SEQ ID NO: 317586
ugugaauaaguugaaaguu

SEQ ID NO: 336728 - RNA, 19 nt, Artificial Sequence
  Description of Artificial Sequence: Synthetic oligonucleotide
  Antisense Strand to SEQ ID NO: 336727
aacuuucaacuuauucaca

SEQ ID NO: 336729 - RNA, 19 nt, Artificial Sequence
  Description of Artificial Sequence: Synthetic oligonucleotide
  Sense Strand Starting at position 227 of SEQ ID NO: 317606
ucaacuccgcuauaggaau

SEQ ID NO: 336730 - RNA, 19 nt, Artificial Sequence
  Description of Artificial Sequence: Synthetic oligonucleotide
  Antisense Strand to SEQ ID NO: 336729
auuccuauagcggaguuga

SEQ ID NO: 336731 - RNA, 19 nt, Artificial Sequence
  Description of Artificial Sequence: Synthetic oligonucleotide
  Sense Strand Starting at position 227 of SEQ ID NO: 317626
accgaucuuguugagauca

SEQ ID NO: 336732 - RNA, 19 nt, Artificial Sequence
  Description of Artificial Sequence: Synthetic oligonucleotide
  Antisense Strand to SEQ ID NO: 336731
ugaucucaacaagaucggu

SEQ ID NO: 336733 - RNA, 19 nt, Artificial Sequence
  Description of Artificial Sequence: Synthetic oligonucleotide
  Sense Strand Starting at position 227 of SEQ ID NO: 317684
aaaguaaaguaugccgaaa

SEQ ID NO: 336734 - RNA, 19 nt, Artificial Sequence
  Description of Artificial Sequence: Synthetic oligonucleotide
  Antisense Strand to SEQ ID NO: 336733
uuucggcauacuuuacuuu

SEQ ID NO: 336735 - RNA, 19 nt, Artificial Sequence
  Description of Artificial Sequence: Synthetic oligonucleotide
  Sense Strand Starting at position 227 of SEQ ID NO: 317725
uuaagugauuguuugauug

SEQ ID NO: 336736 - RNA, 19 nt, Artificial Sequence
  Description of Artificial Sequence: Synthetic oligonucleotide
  Antisense Strand to SEQ ID NO: 336735
caaucaaacaaucacuuaa

SEQ ID NO: 336737 - RNA, 19 nt, Artificial Sequence
  Description of Artificial Sequence: Synthetic oligonucleotide
  Sense Strand Starting at position 227 of SEQ ID NO: 317735
guuugauuguucuugaaua

SEQ ID NO: 336738 - RNA, 19 nt, Artificial Sequence
  Description of Artificial Sequence: Synthetic oligonucleotide
  Antisense Strand to SEQ ID NO: 336737
uauucaagaacaaucaaac

SEQ ID NO: 336739 - RNA, 19 nt, Artificial Sequence
  Description of Artificial Sequence: Synthetic oligonucleotide
  Sense Strand Starting at position 227 of SEQ ID NO: 317767
uugacuuacggguauaagu

SEQ ID NO: 336740 - RNA, 19 nt, Artificial Sequence
  Description of Artificial Sequence: Synthetic oligonucleotide
  Antisense Strand to SEQ ID NO: 336739
acuuauacccguaagucaa

SEQ ID NO: 336741 - RNA, 19 nt, Artificial Sequence
  Description of Artificial Sequence: Synthetic oligonucleotide
  Sense Strand Starting at position 227 of SEQ ID NO: 317769
gacuuacggguauaaguau

SEQ ID NO: 336742 - RNA, 19 nt, Artificial Sequence
  Description of Artificial Sequence: Synthetic oligonucleotide
  Antisense Strand to SEQ ID NO: 336741
auacuuauacccguaaguc

SEQ ID NO: 336743 - RNA, 19 nt, Artificial Sequence
  Description of Artificial Sequence: Synthetic oligonucleotide
  Sense Strand Starting at position 227 of SEQ ID NO: 317775
cggguauaaguaugaacca

SEQ ID NO: 336744 - RNA, 19 nt, Artificial Sequence
  Description of Artificial Sequence: Synthetic oligonucleotide
  Antisense Strand to SEQ ID NO: 336743
ugguucauacuuauacccg

SEQ ID NO: 336745 - RNA, 19 nt, Artificial Sequence
  Description of Artificial Sequence: Synthetic oligonucleotide
  Sense Strand Starting at position 227 of SEQ ID NO: 318921
agaaauacauugccuaguu

SEQ ID NO: 336746 - RNA, 19 nt, Artificial Sequence
  Description of Artificial Sequence: Synthetic oligonucleotide
  Antisense Strand to SEQ ID NO: 336745
aacuaggcaauguauuucu

SEQ ID NO: 336747 - RNA, 19 nt, Artificial Sequence
  Description of Artificial Sequence: Synthetic oligonucleotide
  Sense Strand Starting at position 227 of SEQ ID NO: 319125
gugauugugacugagcuca

SEQ ID NO: 336748 - RNA, 19 nt, Artificial Sequence
  Description of Artificial Sequence: Synthetic oligonucleotide
  Antisense Strand to SEQ ID NO: 336747
ugagcucagucacaaucac

SEQ ID NO: 336749 - RNA, 19 nt, Artificial Sequence
  Description of Artificial Sequence: Synthetic oligonucleotide
  Sense Strand Starting at position 227 of SEQ ID NO: 319130
ugugacugagcucacuaau

SEQ ID NO: 336750 - RNA, 19 nt, Artificial Sequence
  Description of Artificial Sequence: Synthetic oligonucleotide
  Antisense Strand to SEQ ID NO: 336749
auuagugagcucagucaca

SEQ ID NO: 336751 - RNA, 19 nt, Artificial Sequence
  Description of Artificial Sequence: Synthetic oligonucleotide
  Sense Strand Starting at position 228 of SEQ ID NO: 315315
ugccuuacucccgaauaaa

SEQ ID NO: 336752 - RNA, 19 nt, Artificial Sequence
  Description of Artificial Sequence: Synthetic oligonucleotide
  Antisense Strand to SEQ ID NO: 336751
uuuauucgggaguaaggca

SEQ ID NO: 336753 - RNA, 19 nt, Artificial Sequence
  Description of Artificial Sequence: Synthetic oligonucleotide
  Sense Strand Starting at position 228 of SEQ ID NO: 315360
ucuguauguuauuuagguu

SEQ ID NO: 336754 - RNA, 19 nt, Artificial Sequence
  Description of Artificial Sequence: Synthetic oligonucleotide
  Antisense Strand to SEQ ID NO: 336753
aaccuaaauaacauacaga

SEQ ID NO: 336755 - RNA, 19 nt, Artificial Sequence
  Description of Artificial Sequence: Synthetic oligonucleotide
  Sense Strand Starting at position 228 of SEQ ID NO: 315430
cauugaugcagaggagugu

SEQ ID NO: 336756 - RNA, 19 nt, Artificial Sequence
  Description of Artificial Sequence: Synthetic oligonucleotide
  Antisense Strand to SEQ ID NO: 336755
acacuccucugcaucaaug

SEQ ID NO: 336757 - RNA, 19 nt, Artificial Sequence
  Description of Artificial Sequence: Synthetic oligonucleotide
  Sense Strand Starting at position 228 of SEQ ID NO: 315483
gcugucuaaggugacauua

SEQ ID NO: 336758 - RNA, 19 nt, Artificial Sequence
  Description of Artificial Sequence: Synthetic oligonucleotide
  Antisense Strand to SEQ ID NO: 336757
uaaugucaccuuagacagc

SEQ ID NO: 336759 - RNA, 19 nt, Artificial Sequence
  Description of Artificial Sequence: Synthetic oligonucleotide
  Sense Strand Starting at position 228 of SEQ ID NO: 315491
aggugacauuacucugauu

SEQ ID NO: 336760 - RNA, 19 nt, Artificial Sequence
  Description of Artificial Sequence: Synthetic oligonucleotide
  Antisense Strand to SEQ ID NO: 336759
aaucagaguaaugucaccu

SEQ ID NO: 336761 - RNA, 19 nt, Artificial Sequence
  Description of Artificial Sequence: Synthetic oligonucleotide
  Sense Strand Starting at position 228 of SEQ ID NO: 315628
uuuacuuugcaaugugaaa

SEQ ID NO: 336762 - RNA, 19 nt, Artificial Sequence
  Description of Artificial Sequence: Synthetic oligonucleotide
  Antisense Strand to SEQ ID NO: 336761
uuucacauugcaaaguaaa

SEQ ID NO: 336763 - RNA, 19 nt, Artificial Sequence
  Description of Artificial Sequence: Synthetic oligonucleotide
  Sense Strand Starting at position 228 of SEQ ID NO: 315641
gugaaauacagcuguggag

SEQ ID NO: 336764 - RNA, 19 nt, Artificial Sequence
  Description of Artificial Sequence: Synthetic oligonucleotide
  Antisense Strand to SEQ ID NO: 336763
cuccacagcuguauuucac

SEQ ID NO: 336765 - RNA, 19 nt, Artificial Sequence
  Description of Artificial Sequence: Synthetic oligonucleotide
  Sense Strand Starting at position 228 of SEQ ID NO: 315643
gaaauacagcuguggagaa

SEQ ID NO: 336766 - RNA, 19 nt, Artificial Sequence
  Description of Artificial Sequence: Synthetic oligonucleotide
  Antisense Strand to SEQ ID NO: 336765
uucuccacagcuguauuuc

SEQ ID NO: 336767 - RNA, 19 nt, Artificial Sequence
  Description of Artificial Sequence: Synthetic oligonucleotide
  Sense Strand Starting at position 228 of SEQ ID NO: 315694
cuaugugucaaguacaguu

SEQ ID NO: 336768 - RNA, 19 nt, Artificial Sequence
  Description of Artificial Sequence: Synthetic oligonucleotide
  Antisense Strand to SEQ ID NO: 336767
aacuguacuugacacauag

SEQ ID NO: 336769 - RNA, 19 nt, Artificial Sequence
  Description of Artificial Sequence: Synthetic oligonucleotide
  Sense Strand Starting at position 228 of SEQ ID NO: 316145
augagaaagcagcguauuu

SEQ ID NO: 336770 - RNA, 19 nt, Artificial Sequence
  Description of Artificial Sequence: Synthetic oligonucleotide
  Antisense Strand to SEQ ID NO: 336769
aaauacgcugcuuucucau

SEQ ID NO: 336771 - RNA, 19 nt, Artificial Sequence
  Description of Artificial Sequence: Synthetic oligonucleotide
  Sense Strand Starting at position 228 of SEQ ID NO: 316154
cagcguauuuacucugaau

SEQ ID NO: 336772 - RNA, 19 nt, Artificial Sequence
  Description of Artificial Sequence: Synthetic oligonucleotide
  Antisense Strand to SEQ ID NO: 336771
auucagaguaaauacgcug

SEQ ID NO: 336773 - RNA, 19 nt, Artificial Sequence
  Description of Artificial Sequence: Synthetic oligonucleotide
  Sense Strand Starting at position 228 of SEQ ID NO: 316308
gugucucaccucuaccauu

SEQ ID NO: 336774 - RNA, 19 nt, Artificial Sequence
  Description of Artificial Sequence: Synthetic oligonucleotide
  Antisense Strand to SEQ ID NO: 336773
aaugguagaggugagacac

SEQ ID NO: 336775 - RNA, 19 nt, Artificial Sequence
  Description of Artificial Sequence: Synthetic oligonucleotide
  Sense Strand Starting at position 228 of SEQ ID NO: 316691
ugugucaugcaugugcuaa

SEQ ID NO: 336776 - RNA, 19 nt, Artificial Sequence
  Description of Artificial Sequence: Synthetic oligonucleotide
  Antisense Strand to SEQ ID NO: 336775
uuagcacaugcaugacaca

SEQ ID NO: 336777 - RNA, 19 nt, Artificial Sequence
  Description of Artificial Sequence: Synthetic oligonucleotide
  Sense Strand Starting at position 228 of SEQ ID NO: 316736
auaauaacuccaugagguc

SEQ ID NO: 336778 - RNA, 19 nt, Artificial Sequence
  Description of Artificial Sequence: Synthetic oligonucleotide
  Antisense Strand to SEQ ID NO: 336777
gaccucauggaguuauuau

SEQ ID NO: 336779 - RNA, 19 nt, Artificial Sequence
  Description of Artificial Sequence: Synthetic oligonucleotide
  Sense Strand Starting at position 228 of SEQ ID NO: 316761
ucaccuuucuuucuggaga

SEQ ID NO: 336780 - RNA, 19 nt, Artificial Sequence
  Description of Artificial Sequence: Synthetic oligonucleotide
  Antisense Strand to SEQ ID NO: 336779
ucuccagaaagaaagguga

SEQ ID NO: 336781 - RNA, 19 nt, Artificial Sequence
  Description of Artificial Sequence: Synthetic oligonucleotide
  Sense Strand Starting at position 228 of SEQ ID NO: 316998
agcuccgagccugagaaua

SEQ ID NO: 336782 - RNA, 19 nt, Artificial Sequence
  Description of Artificial Sequence: Synthetic oligonucleotide
  Antisense Strand to SEQ ID NO: 336781
uauucucaggcucggagcu

SEQ ID NO: 336783 - RNA, 19 nt, Artificial Sequence
  Description of Artificial Sequence: Synthetic oligonucleotide
  Sense Strand Starting at position 228 of SEQ ID NO: 317070
acugguccagccugagaga

SEQ ID NO: 336784 - RNA, 19 nt, Artificial Sequence
  Description of Artificial Sequence: Synthetic oligonucleotide
  Antisense Strand to SEQ ID NO: 336783
ucucucaggcuggaccagu

SEQ ID NO: 336785 - RNA, 19 nt, Artificial Sequence
  Description of Artificial Sequence: Synthetic oligonucleotide
  Sense Strand Starting at position 228 of SEQ ID NO: 317227
cguuuacuccgguuaccga

SEQ ID NO: 336786 - RNA, 19 nt, Artificial Sequence
  Description of Artificial Sequence: Synthetic oligonucleotide
  Antisense Strand to SEQ ID NO: 336785
ucgguaaccggaguaaacg

SEQ ID NO: 336787 - RNA, 19 nt, Artificial Sequence
  Description of Artificial Sequence: Synthetic oligonucleotide
  Sense Strand Starting at position 228 of SEQ ID NO: 317425
ggacgucauguagauaauu

SEQ ID NO: 336788 - RNA, 19 nt, Artificial Sequence
  Description of Artificial Sequence: Synthetic oligonucleotide
  Antisense Strand to SEQ ID NO: 336787
aauuaucuacaugacgucc

SEQ ID NO: 336789 - RNA, 19 nt, Artificial Sequence
  Description of Artificial Sequence: Synthetic oligonucleotide
  Sense Strand Starting at position 228 of SEQ ID NO: 317450
caugaauaccgucgaagau

SEQ ID NO: 336790 - RNA, 19 nt, Artificial Sequence
  Description of Artificial Sequence: Synthetic oligonucleotide
  Antisense Strand to SEQ ID NO: 336789
aucuucgacgguauucaug

SEQ ID NO: 336791 - RNA, 19 nt, Artificial Sequence
  Description of Artificial Sequence: Synthetic oligonucleotide
  Sense Strand Starting at position 228 of SEQ ID NO: 317451
augaauaccgucgaagaua

SEQ ID NO: 336792 - RNA, 19 nt, Artificial Sequence
  Description of Artificial Sequence: Synthetic oligonucleotide
  Antisense Strand to SEQ ID NO: 336791
uaucuucgacgguauucau

SEQ ID NO: 336793 - RNA, 19 nt, Artificial Sequence
  Description of Artificial Sequence: Synthetic oligonucleotide
  Sense Strand Starting at position 228 of SEQ ID NO: 317465
agauaccugccugauauuc

SEQ ID NO: 336794 - RNA, 19 nt, Artificial Sequence
  Description of Artificial Sequence: Synthetic oligonucleotide
  Antisense Strand to SEQ ID NO: 336793
gaauaucaggcagguaucu

SEQ ID NO: 336795 - RNA, 19 nt, Artificial Sequence
  Description of Artificial Sequence: Synthetic oligonucleotide
  Sense Strand Starting at position 228 of SEQ ID NO: 317806
cguuauuaguuaccaaaua

SEQ ID NO: 336796 - RNA, 19 nt, Artificial Sequence
  Description of Artificial Sequence: Synthetic oligonucleotide
  Antisense Strand to SEQ ID NO: 336795
uauuugguaacuaauaacg

SEQ ID NO: 336797 - RNA, 19 nt, Artificial Sequence
  Description of Artificial Sequence: Synthetic oligonucleotide
  Sense Strand Starting at position 228 of SEQ ID NO: 317837
uggucauuccaauauguga

SEQ ID NO: 336798 - RNA, 19 nt, Artificial Sequence
  Description of Artificial Sequence: Synthetic oligonucleotide
  Antisense Strand to SEQ ID NO: 336797
ucacauauuggaaugacca

SEQ ID NO: 336799 - RNA, 19 nt, Artificial Sequence
  Description of Artificial Sequence: Synthetic oligonucleotide
  Sense Strand Starting at position 228 of SEQ ID NO: 317854
gacaaaggacuuuguauac

SEQ ID NO: 336800 - RNA, 19 nt, Artificial Sequence
  Description of Artificial Sequence: Synthetic oligonucleotide
  Antisense Strand to SEQ ID NO: 336799
guauacaaaguccuuuguc

SEQ ID NO: 336801 - RNA, 19 nt, Artificial Sequence
  Description of Artificial Sequence: Synthetic oligonucleotide
  Sense Strand Starting at position 228 of SEQ ID NO: 317931
ggcaaaggauuugaauacu

SEQ ID NO: 336802 - RNA, 19 nt, Artificial Sequence
  Description of Artificial Sequence: Synthetic oligonucleotide
  Antisense Strand to SEQ ID NO: 336801
aguauucaaauccuuugcc

SEQ ID NO: 336803 - RNA, 19 nt, Artificial Sequence
  Description of Artificial Sequence: Synthetic oligonucleotide
  Sense Strand Starting at position 228 of SEQ ID NO: 317959
cagauauauguauggccaa

SEQ ID NO: 336804 - RNA, 19 nt, Artificial Sequence
  Description of Artificial Sequence: Synthetic oligonucleotide
  Antisense Strand to SEQ ID NO: 336803
uuggccauacauauaucug

SEQ ID NO: 336805 - RNA, 19 nt, Artificial Sequence
  Description of Artificial Sequence: Synthetic oligonucleotide
  Sense Strand Starting at position 228 of SEQ ID NO: 317962
auauauguauggccaauaa

SEQ ID NO: 336806 - RNA, 19 nt, Artificial Sequence
  Description of Artificial Sequence: Synthetic oligonucleotide
  Antisense Strand to SEQ ID NO: 336805
uuauuggccauacauauau

SEQ ID NO: 336807 - RNA, 19 nt, Artificial Sequence
  Description of Artificial Sequence: Synthetic oligonucleotide
  Sense Strand Starting at position 228 of SEQ ID NO: 318224
agucuagagacuugggcaa

SEQ ID NO: 336808 - RNA, 19 nt, Artificial Sequence
  Description of Artificial Sequence: Synthetic oligonucleotide
  Antisense Strand to SEQ ID NO: 336807
uugcccaagucucuagacu

SEQ ID NO: 336809 - RNA, 19 nt, Artificial Sequence
  Description of Artificial Sequence: Synthetic oligonucleotide
  Sense Strand Starting at position 228 of SEQ ID NO: 318262
gugagaugcacuggaaaga

SEQ ID NO: 336810 - RNA, 19 nt, Artificial Sequence
  Description of Artificial Sequence: Synthetic oligonucleotide
  Antisense Strand to SEQ ID NO: 336809
ucuuuccagugcaucucac

SEQ ID NO: 336811 - RNA, 19 nt, Artificial Sequence
  Description of Artificial Sequence: Synthetic oligonucleotide
  Sense Strand Starting at position 228 of SEQ ID NO: 318377
ucuuuaaauggaugucauu

SEQ ID NO: 336812 - RNA, 19 nt, Artificial Sequence
  Description of Artificial Sequence: Synthetic oligonucleotide
  Antisense Strand to SEQ ID NO: 336811
aaugacauccauuuaaaga

SEQ ID NO: 336813 - RNA, 19 nt, Artificial Sequence
  Description of Artificial Sequence: Synthetic oligonucleotide
  Sense Strand Starting at position 228 of SEQ ID NO: 318458
guuuauuaguuuccacaau

SEQ ID NO: 336814 - RNA, 19 nt, Artificial Sequence
  Description of Artificial Sequence: Synthetic oligonucleotide
  Antisense Strand to SEQ ID NO: 336813
auuguggaaacuaauaaac

SEQ ID NO: 336815 - RNA, 19 nt, Artificial Sequence
  Description of Artificial Sequence: Synthetic oligonucleotide
  Sense Strand Starting at position 228 of SEQ ID NO: 318735
ugcaauuguuaaucugaga

SEQ ID NO: 336816 - RNA, 19 nt, Artificial Sequence
  Description of Artificial Sequence: Synthetic oligonucleotide
  Antisense Strand to SEQ ID NO: 336815
ucucagauuaacaauugca

SEQ ID NO: 336817 - RNA, 19 nt, Artificial Sequence
  Description of Artificial Sequence: Synthetic oligonucleotide
  Sense Strand Starting at position 228 of SEQ ID NO: 318843
ggcagugaucauuacugag

SEQ ID NO: 336818 - RNA, 19 nt, Artificial Sequence
  Description of Artificial Sequence: Synthetic oligonucleotide
  Antisense Strand to SEQ ID NO: 336817
cucaguaaugaucacugcc

SEQ ID NO: 336819 - RNA, 19 nt, Artificial Sequence
  Description of Artificial Sequence: Synthetic oligonucleotide
  Sense Strand Starting at position 228 of SEQ ID NO: 318845
cagugaucauuacugagug

SEQ ID NO: 336820 - RNA, 19 nt, Artificial Sequence
  Description of Artificial Sequence: Synthetic oligonucleotide
  Antisense Strand to SEQ ID NO: 336819
cacucaguaaugaucacug

SEQ ID NO: 336821 - RNA, 19 nt, Artificial Sequence
  Description of Artificial Sequence: Synthetic oligonucleotide
  Sense Strand Starting at position 228 of SEQ ID NO: 318847
gugaucauuacugaguguu

SEQ ID NO: 336822 - RNA, 19 nt, Artificial Sequence
  Description of Artificial Sequence: Synthetic oligonucleotide
  Antisense Strand to SEQ ID NO: 336821
aacacucaguaaugaucac

SEQ ID NO: 336823 - RNA, 19 nt, Artificial Sequence
  Description of Artificial Sequence: Synthetic oligonucleotide
  Sense Strand Starting at position 228 of SEQ ID NO: 318936
agacauuaugucugacuuu

SEQ ID NO: 336824 - RNA, 19 nt, Artificial Sequence
  Description of Artificial Sequence: Synthetic oligonucleotide
  Antisense Strand to SEQ ID NO: 336823
aaagucagacauaaugucu

SEQ ID NO: 336825 - RNA, 19 nt, Artificial Sequence
  Description of Artificial Sequence: Synthetic oligonucleotide
  Sense Strand Starting at position 228 of SEQ ID NO: 318959
ugggaaagauuagauuaau

SEQ ID NO: 336826 - RNA, 19 nt, Artificial Sequence
  Description of Artificial Sequence: Synthetic oligonucleotide
  Antisense Strand to SEQ ID NO: 336825
auuaaucuaaucuuuccca

SEQ ID NO: 336827 - RNA, 19 nt, Artificial Sequence
  Description of Artificial Sequence: Synthetic oligonucleotide
  Sense Strand Starting at position 228 of SEQ ID NO: 319140
agcacucugucauuagaca

SEQ ID NO: 336828 - RNA, 19 nt, Artificial Sequence
  Description of Artificial Sequence: Synthetic oligonucleotide
  Antisense Strand to SEQ ID NO: 336827
ugucuaaugacagagugcu

SEQ ID NO: 336829 - RNA, 19 nt, Artificial Sequence
  Description of Artificial Sequence: Synthetic oligonucleotide
  Sense Strand Starting at position 228 of SEQ ID NO: 319141
gcacucugucauuagacaa

SEQ ID NO: 336830 - RNA, 19 nt, Artificial Sequence
  Description of Artificial Sequence: Synthetic oligonucleotide
  Antisense Strand to SEQ ID NO: 336829
uugucuaaugacagagugc

SEQ ID NO: 336831 - RNA, 19 nt, Artificial Sequence
  Description of Artificial Sequence: Synthetic oligonucleotide
  Sense Strand Starting at position 229 of SEQ ID NO: 315322
ggaauucugucugcauaaa

SEQ ID NO: 336832 - RNA, 19 nt, Artificial Sequence
  Description of Artificial Sequence: Synthetic oligonucleotide
  Antisense Strand to SEQ ID NO: 336831
uuuaugcagacagaauucc

SEQ ID NO: 336833 - RNA, 19 nt, Artificial Sequence
  Description of Artificial Sequence: Synthetic oligonucleotide
  Sense Strand Starting at position 229 of SEQ ID NO: 315363
gugugcucugaagaauuau

SEQ ID NO: 336834 - RNA, 19 nt, Artificial Sequence
  Description of Artificial Sequence: Synthetic oligonucleotide
  Antisense Strand to SEQ ID NO: 336833
auaauucuucagagcacac

SEQ ID NO: 336835 - RNA, 19 nt, Artificial Sequence
  Description of Artificial Sequence: Synthetic oligonucleotide
  Sense Strand Starting at position 229 of SEQ ID NO: 315382
gucucauaaguguaaucag

SEQ ID NO: 336836 - RNA, 19 nt, Artificial Sequence
  Description of Artificial Sequence: Synthetic oligonucleotide
  Antisense Strand to SEQ ID NO: 336835
cugauuacacuuaugagac

SEQ ID NO: 336837 - RNA, 19 nt, Artificial Sequence
  Description of Artificial Sequence: Synthetic oligonucleotide
  Sense Strand Starting at position 229 of SEQ ID NO: 315385
ucauaaguguaaucagaaa

SEQ ID NO: 336838 - RNA, 19 nt, Artificial Sequence
  Description of Artificial Sequence: Synthetic oligonucleotide
  Antisense Strand to SEQ ID NO: 336837
uuucugauuacacuuauga

SEQ ID NO: 336839 - RNA, 19 nt, Artificial Sequence
  Description of Artificial Sequence: Synthetic oligonucleotide
  Sense Strand Starting at position 229 of SEQ ID NO: 315396
aucagaaacgauggaguau

SEQ ID NO: 336840 - RNA, 19 nt, Artificial Sequence
  Description of Artificial Sequence: Synthetic oligonucleotide
  Antisense Strand to SEQ ID NO: 336839
auacuccaucguuucugau

SEQ ID NO: 336841 - RNA, 19 nt, Artificial Sequence
  Description of Artificial Sequence: Synthetic oligonucleotide
  Sense Strand Starting at position 229 of SEQ ID NO: 315407
uggaguauuccaugaauac

SEQ ID NO: 336842 - RNA, 19 nt, Artificial Sequence
  Description of Artificial Sequence: Synthetic oligonucleotide
  Antisense Strand to SEQ ID NO: 336841
guauucauggaauacucca

SEQ ID NO: 336843 - RNA, 19 nt, Artificial Sequence
  Description of Artificial Sequence: Synthetic oligonucleotide
  Sense Strand Starting at position 229 of SEQ ID NO: 315418
augaauacauacuagagaa

SEQ ID NO: 336844 - RNA, 19 nt, Artificial Sequence
  Description of Artificial Sequence: Synthetic oligonucleotide
  Antisense Strand to SEQ ID NO: 336843
uucucuaguauguauucau

SEQ ID NO: 336845 - RNA, 19 nt, Artificial Sequence
  Description of Artificial Sequence: Synthetic oligonucleotide
  Sense Strand Starting at position 229 of SEQ ID NO: 315431
agagaauagcuggguaaca

SEQ ID NO: 336846 - RNA, 19 nt, Artificial Sequence
  Description of Artificial Sequence: Synthetic oligonucleotide
  Antisense Strand to SEQ ID NO: 336845
uguuacccagcuauucucu

SEQ ID NO: 336847 - RNA, 19 nt, Artificial Sequence
  Description of Artificial Sequence: Synthetic oligonucleotide
  Sense Strand Starting at position 229 of SEQ ID NO: 315432
gagaauagcuggguaacau

SEQ ID NO: 336848 - RNA, 19 nt, Artificial Sequence
  Description of Artificial Sequence: Synthetic oligonucleotide
  Antisense Strand to SEQ ID NO: 336847
auguuacccagcuauucuc

SEQ ID NO: 336849 - RNA, 19 nt, Artificial Sequence
  Description of Artificial Sequence: Synthetic oligonucleotide
  Sense Strand Starting at position 229 of SEQ ID NO: 315540
uacgauaaagucuagguuu

SEQ ID NO: 336850 - RNA, 19 nt, Artificial Sequence
  Description of Artificial Sequence: Synthetic oligonucleotide
  Antisense Strand to SEQ ID NO: 336849
aaaccuagacuuuaucgua

SEQ ID NO: 336851 - RNA, 19 nt, Artificial Sequence
  Description of Artificial Sequence: Synthetic oligonucleotide
  Sense Strand Starting at position 229 of SEQ ID NO: 315685
ccauuacacguuuauacuu

SEQ ID NO: 336852 - RNA, 19 nt, Artificial Sequence
  Description of Artificial Sequence: Synthetic oligonucleotide
  Antisense Strand to SEQ ID NO: 336851
aaguauaaacguguaaugg

SEQ ID NO: 336853 - RNA, 19 nt, Artificial Sequence
  Description of Artificial Sequence: Synthetic oligonucleotide
  Sense Strand Starting at position 229 of SEQ ID NO: 315772
aguugugguaaauauacca

SEQ ID NO: 336854 - RNA, 19 nt, Artificial Sequence
  Description of Artificial Sequence: Synthetic oligonucleotide
  Antisense Strand to SEQ ID NO: 336853
ugguauauuuaccacaacu

SEQ ID NO: 336855 - RNA, 19 nt, Artificial Sequence
  Description of Artificial Sequence: Synthetic oligonucleotide
  Sense Strand Starting at position 229 of SEQ ID NO: 315833
uaugguuaaugguucuaac

SEQ ID NO: 336856 - RNA, 19 nt, Artificial Sequence
  Description of Artificial Sequence: Synthetic oligonucleotide
  Antisense Strand to SEQ ID NO: 336855
guuagaaccauuaaccaua

SEQ ID NO: 336857 - RNA, 19 nt, Artificial Sequence
  Description of Artificial Sequence: Synthetic oligonucleotide
  Sense Strand Starting at position 229 of SEQ ID NO: 315852
cuaguugugguagauauua

SEQ ID NO: 336858 - RNA, 19 nt, Artificial Sequence
  Description of Artificial Sequence: Synthetic oligonucleotide
  Antisense Strand to SEQ ID NO: 336857
uaauaucuaccacaacuag

SEQ ID NO: 336859 - RNA, 19 nt, Artificial Sequence
  Description of Artificial Sequence: Synthetic oligonucleotide
  Sense Strand Starting at position 229 of SEQ ID NO: 315854
aguugugguagauauuaaa

SEQ ID NO: 336860 - RNA, 19 nt, Artificial Sequence
  Description of Artificial Sequence: Synthetic oligonucleotide
  Antisense Strand to SEQ ID NO: 336859
uuuaauaucuaccacaacu

SEQ ID NO: 336861 - RNA, 19 nt, Artificial Sequence
  Description of Artificial Sequence: Synthetic oligonucleotide
  Sense Strand Starting at position 229 of SEQ ID NO: 315983
gcucaaucauuugugcuaa

SEQ ID NO: 336862 - RNA, 19 nt, Artificial Sequence
  Description of Artificial Sequence: Synthetic oligonucleotide
  Antisense Strand to SEQ ID NO: 336861
uuagcacaaaugauugagc

SEQ ID NO: 336863 - RNA, 19 nt, Artificial Sequence
  Description of Artificial Sequence: Synthetic oligonucleotide
  Sense Strand Starting at position 229 of SEQ ID NO: 316001
augugaaaggccuauacuu

SEQ ID NO: 336864 - RNA, 19 nt, Artificial Sequence
  Description of Artificial Sequence: Synthetic oligonucleotide
  Antisense Strand to SEQ ID NO: 336863
aaguauaggccuuucacau

SEQ ID NO: 336865 - RNA, 19 nt, Artificial Sequence
  Description of Artificial Sequence: Synthetic oligonucleotide
  Sense Strand Starting at position 229 of SEQ ID NO: 316003
gugaaaggccuauacuuuc

SEQ ID NO: 336866 - RNA, 19 nt, Artificial Sequence
  Description of Artificial Sequence: Synthetic oligonucleotide
  Antisense Strand to SEQ ID NO: 336865
gaaaguauaggccuuucac

SEQ ID NO: 336867 - RNA, 19 nt, Artificial Sequence
  Description of Artificial Sequence: Synthetic oligonucleotide
  Sense Strand Starting at position 229 of SEQ ID NO: 316095
gaguuuacauacccgaaga

SEQ ID NO: 336868 - RNA, 19 nt, Artificial Sequence
  Description of Artificial Sequence: Synthetic oligonucleotide
  Antisense Strand to SEQ ID NO: 336867
ucuucggguauguaaacuc

SEQ ID NO: 336869 - RNA, 19 nt, Artificial Sequence
  Description of Artificial Sequence: Synthetic oligonucleotide
  Sense Strand Starting at position 229 of SEQ ID NO: 316201
uaucguuugcuagaucaaa

SEQ ID NO: 336870 - RNA, 19 nt, Artificial Sequence
  Description of Artificial Sequence: Synthetic oligonucleotide
  Antisense Strand to SEQ ID NO: 336869
uuugaucuagcaaacgaua

SEQ ID NO: 336871 - RNA, 19 nt, Artificial Sequence
  Description of Artificial Sequence: Synthetic oligonucleotide
  Sense Strand Starting at position 229 of SEQ ID NO: 316243
aguuuaaauguuuaccgga

SEQ ID NO: 336872 - RNA, 19 nt, Artificial Sequence
  Description of Artificial Sequence: Synthetic oligonucleotide
  Antisense Strand to SEQ ID NO: 336871
uccgguaaacauuuaaacu

SEQ ID NO: 336873 - RNA, 19 nt, Artificial Sequence
  Description of Artificial Sequence: Synthetic oligonucleotide
  Sense Strand Starting at position 229 of SEQ ID NO: 316245
uuuaaauguuuaccggauu

SEQ ID NO: 336874 - RNA, 19 nt, Artificial Sequence
  Description of Artificial Sequence: Synthetic oligonucleotide
  Antisense Strand to SEQ ID NO: 336873
aauccgguaaacauuuaaa

SEQ ID NO: 336875 - RNA, 19 nt, Artificial Sequence
  Description of Artificial Sequence: Synthetic oligonucleotide
  Sense Strand Starting at position 229 of SEQ ID NO: 316248
aaauguuuaccggauuagu

SEQ ID NO: 336876 - RNA, 19 nt, Artificial Sequence
  Description of Artificial Sequence: Synthetic oligonucleotide
  Antisense Strand to SEQ ID NO: 336875
acuaauccgguaaacauuu

SEQ ID NO: 336877 - RNA, 19 nt, Artificial Sequence
  Description of Artificial Sequence: Synthetic oligonucleotide
  Sense Strand Starting at position 229 of SEQ ID NO: 316282
ucuugauacuuagcaggga

SEQ ID NO: 336878 - RNA, 19 nt, Artificial Sequence
  Description of Artificial Sequence: Synthetic oligonucleotide
  Antisense Strand to SEQ ID NO: 336877
ucccugcuaaguaucaaga

SEQ ID NO: 336879 - RNA, 19 nt, Artificial Sequence
  Description of Artificial Sequence: Synthetic oligonucleotide
  Sense Strand Starting at position 229 of SEQ ID NO: 316402
gggaaauaguuucugggcu

SEQ ID NO: 336880 - RNA, 19 nt, Artificial Sequence
  Description of Artificial Sequence: Synthetic oligonucleotide
  Antisense Strand to SEQ ID NO: 336879
agcccagaaacuauuuccc

SEQ ID NO: 336881 - RNA, 19 nt, Artificial Sequence
  Description of Artificial Sequence: Synthetic oligonucleotide
  Sense Strand Starting at position 229 of SEQ ID NO: 317365
ggcagcuugcgucuuccaa

SEQ ID NO: 336882 - RNA, 19 nt, Artificial Sequence
  Description of Artificial Sequence: Synthetic oligonucleotide
  Antisense Strand to SEQ ID NO: 336881
uuggaagacgcaagcugcc

SEQ ID NO: 336883 - RNA, 19 nt, Artificial Sequence
  Description of Artificial Sequence: Synthetic oligonucleotide
  Sense Strand Starting at position 229 of SEQ ID NO: 317366
gcagcuugcgucuuccaau

SEQ ID NO: 336884 - RNA, 19 nt, Artificial Sequence
  Description of Artificial Sequence: Synthetic oligonucleotide
  Antisense Strand to SEQ ID NO: 336883
auuggaagacgcaagcugc

SEQ ID NO: 336885 - RNA, 19 nt, Artificial Sequence
  Description of Artificial Sequence: Synthetic oligonucleotide
  Sense Strand Starting at position 229 of SEQ ID NO: 317707
gaaucagcagucgggauua

SEQ ID NO: 336886 - RNA, 19 nt, Artificial Sequence
  Description of Artificial Sequence: Synthetic oligonucleotide
  Antisense Strand to SEQ ID NO: 336885
uaaucccgacugcugauuc

SEQ ID NO: 336887 - RNA, 19 nt, Artificial Sequence
  Description of Artificial Sequence: Synthetic oligonucleotide
  Sense Strand Starting at position 229 of SEQ ID NO: 318301
cacggugauuuaguuacuu

SEQ ID NO: 336888 - RNA, 19 nt, Artificial Sequence
  Description of Artificial Sequence: Synthetic oligonucleotide
  Antisense Strand to SEQ ID NO: 336887
aaguaacuaaaucaccgug

SEQ ID NO: 336889 - RNA, 19 nt, Artificial Sequence
  Description of Artificial Sequence: Synthetic oligonucleotide
  Sense Strand Starting at position 229 of SEQ ID NO: 318334
gugcguuaaggcaauguga

SEQ ID NO: 336890 - RNA, 19 nt, Artificial Sequence
  Description of Artificial Sequence: Synthetic oligonucleotide
  Antisense Strand to SEQ ID NO: 336889
ucacauugccuuaacgcac

SEQ ID NO: 336891 - RNA, 19 nt, Artificial Sequence
  Description of Artificial Sequence: Synthetic oligonucleotide
  Sense Strand Starting at position 229 of SEQ ID NO: 318804
ccaccaucuccuggcagaa

SEQ ID NO: 336892 - RNA, 19 nt, Artificial Sequence
  Description of Artificial Sequence: Synthetic oligonucleotide
  Antisense Strand to SEQ ID NO: 336891
uucugccaggagauggugg

SEQ ID NO: 336893 - RNA, 19 nt, Artificial Sequence
  Description of Artificial Sequence: Synthetic oligonucleotide
  Sense Strand Starting at position 229 of SEQ ID NO: 318862
ccuucugucaaagaggagu

SEQ ID NO: 336894 - RNA, 19 nt, Artificial Sequence
  Description of Artificial Sequence: Synthetic oligonucleotide
  Antisense Strand to SEQ ID NO: 336893
acuccucuuugacagaagg

SEQ ID NO: 336895 - RNA, 19 nt, Artificial Sequence
  Description of Artificial Sequence: Synthetic oligonucleotide
  Sense Strand Starting at position 229 of SEQ ID NO: 318864
uucugucaaagaggaguaa

SEQ ID NO: 336896 - RNA, 19 nt, Artificial Sequence
  Description of Artificial Sequence: Synthetic oligonucleotide
  Antisense Strand to SEQ ID NO: 336895
uuacuccucuuugacagaa

SEQ ID NO: 336897 - RNA, 19 nt, Artificial Sequence
  Description of Artificial Sequence: Synthetic oligonucleotide
  Sense Strand Starting at position 229 of SEQ ID NO: 318896
augugaaggguuugaauca

SEQ ID NO: 336898 - RNA, 19 nt, Artificial Sequence
  Description of Artificial Sequence: Synthetic oligonucleotide
  Antisense Strand to SEQ ID NO: 336897
ugauucaaacccuucacau

SEQ ID NO: 336899 - RNA, 19 nt, Artificial Sequence
  Description of Artificial Sequence: Synthetic oligonucleotide
  Sense Strand Starting at position 229 of SEQ ID NO: 318905
guuugaaucagguagcuau

SEQ ID NO: 336900 - RNA, 19 nt, Artificial Sequence
  Description of Artificial Sequence: Synthetic oligonucleotide
  Antisense Strand to SEQ ID NO: 336899
auagcuaccugauucaaac

SEQ ID NO: 336901 - RNA, 19 nt, Artificial Sequence
  Description of Artificial Sequence: Synthetic oligonucleotide
  Sense Strand Starting at position 229 of SEQ ID NO: 318908
ugaaucagguagcuauuaa

SEQ ID NO: 336902 - RNA, 19 nt, Artificial Sequence
  Description of Artificial Sequence: Synthetic oligonucleotide
  Antisense Strand to SEQ ID NO: 336901
uuaauagcuaccugauuca

SEQ ID NO: 336903 - RNA, 19 nt, Artificial Sequence
  Description of Artificial Sequence: Synthetic oligonucleotide
  Sense Strand Starting at position 229 of SEQ ID NO: 318919
gcuauuaauuucguucuga

SEQ ID NO: 336904 - RNA, 19 nt, Artificial Sequence
  Description of Artificial Sequence: Synthetic oligonucleotide
  Antisense Strand to SEQ ID NO: 336903
ucagaacgaaauuaauagc

SEQ ID NO: 336905 - RNA, 19 nt, Artificial Sequence
  Description of Artificial Sequence: Synthetic oligonucleotide
  Sense Strand Starting at position 229 of SEQ ID NO: 319073
ccuuacaagcauugaaaga

SEQ ID NO: 336906 - RNA, 19 nt, Artificial Sequence
  Description of Artificial Sequence: Synthetic oligonucleotide
  Antisense Strand to SEQ ID NO: 336905
ucuuucaaugcuuguaagg

SEQ ID NO: 336907 - RNA, 19 nt, Artificial Sequence
  Description of Artificial Sequence: Synthetic oligonucleotide
  Sense Strand Starting at position 229 of SEQ ID NO: 319178
uaaagaaguugguuugaag

SEQ ID NO: 336908 - RNA, 19 nt, Artificial Sequence
  Description of Artificial Sequence: Synthetic oligonucleotide
  Antisense Strand to SEQ ID NO: 336907
cuucaaaccaacuucuuua

SEQ ID NO: 336909 - RNA, 19 nt, Artificial Sequence
  Description of Artificial Sequence: Synthetic oligonucleotide
  Sense Strand Starting at position 229 of SEQ ID NO: 319187
ugguuugaagaguauguca

SEQ ID NO: 336910 - RNA, 19 nt, Artificial Sequence
  Description of Artificial Sequence: Synthetic oligonucleotide
  Antisense Strand to SEQ ID NO: 336909
ugacauacucuucaaacca

SEQ ID NO: 336911 - RNA, 19 nt, Artificial Sequence
  Description of Artificial Sequence: Synthetic oligonucleotide
  Sense Strand Starting at position 230 of SEQ ID NO: 315324
aagaaacccugcguuagau

SEQ ID NO: 336912 - RNA, 19 nt, Artificial Sequence
  Description of Artificial Sequence: Synthetic oligonucleotide
  Antisense Strand to SEQ ID NO: 336911
aucuaacgcaggguuucuu

SEQ ID NO: 336913 - RNA, 19 nt, Artificial Sequence
  Description of Artificial Sequence: Synthetic oligonucleotide
  Sense Strand Starting at position 230 of SEQ ID NO: 315326
gaaacccugcguuagauca

SEQ ID NO: 336914 - RNA, 19 nt, Artificial Sequence
  Description of Artificial Sequence: Synthetic oligonucleotide
  Antisense Strand to SEQ ID NO: 336913
ugaucuaacgcaggguuuc

SEQ ID NO: 336915 - RNA, 19 nt, Artificial Sequence
  Description of Artificial Sequence: Synthetic oligonucleotide
  Sense Strand Starting at position 230 of SEQ ID NO: 315593
cuauauaguuucuuacaug

SEQ ID NO: 336916 - RNA, 19 nt, Artificial Sequence
  Description of Artificial Sequence: Synthetic oligonucleotide
  Antisense Strand to SEQ ID NO: 336915
cauguaagaaacuauauag

SEQ ID NO: 336917 - RNA, 19 nt, Artificial Sequence
  Description of Artificial Sequence: Synthetic oligonucleotide
  Sense Strand Starting at position 230 of SEQ ID NO: 315683
caaguaggugcucaauuau

SEQ ID NO: 336918 - RNA, 19 nt, Artificial Sequence
  Description of Artificial Sequence: Synthetic oligonucleotide
  Antisense Strand to SEQ ID NO: 336917
auaauugagcaccuacuug

SEQ ID NO: 336919 - RNA, 19 nt, Artificial Sequence
  Description of Artificial Sequence: Synthetic oligonucleotide
  Sense Strand Starting at position 230 of SEQ ID NO: 315899
gaagaauuccuguguugag

SEQ ID NO: 336920 - RNA, 19 nt, Artificial Sequence
  Description of Artificial Sequence: Synthetic oligonucleotide
  Antisense Strand to SEQ ID NO: 336919
cucaacacaggaauucuuc

SEQ ID NO: 336921 - RNA, 19 nt, Artificial Sequence
  Description of Artificial Sequence: Synthetic oligonucleotide
  Sense Strand Starting at position 230 of SEQ ID NO: 315903
aauuccuguguugaguaaa

SEQ ID NO: 336922 - RNA, 19 nt, Artificial Sequence
  Description of Artificial Sequence: Synthetic oligonucleotide
  Antisense Strand to SEQ ID NO: 336921
uuuacucaacacaggaauu

SEQ ID NO: 336923 - RNA, 19 nt, Artificial Sequence
  Description of Artificial Sequence: Synthetic oligonucleotide
  Sense Strand Starting at position 230 of SEQ ID NO: 316343
ccaggaucugcagaugugu

SEQ ID NO: 336924 - RNA, 19 nt, Artificial Sequence
  Description of Artificial Sequence: Synthetic oligonucleotide
  Antisense Strand to SEQ ID NO: 336923
acacaucugcagauccugg

SEQ ID NO: 336925 - RNA, 19 nt, Artificial Sequence
  Description of Artificial Sequence: Synthetic oligonucleotide
  Sense Strand Starting at position 230 of SEQ ID NO: 316457
ucugauuccuguuuaacag

SEQ ID NO: 336926 - RNA, 19 nt, Artificial Sequence
  Description of Artificial Sequence: Synthetic oligonucleotide
  Antisense Strand to SEQ ID NO: 336925
cuguuaaacaggaaucaga

SEQ ID NO: 336927 - RNA, 19 nt, Artificial Sequence
  Description of Artificial Sequence: Synthetic oligonucleotide
  Sense Strand Starting at position 230 of SEQ ID NO: 316458
cugauuccuguuuaacaga

SEQ ID NO: 336928 - RNA, 19 nt, Artificial Sequence
  Description of Artificial Sequence: Synthetic oligonucleotide
  Antisense Strand to SEQ ID NO: 336927
ucuguuaaacaggaaucag

SEQ ID NO: 336929 - RNA, 19 nt, Artificial Sequence
  Description of Artificial Sequence: Synthetic oligonucleotide
  Sense Strand Starting at position 230 of SEQ ID NO: 316493
cguaaauguguguugcuac

SEQ ID NO: 336930 - RNA, 19 nt, Artificial Sequence
  Description of Artificial Sequence: Synthetic oligonucleotide
  Antisense Strand to SEQ ID NO: 336929
guagcaacacacauuuacg

SEQ ID NO: 336931 - RNA, 19 nt, Artificial Sequence
  Description of Artificial Sequence: Synthetic oligonucleotide
  Sense Strand Starting at position 230 of SEQ ID NO: 316542
guaagagcucuuuaguaag

SEQ ID NO: 336932 - RNA, 19 nt, Artificial Sequence
  Description of Artificial Sequence: Synthetic oligonucleotide
  Antisense Strand to SEQ ID NO: 336931
cuuacuaaagagcucuuac

SEQ ID NO: 336933 - RNA, 19 nt, Artificial Sequence
  Description of Artificial Sequence: Synthetic oligonucleotide
  Sense Strand Starting at position 230 of SEQ ID NO: 316673
aggguaaauggcggaguaa

SEQ ID NO: 336934 - RNA, 19 nt, Artificial Sequence
  Description of Artificial Sequence: Synthetic oligonucleotide
  Antisense Strand to SEQ ID NO: 336933
uuacuccgccauuuacccu

SEQ ID NO: 336935 - RNA, 19 nt, Artificial Sequence
  Description of Artificial Sequence: Synthetic oligonucleotide
  Sense Strand Starting at position 230 of SEQ ID NO: 316674
ggguaaauggcggaguaaa

SEQ ID NO: 336936 - RNA, 19 nt, Artificial Sequence
  Description of Artificial Sequence: Synthetic oligonucleotide
  Antisense Strand to SEQ ID NO: 336935
uuuacuccgccauuuaccc

SEQ ID NO: 336937 - RNA, 19 nt, Artificial Sequence
  Description of Artificial Sequence: Synthetic oligonucleotide
  Sense Strand Starting at position 230 of SEQ ID NO: 316725
cuuaaauugcgcgcgacau

SEQ ID NO: 336938 - RNA, 19 nt, Artificial Sequence
  Description of Artificial Sequence: Synthetic oligonucleotide
  Antisense Strand to SEQ ID NO: 336937
augucgcgcgcaauuuaag

SEQ ID NO: 336939 - RNA, 19 nt, Artificial Sequence
  Description of Artificial Sequence: Synthetic oligonucleotide
  Sense Strand Starting at position 230 of SEQ ID NO: 316736
cgcgacaucgccucuucua

SEQ ID NO: 336940 - RNA, 19 nt, Artificial Sequence
  Description of Artificial Sequence: Synthetic oligonucleotide
  Antisense Strand to SEQ ID NO: 336939
uagaagaggcgaugucgcg

SEQ ID NO: 336941 - RNA, 19 nt, Artificial Sequence
  Description of Artificial Sequence: Synthetic oligonucleotide
  Sense Strand Starting at position 230 of SEQ ID NO: 316836
ggcacaguggauuaucuau

SEQ ID NO: 336942 - RNA, 19 nt, Artificial Sequence
  Description of Artificial Sequence: Synthetic oligonucleotide
  Antisense Strand to SEQ ID NO: 336941
auagauaauccacugugcc

SEQ ID NO: 336943 - RNA, 19 nt, Artificial Sequence
  Description of Artificial Sequence: Synthetic oligonucleotide
  Sense Strand Starting at position 230 of SEQ ID NO: 317620
ggcagaauccucgggaaug

SEQ ID NO: 336944 - RNA, 19 nt, Artificial Sequence
  Description of Artificial Sequence: Synthetic oligonucleotide
  Antisense Strand to SEQ ID NO: 336943
cauucccgaggauucugcc

SEQ ID NO: 336945 - RNA, 19 nt, Artificial Sequence
  Description of Artificial Sequence: Synthetic oligonucleotide
  Sense Strand Starting at position 230 of SEQ ID NO: 317622
cagaauccucgggaauguu

SEQ ID NO: 336946 - RNA, 19 nt, Artificial Sequence
  Description of Artificial Sequence: Synthetic oligonucleotide
  Antisense Strand to SEQ ID NO: 336945
aacauucccgaggauucug

SEQ ID NO: 336947 - RNA, 19 nt, Artificial Sequence
  Description of Artificial Sequence: Synthetic oligonucleotide
  Sense Strand Starting at position 230 of SEQ ID NO: 317860
uuucgaucagcugaagagu

SEQ ID NO: 336948 - RNA, 19 nt, Artificial Sequence
  Description of Artificial Sequence: Synthetic oligonucleotide
  Antisense Strand to SEQ ID NO: 336947
acucuucagcugaucgaaa

SEQ ID NO: 336949 - RNA, 19 nt, Artificial Sequence
  Description of Artificial Sequence: Synthetic oligonucleotide
  Sense Strand Starting at position 230 of SEQ ID NO: 317903
ucaaguuugagugggagga

SEQ ID NO: 336950 - RNA, 19 nt, Artificial Sequence
  Description of Artificial Sequence: Synthetic oligonucleotide
  Antisense Strand to SEQ ID NO: 336949
uccucccacucaaacuuga

SEQ ID NO: 336951 - RNA, 19 nt, Artificial Sequence
  Description of Artificial Sequence: Synthetic oligonucleotide
  Sense Strand Starting at position 230 of SEQ ID NO: 318103
ucugauugugacuagucca

SEQ ID NO: 336952 - RNA, 19 nt, Artificial Sequence
  Description of Artificial Sequence: Synthetic oligonucleotide
  Antisense Strand to SEQ ID NO: 336951
uggacuagucacaaucaga

SEQ ID NO: 336953 - RNA, 19 nt, Artificial Sequence
  Description of Artificial Sequence: Synthetic oligonucleotide
  Sense Strand Starting at position 230 of SEQ ID NO: 318106
gauugugacuaguccauau

SEQ ID NO: 336954 - RNA, 19 nt, Artificial Sequence
  Description of Artificial Sequence: Synthetic oligonucleotide
  Antisense Strand to SEQ ID NO: 336953
auauggacuagucacaauc

SEQ ID NO: 336955 - RNA, 19 nt, Artificial Sequence
  Description of Artificial Sequence: Synthetic oligonucleotide
  Sense Strand Starting at position 230 of SEQ ID NO: 318108
uugugacuaguccauauaa

SEQ ID NO: 336956 - RNA, 19 nt, Artificial Sequence
  Description of Artificial Sequence: Synthetic oligonucleotide
  Antisense Strand to SEQ ID NO: 336955
uuauauggacuagucacaa

SEQ ID NO: 336957 - RNA, 19 nt, Artificial Sequence
  Description of Artificial Sequence: Synthetic oligonucleotide
  Sense Strand Starting at position 230 of SEQ ID NO: 318212
uccagauucccauauuagu

SEQ ID NO: 336958 - RNA, 19 nt, Artificial Sequence
  Description of Artificial Sequence: Synthetic oligonucleotide
  Antisense Strand to SEQ ID NO: 336957
acuaauaugggaaucugga

SEQ ID NO: 336959 - RNA, 19 nt, Artificial Sequence
  Description of Artificial Sequence: Synthetic oligonucleotide
  Sense Strand Starting at position 230 of SEQ ID NO: 318313
agucauuugucacuccgaa

SEQ ID NO: 336960 - RNA, 19 nt, Artificial Sequence
  Description of Artificial Sequence: Synthetic oligonucleotide
  Antisense Strand to SEQ ID NO: 336959
uucggagugacaaaugacu

SEQ ID NO: 336961 - RNA, 19 nt, Artificial Sequence
  Description of Artificial Sequence: Synthetic oligonucleotide
  Sense Strand Starting at position 230 of SEQ ID NO: 318429
ucuuauaaucauggugagu

SEQ ID NO: 336962 - RNA, 19 nt, Artificial Sequence
  Description of Artificial Sequence: Synthetic oligonucleotide
  Antisense Strand to SEQ ID NO: 336961
acucaccaugauuauaaga

SEQ ID NO: 336963 - RNA, 19 nt, Artificial Sequence
  Description of Artificial Sequence: Synthetic oligonucleotide
  Sense Strand Starting at position 230 of SEQ ID NO: 318434
uaaucauggugagugugaa

SEQ ID NO: 336964 - RNA, 19 nt, Artificial Sequence
  Description of Artificial Sequence: Synthetic oligonucleotide
  Antisense Strand to SEQ ID NO: 336963
uucacacucaccaugauua

SEQ ID NO: 336965 - RNA, 19 nt, Artificial Sequence
  Description of Artificial Sequence: Synthetic oligonucleotide
  Sense Strand Starting at position 230 of SEQ ID NO: 318435
aaucauggugagugugaau

SEQ ID NO: 336966 - RNA, 19 nt, Artificial Sequence
  Description of Artificial Sequence: Synthetic oligonucleotide
  Antisense Strand to SEQ ID NO: 336965
auucacacucaccaugauu

SEQ ID NO: 336967 - RNA, 19 nt, Artificial Sequence
  Description of Artificial Sequence: Synthetic oligonucleotide
  Sense Strand Starting at position 230 of SEQ ID NO: 318595
augaaaguauacucagcau

SEQ ID NO: 336968 - RNA, 19 nt, Artificial Sequence
  Description of Artificial Sequence: Synthetic oligonucleotide
  Antisense Strand to SEQ ID NO: 336967
augcugaguauacuuucau

SEQ ID NO: 336969 - RNA, 19 nt, Artificial Sequence
  Description of Artificial Sequence: Synthetic oligonucleotide
  Sense Strand Starting at position 230 of SEQ ID NO: 318658
uucuguguaccagauugga

SEQ ID NO: 336970 - RNA, 19 nt, Artificial Sequence
  Description of Artificial Sequence: Synthetic oligonucleotide
  Antisense Strand to SEQ ID NO: 336969
uccaaucugguacacagaa

SEQ ID NO: 336971 - RNA, 19 nt, Artificial Sequence
  Description of Artificial Sequence: Synthetic oligonucleotide
  Sense Strand Starting at position 230 of SEQ ID NO: 318736
cucguugacaacuagugaa

SEQ ID NO: 336972 - RNA, 19 nt, Artificial Sequence
  Description of Artificial Sequence: Synthetic oligonucleotide
  Antisense Strand to SEQ ID NO: 336971
uucacuaguugucaacgag

SEQ ID NO: 336973 - RNA, 19 nt, Artificial Sequence
  Description of Artificial Sequence: Synthetic oligonucleotide
  Sense Strand Starting at position 230 of SEQ ID NO: 318743
acaacuagugaaggaguuu

SEQ ID NO: 336974 - RNA, 19 nt, Artificial Sequence
  Description of Artificial Sequence: Synthetic oligonucleotide
  Antisense Strand to SEQ ID NO: 336973
aaacuccuucacuaguugu

SEQ ID NO: 336975 - RNA, 19 nt, Artificial Sequence
  Description of Artificial Sequence: Synthetic oligonucleotide
  Sense Strand Starting at position 230 of SEQ ID NO: 318749
agugaaggaguuuaaguua

SEQ ID NO: 336976 - RNA, 19 nt, Artificial Sequence
  Description of Artificial Sequence: Synthetic oligonucleotide
  Antisense Strand to SEQ ID NO: 336975
uaacuuaaacuccuucacu

SEQ ID NO: 336977 - RNA, 19 nt, Artificial Sequence
  Description of Artificial Sequence: Synthetic oligonucleotide
  Sense Strand Starting at position 230 of SEQ ID NO: 318863
ugaaucucucagggaucuu

SEQ ID NO: 336978 - RNA, 19 nt, Artificial Sequence
  Description of Artificial Sequence: Synthetic oligonucleotide
  Antisense Strand to SEQ ID NO: 336977
aagaucccugagagauuca

SEQ ID NO: 336979 - RNA, 19 nt, Artificial Sequence
  Description of Artificial Sequence: Synthetic oligonucleotide
  Sense Strand Starting at position 230 of SEQ ID NO: 318938
uaacaagcuccagguugau

SEQ ID NO: 336980 - RNA, 19 nt, Artificial Sequence
  Description of Artificial Sequence: Synthetic oligonucleotide
  Antisense Strand to SEQ ID NO: 336979
aucaaccuggagcuuguua

SEQ ID NO: 336981 - RNA, 19 nt, Artificial Sequence
  Description of Artificial Sequence: Synthetic oligonucleotide
  Sense Strand Starting at position 230 of SEQ ID NO: 318987
gggagauguguaugagaau

SEQ ID NO: 336982 - RNA, 19 nt, Artificial Sequence
  Description of Artificial Sequence: Synthetic oligonucleotide
  Antisense Strand to SEQ ID NO: 336981
auucucauacacaucuccc

SEQ ID NO: 336983 - RNA, 19 nt, Artificial Sequence
  Description of Artificial Sequence: Synthetic oligonucleotide
  Sense Strand Starting at position 230 of SEQ ID NO: 319024
uguaauuggacgcagaaua

SEQ ID NO: 336984 - RNA, 19 nt, Artificial Sequence
  Description of Artificial Sequence: Synthetic oligonucleotide
  Antisense Strand to SEQ ID NO: 336983
uauucugcguccaauuaca

SEQ ID NO: 336985 - RNA, 19 nt, Artificial Sequence
  Description of Artificial Sequence: Synthetic oligonucleotide
  Sense Strand Starting at position 230 of SEQ ID NO: 319037
agaauagaagucuguaaac

SEQ ID NO: 336986 - RNA, 19 nt, Artificial Sequence
  Description of Artificial Sequence: Synthetic oligonucleotide
  Antisense Strand to SEQ ID NO: 336985
guuuacagacuucuauucu

SEQ ID NO: 336987 - RNA, 19 nt, Artificial Sequence
  Description of Artificial Sequence: Synthetic oligonucleotide
  Sense Strand Starting at position 230 of SEQ ID NO: 319120
guuagcuauguauaucaaa

SEQ ID NO: 336988 - RNA, 19 nt, Artificial Sequence
  Description of Artificial Sequence: Synthetic oligonucleotide
  Antisense Strand to SEQ ID NO: 336987
uuugauauacauagcuaac

SEQ ID NO: 336989 - RNA, 19 nt, Artificial Sequence
  Description of Artificial Sequence: Synthetic oligonucleotide
  Sense Strand Starting at position 230 of SEQ ID NO: 319187
cuguauauggauggauuga

SEQ ID NO: 336990 - RNA, 19 nt, Artificial Sequence
  Description of Artificial Sequence: Synthetic oligonucleotide
  Antisense Strand to SEQ ID NO: 336989
ucaauccauccauauacag

SEQ ID NO: 336991 - RNA, 19 nt, Artificial Sequence
  Description of Artificial Sequence: Synthetic oligonucleotide
  Sense Strand Starting at position 231 of SEQ ID NO: 315439
gggacagugguaugcacaa

SEQ ID NO: 336992 - RNA, 19 nt, Artificial Sequence
  Description of Artificial Sequence: Synthetic oligonucleotide
  Antisense Strand to SEQ ID NO: 336991
uugugcauaccacuguccc

SEQ ID NO: 336993 - RNA, 19 nt, Artificial Sequence
  Description of Artificial Sequence: Synthetic oligonucleotide
  Sense Strand Starting at position 231 of SEQ ID NO: 315441
gacagugguaugcacaaga

SEQ ID NO: 336994 - RNA, 19 nt, Artificial Sequence
  Description of Artificial Sequence: Synthetic oligonucleotide
  Antisense Strand to SEQ ID NO: 336993
ucuugugcauaccacuguc

SEQ ID NO: 336995 - RNA, 19 nt, Artificial Sequence
  Description of Artificial Sequence: Synthetic oligonucleotide
  Sense Strand Starting at position 231 of SEQ ID NO: 315540
aagauagggcuccauguuu

SEQ ID NO: 336996 - RNA, 19 nt, Artificial Sequence
  Description of Artificial Sequence: Synthetic oligonucleotide
  Antisense Strand to SEQ ID NO: 336995
aaacauggagcccuaucuu

SEQ ID NO: 336997 - RNA, 19 nt, Artificial Sequence
  Description of Artificial Sequence: Synthetic oligonucleotide
  Sense Strand Starting at position 231 of SEQ ID NO: 315743
uugcuuauggcacacauua

SEQ ID NO: 336998 - RNA, 19 nt, Artificial Sequence
  Description of Artificial Sequence: Synthetic oligonucleotide
  Antisense Strand to SEQ ID NO: 336997
uaaugugugccauaagcaa

SEQ ID NO: 336999 - RNA, 19 nt, Artificial Sequence
  Description of Artificial Sequence: Synthetic oligonucleotide
  Sense Strand Starting at position 231 of SEQ ID NO: 315762
aguaguaaucagcggaaau

SEQ ID NO: 337000 - RNA, 19 nt, Artificial Sequence
  Description of Artificial Sequence: Synthetic oligonucleotide
  Antisense Strand to SEQ ID NO: 336999
auuuccgcugauuacuacu

SEQ ID NO: 337001 - RNA, 19 nt, Artificial Sequence
  Description of Artificial Sequence: Synthetic oligonucleotide
  Sense Strand Starting at position 231 of SEQ ID NO: 315763
guaguaaucagcggaaaua

SEQ ID NO: 337002 - RNA, 19 nt, Artificial Sequence
  Description of Artificial Sequence: Synthetic oligonucleotide
  Antisense Strand to SEQ ID NO: 337001
uauuuccgcugauuacuac

SEQ ID NO: 337003 - RNA, 19 nt, Artificial Sequence
  Description of Artificial Sequence: Synthetic oligonucleotide
  Sense Strand Starting at position 231 of SEQ ID NO: 315764
uaguaaucagcggaaauau

SEQ ID NO: 337004 - RNA, 19 nt, Artificial Sequence
  Description of Artificial Sequence: Synthetic oligonucleotide
  Antisense Strand to SEQ ID NO: 337003
auauuuccgcugauuacua

SEQ ID NO: 337005 - RNA, 19 nt, Artificial Sequence
  Description of Artificial Sequence: Synthetic oligonucleotide
  Sense Strand Starting at position 231 of SEQ ID NO: 315790
cucauuaaagagugagucu

SEQ ID NO: 337006 - RNA, 19 nt, Artificial Sequence
  Description of Artificial Sequence: Synthetic oligonucleotide
  Antisense Strand to SEQ ID NO: 337005
agacucacucuuuaaugag

SEQ ID NO: 337007 - RNA, 19 nt, Artificial Sequence
  Description of Artificial Sequence: Synthetic oligonucleotide
  Sense Strand Starting at position 231 of SEQ ID NO: 315793
auuaaagagugagucuuau

SEQ ID NO: 337008 - RNA, 19 nt, Artificial Sequence
  Description of Artificial Sequence: Synthetic oligonucleotide
  Antisense Strand to SEQ ID NO: 337007
auaagacucacucuuuaau

SEQ ID NO: 337009 - RNA, 19 nt, Artificial Sequence
  Description of Artificial Sequence: Synthetic oligonucleotide
  Sense Strand Starting at position 231 of SEQ ID NO: 315812
ggcuuuacgacccagagga

SEQ ID NO: 337010 - RNA, 19 nt, Artificial Sequence
  Description of Artificial Sequence: Synthetic oligonucleotide
  Antisense Strand to SEQ ID NO: 337009
uccucugggucguaaagcc

SEQ ID NO: 337011 - RNA, 19 nt, Artificial Sequence
  Description of Artificial Sequence: Synthetic oligonucleotide
  Sense Strand Starting at position 231 of SEQ ID NO: 315885
cugagcuagucuccuaacu

SEQ ID NO: 337012 - RNA, 19 nt, Artificial Sequence
  Description of Artificial Sequence: Synthetic oligonucleotide
  Antisense Strand to SEQ ID NO: 337011
aguuaggagacuagcucag

SEQ ID NO: 337013 - RNA, 19 nt, Artificial Sequence
  Description of Artificial Sequence: Synthetic oligonucleotide
  Sense Strand Starting at position 231 of SEQ ID NO: 315895
cuccuaacuggauguguaa

SEQ ID NO: 337014 - RNA, 19 nt, Artificial Sequence
  Description of Artificial Sequence: Synthetic oligonucleotide
  Antisense Strand to SEQ ID NO: 337013
uuacacauccaguuaggag

SEQ ID NO: 337015 - RNA, 19 nt, Artificial Sequence
  Description of Artificial Sequence: Synthetic oligonucleotide
  Sense Strand Starting at position 231 of SEQ ID NO: 315898
cuaacuggauguguaacua

SEQ ID NO: 337016 - RNA, 19 nt, Artificial Sequence
  Description of Artificial Sequence: Synthetic oligonucleotide
  Antisense Strand to SEQ ID NO: 337015
uaguuacacauccaguuag

SEQ ID NO: 337017 - RNA, 19 nt, Artificial Sequence
  Description of Artificial Sequence: Synthetic oligonucleotide
  Sense Strand Starting at position 231 of SEQ ID NO: 315951
gcuugaauuaacugacgga

SEQ ID NO: 337018 - RNA, 19 nt, Artificial Sequence
  Description of Artificial Sequence: Synthetic oligonucleotide
  Antisense Strand to SEQ ID NO: 337017
uccgucaguuaauucaagc

SEQ ID NO: 337019 - RNA, 19 nt, Artificial Sequence
  Description of Artificial Sequence: Synthetic oligonucleotide
  Sense Strand Starting at position 231 of SEQ ID NO: 316040
ccuucucuggcgcagagaa

SEQ ID NO: 337020 - RNA, 19 nt, Artificial Sequence
  Description of Artificial Sequence: Synthetic oligonucleotide
  Antisense Strand to SEQ ID NO: 337019
uucucugcgccagagaagg

SEQ ID NO: 337021 - RNA, 19 nt, Artificial Sequence
  Description of Artificial Sequence: Synthetic oligonucleotide
  Sense Strand Starting at position 231 of SEQ ID NO: 316059
ggugcuucaugaguauuug

SEQ ID NO: 337022 - RNA, 19 nt, Artificial Sequence
  Description of Artificial Sequence: Synthetic oligonucleotide
  Antisense Strand to SEQ ID NO: 337021
caaauacucaugaagcacc

SEQ ID NO: 337023 - RNA, 19 nt, Artificial Sequence
  Description of Artificial Sequence: Synthetic oligonucleotide
  Sense Strand Starting at position 231 of SEQ ID NO: 316065
ucaugaguauuugccguau

SEQ ID NO: 337024 - RNA, 19 nt, Artificial Sequence
  Description of Artificial Sequence: Synthetic oligonucleotide
  Antisense Strand to SEQ ID NO: 337023
auacggcaaauacucauga

SEQ ID NO: 337025 - RNA, 19 nt, Artificial Sequence
  Description of Artificial Sequence: Synthetic oligonucleotide
  Sense Strand Starting at position 231 of SEQ ID NO: 316213
uucugagcucuuggguaga

SEQ ID NO: 337026 - RNA, 19 nt, Artificial Sequence
  Description of Artificial Sequence: Synthetic oligonucleotide
  Antisense Strand to SEQ ID NO: 337025
ucuacccaagagcucagaa

SEQ ID NO: 337027 - RNA, 19 nt, Artificial Sequence
  Description of Artificial Sequence: Synthetic oligonucleotide
  Sense Strand Starting at position 231 of SEQ ID NO: 316216
ugagcucuuggguagagua

SEQ ID NO: 337028 - RNA, 19 nt, Artificial Sequence
  Description of Artificial Sequence: Synthetic oligonucleotide
  Antisense Strand to SEQ ID NO: 337027
uacucuacccaagagcuca

SEQ ID NO: 337029 - RNA, 19 nt, Artificial Sequence
  Description of Artificial Sequence: Synthetic oligonucleotide
  Sense Strand Starting at position 231 of SEQ ID NO: 316230
gaguaacaucaaggaagca

SEQ ID NO: 337030 - RNA, 19 nt, Artificial Sequence
  Description of Artificial Sequence: Synthetic oligonucleotide
  Antisense Strand to SEQ ID NO: 337029
ugcuuccuugauguuacuc

SEQ ID NO: 337031 - RNA, 19 nt, Artificial Sequence
  Description of Artificial Sequence: Synthetic oligonucleotide
  Sense Strand Starting at position 231 of SEQ ID NO: 316289
ggguucucccugcaaucca

SEQ ID NO: 337032 - RNA, 19 nt, Artificial Sequence
  Description of Artificial Sequence: Synthetic oligonucleotide
  Antisense Strand to SEQ ID NO: 337031
uggauugcagggagaaccc

SEQ ID NO: 337033 - RNA, 19 nt, Artificial Sequence
  Description of Artificial Sequence: Synthetic oligonucleotide
  Sense Strand Starting at position 231 of SEQ ID NO: 316309
ugggcacuagauuggauaa

SEQ ID NO: 337034 - RNA, 19 nt, Artificial Sequence
  Description of Artificial Sequence: Synthetic oligonucleotide
  Antisense Strand to SEQ ID NO: 337033
uuauccaaucuagugccca

SEQ ID NO: 337035 - RNA, 19 nt, Artificial Sequence
  Description of Artificial Sequence: Synthetic oligonucleotide
  Sense Strand Starting at position 231 of SEQ ID NO: 316469
cagcgagaucugugagaca

SEQ ID NO: 337036 - RNA, 19 nt, Artificial Sequence
  Description of Artificial Sequence: Synthetic oligonucleotide
  Antisense Strand to SEQ ID NO: 337035
ugucucacagaucucgcug

SEQ ID NO: 337037 - RNA, 19 nt, Artificial Sequence
  Description of Artificial Sequence: Synthetic oligonucleotide
  Sense Strand Starting at position 231 of SEQ ID NO: 316490
ccaggcaaguuuccuugaa

SEQ ID NO: 337038 - RNA, 19 nt, Artificial Sequence
  Description of Artificial Sequence: Synthetic oligonucleotide
  Antisense Strand to SEQ ID NO: 337037
uucaaggaaacuugccugg

SEQ ID NO: 337039 - RNA, 19 nt, Artificial Sequence
  Description of Artificial Sequence: Synthetic oligonucleotide
  Sense Strand Starting at position 231 of SEQ ID NO: 316492
aggcaaguuuccuugaaca

SEQ ID NO: 337040 - RNA, 19 nt, Artificial Sequence
  Description of Artificial Sequence: Synthetic oligonucleotide
  Antisense Strand to SEQ ID NO: 337039
uguucaaggaaacuugccu

SEQ ID NO: 337041 - RNA, 19 nt, Artificial Sequence
  Description of Artificial Sequence: Synthetic oligonucleotide
  Sense Strand Starting at position 231 of SEQ ID NO: 316494
gcaaguuuccuugaacagu

SEQ ID NO: 337042 - RNA, 19 nt, Artificial Sequence
  Description of Artificial Sequence: Synthetic oligonucleotide
  Antisense Strand to SEQ ID NO: 337041
acuguucaaggaaacuugc

SEQ ID NO: 337043 - RNA, 19 nt, Artificial Sequence
  Description of Artificial Sequence: Synthetic oligonucleotide
  Sense Strand Starting at position 231 of SEQ ID NO: 316538
aaacauucccguuagugga

SEQ ID NO: 337044 - RNA, 19 nt, Artificial Sequence
  Description of Artificial Sequence: Synthetic oligonucleotide
  Antisense Strand to SEQ ID NO: 337043
uccacuaacgggaauguuu

SEQ ID NO: 337045 - RNA, 19 nt, Artificial Sequence
  Description of Artificial Sequence: Synthetic oligonucleotide
  Sense Strand Starting at position 231 of SEQ ID NO: 316657
aggagcgguagugauaauu

SEQ ID NO: 337046 - RNA, 19 nt, Artificial Sequence
  Description of Artificial Sequence: Synthetic oligonucleotide
  Antisense Strand to SEQ ID NO: 337045
aauuaucacuaccgcuccu

SEQ ID NO: 337047 - RNA, 19 nt, Artificial Sequence
  Description of Artificial Sequence: Synthetic oligonucleotide
  Sense Strand Starting at position 231 of SEQ ID NO: 317906
cugaaacuugcgcauuaug

SEQ ID NO: 337048 - RNA, 19 nt, Artificial Sequence
  Description of Artificial Sequence: Synthetic oligonucleotide
  Antisense Strand to SEQ ID NO: 337047
cauaaugcgcaaguuucag

SEQ ID NO: 337049 - RNA, 19 nt, Artificial Sequence
  Description of Artificial Sequence: Synthetic oligonucleotide
  Sense Strand Starting at position 231 of SEQ ID NO: 317909
aaacuugcgcauuaugaga

SEQ ID NO: 337050 - RNA, 19 nt, Artificial Sequence
  Description of Artificial Sequence: Synthetic oligonucleotide
  Antisense Strand to SEQ ID NO: 337049
ucucauaaugcgcaaguuu

SEQ ID NO: 337051 - RNA, 19 nt, Artificial Sequence
  Description of Artificial Sequence: Synthetic oligonucleotide
  Sense Strand Starting at position 231 of SEQ ID NO: 317989
aguggagcuguccagcaau

SEQ ID NO: 337052 - RNA, 19 nt, Artificial Sequence
  Description of Artificial Sequence: Synthetic oligonucleotide
  Antisense Strand to SEQ ID NO: 337051
auugcuggacagcuccacu

SEQ ID NO: 337053 - RNA, 19 nt, Artificial Sequence
  Description of Artificial Sequence: Synthetic oligonucleotide
  Sense Strand Starting at position 231 of SEQ ID NO: 318232
agccuuucucgggaaacua

SEQ ID NO: 337054 - RNA, 19 nt, Artificial Sequence
  Description of Artificial Sequence: Synthetic oligonucleotide
  Antisense Strand to SEQ ID NO: 337053
uaguuucccgagaaaggcu

SEQ ID NO: 337055 - RNA, 19 nt, Artificial Sequence
  Description of Artificial Sequence: Synthetic oligonucleotide
  Sense Strand Starting at position 231 of SEQ ID NO: 318548
ggguuaguaucauccacac

SEQ ID NO: 337056 - RNA, 19 nt, Artificial Sequence
  Description of Artificial Sequence: Synthetic oligonucleotide
  Antisense Strand to SEQ ID NO: 337055
guguggaugauacuaaccc

SEQ ID NO: 337057 - RNA, 19 nt, Artificial Sequence
  Description of Artificial Sequence: Synthetic oligonucleotide
  Sense Strand Starting at position 231 of SEQ ID NO: 318595
guuagaagccuugaauguu

SEQ ID NO: 337058 - RNA, 19 nt, Artificial Sequence
  Description of Artificial Sequence: Synthetic oligonucleotide
  Antisense Strand to SEQ ID NO: 337057
aacauucaaggcuucuaac

SEQ ID NO: 337059 - RNA, 19 nt, Artificial Sequence
  Description of Artificial Sequence: Synthetic oligonucleotide
  Sense Strand Starting at position 231 of SEQ ID NO: 318598
agaagccuugaauguugua

SEQ ID NO: 337060 - RNA, 19 nt, Artificial Sequence
  Description of Artificial Sequence: Synthetic oligonucleotide
  Antisense Strand to SEQ ID NO: 337059
uacaacauucaaggcuucu

SEQ ID NO: 337061 - RNA, 19 nt, Artificial Sequence
  Description of Artificial Sequence: Synthetic oligonucleotide
  Sense Strand Starting at position 231 of SEQ ID NO: 318807
ugcugugacacggaaauau

SEQ ID NO: 337062 - RNA, 19 nt, Artificial Sequence
  Description of Artificial Sequence: Synthetic oligonucleotide
  Antisense Strand to SEQ ID NO: 337061
auauuuccgugucacagca

SEQ ID NO: 337063 - RNA, 19 nt, Artificial Sequence
  Description of Artificial Sequence: Synthetic oligonucleotide
  Sense Strand Starting at position 231 of SEQ ID NO: 318978
augugugguagguacuuaa

SEQ ID NO: 337064 - RNA, 19 nt, Artificial Sequence
  Description of Artificial Sequence: Synthetic oligonucleotide
  Antisense Strand to SEQ ID NO: 337063
uuaaguaccuaccacacau

SEQ ID NO: 337065 - RNA, 19 nt, Artificial Sequence
  Description of Artificial Sequence: Synthetic oligonucleotide
  Sense Strand Starting at position 231 of SEQ ID NO: 318982
gugguagguacuuaauacu

SEQ ID NO: 337066 - RNA, 19 nt, Artificial Sequence
  Description of Artificial Sequence: Synthetic oligonucleotide
  Antisense Strand to SEQ ID NO: 337065
aguauuaaguaccuaccac

SEQ ID NO: 337067 - RNA, 19 nt, Artificial Sequence
  Description of Artificial Sequence: Synthetic oligonucleotide
  Sense Strand Starting at position 231 of SEQ ID NO: 319049
agagaucaucuuggguaca

SEQ ID NO: 337068 - RNA, 19 nt, Artificial Sequence
  Description of Artificial Sequence: Synthetic oligonucleotide
  Antisense Strand to SEQ ID NO: 337067
uguacccaagaugaucucu

SEQ ID NO: 337069 - RNA, 19 nt, Artificial Sequence
  Description of Artificial Sequence: Synthetic oligonucleotide
  Sense Strand Starting at position 231 of SEQ ID NO: 319051
agaucaucuuggguacauu

SEQ ID NO: 337070 - RNA, 19 nt, Artificial Sequence
  Description of Artificial Sequence: Synthetic oligonucleotide
  Antisense Strand to SEQ ID NO: 337069
aauguacccaagaugaucu

SEQ ID NO: 337071 - RNA, 19 nt, Artificial Sequence
  Description of Artificial Sequence: Synthetic oligonucleotide
  Sense Strand Starting at position 232 of SEQ ID NO: 315505
guacucugcuaggcuaaga

SEQ ID NO: 337072 - RNA, 19 nt, Artificial Sequence
  Description of Artificial Sequence: Synthetic oligonucleotide
  Antisense Strand to SEQ ID NO: 337071
ucuuagccuagcagaguac

SEQ ID NO: 337073 - RNA, 19 nt, Artificial Sequence
  Description of Artificial Sequence: Synthetic oligonucleotide
  Sense Strand Starting at position 232 of SEQ ID NO: 315693
gccagaacuccugaagucu

SEQ ID NO: 337074 - RNA, 19 nt, Artificial Sequence
  Description of Artificial Sequence: Synthetic oligonucleotide
  Antisense Strand to SEQ ID NO: 337073
agacuucaggaguucuggc

SEQ ID NO: 337075 - RNA, 19 nt, Artificial Sequence
  Description of Artificial Sequence: Synthetic oligonucleotide
  Sense Strand Starting at position 232 of SEQ ID NO: 315702
ccugaagucugucuuucua

SEQ ID NO: 337076 - RNA, 19 nt, Artificial Sequence
  Description of Artificial Sequence: Synthetic oligonucleotide
  Antisense Strand to SEQ ID NO: 337075
uagaaagacagacuucagg

SEQ ID NO: 337077 - RNA, 19 nt, Artificial Sequence
  Description of Artificial Sequence: Synthetic oligonucleotide
  Sense Strand Starting at position 232 of SEQ ID NO: 315704
ugaagucugucuuucuaag

SEQ ID NO: 337078 - RNA, 19 nt, Artificial Sequence
  Description of Artificial Sequence: Synthetic oligonucleotide
  Antisense Strand to SEQ ID NO: 337077
cuuagaaagacagacuuca

SEQ ID NO: 337079 - RNA, 19 nt, Artificial Sequence
  Description of Artificial Sequence: Synthetic oligonucleotide
  Sense Strand Starting at position 232 of SEQ ID NO: 315881
agcaacaugcccuggaauu

SEQ ID NO: 337080 - RNA, 19 nt, Artificial Sequence
  Description of Artificial Sequence: Synthetic oligonucleotide
  Antisense Strand to SEQ ID NO: 337079
aauuccagggcauguugcu

SEQ ID NO: 337081 - RNA, 19 nt, Artificial Sequence
  Description of Artificial Sequence: Synthetic oligonucleotide
  Sense Strand Starting at position 232 of SEQ ID NO: 315988
cuacaauaaugggcuaaau

SEQ ID NO: 337082 - RNA, 19 nt, Artificial Sequence
  Description of Artificial Sequence: Synthetic oligonucleotide
  Antisense Strand to SEQ ID NO: 337081
auuuagcccauuauuguag

SEQ ID NO: 337083 - RNA, 19 nt, Artificial Sequence
  Description of Artificial Sequence: Synthetic oligonucleotide
  Sense Strand Starting at position 232 of SEQ ID NO: 316000
gcuaaauagggcuguugaa

SEQ ID NO: 337084 - RNA, 19 nt, Artificial Sequence
  Description of Artificial Sequence: Synthetic oligonucleotide
  Antisense Strand to SEQ ID NO: 337083
uucaacagcccuauuuagc

SEQ ID NO: 337085 - RNA, 19 nt, Artificial Sequence
  Description of Artificial Sequence: Synthetic oligonucleotide
  Sense Strand Starting at position 232 of SEQ ID NO: 316040
aaggguuuaguccaacgca

SEQ ID NO: 337086 - RNA, 19 nt, Artificial Sequence
  Description of Artificial Sequence: Synthetic oligonucleotide
  Antisense Strand to SEQ ID NO: 337085
ugcguuggacuaaacccuu

SEQ ID NO: 337087 - RNA, 19 nt, Artificial Sequence
  Description of Artificial Sequence: Synthetic oligonucleotide
  Sense Strand Starting at position 232 of SEQ ID NO: 316196
aagcgaucacugugaugag

SEQ ID NO: 337088 - RNA, 19 nt, Artificial Sequence
  Description of Artificial Sequence: Synthetic oligonucleotide
  Antisense Strand to SEQ ID NO: 337087
cucaucacagugaucgcuu

SEQ ID NO: 337089 - RNA, 19 nt, Artificial Sequence
  Description of Artificial Sequence: Synthetic oligonucleotide
  Sense Strand Starting at position 232 of SEQ ID NO: 316280
ggauucucuggugauaucu

SEQ ID NO: 337090 - RNA, 19 nt, Artificial Sequence
  Description of Artificial Sequence: Synthetic oligonucleotide
  Antisense Strand to SEQ ID NO: 337089
agauaucaccagagaaucc

SEQ ID NO: 337091 - RNA, 19 nt, Artificial Sequence
  Description of Artificial Sequence: Synthetic oligonucleotide
  Sense Strand Starting at position 232 of SEQ ID NO: 316465
gaugcagucccagagggau

SEQ ID NO: 337092 - RNA, 19 nt, Artificial Sequence
  Description of Artificial Sequence: Synthetic oligonucleotide
  Antisense Strand to SEQ ID NO: 337091
aucccucugggacugcauc

SEQ ID NO: 337093 - RNA, 19 nt, Artificial Sequence
  Description of Artificial Sequence: Synthetic oligonucleotide
  Sense Strand Starting at position 232 of SEQ ID NO: 316587
ucagaucugagcuaugguu

SEQ ID NO: 337094 - RNA, 19 nt, Artificial Sequence
  Description of Artificial Sequence: Synthetic oligonucleotide
  Antisense Strand to SEQ ID NO: 337093
aaccauagcucagaucuga

SEQ ID NO: 337095 - RNA, 19 nt, Artificial Sequence
  Description of Artificial Sequence: Synthetic oligonucleotide
  Sense Strand Starting at position 232 of SEQ ID NO: 316589
agaucugagcuaugguucu

SEQ ID NO: 337096 - RNA, 19 nt, Artificial Sequence
  Description of Artificial Sequence: Synthetic oligonucleotide
  Antisense Strand to SEQ ID NO: 337095
agaaccauagcucagaucu

SEQ ID NO: 337097 - RNA, 19 nt, Artificial Sequence
  Description of Artificial Sequence: Synthetic oligonucleotide
  Sense Strand Starting at position 232 of SEQ ID NO: 316621
agaugugcuguggagaaca

SEQ ID NO: 337098 - RNA, 19 nt, Artificial Sequence
  Description of Artificial Sequence: Synthetic oligonucleotide
  Antisense Strand to SEQ ID NO: 337097
uguucuccacagcacaucu

SEQ ID NO: 337099 - RNA, 19 nt, Artificial Sequence
  Description of Artificial Sequence: Synthetic oligonucleotide
  Sense Strand Starting at position 232 of SEQ ID NO: 317658
gcgaguguccugcccuuga

SEQ ID NO: 337100 - RNA, 19 nt, Artificial Sequence
  Description of Artificial Sequence: Synthetic oligonucleotide
  Antisense Strand to SEQ ID NO: 337099
ucaagggcaggacacucgc

SEQ ID NO: 337101 - RNA, 19 nt, Artificial Sequence
  Description of Artificial Sequence: Synthetic oligonucleotide
  Sense Strand Starting at position 232 of SEQ ID NO: 317759
uggcgaugccacuaguaaa

SEQ ID NO: 337102 - RNA, 19 nt, Artificial Sequence
  Description of Artificial Sequence: Synthetic oligonucleotide
  Antisense Strand to SEQ ID NO: 337101
uuuacuaguggcaucgcca

SEQ ID NO: 337103 - RNA, 19 nt, Artificial Sequence
  Description of Artificial Sequence: Synthetic oligonucleotide
  Sense Strand Starting at position 232 of SEQ ID NO: 317813
cagagcaaccucugaggaa

SEQ ID NO: 337104 - RNA, 19 nt, Artificial Sequence
  Description of Artificial Sequence: Synthetic oligonucleotide
  Antisense Strand to SEQ ID NO: 337103
uuccucagagguugcucug

SEQ ID NO: 337105 - RNA, 19 nt, Artificial Sequence
  Description of Artificial Sequence: Synthetic oligonucleotide
  Sense Strand Starting at position 232 of SEQ ID NO: 317851
gcgggagaguaggauuuau

SEQ ID NO: 337106 - RNA, 19 nt, Artificial Sequence
  Description of Artificial Sequence: Synthetic oligonucleotide
  Antisense Strand to SEQ ID NO: 337105
auaaauccuacucucccgc

SEQ ID NO: 337107 - RNA, 19 nt, Artificial Sequence
  Description of Artificial Sequence: Synthetic oligonucleotide
  Sense Strand Starting at position 232 of SEQ ID NO: 317888
agagguuuccugggagucu

SEQ ID NO: 337108 - RNA, 19 nt, Artificial Sequence
  Description of Artificial Sequence: Synthetic oligonucleotide
  Antisense Strand to SEQ ID NO: 337107
agacucccaggaaaccucu

SEQ ID NO: 337109 - RNA, 19 nt, Artificial Sequence
  Description of Artificial Sequence: Synthetic oligonucleotide
  Sense Strand Starting at position 232 of SEQ ID NO: 318173
acgguugccagucauagac

SEQ ID NO: 337110 - RNA, 19 nt, Artificial Sequence
  Description of Artificial Sequence: Synthetic oligonucleotide
  Antisense Strand to SEQ ID NO: 337109
gucuaugacuggcaaccgu

SEQ ID NO: 337111 - RNA, 19 nt, Artificial Sequence
  Description of Artificial Sequence: Synthetic oligonucleotide
  Sense Strand Starting at position 232 of SEQ ID NO: 318233
gcugaauggcuuugauuug

SEQ ID NO: 337112 - RNA, 19 nt, Artificial Sequence
  Description of Artificial Sequence: Synthetic oligonucleotide
  Antisense Strand to SEQ ID NO: 337111
caaaucaaagccauucagc

SEQ ID NO: 337113 - RNA, 19 nt, Artificial Sequence
  Description of Artificial Sequence: Synthetic oligonucleotide
  Sense Strand Starting at position 232 of SEQ ID NO: 318378
gcaguaaggcucugagauu

SEQ ID NO: 337114 - RNA, 19 nt, Artificial Sequence
  Description of Artificial Sequence: Synthetic oligonucleotide
  Antisense Strand to SEQ ID NO: 337113
aaucucagagccuuacugc

SEQ ID NO: 337115 - RNA, 19 nt, Artificial Sequence
  Description of Artificial Sequence: Synthetic oligonucleotide
  Sense Strand Starting at position 232 of SEQ ID NO: 318384
aggcucugagauugagaau

SEQ ID NO: 337116 - RNA, 19 nt, Artificial Sequence
  Description of Artificial Sequence: Synthetic oligonucleotide
  Antisense Strand to SEQ ID NO: 337115
auucucaaucucagagccu

SEQ ID NO: 337117 - RNA, 19 nt, Artificial Sequence
  Description of Artificial Sequence: Synthetic oligonucleotide
  Sense Strand Starting at position 232 of SEQ ID NO: 318398
agaauagcucagggugaag

SEQ ID NO: 337118 - RNA, 19 nt, Artificial Sequence
  Description of Artificial Sequence: Synthetic oligonucleotide
  Antisense Strand to SEQ ID NO: 337117
cuucacccugagcuauucu

SEQ ID NO: 337119 - RNA, 19 nt, Artificial Sequence
  Description of Artificial Sequence: Synthetic oligonucleotide
  Sense Strand Starting at position 232 of SEQ ID NO: 318450
uggaaucuuuaggaacaaa

SEQ ID NO: 337120 - RNA, 19 nt, Artificial Sequence
  Description of Artificial Sequence: Synthetic oligonucleotide
  Antisense Strand to SEQ ID NO: 337119
uuuguuccuaaagauucca

SEQ ID NO: 337121 - RNA, 19 nt, Artificial Sequence
  Description of Artificial Sequence: Synthetic oligonucleotide
  Sense Strand Starting at position 232 of SEQ ID NO: 318564
ggauucuggugcaaggagu

SEQ ID NO: 337122 - RNA, 19 nt, Artificial Sequence
  Description of Artificial Sequence: Synthetic oligonucleotide
  Antisense Strand to SEQ ID NO: 337121
acuccuugcaccagaaucc

SEQ ID NO: 337123 - RNA, 19 nt, Artificial Sequence
  Description of Artificial Sequence: Synthetic oligonucleotide
  Sense Strand Starting at position 232 of SEQ ID NO: 318663
ugaguaaagauguggucag

SEQ ID NO: 337124 - RNA, 19 nt, Artificial Sequence
  Description of Artificial Sequence: Synthetic oligonucleotide
  Antisense Strand to SEQ ID NO: 337123
cugaccacaucuuuacuca

SEQ ID NO: 337125 - RNA, 19 nt, Artificial Sequence
  Description of Artificial Sequence: Synthetic oligonucleotide
  Sense Strand Starting at position 232 of SEQ ID NO: 318717
ggagguuuaugauuacuaa

SEQ ID NO: 337126 - RNA, 19 nt, Artificial Sequence
  Description of Artificial Sequence: Synthetic oligonucleotide
  Antisense Strand to SEQ ID NO: 337125
uuaguaaucauaaaccucc

SEQ ID NO: 337127 - RNA, 19 nt, Artificial Sequence
  Description of Artificial Sequence: Synthetic oligonucleotide
  Sense Strand Starting at position 232 of SEQ ID NO: 318720
gguuuaugauuacuaauuc

SEQ ID NO: 337128 - RNA, 19 nt, Artificial Sequence
  Description of Artificial Sequence: Synthetic oligonucleotide
  Antisense Strand to SEQ ID NO: 337127
gaauuaguaaucauaaacc

SEQ ID NO: 337129 - RNA, 19 nt, Artificial Sequence
  Description of Artificial Sequence: Synthetic oligonucleotide
  Sense Strand Starting at position 232 of SEQ ID NO: 318789
ucaguuuggauagauggua

SEQ ID NO: 337130 - RNA, 19 nt, Artificial Sequence
  Description of Artificial Sequence: Synthetic oligonucleotide
  Antisense Strand to SEQ ID NO: 337129
uaccaucuauccaaacuga

SEQ ID NO: 337131 - RNA, 19 nt, Artificial Sequence
  Description of Artificial Sequence: Synthetic oligonucleotide
  Sense Strand Starting at position 232 of SEQ ID NO: 318801
gaugguauguuucugggaa

SEQ ID NO: 337132 - RNA, 19 nt, Artificial Sequence
  Description of Artificial Sequence: Synthetic oligonucleotide
  Antisense Strand to SEQ ID NO: 337131
uucccagaaacauaccauc

SEQ ID NO: 337133 - RNA, 19 nt, Artificial Sequence
  Description of Artificial Sequence: Synthetic oligonucleotide
  Sense Strand Starting at position 232 of SEQ ID NO: 318845
aguuucuugguguauaauu

SEQ ID NO: 337134 - RNA, 19 nt, Artificial Sequence
  Description of Artificial Sequence: Synthetic oligonucleotide
  Antisense Strand to SEQ ID NO: 337133
aauuauacaccaagaaacu

SEQ ID NO: 337135 - RNA, 19 nt, Artificial Sequence
  Description of Artificial Sequence: Synthetic oligonucleotide
  Sense Strand Starting at position 232 of SEQ ID NO: 318867
cauaguaguugauuaugau

SEQ ID NO: 337136 - RNA, 19 nt, Artificial Sequence
  Description of Artificial Sequence: Synthetic oligonucleotide
  Antisense Strand to SEQ ID NO: 337135
aucauaaucaacuacuaug

SEQ ID NO: 337137 - RNA, 19 nt, Artificial Sequence
  Description of Artificial Sequence: Synthetic oligonucleotide
  Sense Strand Starting at position 232 of SEQ ID NO: 318868
auaguaguugauuaugauc

SEQ ID NO: 337138 - RNA, 19 nt, Artificial Sequence
  Description of Artificial Sequence: Synthetic oligonucleotide
  Antisense Strand to SEQ ID NO: 337137
gaucauaaucaacuacuau

SEQ ID NO: 337139 - RNA, 19 nt, Artificial Sequence
  Description of Artificial Sequence: Synthetic oligonucleotide
  Sense Strand Starting at position 232 of SEQ ID NO: 318972
cuagcuaagguuuguuaau

SEQ ID NO: 337140 - RNA, 19 nt, Artificial Sequence
  Description of Artificial Sequence: Synthetic oligonucleotide
  Antisense Strand to SEQ ID NO: 337139
auuaacaaaccuuagcuag

SEQ ID NO: 337141 - RNA, 19 nt, Artificial Sequence
  Description of Artificial Sequence: Synthetic oligonucleotide
  Sense Strand Starting at position 232 of SEQ ID NO: 318973
uagcuaagguuuguuaauu

SEQ ID NO: 337142 - RNA, 19 nt, Artificial Sequence
  Description of Artificial Sequence: Synthetic oligonucleotide
  Antisense Strand to SEQ ID NO: 337141
aauuaacaaaccuuagcua

SEQ ID NO: 337143 - RNA, 19 nt, Artificial Sequence
  Description of Artificial Sequence: Synthetic oligonucleotide
  Sense Strand Starting at position 232 of SEQ ID NO: 318974
agcuaagguuuguuaauuu

SEQ ID NO: 337144 - RNA, 19 nt, Artificial Sequence
  Description of Artificial Sequence: Synthetic oligonucleotide
  Antisense Strand to SEQ ID NO: 337143
aaauuaacaaaccuuagcu

SEQ ID NO: 337145 - RNA, 19 nt, Artificial Sequence
  Description of Artificial Sequence: Synthetic oligonucleotide
  Sense Strand Starting at position 232 of SEQ ID NO: 318991
uuuguugaucuuuacuguu

SEQ ID NO: 337146 - RNA, 19 nt, Artificial Sequence
  Description of Artificial Sequence: Synthetic oligonucleotide
  Antisense Strand to SEQ ID NO: 337145
aacaguaaagaucaacaaa

SEQ ID NO: 337147 - RNA, 19 nt, Artificial Sequence
  Description of Artificial Sequence: Synthetic oligonucleotide
  Sense Strand Starting at position 232 of SEQ ID NO: 319032
guuucuauuucugcucuca

SEQ ID NO: 337148 - RNA, 19 nt, Artificial Sequence
  Description of Artificial Sequence: Synthetic oligonucleotide
  Antisense Strand to SEQ ID NO: 337147
ugagagcagaaauagaaac

SEQ ID NO: 337149 - RNA, 19 nt, Artificial Sequence
  Description of Artificial Sequence: Synthetic oligonucleotide
  Sense Strand Starting at position 232 of SEQ ID NO: 319121
aaauuagguuguuugaugu

SEQ ID NO: 337150 - RNA, 19 nt, Artificial Sequence
  Description of Artificial Sequence: Synthetic oligonucleotide
  Antisense Strand to SEQ ID NO: 337149
acaucaaacaaccuaauuu

SEQ ID NO: 337151 - RNA, 19 nt, Artificial Sequence
  Description of Artificial Sequence: Synthetic oligonucleotide
  Sense Strand Starting at position 233 of SEQ ID NO: 315543
ucagauacucacggaauga

SEQ ID NO: 337152 - RNA, 19 nt, Artificial Sequence
  Description of Artificial Sequence: Synthetic oligonucleotide
  Antisense Strand to SEQ ID NO: 337151
ucauuccgugaguaucuga

SEQ ID NO: 337153 - RNA, 19 nt, Artificial Sequence
  Description of Artificial Sequence: Synthetic oligonucleotide
  Sense Strand Starting at position 233 of SEQ ID NO: 315553
acggaaugaacgcauguua

SEQ ID NO: 337154 - RNA, 19 nt, Artificial Sequence
  Description of Artificial Sequence: Synthetic oligonucleotide
  Antisense Strand to SEQ ID NO: 337153
uaacaugcguucauuccgu

SEQ ID NO: 337155 - RNA, 19 nt, Artificial Sequence
  Description of Artificial Sequence: Synthetic oligonucleotide
  Sense Strand Starting at position 233 of SEQ ID NO: 315770
ggguacuuguguccuugaa

SEQ ID NO: 337156 - RNA, 19 nt, Artificial Sequence
  Description of Artificial Sequence: Synthetic oligonucleotide
  Antisense Strand to SEQ ID NO: 337155
uucaaggacacaaguaccc

SEQ ID NO: 337157 - RNA, 19 nt, Artificial Sequence
  Description of Artificial Sequence: Synthetic oligonucleotide
  Sense Strand Starting at position 233 of SEQ ID NO: 316005
aacugaguuccuuggucag

SEQ ID NO: 337158 - RNA, 19 nt, Artificial Sequence
  Description of Artificial Sequence: Synthetic oligonucleotide
  Antisense Strand to SEQ ID NO: 337157
cugaccaaggaacucaguu

SEQ ID NO: 337159 - RNA, 19 nt, Artificial Sequence
  Description of Artificial Sequence: Synthetic oligonucleotide
  Sense Strand Starting at position 233 of SEQ ID NO: 316007
cugaguuccuuggucagga

SEQ ID NO: 337160 - RNA, 19 nt, Artificial Sequence
  Description of Artificial Sequence: Synthetic oligonucleotide
  Antisense Strand to SEQ ID NO: 337159
uccugaccaaggaacucag

SEQ ID NO: 337161 - RNA, 19 nt, Artificial Sequence
  Description of Artificial Sequence: Synthetic oligonucleotide
  Sense Strand Starting at position 233 of SEQ ID NO: 316008
ugaguuccuuggucaggaa

SEQ ID NO: 337162 - RNA, 19 nt, Artificial Sequence
  Description of Artificial Sequence: Synthetic oligonucleotide
  Antisense Strand to SEQ ID NO: 337161
uuccugaccaaggaacuca

SEQ ID NO: 337163 - RNA, 19 nt, Artificial Sequence
  Description of Artificial Sequence: Synthetic oligonucleotide
  Sense Strand Starting at position 233 of SEQ ID NO: 316009
gaguuccuuggucaggaaa

SEQ ID NO: 337164 - RNA, 19 nt, Artificial Sequence
  Description of Artificial Sequence: Synthetic oligonucleotide
  Antisense Strand to SEQ ID NO: 337163
uuuccugaccaaggaacuc

SEQ ID NO: 337165 - RNA, 19 nt, Artificial Sequence
  Description of Artificial Sequence: Synthetic oligonucleotide
  Sense Strand Starting at position 233 of SEQ ID NO: 316261
guagaauggagcuaauucu

SEQ ID NO: 337166 - RNA, 19 nt, Artificial Sequence
  Description of Artificial Sequence: Synthetic oligonucleotide
  Antisense Strand to SEQ ID NO: 337165
agaauuagcuccauucuac

SEQ ID NO: 337167 - RNA, 19 nt, Artificial Sequence
  Description of Artificial Sequence: Synthetic oligonucleotide
  Sense Strand Starting at position 233 of SEQ ID NO: 316268
ggagcuaauucugccuaca

SEQ ID NO: 337168 - RNA, 19 nt, Artificial Sequence
  Description of Artificial Sequence: Synthetic oligonucleotide
  Antisense Strand to SEQ ID NO: 337167
uguaggcagaauuagcucc

SEQ ID NO: 337169 - RNA, 19 nt, Artificial Sequence
  Description of Artificial Sequence: Synthetic oligonucleotide
  Sense Strand Starting at position 233 of SEQ ID NO: 316270
agcuaauucugccuacaag

SEQ ID NO: 337170 - RNA, 19 nt, Artificial Sequence
  Description of Artificial Sequence: Synthetic oligonucleotide
  Antisense Strand to SEQ ID NO: 337169
cuuguaggcagaauuagcu

SEQ ID NO: 337171 - RNA, 19 nt, Artificial Sequence
  Description of Artificial Sequence: Synthetic oligonucleotide
  Sense Strand Starting at position 233 of SEQ ID NO: 316271
gcuaauucugccuacaagu

SEQ ID NO: 337172 - RNA, 19 nt, Artificial Sequence
  Description of Artificial Sequence: Synthetic oligonucleotide
  Antisense Strand to SEQ ID NO: 337171
acuuguaggcagaauuagc

SEQ ID NO: 337173 - RNA, 19 nt, Artificial Sequence
  Description of Artificial Sequence: Synthetic oligonucleotide
  Sense Strand Starting at position 233 of SEQ ID NO: 316289
uuuaaauggcccugaguug

SEQ ID NO: 337174 - RNA, 19 nt, Artificial Sequence
  Description of Artificial Sequence: Synthetic oligonucleotide
  Antisense Strand to SEQ ID NO: 337173
caacucagggccauuuaaa

SEQ ID NO: 337175 - RNA, 19 nt, Artificial Sequence
  Description of Artificial Sequence: Synthetic oligonucleotide
  Sense Strand Starting at position 233 of SEQ ID NO: 316298
cccugaguuggucaccaca

SEQ ID NO: 337176 - RNA, 19 nt, Artificial Sequence
  Description of Artificial Sequence: Synthetic oligonucleotide
  Antisense Strand to SEQ ID NO: 337175
uguggugaccaacucaggg

SEQ ID NO: 337177 - RNA, 19 nt, Artificial Sequence
  Description of Artificial Sequence: Synthetic oligonucleotide
  Sense Strand Starting at position 233 of SEQ ID NO: 316300
cugaguuggucaccacaac

SEQ ID NO: 337178 - RNA, 19 nt, Artificial Sequence
  Description of Artificial Sequence: Synthetic oligonucleotide
  Antisense Strand to SEQ ID NO: 337177
guuguggugaccaacucag

SEQ ID NO: 337179 - RNA, 19 nt, Artificial Sequence
  Description of Artificial Sequence: Synthetic oligonucleotide
  Sense Strand Starting at position 233 of SEQ ID NO: 316634
cgaacucacuugguggaaa

SEQ ID NO: 337180 - RNA, 19 nt, Artificial Sequence
  Description of Artificial Sequence: Synthetic oligonucleotide
  Antisense Strand to SEQ ID NO: 337179
uuuccaccaagugaguucg

SEQ ID NO: 337181 - RNA, 19 nt, Artificial Sequence
  Description of Artificial Sequence: Synthetic oligonucleotide
  Sense Strand Starting at position 233 of SEQ ID NO: 316722
agaauucgcucccucaaag

SEQ ID NO: 337182 - RNA, 19 nt, Artificial Sequence
  Description of Artificial Sequence: Synthetic oligonucleotide
  Antisense Strand to SEQ ID NO: 337181
cuuugagggagcgaauucu

SEQ ID NO: 337183 - RNA, 19 nt, Artificial Sequence
  Description of Artificial Sequence: Synthetic oligonucleotide
  Sense Strand Starting at position 233 of SEQ ID NO: 317708
acuguugguucugucauuu

SEQ ID NO: 337184 - RNA, 19 nt, Artificial Sequence
  Description of Artificial Sequence: Synthetic oligonucleotide
  Antisense Strand to SEQ ID NO: 337183
aaaugacagaaccaacagu

SEQ ID NO: 337185 - RNA, 19 nt, Artificial Sequence
  Description of Artificial Sequence: Synthetic oligonucleotide
  Sense Strand Starting at position 233 of SEQ ID NO: 317741
ccaagucccgaacgguaaa

SEQ ID NO: 337186 - RNA, 19 nt, Artificial Sequence
  Description of Artificial Sequence: Synthetic oligonucleotide
  Antisense Strand to SEQ ID NO: 337185
uuuaccguucgggacuugg

SEQ ID NO: 337187 - RNA, 19 nt, Artificial Sequence
  Description of Artificial Sequence: Synthetic oligonucleotide
  Sense Strand Starting at position 233 of SEQ ID NO: 317882
agaacuguuucuccauuag

SEQ ID NO: 337188 - RNA, 19 nt, Artificial Sequence
  Description of Artificial Sequence: Synthetic oligonucleotide
  Antisense Strand to SEQ ID NO: 337187
cuaauggagaaacaguucu

SEQ ID NO: 337189 - RNA, 19 nt, Artificial Sequence
  Description of Artificial Sequence: Synthetic oligonucleotide
  Sense Strand Starting at position 233 of SEQ ID NO: 317916
uggccauauugauugccau

SEQ ID NO: 337190 - RNA, 19 nt, Artificial Sequence
  Description of Artificial Sequence: Synthetic oligonucleotide
  Antisense Strand to SEQ ID NO: 337189
auggcaaucaauauggcca

SEQ ID NO: 337191 - RNA, 19 nt, Artificial Sequence
  Description of Artificial Sequence: Synthetic oligonucleotide
  Sense Strand Starting at position 233 of SEQ ID NO: 317917
ggccauauugauugccaug

SEQ ID NO: 337192 - RNA, 19 nt, Artificial Sequence
  Description of Artificial Sequence: Synthetic oligonucleotide
  Antisense Strand to SEQ ID NO: 337191
cauggcaaucaauauggcc

SEQ ID NO: 337193 - RNA, 19 nt, Artificial Sequence
  Description of Artificial Sequence: Synthetic oligonucleotide
  Sense Strand Starting at position 233 of SEQ ID NO: 317919
ccauauugauugccauguu

SEQ ID NO: 337194 - RNA, 19 nt, Artificial Sequence
  Description of Artificial Sequence: Synthetic oligonucleotide
  Antisense Strand to SEQ ID NO: 337193
aacauggcaaucaauaugg

SEQ ID NO: 337195 - RNA, 19 nt, Artificial Sequence
  Description of Artificial Sequence: Synthetic oligonucleotide
  Sense Strand Starting at position 233 of SEQ ID NO: 317933
auguucacucgugaaggca

SEQ ID NO: 337196 - RNA, 19 nt, Artificial Sequence
  Description of Artificial Sequence: Synthetic oligonucleotide
  Antisense Strand to SEQ ID NO: 337195
ugccuucacgagugaacau

SEQ ID NO: 337197 - RNA, 19 nt, Artificial Sequence
  Description of Artificial Sequence: Synthetic oligonucleotide
  Sense Strand Starting at position 233 of SEQ ID NO: 317986
gggaaucuucugggucacu

SEQ ID NO: 337198 - RNA, 19 nt, Artificial Sequence
  Description of Artificial Sequence: Synthetic oligonucleotide
  Antisense Strand to SEQ ID NO: 337197
agugacccagaagauuccc

SEQ ID NO: 337199 - RNA, 19 nt, Artificial Sequence
  Description of Artificial Sequence: Synthetic oligonucleotide
  Sense Strand Starting at position 233 of SEQ ID NO: 317991
ucuucugggucacugaaga

SEQ ID NO: 337200 - RNA, 19 nt, Artificial Sequence
  Description of Artificial Sequence: Synthetic oligonucleotide
  Antisense Strand to SEQ ID NO: 337199
ucuucagugacccagaaga

SEQ ID NO: 337201 - RNA, 19 nt, Artificial Sequence
  Description of Artificial Sequence: Synthetic oligonucleotide
  Sense Strand Starting at position 233 of SEQ ID NO: 318053
gcccucuuagaauagcaua

SEQ ID NO: 337202 - RNA, 19 nt, Artificial Sequence
  Description of Artificial Sequence: Synthetic oligonucleotide
  Antisense Strand to SEQ ID NO: 337201
uaugcuauucuaagagggc

SEQ ID NO: 337203 - RNA, 19 nt, Artificial Sequence
  Description of Artificial Sequence: Synthetic oligonucleotide
  Sense Strand Starting at position 233 of SEQ ID NO: 318058
cuuagaauagcauauagca

SEQ ID NO: 337204 - RNA, 19 nt, Artificial Sequence
  Description of Artificial Sequence: Synthetic oligonucleotide
  Antisense Strand to SEQ ID NO: 337203
ugcuauaugcuauucuaag

SEQ ID NO: 337205 - RNA, 19 nt, Artificial Sequence
  Description of Artificial Sequence: Synthetic oligonucleotide
  Sense Strand Starting at position 233 of SEQ ID NO: 318296
aacucagcuccugguauga

SEQ ID NO: 337206 - RNA, 19 nt, Artificial Sequence
  Description of Artificial Sequence: Synthetic oligonucleotide
  Antisense Strand to SEQ ID NO: 337205
ucauaccaggagcugaguu

SEQ ID NO: 337207 - RNA, 19 nt, Artificial Sequence
  Description of Artificial Sequence: Synthetic oligonucleotide
  Sense Strand Starting at position 233 of SEQ ID NO: 318583
ccgagaucugcgccacugu

SEQ ID NO: 337208 - RNA, 19 nt, Artificial Sequence
  Description of Artificial Sequence: Synthetic oligonucleotide
  Antisense Strand to SEQ ID NO: 337207
acaguggcgcagaucucgg

SEQ ID NO: 337209 - RNA, 19 nt, Artificial Sequence
  Description of Artificial Sequence: Synthetic oligonucleotide
  Sense Strand Starting at position 233 of SEQ ID NO: 318745
gagaucuuagaagguguuu

SEQ ID NO: 337210 - RNA, 19 nt, Artificial Sequence
  Description of Artificial Sequence: Synthetic oligonucleotide
  Antisense Strand to SEQ ID NO: 337209
aaacaccuucuaagaucuc

SEQ ID NO: 337211 - RNA, 19 nt, Artificial Sequence
  Description of Artificial Sequence: Synthetic oligonucleotide
  Sense Strand Starting at position 233 of SEQ ID NO: 318750
cuuagaagguguuuggaaa

SEQ ID NO: 337212 - RNA, 19 nt, Artificial Sequence
  Description of Artificial Sequence: Synthetic oligonucleotide
  Antisense Strand to SEQ ID NO: 337211
uuuccaaacaccuucuaag

SEQ ID NO: 337213 - RNA, 19 nt, Artificial Sequence
  Description of Artificial Sequence: Synthetic oligonucleotide
  Sense Strand Starting at position 233 of SEQ ID NO: 318751
uuagaagguguuuggaaau

SEQ ID NO: 337214 - RNA, 19 nt, Artificial Sequence
  Description of Artificial Sequence: Synthetic oligonucleotide
  Antisense Strand to SEQ ID NO: 337213
auuuccaaacaccuucuaa

SEQ ID NO: 337215 - RNA, 19 nt, Artificial Sequence
  Description of Artificial Sequence: Synthetic oligonucleotide
  Sense Strand Starting at position 233 of SEQ ID NO: 318757
gguguuuggaaauguggau

SEQ ID NO: 337216 - RNA, 19 nt, Artificial Sequence
  Description of Artificial Sequence: Synthetic oligonucleotide
  Antisense Strand to SEQ ID NO: 337215
auccacauuuccaaacacc

SEQ ID NO: 337217 - RNA, 19 nt, Artificial Sequence
  Description of Artificial Sequence: Synthetic oligonucleotide
  Sense Strand Starting at position 233 of SEQ ID NO: 318770
guggaugcucagcagcaua

SEQ ID NO: 337218 - RNA, 19 nt, Artificial Sequence
  Description of Artificial Sequence: Synthetic oligonucleotide
  Antisense Strand to SEQ ID NO: 337217
uaugcugcugagcauccac

SEQ ID NO: 337219 - RNA, 19 nt, Artificial Sequence
  Description of Artificial Sequence: Synthetic oligonucleotide
  Sense Strand Starting at position 233 of SEQ ID NO: 318803
gacguaucacauugagucu

SEQ ID NO: 337220 - RNA, 19 nt, Artificial Sequence
  Description of Artificial Sequence: Synthetic oligonucleotide
  Antisense Strand to SEQ ID NO: 337219
agacucaaugugauacguc

SEQ ID NO: 337221 - RNA, 19 nt, Artificial Sequence
  Description of Artificial Sequence: Synthetic oligonucleotide
  Sense Strand Starting at position 233 of SEQ ID NO: 318830
gagcuugcugcugccuaaa

SEQ ID NO: 337222 - RNA, 19 nt, Artificial Sequence
  Description of Artificial Sequence: Synthetic oligonucleotide
  Antisense Strand to SEQ ID NO: 337221
uuuaggcagcagcaagcuc

SEQ ID NO: 337223 - RNA, 19 nt, Artificial Sequence
  Description of Artificial Sequence: Synthetic oligonucleotide
  Sense Strand Starting at position 233 of SEQ ID NO: 318965
cuaauaauugcuuaugguu

SEQ ID NO: 337224 - RNA, 19 nt, Artificial Sequence
  Description of Artificial Sequence: Synthetic oligonucleotide
  Antisense Strand to SEQ ID NO: 337223
aaccauaagcaauuauuag

SEQ ID NO: 337225 - RNA, 19 nt, Artificial Sequence
  Description of Artificial Sequence: Synthetic oligonucleotide
  Sense Strand Starting at position 233 of SEQ ID NO: 318984
ucgugaauugcucagugag

SEQ ID NO: 337226 - RNA, 19 nt, Artificial Sequence
  Description of Artificial Sequence: Synthetic oligonucleotide
  Antisense Strand to SEQ ID NO: 337225
cucacugagcaauucacga

SEQ ID NO: 337227 - RNA, 19 nt, Artificial Sequence
  Description of Artificial Sequence: Synthetic oligonucleotide
  Sense Strand Starting at position 233 of SEQ ID NO: 319077
uguuuaucuccuuagcaua

SEQ ID NO: 337228 - RNA, 19 nt, Artificial Sequence
  Description of Artificial Sequence: Synthetic oligonucleotide
  Antisense Strand to SEQ ID NO: 337227
uaugcuaaggagauaaaca

SEQ ID NO: 337229 - RNA, 19 nt, Artificial Sequence
  Description of Artificial Sequence: Synthetic oligonucleotide
  Sense Strand Starting at position 233 of SEQ ID NO: 319156
uaaacauuagagugugaag

SEQ ID NO: 337230 - RNA, 19 nt, Artificial Sequence
  Description of Artificial Sequence: Synthetic oligonucleotide
  Antisense Strand to SEQ ID NO: 337229
cuucacacucuaauguuua

SEQ ID NO: 337231 - RNA, 19 nt, Artificial Sequence
  Description of Artificial Sequence: Synthetic oligonucleotide
  Sense Strand Starting at position 234 of SEQ ID NO: 315251
caguauagaggguaucgau

SEQ ID NO: 337232 - RNA, 19 nt, Artificial Sequence
  Description of Artificial Sequence: Synthetic oligonucleotide
  Antisense Strand to SEQ ID NO: 337231
aucgauacccucuauacug

SEQ ID NO: 337233 - RNA, 19 nt, Artificial Sequence
  Description of Artificial Sequence: Synthetic oligonucleotide
  Sense Strand Starting at position 234 of SEQ ID NO: 315263
uaucgauaaucuccguauu

SEQ ID NO: 337234 - RNA, 19 nt, Artificial Sequence
  Description of Artificial Sequence: Synthetic oligonucleotide
  Antisense Strand to SEQ ID NO: 337233
aauacggagauuaucgaua

SEQ ID NO: 337235 - RNA, 19 nt, Artificial Sequence
  Description of Artificial Sequence: Synthetic oligonucleotide
  Sense Strand Starting at position 234 of SEQ ID NO: 315264
aucgauaaucuccguauua

SEQ ID NO: 337236 - RNA, 19 nt, Artificial Sequence
  Description of Artificial Sequence: Synthetic oligonucleotide
  Antisense Strand to SEQ ID NO: 337235
uaauacggagauuaucgau

SEQ ID NO: 337237 - RNA, 19 nt, Artificial Sequence
  Description of Artificial Sequence: Synthetic oligonucleotide
  Sense Strand Starting at position 234 of SEQ ID NO: 315265
ucgauaaucuccguauuau

SEQ ID NO: 337238 - RNA, 19 nt, Artificial Sequence
  Description of Artificial Sequence: Synthetic oligonucleotide
  Antisense Strand to SEQ ID NO: 337237
auaauacggagauuaucga

SEQ ID NO: 337239 - RNA, 19 nt, Artificial Sequence
  Description of Artificial Sequence: Synthetic oligonucleotide
  Sense Strand Starting at position 234 of SEQ ID NO: 315266
cgauaaucuccguauuauu

SEQ ID NO: 337240 - RNA, 19 nt, Artificial Sequence
  Description of Artificial Sequence: Synthetic oligonucleotide
  Antisense Strand to SEQ ID NO: 337239
aauaauacggagauuaucg

SEQ ID NO: 337241 - RNA, 19 nt, Artificial Sequence
  Description of Artificial Sequence: Synthetic oligonucleotide
  Sense Strand Starting at position 234 of SEQ ID NO: 315271
aucuccguauuauugagaa

SEQ ID NO: 337242 - RNA, 19 nt, Artificial Sequence
  Description of Artificial Sequence: Synthetic oligonucleotide
  Antisense Strand to SEQ ID NO: 337241
uucucaauaauacggagau

SEQ ID NO: 337243 - RNA, 19 nt, Artificial Sequence
  Description of Artificial Sequence: Synthetic oligonucleotide
  Sense Strand Starting at position 234 of SEQ ID NO: 315273
cuccguauuauugagaaag

SEQ ID NO: 337244 - RNA, 19 nt, Artificial Sequence
  Description of Artificial Sequence: Synthetic oligonucleotide
  Antisense Strand to SEQ ID NO: 337243
cuuucucaauaauacggag

SEQ ID NO: 337245 - RNA, 19 nt, Artificial Sequence
  Description of Artificial Sequence: Synthetic oligonucleotide
  Sense Strand Starting at position 234 of SEQ ID NO: 316212
cuagaauccucuccugaga

SEQ ID NO: 337246 - RNA, 19 nt, Artificial Sequence
  Description of Artificial Sequence: Synthetic oligonucleotide
  Antisense Strand to SEQ ID NO: 337245
ucucaggagaggauucuag

SEQ ID NO: 337247 - RNA, 19 nt, Artificial Sequence
  Description of Artificial Sequence: Synthetic oligonucleotide
  Sense Strand Starting at position 234 of SEQ ID NO: 316396
cuggaauccuccucagaga

SEQ ID NO: 337248 - RNA, 19 nt, Artificial Sequence
  Description of Artificial Sequence: Synthetic oligonucleotide
  Antisense Strand to SEQ ID NO: 337247
ucucugaggaggauuccag

SEQ ID NO: 337249 - RNA, 19 nt, Artificial Sequence
  Description of Artificial Sequence: Synthetic oligonucleotide
  Sense Strand Starting at position 234 of SEQ ID NO: 317343
cccauugcugcgucuuaga

SEQ ID NO: 337250 - RNA, 19 nt, Artificial Sequence
  Description of Artificial Sequence: Synthetic oligonucleotide
  Antisense Strand to SEQ ID NO: 337249
ucuaagacgcagcaauggg

SEQ ID NO: 337251 - RNA, 19 nt, Artificial Sequence
  Description of Artificial Sequence: Synthetic oligonucleotide
  Sense Strand Starting at position 234 of SEQ ID NO: 317365
guguggugccauguacgua

SEQ ID NO: 337252 - RNA, 19 nt, Artificial Sequence
  Description of Artificial Sequence: Synthetic oligonucleotide
  Antisense Strand to SEQ ID NO: 337251
uacguacauggcaccacac

SEQ ID NO: 337253 - RNA, 19 nt, Artificial Sequence
  Description of Artificial Sequence: Synthetic oligonucleotide
  Sense Strand Starting at position 234 of SEQ ID NO: 317370
gugccauguacguauuaaa

SEQ ID NO: 337254 - RNA, 19 nt, Artificial Sequence
  Description of Artificial Sequence: Synthetic oligonucleotide
  Antisense Strand to SEQ ID NO: 337253
uuuaauacguacauggcac

SEQ ID NO: 337255 - RNA, 19 nt, Artificial Sequence
  Description of Artificial Sequence: Synthetic oligonucleotide
  Sense Strand Starting at position 234 of SEQ ID NO: 317471
ucaaauugugcaugcuuaa

SEQ ID NO: 337256 - RNA, 19 nt, Artificial Sequence
  Description of Artificial Sequence: Synthetic oligonucleotide
  Antisense Strand to SEQ ID NO: 337255
uuaagcaugcacaauuuga

SEQ ID NO: 337257 - RNA, 19 nt, Artificial Sequence
  Description of Artificial Sequence: Synthetic oligonucleotide
  Sense Strand Starting at position 234 of SEQ ID NO: 317608
agccuucuguacucauauu

SEQ ID NO: 337258 - RNA, 19 nt, Artificial Sequence
  Description of Artificial Sequence: Synthetic oligonucleotide
  Antisense Strand to SEQ ID NO: 337257
aauaugaguacagaaggcu

SEQ ID NO: 337259 - RNA, 19 nt, Artificial Sequence
  Description of Artificial Sequence: Synthetic oligonucleotide
  Sense Strand Starting at position 234 of SEQ ID NO: 317640
caguucugaugccuuauga

SEQ ID NO: 337260 - RNA, 19 nt, Artificial Sequence
  Description of Artificial Sequence: Synthetic oligonucleotide
  Antisense Strand to SEQ ID NO: 337259
ucauaaggcaucagaacug

SEQ ID NO: 337261 - RNA, 19 nt, Artificial Sequence
  Description of Artificial Sequence: Synthetic oligonucleotide
  Sense Strand Starting at position 234 of SEQ ID NO: 317868
ccacuaaggcugugagauu

SEQ ID NO: 337262 - RNA, 19 nt, Artificial Sequence
  Description of Artificial Sequence: Synthetic oligonucleotide
  Antisense Strand to SEQ ID NO: 337261
aaucucacagccuuagugg

SEQ ID NO: 337263 - RNA, 19 nt, Artificial Sequence
  Description of Artificial Sequence: Synthetic oligonucleotide
  Sense Strand Starting at position 234 of SEQ ID NO: 317875
ggcugugagauugaccuua

SEQ ID NO: 337264 - RNA, 19 nt, Artificial Sequence
  Description of Artificial Sequence: Synthetic oligonucleotide
  Antisense Strand to SEQ ID NO: 337263
uaaggucaaucucacagcc

SEQ ID NO: 337265 - RNA, 19 nt, Artificial Sequence
  Description of Artificial Sequence: Synthetic oligonucleotide
  Sense Strand Starting at position 234 of SEQ ID NO: 317877
cugugagauugaccuuaca

SEQ ID NO: 337266 - RNA, 19 nt, Artificial Sequence
  Description of Artificial Sequence: Synthetic oligonucleotide
  Antisense Strand to SEQ ID NO: 337265
uguaaggucaaucucacag

SEQ ID NO: 337267 - RNA, 19 nt, Artificial Sequence
  Description of Artificial Sequence: Synthetic oligonucleotide
  Sense Strand Starting at position 234 of SEQ ID NO: 317950
cagagcuacccucagaguu

SEQ ID NO: 337268 - RNA, 19 nt, Artificial Sequence
  Description of Artificial Sequence: Synthetic oligonucleotide
  Antisense Strand to SEQ ID NO: 337267
aacucugaggguagcucug

SEQ ID NO: 337269 - RNA, 19 nt, Artificial Sequence
  Description of Artificial Sequence: Synthetic oligonucleotide
  Sense Strand Starting at position 234 of SEQ ID NO: 317960
cucagaguuggaugagcua

SEQ ID NO: 337270 - RNA, 19 nt, Artificial Sequence
  Description of Artificial Sequence: Synthetic oligonucleotide
  Antisense Strand to SEQ ID NO: 337269
uagcucauccaacucugag

SEQ ID NO: 337271 - RNA, 19 nt, Artificial Sequence
  Description of Artificial Sequence: Synthetic oligonucleotide
  Sense Strand Starting at position 234 of SEQ ID NO: 317971
augagcuauccucagaguu

SEQ ID NO: 337272 - RNA, 19 nt, Artificial Sequence
  Description of Artificial Sequence: Synthetic oligonucleotide
  Antisense Strand to SEQ ID NO: 337271
aacucugaggauagcucau

SEQ ID NO: 337273 - RNA, 19 nt, Artificial Sequence
  Description of Artificial Sequence: Synthetic oligonucleotide
  Sense Strand Starting at position 234 of SEQ ID NO: 318027
ucaugauucugccucagaa

SEQ ID NO: 337274 - RNA, 19 nt, Artificial Sequence
  Description of Artificial Sequence: Synthetic oligonucleotide
  Antisense Strand to SEQ ID NO: 337273
uucugaggcagaaucauga

SEQ ID NO: 337275 - RNA, 19 nt, Artificial Sequence
  Description of Artificial Sequence: Synthetic oligonucleotide
  Sense Strand Starting at position 234 of SEQ ID NO: 318138
ugggcacaguucuuaccaa

SEQ ID NO: 337276 - RNA, 19 nt, Artificial Sequence
  Description of Artificial Sequence: Synthetic oligonucleotide
  Antisense Strand to SEQ ID NO: 337275
uugguaagaacugugccca

SEQ ID NO: 337277 - RNA, 19 nt, Artificial Sequence
  Description of Artificial Sequence: Synthetic oligonucleotide
  Sense Strand Starting at position 234 of SEQ ID NO: 318153
ccaacugccuuggcaaauu

SEQ ID NO: 337278 - RNA, 19 nt, Artificial Sequence
  Description of Artificial Sequence: Synthetic oligonucleotide
  Antisense Strand to SEQ ID NO: 337277
aauuugccaaggcaguugg

SEQ ID NO: 337279 - RNA, 19 nt, Artificial Sequence
  Description of Artificial Sequence: Synthetic oligonucleotide
  Sense Strand Starting at position 234 of SEQ ID NO: 318165
gcaaauugugaaugcaagu

SEQ ID NO: 337280 - RNA, 19 nt, Artificial Sequence
  Description of Artificial Sequence: Synthetic oligonucleotide
  Antisense Strand to SEQ ID NO: 337279
acuugcauucacaauuugc

SEQ ID NO: 337281 - RNA, 19 nt, Artificial Sequence
  Description of Artificial Sequence: Synthetic oligonucleotide
  Sense Strand Starting at position 234 of SEQ ID NO: 318189
caggauuuguccuaaguuu

SEQ ID NO: 337282 - RNA, 19 nt, Artificial Sequence
  Description of Artificial Sequence: Synthetic oligonucleotide
  Antisense Strand to SEQ ID NO: 337281
aaacuuaggacaaauccug

SEQ ID NO: 337283 - RNA, 19 nt, Artificial Sequence
  Description of Artificial Sequence: Synthetic oligonucleotide
  Sense Strand Starting at position 234 of SEQ ID NO: 318209
aauuguacugcuggaguga

SEQ ID NO: 337284 - RNA, 19 nt, Artificial Sequence
  Description of Artificial Sequence: Synthetic oligonucleotide
  Antisense Strand to SEQ ID NO: 337283
ucacuccagcaguacaauu

SEQ ID NO: 337285 - RNA, 19 nt, Artificial Sequence
  Description of Artificial Sequence: Synthetic oligonucleotide
  Sense Strand Starting at position 234 of SEQ ID NO: 318210
auuguacugcuggagugau

SEQ ID NO: 337286 - RNA, 19 nt, Artificial Sequence
  Description of Artificial Sequence: Synthetic oligonucleotide
  Antisense Strand to SEQ ID NO: 337285
aucacuccagcaguacaau

SEQ ID NO: 337287 - RNA, 19 nt, Artificial Sequence
  Description of Artificial Sequence: Synthetic oligonucleotide
  Sense Strand Starting at position 234 of SEQ ID NO: 318314
gggaaauacucugccugua

SEQ ID NO: 337288 - RNA, 19 nt, Artificial Sequence
  Description of Artificial Sequence: Synthetic oligonucleotide
  Antisense Strand to SEQ ID NO: 337287
uacaggcagaguauuuccc

SEQ ID NO: 337289 - RNA, 19 nt, Artificial Sequence
  Description of Artificial Sequence: Synthetic oligonucleotide
  Sense Strand Starting at position 234 of SEQ ID NO: 318316
gaaauacucugccuguaga

SEQ ID NO: 337290 - RNA, 19 nt, Artificial Sequence
  Description of Artificial Sequence: Synthetic oligonucleotide
  Antisense Strand to SEQ ID NO: 337289
ucuacaggcagaguauuuc

SEQ ID NO: 337291 - RNA, 19 nt, Artificial Sequence
  Description of Artificial Sequence: Synthetic oligonucleotide
  Sense Strand Starting at position 234 of SEQ ID NO: 318399
ccaucuucugggugaacaa

SEQ ID NO: 337292 - RNA, 19 nt, Artificial Sequence
  Description of Artificial Sequence: Synthetic oligonucleotide
  Antisense Strand to SEQ ID NO: 337291
uuguucacccagaagaugg

SEQ ID NO: 337293 - RNA, 19 nt, Artificial Sequence
  Description of Artificial Sequence: Synthetic oligonucleotide
  Sense Strand Starting at position 234 of SEQ ID NO: 318487
uccuucuuucuuggugauu

SEQ ID NO: 337294 - RNA, 19 nt, Artificial Sequence
  Description of Artificial Sequence: Synthetic oligonucleotide
  Antisense Strand to SEQ ID NO: 337293
aaucaccaagaaagaagga

SEQ ID NO: 337295 - RNA, 19 nt, Artificial Sequence
  Description of Artificial Sequence: Synthetic oligonucleotide
  Sense Strand Starting at position 234 of SEQ ID NO: 318488
ccuucuuucuuggugauuu

SEQ ID NO: 337296 - RNA, 19 nt, Artificial Sequence
  Description of Artificial Sequence: Synthetic oligonucleotide
  Antisense Strand to SEQ ID NO: 337295
aaaucaccaagaaagaagg

SEQ ID NO: 337297 - RNA, 19 nt, Artificial Sequence
  Description of Artificial Sequence: Synthetic oligonucleotide
  Sense Strand Starting at position 234 of SEQ ID NO: 318492
cuuucuuggugauuuguuu

SEQ ID NO: 337298 - RNA, 19 nt, Artificial Sequence
  Description of Artificial Sequence: Synthetic oligonucleotide
  Antisense Strand to SEQ ID NO: 337297
aaacaaaucaccaagaaag

SEQ ID NO: 337299 - RNA, 19 nt, Artificial Sequence
  Description of Artificial Sequence: Synthetic oligonucleotide
  Sense Strand Starting at position 234 of SEQ ID NO: 318693
gauggccaguucuuaacua

SEQ ID NO: 337300 - RNA, 19 nt, Artificial Sequence
  Description of Artificial Sequence: Synthetic oligonucleotide
  Antisense Strand to SEQ ID NO: 337299
uaguuaagaacuggccauc

SEQ ID NO: 337301 - RNA, 19 nt, Artificial Sequence
  Description of Artificial Sequence: Synthetic oligonucleotide
  Sense Strand Starting at position 234 of SEQ ID NO: 318697
gccaguucuuaacuaugag

SEQ ID NO: 337302 - RNA, 19 nt, Artificial Sequence
  Description of Artificial Sequence: Synthetic oligonucleotide
  Antisense Strand to SEQ ID NO: 337301
cucauaguuaagaacuggc

SEQ ID NO: 337303 - RNA, 19 nt, Artificial Sequence
  Description of Artificial Sequence: Synthetic oligonucleotide
  Sense Strand Starting at position 234 of SEQ ID NO: 318700
aguucuuaacuaugaguuu

SEQ ID NO: 337304 - RNA, 19 nt, Artificial Sequence
  Description of Artificial Sequence: Synthetic oligonucleotide
  Antisense Strand to SEQ ID NO: 337303
aaacucauaguuaagaacu

SEQ ID NO: 337305 - RNA, 19 nt, Artificial Sequence
  Description of Artificial Sequence: Synthetic oligonucleotide
  Sense Strand Starting at position 234 of SEQ ID NO: 318752
ucuggcauugcauauaaau

SEQ ID NO: 337306 - RNA, 19 nt, Artificial Sequence
  Description of Artificial Sequence: Synthetic oligonucleotide
  Antisense Strand to SEQ ID NO: 337305
auuuauaugcaaugccaga

SEQ ID NO: 337307 - RNA, 19 nt, Artificial Sequence
  Description of Artificial Sequence: Synthetic oligonucleotide
  Sense Strand Starting at position 234 of SEQ ID NO: 319051
gucgcuuccaaggaugagu

SEQ ID NO: 337308 - RNA, 19 nt, Artificial Sequence
  Description of Artificial Sequence: Synthetic oligonucleotide
  Antisense Strand to SEQ ID NO: 337307
acucauccuuggaagcgac

SEQ ID NO: 337309 - RNA, 19 nt, Artificial Sequence
  Description of Artificial Sequence: Synthetic oligonucleotide
  Sense Strand Starting at position 234 of SEQ ID NO: 319195
ggaugcuugcuagagauac

SEQ ID NO: 337310 - RNA, 19 nt, Artificial Sequence
  Description of Artificial Sequence: Synthetic oligonucleotide
  Antisense Strand to SEQ ID NO: 337309
guaucucuagcaagcaucc

SEQ ID NO: 337311 - RNA, 19 nt, Artificial Sequence
  Description of Artificial Sequence: Synthetic oligonucleotide
  Sense Strand Starting at position 235 of SEQ ID NO: 315250
aaaugugggccaggaauua

SEQ ID NO: 337312 - RNA, 19 nt, Artificial Sequence
  Description of Artificial Sequence: Synthetic oligonucleotide
  Antisense Strand to SEQ ID NO: 337311
uaauuccuggcccacauuu

SEQ ID NO: 337313 - RNA, 19 nt, Artificial Sequence
  Description of Artificial Sequence: Synthetic oligonucleotide
  Sense Strand Starting at position 235 of SEQ ID NO: 315316
agaauaaauguguaugcca

SEQ ID NO: 337314 - RNA, 19 nt, Artificial Sequence
  Description of Artificial Sequence: Synthetic oligonucleotide
  Antisense Strand to SEQ ID NO: 337313
uggcauacacauuuauucu

SEQ ID NO: 337315 - RNA, 19 nt, Artificial Sequence
  Description of Artificial Sequence: Synthetic oligonucleotide
  Sense Strand Starting at position 235 of SEQ ID NO: 315323
auguguaugccagagauua

SEQ ID NO: 337316 - RNA, 19 nt, Artificial Sequence
  Description of Artificial Sequence: Synthetic oligonucleotide
  Antisense Strand to SEQ ID NO: 337315
uaaucucuggcauacacau

SEQ ID NO: 337317 - RNA, 19 nt, Artificial Sequence
  Description of Artificial Sequence: Synthetic oligonucleotide
  Sense Strand Starting at position 235 of SEQ ID NO: 315325
guguaugccagagauuaug

SEQ ID NO: 337318 - RNA, 19 nt, Artificial Sequence
  Description of Artificial Sequence: Synthetic oligonucleotide
  Antisense Strand to SEQ ID NO: 337317
cauaaucucuggcauacac

SEQ ID NO: 337319 - RNA, 19 nt, Artificial Sequence
  Description of Artificial Sequence: Synthetic oligonucleotide
  Sense Strand Starting at position 235 of SEQ ID NO: 315353
cugaaucaguaaucucagu

SEQ ID NO: 337320 - RNA, 19 nt, Artificial Sequence
  Description of Artificial Sequence: Synthetic oligonucleotide
  Antisense Strand to SEQ ID NO: 337319
acugagauuacugauucag

SEQ ID NO: 337321 - RNA, 19 nt, Artificial Sequence
  Description of Artificial Sequence: Synthetic oligonucleotide
  Sense Strand Starting at position 235 of SEQ ID NO: 315388
uucggaagacaaugugaaa

SEQ ID NO: 337322 - RNA, 19 nt, Artificial Sequence
  Description of Artificial Sequence: Synthetic oligonucleotide
  Antisense Strand to SEQ ID NO: 337321
uuucacauugucuuccgaa

SEQ ID NO: 337323 - RNA, 19 nt, Artificial Sequence
  Description of Artificial Sequence: Synthetic oligonucleotide
  Sense Strand Starting at position 235 of SEQ ID NO: 315528
aaaggcuggucagugaaga

SEQ ID NO: 337324 - RNA, 19 nt, Artificial Sequence
  Description of Artificial Sequence: Synthetic oligonucleotide
  Antisense Strand to SEQ ID NO: 337323
ucuucacugaccagccuuu

SEQ ID NO: 337325 - RNA, 19 nt, Artificial Sequence
  Description of Artificial Sequence: Synthetic oligonucleotide
  Sense Strand Starting at position 235 of SEQ ID NO: 315529
aaggcuggucagugaagaa

SEQ ID NO: 337326 - RNA, 19 nt, Artificial Sequence
  Description of Artificial Sequence: Synthetic oligonucleotide
  Antisense Strand to SEQ ID NO: 337325
uucuucacugaccagccuu

SEQ ID NO: 337327 - RNA, 19 nt, Artificial Sequence
  Description of Artificial Sequence: Synthetic oligonucleotide
  Sense Strand Starting at position 235 of SEQ ID NO: 315594
agacuuuaagucuguauau

SEQ ID NO: 337328 - RNA, 19 nt, Artificial Sequence
  Description of Artificial Sequence: Synthetic oligonucleotide
  Antisense Strand to SEQ ID NO: 337327
auauacagacuuaaagucu

SEQ ID NO: 337329 - RNA, 19 nt, Artificial Sequence
  Description of Artificial Sequence: Synthetic oligonucleotide
  Sense Strand Starting at position 235 of SEQ ID NO: 315627
aguggaauuucuuaagaaa

SEQ ID NO: 337330 - RNA, 19 nt, Artificial Sequence
  Description of Artificial Sequence: Synthetic oligonucleotide
  Antisense Strand to SEQ ID NO: 337329
uuucuuaagaaauuccacu

SEQ ID NO: 337331 - RNA, 19 nt, Artificial Sequence
  Description of Artificial Sequence: Synthetic oligonucleotide
  Sense Strand Starting at position 235 of SEQ ID NO: 315775
uaagguggcccuuagaaua

SEQ ID NO: 337332 - RNA, 19 nt, Artificial Sequence
  Description of Artificial Sequence: Synthetic oligonucleotide
  Antisense Strand to SEQ ID NO: 337331
uauucuaagggccaccuua

SEQ ID NO: 337333 - RNA, 19 nt, Artificial Sequence
  Description of Artificial Sequence: Synthetic oligonucleotide
  Sense Strand Starting at position 235 of SEQ ID NO: 315815
uagauagucagagaguugu

SEQ ID NO: 337334 - RNA, 19 nt, Artificial Sequence
  Description of Artificial Sequence: Synthetic oligonucleotide
  Antisense Strand to SEQ ID NO: 337333
acaacucucugacuaucua

SEQ ID NO: 337335 - RNA, 19 nt, Artificial Sequence
  Description of Artificial Sequence: Synthetic oligonucleotide
  Sense Strand Starting at position 235 of SEQ ID NO: 315922
uuaugagcucaagauuauu

SEQ ID NO: 337336 - RNA, 19 nt, Artificial Sequence
  Description of Artificial Sequence: Synthetic oligonucleotide
  Antisense Strand to SEQ ID NO: 337335
aauaaucuugagcucauaa

SEQ ID NO: 337337 - RNA, 19 nt, Artificial Sequence
  Description of Artificial Sequence: Synthetic oligonucleotide
  Sense Strand Starting at position 235 of SEQ ID NO: 316255
gugcaaugucuauucgcag

SEQ ID NO: 337338 - RNA, 19 nt, Artificial Sequence
  Description of Artificial Sequence: Synthetic oligonucleotide
  Antisense Strand to SEQ ID NO: 337337
cugcgaauagacauugcac

SEQ ID NO: 337339 - RNA, 19 nt, Artificial Sequence
  Description of Artificial Sequence: Synthetic oligonucleotide
  Sense Strand Starting at position 235 of SEQ ID NO: 316376
ugcugaugcugaucuauuu

SEQ ID NO: 337340 - RNA, 19 nt, Artificial Sequence
  Description of Artificial Sequence: Synthetic oligonucleotide
  Antisense Strand to SEQ ID NO: 337339
aaauagaucagcaucagca

SEQ ID NO: 337341 - RNA, 19 nt, Artificial Sequence
  Description of Artificial Sequence: Synthetic oligonucleotide
  Sense Strand Starting at position 235 of SEQ ID NO: 316751
gguaauauugcagauaauc

SEQ ID NO: 337342 - RNA, 19 nt, Artificial Sequence
  Description of Artificial Sequence: Synthetic oligonucleotide
  Antisense Strand to SEQ ID NO: 337341
gauuaucugcaauauuacc

SEQ ID NO: 337343 - RNA, 19 nt, Artificial Sequence
  Description of Artificial Sequence: Synthetic oligonucleotide
  Sense Strand Starting at position 235 of SEQ ID NO: 316789
cuagcuuaucuauagguua

SEQ ID NO: 337344 - RNA, 19 nt, Artificial Sequence
  Description of Artificial Sequence: Synthetic oligonucleotide
  Antisense Strand to SEQ ID NO: 337343
uaaccuauagauaagcuag

SEQ ID NO: 337345 - RNA, 19 nt, Artificial Sequence
  Description of Artificial Sequence: Synthetic oligonucleotide
  Sense Strand Starting at position 235 of SEQ ID NO: 317365
cucauaacuccgcaugaau

SEQ ID NO: 337346 - RNA, 19 nt, Artificial Sequence
  Description of Artificial Sequence: Synthetic oligonucleotide
  Antisense Strand to SEQ ID NO: 337345
auucaugcggaguuaugag

SEQ ID NO: 337347 - RNA, 19 nt, Artificial Sequence
  Description of Artificial Sequence: Synthetic oligonucleotide
  Sense Strand Starting at position 235 of SEQ ID NO: 317368
auaacuccgcaugaaugaa

SEQ ID NO: 337348 - RNA, 19 nt, Artificial Sequence
  Description of Artificial Sequence: Synthetic oligonucleotide
  Antisense Strand to SEQ ID NO: 337347
uucauucaugcggaguuau

SEQ ID NO: 337349 - RNA, 19 nt, Artificial Sequence
  Description of Artificial Sequence: Synthetic oligonucleotide
  Sense Strand Starting at position 235 of SEQ ID NO: 317466
uccuaagucagaggaaguu

SEQ ID NO: 337350 - RNA, 19 nt, Artificial Sequence
  Description of Artificial Sequence: Synthetic oligonucleotide
  Antisense Strand to SEQ ID NO: 337349
aacuuccucugacuuagga

SEQ ID NO: 337351 - RNA, 19 nt, Artificial Sequence
  Description of Artificial Sequence: Synthetic oligonucleotide
  Sense Strand Starting at position 235 of SEQ ID NO: 317602
ugaaucuugguguauacau

SEQ ID NO: 337352 - RNA, 19 nt, Artificial Sequence
  Description of Artificial Sequence: Synthetic oligonucleotide
  Antisense Strand to SEQ ID NO: 337351
auguauacaccaagauuca

SEQ ID NO: 337353 - RNA, 19 nt, Artificial Sequence
  Description of Artificial Sequence: Synthetic oligonucleotide
  Sense Strand Starting at position 235 of SEQ ID NO: 317609
ugguguauacaugauucca

SEQ ID NO: 337354 - RNA, 19 nt, Artificial Sequence
  Description of Artificial Sequence: Synthetic oligonucleotide
  Antisense Strand to SEQ ID NO: 337353
uggaaucauguauacacca

SEQ ID NO: 337355 - RNA, 19 nt, Artificial Sequence
  Description of Artificial Sequence: Synthetic oligonucleotide
  Sense Strand Starting at position 235 of SEQ ID NO: 317697
ucuaguaguccacaauuau

SEQ ID NO: 337356 - RNA, 19 nt, Artificial Sequence
  Description of Artificial Sequence: Synthetic oligonucleotide
  Antisense Strand to SEQ ID NO: 337355
auaauuguggacuacuaga

SEQ ID NO: 337357 - RNA, 19 nt, Artificial Sequence
  Description of Artificial Sequence: Synthetic oligonucleotide
  Sense Strand Starting at position 235 of SEQ ID NO: 317958
ugguguauaugacugauga

SEQ ID NO: 337358 - RNA, 19 nt, Artificial Sequence
  Description of Artificial Sequence: Synthetic oligonucleotide
  Antisense Strand to SEQ ID NO: 337357
ucaucagucauauacacca

SEQ ID NO: 337359 - RNA, 19 nt, Artificial Sequence
  Description of Artificial Sequence: Synthetic oligonucleotide
  Sense Strand Starting at position 235 of SEQ ID NO: 317959
gguguauaugacugaugag

SEQ ID NO: 337360 - RNA, 19 nt, Artificial Sequence
  Description of Artificial Sequence: Synthetic oligonucleotide
  Antisense Strand to SEQ ID NO: 337359
cucaucagucauauacacc

SEQ ID NO: 337361 - RNA, 19 nt, Artificial Sequence
  Description of Artificial Sequence: Synthetic oligonucleotide
  Sense Strand Starting at position 235 of SEQ ID NO: 317960
guguauaugacugaugagu

SEQ ID NO: 337362 - RNA, 19 nt, Artificial Sequence
  Description of Artificial Sequence: Synthetic oligonucleotide
  Antisense Strand to SEQ ID NO: 337361
acucaucagucauauacac

SEQ ID NO: 337363 - RNA, 19 nt, Artificial Sequence
  Description of Artificial Sequence: Synthetic oligonucleotide
  Sense Strand Starting at position 235 of SEQ ID NO: 317965
uaugacugaugaguguuaa

SEQ ID NO: 337364 - RNA, 19 nt, Artificial Sequence
  Description of Artificial Sequence: Synthetic oligonucleotide
  Antisense Strand to SEQ ID NO: 337363
uuaacacucaucagucaua

SEQ ID NO: 337365 - RNA, 19 nt, Artificial Sequence
  Description of Artificial Sequence: Synthetic oligonucleotide
  Sense Strand Starting at position 235 of SEQ ID NO: 317966
augacugaugaguguuaau

SEQ ID NO: 337366 - RNA, 19 nt, Artificial Sequence
  Description of Artificial Sequence: Synthetic oligonucleotide
  Antisense Strand to SEQ ID NO: 337365
auuaacacucaucagucau

SEQ ID NO: 337367 - RNA, 19 nt, Artificial Sequence
  Description of Artificial Sequence: Synthetic oligonucleotide
  Sense Strand Starting at position 235 of SEQ ID NO: 317976
aguguuaauggcuaagaca

SEQ ID NO: 337368 - RNA, 19 nt, Artificial Sequence
  Description of Artificial Sequence: Synthetic oligonucleotide
  Antisense Strand to SEQ ID NO: 337367
ugucuuagccauuaacacu

SEQ ID NO: 337369 - RNA, 19 nt, Artificial Sequence
  Description of Artificial Sequence: Synthetic oligonucleotide
  Sense Strand Starting at position 235 of SEQ ID NO: 318384
cugaaacauuguguuaaua

SEQ ID NO: 337370 - RNA, 19 nt, Artificial Sequence
  Description of Artificial Sequence: Synthetic oligonucleotide
  Antisense Strand to SEQ ID NO: 337369
uauuaacacaauguuucag

SEQ ID NO: 337371 - RNA, 19 nt, Artificial Sequence
  Description of Artificial Sequence: Synthetic oligonucleotide
  Sense Strand Starting at position 235 of SEQ ID NO: 318396
guuaauagaugucuaaaca

SEQ ID NO: 337372 - RNA, 19 nt, Artificial Sequence
  Description of Artificial Sequence: Synthetic oligonucleotide
  Antisense Strand to SEQ ID NO: 337371
uguuuagacaucuauuaac

SEQ ID NO: 337373 - RNA, 19 nt, Artificial Sequence
  Description of Artificial Sequence: Synthetic oligonucleotide
  Sense Strand Starting at position 235 of SEQ ID NO: 318610
cuaaguauuuccgcuuuau

SEQ ID NO: 337374 - RNA, 19 nt, Artificial Sequence
  Description of Artificial Sequence: Synthetic oligonucleotide
  Antisense Strand to SEQ ID NO: 337373
auaaagcggaaauacuuag

SEQ ID NO: 337375 - RNA, 19 nt, Artificial Sequence
  Description of Artificial Sequence: Synthetic oligonucleotide
  Sense Strand Starting at position 235 of SEQ ID NO: 318614
guauuuccgcuuuauuauu

SEQ ID NO: 337376 - RNA, 19 nt, Artificial Sequence
  Description of Artificial Sequence: Synthetic oligonucleotide
  Antisense Strand to SEQ ID NO: 337375
aauaauaaagcggaaauac

SEQ ID NO: 337377 - RNA, 19 nt, Artificial Sequence
  Description of Artificial Sequence: Synthetic oligonucleotide
  Sense Strand Starting at position 235 of SEQ ID NO: 318657
auuauagaccuguaucuuu

SEQ ID NO: 337378 - RNA, 19 nt, Artificial Sequence
  Description of Artificial Sequence: Synthetic oligonucleotide
  Antisense Strand to SEQ ID NO: 337377
aaagauacaggucuauaau

SEQ ID NO: 337379 - RNA, 19 nt, Artificial Sequence
  Description of Artificial Sequence: Synthetic oligonucleotide
  Sense Strand Starting at position 235 of SEQ ID NO: 318860
gaguaauggcauuauucua

SEQ ID NO: 337380 - RNA, 19 nt, Artificial Sequence
  Description of Artificial Sequence: Synthetic oligonucleotide
  Antisense Strand to SEQ ID NO: 337379
uagaauaaugccauuacuc

SEQ ID NO: 337381 - RNA, 19 nt, Artificial Sequence
  Description of Artificial Sequence: Synthetic oligonucleotide
  Sense Strand Starting at position 235 of SEQ ID NO: 319052
ugaaaugaguuauccuaau

SEQ ID NO: 337382 - RNA, 19 nt, Artificial Sequence
  Description of Artificial Sequence: Synthetic oligonucleotide
  Antisense Strand to SEQ ID NO: 337381
auuaggauaacucauuuca

SEQ ID NO: 337383 - RNA, 19 nt, Artificial Sequence
  Description of Artificial Sequence: Synthetic oligonucleotide
  Sense Strand Starting at position 235 of SEQ ID NO: 319135
aggugaguccuacguauuu

SEQ ID NO: 337384 - RNA, 19 nt, Artificial Sequence
  Description of Artificial Sequence: Synthetic oligonucleotide
  Antisense Strand to SEQ ID NO: 337383
aaauacguaggacucaccu

SEQ ID NO: 337385 - RNA, 19 nt, Artificial Sequence
  Description of Artificial Sequence: Synthetic oligonucleotide
  Sense Strand Starting at position 235 of SEQ ID NO: 319137
gugaguccuacguauuugu

SEQ ID NO: 337386 - RNA, 19 nt, Artificial Sequence
  Description of Artificial Sequence: Synthetic oligonucleotide
  Antisense Strand to SEQ ID NO: 337385
acaaauacguaggacucac

SEQ ID NO: 337387 - RNA, 19 nt, Artificial Sequence
  Description of Artificial Sequence: Synthetic oligonucleotide
  Sense Strand Starting at position 235 of SEQ ID NO: 319140
aguccuacguauuuguaca

SEQ ID NO: 337388 - RNA, 19 nt, Artificial Sequence
  Description of Artificial Sequence: Synthetic oligonucleotide
  Antisense Strand to SEQ ID NO: 337387
uguacaaauacguaggacu

SEQ ID NO: 337389 - RNA, 19 nt, Artificial Sequence
  Description of Artificial Sequence: Synthetic oligonucleotide
  Sense Strand Starting at position 235 of SEQ ID NO: 319141
guccuacguauuuguacaa

SEQ ID NO: 337390 - RNA, 19 nt, Artificial Sequence
  Description of Artificial Sequence: Synthetic oligonucleotide
  Antisense Strand to SEQ ID NO: 337389
uuguacaaauacguaggac

SEQ ID NO: 337391 - RNA, 19 nt, Artificial Sequence
  Description of Artificial Sequence: Synthetic oligonucleotide
  Sense Strand Starting at position 236 of SEQ ID NO: 315291
guacaauagucacuaaauu

SEQ ID NO: 337392 - RNA, 19 nt, Artificial Sequence
  Description of Artificial Sequence: Synthetic oligonucleotide
  Antisense Strand to SEQ ID NO: 337391
aauuuagugacuauuguac

SEQ ID NO: 337393 - RNA, 19 nt, Artificial Sequence
  Description of Artificial Sequence: Synthetic oligonucleotide
  Sense Strand Starting at position 236 of SEQ ID NO: 315363
acagguauuaggcgauuaa

SEQ ID NO: 337394 - RNA, 19 nt, Artificial Sequence
  Description of Artificial Sequence: Synthetic oligonucleotide
  Antisense Strand to SEQ ID NO: 337393
uuaaucgccuaauaccugu

SEQ ID NO: 337395 - RNA, 19 nt, Artificial Sequence
  Description of Artificial Sequence: Synthetic oligonucleotide
  Sense Strand Starting at position 236 of SEQ ID NO: 315364
cagguauuaggcgauuaaa

SEQ ID NO: 337396 - RNA, 19 nt, Artificial Sequence
  Description of Artificial Sequence: Synthetic oligonucleotide
  Antisense Strand to SEQ ID NO: 337395
uuuaaucgccuaauaccug

SEQ ID NO: 337397 - RNA, 19 nt, Artificial Sequence
  Description of Artificial Sequence: Synthetic oligonucleotide
  Sense Strand Starting at position 236 of SEQ ID NO: 315737
ugcaaaugguacuuaauaa

SEQ ID NO: 337398 - RNA, 19 nt, Artificial Sequence
  Description of Artificial Sequence: Synthetic oligonucleotide
  Antisense Strand to SEQ ID NO: 337397
uuauuaaguaccauuugca

SEQ ID NO: 337399 - RNA, 19 nt, Artificial Sequence
  Description of Artificial Sequence: Synthetic oligonucleotide
  Sense Strand Starting at position 236 of SEQ ID NO: 315804
uguauuaugucaucugaua

SEQ ID NO: 337400 - RNA, 19 nt, Artificial Sequence
  Description of Artificial Sequence: Synthetic oligonucleotide
  Antisense Strand to SEQ ID NO: 337399
uaucagaugacauaauaca

SEQ ID NO: 337401 - RNA, 19 nt, Artificial Sequence
  Description of Artificial Sequence: Synthetic oligonucleotide
  Sense Strand Starting at position 236 of SEQ ID NO: 315830
gguaaaguagauuaugugu

SEQ ID NO: 337402 - RNA, 19 nt, Artificial Sequence
  Description of Artificial Sequence: Synthetic oligonucleotide
  Antisense Strand to SEQ ID NO: 337401
acacauaaucuacuuuacc

SEQ ID NO: 337403 - RNA, 19 nt, Artificial Sequence
  Description of Artificial Sequence: Synthetic oligonucleotide
  Sense Strand Starting at position 236 of SEQ ID NO: 315833
aaaguagauuauguguuga

SEQ ID NO: 337404 - RNA, 19 nt, Artificial Sequence
  Description of Artificial Sequence: Synthetic oligonucleotide
  Antisense Strand to SEQ ID NO: 337403
ucaacacauaaucuacuuu

SEQ ID NO: 337405 - RNA, 19 nt, Artificial Sequence
  Description of Artificial Sequence: Synthetic oligonucleotide
  Sense Strand Starting at position 236 of SEQ ID NO: 315847
guugaaaugaaguguacag

SEQ ID NO: 337406 - RNA, 19 nt, Artificial Sequence
  Description of Artificial Sequence: Synthetic oligonucleotide
  Antisense Strand to SEQ ID NO: 337405
cuguacacuucauuucaac

SEQ ID NO: 337407 - RNA, 19 nt, Artificial Sequence
  Description of Artificial Sequence: Synthetic oligonucleotide
  Sense Strand Starting at position 236 of SEQ ID NO: 315875
agagaugacuucuuuguua

SEQ ID NO: 337408 - RNA, 19 nt, Artificial Sequence
  Description of Artificial Sequence: Synthetic oligonucleotide
  Antisense Strand to SEQ ID NO: 337407
uaacaaagaagucaucucu

SEQ ID NO: 337409 - RNA, 19 nt, Artificial Sequence
  Description of Artificial Sequence: Synthetic oligonucleotide
  Sense Strand Starting at position 236 of SEQ ID NO: 315877
agaugacuucuuuguuauc

SEQ ID NO: 337410 - RNA, 19 nt, Artificial Sequence
  Description of Artificial Sequence: Synthetic oligonucleotide
  Antisense Strand to SEQ ID NO: 337409
gauaacaaagaagucaucu

SEQ ID NO: 337411 - RNA, 19 nt, Artificial Sequence
  Description of Artificial Sequence: Synthetic oligonucleotide
  Sense Strand Starting at position 236 of SEQ ID NO: 315914
cuggcauuggaauagucaa

SEQ ID NO: 337412 - RNA, 19 nt, Artificial Sequence
  Description of Artificial Sequence: Synthetic oligonucleotide
  Antisense Strand to SEQ ID NO: 337411
uugacuauuccaaugccag

SEQ ID NO: 337413 - RNA, 19 nt, Artificial Sequence
  Description of Artificial Sequence: Synthetic oligonucleotide
  Sense Strand Starting at position 236 of SEQ ID NO: 316041
agaagugauucuuugguug

SEQ ID NO: 337414 - RNA, 19 nt, Artificial Sequence
  Description of Artificial Sequence: Synthetic oligonucleotide
  Antisense Strand to SEQ ID NO: 337413
caaccaaagaaucacuucu

SEQ ID NO: 337415 - RNA, 19 nt, Artificial Sequence
  Description of Artificial Sequence: Synthetic oligonucleotide
  Sense Strand Starting at position 236 of SEQ ID NO: 316044
agugauucuuugguugaac

SEQ ID NO: 337416 - RNA, 19 nt, Artificial Sequence
  Description of Artificial Sequence: Synthetic oligonucleotide
  Antisense Strand to SEQ ID NO: 337415
guucaaccaaagaaucacu

SEQ ID NO: 337417 - RNA, 19 nt, Artificial Sequence
  Description of Artificial Sequence: Synthetic oligonucleotide
  Sense Strand Starting at position 236 of SEQ ID NO: 316046
ugauucuuugguugaacca

SEQ ID NO: 337418 - RNA, 19 nt, Artificial Sequence
  Description of Artificial Sequence: Synthetic oligonucleotide
  Antisense Strand to SEQ ID NO: 337417
ugguucaaccaaagaauca

SEQ ID NO: 337419 - RNA, 19 nt, Artificial Sequence
  Description of Artificial Sequence: Synthetic oligonucleotide
  Sense Strand Starting at position 236 of SEQ ID NO: 316233
cccgcuuaagaugauauua

SEQ ID NO: 337420 - RNA, 19 nt, Artificial Sequence
  Description of Artificial Sequence: Synthetic oligonucleotide
  Antisense Strand to SEQ ID NO: 337419
uaauaucaucuuaagcggg

SEQ ID NO: 337421 - RNA, 19 nt, Artificial Sequence
  Description of Artificial Sequence: Synthetic oligonucleotide
  Sense Strand Starting at position 236 of SEQ ID NO: 316288
guuaaacuucuaugaagac

SEQ ID NO: 337422 - RNA, 19 nt, Artificial Sequence
  Description of Artificial Sequence: Synthetic oligonucleotide
  Antisense Strand to SEQ ID NO: 337421
gucuucauagaaguuuaac

SEQ ID NO: 337423 - RNA, 19 nt, Artificial Sequence
  Description of Artificial Sequence: Synthetic oligonucleotide
  Sense Strand Starting at position 236 of SEQ ID NO: 316459
gguguucuuaaagaagcaa

SEQ ID NO: 337424 - RNA, 19 nt, Artificial Sequence
  Description of Artificial Sequence: Synthetic oligonucleotide
  Antisense Strand to SEQ ID NO: 337423
uugcuucuuuaagaacacc

SEQ ID NO: 337425 - RNA, 19 nt, Artificial Sequence
  Description of Artificial Sequence: Synthetic oligonucleotide
  Sense Strand Starting at position 236 of SEQ ID NO: 316572
uaguauaucgcccaacuga

SEQ ID NO: 337426 - RNA, 19 nt, Artificial Sequence
  Description of Artificial Sequence: Synthetic oligonucleotide
  Antisense Strand to SEQ ID NO: 337425
ucaguugggcgauauacua

SEQ ID NO: 337427 - RNA, 19 nt, Artificial Sequence
  Description of Artificial Sequence: Synthetic oligonucleotide
  Sense Strand Starting at position 236 of SEQ ID NO: 317514
cgaguugauuuauuacggu

SEQ ID NO: 337428 - RNA, 19 nt, Artificial Sequence
  Description of Artificial Sequence: Synthetic oligonucleotide
  Antisense Strand to SEQ ID NO: 337427
accguaauaaaucaacucg

SEQ ID NO: 337429 - RNA, 19 nt, Artificial Sequence
  Description of Artificial Sequence: Synthetic oligonucleotide
  Sense Strand Starting at position 236 of SEQ ID NO: 317588
ucgaguaauccaggaacug

SEQ ID NO: 337430 - RNA, 19 nt, Artificial Sequence
  Description of Artificial Sequence: Synthetic oligonucleotide
  Antisense Strand to SEQ ID NO: 337429
caguuccuggauuacucga

SEQ ID NO: 337431 - RNA, 19 nt, Artificial Sequence
  Description of Artificial Sequence: Synthetic oligonucleotide
  Sense Strand Starting at position 236 of SEQ ID NO: 317778
ggauccagugucuagaguu

SEQ ID NO: 337432 - RNA, 19 nt, Artificial Sequence
  Description of Artificial Sequence: Synthetic oligonucleotide
  Antisense Strand to SEQ ID NO: 337431
aacucuagacacuggaucc

SEQ ID NO: 337433 - RNA, 19 nt, Artificial Sequence
  Description of Artificial Sequence: Synthetic oligonucleotide
  Sense Strand Starting at position 236 of SEQ ID NO: 317847
uaagguucuugccuggaaa

SEQ ID NO: 337434 - RNA, 19 nt, Artificial Sequence
  Description of Artificial Sequence: Synthetic oligonucleotide
  Antisense Strand to SEQ ID NO: 337433
uuuccaggcaagaaccuua

SEQ ID NO: 337435 - RNA, 19 nt, Artificial Sequence
  Description of Artificial Sequence: Synthetic oligonucleotide
  Sense Strand Starting at position 236 of SEQ ID NO: 317848
aagguucuugccuggaaac

SEQ ID NO: 337436 - RNA, 19 nt, Artificial Sequence
  Description of Artificial Sequence: Synthetic oligonucleotide
  Antisense Strand to SEQ ID NO: 337435
guuuccaggcaagaaccuu

SEQ ID NO: 337437 - RNA, 19 nt, Artificial Sequence
  Description of Artificial Sequence: Synthetic oligonucleotide
  Sense Strand Starting at position 236 of SEQ ID NO: 317849
agguucuugccuggaaaca

SEQ ID NO: 337438 - RNA, 19 nt, Artificial Sequence
  Description of Artificial Sequence: Synthetic oligonucleotide
  Antisense Strand to SEQ ID NO: 337437
uguuuccaggcaagaaccu

SEQ ID NO: 337439 - RNA, 19 nt, Artificial Sequence
  Description of Artificial Sequence: Synthetic oligonucleotide
  Sense Strand Starting at position 236 of SEQ ID NO: 317850
gguucuugccuggaaacau

SEQ ID NO: 337440 - RNA, 19 nt, Artificial Sequence
  Description of Artificial Sequence: Synthetic oligonucleotide
  Antisense Strand to SEQ ID NO: 337439
auguuuccaggcaagaacc

SEQ ID NO: 337441 - RNA, 19 nt, Artificial Sequence
  Description of Artificial Sequence: Synthetic oligonucleotide
  Sense Strand Starting at position 236 of SEQ ID NO: 317983
uggcuauacggugauccua

SEQ ID NO: 337442 - RNA, 19 nt, Artificial Sequence
  Description of Artificial Sequence: Synthetic oligonucleotide
  Antisense Strand to SEQ ID NO: 337441
uaggaucaccguauagcca

SEQ ID NO: 337443 - RNA, 19 nt, Artificial Sequence
  Description of Artificial Sequence: Synthetic oligonucleotide
  Sense Strand Starting at position 236 of SEQ ID NO: 318086
agaauccuugcauguauaa

SEQ ID NO: 337444 - RNA, 19 nt, Artificial Sequence
  Description of Artificial Sequence: Synthetic oligonucleotide
  Antisense Strand to SEQ ID NO: 337443
uuauacaugcaaggauucu

SEQ ID NO: 337445 - RNA, 19 nt, Artificial Sequence
  Description of Artificial Sequence: Synthetic oligonucleotide
  Sense Strand Starting at position 236 of SEQ ID NO: 318124
gcgugcguaccuguauaua

SEQ ID NO: 337446 - RNA, 19 nt, Artificial Sequence
  Description of Artificial Sequence: Synthetic oligonucleotide
  Antisense Strand to SEQ ID NO: 337445
uauauacagguacgcacgc

SEQ ID NO: 337447 - RNA, 19 nt, Artificial Sequence
  Description of Artificial Sequence: Synthetic oligonucleotide
  Sense Strand Starting at position 236 of SEQ ID NO: 318143
gucucuacuguuuaaagca

SEQ ID NO: 337448 - RNA, 19 nt, Artificial Sequence
  Description of Artificial Sequence: Synthetic oligonucleotide
  Antisense Strand to SEQ ID NO: 337447
ugcuuuaaacaguagagac

SEQ ID NO: 337449 - RNA, 19 nt, Artificial Sequence
  Description of Artificial Sequence: Synthetic oligonucleotide
  Sense Strand Starting at position 236 of SEQ ID NO: 318311
ugucucaaggauuauuauu

SEQ ID NO: 337450 - RNA, 19 nt, Artificial Sequence
  Description of Artificial Sequence: Synthetic oligonucleotide
  Antisense Strand to SEQ ID NO: 337449
aauaauaauccuugagaca

SEQ ID NO: 337451 - RNA, 19 nt, Artificial Sequence
  Description of Artificial Sequence: Synthetic oligonucleotide
  Sense Strand Starting at position 236 of SEQ ID NO: 318446
cuuucuuaagaaugacgua

SEQ ID NO: 337452 - RNA, 19 nt, Artificial Sequence
  Description of Artificial Sequence: Synthetic oligonucleotide
  Antisense Strand to SEQ ID NO: 337451
uacgucauucuuaagaaag

SEQ ID NO: 337453 - RNA, 19 nt, Artificial Sequence
  Description of Artificial Sequence: Synthetic oligonucleotide
  Sense Strand Starting at position 236 of SEQ ID NO: 318451
uuaagaaugacguaguaau

SEQ ID NO: 337454 - RNA, 19 nt, Artificial Sequence
  Description of Artificial Sequence: Synthetic oligonucleotide
  Antisense Strand to SEQ ID NO: 337453
auuacuacgucauucuuaa

SEQ ID NO: 337455 - RNA, 19 nt, Artificial Sequence
  Description of Artificial Sequence: Synthetic oligonucleotide
  Sense Strand Starting at position 236 of SEQ ID NO: 318461
cguaguaauaugcaagaua

SEQ ID NO: 337456 - RNA, 19 nt, Artificial Sequence
  Description of Artificial Sequence: Synthetic oligonucleotide
  Antisense Strand to SEQ ID NO: 337455
uaucuugcauauuacuacg

SEQ ID NO: 337457 - RNA, 19 nt, Artificial Sequence
  Description of Artificial Sequence: Synthetic oligonucleotide
  Sense Strand Starting at position 236 of SEQ ID NO: 318499
caaguuauucucgauaugg

SEQ ID NO: 337458 - RNA, 19 nt, Artificial Sequence
  Description of Artificial Sequence: Synthetic oligonucleotide
  Antisense Strand to SEQ ID NO: 337457
ccauaucgagaauaacuug

SEQ ID NO: 337459 - RNA, 19 nt, Artificial Sequence
  Description of Artificial Sequence: Synthetic oligonucleotide
  Sense Strand Starting at position 236 of SEQ ID NO: 318501
aguuauucucgauauggga

SEQ ID NO: 337460 - RNA, 19 nt, Artificial Sequence
  Description of Artificial Sequence: Synthetic oligonucleotide
  Antisense Strand to SEQ ID NO: 337459
ucccauaucgagaauaacu

SEQ ID NO: 337461 - RNA, 19 nt, Artificial Sequence
  Description of Artificial Sequence: Synthetic oligonucleotide
  Sense Strand Starting at position 236 of SEQ ID NO: 318595
uggagugagcucuauggca

SEQ ID NO: 337462 - RNA, 19 nt, Artificial Sequence
  Description of Artificial Sequence: Synthetic oligonucleotide
  Antisense Strand to SEQ ID NO: 337461
ugccauagagcucacucca

SEQ ID NO: 337463 - RNA, 19 nt, Artificial Sequence
  Description of Artificial Sequence: Synthetic oligonucleotide
  Sense Strand Starting at position 236 of SEQ ID NO: 318635
uaaugaauggcauagagcu

SEQ ID NO: 337464 - RNA, 19 nt, Artificial Sequence
  Description of Artificial Sequence: Synthetic oligonucleotide
  Antisense Strand to SEQ ID NO: 337463
agcucuaugccauucauua

SEQ ID NO: 337465 - RNA, 19 nt, Artificial Sequence
  Description of Artificial Sequence: Synthetic oligonucleotide
  Sense Strand Starting at position 236 of SEQ ID NO: 318920
ucucccauaguuugaagaa

SEQ ID NO: 337466 - RNA, 19 nt, Artificial Sequence
  Description of Artificial Sequence: Synthetic oligonucleotide
  Antisense Strand to SEQ ID NO: 337465
uucuucaaacuaugggaga

SEQ ID NO: 337467 - RNA, 19 nt, Artificial Sequence
  Description of Artificial Sequence: Synthetic oligonucleotide
  Sense Strand Starting at position 236 of SEQ ID NO: 318930
uuugaagaaggcugauauu

SEQ ID NO: 337468 - RNA, 19 nt, Artificial Sequence
  Description of Artificial Sequence: Synthetic oligonucleotide
  Antisense Strand to SEQ ID NO: 337467
aauaucagccuucuucaaa

SEQ ID NO: 337469 - RNA, 19 nt, Artificial Sequence
  Description of Artificial Sequence: Synthetic oligonucleotide
  Sense Strand Starting at position 236 of SEQ ID NO: 319144
gguaccucggguuauaauu

SEQ ID NO: 337470 - RNA, 19 nt, Artificial Sequence
  Description of Artificial Sequence: Synthetic oligonucleotide
  Antisense Strand to SEQ ID NO: 337469
aauuauaacccgagguacc

SEQ ID NO: 337471 - RNA, 19 nt, Artificial Sequence
  Description of Artificial Sequence: Synthetic oligonucleotide
  Sense Strand Starting at position 237 of SEQ ID NO: 315256
cugggcaagugcucauaaa

SEQ ID NO: 337472 - RNA, 19 nt, Artificial Sequence
  Description of Artificial Sequence: Synthetic oligonucleotide
  Antisense Strand to SEQ ID NO: 337471
uuuaugagcacuugcccag

SEQ ID NO: 337473 - RNA, 19 nt, Artificial Sequence
  Description of Artificial Sequence: Synthetic oligonucleotide
  Sense Strand Starting at position 237 of SEQ ID NO: 315257
ugggcaagugcucauaaau

SEQ ID NO: 337474 - RNA, 19 nt, Artificial Sequence
  Description of Artificial Sequence: Synthetic oligonucleotide
  Antisense Strand to SEQ ID NO: 337473
auuuaugagcacuugccca

SEQ ID NO: 337475 - RNA, 19 nt, Artificial Sequence
  Description of Artificial Sequence: Synthetic oligonucleotide
  Sense Strand Starting at position 237 of SEQ ID NO: 315605
ggaagauggccugagcacu

SEQ ID NO: 337476 - RNA, 19 nt, Artificial Sequence
  Description of Artificial Sequence: Synthetic oligonucleotide
  Antisense Strand to SEQ ID NO: 337475
agugcucaggccaucuucc

SEQ ID NO: 337477 - RNA, 19 nt, Artificial Sequence
  Description of Artificial Sequence: Synthetic oligonucleotide
  Sense Strand Starting at position 237 of SEQ ID NO: 315611
uggccugagcacugucaaa

SEQ ID NO: 337478 - RNA, 19 nt, Artificial Sequence
  Description of Artificial Sequence: Synthetic oligonucleotide
  Antisense Strand to SEQ ID NO: 337477
uuugacagugcucaggcca

SEQ ID NO: 337479 - RNA, 19 nt, Artificial Sequence
  Description of Artificial Sequence: Synthetic oligonucleotide
  Sense Strand Starting at position 237 of SEQ ID NO: 316222
caaggucccugucuggaaa

SEQ ID NO: 337480 - RNA, 19 nt, Artificial Sequence
  Description of Artificial Sequence: Synthetic oligonucleotide
  Antisense Strand to SEQ ID NO: 337479
uuuccagacagggaccuug

SEQ ID NO: 337481 - RNA, 19 nt, Artificial Sequence
  Description of Artificial Sequence: Synthetic oligonucleotide
  Sense Strand Starting at position 237 of SEQ ID NO: 317679
gaugaagacuugucuuuaa

SEQ ID NO: 337482 - RNA, 19 nt, Artificial Sequence
  Description of Artificial Sequence: Synthetic oligonucleotide
  Antisense Strand to SEQ ID NO: 337481
uuaaagacaagucuucauc

SEQ ID NO: 337483 - RNA, 19 nt, Artificial Sequence
  Description of Artificial Sequence: Synthetic oligonucleotide
  Sense Strand Starting at position 237 of SEQ ID NO: 317682
gaagacuugucuuuaaaga

SEQ ID NO: 337484 - RNA, 19 nt, Artificial Sequence
  Description of Artificial Sequence: Synthetic oligonucleotide
  Antisense Strand to SEQ ID NO: 337483
ucuuuaaagacaagucuuc

SEQ ID NO: 337485 - RNA, 19 nt, Artificial Sequence
  Description of Artificial Sequence: Synthetic oligonucleotide
  Sense Strand Starting at position 237 of SEQ ID NO: 317821
gcuccucauucuuguguua

SEQ ID NO: 337486 - RNA, 19 nt, Artificial Sequence
  Description of Artificial Sequence: Synthetic oligonucleotide
  Antisense Strand to SEQ ID NO: 337485
uaacacaagaaugaggagc

SEQ ID NO: 337487 - RNA, 19 nt, Artificial Sequence
  Description of Artificial Sequence: Synthetic oligonucleotide
  Sense Strand Starting at position 237 of SEQ ID NO: 317857
gccagaaaccggcagcauu

SEQ ID NO: 337488 - RNA, 19 nt, Artificial Sequence
  Description of Artificial Sequence: Synthetic oligonucleotide
  Antisense Strand to SEQ ID NO: 337487
aaugcugccgguuucuggc

SEQ ID NO: 337489 - RNA, 19 nt, Artificial Sequence
  Description of Artificial Sequence: Synthetic oligonucleotide
  Sense Strand Starting at position 237 of SEQ ID NO: 317896
guaucucccucucauugua

SEQ ID NO: 337490 - RNA, 19 nt, Artificial Sequence
  Description of Artificial Sequence: Synthetic oligonucleotide
  Antisense Strand to SEQ ID NO: 337489
uacaaugagagggagauac

SEQ ID NO: 337491 - RNA, 19 nt, Artificial Sequence
  Description of Artificial Sequence: Synthetic oligonucleotide
  Sense Strand Starting at position 237 of SEQ ID NO: 318104
ccuuccuaaucuugggaga

SEQ ID NO: 337492 - RNA, 19 nt, Artificial Sequence
  Description of Artificial Sequence: Synthetic oligonucleotide
  Antisense Strand to SEQ ID NO: 337491
ucucccaagauuaggaagg

SEQ ID NO: 337493 - RNA, 19 nt, Artificial Sequence
  Description of Artificial Sequence: Synthetic oligonucleotide
  Sense Strand Starting at position 237 of SEQ ID NO: 318106
uuccuaaucuugggagaca

SEQ ID NO: 337494 - RNA, 19 nt, Artificial Sequence
  Description of Artificial Sequence: Synthetic oligonucleotide
  Antisense Strand to SEQ ID NO: 337493
ugucucccaagauuaggaa

SEQ ID NO: 337495 - RNA, 19 nt, Artificial Sequence
  Description of Artificial Sequence: Synthetic oligonucleotide
  Sense Strand Starting at position 237 of SEQ ID NO: 318107
uccuaaucuugggagacau

SEQ ID NO: 337496 - RNA, 19 nt, Artificial Sequence
  Description of Artificial Sequence: Synthetic oligonucleotide
  Antisense Strand to SEQ ID NO: 337495
augucucccaagauuagga

SEQ ID NO: 337497 - RNA, 19 nt, Artificial Sequence
  Description of Artificial Sequence: Synthetic oligonucleotide
  Sense Strand Starting at position 237 of SEQ ID NO: 318118
ggagacaucucgucuggcu

SEQ ID NO: 337498 - RNA, 19 nt, Artificial Sequence
  Description of Artificial Sequence: Synthetic oligonucleotide
  Antisense Strand to SEQ ID NO: 337497
agccagacgagaugucucc

SEQ ID NO: 337499 - RNA, 19 nt, Artificial Sequence
  Description of Artificial Sequence: Synthetic oligonucleotide
  Sense Strand Starting at position 237 of SEQ ID NO: 318382
gcagcugucuuuccuaaga

SEQ ID NO: 337500 - RNA, 19 nt, Artificial Sequence
  Description of Artificial Sequence: Synthetic oligonucleotide
  Antisense Strand to SEQ ID NO: 337499
ucuuaggaaagacagcugc

SEQ ID NO: 337501 - RNA, 19 nt, Artificial Sequence
  Description of Artificial Sequence: Synthetic oligonucleotide
  Sense Strand Starting at position 237 of SEQ ID NO: 318405
gacacaugggccugguuau

SEQ ID NO: 337502 - RNA, 19 nt, Artificial Sequence
  Description of Artificial Sequence: Synthetic oligonucleotide
  Antisense Strand to SEQ ID NO: 337501
auaaccaggcccauguguc

SEQ ID NO: 337503 - RNA, 19 nt, Artificial Sequence
  Description of Artificial Sequence: Synthetic oligonucleotide
  Sense Strand Starting at position 237 of SEQ ID NO: 318406
acacaugggccugguuauu

SEQ ID NO: 337504 - RNA, 19 nt, Artificial Sequence
  Description of Artificial Sequence: Synthetic oligonucleotide
  Antisense Strand to SEQ ID NO: 337503
aauaaccaggcccaugugu

SEQ ID NO: 337505 - RNA, 19 nt, Artificial Sequence
  Description of Artificial Sequence: Synthetic oligonucleotide
  Sense Strand Starting at position 237 of SEQ ID NO: 318418
gguuauuccucuugucaca

SEQ ID NO: 337506 - RNA, 19 nt, Artificial Sequence
  Description of Artificial Sequence: Synthetic oligonucleotide
  Antisense Strand to SEQ ID NO: 337505
ugugacaagaggaauaacc

SEQ ID NO: 337507 - RNA, 19 nt, Artificial Sequence
  Description of Artificial Sequence: Synthetic oligonucleotide
  Sense Strand Starting at position 237 of SEQ ID NO: 318656
ggagauuucucucaugugg

SEQ ID NO: 337508 - RNA, 19 nt, Artificial Sequence
  Description of Artificial Sequence: Synthetic oligonucleotide
  Antisense Strand to SEQ ID NO: 337507
ccacaugagagaaaucucc

SEQ ID NO: 337509 - RNA, 19 nt, Artificial Sequence
  Description of Artificial Sequence: Synthetic oligonucleotide
  Sense Strand Starting at position 237 of SEQ ID NO: 318662
uucucucaugugggcaaua

SEQ ID NO: 337510 - RNA, 19 nt, Artificial Sequence
  Description of Artificial Sequence: Synthetic oligonucleotide
  Antisense Strand to SEQ ID NO: 337509
uauugcccacaugagagaa

SEQ ID NO: 337511 - RNA, 19 nt, Artificial Sequence
  Description of Artificial Sequence: Synthetic oligonucleotide
  Sense Strand Starting at position 237 of SEQ ID NO: 318663
ucucucaugugggcaauau

SEQ ID NO: 337512 - RNA, 19 nt, Artificial Sequence
  Description of Artificial Sequence: Synthetic oligonucleotide
  Antisense Strand to SEQ ID NO: 337511
auauugcccacaugagaga

SEQ ID NO: 337513 - RNA, 19 nt, Artificial Sequence
  Description of Artificial Sequence: Synthetic oligonucleotide
  Sense Strand Starting at position 237 of SEQ ID NO: 318781
cagguaugauguccaggga

SEQ ID NO: 337514 - RNA, 19 nt, Artificial Sequence
  Description of Artificial Sequence: Synthetic oligonucleotide
  Antisense Strand to SEQ ID NO: 337513
ucccuggacaucauaccug

SEQ ID NO: 337515 - RNA, 19 nt, Artificial Sequence
  Description of Artificial Sequence: Synthetic oligonucleotide
  Sense Strand Starting at position 237 of SEQ ID NO: 318873
acacaaauguccugccaga

SEQ ID NO: 337516 - RNA, 19 nt, Artificial Sequence
  Description of Artificial Sequence: Synthetic oligonucleotide
  Antisense Strand to SEQ ID NO: 337515
ucuggcaggacauuugugu

SEQ ID NO: 337517 - RNA, 19 nt, Artificial Sequence
  Description of Artificial Sequence: Synthetic oligonucleotide
  Sense Strand Starting at position 237 of SEQ ID NO: 318884
cugccagauuccuccugga

SEQ ID NO: 337518 - RNA, 19 nt, Artificial Sequence
  Description of Artificial Sequence: Synthetic oligonucleotide
  Antisense Strand to SEQ ID NO: 337517
uccaggaggaaucuggcag

SEQ ID NO: 337519 - RNA, 19 nt, Artificial Sequence
  Description of Artificial Sequence: Synthetic oligonucleotide
  Sense Strand Starting at position 237 of SEQ ID NO: 319079
guggcucccuucucugauu

SEQ ID NO: 337520 - RNA, 19 nt, Artificial Sequence
  Description of Artificial Sequence: Synthetic oligonucleotide
  Antisense Strand to SEQ ID NO: 337519
aaucagagaagggagccac

SEQ ID NO: 337521 - RNA, 19 nt, Artificial Sequence
  Description of Artificial Sequence: Synthetic oligonucleotide
  Sense Strand Starting at position 238 of SEQ ID NO: 315291
agcauagucucagccaaag

SEQ ID NO: 337522 - RNA, 19 nt, Artificial Sequence
  Description of Artificial Sequence: Synthetic oligonucleotide
  Antisense Strand to SEQ ID NO: 337521
cuuuggcugagacuaugcu

SEQ ID NO: 337523 - RNA, 19 nt, Artificial Sequence
  Description of Artificial Sequence: Synthetic oligonucleotide
  Sense Strand Starting at position 238 of SEQ ID NO: 315353
cuggauagguuggucugau

SEQ ID NO: 337524 - RNA, 19 nt, Artificial Sequence
  Description of Artificial Sequence: Synthetic oligonucleotide
  Antisense Strand to SEQ ID NO: 337523
aucagaccaaccuauccag

SEQ ID NO: 337525 - RNA, 19 nt, Artificial Sequence
  Description of Artificial Sequence: Synthetic oligonucleotide
  Sense Strand Starting at position 238 of SEQ ID NO: 315354
uggauagguuggucugauu

SEQ ID NO: 337526 - RNA, 19 nt, Artificial Sequence
  Description of Artificial Sequence: Synthetic oligonucleotide
  Antisense Strand to SEQ ID NO: 337525
aaucagaccaaccuaucca

SEQ ID NO: 337527 - RNA, 19 nt, Artificial Sequence
  Description of Artificial Sequence: Synthetic oligonucleotide
  Sense Strand Starting at position 238 of SEQ ID NO: 315437
acaagagcgcuugacagaa

SEQ ID NO: 337528 - RNA, 19 nt, Artificial Sequence
  Description of Artificial Sequence: Synthetic oligonucleotide
  Antisense Strand to SEQ ID NO: 337527
uucugucaagcgcucuugu

SEQ ID NO: 337529 - RNA, 19 nt, Artificial Sequence
  Description of Artificial Sequence: Synthetic oligonucleotide
  Sense Strand Starting at position 238 of SEQ ID NO: 315665
ccucaaaccuggguagagu

SEQ ID NO: 337530 - RNA, 19 nt, Artificial Sequence
  Description of Artificial Sequence: Synthetic oligonucleotide
  Antisense Strand to SEQ ID NO: 337529
acucuacccagguuugagg

SEQ ID NO: 337531 - RNA, 19 nt, Artificial Sequence
  Description of Artificial Sequence: Synthetic oligonucleotide
  Sense Strand Starting at position 238 of SEQ ID NO: 315698
aggugucccacggagacau

SEQ ID NO: 337532 - RNA, 19 nt, Artificial Sequence
  Description of Artificial Sequence: Synthetic oligonucleotide
  Antisense Strand to SEQ ID NO: 337531
augucuccgugggacaccu

SEQ ID NO: 337533 - RNA, 19 nt, Artificial Sequence
  Description of Artificial Sequence: Synthetic oligonucleotide
  Sense Strand Starting at position 238 of SEQ ID NO: 315790
ucagguguccucuaacauc

SEQ ID NO: 337534 - RNA, 19 nt, Artificial Sequence
  Description of Artificial Sequence: Synthetic oligonucleotide
  Antisense Strand to SEQ ID NO: 337533
gauguuagaggacaccuga

SEQ ID NO: 337535 - RNA, 19 nt, Artificial Sequence
  Description of Artificial Sequence: Synthetic oligonucleotide
  Sense Strand Starting at position 238 of SEQ ID NO: 315842
aguucugcccugucuuagu

SEQ ID NO: 337536 - RNA, 19 nt, Artificial Sequence
  Description of Artificial Sequence: Synthetic oligonucleotide
  Antisense Strand to SEQ ID NO: 337535
acuaagacagggcagaacu

SEQ ID NO: 337537 - RNA, 19 nt, Artificial Sequence
  Description of Artificial Sequence: Synthetic oligonucleotide
  Sense Strand Starting at position 238 of SEQ ID NO: 315852
ugucuuaguacuggguaaa

SEQ ID NO: 337538 - RNA, 19 nt, Artificial Sequence
  Description of Artificial Sequence: Synthetic oligonucleotide
  Antisense Strand to SEQ ID NO: 337537
uuuacccaguacuaagaca

SEQ ID NO: 337539 - RNA, 19 nt, Artificial Sequence
  Description of Artificial Sequence: Synthetic oligonucleotide
  Sense Strand Starting at position 238 of SEQ ID NO: 315853
gucuuaguacuggguaaac

SEQ ID NO: 337540 - RNA, 19 nt, Artificial Sequence
  Description of Artificial Sequence: Synthetic oligonucleotide
  Antisense Strand to SEQ ID NO: 337539
guuuacccaguacuaagac

SEQ ID NO: 337541 - RNA, 19 nt, Artificial Sequence
  Description of Artificial Sequence: Synthetic oligonucleotide
  Sense Strand Starting at position 238 of SEQ ID NO: 315855
cuuaguacuggguaaacau

SEQ ID NO: 337542 - RNA, 19 nt, Artificial Sequence
  Description of Artificial Sequence: Synthetic oligonucleotide
  Antisense Strand to SEQ ID NO: 337541
auguuuacccaguacuaag

SEQ ID NO: 337543 - RNA, 19 nt, Artificial Sequence
  Description of Artificial Sequence: Synthetic oligonucleotide
  Sense Strand Starting at position 238 of SEQ ID NO: 315864
ggguaaacaucugucuacu

SEQ ID NO: 337544 - RNA, 19 nt, Artificial Sequence
  Description of Artificial Sequence: Synthetic oligonucleotide
  Antisense Strand to SEQ ID NO: 337543
aguagacagauguuuaccc

SEQ ID NO: 337545 - RNA, 19 nt, Artificial Sequence
  Description of Artificial Sequence: Synthetic oligonucleotide
  Sense Strand Starting at position 238 of SEQ ID NO: 315866
guaaacaucugucuacuga

SEQ ID NO: 337546 - RNA, 19 nt, Artificial Sequence
  Description of Artificial Sequence: Synthetic oligonucleotide
  Antisense Strand to SEQ ID NO: 337545
ucaguagacagauguuuac

SEQ ID NO: 337547 - RNA, 19 nt, Artificial Sequence
  Description of Artificial Sequence: Synthetic oligonucleotide
  Sense Strand Starting at position 238 of SEQ ID NO: 315881
cugaaugacucgguggaca

SEQ ID NO: 337548 - RNA, 19 nt, Artificial Sequence
  Description of Artificial Sequence: Synthetic oligonucleotide
  Antisense Strand to SEQ ID NO: 337547
uguccaccgagucauucag

SEQ ID NO: 337549 - RNA, 19 nt, Artificial Sequence
  Description of Artificial Sequence: Synthetic oligonucleotide
  Sense Strand Starting at position 238 of SEQ ID NO: 315883
gaaugacucgguggacaga

SEQ ID NO: 337550 - RNA, 19 nt, Artificial Sequence
  Description of Artificial Sequence: Synthetic oligonucleotide
  Antisense Strand to SEQ ID NO: 337549
ucuguccaccgagucauuc

SEQ ID NO: 337551 - RNA, 19 nt, Artificial Sequence
  Description of Artificial Sequence: Synthetic oligonucleotide
  Sense Strand Starting at position 238 of SEQ ID NO: 315934
cccagacugccaggagauu

SEQ ID NO: 337552 - RNA, 19 nt, Artificial Sequence
  Description of Artificial Sequence: Synthetic oligonucleotide
  Antisense Strand to SEQ ID NO: 337551
aaucuccuggcagucuggg

SEQ ID NO: 337553 - RNA, 19 nt, Artificial Sequence
  Description of Artificial Sequence: Synthetic oligonucleotide
  Sense Strand Starting at position 238 of SEQ ID NO: 315943
ccaggagauugucugcuca

SEQ ID NO: 337554 - RNA, 19 nt, Artificial Sequence
  Description of Artificial Sequence: Synthetic oligonucleotide
  Antisense Strand to SEQ ID NO: 337553
ugagcagacaaucuccugg

SEQ ID NO: 337555 - RNA, 19 nt, Artificial Sequence
  Description of Artificial Sequence: Synthetic oligonucleotide
  Sense Strand Starting at position 238 of SEQ ID NO: 315945
aggagauugucugcucaac

SEQ ID NO: 337556 - RNA, 19 nt, Artificial Sequence
  Description of Artificial Sequence: Synthetic oligonucleotide
  Antisense Strand to SEQ ID NO: 337555
guugagcagacaaucuccu

SEQ ID NO: 337557 - RNA, 19 nt, Artificial Sequence
  Description of Artificial Sequence: Synthetic oligonucleotide
  Sense Strand Starting at position 238 of SEQ ID NO: 315947
gagauugucugcucaacac

SEQ ID NO: 337558 - RNA, 19 nt, Artificial Sequence
  Description of Artificial Sequence: Synthetic oligonucleotide
  Antisense Strand to SEQ ID NO: 337557
guguugagcagacaaucuc

SEQ ID NO: 337559 - RNA, 19 nt, Artificial Sequence
  Description of Artificial Sequence: Synthetic oligonucleotide
  Sense Strand Starting at position 238 of SEQ ID NO: 316200
uuacuuacucccugggacu

SEQ ID NO: 337560 - RNA, 19 nt, Artificial Sequence
  Description of Artificial Sequence: Synthetic oligonucleotide
  Antisense Strand to SEQ ID NO: 337559
agucccagggaguaaguaa

SEQ ID NO: 337561 - RNA, 19 nt, Artificial Sequence
  Description of Artificial Sequence: Synthetic oligonucleotide
  Sense Strand Starting at position 238 of SEQ ID NO: 316447
uugugugaaauggguugau

SEQ ID NO: 337562 - RNA, 19 nt, Artificial Sequence
  Description of Artificial Sequence: Synthetic oligonucleotide
  Antisense Strand to SEQ ID NO: 337561
aucaacccauuucacacaa

SEQ ID NO: 337563 - RNA, 19 nt, Artificial Sequence
  Description of Artificial Sequence: Synthetic oligonucleotide
  Sense Strand Starting at position 238 of SEQ ID NO: 317626
agggcugaucugggaugaa

SEQ ID NO: 337564 - RNA, 19 nt, Artificial Sequence
  Description of Artificial Sequence: Synthetic oligonucleotide
  Antisense Strand to SEQ ID NO: 337563
uucaucccagaucagcccu

SEQ ID NO: 337565 - RNA, 19 nt, Artificial Sequence
  Description of Artificial Sequence: Synthetic oligonucleotide
  Sense Strand Starting at position 238 of SEQ ID NO: 317700
caguaagaggccuaagagu

SEQ ID NO: 337566 - RNA, 19 nt, Artificial Sequence
  Description of Artificial Sequence: Synthetic oligonucleotide
  Antisense Strand to SEQ ID NO: 337565
acucuuaggccucuuacug

SEQ ID NO: 337567 - RNA, 19 nt, Artificial Sequence
  Description of Artificial Sequence: Synthetic oligonucleotide
  Sense Strand Starting at position 238 of SEQ ID NO: 318000
aaguccagccuuugaaaga

SEQ ID NO: 337568 - RNA, 19 nt, Artificial Sequence
  Description of Artificial Sequence: Synthetic oligonucleotide
  Antisense Strand to SEQ ID NO: 337567
ucuuucaaaggcuggacuu

SEQ ID NO: 337569 - RNA, 19 nt, Artificial Sequence
  Description of Artificial Sequence: Synthetic oligonucleotide
  Sense Strand Starting at position 238 of SEQ ID NO: 318137
gugcguuggaaacaacauu

SEQ ID NO: 337570 - RNA, 19 nt, Artificial Sequence
  Description of Artificial Sequence: Synthetic oligonucleotide
  Antisense Strand to SEQ ID NO: 337569
aauguuguuuccaacgcac

SEQ ID NO: 337571 - RNA, 19 nt, Artificial Sequence
  Description of Artificial Sequence: Synthetic oligonucleotide
  Sense Strand Starting at position 238 of SEQ ID NO: 318150
aacauuuagcagugugagu

SEQ ID NO: 337572 - RNA, 19 nt, Artificial Sequence
  Description of Artificial Sequence: Synthetic oligonucleotide
  Antisense Strand to SEQ ID NO: 337571
acucacacugcuaaauguu

SEQ ID NO: 337573 - RNA, 19 nt, Artificial Sequence
  Description of Artificial Sequence: Synthetic oligonucleotide
  Sense Strand Starting at position 238 of SEQ ID NO: 318257
ggagauaugcaguggugag

SEQ ID NO: 337574 - RNA, 19 nt, Artificial Sequence
  Description of Artificial Sequence: Synthetic oligonucleotide
  Antisense Strand to SEQ ID NO: 337573
cucaccacugcauaucucc

SEQ ID NO: 337575 - RNA, 19 nt, Artificial Sequence
  Description of Artificial Sequence: Synthetic oligonucleotide
  Sense Strand Starting at position 238 of SEQ ID NO: 318287
ccguguaaccaucaccuaa

SEQ ID NO: 337576 - RNA, 19 nt, Artificial Sequence
  Description of Artificial Sequence: Synthetic oligonucleotide
  Antisense Strand to SEQ ID NO: 337575
uuaggugaugguuacacgg

SEQ ID NO: 337577 - RNA, 19 nt, Artificial Sequence
  Description of Artificial Sequence: Synthetic oligonucleotide
  Sense Strand Starting at position 238 of SEQ ID NO: 318289
guguaaccaucaccuaaau

SEQ ID NO: 337578 - RNA, 19 nt, Artificial Sequence
  Description of Artificial Sequence: Synthetic oligonucleotide
  Antisense Strand to SEQ ID NO: 337577
auuuaggugaugguuacac

SEQ ID NO: 337579 - RNA, 19 nt, Artificial Sequence
  Description of Artificial Sequence: Synthetic oligonucleotide
  Sense Strand Starting at position 238 of SEQ ID NO: 318302
cuaaauaauguccauugua

SEQ ID NO: 337580 - RNA, 19 nt, Artificial Sequence
  Description of Artificial Sequence: Synthetic oligonucleotide
  Antisense Strand to SEQ ID NO: 337579
uacaauggacauuauuuag

SEQ ID NO: 337581 - RNA, 19 nt, Artificial Sequence
  Description of Artificial Sequence: Synthetic oligonucleotide
  Sense Strand Starting at position 238 of SEQ ID NO: 318412
uuguuaaacuguucuugaa

SEQ ID NO: 337582 - RNA, 19 nt, Artificial Sequence
  Description of Artificial Sequence: Synthetic oligonucleotide
  Antisense Strand to SEQ ID NO: 337581
uucaagaacaguuuaacaa

SEQ ID NO: 337583 - RNA, 19 nt, Artificial Sequence
  Description of Artificial Sequence: Synthetic oligonucleotide
  Sense Strand Starting at position 238 of SEQ ID NO: 318543
cagugcugugaagauuaaa

SEQ ID NO: 337584 - RNA, 19 nt, Artificial Sequence
  Description of Artificial Sequence: Synthetic oligonucleotide
  Antisense Strand to SEQ ID NO: 337583
uuuaaucuucacagcacug

SEQ ID NO: 337585 - RNA, 19 nt, Artificial Sequence
  Description of Artificial Sequence: Synthetic oligonucleotide
  Sense Strand Starting at position 238 of SEQ ID NO: 318568
acaggaaauguuugcaaca

SEQ ID NO: 337586 - RNA, 19 nt, Artificial Sequence
  Description of Artificial Sequence: Synthetic oligonucleotide
  Antisense Strand to SEQ ID NO: 337585
uguugcaaacauuuccugu

SEQ ID NO: 337587 - RNA, 19 nt, Artificial Sequence
  Description of Artificial Sequence: Synthetic oligonucleotide
  Sense Strand Starting at position 238 of SEQ ID NO: 318677
uucuguuaaaguggugaaa

SEQ ID NO: 337588 - RNA, 19 nt, Artificial Sequence
  Description of Artificial Sequence: Synthetic oligonucleotide
  Antisense Strand to SEQ ID NO: 337587
uuucaccacuuuaacagaa

SEQ ID NO: 337589 - RNA, 19 nt, Artificial Sequence
  Description of Artificial Sequence: Synthetic oligonucleotide
  Sense Strand Starting at position 238 of SEQ ID NO: 318734
agaucuauuuaaggaagaa

SEQ ID NO: 337590 - RNA, 19 nt, Artificial Sequence
  Description of Artificial Sequence: Synthetic oligonucleotide
  Antisense Strand to SEQ ID NO: 337589
uucuuccuuaaauagaucu

SEQ ID NO: 337591 - RNA, 19 nt, Artificial Sequence
  Description of Artificial Sequence: Synthetic oligonucleotide
  Sense Strand Starting at position 238 of SEQ ID NO: 318799
uggugaugauguucucaaa

SEQ ID NO: 337592 - RNA, 19 nt, Artificial Sequence
  Description of Artificial Sequence: Synthetic oligonucleotide
  Antisense Strand to SEQ ID NO: 337591
uuugagaacaucaucacca

SEQ ID NO: 337593 - RNA, 19 nt, Artificial Sequence
  Description of Artificial Sequence: Synthetic oligonucleotide
  Sense Strand Starting at position 238 of SEQ ID NO: 318841
cacaguaagcuagaagcuu

SEQ ID NO: 337594 - RNA, 19 nt, Artificial Sequence
  Description of Artificial Sequence: Synthetic oligonucleotide
  Antisense Strand to SEQ ID NO: 337593
aagcuucuagcuuacugug

SEQ ID NO: 337595 - RNA, 19 nt, Artificial Sequence
  Description of Artificial Sequence: Synthetic oligonucleotide
  Sense Strand Starting at position 238 of SEQ ID NO: 319035
cgcgcuuugcccuuauaug

SEQ ID NO: 337596 - RNA, 19 nt, Artificial Sequence
  Description of Artificial Sequence: Synthetic oligonucleotide
  Antisense Strand to SEQ ID NO: 337595
cauauaagggcaaagcgcg

SEQ ID NO: 337597 - RNA, 19 nt, Artificial Sequence
  Description of Artificial Sequence: Synthetic oligonucleotide
  Sense Strand Starting at position 238 of SEQ ID NO: 319101
cggagaugucccuggaaau

SEQ ID NO: 337598 - RNA, 19 nt, Artificial Sequence
  Description of Artificial Sequence: Synthetic oligonucleotide
  Antisense Strand to SEQ ID NO: 337597
auuuccagggacaucuccg

SEQ ID NO: 337599 - RNA, 19 nt, Artificial Sequence
  Description of Artificial Sequence: Synthetic oligonucleotide
  Sense Strand Starting at position 238 of SEQ ID NO: 319102
ggagaugucccuggaaaug

SEQ ID NO: 337600 - RNA, 19 nt, Artificial Sequence
  Description of Artificial Sequence: Synthetic oligonucleotide
  Antisense Strand to SEQ ID NO: 337599
cauuuccagggacaucucc

SEQ ID NO: 337601 - RNA, 19 nt, Artificial Sequence
  Description of Artificial Sequence: Synthetic oligonucleotide
  Sense Strand Starting at position 239 of SEQ ID NO: 317568
cucagaaagaguuggugau

SEQ ID NO: 337602 - RNA, 19 nt, Artificial Sequence
  Description of Artificial Sequence: Synthetic oligonucleotide
  Antisense Strand to SEQ ID NO: 337601
aucaccaacucuuucugag

SEQ ID NO: 337603 - RNA, 19 nt, Artificial Sequence
  Description of Artificial Sequence: Synthetic oligonucleotide
  Sense Strand Starting at position 239 of SEQ ID NO: 317574
aagaguuggugaugaaguu

SEQ ID NO: 337604 - RNA, 19 nt, Artificial Sequence
  Description of Artificial Sequence: Synthetic oligonucleotide
  Antisense Strand to SEQ ID NO: 337603
aacuucaucaccaacucuu

SEQ ID NO: 337605 - RNA, 19 nt, Artificial Sequence
  Description of Artificial Sequence: Synthetic oligonucleotide
  Sense Strand Starting at position 239 of SEQ ID NO: 317575
agaguuggugaugaaguuu

SEQ ID NO: 337606 - RNA, 19 nt, Artificial Sequence
  Description of Artificial Sequence: Synthetic oligonucleotide
  Antisense Strand to SEQ ID NO: 337605
aaacuucaucaccaacucu

SEQ ID NO: 337607 - RNA, 19 nt, Artificial Sequence
  Description of Artificial Sequence: Synthetic oligonucleotide
  Sense Strand Starting at position 239 of SEQ ID NO: 317583
ugaugaaguuugggcagaa

SEQ ID NO: 337608 - RNA, 19 nt, Artificial Sequence
  Description of Artificial Sequence: Synthetic oligonucleotide
  Antisense Strand to SEQ ID NO: 337607
uucugcccaaacuucauca

SEQ ID NO: 337609 - RNA, 19 nt, Artificial Sequence
  Description of Artificial Sequence: Synthetic oligonucleotide
  Sense Strand Starting at position 239 of SEQ ID NO: 317946
ugcugcguccacugugauu

SEQ ID NO: 337610 - RNA, 19 nt, Artificial Sequence
  Description of Artificial Sequence: Synthetic oligonucleotide
  Antisense Strand to SEQ ID NO: 337609
aaucacaguggacgcagca

SEQ ID NO: 337611 - RNA, 19 nt, Artificial Sequence
  Description of Artificial Sequence: Synthetic oligonucleotide
  Sense Strand Starting at position 239 of SEQ ID NO: 317948
cugcguccacugugauuga

SEQ ID NO: 337612 - RNA, 19 nt, Artificial Sequence
  Description of Artificial Sequence: Synthetic oligonucleotide
  Antisense Strand to SEQ ID NO: 337611
ucaaucacaguggacgcag

SEQ ID NO: 337613 - RNA, 19 nt, Artificial Sequence
  Description of Artificial Sequence: Synthetic oligonucleotide
  Sense Strand Starting at position 239 of SEQ ID NO: 317962
auugacguccucuggaauu

SEQ ID NO: 337614 - RNA, 19 nt, Artificial Sequence
  Description of Artificial Sequence: Synthetic oligonucleotide
  Antisense Strand to SEQ ID NO: 337613
aauuccagaggacgucaau

SEQ ID NO: 337615 - RNA, 19 nt, Artificial Sequence
  Description of Artificial Sequence: Synthetic oligonucleotide
  Sense Strand Starting at position 239 of SEQ ID NO: 318078
aggaaacaccguuguugaa

SEQ ID NO: 337616 - RNA, 19 nt, Artificial Sequence
  Description of Artificial Sequence: Synthetic oligonucleotide
  Antisense Strand to SEQ ID NO: 337615
uucaacaacgguguuuccu

SEQ ID NO: 337617 - RNA, 19 nt, Artificial Sequence
  Description of Artificial Sequence: Synthetic oligonucleotide
  Sense Strand Starting at position 239 of SEQ ID NO: 318136
uguuuaagguuaugaggaa

SEQ ID NO: 337618 - RNA, 19 nt, Artificial Sequence
  Description of Artificial Sequence: Synthetic oligonucleotide
  Antisense Strand to SEQ ID NO: 337617
uuccucauaaccuuaaaca

SEQ ID NO: 337619 - RNA, 19 nt, Artificial Sequence
  Description of Artificial Sequence: Synthetic oligonucleotide
  Sense Strand Starting at position 239 of SEQ ID NO: 318137
guuuaagguuaugaggaaa

SEQ ID NO: 337620 - RNA, 19 nt, Artificial Sequence
  Description of Artificial Sequence: Synthetic oligonucleotide
  Antisense Strand to SEQ ID NO: 337619
uuuccucauaaccuuaaac

SEQ ID NO: 337621 - RNA, 19 nt, Artificial Sequence
  Description of Artificial Sequence: Synthetic oligonucleotide
  Sense Strand Starting at position 239 of SEQ ID NO: 318353
cucagcacccucggauaaa

SEQ ID NO: 337622 - RNA, 19 nt, Artificial Sequence
  Description of Artificial Sequence: Synthetic oligonucleotide
  Antisense Strand to SEQ ID NO: 337621
uuuauccgagggugcugag

SEQ ID NO: 337623 - RNA, 19 nt, Artificial Sequence
  Description of Artificial Sequence: Synthetic oligonucleotide
  Sense Strand Starting at position 239 of SEQ ID NO: 318422
uuuagaaguuacugcacaa

SEQ ID NO: 337624 - RNA, 19 nt, Artificial Sequence
  Description of Artificial Sequence: Synthetic oligonucleotide
  Antisense Strand to SEQ ID NO: 337623
uugugcaguaacuucuaaa

SEQ ID NO: 337625 - RNA, 19 nt, Artificial Sequence
  Description of Artificial Sequence: Synthetic oligonucleotide
  Sense Strand Starting at position 239 of SEQ ID NO: 318437
acaauuaucuuuguagcgu

SEQ ID NO: 337626 - RNA, 19 nt, Artificial Sequence
  Description of Artificial Sequence: Synthetic oligonucleotide
  Antisense Strand to SEQ ID NO: 337625
acgcuacaaagauaauugu

SEQ ID NO: 337627 - RNA, 19 nt, Artificial Sequence
  Description of Artificial Sequence: Synthetic oligonucleotide
  Sense Strand Starting at position 239 of SEQ ID NO: 318438
caauuaucuuuguagcguu

SEQ ID NO: 337628 - RNA, 19 nt, Artificial Sequence
  Description of Artificial Sequence: Synthetic oligonucleotide
  Antisense Strand to SEQ ID NO: 337627
aacgcuacaaagauaauug

SEQ ID NO: 337629 - RNA, 19 nt, Artificial Sequence
  Description of Artificial Sequence: Synthetic oligonucleotide
  Sense Strand Starting at position 239 of SEQ ID NO: 318449
guagcguuucgggcagacu

SEQ ID NO: 337630 - RNA, 19 nt, Artificial Sequence
  Description of Artificial Sequence: Synthetic oligonucleotide
  Antisense Strand to SEQ ID NO: 337629
agucugcccgaaacgcuac

SEQ ID NO: 337631 - RNA, 19 nt, Artificial Sequence
  Description of Artificial Sequence: Synthetic oligonucleotide
  Sense Strand Starting at position 239 of SEQ ID NO: 318450
uagcguuucgggcagacuu

SEQ ID NO: 337632 - RNA, 19 nt, Artificial Sequence
  Description of Artificial Sequence: Synthetic oligonucleotide
  Antisense Strand to SEQ ID NO: 337631
aagucugcccgaaacgcua

SEQ ID NO: 337633 - RNA, 19 nt, Artificial Sequence
  Description of Artificial Sequence: Synthetic oligonucleotide
  Sense Strand Starting at position 239 of SEQ ID NO: 318451
agcguuucgggcagacuuu

SEQ ID NO: 337634 - RNA, 19 nt, Artificial Sequence
  Description of Artificial Sequence: Synthetic oligonucleotide
  Antisense Strand to SEQ ID NO: 337633
aaagucugcccgaaacgcu

SEQ ID NO: 337635 - RNA, 19 nt, Artificial Sequence
  Description of Artificial Sequence: Synthetic oligonucleotide
  Sense Strand Starting at position 239 of SEQ ID NO: 318472
agaggaccguucuaacauu

SEQ ID NO: 337636 - RNA, 19 nt, Artificial Sequence
  Description of Artificial Sequence: Synthetic oligonucleotide
  Antisense Strand to SEQ ID NO: 337635
aauguuagaacgguccucu

SEQ ID NO: 337637 - RNA, 19 nt, Artificial Sequence
  Description of Artificial Sequence: Synthetic oligonucleotide
  Sense Strand Starting at position 239 of SEQ ID NO: 318498
ugcuguuugcgccauuauu

SEQ ID NO: 337638 - RNA, 19 nt, Artificial Sequence
  Description of Artificial Sequence: Synthetic oligonucleotide
  Antisense Strand to SEQ ID NO: 337637
aauaauggcgcaaacagca

SEQ ID NO: 337639 - RNA, 19 nt, Artificial Sequence
  Description of Artificial Sequence: Synthetic oligonucleotide
  Sense Strand Starting at position 239 of SEQ ID NO: 318500
cuguuugcgccauuauucu

SEQ ID NO: 337640 - RNA, 19 nt, Artificial Sequence
  Description of Artificial Sequence: Synthetic oligonucleotide
  Antisense Strand to SEQ ID NO: 337639
agaauaauggcgcaaacag

SEQ ID NO: 337641 - RNA, 19 nt, Artificial Sequence
  Description of Artificial Sequence: Synthetic oligonucleotide
  Sense Strand Starting at position 239 of SEQ ID NO: 318506
gcgccauuauucuuccaug

SEQ ID NO: 337642 - RNA, 19 nt, Artificial Sequence
  Description of Artificial Sequence: Synthetic oligonucleotide
  Antisense Strand to SEQ ID NO: 337641
cauggaagaauaauggcgc

SEQ ID NO: 337643 - RNA, 19 nt, Artificial Sequence
  Description of Artificial Sequence: Synthetic oligonucleotide
  Sense Strand Starting at position 239 of SEQ ID NO: 318507
cgccauuauucuuccauga

SEQ ID NO: 337644 - RNA, 19 nt, Artificial Sequence
  Description of Artificial Sequence: Synthetic oligonucleotide
  Antisense Strand to SEQ ID NO: 337643
ucauggaagaauaauggcg

SEQ ID NO: 337645 - RNA, 19 nt, Artificial Sequence
  Description of Artificial Sequence: Synthetic oligonucleotide
  Sense Strand Starting at position 239 of SEQ ID NO: 318512
uuauucuuccaugagucuu

SEQ ID NO: 337646 - RNA, 19 nt, Artificial Sequence
  Description of Artificial Sequence: Synthetic oligonucleotide
  Antisense Strand to SEQ ID NO: 337645
aagacucauggaagaauaa

SEQ ID NO: 337647 - RNA, 19 nt, Artificial Sequence
  Description of Artificial Sequence: Synthetic oligonucleotide
  Sense Strand Starting at position 239 of SEQ ID NO: 318520
ccaugagucuuacagaauc

SEQ ID NO: 337648 - RNA, 19 nt, Artificial Sequence
  Description of Artificial Sequence: Synthetic oligonucleotide
  Antisense Strand to SEQ ID NO: 337647
gauucuguaagacucaugg

SEQ ID NO: 337649 - RNA, 19 nt, Artificial Sequence
  Description of Artificial Sequence: Synthetic oligonucleotide
  Sense Strand Starting at position 239 of SEQ ID NO: 318563
ugacuuaacucgcuuucca

SEQ ID NO: 337650 - RNA, 19 nt, Artificial Sequence
  Description of Artificial Sequence: Synthetic oligonucleotide
  Antisense Strand to SEQ ID NO: 337649
uggaaagcgaguuaaguca

SEQ ID NO: 337651 - RNA, 19 nt, Artificial Sequence
  Description of Artificial Sequence: Synthetic oligonucleotide
  Sense Strand Starting at position 239 of SEQ ID NO: 318589
uuaacucucuuacggauuu

SEQ ID NO: 337652 - RNA, 19 nt, Artificial Sequence
  Description of Artificial Sequence: Synthetic oligonucleotide
  Antisense Strand to SEQ ID NO: 337651
aaauccguaagagaguuaa

SEQ ID NO: 337653 - RNA, 19 nt, Artificial Sequence
  Description of Artificial Sequence: Synthetic oligonucleotide
  Sense Strand Starting at position 239 of SEQ ID NO: 318664
cccauaaugucacgaguac

SEQ ID NO: 337654 - RNA, 19 nt, Artificial Sequence
  Description of Artificial Sequence: Synthetic oligonucleotide
  Antisense Strand to SEQ ID NO: 337653
guacucgugacauuauggg

SEQ ID NO: 337655 - RNA, 19 nt, Artificial Sequence
  Description of Artificial Sequence: Synthetic oligonucleotide
  Sense Strand Starting at position 239 of SEQ ID NO: 318665
ccauaaugucacgaguaca

SEQ ID NO: 337656 - RNA, 19 nt, Artificial Sequence
  Description of Artificial Sequence: Synthetic oligonucleotide
  Antisense Strand to SEQ ID NO: 337655
uguacucgugacauuaugg

SEQ ID NO: 337657 - RNA, 19 nt, Artificial Sequence
  Description of Artificial Sequence: Synthetic oligonucleotide
  Sense Strand Starting at position 239 of SEQ ID NO: 318668
uaaugucacgaguacaguu

SEQ ID NO: 337658 - RNA, 19 nt, Artificial Sequence
  Description of Artificial Sequence: Synthetic oligonucleotide
  Antisense Strand to SEQ ID NO: 337657
aacuguacucgugacauua

SEQ ID NO: 337659 - RNA, 19 nt, Artificial Sequence
  Description of Artificial Sequence: Synthetic oligonucleotide
  Sense Strand Starting at position 239 of SEQ ID NO: 318769
uggcauugccucuggaagu

SEQ ID NO: 337660 - RNA, 19 nt, Artificial Sequence
  Description of Artificial Sequence: Synthetic oligonucleotide
  Antisense Strand to SEQ ID NO: 337659
acuuccagaggcaaugcca

SEQ ID NO: 337661 - RNA, 19 nt, Artificial Sequence
  Description of Artificial Sequence: Synthetic oligonucleotide
  Sense Strand Starting at position 239 of SEQ ID NO: 318789
ggucgagacaggcaagaau

SEQ ID NO: 337662 - RNA, 19 nt, Artificial Sequence
  Description of Artificial Sequence: Synthetic oligonucleotide
  Antisense Strand to SEQ ID NO: 337661
auucuugccugucucgacc

SEQ ID NO: 337663 - RNA, 19 nt, Artificial Sequence
  Description of Artificial Sequence: Synthetic oligonucleotide
  Sense Strand Starting at position 239 of SEQ ID NO: 318798
aggcaagaaucccuguuaa

SEQ ID NO: 337664 - RNA, 19 nt, Artificial Sequence
  Description of Artificial Sequence: Synthetic oligonucleotide
  Antisense Strand to SEQ ID NO: 337663
uuaacagggauucuugccu

SEQ ID NO: 337665 - RNA, 19 nt, Artificial Sequence
  Description of Artificial Sequence: Synthetic oligonucleotide
  Sense Strand Starting at position 239 of SEQ ID NO: 318809
ccuguuaacagaugaaggu

SEQ ID NO: 337666 - RNA, 19 nt, Artificial Sequence
  Description of Artificial Sequence: Synthetic oligonucleotide
  Antisense Strand to SEQ ID NO: 337665
accuucaucuguuaacagg

SEQ ID NO: 337667 - RNA, 19 nt, Artificial Sequence
  Description of Artificial Sequence: Synthetic oligonucleotide
  Sense Strand Starting at position 239 of SEQ ID NO: 318818
agaugaaggugguagaguu

SEQ ID NO: 337668 - RNA, 19 nt, Artificial Sequence
  Description of Artificial Sequence: Synthetic oligonucleotide
  Antisense Strand to SEQ ID NO: 337667
aacucuaccaccuucaucu

SEQ ID NO: 337669 - RNA, 19 nt, Artificial Sequence
  Description of Artificial Sequence: Synthetic oligonucleotide
  Sense Strand Starting at position 239 of SEQ ID NO: 318825
ggugguagaguuuaauuga

SEQ ID NO: 337670 - RNA, 19 nt, Artificial Sequence
  Description of Artificial Sequence: Synthetic oligonucleotide
  Antisense Strand to SEQ ID NO: 337669
ucaauuaaacucuaccacc

SEQ ID NO: 337671 - RNA, 19 nt, Artificial Sequence
  Description of Artificial Sequence: Synthetic oligonucleotide
  Sense Strand Starting at position 239 of SEQ ID NO: 318832
gaguuuaauugagcgacuc

SEQ ID NO: 337672 - RNA, 19 nt, Artificial Sequence
  Description of Artificial Sequence: Synthetic oligonucleotide
  Antisense Strand to SEQ ID NO: 337671
gagucgcucaauuaaacuc

SEQ ID NO: 337673 - RNA, 19 nt, Artificial Sequence
  Description of Artificial Sequence: Synthetic oligonucleotide
  Sense Strand Starting at position 239 of SEQ ID NO: 318947
aaaugacauuggugcauga

SEQ ID NO: 337674 - RNA, 19 nt, Artificial Sequence
  Description of Artificial Sequence: Synthetic oligonucleotide
  Antisense Strand to SEQ ID NO: 337673
ucaugcaccaaugucauuu

SEQ ID NO: 337675 - RNA, 19 nt, Artificial Sequence
  Description of Artificial Sequence: Synthetic oligonucleotide
  Sense Strand Starting at position 239 of SEQ ID NO: 319097
acugaauugcauuagucga

SEQ ID NO: 337676 - RNA, 19 nt, Artificial Sequence
  Description of Artificial Sequence: Synthetic oligonucleotide
  Antisense Strand to SEQ ID NO: 337675
ucgacuaaugcaauucagu

SEQ ID NO: 337677 - RNA, 19 nt, Artificial Sequence
  Description of Artificial Sequence: Synthetic oligonucleotide
  Sense Strand Starting at position 239 of SEQ ID NO: 319154
auaauuccguuugcaauuu

SEQ ID NO: 337678 - RNA, 19 nt, Artificial Sequence
  Description of Artificial Sequence: Synthetic oligonucleotide
  Antisense Strand to SEQ ID NO: 337677
aaauugcaaacggaauuau

SEQ ID NO: 337679 - RNA, 19 nt, Artificial Sequence
  Description of Artificial Sequence: Synthetic oligonucleotide
  Sense Strand Starting at position 239 of SEQ ID NO: 319180
cuuuacugguguuggcaaa

SEQ ID NO: 337680 - RNA, 19 nt, Artificial Sequence
  Description of Artificial Sequence: Synthetic oligonucleotide
  Antisense Strand to SEQ ID NO: 337679
uuugccaacaccaguaaag

SEQ ID NO: 337681 - RNA, 19 nt, Artificial Sequence
  Description of Artificial Sequence: Synthetic oligonucleotide
  Sense Strand Starting at position 240 of SEQ ID NO: 315332
cuguauacccauuaaaguu

SEQ ID NO: 337682 - RNA, 19 nt, Artificial Sequence
  Description of Artificial Sequence: Synthetic oligonucleotide
  Antisense Strand to SEQ ID NO: 337681
aacuuuaauggguauacag

SEQ ID NO: 337683 - RNA, 19 nt, Artificial Sequence
  Description of Artificial Sequence: Synthetic oligonucleotide
  Sense Strand Starting at position 240 of SEQ ID NO: 315455
uggcguauuccauccuugu

SEQ ID NO: 337684 - RNA, 19 nt, Artificial Sequence
  Description of Artificial Sequence: Synthetic oligonucleotide
  Antisense Strand to SEQ ID NO: 337683
acaaggauggaauacgcca

SEQ ID NO: 337685 - RNA, 19 nt, Artificial Sequence
  Description of Artificial Sequence: Synthetic oligonucleotide
  Sense Strand Starting at position 240 of SEQ ID NO: 315805
ccaacucagggcugaagaa

SEQ ID NO: 337686 - RNA, 19 nt, Artificial Sequence
  Description of Artificial Sequence: Synthetic oligonucleotide
  Antisense Strand to SEQ ID NO: 337685
uucuucagcccugaguugg

SEQ ID NO: 337687 - RNA, 19 nt, Artificial Sequence
  Description of Artificial Sequence: Synthetic oligonucleotide
  Sense Strand Starting at position 240 of SEQ ID NO: 315818
gaagaagccuugcccgauu

SEQ ID NO: 337688 - RNA, 19 nt, Artificial Sequence
  Description of Artificial Sequence: Synthetic oligonucleotide
  Antisense Strand to SEQ ID NO: 337687
aaucgggcaaggcuucuuc

SEQ ID NO: 337689 - RNA, 19 nt, Artificial Sequence
  Description of Artificial Sequence: Synthetic oligonucleotide
  Sense Strand Starting at position 240 of SEQ ID NO: 315830
cccgauuuguuccugucca

SEQ ID NO: 337690 - RNA, 19 nt, Artificial Sequence
  Description of Artificial Sequence: Synthetic oligonucleotide
  Antisense Strand to SEQ ID NO: 337689
uggacaggaacaaaucggg

SEQ ID NO: 337691 - RNA, 19 nt, Artificial Sequence
  Description of Artificial Sequence: Synthetic oligonucleotide
  Sense Strand Starting at position 240 of SEQ ID NO: 316027
aagaacauucugugaugau

SEQ ID NO: 337692 - RNA, 19 nt, Artificial Sequence
  Description of Artificial Sequence: Synthetic oligonucleotide
  Antisense Strand to SEQ ID NO: 337691
aucaucacagaauguucuu

SEQ ID NO: 337693 - RNA, 19 nt, Artificial Sequence
  Description of Artificial Sequence: Synthetic oligonucleotide
  Sense Strand Starting at position 240 of SEQ ID NO: 316046
agaggcaugccuuguacau

SEQ ID NO: 337694 - RNA, 19 nt, Artificial Sequence
  Description of Artificial Sequence: Synthetic oligonucleotide
  Antisense Strand to SEQ ID NO: 337693
auguacaaggcaugccucu

SEQ ID NO: 337695 - RNA, 19 nt, Artificial Sequence
  Description of Artificial Sequence: Synthetic oligonucleotide
  Sense Strand Starting at position 240 of SEQ ID NO: 316193
gggcgaucuugcucacuac

SEQ ID NO: 337696 - RNA, 19 nt, Artificial Sequence
  Description of Artificial Sequence: Synthetic oligonucleotide
  Antisense Strand to SEQ ID NO: 337695
guagugagcaagaucgccc

SEQ ID NO: 337697 - RNA, 19 nt, Artificial Sequence
  Description of Artificial Sequence: Synthetic oligonucleotide
  Sense Strand Starting at position 240 of SEQ ID NO: 316194
ggcgaucuugcucacuaca

SEQ ID NO: 337698 - RNA, 19 nt, Artificial Sequence
  Description of Artificial Sequence: Synthetic oligonucleotide
  Antisense Strand to SEQ ID NO: 337697
uguagugagcaagaucgcc

SEQ ID NO: 337699 - RNA, 19 nt, Artificial Sequence
  Description of Artificial Sequence: Synthetic oligonucleotide
  Sense Strand Starting at position 240 of SEQ ID NO: 316568
gcucaucugucaccacuuu

SEQ ID NO: 337700 - RNA, 19 nt, Artificial Sequence
  Description of Artificial Sequence: Synthetic oligonucleotide
  Antisense Strand to SEQ ID NO: 337699
aaaguggugacagaugagc

SEQ ID NO: 337701 - RNA, 19 nt, Artificial Sequence
  Description of Artificial Sequence: Synthetic oligonucleotide
  Sense Strand Starting at position 240 of SEQ ID NO: 316660
gcccuucucugauccagga

SEQ ID NO: 337702 - RNA, 19 nt, Artificial Sequence
  Description of Artificial Sequence: Synthetic oligonucleotide
  Antisense Strand to SEQ ID NO: 337701
uccuggaucagagaagggc

SEQ ID NO: 337703 - RNA, 19 nt, Artificial Sequence
  Description of Artificial Sequence: Synthetic oligonucleotide
  Sense Strand Starting at position 240 of SEQ ID NO: 316664
uucucugauccaggacgaa

SEQ ID NO: 337704 - RNA, 19 nt, Artificial Sequence
  Description of Artificial Sequence: Synthetic oligonucleotide
  Antisense Strand to SEQ ID NO: 337703
uucguccuggaucagagaa

SEQ ID NO: 337705 - RNA, 19 nt, Artificial Sequence
  Description of Artificial Sequence: Synthetic oligonucleotide
  Sense Strand Starting at position 240 of SEQ ID NO: 316667
ucugauccaggacgaaauu

SEQ ID NO: 337706 - RNA, 19 nt, Artificial Sequence
  Description of Artificial Sequence: Synthetic oligonucleotide
  Antisense Strand to SEQ ID NO: 337705
aauuucguccuggaucaga

SEQ ID NO: 337707 - RNA, 19 nt, Artificial Sequence
  Description of Artificial Sequence: Synthetic oligonucleotide
  Sense Strand Starting at position 240 of SEQ ID NO: 316731
aggaaagucuucuuagacc

SEQ ID NO: 337708 - RNA, 19 nt, Artificial Sequence
  Description of Artificial Sequence: Synthetic oligonucleotide
  Antisense Strand to SEQ ID NO: 337707
ggucuaagaagacuuuccu

SEQ ID NO: 337709 - RNA, 19 nt, Artificial Sequence
  Description of Artificial Sequence: Synthetic oligonucleotide
  Sense Strand Starting at position 240 of SEQ ID NO: 317074
ggaggauucugcuugccuc

SEQ ID NO: 337710 - RNA, 19 nt, Artificial Sequence
  Description of Artificial Sequence: Synthetic oligonucleotide
  Antisense Strand to SEQ ID NO: 337709
gaggcaagcagaauccucc

SEQ ID NO: 337711 - RNA, 19 nt, Artificial Sequence
  Description of Artificial Sequence: Synthetic oligonucleotide
  Sense Strand Starting at position 240 of SEQ ID NO: 317075
gaggauucugcuugccuca

SEQ ID NO: 337712 - RNA, 19 nt, Artificial Sequence
  Description of Artificial Sequence: Synthetic oligonucleotide
  Antisense Strand to SEQ ID NO: 337711
ugaggcaagcagaauccuc

SEQ ID NO: 337713 - RNA, 19 nt, Artificial Sequence
  Description of Artificial Sequence: Synthetic oligonucleotide
  Sense Strand Starting at position 240 of SEQ ID NO: 317143
ccugcucuccaggagcaaa

SEQ ID NO: 337714 - RNA, 19 nt, Artificial Sequence
  Description of Artificial Sequence: Synthetic oligonucleotide
  Antisense Strand to SEQ ID NO: 337713
uuugcuccuggagagcagg

SEQ ID NO: 337715 - RNA, 19 nt, Artificial Sequence
  Description of Artificial Sequence: Synthetic oligonucleotide
  Sense Strand Starting at position 240 of SEQ ID NO: 317385
uuucgaaagcuuuggcaaa

SEQ ID NO: 337716 - RNA, 19 nt, Artificial Sequence
  Description of Artificial Sequence: Synthetic oligonucleotide
  Antisense Strand to SEQ ID NO: 337715
uuugccaaagcuuucgaaa

SEQ ID NO: 337717 - RNA, 19 nt, Artificial Sequence
  Description of Artificial Sequence: Synthetic oligonucleotide
  Sense Strand Starting at position 240 of SEQ ID NO: 317481
cccauaucagcuugcuuga

SEQ ID NO: 337718 - RNA, 19 nt, Artificial Sequence
  Description of Artificial Sequence: Synthetic oligonucleotide
  Antisense Strand to SEQ ID NO: 337717
ucaagcaagcugauauggg

SEQ ID NO: 337719 - RNA, 19 nt, Artificial Sequence
  Description of Artificial Sequence: Synthetic oligonucleotide
  Sense Strand Starting at position 240 of SEQ ID NO: 317488
cagcuugcuugagcuuaga

SEQ ID NO: 337720 - RNA, 19 nt, Artificial Sequence
  Description of Artificial Sequence: Synthetic oligonucleotide
  Antisense Strand to SEQ ID NO: 337719
ucuaagcucaagcaagcug

SEQ ID NO: 337721 - RNA, 19 nt, Artificial Sequence
  Description of Artificial Sequence: Synthetic oligonucleotide
  Sense Strand Starting at position 240 of SEQ ID NO: 317522
cugugagcccguuucucuu

SEQ ID NO: 337722 - RNA, 19 nt, Artificial Sequence
  Description of Artificial Sequence: Synthetic oligonucleotide
  Antisense Strand to SEQ ID NO: 337721
aagagaaacgggcucacag

SEQ ID NO: 337723 - RNA, 19 nt, Artificial Sequence
  Description of Artificial Sequence: Synthetic oligonucleotide
  Sense Strand Starting at position 240 of SEQ ID NO: 317532
guuucucuucucuguguaa

SEQ ID NO: 337724 - RNA, 19 nt, Artificial Sequence
  Description of Artificial Sequence: Synthetic oligonucleotide
  Antisense Strand to SEQ ID NO: 337723
uuacacagagaagagaaac

SEQ ID NO: 337725 - RNA, 19 nt, Artificial Sequence
  Description of Artificial Sequence: Synthetic oligonucleotide
  Sense Strand Starting at position 240 of SEQ ID NO: 317533
uuucucuucucuguguaau

SEQ ID NO: 337726 - RNA, 19 nt, Artificial Sequence
  Description of Artificial Sequence: Synthetic oligonucleotide
  Antisense Strand to SEQ ID NO: 337725
auuacacagagaagagaaa

SEQ ID NO: 337727 - RNA, 19 nt, Artificial Sequence
  Description of Artificial Sequence: Synthetic oligonucleotide
  Sense Strand Starting at position 240 of SEQ ID NO: 317534
uucucuucucuguguaaug

SEQ ID NO: 337728 - RNA, 19 nt, Artificial Sequence
  Description of Artificial Sequence: Synthetic oligonucleotide
  Antisense Strand to SEQ ID NO: 337727
cauuacacagagaagagaa

SEQ ID NO: 337729 - RNA, 19 nt, Artificial Sequence
  Description of Artificial Sequence: Synthetic oligonucleotide
  Sense Strand Starting at position 240 of SEQ ID NO: 317535
ucucuucucuguguaauga

SEQ ID NO: 337730 - RNA, 19 nt, Artificial Sequence
  Description of Artificial Sequence: Synthetic oligonucleotide
  Antisense Strand to SEQ ID NO: 337729
ucauuacacagagaagaga

SEQ ID NO: 337731 - RNA, 19 nt, Artificial Sequence
  Description of Artificial Sequence: Synthetic oligonucleotide
  Sense Strand Starting at position 240 of SEQ ID NO: 317543
cuguguaaugacgauaaug

SEQ ID NO: 337732 - RNA, 19 nt, Artificial Sequence
  Description of Artificial Sequence: Synthetic oligonucleotide
  Antisense Strand to SEQ ID NO: 337731
cauuaucgucauuacacag

SEQ ID NO: 337733 - RNA, 19 nt, Artificial Sequence
  Description of Artificial Sequence: Synthetic oligonucleotide
  Sense Strand Starting at position 240 of SEQ ID NO: 317545
guguaaugacgauaaugau

SEQ ID NO: 337734 - RNA, 19 nt, Artificial Sequence
  Description of Artificial Sequence: Synthetic oligonucleotide
  Antisense Strand to SEQ ID NO: 337733
aucauuaucgucauuacac

SEQ ID NO: 337735 - RNA, 19 nt, Artificial Sequence
  Description of Artificial Sequence: Synthetic oligonucleotide
  Sense Strand Starting at position 240 of SEQ ID NO: 317551
ugacgauaaugauucuugu

SEQ ID NO: 337736 - RNA, 19 nt, Artificial Sequence
  Description of Artificial Sequence: Synthetic oligonucleotide
  Antisense Strand to SEQ ID NO: 337735
acaagaaucauuaucguca

SEQ ID NO: 337737 - RNA, 19 nt, Artificial Sequence
  Description of Artificial Sequence: Synthetic oligonucleotide
  Sense Strand Starting at position 240 of SEQ ID NO: 317577
gguaguggugaggauuagu

SEQ ID NO: 337738 - RNA, 19 nt, Artificial Sequence
  Description of Artificial Sequence: Synthetic oligonucleotide
  Antisense Strand to SEQ ID NO: 337737
acuaauccucaccacuacc

SEQ ID NO: 337739 - RNA, 19 nt, Artificial Sequence
  Description of Artificial Sequence: Synthetic oligonucleotide
  Sense Strand Starting at position 240 of SEQ ID NO: 317582
uggugaggauuagugacaa

SEQ ID NO: 337740 - RNA, 19 nt, Artificial Sequence
  Description of Artificial Sequence: Synthetic oligonucleotide
  Antisense Strand to SEQ ID NO: 337739
uugucacuaauccucacca

SEQ ID NO: 337741 - RNA, 19 nt, Artificial Sequence
  Description of Artificial Sequence: Synthetic oligonucleotide
  Sense Strand Starting at position 240 of SEQ ID NO: 318410
gaucgaagugauuauuagu

SEQ ID NO: 337742 - RNA, 19 nt, Artificial Sequence
  Description of Artificial Sequence: Synthetic oligonucleotide
  Antisense Strand to SEQ ID NO: 337741
acuaauaaucacuucgauc

SEQ ID NO: 337743 - RNA, 19 nt, Artificial Sequence
  Description of Artificial Sequence: Synthetic oligonucleotide
  Sense Strand Starting at position 240 of SEQ ID NO: 318530
gcugaaauguggagugguu

SEQ ID NO: 337744 - RNA, 19 nt, Artificial Sequence
  Description of Artificial Sequence: Synthetic oligonucleotide
  Antisense Strand to SEQ ID NO: 337743
aaccacuccacauuucagc

SEQ ID NO: 337745 - RNA, 19 nt, Artificial Sequence
  Description of Artificial Sequence: Synthetic oligonucleotide
  Sense Strand Starting at position 240 of SEQ ID NO: 318532
ugaaauguggagugguuaa

SEQ ID NO: 337746 - RNA, 19 nt, Artificial Sequence
  Description of Artificial Sequence: Synthetic oligonucleotide
  Antisense Strand to SEQ ID NO: 337745
uuaaccacuccacauuuca

SEQ ID NO: 337747 - RNA, 19 nt, Artificial Sequence
  Description of Artificial Sequence: Synthetic oligonucleotide
  Sense Strand Starting at position 240 of SEQ ID NO: 318544
ugguuaagaguguaagauc

SEQ ID NO: 337748 - RNA, 19 nt, Artificial Sequence
  Description of Artificial Sequence: Synthetic oligonucleotide
  Antisense Strand to SEQ ID NO: 337747
gaucuuacacucuuaacca

SEQ ID NO: 337749 - RNA, 19 nt, Artificial Sequence
  Description of Artificial Sequence: Synthetic oligonucleotide
  Sense Strand Starting at position 240 of SEQ ID NO: 318553
guguaagaucucugaccca

SEQ ID NO: 337750 - RNA, 19 nt, Artificial Sequence
  Description of Artificial Sequence: Synthetic oligonucleotide
  Antisense Strand to SEQ ID NO: 337749
ugggucagagaucuuacac

SEQ ID NO: 337751 - RNA, 19 nt, Artificial Sequence
  Description of Artificial Sequence: Synthetic oligonucleotide
  Sense Strand Starting at position 240 of SEQ ID NO: 318605
augugugucauacagagca

SEQ ID NO: 337752 - RNA, 19 nt, Artificial Sequence
  Description of Artificial Sequence: Synthetic oligonucleotide
  Antisense Strand to SEQ ID NO: 337751
ugcucuguaugacacacau

SEQ ID NO: 337753 - RNA, 19 nt, Artificial Sequence
  Description of Artificial Sequence: Synthetic oligonucleotide
  Sense Strand Starting at position 240 of SEQ ID NO: 318850
cuuguaugugaauauccau

SEQ ID NO: 337754 - RNA, 19 nt, Artificial Sequence
  Description of Artificial Sequence: Synthetic oligonucleotide
  Antisense Strand to SEQ ID NO: 337753
auggauauucacauacaag

SEQ ID NO: 337755 - RNA, 19 nt, Artificial Sequence
  Description of Artificial Sequence: Synthetic oligonucleotide
  Sense Strand Starting at position 240 of SEQ ID NO: 318864
uccauaggauuauucguaa

SEQ ID NO: 337756 - RNA, 19 nt, Artificial Sequence
  Description of Artificial Sequence: Synthetic oligonucleotide
  Antisense Strand to SEQ ID NO: 337755
uuacgaauaauccuaugga

SEQ ID NO: 337757 - RNA, 19 nt, Artificial Sequence
  Description of Artificial Sequence: Synthetic oligonucleotide
  Sense Strand Starting at position 240 of SEQ ID NO: 318867
auaggauuauucguaauag

SEQ ID NO: 337758 - RNA, 19 nt, Artificial Sequence
  Description of Artificial Sequence: Synthetic oligonucleotide
  Antisense Strand to SEQ ID NO: 337757
cuauuacgaauaauccuau

SEQ ID NO: 337759 - RNA, 19 nt, Artificial Sequence
  Description of Artificial Sequence: Synthetic oligonucleotide
  Sense Strand Starting at position 240 of SEQ ID NO: 318892
gguagaaacacaugaaugu

SEQ ID NO: 337760 - RNA, 19 nt, Artificial Sequence
  Description of Artificial Sequence: Synthetic oligonucleotide
  Antisense Strand to SEQ ID NO: 337759
acauucauguguuucuacc

SEQ ID NO: 337761 - RNA, 19 nt, Artificial Sequence
  Description of Artificial Sequence: Synthetic oligonucleotide
  Sense Strand Starting at position 241 of SEQ ID NO: 315322
agacaucagucauugcuaa

SEQ ID NO: 337762 - RNA, 19 nt, Artificial Sequence
  Description of Artificial Sequence: Synthetic oligonucleotide
  Antisense Strand to SEQ ID NO: 337761
uuagcaaugacugaugucu

SEQ ID NO: 337763 - RNA, 19 nt, Artificial Sequence
  Description of Artificial Sequence: Synthetic oligonucleotide
  Sense Strand Starting at position 241 of SEQ ID NO: 315333
auugcuaauuaguuggaca

SEQ ID NO: 337764 - RNA, 19 nt, Artificial Sequence
  Description of Artificial Sequence: Synthetic oligonucleotide
  Antisense Strand to SEQ ID NO: 337763
uguccaacuaauuagcaau

SEQ ID NO: 337765 - RNA, 19 nt, Artificial Sequence
  Description of Artificial Sequence: Synthetic oligonucleotide
  Sense Strand Starting at position 241 of SEQ ID NO: 315380
ggcgcugguagguaucaga

SEQ ID NO: 337766 - RNA, 19 nt, Artificial Sequence
  Description of Artificial Sequence: Synthetic oligonucleotide
  Antisense Strand to SEQ ID NO: 337765
ucugauaccuaccagcgcc

SEQ ID NO: 337767 - RNA, 19 nt, Artificial Sequence
  Description of Artificial Sequence: Synthetic oligonucleotide
  Sense Strand Starting at position 241 of SEQ ID NO: 315497
ggagguccucaagacugua

SEQ ID NO: 337768 - RNA, 19 nt, Artificial Sequence
  Description of Artificial Sequence: Synthetic oligonucleotide
  Antisense Strand to SEQ ID NO: 337767
uacagucuugaggaccucc

SEQ ID NO: 337769 - RNA, 19 nt, Artificial Sequence
  Description of Artificial Sequence: Synthetic oligonucleotide
  Sense Strand Starting at position 241 of SEQ ID NO: 315773
gcccuagucuuacucagaa

SEQ ID NO: 337770 - RNA, 19 nt, Artificial Sequence
  Description of Artificial Sequence: Synthetic oligonucleotide
  Antisense Strand to SEQ ID NO: 337769
uucugaguaagacuagggc

SEQ ID NO: 337771 - RNA, 19 nt, Artificial Sequence
  Description of Artificial Sequence: Synthetic oligonucleotide
  Sense Strand Starting at position 241 of SEQ ID NO: 316343
ucuccucaccuguaaaguu

SEQ ID NO: 337772 - RNA, 19 nt, Artificial Sequence
  Description of Artificial Sequence: Synthetic oligonucleotide
  Antisense Strand to SEQ ID NO: 337771
aacuuuacaggugaggaga

SEQ ID NO: 337773 - RNA, 19 nt, Artificial Sequence
  Description of Artificial Sequence: Synthetic oligonucleotide
  Sense Strand Starting at position 241 of SEQ ID NO: 316350
accuguaaaguuggaugaa

SEQ ID NO: 337774 - RNA, 19 nt, Artificial Sequence
  Description of Artificial Sequence: Synthetic oligonucleotide
  Antisense Strand to SEQ ID NO: 337773
uucauccaacuuuacaggu

SEQ ID NO: 337775 - RNA, 19 nt, Artificial Sequence
  Description of Artificial Sequence: Synthetic oligonucleotide
  Sense Strand Starting at position 241 of SEQ ID NO: 316351
ccuguaaaguuggaugaag

SEQ ID NO: 337776 - RNA, 19 nt, Artificial Sequence
  Description of Artificial Sequence: Synthetic oligonucleotide
  Antisense Strand to SEQ ID NO: 337775
cuucauccaacuuuacagg

SEQ ID NO: 337777 - RNA, 19 nt, Artificial Sequence
  Description of Artificial Sequence: Synthetic oligonucleotide
  Sense Strand Starting at position 241 of SEQ ID NO: 316383
aagucaauguaagguauuu

SEQ ID NO: 337778 - RNA, 19 nt, Artificial Sequence
  Description of Artificial Sequence: Synthetic oligonucleotide
  Antisense Strand to SEQ ID NO: 337777
aaauaccuuacauugacuu

SEQ ID NO: 337779 - RNA, 19 nt, Artificial Sequence
  Description of Artificial Sequence: Synthetic oligonucleotide
  Sense Strand Starting at position 241 of SEQ ID NO: 316483
uuggcucccucauggauuu

SEQ ID NO: 337780 - RNA, 19 nt, Artificial Sequence
  Description of Artificial Sequence: Synthetic oligonucleotide
  Antisense Strand to SEQ ID NO: 337779
aaauccaugagggagccaa

SEQ ID NO: 337781 - RNA, 19 nt, Artificial Sequence
  Description of Artificial Sequence: Synthetic oligonucleotide
  Sense Strand Starting at position 241 of SEQ ID NO: 316774
cuguauacccauuaaaguu

SEQ ID NO: 337782 - RNA, 19 nt, Artificial Sequence
  Description of Artificial Sequence: Synthetic oligonucleotide
  Antisense Strand to SEQ ID NO: 337781
aacuuuaauggguauacag

SEQ ID NO: 337783 - RNA, 19 nt, Artificial Sequence
  Description of Artificial Sequence: Synthetic oligonucleotide
  Sense Strand Starting at position 241 of SEQ ID NO: 316897
uggcguauuccauccuugu

SEQ ID NO: 337784 - RNA, 19 nt, Artificial Sequence
  Description of Artificial Sequence: Synthetic oligonucleotide
  Antisense Strand to SEQ ID NO: 337783
acaaggauggaauacgcca

SEQ ID NO: 337785 - RNA, 19 nt, Artificial Sequence
  Description of Artificial Sequence: Synthetic oligonucleotide
  Sense Strand Starting at position 241 of SEQ ID NO: 317247
ccaacucagggcugaagaa

SEQ ID NO: 337786 - RNA, 19 nt, Artificial Sequence
  Description of Artificial Sequence: Synthetic oligonucleotide
  Antisense Strand to SEQ ID NO: 337785
uucuucagcccugaguugg

SEQ ID NO: 337787 - RNA, 19 nt, Artificial Sequence
  Description of Artificial Sequence: Synthetic oligonucleotide
  Sense Strand Starting at position 241 of SEQ ID NO: 317260
gaagaagccuugcccgauu

SEQ ID NO: 337788 - RNA, 19 nt, Artificial Sequence
  Description of Artificial Sequence: Synthetic oligonucleotide
  Antisense Strand to SEQ ID NO: 337787
aaucgggcaaggcuucuuc

SEQ ID NO: 337789 - RNA, 19 nt, Artificial Sequence
  Description of Artificial Sequence: Synthetic oligonucleotide
  Sense Strand Starting at position 241 of SEQ ID NO: 317272
cccgauuuguuccugucca

SEQ ID NO: 337790 - RNA, 19 nt, Artificial Sequence
  Description of Artificial Sequence: Synthetic oligonucleotide
  Antisense Strand to SEQ ID NO: 337789
uggacaggaacaaaucggg

SEQ ID NO: 337791 - RNA, 19 nt, Artificial Sequence
  Description of Artificial Sequence: Synthetic oligonucleotide
  Sense Strand Starting at position 241 of SEQ ID NO: 317469
aagaacauucugugaugau

SEQ ID NO: 337792 - RNA, 19 nt, Artificial Sequence
  Description of Artificial Sequence: Synthetic oligonucleotide
  Antisense Strand to SEQ ID NO: 337791
aucaucacagaauguucuu

SEQ ID NO: 337793 - RNA, 19 nt, Artificial Sequence
  Description of Artificial Sequence: Synthetic oligonucleotide
  Sense Strand Starting at position 241 of SEQ ID NO: 317488
agaggcaugccuuguacau

SEQ ID NO: 337794 - RNA, 19 nt, Artificial Sequence
  Description of Artificial Sequence: Synthetic oligonucleotide
  Antisense Strand to SEQ ID NO: 337793
auguacaaggcaugccucu

SEQ ID NO: 337795 - RNA, 19 nt, Artificial Sequence
  Description of Artificial Sequence: Synthetic oligonucleotide
  Sense Strand Starting at position 241 of SEQ ID NO: 317635
gggcgaucuugcucacuac

SEQ ID NO: 337796 - RNA, 19 nt, Artificial Sequence
  Description of Artificial Sequence: Synthetic oligonucleotide
  Antisense Strand to SEQ ID NO: 337795
guagugagcaagaucgccc

SEQ ID NO: 337797 - RNA, 19 nt, Artificial Sequence
  Description of Artificial Sequence: Synthetic oligonucleotide
  Sense Strand Starting at position 241 of SEQ ID NO: 317636
ggcgaucuugcucacuaca

SEQ ID NO: 337798 - RNA, 19 nt, Artificial Sequence
  Description of Artificial Sequence: Synthetic oligonucleotide
  Antisense Strand to SEQ ID NO: 337797
uguagugagcaagaucgcc

SEQ ID NO: 337799 - RNA, 19 nt, Artificial Sequence
  Description of Artificial Sequence: Synthetic oligonucleotide
  Sense Strand Starting at position 241 of SEQ ID NO: 318010
gcucaucugucaccacuuu

SEQ ID NO: 337800 - RNA, 19 nt, Artificial Sequence
  Description of Artificial Sequence: Synthetic oligonucleotide
  Antisense Strand to SEQ ID NO: 337799
aaaguggugacagaugagc

SEQ ID NO: 337801 - RNA, 19 nt, Artificial Sequence
  Description of Artificial Sequence: Synthetic oligonucleotide
  Sense Strand Starting at position 241 of SEQ ID NO: 318102
gcccuucucugauccagga

SEQ ID NO: 337802 - RNA, 19 nt, Artificial Sequence
  Description of Artificial Sequence: Synthetic oligonucleotide
  Antisense Strand to SEQ ID NO: 337801
uccuggaucagagaagggc

SEQ ID NO: 337803 - RNA, 19 nt, Artificial Sequence
  Description of Artificial Sequence: Synthetic oligonucleotide
  Sense Strand Starting at position 241 of SEQ ID NO: 318106
uucucugauccaggacgaa

SEQ ID NO: 337804 - RNA, 19 nt, Artificial Sequence
  Description of Artificial Sequence: Synthetic oligonucleotide
  Antisense Strand to SEQ ID NO: 337803
uucguccuggaucagagaa

SEQ ID NO: 337805 - RNA, 19 nt, Artificial Sequence
  Description of Artificial Sequence: Synthetic oligonucleotide
  Sense Strand Starting at position 241 of SEQ ID NO: 318109
ucugauccaggacgaaauu

SEQ ID NO: 337806 - RNA, 19 nt, Artificial Sequence
  Description of Artificial Sequence: Synthetic oligonucleotide
  Antisense Strand to SEQ ID NO: 337805
aauuucguccuggaucaga

SEQ ID NO: 337807 - RNA, 19 nt, Artificial Sequence
  Description of Artificial Sequence: Synthetic oligonucleotide
  Sense Strand Starting at position 241 of SEQ ID NO: 318173
aggaaagucuucuuagacc

SEQ ID NO: 337808 - RNA, 19 nt, Artificial Sequence
  Description of Artificial Sequence: Synthetic oligonucleotide
  Antisense Strand to SEQ ID NO: 337807
ggucuaagaagacuuuccu

SEQ ID NO: 337809 - RNA, 19 nt, Artificial Sequence
  Description of Artificial Sequence: Synthetic oligonucleotide
  Sense Strand Starting at position 241 of SEQ ID NO: 318516
ggaggauucugcuugccuc

SEQ ID NO: 337810 - RNA, 19 nt, Artificial Sequence
  Description of Artificial Sequence: Synthetic oligonucleotide
  Antisense Strand to SEQ ID NO: 337809
gaggcaagcagaauccucc

SEQ ID NO: 337811 - RNA, 19 nt, Artificial Sequence
  Description of Artificial Sequence: Synthetic oligonucleotide
  Sense Strand Starting at position 241 of SEQ ID NO: 318517
gaggauucugcuugccuca

SEQ ID NO: 337812 - RNA, 19 nt, Artificial Sequence
  Description of Artificial Sequence: Synthetic oligonucleotide
  Antisense Strand to SEQ ID NO: 337811
ugaggcaagcagaauccuc

SEQ ID NO: 337813 - RNA, 19 nt, Artificial Sequence
  Description of Artificial Sequence: Synthetic oligonucleotide
  Sense Strand Starting at position 241 of SEQ ID NO: 318585
ccugcucuccaggagcaaa

SEQ ID NO: 337814 - RNA, 19 nt, Artificial Sequence
  Description of Artificial Sequence: Synthetic oligonucleotide
  Antisense Strand to SEQ ID NO: 337813
uuugcuccuggagagcagg

SEQ ID NO: 337815 - RNA, 19 nt, Artificial Sequence
  Description of Artificial Sequence: Synthetic oligonucleotide
  Sense Strand Starting at position 241 of SEQ ID NO: 318827
uuucgaaagcuuuggcaaa

SEQ ID NO: 337816 - RNA, 19 nt, Artificial Sequence
  Description of Artificial Sequence: Synthetic oligonucleotide
  Antisense Strand to SEQ ID NO: 337815
uuugccaaagcuuucgaaa

SEQ ID NO: 337817 - RNA, 19 nt, Artificial Sequence
  Description of Artificial Sequence: Synthetic oligonucleotide
  Sense Strand Starting at position 241 of SEQ ID NO: 318923
cccauaucagcuugcuuga

SEQ ID NO: 337818 - RNA, 19 nt, Artificial Sequence
  Description of Artificial Sequence: Synthetic oligonucleotide
  Antisense Strand to SEQ ID NO: 337817
ucaagcaagcugauauggg

SEQ ID NO: 337819 - RNA, 19 nt, Artificial Sequence
  Description of Artificial Sequence: Synthetic oligonucleotide
  Sense Strand Starting at position 241 of SEQ ID NO: 318930
cagcuugcuugagcuuaga

SEQ ID NO: 337820 - RNA, 19 nt, Artificial Sequence
  Description of Artificial Sequence: Synthetic oligonucleotide
  Antisense Strand to SEQ ID NO: 337819
ucuaagcucaagcaagcug

SEQ ID NO: 337821 - RNA, 19 nt, Artificial Sequence
  Description of Artificial Sequence: Synthetic oligonucleotide
  Sense Strand Starting at position 241 of SEQ ID NO: 318964
cugugagcccguuucucuu

SEQ ID NO: 337822 - RNA, 19 nt, Artificial Sequence
  Description of Artificial Sequence: Synthetic oligonucleotide
  Antisense Strand to SEQ ID NO: 337821
aagagaaacgggcucacag

SEQ ID NO: 337823 - RNA, 19 nt, Artificial Sequence
  Description of Artificial Sequence: Synthetic oligonucleotide
  Sense Strand Starting at position 241 of SEQ ID NO: 318974
guuucucuucucuguguaa

SEQ ID NO: 337824 - RNA, 19 nt, Artificial Sequence
  Description of Artificial Sequence: Synthetic oligonucleotide
  Antisense Strand to SEQ ID NO: 337823
uuacacagagaagagaaac

SEQ ID NO: 337825 - RNA, 19 nt, Artificial Sequence
  Description of Artificial Sequence: Synthetic oligonucleotide
  Sense Strand Starting at position 241 of SEQ ID NO: 318975
uuucucuucucuguguaau

SEQ ID NO: 337826 - RNA, 19 nt, Artificial Sequence
  Description of Artificial Sequence: Synthetic oligonucleotide
  Antisense Strand to SEQ ID NO: 337825
auuacacagagaagagaaa

SEQ ID NO: 337827 - RNA, 19 nt, Artificial Sequence
  Description of Artificial Sequence: Synthetic oligonucleotide
  Sense Strand Starting at position 241 of SEQ ID NO: 318976
uucucuucucuguguaaug

SEQ ID NO: 337828 - RNA, 19 nt, Artificial Sequence
  Description of Artificial Sequence: Synthetic oligonucleotide
  Antisense Strand to SEQ ID NO: 337827
cauuacacagagaagagaa

SEQ ID NO: 337829 - RNA, 19 nt, Artificial Sequence
  Description of Artificial Sequence: Synthetic oligonucleotide
  Sense Strand Starting at position 241 of SEQ ID NO: 318977
ucucuucucuguguaauga

SEQ ID NO: 337830 - RNA, 19 nt, Artificial Sequence
  Description of Artificial Sequence: Synthetic oligonucleotide
  Antisense Strand to SEQ ID NO: 337829
ucauuacacagagaagaga

SEQ ID NO: 337831 - RNA, 19 nt, Artificial Sequence
  Description of Artificial Sequence: Synthetic oligonucleotide
  Sense Strand Starting at position 241 of SEQ ID NO: 318985
cuguguaaugacgauaaug

SEQ ID NO: 337832 - RNA, 19 nt, Artificial Sequence
  Description of Artificial Sequence: Synthetic oligonucleotide
  Antisense Strand to SEQ ID NO: 337831
cauuaucgucauuacacag

SEQ ID NO: 337833 - RNA, 19 nt, Artificial Sequence
  Description of Artificial Sequence: Synthetic oligonucleotide
  Sense Strand Starting at position 241 of SEQ ID NO: 318987
guguaaugacgauaaugau

SEQ ID NO: 337834 - RNA, 19 nt, Artificial Sequence
  Description of Artificial Sequence: Synthetic oligonucleotide
  Antisense Strand to SEQ ID NO: 337833
aucauuaucgucauuacac

SEQ ID NO: 337835 - RNA, 19 nt, Artificial Sequence
  Description of Artificial Sequence: Synthetic oligonucleotide
  Sense Strand Starting at position 241 of SEQ ID NO: 318993
ugacgauaaugauucuugu

SEQ ID NO: 337836 - RNA, 19 nt, Artificial Sequence
  Description of Artificial Sequence: Synthetic oligonucleotide
  Antisense Strand to SEQ ID NO: 337835
acaagaaucauuaucguca

SEQ ID NO: 337837 - RNA, 19 nt, Artificial Sequence
  Description of Artificial Sequence: Synthetic oligonucleotide
  Sense Strand Starting at position 241 of SEQ ID NO: 319019
gguaguggugaggauuagu

SEQ ID NO: 337838 - RNA, 19 nt, Artificial Sequence
  Description of Artificial Sequence: Synthetic oligonucleotide
  Antisense Strand to SEQ ID NO: 337837
acuaauccucaccacuacc

SEQ ID NO: 337839 - RNA, 19 nt, Artificial Sequence
  Description of Artificial Sequence: Synthetic oligonucleotide
  Sense Strand Starting at position 241 of SEQ ID NO: 319024
uggugaggauuagugacaa

SEQ ID NO: 337840 - RNA, 19 nt, Artificial Sequence
  Description of Artificial Sequence: Synthetic oligonucleotide
  Antisense Strand to SEQ ID NO: 337839
uugucacuaauccucacca

SEQ ID NO: 337841 - RNA, 19 nt, Artificial Sequence
  Description of Artificial Sequence: Synthetic oligonucleotide
  Sense Strand Starting at position 242 of SEQ ID NO: 315253
ggagguccucaagacugua

SEQ ID NO: 337842 - RNA, 19 nt, Artificial Sequence
  Description of Artificial Sequence: Synthetic oligonucleotide
  Antisense Strand to SEQ ID NO: 337841
uacagucuugaggaccucc

SEQ ID NO: 337843 - RNA, 19 nt, Artificial Sequence
  Description of Artificial Sequence: Synthetic oligonucleotide
  Sense Strand Starting at position 242 of SEQ ID NO: 315529
gcccuagucuuacucagaa

SEQ ID NO: 337844 - RNA, 19 nt, Artificial Sequence
  Description of Artificial Sequence: Synthetic oligonucleotide
  Antisense Strand to SEQ ID NO: 337843
uucugaguaagacuagggc

SEQ ID NO: 337845 - RNA, 19 nt, Artificial Sequence
  Description of Artificial Sequence: Synthetic oligonucleotide
  Sense Strand Starting at position 242 of SEQ ID NO: 316031
aggaguaaguagcaaagua

SEQ ID NO: 337846 - RNA, 19 nt, Artificial Sequence
  Description of Artificial Sequence: Synthetic oligonucleotide
  Antisense Strand to SEQ ID NO: 337845
uacuuugcuacuuacuccu

SEQ ID NO: 337847 - RNA, 19 nt, Artificial Sequence
  Description of Artificial Sequence: Synthetic oligonucleotide
  Sense Strand Starting at position 242 of SEQ ID NO: 316099
ucuccucaccuguaaaguu

SEQ ID NO: 337848 - RNA, 19 nt, Artificial Sequence
  Description of Artificial Sequence: Synthetic oligonucleotide
  Antisense Strand to SEQ ID NO: 337847
aacuuuacaggugaggaga

SEQ ID NO: 337849 - RNA, 19 nt, Artificial Sequence
  Description of Artificial Sequence: Synthetic oligonucleotide
  Sense Strand Starting at position 242 of SEQ ID NO: 316106
accuguaaaguuggaugaa

SEQ ID NO: 337850 - RNA, 19 nt, Artificial Sequence
  Description of Artificial Sequence: Synthetic oligonucleotide
  Antisense Strand to SEQ ID NO: 337849
uucauccaacuuuacaggu

SEQ ID NO: 337851 - RNA, 19 nt, Artificial Sequence
  Description of Artificial Sequence: Synthetic oligonucleotide
  Sense Strand Starting at position 242 of SEQ ID NO: 316107
ccuguaaaguuggaugaag

SEQ ID NO: 337852 - RNA, 19 nt, Artificial Sequence
  Description of Artificial Sequence: Synthetic oligonucleotide
  Antisense Strand to SEQ ID NO: 337851
cuucauccaacuuuacagg

SEQ ID NO: 337853 - RNA, 19 nt, Artificial Sequence
  Description of Artificial Sequence: Synthetic oligonucleotide
  Sense Strand Starting at position 242 of SEQ ID NO: 316139
aagucaauguaagguauuu

SEQ ID NO: 337854 - RNA, 19 nt, Artificial Sequence
  Description of Artificial Sequence: Synthetic oligonucleotide
  Antisense Strand to SEQ ID NO: 337853
aaauaccuuacauugacuu

SEQ ID NO: 337855 - RNA, 19 nt, Artificial Sequence
  Description of Artificial Sequence: Synthetic oligonucleotide
  Sense Strand Starting at position 242 of SEQ ID NO: 316239
uuggcucccucauggauuu

SEQ ID NO: 337856 - RNA, 19 nt, Artificial Sequence
  Description of Artificial Sequence: Synthetic oligonucleotide
  Antisense Strand to SEQ ID NO: 337855
aaauccaugagggagccaa

SEQ ID NO: 337857 - RNA, 19 nt, Artificial Sequence
  Description of Artificial Sequence: Synthetic oligonucleotide
  Sense Strand Starting at position 242 of SEQ ID NO: 316530
cuguauacccauuaaaguu

SEQ ID NO: 337858 - RNA, 19 nt, Artificial Sequence
  Description of Artificial Sequence: Synthetic oligonucleotide
  Antisense Strand to SEQ ID NO: 337857
aacuuuaauggguauacag

SEQ ID NO: 337859 - RNA, 19 nt, Artificial Sequence
  Description of Artificial Sequence: Synthetic oligonucleotide
  Sense Strand Starting at position 242 of SEQ ID NO: 316653
uggcguauuccauccuugu

SEQ ID NO: 337860 - RNA, 19 nt, Artificial Sequence
  Description of Artificial Sequence: Synthetic oligonucleotide
  Antisense Strand to SEQ ID NO: 337859
acaaggauggaauacgcca

SEQ ID NO: 337861 - RNA, 19 nt, Artificial Sequence
  Description of Artificial Sequence: Synthetic oligonucleotide
  Sense Strand Starting at position 242 of SEQ ID NO: 317003
ccaacucagggcugaagaa

SEQ ID NO: 337862 - RNA, 19 nt, Artificial Sequence
  Description of Artificial Sequence: Synthetic oligonucleotide
  Antisense Strand to SEQ ID NO: 337861
uucuucagcccugaguugg

SEQ ID NO: 337863 - RNA, 19 nt, Artificial Sequence
  Description of Artificial Sequence: Synthetic oligonucleotide
  Sense Strand Starting at position 242 of SEQ ID NO: 317016
gaagaagccuugcccgauu

SEQ ID NO: 337864 - RNA, 19 nt, Artificial Sequence
  Description of Artificial Sequence: Synthetic oligonucleotide
  Antisense Strand to SEQ ID NO: 337863
aaucgggcaaggcuucuuc

SEQ ID NO: 337865 - RNA, 19 nt, Artificial Sequence
  Description of Artificial Sequence: Synthetic oligonucleotide
  Sense Strand Starting at position 242 of SEQ ID NO: 317028
cccgauuuguuccugucca

SEQ ID NO: 337866 - RNA, 19 nt, Artificial Sequence
  Description of Artificial Sequence: Synthetic oligonucleotide
  Antisense Strand to SEQ ID NO: 337865
uggacaggaacaaaucggg

SEQ ID NO: 337867 - RNA, 19 nt, Artificial Sequence
  Description of Artificial Sequence: Synthetic oligonucleotide
  Sense Strand Starting at position 242 of SEQ ID NO: 317029
ccgauuuguuccuguccau

SEQ ID NO: 337868 - RNA, 19 nt, Artificial Sequence
  Description of Artificial Sequence: Synthetic oligonucleotide
  Antisense Strand to SEQ ID NO: 337867
auggacaggaacaaaucgg

SEQ ID NO: 337869 - RNA, 19 nt, Artificial Sequence
  Description of Artificial Sequence: Synthetic oligonucleotide
  Sense Strand Starting at position 242 of SEQ ID NO: 317225
aagaacauucugugaugau

SEQ ID NO: 337870 - RNA, 19 nt, Artificial Sequence
  Description of Artificial Sequence: Synthetic oligonucleotide
  Antisense Strand to SEQ ID NO: 337869
aucaucacagaauguucuu

SEQ ID NO: 337871 - RNA, 19 nt, Artificial Sequence
  Description of Artificial Sequence: Synthetic oligonucleotide
  Sense Strand Starting at position 242 of SEQ ID NO: 317228
aacauucugugaugauaga

SEQ ID NO: 337872 - RNA, 19 nt, Artificial Sequence
  Description of Artificial Sequence: Synthetic oligonucleotide
  Antisense Strand to SEQ ID NO: 337871
ucuaucaucacagaauguu

SEQ ID NO: 337873 - RNA, 19 nt, Artificial Sequence
  Description of Artificial Sequence: Synthetic oligonucleotide
  Sense Strand Starting at position 242 of SEQ ID NO: 317244
agaggcaugccuuguacau

SEQ ID NO: 337874 - RNA, 19 nt, Artificial Sequence
  Description of Artificial Sequence: Synthetic oligonucleotide
  Antisense Strand to SEQ ID NO: 337873
auguacaaggcaugccucu

SEQ ID NO: 337875 - RNA, 19 nt, Artificial Sequence
  Description of Artificial Sequence: Synthetic oligonucleotide
  Sense Strand Starting at position 242 of SEQ ID NO: 317391
gggcgaucuugcucacuac

SEQ ID NO: 337876 - RNA, 19 nt, Artificial Sequence
  Description of Artificial Sequence: Synthetic oligonucleotide
  Antisense Strand to SEQ ID NO: 337875
guagugagcaagaucgccc

SEQ ID NO: 337877 - RNA, 19 nt, Artificial Sequence
  Description of Artificial Sequence: Synthetic oligonucleotide
  Sense Strand Starting at position 242 of SEQ ID NO: 317392
ggcgaucuugcucacuaca

SEQ ID NO: 337878 - RNA, 19 nt, Artificial Sequence
  Description of Artificial Sequence: Synthetic oligonucleotide
  Antisense Strand to SEQ ID NO: 337877
uguagugagcaagaucgcc

SEQ ID NO: 337879 - RNA, 19 nt, Artificial Sequence
  Description of Artificial Sequence: Synthetic oligonucleotide
  Sense Strand Starting at position 242 of SEQ ID NO: 317766
gcucaucugucaccacuuu

SEQ ID NO: 337880 - RNA, 19 nt, Artificial Sequence
  Description of Artificial Sequence: Synthetic oligonucleotide
  Antisense Strand to SEQ ID NO: 337879
aaaguggugacagaugagc

SEQ ID NO: 337881 - RNA, 19 nt, Artificial Sequence
  Description of Artificial Sequence: Synthetic oligonucleotide
  Sense Strand Starting at position 242 of SEQ ID NO: 317858
gcccuucucugauccagga

SEQ ID NO: 337882 - RNA, 19 nt, Artificial Sequence
  Description of Artificial Sequence: Synthetic oligonucleotide
  Antisense Strand to SEQ ID NO: 337881
uccuggaucagagaagggc

SEQ ID NO: 337883 - RNA, 19 nt, Artificial Sequence
  Description of Artificial Sequence: Synthetic oligonucleotide
  Sense Strand Starting at position 242 of SEQ ID NO: 317862
uucucugauccaggacgaa

SEQ ID NO: 337884 - RNA, 19 nt, Artificial Sequence
  Description of Artificial Sequence: Synthetic oligonucleotide
  Antisense Strand to SEQ ID NO: 337883
uucguccuggaucagagaa

SEQ ID NO: 337885 - RNA, 19 nt, Artificial Sequence
  Description of Artificial Sequence: Synthetic oligonucleotide
  Sense Strand Starting at position 242 of SEQ ID NO: 317865
ucugauccaggacgaaauu

SEQ ID NO: 337886 - RNA, 19 nt, Artificial Sequence
  Description of Artificial Sequence: Synthetic oligonucleotide
  Antisense Strand to SEQ ID NO: 337885
aauuucguccuggaucaga

SEQ ID NO: 337887 - RNA, 19 nt, Artificial Sequence
  Description of Artificial Sequence: Synthetic oligonucleotide
  Sense Strand Starting at position 242 of SEQ ID NO: 317929
aggaaagucuucuuagacc

SEQ ID NO: 337888 - RNA, 19 nt, Artificial Sequence
  Description of Artificial Sequence: Synthetic oligonucleotide
  Antisense Strand to SEQ ID NO: 337887
ggucuaagaagacuuuccu

SEQ ID NO: 337889 - RNA, 19 nt, Artificial Sequence
  Description of Artificial Sequence: Synthetic oligonucleotide
  Sense Strand Starting at position 242 of SEQ ID NO: 318272
ggaggauucugcuugccuc

SEQ ID NO: 337890 - RNA, 19 nt, Artificial Sequence
  Description of Artificial Sequence: Synthetic oligonucleotide
  Antisense Strand to SEQ ID NO: 337889
gaggcaagcagaauccucc

SEQ ID NO: 337891 - RNA, 19 nt, Artificial Sequence
  Description of Artificial Sequence: Synthetic oligonucleotide
  Sense Strand Starting at position 242 of SEQ ID NO: 318273
gaggauucugcuugccuca

SEQ ID NO: 337892 - RNA, 19 nt, Artificial Sequence
  Description of Artificial Sequence: Synthetic oligonucleotide
  Antisense Strand to SEQ ID NO: 337891
ugaggcaagcagaauccuc

SEQ ID NO: 337893 - RNA, 19 nt, Artificial Sequence
  Description of Artificial Sequence: Synthetic oligonucleotide
  Sense Strand Starting at position 242 of SEQ ID NO: 318341
ccugcucuccaggagcaaa

SEQ ID NO: 337894 - RNA, 19 nt, Artificial Sequence
  Description of Artificial Sequence: Synthetic oligonucleotide
  Antisense Strand to SEQ ID NO: 337893
uuugcuccuggagagcagg

SEQ ID NO: 337895 - RNA, 19 nt, Artificial Sequence
  Description of Artificial Sequence: Synthetic oligonucleotide
  Sense Strand Starting at position 242 of SEQ ID NO: 318583
uuucgaaagcuuuggcaaa

SEQ ID NO: 337896 - RNA, 19 nt, Artificial Sequence
  Description of Artificial Sequence: Synthetic oligonucleotide
  Antisense Strand to SEQ ID NO: 337895
uuugccaaagcuuucgaaa

SEQ ID NO: 337897 - RNA, 19 nt, Artificial Sequence
  Description of Artificial Sequence: Synthetic oligonucleotide
  Sense Strand Starting at position 242 of SEQ ID NO: 318679
cccauaucagcuugcuuga

SEQ ID NO: 337898 - RNA, 19 nt, Artificial Sequence
  Description of Artificial Sequence: Synthetic oligonucleotide
  Antisense Strand to SEQ ID NO: 337897
ucaagcaagcugauauggg

SEQ ID NO: 337899 - RNA, 19 nt, Artificial Sequence
  Description of Artificial Sequence: Synthetic oligonucleotide
  Sense Strand Starting at position 242 of SEQ ID NO: 318686
cagcuugcuugagcuuaga

SEQ ID NO: 337900 - RNA, 19 nt, Artificial Sequence
  Description of Artificial Sequence: Synthetic oligonucleotide
  Antisense Strand to SEQ ID NO: 337899
ucuaagcucaagcaagcug

SEQ ID NO: 337901 - RNA, 19 nt, Artificial Sequence
  Description of Artificial Sequence: Synthetic oligonucleotide
  Sense Strand Starting at position 242 of SEQ ID NO: 318720
cugugagcccguuucucuu

SEQ ID NO: 337902 - RNA, 19 nt, Artificial Sequence
  Description of Artificial Sequence: Synthetic oligonucleotide
  Antisense Strand to SEQ ID NO: 337901
aagagaaacgggcucacag

SEQ ID NO: 337903 - RNA, 19 nt, Artificial Sequence
  Description of Artificial Sequence: Synthetic oligonucleotide
  Sense Strand Starting at position 242 of SEQ ID NO: 318730
guuucucuucucuguguaa

SEQ ID NO: 337904 - RNA, 19 nt, Artificial Sequence
  Description of Artificial Sequence: Synthetic oligonucleotide
  Antisense Strand to SEQ ID NO: 337903
uuacacagagaagagaaac

SEQ ID NO: 337905 - RNA, 19 nt, Artificial Sequence
  Description of Artificial Sequence: Synthetic oligonucleotide
  Sense Strand Starting at position 242 of SEQ ID NO: 318731
uuucucuucucuguguaau

SEQ ID NO: 337906 - RNA, 19 nt, Artificial Sequence
  Description of Artificial Sequence: Synthetic oligonucleotide
  Antisense Strand to SEQ ID NO: 337905
auuacacagagaagagaaa

SEQ ID NO: 337907 - RNA, 19 nt, Artificial Sequence
  Description of Artificial Sequence: Synthetic oligonucleotide
  Sense Strand Starting at position 242 of SEQ ID NO: 318732
uucucuucucuguguaaug

SEQ ID NO: 337908 - RNA, 19 nt, Artificial Sequence
  Description of Artificial Sequence: Synthetic oligonucleotide
  Antisense Strand to SEQ ID NO: 337907
cauuacacagagaagagaa

SEQ ID NO: 337909 - RNA, 19 nt, Artificial Sequence
  Description of Artificial Sequence: Synthetic oligonucleotide
  Sense Strand Starting at position 242 of SEQ ID NO: 318733
ucucuucucuguguaauga

SEQ ID NO: 337910 - RNA, 19 nt, Artificial Sequence
  Description of Artificial Sequence: Synthetic oligonucleotide
  Antisense Strand to SEQ ID NO: 337909
ucauuacacagagaagaga

SEQ ID NO: 337911 - RNA, 19 nt, Artificial Sequence
  Description of Artificial Sequence: Synthetic oligonucleotide
  Sense Strand Starting at position 242 of SEQ ID NO: 318741
cuguguaaugacgauaaug

SEQ ID NO: 337912 - RNA, 19 nt, Artificial Sequence
  Description of Artificial Sequence: Synthetic oligonucleotide
  Antisense Strand to SEQ ID NO: 337911
cauuaucgucauuacacag

SEQ ID NO: 337913 - RNA, 19 nt, Artificial Sequence
  Description of Artificial Sequence: Synthetic oligonucleotide
  Sense Strand Starting at position 242 of SEQ ID NO: 318743
guguaaugacgauaaugau

SEQ ID NO: 337914 - RNA, 19 nt, Artificial Sequence
  Description of Artificial Sequence: Synthetic oligonucleotide
  Antisense Strand to SEQ ID NO: 337913
aucauuaucgucauuacac

SEQ ID NO: 337915 - RNA, 19 nt, Artificial Sequence
  Description of Artificial Sequence: Synthetic oligonucleotide
  Sense Strand Starting at position 242 of SEQ ID NO: 318749
ugacgauaaugauucuugu

SEQ ID NO: 337916 - RNA, 19 nt, Artificial Sequence
  Description of Artificial Sequence: Synthetic oligonucleotide
  Antisense Strand to SEQ ID NO: 337915
acaagaaucauuaucguca

SEQ ID NO: 337917 - RNA, 19 nt, Artificial Sequence
  Description of Artificial Sequence: Synthetic oligonucleotide
  Sense Strand Starting at position 242 of SEQ ID NO: 318775
gguaguggugaggauuagu

SEQ ID NO: 337918 - RNA, 19 nt, Artificial Sequence
  Description of Artificial Sequence: Synthetic oligonucleotide
  Antisense Strand to SEQ ID NO: 337917
acuaauccucaccacuacc

SEQ ID NO: 337919 - RNA, 19 nt, Artificial Sequence
  Description of Artificial Sequence: Synthetic oligonucleotide
  Sense Strand Starting at position 242 of SEQ ID NO: 318780
uggugaggauuagugacaa

SEQ ID NO: 337920 - RNA, 19 nt, Artificial Sequence
  Description of Artificial Sequence: Synthetic oligonucleotide
  Antisense Strand to SEQ ID NO: 337919
uugucacuaauccucacca

SEQ ID NO: 337921 - RNA, 19 nt, Artificial Sequence
  Description of Artificial Sequence: Synthetic oligonucleotide
  Sense Strand Starting at position 243 of SEQ ID NO: 315247
cugugucuuccaggccaaa

SEQ ID NO: 337922 - RNA, 19 nt, Artificial Sequence
  Description of Artificial Sequence: Synthetic oligonucleotide
  Antisense Strand to SEQ ID NO: 337921
uuuggccuggaagacacag

SEQ ID NO: 337923 - RNA, 19 nt, Artificial Sequence
  Description of Artificial Sequence: Synthetic oligonucleotide
  Sense Strand Starting at position 243 of SEQ ID NO: 315310
ggcaaacagcgccaguauu

SEQ ID NO: 337924 - RNA, 19 nt, Artificial Sequence
  Description of Artificial Sequence: Synthetic oligonucleotide
  Antisense Strand to SEQ ID NO: 337923
aauacuggcgcuguuugcc

SEQ ID NO: 337925 - RNA, 19 nt, Artificial Sequence
  Description of Artificial Sequence: Synthetic oligonucleotide
  Sense Strand Starting at position 243 of SEQ ID NO: 315378
cugacuccuguguagguua

SEQ ID NO: 337926 - RNA, 19 nt, Artificial Sequence
  Description of Artificial Sequence: Synthetic oligonucleotide
  Antisense Strand to SEQ ID NO: 337925
uaaccuacacaggagucag

SEQ ID NO: 337927 - RNA, 19 nt, Artificial Sequence
  Description of Artificial Sequence: Synthetic oligonucleotide
  Sense Strand Starting at position 243 of SEQ ID NO: 315380
gacuccuguguagguuaua

SEQ ID NO: 337928 - RNA, 19 nt, Artificial Sequence
  Description of Artificial Sequence: Synthetic oligonucleotide
  Antisense Strand to SEQ ID NO: 337927
uauaaccuacacaggaguc

SEQ ID NO: 337929 - RNA, 19 nt, Artificial Sequence
  Description of Artificial Sequence: Synthetic oligonucleotide
  Sense Strand Starting at position 243 of SEQ ID NO: 315392
gguuauaggugacccucua

SEQ ID NO: 337930 - RNA, 19 nt, Artificial Sequence
  Description of Artificial Sequence: Synthetic oligonucleotide
  Antisense Strand to SEQ ID NO: 337929
uagagggucaccuauaacc

SEQ ID NO: 337931 - RNA, 19 nt, Artificial Sequence
  Description of Artificial Sequence: Synthetic oligonucleotide
  Sense Strand Starting at position 243 of SEQ ID NO: 315510
ggcuguacugugggaucuu

SEQ ID NO: 337932 - RNA, 19 nt, Artificial Sequence
  Description of Artificial Sequence: Synthetic oligonucleotide
  Antisense Strand to SEQ ID NO: 337931
aagaucccacaguacagcc

SEQ ID NO: 337933 - RNA, 19 nt, Artificial Sequence
  Description of Artificial Sequence: Synthetic oligonucleotide
  Sense Strand Starting at position 243 of SEQ ID NO: 315719
gguagcuggguguaugaau

SEQ ID NO: 337934 - RNA, 19 nt, Artificial Sequence
  Description of Artificial Sequence: Synthetic oligonucleotide
  Antisense Strand to SEQ ID NO: 337933
auucauacacccagcuacc

SEQ ID NO: 337935 - RNA, 19 nt, Artificial Sequence
  Description of Artificial Sequence: Synthetic oligonucleotide
  Sense Strand Starting at position 243 of SEQ ID NO: 315731
uaugaauagcuguguugau

SEQ ID NO: 337936 - RNA, 19 nt, Artificial Sequence
  Description of Artificial Sequence: Synthetic oligonucleotide
  Antisense Strand to SEQ ID NO: 337935
aucaacacagcuauucaua

SEQ ID NO: 337937 - RNA, 19 nt, Artificial Sequence
  Description of Artificial Sequence: Synthetic oligonucleotide
  Sense Strand Starting at position 243 of SEQ ID NO: 315732
augaauagcuguguugauc

SEQ ID NO: 337938 - RNA, 19 nt, Artificial Sequence
  Description of Artificial Sequence: Synthetic oligonucleotide
  Antisense Strand to SEQ ID NO: 337937
gaucaacacagcuauucau

SEQ ID NO: 337939 - RNA, 19 nt, Artificial Sequence
  Description of Artificial Sequence: Synthetic oligonucleotide
  Sense Strand Starting at position 243 of SEQ ID NO: 315738
agcuguguugaucaccaca

SEQ ID NO: 337940 - RNA, 19 nt, Artificial Sequence
  Description of Artificial Sequence: Synthetic oligonucleotide
  Antisense Strand to SEQ ID NO: 337939
uguggugaucaacacagcu

SEQ ID NO: 337941 - RNA, 19 nt, Artificial Sequence
  Description of Artificial Sequence: Synthetic oligonucleotide
  Sense Strand Starting at position 243 of SEQ ID NO: 315740
cuguguugaucaccacaag

SEQ ID NO: 337942 - RNA, 19 nt, Artificial Sequence
  Description of Artificial Sequence: Synthetic oligonucleotide
  Antisense Strand to SEQ ID NO: 337941
cuuguggugaucaacacag

SEQ ID NO: 337943 - RNA, 19 nt, Artificial Sequence
  Description of Artificial Sequence: Synthetic oligonucleotide
  Sense Strand Starting at position 243 of SEQ ID NO: 315795
auggcugugucaucaucau

SEQ ID NO: 337944 - RNA, 19 nt, Artificial Sequence
  Description of Artificial Sequence: Synthetic oligonucleotide
  Antisense Strand to SEQ ID NO: 337943
augaugaugacacagccau

SEQ ID NO: 337945 - RNA, 19 nt, Artificial Sequence
  Description of Artificial Sequence: Synthetic oligonucleotide
  Sense Strand Starting at position 243 of SEQ ID NO: 315831
guguguucuagguacaugu

SEQ ID NO: 337946 - RNA, 19 nt, Artificial Sequence
  Description of Artificial Sequence: Synthetic oligonucleotide
  Antisense Strand to SEQ ID NO: 337945
acauguaccuagaacacac

SEQ ID NO: 337947 - RNA, 19 nt, Artificial Sequence
  Description of Artificial Sequence: Synthetic oligonucleotide
  Sense Strand Starting at position 243 of SEQ ID NO: 315900
aacaguagcccugagcuua

SEQ ID NO: 337948 - RNA, 19 nt, Artificial Sequence
  Description of Artificial Sequence: Synthetic oligonucleotide
  Antisense Strand to SEQ ID NO: 337947
uaagcucagggcuacuguu

SEQ ID NO: 337949 - RNA, 19 nt, Artificial Sequence
  Description of Artificial Sequence: Synthetic oligonucleotide
  Sense Strand Starting at position 243 of SEQ ID NO: 315925
ggugcucaccuaggguaaa

SEQ ID NO: 337950 - RNA, 19 nt, Artificial Sequence
  Description of Artificial Sequence: Synthetic oligonucleotide
  Antisense Strand to SEQ ID NO: 337949
uuuacccuaggugagcacc

SEQ ID NO: 337951 - RNA, 19 nt, Artificial Sequence
  Description of Artificial Sequence: Synthetic oligonucleotide
  Sense Strand Starting at position 243 of SEQ ID NO: 316018
ucaggagucccagaaugca

SEQ ID NO: 337952 - RNA, 19 nt, Artificial Sequence
  Description of Artificial Sequence: Synthetic oligonucleotide
  Antisense Strand to SEQ ID NO: 337951
ugcauucugggacuccuga

SEQ ID NO: 337953 - RNA, 19 nt, Artificial Sequence
  Description of Artificial Sequence: Synthetic oligonucleotide
  Sense Strand Starting at position 243 of SEQ ID NO: 316073
gaaguagucuucccagcac

SEQ ID NO: 337954 - RNA, 19 nt, Artificial Sequence
  Description of Artificial Sequence: Synthetic oligonucleotide
  Antisense Strand to SEQ ID NO: 337953
gugcugggaagacuacuuc

SEQ ID NO: 337955 - RNA, 19 nt, Artificial Sequence
  Description of Artificial Sequence: Synthetic oligonucleotide
  Sense Strand Starting at position 243 of SEQ ID NO: 316327
aggucaagacucugucuua

SEQ ID NO: 337956 - RNA, 19 nt, Artificial Sequence
  Description of Artificial Sequence: Synthetic oligonucleotide
  Antisense Strand to SEQ ID NO: 337955
uaagacagagucuugaccu

SEQ ID NO: 337957 - RNA, 19 nt, Artificial Sequence
  Description of Artificial Sequence: Synthetic oligonucleotide
  Sense Strand Starting at position 243 of SEQ ID NO: 316328
ggucaagacucugucuuau

SEQ ID NO: 337958 - RNA, 19 nt, Artificial Sequence
  Description of Artificial Sequence: Synthetic oligonucleotide
  Antisense Strand to SEQ ID NO: 337957
auaagacagagucuugacc

SEQ ID NO: 337959 - RNA, 19 nt, Artificial Sequence
  Description of Artificial Sequence: Synthetic oligonucleotide
  Sense Strand Starting at position 243 of SEQ ID NO: 316370
uuaccucaagucugggaaa

SEQ ID NO: 337960 - RNA, 19 nt, Artificial Sequence
  Description of Artificial Sequence: Synthetic oligonucleotide
  Antisense Strand to SEQ ID NO: 337959
uuucccagacuugagguaa

SEQ ID NO: 337961 - RNA, 19 nt, Artificial Sequence
  Description of Artificial Sequence: Synthetic oligonucleotide
  Sense Strand Starting at position 243 of SEQ ID NO: 316372
accucaagucugggaaauu

SEQ ID NO: 337962 - RNA, 19 nt, Artificial Sequence
  Description of Artificial Sequence: Synthetic oligonucleotide
  Antisense Strand to SEQ ID NO: 337961
aauuucccagacuugaggu

SEQ ID NO: 337963 - RNA, 19 nt, Artificial Sequence
  Description of Artificial Sequence: Synthetic oligonucleotide
  Sense Strand Starting at position 243 of SEQ ID NO: 316373
ccucaagucugggaaauuu

SEQ ID NO: 337964 - RNA, 19 nt, Artificial Sequence
  Description of Artificial Sequence: Synthetic oligonucleotide
  Antisense Strand to SEQ ID NO: 337963
aaauuucccagacuugagg

SEQ ID NO: 337965 - RNA, 19 nt, Artificial Sequence
  Description of Artificial Sequence: Synthetic oligonucleotide
  Sense Strand Starting at position 243 of SEQ ID NO: 316708
cugggauuguuggccacau

SEQ ID NO: 337966 - RNA, 19 nt, Artificial Sequence
  Description of Artificial Sequence: Synthetic oligonucleotide
  Antisense Strand to SEQ ID NO: 337965
auguggccaacaaucccag

SEQ ID NO: 337967 - RNA, 19 nt, Artificial Sequence
  Description of Artificial Sequence: Synthetic oligonucleotide
  Sense Strand Starting at position 243 of SEQ ID NO: 316710
gggauuguuggccacaucu

SEQ ID NO: 337968 - RNA, 19 nt, Artificial Sequence
  Description of Artificial Sequence: Synthetic oligonucleotide
  Antisense Strand to SEQ ID NO: 337967
agauguggccaacaauccc

SEQ ID NO: 337969 - RNA, 19 nt, Artificial Sequence
  Description of Artificial Sequence: Synthetic oligonucleotide
  Sense Strand Starting at position 243 of SEQ ID NO: 316838
ugggaauugagguaagugu

SEQ ID NO: 337970 - RNA, 19 nt, Artificial Sequence
  Description of Artificial Sequence: Synthetic oligonucleotide
  Antisense Strand to SEQ ID NO: 337969
acacuuaccucaauuccca

SEQ ID NO: 337971 - RNA, 19 nt, Artificial Sequence
  Description of Artificial Sequence: Synthetic oligonucleotide
  Sense Strand Starting at position 243 of SEQ ID NO: 317239
gggcgagcugcugccuaau

SEQ ID NO: 337972 - RNA, 19 nt, Artificial Sequence
  Description of Artificial Sequence: Synthetic oligonucleotide
  Antisense Strand to SEQ ID NO: 337971
auuaggcagcagcucgccc

SEQ ID NO: 337973 - RNA, 19 nt, Artificial Sequence
  Description of Artificial Sequence: Synthetic oligonucleotide
  Sense Strand Starting at position 243 of SEQ ID NO: 317857
agaggacaguuccagaaau

SEQ ID NO: 337974 - RNA, 19 nt, Artificial Sequence
  Description of Artificial Sequence: Synthetic oligonucleotide
  Antisense Strand to SEQ ID NO: 337973
auuucuggaacuguccucu

SEQ ID NO: 337975 - RNA, 19 nt, Artificial Sequence
  Description of Artificial Sequence: Synthetic oligonucleotide
  Sense Strand Starting at position 243 of SEQ ID NO: 318145
gagagaguccugcaacuca

SEQ ID NO: 337976 - RNA, 19 nt, Artificial Sequence
  Description of Artificial Sequence: Synthetic oligonucleotide
  Antisense Strand to SEQ ID NO: 337975
ugaguugcaggacucucuc

SEQ ID NO: 337977 - RNA, 19 nt, Artificial Sequence
  Description of Artificial Sequence: Synthetic oligonucleotide
  Sense Strand Starting at position 243 of SEQ ID NO: 318448
gacuguagggucugugaau

SEQ ID NO: 337978 - RNA, 19 nt, Artificial Sequence
  Description of Artificial Sequence: Synthetic oligonucleotide
  Antisense Strand to SEQ ID NO: 337977
auucacagacccuacaguc

SEQ ID NO: 337979 - RNA, 19 nt, Artificial Sequence
  Description of Artificial Sequence: Synthetic oligonucleotide
  Sense Strand Starting at position 243 of SEQ ID NO: 318449
acuguagggucugugaauc

SEQ ID NO: 337980 - RNA, 19 nt, Artificial Sequence
  Description of Artificial Sequence: Synthetic oligonucleotide
  Antisense Strand to SEQ ID NO: 337979
gauucacagacccuacagu

SEQ ID NO: 337981 - RNA, 19 nt, Artificial Sequence
  Description of Artificial Sequence: Synthetic oligonucleotide
  Sense Strand Starting at position 243 of SEQ ID NO: 318457
gucugugaaucuccuccaa

SEQ ID NO: 337982 - RNA, 19 nt, Artificial Sequence
  Description of Artificial Sequence: Synthetic oligonucleotide
  Antisense Strand to SEQ ID NO: 337981
uuggaggagauucacagac

SEQ ID NO: 337983 - RNA, 19 nt, Artificial Sequence
  Description of Artificial Sequence: Synthetic oligonucleotide
  Sense Strand Starting at position 243 of SEQ ID NO: 318574
ggagucuagcucugagauc

SEQ ID NO: 337984 - RNA, 19 nt, Artificial Sequence
  Description of Artificial Sequence: Synthetic oligonucleotide
  Antisense Strand to SEQ ID NO: 337983
gaucucagagcuagacucc

SEQ ID NO: 337985 - RNA, 19 nt, Artificial Sequence
  Description of Artificial Sequence: Synthetic oligonucleotide
  Sense Strand Starting at position 243 of SEQ ID NO: 318622
guugaagggccugaacgau

SEQ ID NO: 337986 - RNA, 19 nt, Artificial Sequence
  Description of Artificial Sequence: Synthetic oligonucleotide
  Antisense Strand to SEQ ID NO: 337985
aucguucaggcccuucaac

SEQ ID NO: 337987 - RNA, 19 nt, Artificial Sequence
  Description of Artificial Sequence: Synthetic oligonucleotide
  Sense Strand Starting at position 243 of SEQ ID NO: 318760
gucacuucucuguagcuuu

SEQ ID NO: 337988 - RNA, 19 nt, Artificial Sequence
  Description of Artificial Sequence: Synthetic oligonucleotide
  Antisense Strand to SEQ ID NO: 337987
aaagcuacagagaagugac

SEQ ID NO: 337989 - RNA, 19 nt, Artificial Sequence
  Description of Artificial Sequence: Synthetic oligonucleotide
  Sense Strand Starting at position 243 of SEQ ID NO: 318770
uguagcuuuccugaaggga

SEQ ID NO: 337990 - RNA, 19 nt, Artificial Sequence
  Description of Artificial Sequence: Synthetic oligonucleotide
  Antisense Strand to SEQ ID NO: 337989
ucccuucaggaaagcuaca

SEQ ID NO: 337991 - RNA, 19 nt, Artificial Sequence
  Description of Artificial Sequence: Synthetic oligonucleotide
  Sense Strand Starting at position 243 of SEQ ID NO: 318793
gggcuucaugagugcaacu

SEQ ID NO: 337992 - RNA, 19 nt, Artificial Sequence
  Description of Artificial Sequence: Synthetic oligonucleotide
  Antisense Strand to SEQ ID NO: 337991
aguugcacucaugaagccc

SEQ ID NO: 337993 - RNA, 19 nt, Artificial Sequence
  Description of Artificial Sequence: Synthetic oligonucleotide
  Sense Strand Starting at position 243 of SEQ ID NO: 318826
cugaguuggccagaagcca

SEQ ID NO: 337994 - RNA, 19 nt, Artificial Sequence
  Description of Artificial Sequence: Synthetic oligonucleotide
  Antisense Strand to SEQ ID NO: 337993
uggcuucuggccaacucag

SEQ ID NO: 337995 - RNA, 19 nt, Artificial Sequence
  Description of Artificial Sequence: Synthetic oligonucleotide
  Sense Strand Starting at position 243 of SEQ ID NO: 318887
cacuuugagggcugggaua

SEQ ID NO: 337996 - RNA, 19 nt, Artificial Sequence
  Description of Artificial Sequence: Synthetic oligonucleotide
  Antisense Strand to SEQ ID NO: 337995
uaucccagcccucaaagug

SEQ ID NO: 337997 - RNA, 19 nt, Artificial Sequence
  Description of Artificial Sequence: Synthetic oligonucleotide
  Sense Strand Starting at position 243 of SEQ ID NO: 318956
ggaacuguccacugucuca

SEQ ID NO: 337998 - RNA, 19 nt, Artificial Sequence
  Description of Artificial Sequence: Synthetic oligonucleotide
  Antisense Strand to SEQ ID NO: 337997
ugagacaguggacaguucc

SEQ ID NO: 337999 - RNA, 19 nt, Artificial Sequence
  Description of Artificial Sequence: Synthetic oligonucleotide
  Sense Strand Starting at position 243 of SEQ ID NO: 318969
gucucauuacuaugaagac

SEQ ID NO: 338000 - RNA, 19 nt, Artificial Sequence
  Description of Artificial Sequence: Synthetic oligonucleotide
  Antisense Strand to SEQ ID NO: 337999
gucuucauaguaaugagac

SEQ ID NO: 338001 - RNA, 19 nt, Artificial Sequence
  Description of Artificial Sequence: Synthetic oligonucleotide
  Sense Strand Starting at position 244 of SEQ ID NO: 315410
uggcaaugcccuuaaguau

SEQ ID NO: 338002 - RNA, 19 nt, Artificial Sequence
  Description of Artificial Sequence: Synthetic oligonucleotide
  Antisense Strand to SEQ ID NO: 338001
auacuuaagggcauugcca

SEQ ID NO: 338003 - RNA, 19 nt, Artificial Sequence
  Description of Artificial Sequence: Synthetic oligonucleotide
  Sense Strand Starting at position 244 of SEQ ID NO: 315416
ugcccuuaaguauaugaga

SEQ ID NO: 338004 - RNA, 19 nt, Artificial Sequence
  Description of Artificial Sequence: Synthetic oligonucleotide
  Antisense Strand to SEQ ID NO: 338003
ucucauauacuuaagggca

SEQ ID NO: 338005 - RNA, 19 nt, Artificial Sequence
  Description of Artificial Sequence: Synthetic oligonucleotide
  Sense Strand Starting at position 244 of SEQ ID NO: 315748
auggaccagucuuccuuaa

SEQ ID NO: 338006 - RNA, 19 nt, Artificial Sequence
  Description of Artificial Sequence: Synthetic oligonucleotide
  Antisense Strand to SEQ ID NO: 338005
uuaaggaagacugguccau

SEQ ID NO: 338007 - RNA, 19 nt, Artificial Sequence
  Description of Artificial Sequence: Synthetic oligonucleotide
  Sense Strand Starting at position 244 of SEQ ID NO: 315750
ggaccagucuuccuuaaga

SEQ ID NO: 338008 - RNA, 19 nt, Artificial Sequence
  Description of Artificial Sequence: Synthetic oligonucleotide
  Antisense Strand to SEQ ID NO: 338007
ucuuaaggaagacuggucc

SEQ ID NO: 338009 - RNA, 19 nt, Artificial Sequence
  Description of Artificial Sequence: Synthetic oligonucleotide
  Sense Strand Starting at position 244 of SEQ ID NO: 315819
ucauacauaucugugaugu

SEQ ID NO: 338010 - RNA, 19 nt, Artificial Sequence
  Description of Artificial Sequence: Synthetic oligonucleotide
  Antisense Strand to SEQ ID NO: 338009
acaucacagauauguauga

SEQ ID NO: 338011 - RNA, 19 nt, Artificial Sequence
  Description of Artificial Sequence: Synthetic oligonucleotide
  Sense Strand Starting at position 244 of SEQ ID NO: 315827
aucugugauguugauguga

SEQ ID NO: 338012 - RNA, 19 nt, Artificial Sequence
  Description of Artificial Sequence: Synthetic oligonucleotide
  Antisense Strand to SEQ ID NO: 338011
ucacaucaacaucacagau

SEQ ID NO: 338013 - RNA, 19 nt, Artificial Sequence
  Description of Artificial Sequence: Synthetic oligonucleotide
  Sense Strand Starting at position 244 of SEQ ID NO: 315994
gggacauauugucucagca

SEQ ID NO: 338014 - RNA, 19 nt, Artificial Sequence
  Description of Artificial Sequence: Synthetic oligonucleotide
  Antisense Strand to SEQ ID NO: 338013
ugcugagacaauauguccc

SEQ ID NO: 338015 - RNA, 19 nt, Artificial Sequence
  Description of Artificial Sequence: Synthetic oligonucleotide
  Sense Strand Starting at position 244 of SEQ ID NO: 316113
aagugcuuuggagaacuau

SEQ ID NO: 338016 - RNA, 19 nt, Artificial Sequence
  Description of Artificial Sequence: Synthetic oligonucleotide
  Antisense Strand to SEQ ID NO: 338015
auaguucuccaaagcacuu

SEQ ID NO: 338017 - RNA, 19 nt, Artificial Sequence
  Description of Artificial Sequence: Synthetic oligonucleotide
  Sense Strand Starting at position 244 of SEQ ID NO: 316535
gguaaauugucaccucaug

SEQ ID NO: 338018 - RNA, 19 nt, Artificial Sequence
  Description of Artificial Sequence: Synthetic oligonucleotide
  Antisense Strand to SEQ ID NO: 338017
caugaggugacaauuuacc

SEQ ID NO: 338019 - RNA, 19 nt, Artificial Sequence
  Description of Artificial Sequence: Synthetic oligonucleotide
  Sense Strand Starting at position 244 of SEQ ID NO: 316699
agcaaaugaucgucaccuu

SEQ ID NO: 338020 - RNA, 19 nt, Artificial Sequence
  Description of Artificial Sequence: Synthetic oligonucleotide
  Antisense Strand to SEQ ID NO: 338019
aaggugacgaucauuugcu

SEQ ID NO: 338021 - RNA, 19 nt, Artificial Sequence
  Description of Artificial Sequence: Synthetic oligonucleotide
  Sense Strand Starting at position 244 of SEQ ID NO: 316700
gcaaaugaucgucaccuua

SEQ ID NO: 338022 - RNA, 19 nt, Artificial Sequence
  Description of Artificial Sequence: Synthetic oligonucleotide
  Antisense Strand to SEQ ID NO: 338021
uaaggugacgaucauuugc

SEQ ID NO: 338023 - RNA, 19 nt, Artificial Sequence
  Description of Artificial Sequence: Synthetic oligonucleotide
  Sense Strand Starting at position 244 of SEQ ID NO: 317044
acauaugcuguuggauaca

SEQ ID NO: 338024 - RNA, 19 nt, Artificial Sequence
  Description of Artificial Sequence: Synthetic oligonucleotide
  Antisense Strand to SEQ ID NO: 338023
uguauccaacagcauaugu

SEQ ID NO: 338025 - RNA, 19 nt, Artificial Sequence
  Description of Artificial Sequence: Synthetic oligonucleotide
  Sense Strand Starting at position 244 of SEQ ID NO: 317217
ccauguaaucaguagcaau

SEQ ID NO: 338026 - RNA, 19 nt, Artificial Sequence
  Description of Artificial Sequence: Synthetic oligonucleotide
  Antisense Strand to SEQ ID NO: 338025
auugcuacugauuacaugg

SEQ ID NO: 338027 - RNA, 19 nt, Artificial Sequence
  Description of Artificial Sequence: Synthetic oligonucleotide
  Sense Strand Starting at position 244 of SEQ ID NO: 317373
ucucauuaugcaggaagca

SEQ ID NO: 338028 - RNA, 19 nt, Artificial Sequence
  Description of Artificial Sequence: Synthetic oligonucleotide
  Antisense Strand to SEQ ID NO: 338027
ugcuuccugcauaaugaga

SEQ ID NO: 338029 - RNA, 19 nt, Artificial Sequence
  Description of Artificial Sequence: Synthetic oligonucleotide
  Sense Strand Starting at position 244 of SEQ ID NO: 317374
cucauuaugcaggaagcau

SEQ ID NO: 338030 - RNA, 19 nt, Artificial Sequence
  Description of Artificial Sequence: Synthetic oligonucleotide
  Antisense Strand to SEQ ID NO: 338029
augcuuccugcauaaugag

SEQ ID NO: 338031 - RNA, 19 nt, Artificial Sequence
  Description of Artificial Sequence: Synthetic oligonucleotide
  Sense Strand Starting at position 244 of SEQ ID NO: 317478
cuuacuucugguggagaca

SEQ ID NO: 338032 - RNA, 19 nt, Artificial Sequence
  Description of Artificial Sequence: Synthetic oligonucleotide
  Antisense Strand to SEQ ID NO: 338031
ugucuccaccagaaguaag

SEQ ID NO: 338033 - RNA, 19 nt, Artificial Sequence
  Description of Artificial Sequence: Synthetic oligonucleotide
  Sense Strand Starting at position 244 of SEQ ID NO: 317589
uggagcucaugaucacaaa

SEQ ID NO: 338034 - RNA, 19 nt, Artificial Sequence
  Description of Artificial Sequence: Synthetic oligonucleotide
  Antisense Strand to SEQ ID NO: 338033
uuugugaucaugagcucca

SEQ ID NO: 338035 - RNA, 19 nt, Artificial Sequence
  Description of Artificial Sequence: Synthetic oligonucleotide
  Sense Strand Starting at position 244 of SEQ ID NO: 317655
caccaaaggguauguuaua

SEQ ID NO: 338036 - RNA, 19 nt, Artificial Sequence
  Description of Artificial Sequence: Synthetic oligonucleotide
  Antisense Strand to SEQ ID NO: 338035
uauaacauacccuuuggug

SEQ ID NO: 338037 - RNA, 19 nt, Artificial Sequence
  Description of Artificial Sequence: Synthetic oligonucleotide
  Sense Strand Starting at position 244 of SEQ ID NO: 317656
accaaaggguauguuauaa

SEQ ID NO: 338038 - RNA, 19 nt, Artificial Sequence
  Description of Artificial Sequence: Synthetic oligonucleotide
  Antisense Strand to SEQ ID NO: 338037
uuauaacauacccuuuggu

SEQ ID NO: 338039 - RNA, 19 nt, Artificial Sequence
  Description of Artificial Sequence: Synthetic oligonucleotide
  Sense Strand Starting at position 244 of SEQ ID NO: 317691
acuggaaguuaucuuauug

SEQ ID NO: 338040 - RNA, 19 nt, Artificial Sequence
  Description of Artificial Sequence: Synthetic oligonucleotide
  Antisense Strand to SEQ ID NO: 338039
caauaagauaacuuccagu

SEQ ID NO: 338041 - RNA, 19 nt, Artificial Sequence
  Description of Artificial Sequence: Synthetic oligonucleotide
  Sense Strand Starting at position 244 of SEQ ID NO: 317981
gcaggagacugucuagaaa

SEQ ID NO: 338042 - RNA, 19 nt, Artificial Sequence
  Description of Artificial Sequence: Synthetic oligonucleotide
  Antisense Strand to SEQ ID NO: 338041
uuucuagacagucuccugc

SEQ ID NO: 338043 - RNA, 19 nt, Artificial Sequence
  Description of Artificial Sequence: Synthetic oligonucleotide
  Sense Strand Starting at position 244 of SEQ ID NO: 318085
ccuucuagucacgaucuga

SEQ ID NO: 338044 - RNA, 19 nt, Artificial Sequence
  Description of Artificial Sequence: Synthetic oligonucleotide
  Antisense Strand to SEQ ID NO: 338043
ucagaucgugacuagaagg

SEQ ID NO: 338045 - RNA, 19 nt, Artificial Sequence
  Description of Artificial Sequence: Synthetic oligonucleotide
  Sense Strand Starting at position 244 of SEQ ID NO: 318089
cuagucacgaucugacaga

SEQ ID NO: 338046 - RNA, 19 nt, Artificial Sequence
  Description of Artificial Sequence: Synthetic oligonucleotide
  Antisense Strand to SEQ ID NO: 338045
ucugucagaucgugacuag

SEQ ID NO: 338047 - RNA, 19 nt, Artificial Sequence
  Description of Artificial Sequence: Synthetic oligonucleotide
  Sense Strand Starting at position 244 of SEQ ID NO: 318156
agggacucugccuaacuua

SEQ ID NO: 338048 - RNA, 19 nt, Artificial Sequence
  Description of Artificial Sequence: Synthetic oligonucleotide
  Antisense Strand to SEQ ID NO: 338047
uaaguuaggcagagucccu

SEQ ID NO: 338049 - RNA, 19 nt, Artificial Sequence
  Description of Artificial Sequence: Synthetic oligonucleotide
  Sense Strand Starting at position 244 of SEQ ID NO: 318297
gguuucuuguauuuaguaa

SEQ ID NO: 338050 - RNA, 19 nt, Artificial Sequence
  Description of Artificial Sequence: Synthetic oligonucleotide
  Antisense Strand to SEQ ID NO: 338049
uuacuaaauacaagaaacc

SEQ ID NO: 338051 - RNA, 19 nt, Artificial Sequence
  Description of Artificial Sequence: Synthetic oligonucleotide
  Sense Strand Starting at position 244 of SEQ ID NO: 318346
aucaauaugcuguaagaug

SEQ ID NO: 338052 - RNA, 19 nt, Artificial Sequence
  Description of Artificial Sequence: Synthetic oligonucleotide
  Antisense Strand to SEQ ID NO: 338051
caucuuacagcauauugau

SEQ ID NO: 338053 - RNA, 19 nt, Artificial Sequence
  Description of Artificial Sequence: Synthetic oligonucleotide
  Sense Strand Starting at position 244 of SEQ ID NO: 318353
ugcuguaagauguaugaug

SEQ ID NO: 338054 - RNA, 19 nt, Artificial Sequence
  Description of Artificial Sequence: Synthetic oligonucleotide
  Antisense Strand to SEQ ID NO: 338053
caucauacaucuuacagca

SEQ ID NO: 338055 - RNA, 19 nt, Artificial Sequence
  Description of Artificial Sequence: Synthetic oligonucleotide
  Sense Strand Starting at position 244 of SEQ ID NO: 318361
gauguaugaugugucauua

SEQ ID NO: 338056 - RNA, 19 nt, Artificial Sequence
  Description of Artificial Sequence: Synthetic oligonucleotide
  Antisense Strand to SEQ ID NO: 338055
uaaugacacaucauacauc

SEQ ID NO: 338057 - RNA, 19 nt, Artificial Sequence
  Description of Artificial Sequence: Synthetic oligonucleotide
  Sense Strand Starting at position 244 of SEQ ID NO: 318420
ccauaauaguuucugguca

SEQ ID NO: 338058 - RNA, 19 nt, Artificial Sequence
  Description of Artificial Sequence: Synthetic oligonucleotide
  Antisense Strand to SEQ ID NO: 338057
ugaccagaaacuauuaugg

SEQ ID NO: 338059 - RNA, 19 nt, Artificial Sequence
  Description of Artificial Sequence: Synthetic oligonucleotide
  Sense Strand Starting at position 244 of SEQ ID NO: 318424
aauaguuucuggucacaga

SEQ ID NO: 338060 - RNA, 19 nt, Artificial Sequence
  Description of Artificial Sequence: Synthetic oligonucleotide
  Antisense Strand to SEQ ID NO: 338059
ucugugaccagaaacuauu

SEQ ID NO: 338061 - RNA, 19 nt, Artificial Sequence
  Description of Artificial Sequence: Synthetic oligonucleotide
  Sense Strand Starting at position 244 of SEQ ID NO: 318425
auaguuucuggucacagaa

SEQ ID NO: 338062 - RNA, 19 nt, Artificial Sequence
  Description of Artificial Sequence: Synthetic oligonucleotide
  Antisense Strand to SEQ ID NO: 338061
uucugugaccagaaacuau

SEQ ID NO: 338063 - RNA, 19 nt, Artificial Sequence
  Description of Artificial Sequence: Synthetic oligonucleotide
  Sense Strand Starting at position 244 of SEQ ID NO: 318459
auuugaauugcgugccauu

SEQ ID NO: 338064 - RNA, 19 nt, Artificial Sequence
  Description of Artificial Sequence: Synthetic oligonucleotide
  Antisense Strand to SEQ ID NO: 338063
aauggcacgcaauucaaau

SEQ ID NO: 338065 - RNA, 19 nt, Artificial Sequence
  Description of Artificial Sequence: Synthetic oligonucleotide
  Sense Strand Starting at position 244 of SEQ ID NO: 318506
gcauaaaugcaccaaguga

SEQ ID NO: 338066 - RNA, 19 nt, Artificial Sequence
  Description of Artificial Sequence: Synthetic oligonucleotide
  Antisense Strand to SEQ ID NO: 338065
ucacuuggugcauuuaugc

SEQ ID NO: 338067 - RNA, 19 nt, Artificial Sequence
  Description of Artificial Sequence: Synthetic oligonucleotide
  Sense Strand Starting at position 244 of SEQ ID NO: 318555
cuuugugugcaugaacuau

SEQ ID NO: 338068 - RNA, 19 nt, Artificial Sequence
  Description of Artificial Sequence: Synthetic oligonucleotide
  Antisense Strand to SEQ ID NO: 338067
auaguucaugcacacaaag

SEQ ID NO: 338069 - RNA, 19 nt, Artificial Sequence
  Description of Artificial Sequence: Synthetic oligonucleotide
  Sense Strand Starting at position 244 of SEQ ID NO: 318851
guaucaugggcugggauga

SEQ ID NO: 338070 - RNA, 19 nt, Artificial Sequence
  Description of Artificial Sequence: Synthetic oligonucleotide
  Antisense Strand to SEQ ID NO: 338069
ucaucccagcccaugauac

SEQ ID NO: 338071 - RNA, 19 nt, Artificial Sequence
  Description of Artificial Sequence: Synthetic oligonucleotide
  Sense Strand Starting at position 244 of SEQ ID NO: 318865
gaugaaacacaccguaauu

SEQ ID NO: 338072 - RNA, 19 nt, Artificial Sequence
  Description of Artificial Sequence: Synthetic oligonucleotide
  Antisense Strand to SEQ ID NO: 338071
aauuacgguguguuucauc

SEQ ID NO: 338073 - RNA, 19 nt, Artificial Sequence
  Description of Artificial Sequence: Synthetic oligonucleotide
  Sense Strand Starting at position 244 of SEQ ID NO: 318886
ucucauuaacacuggugaa

SEQ ID NO: 338074 - RNA, 19 nt, Artificial Sequence
  Description of Artificial Sequence: Synthetic oligonucleotide
  Antisense Strand to SEQ ID NO: 338073
uucaccaguguuaaugaga

SEQ ID NO: 338075 - RNA, 19 nt, Artificial Sequence
  Description of Artificial Sequence: Synthetic oligonucleotide
  Sense Strand Starting at position 244 of SEQ ID NO: 318941
caggguauuuaggaauaau

SEQ ID NO: 338076 - RNA, 19 nt, Artificial Sequence
  Description of Artificial Sequence: Synthetic oligonucleotide
  Antisense Strand to SEQ ID NO: 338075
auuauuccuaaauacccug

SEQ ID NO: 338077 - RNA, 19 nt, Artificial Sequence
  Description of Artificial Sequence: Synthetic oligonucleotide
  Sense Strand Starting at position 244 of SEQ ID NO: 319005
cuguaaccacauuguauau

SEQ ID NO: 338078 - RNA, 19 nt, Artificial Sequence
  Description of Artificial Sequence: Synthetic oligonucleotide
  Antisense Strand to SEQ ID NO: 338077
auauacaaugugguuacag

SEQ ID NO: 338079 - RNA, 19 nt, Artificial Sequence
  Description of Artificial Sequence: Synthetic oligonucleotide
  Sense Strand Starting at position 244 of SEQ ID NO: 319034
acuuguuuaugaucuaucu

SEQ ID NO: 338080 - RNA, 19 nt, Artificial Sequence
  Description of Artificial Sequence: Synthetic oligonucleotide
  Antisense Strand to SEQ ID NO: 338079
agauagaucauaaacaagu

SEQ ID NO: 338081 - RNA, 19 nt, Artificial Sequence
  Description of Artificial Sequence: Synthetic oligonucleotide
  Sense Strand Starting at position 245 of SEQ ID NO: 315236
auugucuugggcuacauua

SEQ ID NO: 338082 - RNA, 19 nt, Artificial Sequence
  Description of Artificial Sequence: Synthetic oligonucleotide
  Antisense Strand to SEQ ID NO: 338081
uaauguagcccaagacaau

SEQ ID NO: 338083 - RNA, 19 nt, Artificial Sequence
  Description of Artificial Sequence: Synthetic oligonucleotide
  Sense Strand Starting at position 245 of SEQ ID NO: 315244
gggcuacauuaucuaguga

SEQ ID NO: 338084 - RNA, 19 nt, Artificial Sequence
  Description of Artificial Sequence: Synthetic oligonucleotide
  Antisense Strand to SEQ ID NO: 338083
ucacuagauaauguagccc

SEQ ID NO: 338085 - RNA, 19 nt, Artificial Sequence
  Description of Artificial Sequence: Synthetic oligonucleotide
  Sense Strand Starting at position 245 of SEQ ID NO: 315410
cacagaauaucagcgugau

SEQ ID NO: 338086 - RNA, 19 nt, Artificial Sequence
  Description of Artificial Sequence: Synthetic oligonucleotide
  Antisense Strand to SEQ ID NO: 338085
aucacgcugauauucugug

SEQ ID NO: 338087 - RNA, 19 nt, Artificial Sequence
  Description of Artificial Sequence: Synthetic oligonucleotide
  Sense Strand Starting at position 245 of SEQ ID NO: 315411
acagaauaucagcgugauu

SEQ ID NO: 338088 - RNA, 19 nt, Artificial Sequence
  Description of Artificial Sequence: Synthetic oligonucleotide
  Antisense Strand to SEQ ID NO: 338087
aaucacgcugauauucugu

SEQ ID NO: 338089 - RNA, 19 nt, Artificial Sequence
  Description of Artificial Sequence: Synthetic oligonucleotide
  Sense Strand Starting at position 245 of SEQ ID NO: 315557
gucuuucuacaacagucua

SEQ ID NO: 338090 - RNA, 19 nt, Artificial Sequence
  Description of Artificial Sequence: Synthetic oligonucleotide
  Antisense Strand to SEQ ID NO: 338089
uagacuguuguagaaagac

SEQ ID NO: 338091 - RNA, 19 nt, Artificial Sequence
  Description of Artificial Sequence: Synthetic oligonucleotide
  Sense Strand Starting at position 245 of SEQ ID NO: 315592
caacuaucuugagugugaa

SEQ ID NO: 338092 - RNA, 19 nt, Artificial Sequence
  Description of Artificial Sequence: Synthetic oligonucleotide
  Antisense Strand to SEQ ID NO: 338091
uucacacucaagauaguug

SEQ ID NO: 338093 - RNA, 19 nt, Artificial Sequence
  Description of Artificial Sequence: Synthetic oligonucleotide
  Sense Strand Starting at position 245 of SEQ ID NO: 315593
aacuaucuugagugugaau

SEQ ID NO: 338094 - RNA, 19 nt, Artificial Sequence
  Description of Artificial Sequence: Synthetic oligonucleotide
  Antisense Strand to SEQ ID NO: 338093
auucacacucaagauaguu

SEQ ID NO: 338095 - RNA, 19 nt, Artificial Sequence
  Description of Artificial Sequence: Synthetic oligonucleotide
  Sense Strand Starting at position 245 of SEQ ID NO: 315595
cuaucuugagugugaauau

SEQ ID NO: 338096 - RNA, 19 nt, Artificial Sequence
  Description of Artificial Sequence: Synthetic oligonucleotide
  Antisense Strand to SEQ ID NO: 338095
auauucacacucaagauag

SEQ ID NO: 338097 - RNA, 19 nt, Artificial Sequence
  Description of Artificial Sequence: Synthetic oligonucleotide
  Sense Strand Starting at position 245 of SEQ ID NO: 315602
gagugugaauauguauaug

SEQ ID NO: 338098 - RNA, 19 nt, Artificial Sequence
  Description of Artificial Sequence: Synthetic oligonucleotide
  Antisense Strand to SEQ ID NO: 338097
cauauacauauucacacuc

SEQ ID NO: 338099 - RNA, 19 nt, Artificial Sequence
  Description of Artificial Sequence: Synthetic oligonucleotide
  Sense Strand Starting at position 245 of SEQ ID NO: 315632
gaguaaauuuagcuuguuu

SEQ ID NO: 338100 - RNA, 19 nt, Artificial Sequence
  Description of Artificial Sequence: Synthetic oligonucleotide
  Antisense Strand to SEQ ID NO: 338099
aaacaagcuaaauuuacuc

SEQ ID NO: 338101 - RNA, 19 nt, Artificial Sequence
  Description of Artificial Sequence: Synthetic oligonucleotide
  Sense Strand Starting at position 245 of SEQ ID NO: 315634
guaaauuuagcuuguuucu

SEQ ID NO: 338102 - RNA, 19 nt, Artificial Sequence
  Description of Artificial Sequence: Synthetic oligonucleotide
  Antisense Strand to SEQ ID NO: 338101
agaaacaagcuaaauuuac

SEQ ID NO: 338103 - RNA, 19 nt, Artificial Sequence
  Description of Artificial Sequence: Synthetic oligonucleotide
  Sense Strand Starting at position 245 of SEQ ID NO: 315736
augguauguaaugaagcau

SEQ ID NO: 338104 - RNA, 19 nt, Artificial Sequence
  Description of Artificial Sequence: Synthetic oligonucleotide
  Antisense Strand to SEQ ID NO: 338103
augcuucauuacauaccau

SEQ ID NO: 338105 - RNA, 19 nt, Artificial Sequence
  Description of Artificial Sequence: Synthetic oligonucleotide
  Sense Strand Starting at position 245 of SEQ ID NO: 315774
acuuuauuguccuuguaaa

SEQ ID NO: 338106 - RNA, 19 nt, Artificial Sequence
  Description of Artificial Sequence: Synthetic oligonucleotide
  Antisense Strand to SEQ ID NO: 338105
uuuacaaggacaauaaagu

SEQ ID NO: 338107 - RNA, 19 nt, Artificial Sequence
  Description of Artificial Sequence: Synthetic oligonucleotide
  Sense Strand Starting at position 245 of SEQ ID NO: 315819
gggcuuuaccauuaaaucu

SEQ ID NO: 338108 - RNA, 19 nt, Artificial Sequence
  Description of Artificial Sequence: Synthetic oligonucleotide
  Antisense Strand to SEQ ID NO: 338107
agauuuaaugguaaagccc

SEQ ID NO: 338109 - RNA, 19 nt, Artificial Sequence
  Description of Artificial Sequence: Synthetic oligonucleotide
  Sense Strand Starting at position 245 of SEQ ID NO: 315830
uuaaaucugcgucauaauu

SEQ ID NO: 338110 - RNA, 19 nt, Artificial Sequence
  Description of Artificial Sequence: Synthetic oligonucleotide
  Antisense Strand to SEQ ID NO: 338109
aauuaugacgcagauuuaa

SEQ ID NO: 338111 - RNA, 19 nt, Artificial Sequence
  Description of Artificial Sequence: Synthetic oligonucleotide
  Sense Strand Starting at position 245 of SEQ ID NO: 315840
gucauaauucuagaguuug

SEQ ID NO: 338112 - RNA, 19 nt, Artificial Sequence
  Description of Artificial Sequence: Synthetic oligonucleotide
  Antisense Strand to SEQ ID NO: 338111
caaacucuagaauuaugac

SEQ ID NO: 338113 - RNA, 19 nt, Artificial Sequence
  Description of Artificial Sequence: Synthetic oligonucleotide
  Sense Strand Starting at position 245 of SEQ ID NO: 315911
ucaugagaauauguuacua

SEQ ID NO: 338114 - RNA, 19 nt, Artificial Sequence
  Description of Artificial Sequence: Synthetic oligonucleotide
  Antisense Strand to SEQ ID NO: 338113
uaguaacauauucucauga

SEQ ID NO: 338115 - RNA, 19 nt, Artificial Sequence
  Description of Artificial Sequence: Synthetic oligonucleotide
  Sense Strand Starting at position 245 of SEQ ID NO: 316209
guuggucuggguaguguuu

SEQ ID NO: 338116 - RNA, 19 nt, Artificial Sequence
  Description of Artificial Sequence: Synthetic oligonucleotide
  Antisense Strand to SEQ ID NO: 338115
aaacacuacccagaccaac

SEQ ID NO: 338117 - RNA, 19 nt, Artificial Sequence
  Description of Artificial Sequence: Synthetic oligonucleotide
  Sense Strand Starting at position 245 of SEQ ID NO: 316221
aguguuuacacaggugaac

SEQ ID NO: 338118 - RNA, 19 nt, Artificial Sequence
  Description of Artificial Sequence: Synthetic oligonucleotide
  Antisense Strand to SEQ ID NO: 338117
guucaccuguguaaacacu

SEQ ID NO: 338119 - RNA, 19 nt, Artificial Sequence
  Description of Artificial Sequence: Synthetic oligonucleotide
  Sense Strand Starting at position 245 of SEQ ID NO: 316233
ggugaacacaaaugucgaa

SEQ ID NO: 338120 - RNA, 19 nt, Artificial Sequence
  Description of Artificial Sequence: Synthetic oligonucleotide
  Antisense Strand to SEQ ID NO: 338119
uucgacauuuguguucacc

SEQ ID NO: 338121 - RNA, 19 nt, Artificial Sequence
  Description of Artificial Sequence: Synthetic oligonucleotide
  Sense Strand Starting at position 245 of SEQ ID NO: 317456
ugcccucgcccugugaaau

SEQ ID NO: 338122 - RNA, 19 nt, Artificial Sequence
  Description of Artificial Sequence: Synthetic oligonucleotide
  Antisense Strand to SEQ ID NO: 338121
auuucacagggcgagggca

SEQ ID NO: 338123 - RNA, 19 nt, Artificial Sequence
  Description of Artificial Sequence: Synthetic oligonucleotide
  Sense Strand Starting at position 245 of SEQ ID NO: 317466
cugugaaauguggaacguu

SEQ ID NO: 338124 - RNA, 19 nt, Artificial Sequence
  Description of Artificial Sequence: Synthetic oligonucleotide
  Antisense Strand to SEQ ID NO: 338123
aacguuccacauuucacag

SEQ ID NO: 338125 - RNA, 19 nt, Artificial Sequence
  Description of Artificial Sequence: Synthetic oligonucleotide
  Sense Strand Starting at position 245 of SEQ ID NO: 317515
uuaggaaaguacuuggcau

SEQ ID NO: 338126 - RNA, 19 nt, Artificial Sequence
  Description of Artificial Sequence: Synthetic oligonucleotide
  Antisense Strand to SEQ ID NO: 338125
augccaaguacuuuccuaa

SEQ ID NO: 338127 - RNA, 19 nt, Artificial Sequence
  Description of Artificial Sequence: Synthetic oligonucleotide
  Sense Strand Starting at position 245 of SEQ ID NO: 317615
acagucacuguguaauacu

SEQ ID NO: 338128 - RNA, 19 nt, Artificial Sequence
  Description of Artificial Sequence: Synthetic oligonucleotide
  Antisense Strand to SEQ ID NO: 338127
aguauuacacagugacugu

SEQ ID NO: 338129 - RNA, 19 nt, Artificial Sequence
  Description of Artificial Sequence: Synthetic oligonucleotide
  Sense Strand Starting at position 245 of SEQ ID NO: 318108
uucuucucucauggguaaa

SEQ ID NO: 338130 - RNA, 19 nt, Artificial Sequence
  Description of Artificial Sequence: Synthetic oligonucleotide
  Antisense Strand to SEQ ID NO: 338129
uuuacccaugagagaagaa

SEQ ID NO: 338131 - RNA, 19 nt, Artificial Sequence
  Description of Artificial Sequence: Synthetic oligonucleotide
  Sense Strand Starting at position 245 of SEQ ID NO: 318110
cuucucucauggguaaaua

SEQ ID NO: 338132 - RNA, 19 nt, Artificial Sequence
  Description of Artificial Sequence: Synthetic oligonucleotide
  Antisense Strand to SEQ ID NO: 338131
uauuuacccaugagagaag

SEQ ID NO: 338133 - RNA, 19 nt, Artificial Sequence
  Description of Artificial Sequence: Synthetic oligonucleotide
  Sense Strand Starting at position 245 of SEQ ID NO: 318270
ugauauggucaggguuauu

SEQ ID NO: 338134 - RNA, 19 nt, Artificial Sequence
  Description of Artificial Sequence: Synthetic oligonucleotide
  Antisense Strand to SEQ ID NO: 338133
aauaacccugaccauauca

SEQ ID NO: 338135 - RNA, 19 nt, Artificial Sequence
  Description of Artificial Sequence: Synthetic oligonucleotide
  Sense Strand Starting at position 245 of SEQ ID NO: 318273
uauggucaggguuauuagu

SEQ ID NO: 338136 - RNA, 19 nt, Artificial Sequence
  Description of Artificial Sequence: Synthetic oligonucleotide
  Antisense Strand to SEQ ID NO: 338135
acuaauaacccugaccaua

SEQ ID NO: 338137 - RNA, 19 nt, Artificial Sequence
  Description of Artificial Sequence: Synthetic oligonucleotide
  Sense Strand Starting at position 245 of SEQ ID NO: 318309
ggguaaaguugucuaauac

SEQ ID NO: 338138 - RNA, 19 nt, Artificial Sequence
  Description of Artificial Sequence: Synthetic oligonucleotide
  Antisense Strand to SEQ ID NO: 338137
guauuagacaacuuuaccc

SEQ ID NO: 338139 - RNA, 19 nt, Artificial Sequence
  Description of Artificial Sequence: Synthetic oligonucleotide
  Sense Strand Starting at position 245 of SEQ ID NO: 318310
gguaaaguugucuaauaca

SEQ ID NO: 338140 - RNA, 19 nt, Artificial Sequence
  Description of Artificial Sequence: Synthetic oligonucleotide
  Antisense Strand to SEQ ID NO: 338139
uguauuagacaacuuuacc

SEQ ID NO: 338141 - RNA, 19 nt, Artificial Sequence
  Description of Artificial Sequence: Synthetic oligonucleotide
  Sense Strand Starting at position 245 of SEQ ID NO: 318344
guguuuaucuucuugacaa

SEQ ID NO: 338142 - RNA, 19 nt, Artificial Sequence
  Description of Artificial Sequence: Synthetic oligonucleotide
  Antisense Strand to SEQ ID NO: 338141
uugucaagaagauaaacac

SEQ ID NO: 338143 - RNA, 19 nt, Artificial Sequence
  Description of Artificial Sequence: Synthetic oligonucleotide
  Sense Strand Starting at position 245 of SEQ ID NO: 318449
uaggguggugccuagcaaa

SEQ ID NO: 338144 - RNA, 19 nt, Artificial Sequence
  Description of Artificial Sequence: Synthetic oligonucleotide
  Antisense Strand to SEQ ID NO: 338143
uuugcuaggcaccacccua

SEQ ID NO: 338145 - RNA, 19 nt, Artificial Sequence
  Description of Artificial Sequence: Synthetic oligonucleotide
  Sense Strand Starting at position 245 of SEQ ID NO: 318464
caaauaauggguggccaau

SEQ ID NO: 338146 - RNA, 19 nt, Artificial Sequence
  Description of Artificial Sequence: Synthetic oligonucleotide
  Antisense Strand to SEQ ID NO: 338145
auuggccacccauuauuug

SEQ ID NO: 338147 - RNA, 19 nt, Artificial Sequence
  Description of Artificial Sequence: Synthetic oligonucleotide
  Sense Strand Starting at position 245 of SEQ ID NO: 318618
uuguauugaguuuguaaag

SEQ ID NO: 338148 - RNA, 19 nt, Artificial Sequence
  Description of Artificial Sequence: Synthetic oligonucleotide
  Antisense Strand to SEQ ID NO: 338147
cuuuacaaacucaauacaa

SEQ ID NO: 338149 - RNA, 19 nt, Artificial Sequence
  Description of Artificial Sequence: Synthetic oligonucleotide
  Sense Strand Starting at position 245 of SEQ ID NO: 318685
ucaaguaaacuauguguga

SEQ ID NO: 338150 - RNA, 19 nt, Artificial Sequence
  Description of Artificial Sequence: Synthetic oligonucleotide
  Antisense Strand to SEQ ID NO: 338149
ucacacauaguuuacuuga

SEQ ID NO: 338151 - RNA, 19 nt, Artificial Sequence
  Description of Artificial Sequence: Synthetic oligonucleotide
  Sense Strand Starting at position 245 of SEQ ID NO: 318686
caaguaaacuaugugugau

SEQ ID NO: 338152 - RNA, 19 nt, Artificial Sequence
  Description of Artificial Sequence: Synthetic oligonucleotide
  Antisense Strand to SEQ ID NO: 338151
aucacacauaguuuacuug

SEQ ID NO: 338153 - RNA, 19 nt, Artificial Sequence
  Description of Artificial Sequence: Synthetic oligonucleotide
  Sense Strand Starting at position 245 of SEQ ID NO: 318776
gugucugugagagaguuua

SEQ ID NO: 338154 - RNA, 19 nt, Artificial Sequence
  Description of Artificial Sequence: Synthetic oligonucleotide
  Antisense Strand to SEQ ID NO: 338153
uaaacucucucacagacac

SEQ ID NO: 338155 - RNA, 19 nt, Artificial Sequence
  Description of Artificial Sequence: Synthetic oligonucleotide
  Sense Strand Starting at position 245 of SEQ ID NO: 318811
uugaauuggugagcugagu

SEQ ID NO: 338156 - RNA, 19 nt, Artificial Sequence
  Description of Artificial Sequence: Synthetic oligonucleotide
  Antisense Strand to SEQ ID NO: 338155
acucagcucaccaauucaa

SEQ ID NO: 338157 - RNA, 19 nt, Artificial Sequence
  Description of Artificial Sequence: Synthetic oligonucleotide
  Sense Strand Starting at position 245 of SEQ ID NO: 318845
ucccaaugucaguggacau

SEQ ID NO: 338158 - RNA, 19 nt, Artificial Sequence
  Description of Artificial Sequence: Synthetic oligonucleotide
  Antisense Strand to SEQ ID NO: 338157
auguccacugacauuggga

SEQ ID NO: 338159 - RNA, 19 nt, Artificial Sequence
  Description of Artificial Sequence: Synthetic oligonucleotide
  Sense Strand Starting at position 245 of SEQ ID NO: 319039
ccagacuaggacuguauua

SEQ ID NO: 338160 - RNA, 19 nt, Artificial Sequence
  Description of Artificial Sequence: Synthetic oligonucleotide
  Antisense Strand to SEQ ID NO: 338159
uaauacaguccuagucugg

SEQ ID NO: 338161 - RNA, 19 nt, Artificial Sequence
  Description of Artificial Sequence: Synthetic oligonucleotide
  Sense Strand Starting at position 246 of SEQ ID NO: 315445
gggagagucgccugaacca

SEQ ID NO: 338162 - RNA, 19 nt, Artificial Sequence
  Description of Artificial Sequence: Synthetic oligonucleotide
  Antisense Strand to SEQ ID NO: 338161
ugguucaggcgacucuccc

SEQ ID NO: 338163 - RNA, 19 nt, Artificial Sequence
  Description of Artificial Sequence: Synthetic oligonucleotide
  Sense Strand Starting at position 246 of SEQ ID NO: 315922
ggagagguggcugguguua

SEQ ID NO: 338164 - RNA, 19 nt, Artificial Sequence
  Description of Artificial Sequence: Synthetic oligonucleotide
  Antisense Strand to SEQ ID NO: 338163
uaacaccagccaccucucc

SEQ ID NO: 338165 - RNA, 19 nt, Artificial Sequence
  Description of Artificial Sequence: Synthetic oligonucleotide
  Sense Strand Starting at position 246 of SEQ ID NO: 315934
gguguuaagaggcaccauu

SEQ ID NO: 338166 - RNA, 19 nt, Artificial Sequence
  Description of Artificial Sequence: Synthetic oligonucleotide
  Antisense Strand to SEQ ID NO: 338165
aauggugccucuuaacacc

SEQ ID NO: 338167 - RNA, 19 nt, Artificial Sequence
  Description of Artificial Sequence: Synthetic oligonucleotide
  Sense Strand Starting at position 246 of SEQ ID NO: 316161
gccaccuuccugggcaaau

SEQ ID NO: 338168 - RNA, 19 nt, Artificial Sequence
  Description of Artificial Sequence: Synthetic oligonucleotide
  Antisense Strand to SEQ ID NO: 338167
auuugcccaggaagguggc

SEQ ID NO: 338169 - RNA, 19 nt, Artificial Sequence
  Description of Artificial Sequence: Synthetic oligonucleotide
  Sense Strand Starting at position 246 of SEQ ID NO: 316162
ccaccuuccugggcaaauu

SEQ ID NO: 338170 - RNA, 19 nt, Artificial Sequence
  Description of Artificial Sequence: Synthetic oligonucleotide
  Antisense Strand to SEQ ID NO: 338169
aauuugcccaggaaggugg

SEQ ID NO: 338171 - RNA, 19 nt, Artificial Sequence
  Description of Artificial Sequence: Synthetic oligonucleotide
  Sense Strand Starting at position 246 of SEQ ID NO: 316264
ucacguggcuucucaaaca

SEQ ID NO: 338172 - RNA, 19 nt, Artificial Sequence
  Description of Artificial Sequence: Synthetic oligonucleotide
  Antisense Strand to SEQ ID NO: 338171
uguuugagaagccacguga

SEQ ID NO: 338173 - RNA, 19 nt, Artificial Sequence
  Description of Artificial Sequence: Synthetic oligonucleotide
  Sense Strand Starting at position 246 of SEQ ID NO: 316298
ggcgauaagucagcucaga

SEQ ID NO: 338174 - RNA, 19 nt, Artificial Sequence
  Description of Artificial Sequence: Synthetic oligonucleotide
  Antisense Strand to SEQ ID NO: 338173
ucugagcugacuuaucgcc

SEQ ID NO: 338175 - RNA, 19 nt, Artificial Sequence
  Description of Artificial Sequence: Synthetic oligonucleotide
  Sense Strand Starting at position 246 of SEQ ID NO: 316546
ggcugaccaucuuucuaca

SEQ ID NO: 338176 - RNA, 19 nt, Artificial Sequence
  Description of Artificial Sequence: Synthetic oligonucleotide
  Antisense Strand to SEQ ID NO: 338175
uguagaaagauggucagcc

SEQ ID NO: 338177 - RNA, 19 nt, Artificial Sequence
  Description of Artificial Sequence: Synthetic oligonucleotide
  Sense Strand Starting at position 246 of SEQ ID NO: 316568
ucgauucuaugcuuagcau

SEQ ID NO: 338178 - RNA, 19 nt, Artificial Sequence
  Description of Artificial Sequence: Synthetic oligonucleotide
  Antisense Strand to SEQ ID NO: 338177
augcuaagcauagaaucga

SEQ ID NO: 338179 - RNA, 19 nt, Artificial Sequence
  Description of Artificial Sequence: Synthetic oligonucleotide
  Sense Strand Starting at position 246 of SEQ ID NO: 316612
agagaaugucuuggguggu

SEQ ID NO: 338180 - RNA, 19 nt, Artificial Sequence
  Description of Artificial Sequence: Synthetic oligonucleotide
  Antisense Strand to SEQ ID NO: 338179
accacccaagacauucucu

SEQ ID NO: 338181 - RNA, 19 nt, Artificial Sequence
  Description of Artificial Sequence: Synthetic oligonucleotide
  Sense Strand Starting at position 246 of SEQ ID NO: 316615
gaaugucuuggguggugga

SEQ ID NO: 338182 - RNA, 19 nt, Artificial Sequence
  Description of Artificial Sequence: Synthetic oligonucleotide
  Antisense Strand to SEQ ID NO: 338181
uccaccacccaagacauuc

SEQ ID NO: 338183 - RNA, 19 nt, Artificial Sequence
  Description of Artificial Sequence: Synthetic oligonucleotide
  Sense Strand Starting at position 246 of SEQ ID NO: 316618
ugucuugggugguggagau

SEQ ID NO: 338184 - RNA, 19 nt, Artificial Sequence
  Description of Artificial Sequence: Synthetic oligonucleotide
  Antisense Strand to SEQ ID NO: 338183
aucuccaccacccaagaca

SEQ ID NO: 338185 - RNA, 19 nt, Artificial Sequence
  Description of Artificial Sequence: Synthetic oligonucleotide
  Sense Strand Starting at position 246 of SEQ ID NO: 316619
gucuugggugguggagaua

SEQ ID NO: 338186 - RNA, 19 nt, Artificial Sequence
  Description of Artificial Sequence: Synthetic oligonucleotide
  Antisense Strand to SEQ ID NO: 338185
uaucuccaccacccaagac

SEQ ID NO: 338187 - RNA, 19 nt, Artificial Sequence
  Description of Artificial Sequence: Synthetic oligonucleotide
  Sense Strand Starting at position 246 of SEQ ID NO: 316632
gagauaguggcguagagaa

SEQ ID NO: 338188 - RNA, 19 nt, Artificial Sequence
  Description of Artificial Sequence: Synthetic oligonucleotide
  Antisense Strand to SEQ ID NO: 338187
uucucuacgccacuaucuc

SEQ ID NO: 338189 - RNA, 19 nt, Artificial Sequence
  Description of Artificial Sequence: Synthetic oligonucleotide
  Sense Strand Starting at position 246 of SEQ ID NO: 316646
gagaaaguucaauggugug

SEQ ID NO: 338190 - RNA, 19 nt, Artificial Sequence
  Description of Artificial Sequence: Synthetic oligonucleotide
  Antisense Strand to SEQ ID NO: 338189
cacaccauugaacuuucuc

SEQ ID NO: 338191 - RNA, 19 nt, Artificial Sequence
  Description of Artificial Sequence: Synthetic oligonucleotide
  Sense Strand Starting at position 246 of SEQ ID NO: 316652
guucaauggugugaauggu

SEQ ID NO: 338192 - RNA, 19 nt, Artificial Sequence
  Description of Artificial Sequence: Synthetic oligonucleotide
  Antisense Strand to SEQ ID NO: 338191
accauucacaccauugaac

SEQ ID NO: 338193 - RNA, 19 nt, Artificial Sequence
  Description of Artificial Sequence: Synthetic oligonucleotide
  Sense Strand Starting at position 246 of SEQ ID NO: 318014
gcguagagauagugugaga

SEQ ID NO: 338194 - RNA, 19 nt, Artificial Sequence
  Description of Artificial Sequence: Synthetic oligonucleotide
  Antisense Strand to SEQ ID NO: 338193
ucucacacuaucucuacgc

SEQ ID NO: 338195 - RNA, 19 nt, Artificial Sequence
  Description of Artificial Sequence: Synthetic oligonucleotide
  Sense Strand Starting at position 246 of SEQ ID NO: 318017
uagagauagugugagagga

SEQ ID NO: 338196 - RNA, 19 nt, Artificial Sequence
  Description of Artificial Sequence: Synthetic oligonucleotide
  Antisense Strand to SEQ ID NO: 338195
uccucucacacuaucucua

SEQ ID NO: 338197 - RNA, 19 nt, Artificial Sequence
  Description of Artificial Sequence: Synthetic oligonucleotide
  Sense Strand Starting at position 246 of SEQ ID NO: 318252
ggauccguguccaggagaa

SEQ ID NO: 338198 - RNA, 19 nt, Artificial Sequence
  Description of Artificial Sequence: Synthetic oligonucleotide
  Antisense Strand to SEQ ID NO: 338197
uucuccuggacacggaucc

SEQ ID NO: 338199 - RNA, 19 nt, Artificial Sequence
  Description of Artificial Sequence: Synthetic oligonucleotide
  Sense Strand Starting at position 246 of SEQ ID NO: 318454
uagcgacgucauggcaaau

SEQ ID NO: 338200 - RNA, 19 nt, Artificial Sequence
  Description of Artificial Sequence: Synthetic oligonucleotide
  Antisense Strand to SEQ ID NO: 338199
auuugccaugacgucgcua

SEQ ID NO: 338201 - RNA, 19 nt, Artificial Sequence
  Description of Artificial Sequence: Synthetic oligonucleotide
  Sense Strand Starting at position 247 of SEQ ID NO: 315378
gagcaaaugccacagguau

SEQ ID NO: 338202 - RNA, 19 nt, Artificial Sequence
  Description of Artificial Sequence: Synthetic oligonucleotide
  Antisense Strand to SEQ ID NO: 338201
auaccuguggcauuugcuc

SEQ ID NO: 338203 - RNA, 19 nt, Artificial Sequence
  Description of Artificial Sequence: Synthetic oligonucleotide
  Sense Strand Starting at position 247 of SEQ ID NO: 315468
aaaguugucccuugauagg

SEQ ID NO: 338204 - RNA, 19 nt, Artificial Sequence
  Description of Artificial Sequence: Synthetic oligonucleotide
  Antisense Strand to SEQ ID NO: 338203
ccuaucaagggacaacuuu

SEQ ID NO: 338205 - RNA, 19 nt, Artificial Sequence
  Description of Artificial Sequence: Synthetic oligonucleotide
  Sense Strand Starting at position 247 of SEQ ID NO: 315625
acagacacaugauauaaga

SEQ ID NO: 338206 - RNA, 19 nt, Artificial Sequence
  Description of Artificial Sequence: Synthetic oligonucleotide
  Antisense Strand to SEQ ID NO: 338205
ucuuauaucaugugucugu

SEQ ID NO: 338207 - RNA, 19 nt, Artificial Sequence
  Description of Artificial Sequence: Synthetic oligonucleotide
  Sense Strand Starting at position 247 of SEQ ID NO: 315667
agauacuccagccgugaau

SEQ ID NO: 338208 - RNA, 19 nt, Artificial Sequence
  Description of Artificial Sequence: Synthetic oligonucleotide
  Antisense Strand to SEQ ID NO: 338207
auucacggcuggaguaucu

SEQ ID NO: 338209 - RNA, 19 nt, Artificial Sequence
  Description of Artificial Sequence: Synthetic oligonucleotide
  Sense Strand Starting at position 247 of SEQ ID NO: 315669
auacuccagccgugaauca

SEQ ID NO: 338210 - RNA, 19 nt, Artificial Sequence
  Description of Artificial Sequence: Synthetic oligonucleotide
  Antisense Strand to SEQ ID NO: 338209
ugauucacggcuggaguau

SEQ ID NO: 338211 - RNA, 19 nt, Artificial Sequence
  Description of Artificial Sequence: Synthetic oligonucleotide
  Sense Strand Starting at position 247 of SEQ ID NO: 315670
uacuccagccgugaaucau

SEQ ID NO: 338212 - RNA, 19 nt, Artificial Sequence
  Description of Artificial Sequence: Synthetic oligonucleotide
  Antisense Strand to SEQ ID NO: 338211
augauucacggcuggagua

SEQ ID NO: 338213 - RNA, 19 nt, Artificial Sequence
  Description of Artificial Sequence: Synthetic oligonucleotide
  Sense Strand Starting at position 247 of SEQ ID NO: 315676
agccgugaaucauuauuau

SEQ ID NO: 338214 - RNA, 19 nt, Artificial Sequence
  Description of Artificial Sequence: Synthetic oligonucleotide
  Antisense Strand to SEQ ID NO: 338213
auaauaaugauucacggcu

SEQ ID NO: 338215 - RNA, 19 nt, Artificial Sequence
  Description of Artificial Sequence: Synthetic oligonucleotide
  Sense Strand Starting at position 247 of SEQ ID NO: 315679
cgugaaucauuauuaucua

SEQ ID NO: 338216 - RNA, 19 nt, Artificial Sequence
  Description of Artificial Sequence: Synthetic oligonucleotide
  Antisense Strand to SEQ ID NO: 338215
uagauaauaaugauucacg

SEQ ID NO: 338217 - RNA, 19 nt, Artificial Sequence
  Description of Artificial Sequence: Synthetic oligonucleotide
  Sense Strand Starting at position 247 of SEQ ID NO: 315695
cuaaguaaaugggaauuua

SEQ ID NO: 338218 - RNA, 19 nt, Artificial Sequence
  Description of Artificial Sequence: Synthetic oligonucleotide
  Antisense Strand to SEQ ID NO: 338217
uaaauucccauuuacuuag

SEQ ID NO: 338219 - RNA, 19 nt, Artificial Sequence
  Description of Artificial Sequence: Synthetic oligonucleotide
  Sense Strand Starting at position 247 of SEQ ID NO: 315703
augggaauuuaaugacuuu

SEQ ID NO: 338220 - RNA, 19 nt, Artificial Sequence
  Description of Artificial Sequence: Synthetic oligonucleotide
  Antisense Strand to SEQ ID NO: 338219
aaagucauuaaauucccau

SEQ ID NO: 338221 - RNA, 19 nt, Artificial Sequence
  Description of Artificial Sequence: Synthetic oligonucleotide
  Sense Strand Starting at position 247 of SEQ ID NO: 315866
gaaauuucuuuguggaaga

SEQ ID NO: 338222 - RNA, 19 nt, Artificial Sequence
  Description of Artificial Sequence: Synthetic oligonucleotide
  Antisense Strand to SEQ ID NO: 338221
ucuuccacaaagaaauuuc

SEQ ID NO: 338223 - RNA, 19 nt, Artificial Sequence
  Description of Artificial Sequence: Synthetic oligonucleotide
  Sense Strand Starting at position 247 of SEQ ID NO: 315867
aaauuucuuuguggaagau

SEQ ID NO: 338224 - RNA, 19 nt, Artificial Sequence
  Description of Artificial Sequence: Synthetic oligonucleotide
  Antisense Strand to SEQ ID NO: 338223
aucuuccacaaagaaauuu

SEQ ID NO: 338225 - RNA, 19 nt, Artificial Sequence
  Description of Artificial Sequence: Synthetic oligonucleotide
  Sense Strand Starting at position 247 of SEQ ID NO: 316011
uauuauguugcgcagguua

SEQ ID NO: 338226 - RNA, 19 nt, Artificial Sequence
  Description of Artificial Sequence: Synthetic oligonucleotide
  Antisense Strand to SEQ ID NO: 338225
uaaccugcgcaacauaaua

SEQ ID NO: 338227 - RNA, 19 nt, Artificial Sequence
  Description of Artificial Sequence: Synthetic oligonucleotide
  Sense Strand Starting at position 247 of SEQ ID NO: 316018
uugcgcagguuauuuagaa

SEQ ID NO: 338228 - RNA, 19 nt, Artificial Sequence
  Description of Artificial Sequence: Synthetic oligonucleotide
  Antisense Strand to SEQ ID NO: 338227
uucuaaauaaccugcgcaa

SEQ ID NO: 338229 - RNA, 19 nt, Artificial Sequence
  Description of Artificial Sequence: Synthetic oligonucleotide
  Sense Strand Starting at position 247 of SEQ ID NO: 316022
gcagguuauuuagaaccuu

SEQ ID NO: 338230 - RNA, 19 nt, Artificial Sequence
  Description of Artificial Sequence: Synthetic oligonucleotide
  Antisense Strand to SEQ ID NO: 338229
aagguucuaaauaaccugc

SEQ ID NO: 338231 - RNA, 19 nt, Artificial Sequence
  Description of Artificial Sequence: Synthetic oligonucleotide
  Sense Strand Starting at position 247 of SEQ ID NO: 316347
gcgugcacacuugagaagu

SEQ ID NO: 338232 - RNA, 19 nt, Artificial Sequence
  Description of Artificial Sequence: Synthetic oligonucleotide
  Antisense Strand to SEQ ID NO: 338231
acuucucaagugugcacgc

SEQ ID NO: 338233 - RNA, 19 nt, Artificial Sequence
  Description of Artificial Sequence: Synthetic oligonucleotide
  Sense Strand Starting at position 247 of SEQ ID NO: 316445
augccuaggagaggucuaa

SEQ ID NO: 338234 - RNA, 19 nt, Artificial Sequence
  Description of Artificial Sequence: Synthetic oligonucleotide
  Antisense Strand to SEQ ID NO: 338233
uuagaccucuccuaggcau

SEQ ID NO: 338235 - RNA, 19 nt, Artificial Sequence
  Description of Artificial Sequence: Synthetic oligonucleotide
  Sense Strand Starting at position 247 of SEQ ID NO: 316457
ggucuaagagcucaaguuc

SEQ ID NO: 338236 - RNA, 19 nt, Artificial Sequence
  Description of Artificial Sequence: Synthetic oligonucleotide
  Antisense Strand to SEQ ID NO: 338235
gaacuugagcucuuagacc

SEQ ID NO: 338237 - RNA, 19 nt, Artificial Sequence
  Description of Artificial Sequence: Synthetic oligonucleotide
  Sense Strand Starting at position 247 of SEQ ID NO: 316550
aagugucacccagggaguu

SEQ ID NO: 338238 - RNA, 19 nt, Artificial Sequence
  Description of Artificial Sequence: Synthetic oligonucleotide
  Antisense Strand to SEQ ID NO: 338237
aacucccugggugacacuu

SEQ ID NO: 338239 - RNA, 19 nt, Artificial Sequence
  Description of Artificial Sequence: Synthetic oligonucleotide
  Sense Strand Starting at position 247 of SEQ ID NO: 316551
agugucacccagggaguua

SEQ ID NO: 338240 - RNA, 19 nt, Artificial Sequence
  Description of Artificial Sequence: Synthetic oligonucleotide
  Antisense Strand to SEQ ID NO: 338239
uaacucccugggugacacu

SEQ ID NO: 338241 - RNA, 19 nt, Artificial Sequence
  Description of Artificial Sequence: Synthetic oligonucleotide
  Sense Strand Starting at position 247 of SEQ ID NO: 316597
cgucgcuuuccucaaacca

SEQ ID NO: 338242 - RNA, 19 nt, Artificial Sequence
  Description of Artificial Sequence: Synthetic oligonucleotide
  Antisense Strand to SEQ ID NO: 338241
ugguuugaggaaagcgacg

SEQ ID NO: 338243 - RNA, 19 nt, Artificial Sequence
  Description of Artificial Sequence: Synthetic oligonucleotide
  Sense Strand Starting at position 247 of SEQ ID NO: 316667
acugaagacugauaaccau

SEQ ID NO: 338244 - RNA, 19 nt, Artificial Sequence
  Description of Artificial Sequence: Synthetic oligonucleotide
  Antisense Strand to SEQ ID NO: 338243
augguuaucagucuucagu

SEQ ID NO: 338245 - RNA, 19 nt, Artificial Sequence
  Description of Artificial Sequence: Synthetic oligonucleotide
  Sense Strand Starting at position 247 of SEQ ID NO: 316764
ugcacucacugcucagauu

SEQ ID NO: 338246 - RNA, 19 nt, Artificial Sequence
  Description of Artificial Sequence: Synthetic oligonucleotide
  Antisense Strand to SEQ ID NO: 338245
aaucugagcagugagugca

SEQ ID NO: 338247 - RNA, 19 nt, Artificial Sequence
  Description of Artificial Sequence: Synthetic oligonucleotide
  Sense Strand Starting at position 247 of SEQ ID NO: 317715
ucacuugucucugcaagga

SEQ ID NO: 338248 - RNA, 19 nt, Artificial Sequence
  Description of Artificial Sequence: Synthetic oligonucleotide
  Antisense Strand to SEQ ID NO: 338247
uccuugcagagacaaguga

SEQ ID NO: 338249 - RNA, 19 nt, Artificial Sequence
  Description of Artificial Sequence: Synthetic oligonucleotide
  Sense Strand Starting at position 247 of SEQ ID NO: 317728
caaggagccucagagacuu

SEQ ID NO: 338250 - RNA, 19 nt, Artificial Sequence
  Description of Artificial Sequence: Synthetic oligonucleotide
  Antisense Strand to SEQ ID NO: 338249
aagucucugaggcuccuug

SEQ ID NO: 338251 - RNA, 19 nt, Artificial Sequence
  Description of Artificial Sequence: Synthetic oligonucleotide
  Sense Strand Starting at position 247 of SEQ ID NO: 317903
cccuuugaucuaugauugu

SEQ ID NO: 338252 - RNA, 19 nt, Artificial Sequence
  Description of Artificial Sequence: Synthetic oligonucleotide
  Antisense Strand to SEQ ID NO: 338251
acaaucauagaucaaaggg

SEQ ID NO: 338253 - RNA, 19 nt, Artificial Sequence
  Description of Artificial Sequence: Synthetic oligonucleotide
  Sense Strand Starting at position 247 of SEQ ID NO: 317907
uugaucuaugauuguccuu

SEQ ID NO: 338254 - RNA, 19 nt, Artificial Sequence
  Description of Artificial Sequence: Synthetic oligonucleotide
  Antisense Strand to SEQ ID NO: 338253
aaggacaaucauagaucaa

SEQ ID NO: 338255 - RNA, 19 nt, Artificial Sequence
  Description of Artificial Sequence: Synthetic oligonucleotide
  Sense Strand Starting at position 247 of SEQ ID NO: 317930
auguauuauuguccuuaug

SEQ ID NO: 338256 - RNA, 19 nt, Artificial Sequence
  Description of Artificial Sequence: Synthetic oligonucleotide
  Antisense Strand to SEQ ID NO: 338255
cauaaggacaauaauacau

SEQ ID NO: 338257 - RNA, 19 nt, Artificial Sequence
  Description of Artificial Sequence: Synthetic oligonucleotide
  Sense Strand Starting at position 247 of SEQ ID NO: 318005
uaugucuuagagcagcaau

SEQ ID NO: 338258 - RNA, 19 nt, Artificial Sequence
  Description of Artificial Sequence: Synthetic oligonucleotide
  Antisense Strand to SEQ ID NO: 338257
auugcugcucuaagacaua

SEQ ID NO: 338259 - RNA, 19 nt, Artificial Sequence
  Description of Artificial Sequence: Synthetic oligonucleotide
  Sense Strand Starting at position 247 of SEQ ID NO: 318080
ugaguuaucaaauguuguu

SEQ ID NO: 338260 - RNA, 19 nt, Artificial Sequence
  Description of Artificial Sequence: Synthetic oligonucleotide
  Antisense Strand to SEQ ID NO: 338259
aacaacauuugauaacuca

SEQ ID NO: 338261 - RNA, 19 nt, Artificial Sequence
  Description of Artificial Sequence: Synthetic oligonucleotide
  Sense Strand Starting at position 247 of SEQ ID NO: 318237
guaguuucccucuauguuu

SEQ ID NO: 338262 - RNA, 19 nt, Artificial Sequence
  Description of Artificial Sequence: Synthetic oligonucleotide
  Antisense Strand to SEQ ID NO: 338261
aaacauagagggaaacuac

SEQ ID NO: 338263 - RNA, 19 nt, Artificial Sequence
  Description of Artificial Sequence: Synthetic oligonucleotide
  Sense Strand Starting at position 247 of SEQ ID NO: 318267
ccuucuuuguaguuaguca

SEQ ID NO: 338264 - RNA, 19 nt, Artificial Sequence
  Description of Artificial Sequence: Synthetic oligonucleotide
  Antisense Strand to SEQ ID NO: 338263
ugacuaacuacaaagaagg

SEQ ID NO: 338265 - RNA, 19 nt, Artificial Sequence
  Description of Artificial Sequence: Synthetic oligonucleotide
  Sense Strand Starting at position 247 of SEQ ID NO: 318271
cuuuguaguuagucagaag

SEQ ID NO: 338266 - RNA, 19 nt, Artificial Sequence
  Description of Artificial Sequence: Synthetic oligonucleotide
  Antisense Strand to SEQ ID NO: 338265
cuucugacuaacuacaaag

SEQ ID NO: 338267 - RNA, 19 nt, Artificial Sequence
  Description of Artificial Sequence: Synthetic oligonucleotide
  Sense Strand Starting at position 247 of SEQ ID NO: 318272
uuuguaguuagucagaagu

SEQ ID NO: 338268 - RNA, 19 nt, Artificial Sequence
  Description of Artificial Sequence: Synthetic oligonucleotide
  Antisense Strand to SEQ ID NO: 338267
acuucugacuaacuacaaa

SEQ ID NO: 338269 - RNA, 19 nt, Artificial Sequence
  Description of Artificial Sequence: Synthetic oligonucleotide
  Sense Strand Starting at position 247 of SEQ ID NO: 318290
ugcuguugugguuaggaau

SEQ ID NO: 338270 - RNA, 19 nt, Artificial Sequence
  Description of Artificial Sequence: Synthetic oligonucleotide
  Antisense Strand to SEQ ID NO: 338269
auuccuaaccacaacagca

SEQ ID NO: 338271 - RNA, 19 nt, Artificial Sequence
  Description of Artificial Sequence: Synthetic oligonucleotide
  Sense Strand Starting at position 247 of SEQ ID NO: 318699
cuaucagcuguuuaggaca

SEQ ID NO: 338272 - RNA, 19 nt, Artificial Sequence
  Description of Artificial Sequence: Synthetic oligonucleotide
  Antisense Strand to SEQ ID NO: 338271
uguccuaaacagcugauag

SEQ ID NO: 338273 - RNA, 19 nt, Artificial Sequence
  Description of Artificial Sequence: Synthetic oligonucleotide
  Sense Strand Starting at position 247 of SEQ ID NO: 318771
cuaggucucaguggauguu

SEQ ID NO: 338274 - RNA, 19 nt, Artificial Sequence
  Description of Artificial Sequence: Synthetic oligonucleotide
  Antisense Strand to SEQ ID NO: 338273
aacauccacugagaccuag

SEQ ID NO: 338275 - RNA, 19 nt, Artificial Sequence
  Description of Artificial Sequence: Synthetic oligonucleotide
  Sense Strand Starting at position 247 of SEQ ID NO: 318807
uguggaugaagauguauca

SEQ ID NO: 338276 - RNA, 19 nt, Artificial Sequence
  Description of Artificial Sequence: Synthetic oligonucleotide
  Antisense Strand to SEQ ID NO: 338275
ugauacaucuucauccaca

SEQ ID NO: 338277 - RNA, 19 nt, Artificial Sequence
  Description of Artificial Sequence: Synthetic oligonucleotide
  Sense Strand Starting at position 247 of SEQ ID NO: 318867
acuggaauuugcugcagga

SEQ ID NO: 338278 - RNA, 19 nt, Artificial Sequence
  Description of Artificial Sequence: Synthetic oligonucleotide
  Antisense Strand to SEQ ID NO: 338277
uccugcagcaaauuccagu

SEQ ID NO: 338279 - RNA, 19 nt, Artificial Sequence
  Description of Artificial Sequence: Synthetic oligonucleotide
  Sense Strand Starting at position 247 of SEQ ID NO: 318888
agagcaguaccaugugaau

SEQ ID NO: 338280 - RNA, 19 nt, Artificial Sequence
  Description of Artificial Sequence: Synthetic oligonucleotide
  Antisense Strand to SEQ ID NO: 338279
auucacaugguacugcucu

SEQ ID NO: 338281 - RNA, 19 nt, Artificial Sequence
  Description of Artificial Sequence: Synthetic oligonucleotide
  Sense Strand Starting at position 248 of SEQ ID NO: 315305
gcacguagccugggaacaa

SEQ ID NO: 338282 - RNA, 19 nt, Artificial Sequence
  Description of Artificial Sequence: Synthetic oligonucleotide
  Antisense Strand to SEQ ID NO: 338281
uuguucccaggcuacgugc

SEQ ID NO: 338283 - RNA, 19 nt, Artificial Sequence
  Description of Artificial Sequence: Synthetic oligonucleotide
  Sense Strand Starting at position 248 of SEQ ID NO: 315427
ggacuuagaaggugcuaau

SEQ ID NO: 338284 - RNA, 19 nt, Artificial Sequence
  Description of Artificial Sequence: Synthetic oligonucleotide
  Antisense Strand to SEQ ID NO: 338283
auuagcaccuucuaagucc

SEQ ID NO: 338285 - RNA, 19 nt, Artificial Sequence
  Description of Artificial Sequence: Synthetic oligonucleotide
  Sense Strand Starting at position 248 of SEQ ID NO: 315573
agaguccauuuacauuauu

SEQ ID NO: 338286 - RNA, 19 nt, Artificial Sequence
  Description of Artificial Sequence: Synthetic oligonucleotide
  Antisense Strand to SEQ ID NO: 338285
aauaauguaaauggacucu

SEQ ID NO: 338287 - RNA, 19 nt, Artificial Sequence
  Description of Artificial Sequence: Synthetic oligonucleotide
  Sense Strand Starting at position 248 of SEQ ID NO: 315706
guuacuuaaccaugauguc

SEQ ID NO: 338288 - RNA, 19 nt, Artificial Sequence
  Description of Artificial Sequence: Synthetic oligonucleotide
  Antisense Strand to SEQ ID NO: 338287
gacaucaugguuaaguaac

SEQ ID NO: 338289 - RNA, 19 nt, Artificial Sequence
  Description of Artificial Sequence: Synthetic oligonucleotide
  Sense Strand Starting at position 248 of SEQ ID NO: 316085
guaccuacaucucuguaau

SEQ ID NO: 338290 - RNA, 19 nt, Artificial Sequence
  Description of Artificial Sequence: Synthetic oligonucleotide
  Antisense Strand to SEQ ID NO: 338289
auuacagagauguagguac

SEQ ID NO: 338291 - RNA, 19 nt, Artificial Sequence
  Description of Artificial Sequence: Synthetic oligonucleotide
  Sense Strand Starting at position 248 of SEQ ID NO: 316099
guaauagaauucuacugaa

SEQ ID NO: 338292 - RNA, 19 nt, Artificial Sequence
  Description of Artificial Sequence: Synthetic oligonucleotide
  Antisense Strand to SEQ ID NO: 338291
uucaguagaauucuauuac

SEQ ID NO: 338293 - RNA, 19 nt, Artificial Sequence
  Description of Artificial Sequence: Synthetic oligonucleotide
  Sense Strand Starting at position 248 of SEQ ID NO: 316175
aaagguuaguuguuaucau

SEQ ID NO: 338294 - RNA, 19 nt, Artificial Sequence
  Description of Artificial Sequence: Synthetic oligonucleotide
  Antisense Strand to SEQ ID NO: 338293
augauaacaacuaaccuuu

SEQ ID NO: 338295 - RNA, 19 nt, Artificial Sequence
  Description of Artificial Sequence: Synthetic oligonucleotide
  Sense Strand Starting at position 248 of SEQ ID NO: 316198
guucuuugucugucucagu

SEQ ID NO: 338296 - RNA, 19 nt, Artificial Sequence
  Description of Artificial Sequence: Synthetic oligonucleotide
  Antisense Strand to SEQ ID NO: 338295
acugagacagacaaagaac

SEQ ID NO: 338297 - RNA, 19 nt, Artificial Sequence
  Description of Artificial Sequence: Synthetic oligonucleotide
  Sense Strand Starting at position 248 of SEQ ID NO: 316232
ucagguguccuaggugauu

SEQ ID NO: 338298 - RNA, 19 nt, Artificial Sequence
  Description of Artificial Sequence: Synthetic oligonucleotide
  Antisense Strand to SEQ ID NO: 338297
aaucaccuaggacaccuga

SEQ ID NO: 338299 - RNA, 19 nt, Artificial Sequence
  Description of Artificial Sequence: Synthetic oligonucleotide
  Sense Strand Starting at position 248 of SEQ ID NO: 316344
ggcugcuguccucauggau

SEQ ID NO: 338300 - RNA, 19 nt, Artificial Sequence
  Description of Artificial Sequence: Synthetic oligonucleotide
  Antisense Strand to SEQ ID NO: 338299
auccaugaggacagcagcc

SEQ ID NO: 338301 - RNA, 19 nt, Artificial Sequence
  Description of Artificial Sequence: Synthetic oligonucleotide
  Sense Strand Starting at position 248 of SEQ ID NO: 316483
agacaccugccuugguauu

SEQ ID NO: 338302 - RNA, 19 nt, Artificial Sequence
  Description of Artificial Sequence: Synthetic oligonucleotide
  Antisense Strand to SEQ ID NO: 338301
aauaccaaggcaggugucu

SEQ ID NO: 338303 - RNA, 19 nt, Artificial Sequence
  Description of Artificial Sequence: Synthetic oligonucleotide
  Sense Strand Starting at position 248 of SEQ ID NO: 316493
cuugguauucacggaguua

SEQ ID NO: 338304 - RNA, 19 nt, Artificial Sequence
  Description of Artificial Sequence: Synthetic oligonucleotide
  Antisense Strand to SEQ ID NO: 338303
uaacuccgugaauaccaag

SEQ ID NO: 338305 - RNA, 19 nt, Artificial Sequence
  Description of Artificial Sequence: Synthetic oligonucleotide
  Sense Strand Starting at position 248 of SEQ ID NO: 316650
auuacaauaugugucacau

SEQ ID NO: 338306 - RNA, 19 nt, Artificial Sequence
  Description of Artificial Sequence: Synthetic oligonucleotide
  Antisense Strand to SEQ ID NO: 338305
augugacacauauuguaau

SEQ ID NO: 338307 - RNA, 19 nt, Artificial Sequence
  Description of Artificial Sequence: Synthetic oligonucleotide
  Sense Strand Starting at position 248 of SEQ ID NO: 316687
acaagauacugggagaauu

SEQ ID NO: 338308 - RNA, 19 nt, Artificial Sequence
  Description of Artificial Sequence: Synthetic oligonucleotide
  Antisense Strand to SEQ ID NO: 338307
aauucucccaguaucuugu

SEQ ID NO: 338309 - RNA, 19 nt, Artificial Sequence
  Description of Artificial Sequence: Synthetic oligonucleotide
  Sense Strand Starting at position 248 of SEQ ID NO: 316863
ccaggaaucuagccgacau

SEQ ID NO: 338310 - RNA, 19 nt, Artificial Sequence
  Description of Artificial Sequence: Synthetic oligonucleotide
  Antisense Strand to SEQ ID NO: 338309
augucggcuagauuccugg

SEQ ID NO: 338311 - RNA, 19 nt, Artificial Sequence
  Description of Artificial Sequence: Synthetic oligonucleotide
  Sense Strand Starting at position 248 of SEQ ID NO: 317385
ggcacugaaugcucaguaa

SEQ ID NO: 338312 - RNA, 19 nt, Artificial Sequence
  Description of Artificial Sequence: Synthetic oligonucleotide
  Antisense Strand to SEQ ID NO: 338311
uuacugagcauucagugcc

SEQ ID NO: 338313 - RNA, 19 nt, Artificial Sequence
  Description of Artificial Sequence: Synthetic oligonucleotide
  Sense Strand Starting at position 248 of SEQ ID NO: 317388
acugaaugcucaguaaagu

SEQ ID NO: 338314 - RNA, 19 nt, Artificial Sequence
  Description of Artificial Sequence: Synthetic oligonucleotide
  Antisense Strand to SEQ ID NO: 338313
acuuuacugagcauucagu

SEQ ID NO: 338315 - RNA, 19 nt, Artificial Sequence
  Description of Artificial Sequence: Synthetic oligonucleotide
  Sense Strand Starting at position 248 of SEQ ID NO: 317389
cugaaugcucaguaaaguu

SEQ ID NO: 338316 - RNA, 19 nt, Artificial Sequence
  Description of Artificial Sequence: Synthetic oligonucleotide
  Antisense Strand to SEQ ID NO: 338315
aacuuuacugagcauucag

SEQ ID NO: 338317 - RNA, 19 nt, Artificial Sequence
  Description of Artificial Sequence: Synthetic oligonucleotide
  Sense Strand Starting at position 248 of SEQ ID NO: 317562
ucgugaaagaugggugguu

SEQ ID NO: 338318 - RNA, 19 nt, Artificial Sequence
  Description of Artificial Sequence: Synthetic oligonucleotide
  Antisense Strand to SEQ ID NO: 338317
aaccacccaucuuucacga

SEQ ID NO: 338319 - RNA, 19 nt, Artificial Sequence
  Description of Artificial Sequence: Synthetic oligonucleotide
  Sense Strand Starting at position 248 of SEQ ID NO: 317564
gugaaagaugggugguuga

SEQ ID NO: 338320 - RNA, 19 nt, Artificial Sequence
  Description of Artificial Sequence: Synthetic oligonucleotide
  Antisense Strand to SEQ ID NO: 338319
ucaaccacccaucuuucac

SEQ ID NO: 338321 - RNA, 19 nt, Artificial Sequence
  Description of Artificial Sequence: Synthetic oligonucleotide
  Sense Strand Starting at position 248 of SEQ ID NO: 317571
augggugguugaucugauu

SEQ ID NO: 338322 - RNA, 19 nt, Artificial Sequence
  Description of Artificial Sequence: Synthetic oligonucleotide
  Antisense Strand to SEQ ID NO: 338321
aaucagaucaaccacccau

SEQ ID NO: 338323 - RNA, 19 nt, Artificial Sequence
  Description of Artificial Sequence: Synthetic oligonucleotide
  Sense Strand Starting at position 248 of SEQ ID NO: 317719
cuagaucugcguucguuga

SEQ ID NO: 338324 - RNA, 19 nt, Artificial Sequence
  Description of Artificial Sequence: Synthetic oligonucleotide
  Antisense Strand to SEQ ID NO: 338323
ucaacgaacgcagaucuag

SEQ ID NO: 338325 - RNA, 19 nt, Artificial Sequence
  Description of Artificial Sequence: Synthetic oligonucleotide
  Sense Strand Starting at position 248 of SEQ ID NO: 317944
aaaugugccuuugugagga

SEQ ID NO: 338326 - RNA, 19 nt, Artificial Sequence
  Description of Artificial Sequence: Synthetic oligonucleotide
  Antisense Strand to SEQ ID NO: 338325
uccucacaaaggcacauuu

SEQ ID NO: 338327 - RNA, 19 nt, Artificial Sequence
  Description of Artificial Sequence: Synthetic oligonucleotide
  Sense Strand Starting at position 248 of SEQ ID NO: 317949
ugccuuugugaggauaaga

SEQ ID NO: 338328 - RNA, 19 nt, Artificial Sequence
  Description of Artificial Sequence: Synthetic oligonucleotide
  Antisense Strand to SEQ ID NO: 338327
ucuuauccucacaaaggca

SEQ ID NO: 338329 - RNA, 19 nt, Artificial Sequence
  Description of Artificial Sequence: Synthetic oligonucleotide
  Sense Strand Starting at position 248 of SEQ ID NO: 318060
agcacagucuuaucugacu

SEQ ID NO: 338330 - RNA, 19 nt, Artificial Sequence
  Description of Artificial Sequence: Synthetic oligonucleotide
  Antisense Strand to SEQ ID NO: 338329
agucagauaagacugugcu

SEQ ID NO: 338331 - RNA, 19 nt, Artificial Sequence
  Description of Artificial Sequence: Synthetic oligonucleotide
  Sense Strand Starting at position 248 of SEQ ID NO: 318127
uccuuuaagugagcacaau

SEQ ID NO: 338332 - RNA, 19 nt, Artificial Sequence
  Description of Artificial Sequence: Synthetic oligonucleotide
  Antisense Strand to SEQ ID NO: 338331
auugugcucacuuaaagga

SEQ ID NO: 338333 - RNA, 19 nt, Artificial Sequence
  Description of Artificial Sequence: Synthetic oligonucleotide
  Sense Strand Starting at position 248 of SEQ ID NO: 318248
ugcccaacccauugguuua

SEQ ID NO: 338334 - RNA, 19 nt, Artificial Sequence
  Description of Artificial Sequence: Synthetic oligonucleotide
  Antisense Strand to SEQ ID NO: 338333
uaaaccaauggguugggca

SEQ ID NO: 338335 - RNA, 19 nt, Artificial Sequence
  Description of Artificial Sequence: Synthetic oligonucleotide
  Sense Strand Starting at position 248 of SEQ ID NO: 318332
cggcgcuaggcugucaauu

SEQ ID NO: 338336 - RNA, 19 nt, Artificial Sequence
  Description of Artificial Sequence: Synthetic oligonucleotide
  Antisense Strand to SEQ ID NO: 338335
aauugacagccuagcgccg

SEQ ID NO: 338337 - RNA, 19 nt, Artificial Sequence
  Description of Artificial Sequence: Synthetic oligonucleotide
  Sense Strand Starting at position 248 of SEQ ID NO: 318580
cgggaaucaacgugacauu

SEQ ID NO: 338338 - RNA, 19 nt, Artificial Sequence
  Description of Artificial Sequence: Synthetic oligonucleotide
  Antisense Strand to SEQ ID NO: 338337
aaugucacguugauucccg

SEQ ID NO: 338339 - RNA, 19 nt, Artificial Sequence
  Description of Artificial Sequence: Synthetic oligonucleotide
  Sense Strand Starting at position 248 of SEQ ID NO: 318590
cgugacauuucccaaacca

SEQ ID NO: 338340 - RNA, 19 nt, Artificial Sequence
  Description of Artificial Sequence: Synthetic oligonucleotide
  Antisense Strand to SEQ ID NO: 338339
ugguuugggaaaugucacg

SEQ ID NO: 338341 - RNA, 19 nt, Artificial Sequence
  Description of Artificial Sequence: Synthetic oligonucleotide
  Sense Strand Starting at position 248 of SEQ ID NO: 318630
cgugaauugcucagcggcu

SEQ ID NO: 338342 - RNA, 19 nt, Artificial Sequence
  Description of Artificial Sequence: Synthetic oligonucleotide
  Antisense Strand to SEQ ID NO: 338341
agccgcugagcaauucacg

SEQ ID NO: 338343 - RNA, 19 nt, Artificial Sequence
  Description of Artificial Sequence: Synthetic oligonucleotide
  Sense Strand Starting at position 248 of SEQ ID NO: 318871
cugggaccgcaguaauuaa

SEQ ID NO: 338344 - RNA, 19 nt, Artificial Sequence
  Description of Artificial Sequence: Synthetic oligonucleotide
  Antisense Strand to SEQ ID NO: 338343
uuaauuacugcggucccag

SEQ ID NO: 338345 - RNA, 19 nt, Artificial Sequence
  Description of Artificial Sequence: Synthetic oligonucleotide
  Sense Strand Starting at position 248 of SEQ ID NO: 318881
aguaauuaacacggacuca

SEQ ID NO: 338346 - RNA, 19 nt, Artificial Sequence
  Description of Artificial Sequence: Synthetic oligonucleotide
  Antisense Strand to SEQ ID NO: 338345
ugaguccguguuaauuacu

SEQ ID NO: 338347 - RNA, 19 nt, Artificial Sequence
  Description of Artificial Sequence: Synthetic oligonucleotide
  Sense Strand Starting at position 248 of SEQ ID NO: 318907
uuagguguuccgguuuguu

SEQ ID NO: 338348 - RNA, 19 nt, Artificial Sequence
  Description of Artificial Sequence: Synthetic oligonucleotide
  Antisense Strand to SEQ ID NO: 338347
aacaaaccggaacaccuaa

SEQ ID NO: 338349 - RNA, 19 nt, Artificial Sequence
  Description of Artificial Sequence: Synthetic oligonucleotide
  Sense Strand Starting at position 248 of SEQ ID NO: 318909
agguguuccgguuuguuca

SEQ ID NO: 338350 - RNA, 19 nt, Artificial Sequence
  Description of Artificial Sequence: Synthetic oligonucleotide
  Antisense Strand to SEQ ID NO: 338349
ugaacaaaccggaacaccu

SEQ ID NO: 338351 - RNA, 19 nt, Artificial Sequence
  Description of Artificial Sequence: Synthetic oligonucleotide
  Sense Strand Starting at position 248 of SEQ ID NO: 318991
auaagaauacugcggccua

SEQ ID NO: 338352 - RNA, 19 nt, Artificial Sequence
  Description of Artificial Sequence: Synthetic oligonucleotide
  Antisense Strand to SEQ ID NO: 338351
uaggccgcaguauucuuau

SEQ ID NO: 338353 - RNA, 19 nt, Artificial Sequence
  Description of Artificial Sequence: Synthetic oligonucleotide
  Sense Strand Starting at position 248 of SEQ ID NO: 318996
aauacugcggccuagagaa

SEQ ID NO: 338354 - RNA, 19 nt, Artificial Sequence
  Description of Artificial Sequence: Synthetic oligonucleotide
  Antisense Strand to SEQ ID NO: 338353
uucucuaggccgcaguauu

SEQ ID NO: 338355 - RNA, 19 nt, Artificial Sequence
  Description of Artificial Sequence: Synthetic oligonucleotide
  Sense Strand Starting at position 248 of SEQ ID NO: 319105
cucugugacgccgucuaau

SEQ ID NO: 338356 - RNA, 19 nt, Artificial Sequence
  Description of Artificial Sequence: Synthetic oligonucleotide
  Antisense Strand to SEQ ID NO: 338355
auuagacggcgucacagag

SEQ ID NO: 338357 - RNA, 19 nt, Artificial Sequence
  Description of Artificial Sequence: Synthetic oligonucleotide
  Sense Strand Starting at position 248 of SEQ ID NO: 319107
cugugacgccgucuaauau

SEQ ID NO: 338358 - RNA, 19 nt, Artificial Sequence
  Description of Artificial Sequence: Synthetic oligonucleotide
  Antisense Strand to SEQ ID NO: 338357
auauuagacggcgucacag

SEQ ID NO: 338359 - RNA, 19 nt, Artificial Sequence
  Description of Artificial Sequence: Synthetic oligonucleotide
  Sense Strand Starting at position 248 of SEQ ID NO: 319129
gcucucuacccagaggaua

SEQ ID NO: 338360 - RNA, 19 nt, Artificial Sequence
  Description of Artificial Sequence: Synthetic oligonucleotide
  Antisense Strand to SEQ ID NO: 338359
uauccucuggguagagagc

SEQ ID NO: 338361 - RNA, 19 nt, Artificial Sequence
  Description of Artificial Sequence: Synthetic oligonucleotide
  Sense Strand Starting at position 249 of SEQ ID NO: 315344
cuagaucugcguucguuga

SEQ ID NO: 338362 - RNA, 19 nt, Artificial Sequence
  Description of Artificial Sequence: Synthetic oligonucleotide
  Antisense Strand to SEQ ID NO: 338361
ucaacgaacgcagaucuag

SEQ ID NO: 338363 - RNA, 19 nt, Artificial Sequence
  Description of Artificial Sequence: Synthetic oligonucleotide
  Sense Strand Starting at position 249 of SEQ ID NO: 315569
aaaugugccuuugugagga

SEQ ID NO: 338364 - RNA, 19 nt, Artificial Sequence
  Description of Artificial Sequence: Synthetic oligonucleotide
  Antisense Strand to SEQ ID NO: 338363
uccucacaaaggcacauuu

SEQ ID NO: 338365 - RNA, 19 nt, Artificial Sequence
  Description of Artificial Sequence: Synthetic oligonucleotide
  Sense Strand Starting at position 249 of SEQ ID NO: 315574
ugccuuugugaggauaaga

SEQ ID NO: 338366 - RNA, 19 nt, Artificial Sequence
  Description of Artificial Sequence: Synthetic oligonucleotide
  Antisense Strand to SEQ ID NO: 338365
ucuuauccucacaaaggca

SEQ ID NO: 338367 - RNA, 19 nt, Artificial Sequence
  Description of Artificial Sequence: Synthetic oligonucleotide
  Sense Strand Starting at position 249 of SEQ ID NO: 315685
agcacagucuuaucugacu

SEQ ID NO: 338368 - RNA, 19 nt, Artificial Sequence
  Description of Artificial Sequence: Synthetic oligonucleotide
  Antisense Strand to SEQ ID NO: 338367
agucagauaagacugugcu

SEQ ID NO: 338369 - RNA, 19 nt, Artificial Sequence
  Description of Artificial Sequence: Synthetic oligonucleotide
  Sense Strand Starting at position 249 of SEQ ID NO: 315752
uccuuuaagugagcacaau

SEQ ID NO: 338370 - RNA, 19 nt, Artificial Sequence
  Description of Artificial Sequence: Synthetic oligonucleotide
  Antisense Strand to SEQ ID NO: 338369
auugugcucacuuaaagga

SEQ ID NO: 338371 - RNA, 19 nt, Artificial Sequence
  Description of Artificial Sequence: Synthetic oligonucleotide
  Sense Strand Starting at position 249 of SEQ ID NO: 315873
ugcccaacccauugguuua

SEQ ID NO: 338372 - RNA, 19 nt, Artificial Sequence
  Description of Artificial Sequence: Synthetic oligonucleotide
  Antisense Strand to SEQ ID NO: 338371
uaaaccaauggguugggca

SEQ ID NO: 338373 - RNA, 19 nt, Artificial Sequence
  Description of Artificial Sequence: Synthetic oligonucleotide
  Sense Strand Starting at position 249 of SEQ ID NO: 315957
cggcgcuaggcugucaauu

SEQ ID NO: 338374 - RNA, 19 nt, Artificial Sequence
  Description of Artificial Sequence: Synthetic oligonucleotide
  Antisense Strand to SEQ ID NO: 338373
aauugacagccuagcgccg

SEQ ID NO: 338375 - RNA, 19 nt, Artificial Sequence
  Description of Artificial Sequence: Synthetic oligonucleotide
  Sense Strand Starting at position 249 of SEQ ID NO: 316205
cgggaaucaacgugacauu

SEQ ID NO: 338376 - RNA, 19 nt, Artificial Sequence
  Description of Artificial Sequence: Synthetic oligonucleotide
  Antisense Strand to SEQ ID NO: 338375
aaugucacguugauucccg

SEQ ID NO: 338377 - RNA, 19 nt, Artificial Sequence
  Description of Artificial Sequence: Synthetic oligonucleotide
  Sense Strand Starting at position 249 of SEQ ID NO: 316215
cgugacauuucccaaacca

SEQ ID NO: 338378 - RNA, 19 nt, Artificial Sequence
  Description of Artificial Sequence: Synthetic oligonucleotide
  Antisense Strand to SEQ ID NO: 338377
ugguuugggaaaugucacg

SEQ ID NO: 338379 - RNA, 19 nt, Artificial Sequence
  Description of Artificial Sequence: Synthetic oligonucleotide
  Sense Strand Starting at position 249 of SEQ ID NO: 316496
cugggaccgcaguaauuaa

SEQ ID NO: 338380 - RNA, 19 nt, Artificial Sequence
  Description of Artificial Sequence: Synthetic oligonucleotide
  Antisense Strand to SEQ ID NO: 338379
uuaauuacugcggucccag

SEQ ID NO: 338381 - RNA, 19 nt, Artificial Sequence
  Description of Artificial Sequence: Synthetic oligonucleotide
  Sense Strand Starting at position 249 of SEQ ID NO: 316506
aguaauuaacacggacuca

SEQ ID NO: 338382 - RNA, 19 nt, Artificial Sequence
  Description of Artificial Sequence: Synthetic oligonucleotide
  Antisense Strand to SEQ ID NO: 338381
ugaguccguguuaauuacu

SEQ ID NO: 338383 - RNA, 19 nt, Artificial Sequence
  Description of Artificial Sequence: Synthetic oligonucleotide
  Sense Strand Starting at position 249 of SEQ ID NO: 316532
uuagguguuccgguuuguu

SEQ ID NO: 338384 - RNA, 19 nt, Artificial Sequence
  Description of Artificial Sequence: Synthetic oligonucleotide
  Antisense Strand to SEQ ID NO: 338383
aacaaaccggaacaccuaa

SEQ ID NO: 338385 - RNA, 19 nt, Artificial Sequence
  Description of Artificial Sequence: Synthetic oligonucleotide
  Sense Strand Starting at position 249 of SEQ ID NO: 316534
agguguuccgguuuguuca

SEQ ID NO: 338386 - RNA, 19 nt, Artificial Sequence
  Description of Artificial Sequence: Synthetic oligonucleotide
  Antisense Strand to SEQ ID NO: 338385
ugaacaaaccggaacaccu

SEQ ID NO: 338387 - RNA, 19 nt, Artificial Sequence
  Description of Artificial Sequence: Synthetic oligonucleotide
  Sense Strand Starting at position 249 of SEQ ID NO: 316616
auaagaauacugcggccua

SEQ ID NO: 338388 - RNA, 19 nt, Artificial Sequence
  Description of Artificial Sequence: Synthetic oligonucleotide
  Antisense Strand to SEQ ID NO: 338387
uaggccgcaguauucuuau

SEQ ID NO: 338389 - RNA, 19 nt, Artificial Sequence
  Description of Artificial Sequence: Synthetic oligonucleotide
  Sense Strand Starting at position 249 of SEQ ID NO: 316621
aauacugcggccuagagaa

SEQ ID NO: 338390 - RNA, 19 nt, Artificial Sequence
  Description of Artificial Sequence: Synthetic oligonucleotide
  Antisense Strand to SEQ ID NO: 338389
uucucuaggccgcaguauu

SEQ ID NO: 338391 - RNA, 19 nt, Artificial Sequence
  Description of Artificial Sequence: Synthetic oligonucleotide
  Sense Strand Starting at position 249 of SEQ ID NO: 316730
cucugugacgccgucuaau

SEQ ID NO: 338392 - RNA, 19 nt, Artificial Sequence
  Description of Artificial Sequence: Synthetic oligonucleotide
  Antisense Strand to SEQ ID NO: 338391
auuagacggcgucacagag

SEQ ID NO: 338393 - RNA, 19 nt, Artificial Sequence
  Description of Artificial Sequence: Synthetic oligonucleotide
  Sense Strand Starting at position 249 of SEQ ID NO: 316732
cugugacgccgucuaauau

SEQ ID NO: 338394 - RNA, 19 nt, Artificial Sequence
  Description of Artificial Sequence: Synthetic oligonucleotide
  Antisense Strand to SEQ ID NO: 338393
auauuagacggcgucacag

SEQ ID NO: 338395 - RNA, 19 nt, Artificial Sequence
  Description of Artificial Sequence: Synthetic oligonucleotide
  Sense Strand Starting at position 249 of SEQ ID NO: 316754
gcucucuacccagaggaua

SEQ ID NO: 338396 - RNA, 19 nt, Artificial Sequence
  Description of Artificial Sequence: Synthetic oligonucleotide
  Antisense Strand to SEQ ID NO: 338395
uauccucuggguagagagc

SEQ ID NO: 338397 - RNA, 19 nt, Artificial Sequence
  Description of Artificial Sequence: Synthetic oligonucleotide
  Sense Strand Starting at position 249 of SEQ ID NO: 317478
gcguuugucgagaguucug

SEQ ID NO: 338398 - RNA, 19 nt, Artificial Sequence
  Description of Artificial Sequence: Synthetic oligonucleotide
  Antisense Strand to SEQ ID NO: 338397
cagaacucucgacaaacgc

SEQ ID NO: 338399 - RNA, 19 nt, Artificial Sequence
  Description of Artificial Sequence: Synthetic oligonucleotide
  Sense Strand Starting at position 249 of SEQ ID NO: 317480
guuugucgagaguucuguu

SEQ ID NO: 338400 - RNA, 19 nt, Artificial Sequence
  Description of Artificial Sequence: Synthetic oligonucleotide
  Antisense Strand to SEQ ID NO: 338399
aacagaacucucgacaaac

SEQ ID NO: 338401 - RNA, 19 nt, Artificial Sequence
  Description of Artificial Sequence: Synthetic oligonucleotide
  Sense Strand Starting at position 249 of SEQ ID NO: 317507
acugguuucucuucuuaua

SEQ ID NO: 338402 - RNA, 19 nt, Artificial Sequence
  Description of Artificial Sequence: Synthetic oligonucleotide
  Antisense Strand to SEQ ID NO: 338401
uauaagaagagaaaccagu

SEQ ID NO: 338403 - RNA, 19 nt, Artificial Sequence
  Description of Artificial Sequence: Synthetic oligonucleotide
  Sense Strand Starting at position 249 of SEQ ID NO: 317747
gaacaucaucagcggcaaa

SEQ ID NO: 338404 - RNA, 19 nt, Artificial Sequence
  Description of Artificial Sequence: Synthetic oligonucleotide
  Antisense Strand to SEQ ID NO: 338403
uuugccgcugaugauguuc

SEQ ID NO: 338405 - RNA, 19 nt, Artificial Sequence
  Description of Artificial Sequence: Synthetic oligonucleotide
  Sense Strand Starting at position 249 of SEQ ID NO: 317760
ggcaaacguggccauaaua

SEQ ID NO: 338406 - RNA, 19 nt, Artificial Sequence
  Description of Artificial Sequence: Synthetic oligonucleotide
  Antisense Strand to SEQ ID NO: 338405
uauuauggccacguuugcc

SEQ ID NO: 338407 - RNA, 19 nt, Artificial Sequence
  Description of Artificial Sequence: Synthetic oligonucleotide
  Sense Strand Starting at position 249 of SEQ ID NO: 317812
guuauauauuaugcagaug

SEQ ID NO: 338408 - RNA, 19 nt, Artificial Sequence
  Description of Artificial Sequence: Synthetic oligonucleotide
  Antisense Strand to SEQ ID NO: 338407
caucugcauaauauauaac

SEQ ID NO: 338409 - RNA, 19 nt, Artificial Sequence
  Description of Artificial Sequence: Synthetic oligonucleotide
  Sense Strand Starting at position 249 of SEQ ID NO: 317815
auauauuaugcagaugcau

SEQ ID NO: 338410 - RNA, 19 nt, Artificial Sequence
  Description of Artificial Sequence: Synthetic oligonucleotide
  Antisense Strand to SEQ ID NO: 338409
augcaucugcauaauauau

SEQ ID NO: 338411 - RNA, 19 nt, Artificial Sequence
  Description of Artificial Sequence: Synthetic oligonucleotide
  Sense Strand Starting at position 249 of SEQ ID NO: 317861
cauaacagccuuugaggua

SEQ ID NO: 338412 - RNA, 19 nt, Artificial Sequence
  Description of Artificial Sequence: Synthetic oligonucleotide
  Antisense Strand to SEQ ID NO: 338411
uaccucaaaggcuguuaug

SEQ ID NO: 338413 - RNA, 19 nt, Artificial Sequence
  Description of Artificial Sequence: Synthetic oligonucleotide
  Sense Strand Starting at position 249 of SEQ ID NO: 317868
gccuuugagguaggaacaa

SEQ ID NO: 338414 - RNA, 19 nt, Artificial Sequence
  Description of Artificial Sequence: Synthetic oligonucleotide
  Antisense Strand to SEQ ID NO: 338413
uuguuccuaccucaaaggc

SEQ ID NO: 338415 - RNA, 19 nt, Artificial Sequence
  Description of Artificial Sequence: Synthetic oligonucleotide
  Sense Strand Starting at position 249 of SEQ ID NO: 318210
acgcacuagccauagagaa

SEQ ID NO: 338416 - RNA, 19 nt, Artificial Sequence
  Description of Artificial Sequence: Synthetic oligonucleotide
  Antisense Strand to SEQ ID NO: 338415
uucucuauggcuagugcgu

SEQ ID NO: 338417 - RNA, 19 nt, Artificial Sequence
  Description of Artificial Sequence: Synthetic oligonucleotide
  Sense Strand Starting at position 249 of SEQ ID NO: 318306
cacgaacuguuucuaggaa

SEQ ID NO: 338418 - RNA, 19 nt, Artificial Sequence
  Description of Artificial Sequence: Synthetic oligonucleotide
  Antisense Strand to SEQ ID NO: 338417
uuccuagaaacaguucgug

SEQ ID NO: 338419 - RNA, 19 nt, Artificial Sequence
  Description of Artificial Sequence: Synthetic oligonucleotide
  Sense Strand Starting at position 249 of SEQ ID NO: 318318
cuaggaaacuguccugauc

SEQ ID NO: 338420 - RNA, 19 nt, Artificial Sequence
  Description of Artificial Sequence: Synthetic oligonucleotide
  Antisense Strand to SEQ ID NO: 338419
gaucaggacaguuuccuag

SEQ ID NO: 338421 - RNA, 19 nt, Artificial Sequence
  Description of Artificial Sequence: Synthetic oligonucleotide
  Sense Strand Starting at position 249 of SEQ ID NO: 318321
ggaaacuguccugaucagu

SEQ ID NO: 338422 - RNA, 19 nt, Artificial Sequence
  Description of Artificial Sequence: Synthetic oligonucleotide
  Antisense Strand to SEQ ID NO: 338421
acugaucaggacaguuucc

SEQ ID NO: 338423 - RNA, 19 nt, Artificial Sequence
  Description of Artificial Sequence: Synthetic oligonucleotide
  Sense Strand Starting at position 249 of SEQ ID NO: 318326
cuguccugaucagucugaa

SEQ ID NO: 338424 - RNA, 19 nt, Artificial Sequence
  Description of Artificial Sequence: Synthetic oligonucleotide
  Antisense Strand to SEQ ID NO: 338423
uucagacugaucaggacag

SEQ ID NO: 338425 - RNA, 19 nt, Artificial Sequence
  Description of Artificial Sequence: Synthetic oligonucleotide
  Sense Strand Starting at position 249 of SEQ ID NO: 318403
ucuggcucacuguaaauaa

SEQ ID NO: 338426 - RNA, 19 nt, Artificial Sequence
  Description of Artificial Sequence: Synthetic oligonucleotide
  Antisense Strand to SEQ ID NO: 338425
uuauuuacagugagccaga

SEQ ID NO: 338427 - RNA, 19 nt, Artificial Sequence
  Description of Artificial Sequence: Synthetic oligonucleotide
  Sense Strand Starting at position 249 of SEQ ID NO: 318526
acaaauaggccgcauuauu

SEQ ID NO: 338428 - RNA, 19 nt, Artificial Sequence
  Description of Artificial Sequence: Synthetic oligonucleotide
  Antisense Strand to SEQ ID NO: 338427
aauaaugcggccuauuugu

SEQ ID NO: 338429 - RNA, 19 nt, Artificial Sequence
  Description of Artificial Sequence: Synthetic oligonucleotide
  Sense Strand Starting at position 249 of SEQ ID NO: 318566
ggaagucuuccuugagcug

SEQ ID NO: 338430 - RNA, 19 nt, Artificial Sequence
  Description of Artificial Sequence: Synthetic oligonucleotide
  Antisense Strand to SEQ ID NO: 338429
cagcucaaggaagacuucc

SEQ ID NO: 338431 - RNA, 19 nt, Artificial Sequence
  Description of Artificial Sequence: Synthetic oligonucleotide
  Sense Strand Starting at position 249 of SEQ ID NO: 318686
gacuuaaaggugugaggau

SEQ ID NO: 338432 - RNA, 19 nt, Artificial Sequence
  Description of Artificial Sequence: Synthetic oligonucleotide
  Antisense Strand to SEQ ID NO: 338431
auccucacaccuuuaaguc

SEQ ID NO: 338433 - RNA, 19 nt, Artificial Sequence
  Description of Artificial Sequence: Synthetic oligonucleotide
  Sense Strand Starting at position 249 of SEQ ID NO: 318793
cccuaaugcugguuaucag

SEQ ID NO: 338434 - RNA, 19 nt, Artificial Sequence
  Description of Artificial Sequence: Synthetic oligonucleotide
  Antisense Strand to SEQ ID NO: 338433
cugauaaccagcauuaggg

SEQ ID NO: 338435 - RNA, 19 nt, Artificial Sequence
  Description of Artificial Sequence: Synthetic oligonucleotide
  Sense Strand Starting at position 249 of SEQ ID NO: 318794
ccuaaugcugguuaucagu

SEQ ID NO: 338436 - RNA, 19 nt, Artificial Sequence
  Description of Artificial Sequence: Synthetic oligonucleotide
  Antisense Strand to SEQ ID NO: 338435
acugauaaccagcauuagg

SEQ ID NO: 338437 - RNA, 19 nt, Artificial Sequence
  Description of Artificial Sequence: Synthetic oligonucleotide
  Sense Strand Starting at position 249 of SEQ ID NO: 318802
ugguuaucagugcaaucac

SEQ ID NO: 338438 - RNA, 19 nt, Artificial Sequence
  Description of Artificial Sequence: Synthetic oligonucleotide
  Antisense Strand to SEQ ID NO: 338437
gugauugcacugauaacca

SEQ ID NO: 338439 - RNA, 19 nt, Artificial Sequence
  Description of Artificial Sequence: Synthetic oligonucleotide
  Sense Strand Starting at position 249 of SEQ ID NO: 319015
ucacuuucuggcugugaga

SEQ ID NO: 338440 - RNA, 19 nt, Artificial Sequence
  Description of Artificial Sequence: Synthetic oligonucleotide
  Antisense Strand to SEQ ID NO: 338439
ucucacagccagaaaguga

SEQ ID NO: 338441 - RNA, 19 nt, Artificial Sequence
  Description of Artificial Sequence: Synthetic oligonucleotide
  Sense Strand Starting at position 250 of SEQ ID NO: 315447
gcagacauccuuuacagua

SEQ ID NO: 338442 - RNA, 19 nt, Artificial Sequence
  Description of Artificial Sequence: Synthetic oligonucleotide
  Antisense Strand to SEQ ID NO: 338441
uacuguaaaggaugucugc

SEQ ID NO: 338443 - RNA, 19 nt, Artificial Sequence
  Description of Artificial Sequence: Synthetic oligonucleotide
  Sense Strand Starting at position 250 of SEQ ID NO: 315639
acuccaauuugagaguuua

SEQ ID NO: 338444 - RNA, 19 nt, Artificial Sequence
  Description of Artificial Sequence: Synthetic oligonucleotide
  Antisense Strand to SEQ ID NO: 338443
uaaacucucaaauuggagu

SEQ ID NO: 338445 - RNA, 19 nt, Artificial Sequence
  Description of Artificial Sequence: Synthetic oligonucleotide
  Sense Strand Starting at position 250 of SEQ ID NO: 315680
uauauaaacucagucgagu

SEQ ID NO: 338446 - RNA, 19 nt, Artificial Sequence
  Description of Artificial Sequence: Synthetic oligonucleotide
  Antisense Strand to SEQ ID NO: 338445
acucgacugaguuuauaua

SEQ ID NO: 338447 - RNA, 19 nt, Artificial Sequence
  Description of Artificial Sequence: Synthetic oligonucleotide
  Sense Strand Starting at position 250 of SEQ ID NO: 315686
aacucagucgaguaucuuu

SEQ ID NO: 338448 - RNA, 19 nt, Artificial Sequence
  Description of Artificial Sequence: Synthetic oligonucleotide
  Antisense Strand to SEQ ID NO: 338447
aaagauacucgacugaguu

SEQ ID NO: 338449 - RNA, 19 nt, Artificial Sequence
  Description of Artificial Sequence: Synthetic oligonucleotide
  Sense Strand Starting at position 250 of SEQ ID NO: 316032
uagucaguucccuagagca

SEQ ID NO: 338450 - RNA, 19 nt, Artificial Sequence
  Description of Artificial Sequence: Synthetic oligonucleotide
  Antisense Strand to SEQ ID NO: 338449
ugcucuagggaacugacua

SEQ ID NO: 338451 - RNA, 19 nt, Artificial Sequence
  Description of Artificial Sequence: Synthetic oligonucleotide
  Sense Strand Starting at position 250 of SEQ ID NO: 316034
gucaguucccuagagcaac

SEQ ID NO: 338452 - RNA, 19 nt, Artificial Sequence
  Description of Artificial Sequence: Synthetic oligonucleotide
  Antisense Strand to SEQ ID NO: 338451
guugcucuagggaacugac

SEQ ID NO: 338453 - RNA, 19 nt, Artificial Sequence
  Description of Artificial Sequence: Synthetic oligonucleotide
  Sense Strand Starting at position 250 of SEQ ID NO: 316096
uugggaugcacuggaaaga

SEQ ID NO: 338454 - RNA, 19 nt, Artificial Sequence
  Description of Artificial Sequence: Synthetic oligonucleotide
  Antisense Strand to SEQ ID NO: 338453
ucuuuccagugcaucccaa

SEQ ID NO: 338455 - RNA, 19 nt, Artificial Sequence
  Description of Artificial Sequence: Synthetic oligonucleotide
  Sense Strand Starting at position 250 of SEQ ID NO: 316273
uaaugcugucaucaagagu

SEQ ID NO: 338456 - RNA, 19 nt, Artificial Sequence
  Description of Artificial Sequence: Synthetic oligonucleotide
  Antisense Strand to SEQ ID NO: 338455
acucuugaugacagcauua

SEQ ID NO: 338457 - RNA, 19 nt, Artificial Sequence
  Description of Artificial Sequence: Synthetic oligonucleotide
  Sense Strand Starting at position 250 of SEQ ID NO: 316276
ugcugucaucaagaguaaa

SEQ ID NO: 338458 - RNA, 19 nt, Artificial Sequence
  Description of Artificial Sequence: Synthetic oligonucleotide
  Antisense Strand to SEQ ID NO: 338457
uuuacucuugaugacagca

SEQ ID NO: 338459 - RNA, 19 nt, Artificial Sequence
  Description of Artificial Sequence: Synthetic oligonucleotide
  Sense Strand Starting at position 250 of SEQ ID NO: 316312
aagggugguacugaaaugu

SEQ ID NO: 338460 - RNA, 19 nt, Artificial Sequence
  Description of Artificial Sequence: Synthetic oligonucleotide
  Antisense Strand to SEQ ID NO: 338459
acauuucaguaccacccuu

SEQ ID NO: 338461 - RNA, 19 nt, Artificial Sequence
  Description of Artificial Sequence: Synthetic oligonucleotide
  Sense Strand Starting at position 250 of SEQ ID NO: 316340
ugauauaugcagcaaugga

SEQ ID NO: 338462 - RNA, 19 nt, Artificial Sequence
  Description of Artificial Sequence: Synthetic oligonucleotide
  Antisense Strand to SEQ ID NO: 338461
uccauugcugcauauauca

SEQ ID NO: 338463 - RNA, 19 nt, Artificial Sequence
  Description of Artificial Sequence: Synthetic oligonucleotide
  Sense Strand Starting at position 250 of SEQ ID NO: 316396
cuuaauuacccuuguggaa

SEQ ID NO: 338464 - RNA, 19 nt, Artificial Sequence
  Description of Artificial Sequence: Synthetic oligonucleotide
  Antisense Strand to SEQ ID NO: 338463
uuccacaaggguaauuaag

SEQ ID NO: 338465 - RNA, 19 nt, Artificial Sequence
  Description of Artificial Sequence: Synthetic oligonucleotide
  Sense Strand Starting at position 250 of SEQ ID NO: 316437
ggaacuauuuaguaacuuc

SEQ ID NO: 338466 - RNA, 19 nt, Artificial Sequence
  Description of Artificial Sequence: Synthetic oligonucleotide
  Antisense Strand to SEQ ID NO: 338465
gaaguuacuaaauaguucc

SEQ ID NO: 338467 - RNA, 19 nt, Artificial Sequence
  Description of Artificial Sequence: Synthetic oligonucleotide
  Sense Strand Starting at position 250 of SEQ ID NO: 316563
ucauuagccuuaguaaaga

SEQ ID NO: 338468 - RNA, 19 nt, Artificial Sequence
  Description of Artificial Sequence: Synthetic oligonucleotide
  Antisense Strand to SEQ ID NO: 338467
ucuuuacuaaggcuaauga

SEQ ID NO: 338469 - RNA, 19 nt, Artificial Sequence
  Description of Artificial Sequence: Synthetic oligonucleotide
  Sense Strand Starting at position 250 of SEQ ID NO: 316577
aaagauacugaauguugua

SEQ ID NO: 338470 - RNA, 19 nt, Artificial Sequence
  Description of Artificial Sequence: Synthetic oligonucleotide
  Antisense Strand to SEQ ID NO: 338469
uacaacauucaguaucuuu

SEQ ID NO: 338471 - RNA, 19 nt, Artificial Sequence
  Description of Artificial Sequence: Synthetic oligonucleotide
  Sense Strand Starting at position 250 of SEQ ID NO: 316626
gcuggccuggaucaugaaa

SEQ ID NO: 338472 - RNA, 19 nt, Artificial Sequence
  Description of Artificial Sequence: Synthetic oligonucleotide
  Antisense Strand to SEQ ID NO: 338471
uuucaugauccaggccagc

SEQ ID NO: 338473 - RNA, 19 nt, Artificial Sequence
  Description of Artificial Sequence: Synthetic oligonucleotide
  Sense Strand Starting at position 250 of SEQ ID NO: 317315
uggugaaacuaugcuaaac

SEQ ID NO: 338474 - RNA, 19 nt, Artificial Sequence
  Description of Artificial Sequence: Synthetic oligonucleotide
  Antisense Strand to SEQ ID NO: 338473
guuuagcauaguuucacca

SEQ ID NO: 338475 - RNA, 19 nt, Artificial Sequence
  Description of Artificial Sequence: Synthetic oligonucleotide
  Sense Strand Starting at position 250 of SEQ ID NO: 317384
ccaugaaggacuuguagca

SEQ ID NO: 338476 - RNA, 19 nt, Artificial Sequence
  Description of Artificial Sequence: Synthetic oligonucleotide
  Antisense Strand to SEQ ID NO: 338475
ugcuacaaguccuucaugg

SEQ ID NO: 338477 - RNA, 19 nt, Artificial Sequence
  Description of Artificial Sequence: Synthetic oligonucleotide
  Sense Strand Starting at position 250 of SEQ ID NO: 317478
gacagcucuggguggaaau

SEQ ID NO: 338478 - RNA, 19 nt, Artificial Sequence
  Description of Artificial Sequence: Synthetic oligonucleotide
  Antisense Strand to SEQ ID NO: 338477
auuuccacccagagcuguc

SEQ ID NO: 338479 - RNA, 19 nt, Artificial Sequence
  Description of Artificial Sequence: Synthetic oligonucleotide
  Sense Strand Starting at position 250 of SEQ ID NO: 317479
acagcucuggguggaaauu

SEQ ID NO: 338480 - RNA, 19 nt, Artificial Sequence
  Description of Artificial Sequence: Synthetic oligonucleotide
  Antisense Strand to SEQ ID NO: 338479
aauuuccacccagagcugu

SEQ ID NO: 338481 - RNA, 19 nt, Artificial Sequence
  Description of Artificial Sequence: Synthetic oligonucleotide
  Sense Strand Starting at position 250 of SEQ ID NO: 317490
uggaaauucuugcucugaa

SEQ ID NO: 338482 - RNA, 19 nt, Artificial Sequence
  Description of Artificial Sequence: Synthetic oligonucleotide
  Antisense Strand to SEQ ID NO: 338481
uucagagcaagaauuucca

SEQ ID NO: 338483 - RNA, 19 nt, Artificial Sequence
  Description of Artificial Sequence: Synthetic oligonucleotide
  Sense Strand Starting at position 250 of SEQ ID NO: 317491
ggaaauucuugcucugaau

SEQ ID NO: 338484 - RNA, 19 nt, Artificial Sequence
  Description of Artificial Sequence: Synthetic oligonucleotide
  Antisense Strand to SEQ ID NO: 338483
auucagagcaagaauuucc

SEQ ID NO: 338485 - RNA, 19 nt, Artificial Sequence
  Description of Artificial Sequence: Synthetic oligonucleotide
  Sense Strand Starting at position 250 of SEQ ID NO: 317626
agaauagcaucugucagua

SEQ ID NO: 338486 - RNA, 19 nt, Artificial Sequence
  Description of Artificial Sequence: Synthetic oligonucleotide
  Antisense Strand to SEQ ID NO: 338485
uacugacagaugcuauucu

SEQ ID NO: 338487 - RNA, 19 nt, Artificial Sequence
  Description of Artificial Sequence: Synthetic oligonucleotide
  Sense Strand Starting at position 250 of SEQ ID NO: 317754
uuaggaagaaaguguguuu

SEQ ID NO: 338488 - RNA, 19 nt, Artificial Sequence
  Description of Artificial Sequence: Synthetic oligonucleotide
  Antisense Strand to SEQ ID NO: 338487
aaacacacuuucuuccuaa

SEQ ID NO: 338489 - RNA, 19 nt, Artificial Sequence
  Description of Artificial Sequence: Synthetic oligonucleotide
  Sense Strand Starting at position 250 of SEQ ID NO: 317832
cugaauagguauccuuaau

SEQ ID NO: 338490 - RNA, 19 nt, Artificial Sequence
  Description of Artificial Sequence: Synthetic oligonucleotide
  Antisense Strand to SEQ ID NO: 338489
auuaaggauaccuauucag

SEQ ID NO: 338491 - RNA, 19 nt, Artificial Sequence
  Description of Artificial Sequence: Synthetic oligonucleotide
  Sense Strand Starting at position 250 of SEQ ID NO: 318070
aggccagaaagagguaauu

SEQ ID NO: 338492 - RNA, 19 nt, Artificial Sequence
  Description of Artificial Sequence: Synthetic oligonucleotide
  Antisense Strand to SEQ ID NO: 338491
aauuaccucuuucuggccu

SEQ ID NO: 338493 - RNA, 19 nt, Artificial Sequence
  Description of Artificial Sequence: Synthetic oligonucleotide
  Sense Strand Starting at position 250 of SEQ ID NO: 318079
agagguaauuacucuggca

SEQ ID NO: 338494 - RNA, 19 nt, Artificial Sequence
  Description of Artificial Sequence: Synthetic oligonucleotide
  Antisense Strand to SEQ ID NO: 338493
ugccagaguaauuaccucu

SEQ ID NO: 338495 - RNA, 19 nt, Artificial Sequence
  Description of Artificial Sequence: Synthetic oligonucleotide
  Sense Strand Starting at position 250 of SEQ ID NO: 318081
agguaauuacucuggcaug

SEQ ID NO: 338496 - RNA, 19 nt, Artificial Sequence
  Description of Artificial Sequence: Synthetic oligonucleotide
  Antisense Strand to SEQ ID NO: 338495
caugccagaguaauuaccu

SEQ ID NO: 338497 - RNA, 19 nt, Artificial Sequence
  Description of Artificial Sequence: Synthetic oligonucleotide
  Sense Strand Starting at position 250 of SEQ ID NO: 318086
auuacucuggcaugaauca

SEQ ID NO: 338498 - RNA, 19 nt, Artificial Sequence
  Description of Artificial Sequence: Synthetic oligonucleotide
  Antisense Strand to SEQ ID NO: 338497
ugauucaugccagaguaau

SEQ ID NO: 338499 - RNA, 19 nt, Artificial Sequence
  Description of Artificial Sequence: Synthetic oligonucleotide
  Sense Strand Starting at position 250 of SEQ ID NO: 318093
uggcaugaaucagcuacua

SEQ ID NO: 338500 - RNA, 19 nt, Artificial Sequence
  Description of Artificial Sequence: Synthetic oligonucleotide
  Antisense Strand to SEQ ID NO: 338499
uaguagcugauucaugcca

SEQ ID NO: 338501 - RNA, 19 nt, Artificial Sequence
  Description of Artificial Sequence: Synthetic oligonucleotide
  Sense Strand Starting at position 250 of SEQ ID NO: 318343
gguggaauauaagcuuaau

SEQ ID NO: 338502 - RNA, 19 nt, Artificial Sequence
  Description of Artificial Sequence: Synthetic oligonucleotide
  Antisense Strand to SEQ ID NO: 338501
auuaagcuuauauuccacc

SEQ ID NO: 338503 - RNA, 19 nt, Artificial Sequence
  Description of Artificial Sequence: Synthetic oligonucleotide
  Sense Strand Starting at position 250 of SEQ ID NO: 318426
guuaccagugguuaaucau

SEQ ID NO: 338504 - RNA, 19 nt, Artificial Sequence
  Description of Artificial Sequence: Synthetic oligonucleotide
  Antisense Strand to SEQ ID NO: 338503
augauuaaccacugguaac

SEQ ID NO: 338505 - RNA, 19 nt, Artificial Sequence
  Description of Artificial Sequence: Synthetic oligonucleotide
  Sense Strand Starting at position 250 of SEQ ID NO: 318499
auugaacacuguucugaau

SEQ ID NO: 338506 - RNA, 19 nt, Artificial Sequence
  Description of Artificial Sequence: Synthetic oligonucleotide
  Antisense Strand to SEQ ID NO: 338505
auucagaacaguguucaau

SEQ ID NO: 338507 - RNA, 19 nt, Artificial Sequence
  Description of Artificial Sequence: Synthetic oligonucleotide
  Sense Strand Starting at position 250 of SEQ ID NO: 318631
ggugaucugaccuacuguu

SEQ ID NO: 338508 - RNA, 19 nt, Artificial Sequence
  Description of Artificial Sequence: Synthetic oligonucleotide
  Antisense Strand to SEQ ID NO: 338507
aacaguaggucagaucacc

SEQ ID NO: 338509 - RNA, 19 nt, Artificial Sequence
  Description of Artificial Sequence: Synthetic oligonucleotide
  Sense Strand Starting at position 250 of SEQ ID NO: 318697
cacugagggucuuugaaca

SEQ ID NO: 338510 - RNA, 19 nt, Artificial Sequence
  Description of Artificial Sequence: Synthetic oligonucleotide
  Antisense Strand to SEQ ID NO: 338509
uguucaaagacccucagug

SEQ ID NO: 338511 - RNA, 19 nt, Artificial Sequence
  Description of Artificial Sequence: Synthetic oligonucleotide
  Sense Strand Starting at position 250 of SEQ ID NO: 318733
gggugauuacuguacacau

SEQ ID NO: 338512 - RNA, 19 nt, Artificial Sequence
  Description of Artificial Sequence: Synthetic oligonucleotide
  Antisense Strand to SEQ ID NO: 338511
auguguacaguaaucaccc

SEQ ID NO: 338513 - RNA, 19 nt, Artificial Sequence
  Description of Artificial Sequence: Synthetic oligonucleotide
  Sense Strand Starting at position 250 of SEQ ID NO: 318735
gugauuacuguacacauua

SEQ ID NO: 338514 - RNA, 19 nt, Artificial Sequence
  Description of Artificial Sequence: Synthetic oligonucleotide
  Antisense Strand to SEQ ID NO: 338513
uaauguguacaguaaucac

SEQ ID NO: 338515 - RNA, 19 nt, Artificial Sequence
  Description of Artificial Sequence: Synthetic oligonucleotide
  Sense Strand Starting at position 250 of SEQ ID NO: 318767
cuaucugcgagguacauua

SEQ ID NO: 338516 - RNA, 19 nt, Artificial Sequence
  Description of Artificial Sequence: Synthetic oligonucleotide
  Antisense Strand to SEQ ID NO: 338515
uaauguaccucgcagauag

SEQ ID NO: 338517 - RNA, 19 nt, Artificial Sequence
  Description of Artificial Sequence: Synthetic oligonucleotide
  Sense Strand Starting at position 250 of SEQ ID NO: 318860
aaugucauugcccacggaa

SEQ ID NO: 338518 - RNA, 19 nt, Artificial Sequence
  Description of Artificial Sequence: Synthetic oligonucleotide
  Antisense Strand to SEQ ID NO: 338517
uuccgugggcaaugacauu

SEQ ID NO: 338519 - RNA, 19 nt, Artificial Sequence
  Description of Artificial Sequence: Synthetic oligonucleotide
  Sense Strand Starting at position 250 of SEQ ID NO: 318958
gcugaucugggagagcaaa

SEQ ID NO: 338520 - RNA, 19 nt, Artificial Sequence
  Description of Artificial Sequence: Synthetic oligonucleotide
  Antisense Strand to SEQ ID NO: 338519
uuugcucucccagaucagc

SEQ ID NO: 338521 - RNA, 19 nt, Artificial Sequence
  Description of Artificial Sequence: Synthetic oligonucleotide
  Sense Strand Starting at position 251 of SEQ ID NO: 315362
ucacguuccgcuguuuaua

SEQ ID NO: 338522 - RNA, 19 nt, Artificial Sequence
  Description of Artificial Sequence: Synthetic oligonucleotide
  Antisense Strand to SEQ ID NO: 338521
uauaaacagcggaacguga

SEQ ID NO: 338523 - RNA, 19 nt, Artificial Sequence
  Description of Artificial Sequence: Synthetic oligonucleotide
  Sense Strand Starting at position 251 of SEQ ID NO: 315871
acagauucccaagguuaua

SEQ ID NO: 338524 - RNA, 19 nt, Artificial Sequence
  Description of Artificial Sequence: Synthetic oligonucleotide
  Antisense Strand to SEQ ID NO: 338523
uauaaccuugggaaucugu

SEQ ID NO: 338525 - RNA, 19 nt, Artificial Sequence
  Description of Artificial Sequence: Synthetic oligonucleotide
  Sense Strand Starting at position 251 of SEQ ID NO: 315887
auaggaagcucuccguaaa

SEQ ID NO: 338526 - RNA, 19 nt, Artificial Sequence
  Description of Artificial Sequence: Synthetic oligonucleotide
  Antisense Strand to SEQ ID NO: 338525
uuuacggagagcuuccuau

SEQ ID NO: 338527 - RNA, 19 nt, Artificial Sequence
  Description of Artificial Sequence: Synthetic oligonucleotide
  Sense Strand Starting at position 251 of SEQ ID NO: 315890
ggaagcucuccguaaauaa

SEQ ID NO: 338528 - RNA, 19 nt, Artificial Sequence
  Description of Artificial Sequence: Synthetic oligonucleotide
  Antisense Strand to SEQ ID NO: 338527
uuauuuacggagagcuucc

SEQ ID NO: 338529 - RNA, 19 nt, Artificial Sequence
  Description of Artificial Sequence: Synthetic oligonucleotide
  Sense Strand Starting at position 251 of SEQ ID NO: 315925
agaauaaaucaccguauga

SEQ ID NO: 338530 - RNA, 19 nt, Artificial Sequence
  Description of Artificial Sequence: Synthetic oligonucleotide
  Antisense Strand to SEQ ID NO: 338529
ucauacggugauuuauucu

SEQ ID NO: 338531 - RNA, 19 nt, Artificial Sequence
  Description of Artificial Sequence: Synthetic oligonucleotide
  Sense Strand Starting at position 251 of SEQ ID NO: 316001
uggcaaauuccuggaggag

SEQ ID NO: 338532 - RNA, 19 nt, Artificial Sequence
  Description of Artificial Sequence: Synthetic oligonucleotide
  Antisense Strand to SEQ ID NO: 338531
cuccuccaggaauuugcca

SEQ ID NO: 338533 - RNA, 19 nt, Artificial Sequence
  Description of Artificial Sequence: Synthetic oligonucleotide
  Sense Strand Starting at position 251 of SEQ ID NO: 316153
ucucuuaucugagugaaag

SEQ ID NO: 338534 - RNA, 19 nt, Artificial Sequence
  Description of Artificial Sequence: Synthetic oligonucleotide
  Antisense Strand to SEQ ID NO: 338533
cuuucacucagauaagaga

SEQ ID NO: 338535 - RNA, 19 nt, Artificial Sequence
  Description of Artificial Sequence: Synthetic oligonucleotide
  Sense Strand Starting at position 251 of SEQ ID NO: 316154
cucuuaucugagugaaaga

SEQ ID NO: 338536 - RNA, 19 nt, Artificial Sequence
  Description of Artificial Sequence: Synthetic oligonucleotide
  Antisense Strand to SEQ ID NO: 338535
ucuuucacucagauaagag

SEQ ID NO: 338537 - RNA, 19 nt, Artificial Sequence
  Description of Artificial Sequence: Synthetic oligonucleotide
  Sense Strand Starting at position 251 of SEQ ID NO: 316188
cuacucuugugacuugaau

SEQ ID NO: 338538 - RNA, 19 nt, Artificial Sequence
  Description of Artificial Sequence: Synthetic oligonucleotide
  Antisense Strand to SEQ ID NO: 338537
auucaagucacaagaguag

SEQ ID NO: 338539 - RNA, 19 nt, Artificial Sequence
  Description of Artificial Sequence: Synthetic oligonucleotide
  Sense Strand Starting at position 251 of SEQ ID NO: 316249
acaauccuuguguauugaa

SEQ ID NO: 338540 - RNA, 19 nt, Artificial Sequence
  Description of Artificial Sequence: Synthetic oligonucleotide
  Antisense Strand to SEQ ID NO: 338539
uucaauacacaaggauugu

SEQ ID NO: 338541 - RNA, 19 nt, Artificial Sequence
  Description of Artificial Sequence: Synthetic oligonucleotide
  Sense Strand Starting at position 251 of SEQ ID NO: 316256
uuguguauugaauaugcca

SEQ ID NO: 338542 - RNA, 19 nt, Artificial Sequence
  Description of Artificial Sequence: Synthetic oligonucleotide
  Antisense Strand to SEQ ID NO: 338541
uggcauauucaauacacaa

SEQ ID NO: 338543 - RNA, 19 nt, Artificial Sequence
  Description of Artificial Sequence: Synthetic oligonucleotide
  Sense Strand Starting at position 251 of SEQ ID NO: 316375
guuccuugucaccaauauu

SEQ ID NO: 338544 - RNA, 19 nt, Artificial Sequence
  Description of Artificial Sequence: Synthetic oligonucleotide
  Antisense Strand to SEQ ID NO: 338543
aauauuggugacaaggaac

SEQ ID NO: 338545 - RNA, 19 nt, Artificial Sequence
  Description of Artificial Sequence: Synthetic oligonucleotide
  Sense Strand Starting at position 251 of SEQ ID NO: 316659
uguuccuaugggugauuga

SEQ ID NO: 338546 - RNA, 19 nt, Artificial Sequence
  Description of Artificial Sequence: Synthetic oligonucleotide
  Antisense Strand to SEQ ID NO: 338545
ucaaucacccauaggaaca

SEQ ID NO: 338547 - RNA, 19 nt, Artificial Sequence
  Description of Artificial Sequence: Synthetic oligonucleotide
  Sense Strand Starting at position 251 of SEQ ID NO: 316669
ggugauugagacuaugcca

SEQ ID NO: 338548 - RNA, 19 nt, Artificial Sequence
  Description of Artificial Sequence: Synthetic oligonucleotide
  Antisense Strand to SEQ ID NO: 338547
uggcauagucucaaucacc

SEQ ID NO: 338549 - RNA, 19 nt, Artificial Sequence
  Description of Artificial Sequence: Synthetic oligonucleotide
  Sense Strand Starting at position 251 of SEQ ID NO: 316715
uaaguuccucugggagaau

SEQ ID NO: 338550 - RNA, 19 nt, Artificial Sequence
  Description of Artificial Sequence: Synthetic oligonucleotide
  Antisense Strand to SEQ ID NO: 338549
auucucccagaggaacuua

SEQ ID NO: 338551 - RNA, 19 nt, Artificial Sequence
  Description of Artificial Sequence: Synthetic oligonucleotide
  Sense Strand Starting at position 251 of SEQ ID NO: 317364
gugagauaauucccacaau

SEQ ID NO: 338552 - RNA, 19 nt, Artificial Sequence
  Description of Artificial Sequence: Synthetic oligonucleotide
  Antisense Strand to SEQ ID NO: 338551
auugugggaauuaucucac

SEQ ID NO: 338553 - RNA, 19 nt, Artificial Sequence
  Description of Artificial Sequence: Synthetic oligonucleotide
  Sense Strand Starting at position 251 of SEQ ID NO: 317443
gagggaguuucuuuccuga

SEQ ID NO: 338554 - RNA, 19 nt, Artificial Sequence
  Description of Artificial Sequence: Synthetic oligonucleotide
  Antisense Strand to SEQ ID NO: 338553
ucaggaaagaaacucccuc

SEQ ID NO: 338555 - RNA, 19 nt, Artificial Sequence
  Description of Artificial Sequence: Synthetic oligonucleotide
  Sense Strand Starting at position 251 of SEQ ID NO: 317445
gggaguuucuuuccugauu

SEQ ID NO: 338556 - RNA, 19 nt, Artificial Sequence
  Description of Artificial Sequence: Synthetic oligonucleotide
  Antisense Strand to SEQ ID NO: 338555
aaucaggaaagaaacuccc

SEQ ID NO: 338557 - RNA, 19 nt, Artificial Sequence
  Description of Artificial Sequence: Synthetic oligonucleotide
  Sense Strand Starting at position 251 of SEQ ID NO: 317446
ggaguuucuuuccugauua

SEQ ID NO: 338558 - RNA, 19 nt, Artificial Sequence
  Description of Artificial Sequence: Synthetic oligonucleotide
  Antisense Strand to SEQ ID NO: 338557
uaaucaggaaagaaacucc

SEQ ID NO: 338559 - RNA, 19 nt, Artificial Sequence
  Description of Artificial Sequence: Synthetic oligonucleotide
  Sense Strand Starting at position 251 of SEQ ID NO: 317538
cagggcuuccaguaguuaa

SEQ ID NO: 338560 - RNA, 19 nt, Artificial Sequence
  Description of Artificial Sequence: Synthetic oligonucleotide
  Antisense Strand to SEQ ID NO: 338559
uuaacuacuggaagcccug

SEQ ID NO: 338561 - RNA, 19 nt, Artificial Sequence
  Description of Artificial Sequence: Synthetic oligonucleotide
  Sense Strand Starting at position 251 of SEQ ID NO: 317650
ccgguuaugaggcauaaua

SEQ ID NO: 338562 - RNA, 19 nt, Artificial Sequence
  Description of Artificial Sequence: Synthetic oligonucleotide
  Antisense Strand to SEQ ID NO: 338561
uauuaugccucauaaccgg

SEQ ID NO: 338563 - RNA, 19 nt, Artificial Sequence
  Description of Artificial Sequence: Synthetic oligonucleotide
  Sense Strand Starting at position 251 of SEQ ID NO: 317660
ggcauaauaagguauaguu

SEQ ID NO: 338564 - RNA, 19 nt, Artificial Sequence
  Description of Artificial Sequence: Synthetic oligonucleotide
  Antisense Strand to SEQ ID NO: 338563
aacuauaccuuauuaugcc

SEQ ID NO: 338565 - RNA, 19 nt, Artificial Sequence
  Description of Artificial Sequence: Synthetic oligonucleotide
  Sense Strand Starting at position 251 of SEQ ID NO: 317667
uaagguauaguugauucua

SEQ ID NO: 338566 - RNA, 19 nt, Artificial Sequence
  Description of Artificial Sequence: Synthetic oligonucleotide
  Antisense Strand to SEQ ID NO: 338565
uagaaucaacuauaccuua

SEQ ID NO: 338567 - RNA, 19 nt, Artificial Sequence
  Description of Artificial Sequence: Synthetic oligonucleotide
  Sense Strand Starting at position 251 of SEQ ID NO: 317675
aguugauucuaguuaauca

SEQ ID NO: 338568 - RNA, 19 nt, Artificial Sequence
  Description of Artificial Sequence: Synthetic oligonucleotide
  Antisense Strand to SEQ ID NO: 338567
ugauuaacuagaaucaacu

SEQ ID NO: 338569 - RNA, 19 nt, Artificial Sequence
  Description of Artificial Sequence: Synthetic oligonucleotide
  Sense Strand Starting at position 251 of SEQ ID NO: 317679
gauucuaguuaaucauggu

SEQ ID NO: 338570 - RNA, 19 nt, Artificial Sequence
  Description of Artificial Sequence: Synthetic oligonucleotide
  Antisense Strand to SEQ ID NO: 338569
accaugauuaacuagaauc

SEQ ID NO: 338571 - RNA, 19 nt, Artificial Sequence
  Description of Artificial Sequence: Synthetic oligonucleotide
  Sense Strand Starting at position 251 of SEQ ID NO: 317898
agccaacagcagugaaauu

SEQ ID NO: 338572 - RNA, 19 nt, Artificial Sequence
  Description of Artificial Sequence: Synthetic oligonucleotide
  Antisense Strand to SEQ ID NO: 338571
aauuucacugcuguuggcu

SEQ ID NO: 338573 - RNA, 19 nt, Artificial Sequence
  Description of Artificial Sequence: Synthetic oligonucleotide
  Sense Strand Starting at position 251 of SEQ ID NO: 318099
acuuguuuaccguaugaga

SEQ ID NO: 338574 - RNA, 19 nt, Artificial Sequence
  Description of Artificial Sequence: Synthetic oligonucleotide
  Antisense Strand to SEQ ID NO: 338573
ucucauacgguaaacaagu

SEQ ID NO: 338575 - RNA, 19 nt, Artificial Sequence
  Description of Artificial Sequence: Synthetic oligonucleotide
  Sense Strand Starting at position 251 of SEQ ID NO: 318285
uaugguacacaugguuaau

SEQ ID NO: 338576 - RNA, 19 nt, Artificial Sequence
  Description of Artificial Sequence: Synthetic oligonucleotide
  Antisense Strand to SEQ ID NO: 338575
auuaaccauguguaccaua

SEQ ID NO: 338577 - RNA, 19 nt, Artificial Sequence
  Description of Artificial Sequence: Synthetic oligonucleotide
  Sense Strand Starting at position 251 of SEQ ID NO: 318287
ugguacacaugguuaauga

SEQ ID NO: 338578 - RNA, 19 nt, Artificial Sequence
  Description of Artificial Sequence: Synthetic oligonucleotide
  Antisense Strand to SEQ ID NO: 338577
ucauuaaccauguguacca

SEQ ID NO: 338579 - RNA, 19 nt, Artificial Sequence
  Description of Artificial Sequence: Synthetic oligonucleotide
  Sense Strand Starting at position 251 of SEQ ID NO: 318302
augagaaucagcuguagua

SEQ ID NO: 338580 - RNA, 19 nt, Artificial Sequence
  Description of Artificial Sequence: Synthetic oligonucleotide
  Antisense Strand to SEQ ID NO: 338579
uacuacagcugauucucau

SEQ ID NO: 338581 - RNA, 19 nt, Artificial Sequence
  Description of Artificial Sequence: Synthetic oligonucleotide
  Sense Strand Starting at position 251 of SEQ ID NO: 318304
gagaaucagcuguaguagu

SEQ ID NO: 338582 - RNA, 19 nt, Artificial Sequence
  Description of Artificial Sequence: Synthetic oligonucleotide
  Antisense Strand to SEQ ID NO: 338581
acuacuacagcugauucuc

SEQ ID NO: 338583 - RNA, 19 nt, Artificial Sequence
  Description of Artificial Sequence: Synthetic oligonucleotide
  Sense Strand Starting at position 251 of SEQ ID NO: 318331
agaauugacuaguuaaugu

SEQ ID NO: 338584 - RNA, 19 nt, Artificial Sequence
  Description of Artificial Sequence: Synthetic oligonucleotide
  Antisense Strand to SEQ ID NO: 338583
acauuaacuagucaauucu

SEQ ID NO: 338585 - RNA, 19 nt, Artificial Sequence
  Description of Artificial Sequence: Synthetic oligonucleotide
  Sense Strand Starting at position 251 of SEQ ID NO: 318384
ugccuuaaucaauggagaa

SEQ ID NO: 338586 - RNA, 19 nt, Artificial Sequence
  Description of Artificial Sequence: Synthetic oligonucleotide
  Antisense Strand to SEQ ID NO: 338585
uucuccauugauuaaggca

SEQ ID NO: 338587 - RNA, 19 nt, Artificial Sequence
  Description of Artificial Sequence: Synthetic oligonucleotide
  Sense Strand Starting at position 251 of SEQ ID NO: 318580
cuuaucucucuggauuguu

SEQ ID NO: 338588 - RNA, 19 nt, Artificial Sequence
  Description of Artificial Sequence: Synthetic oligonucleotide
  Antisense Strand to SEQ ID NO: 338587
aacaauccagagagauaag

SEQ ID NO: 338589 - RNA, 19 nt, Artificial Sequence
  Description of Artificial Sequence: Synthetic oligonucleotide
  Sense Strand Starting at position 251 of SEQ ID NO: 318622
augugaaauguugagcauu

SEQ ID NO: 338590 - RNA, 19 nt, Artificial Sequence
  Description of Artificial Sequence: Synthetic oligonucleotide
  Antisense Strand to SEQ ID NO: 338589
aaugcucaacauuucacau

SEQ ID NO: 338591 - RNA, 19 nt, Artificial Sequence
  Description of Artificial Sequence: Synthetic oligonucleotide
  Sense Strand Starting at position 251 of SEQ ID NO: 318625
ugaaauguugagcauuaca

SEQ ID NO: 338592 - RNA, 19 nt, Artificial Sequence
  Description of Artificial Sequence: Synthetic oligonucleotide
  Antisense Strand to SEQ ID NO: 338591
uguaaugcucaacauuuca

SEQ ID NO: 338593 - RNA, 19 nt, Artificial Sequence
  Description of Artificial Sequence: Synthetic oligonucleotide
  Sense Strand Starting at position 251 of SEQ ID NO: 318647
ggagcacuguacucagaaa

SEQ ID NO: 338594 - RNA, 19 nt, Artificial Sequence
  Description of Artificial Sequence: Synthetic oligonucleotide
  Antisense Strand to SEQ ID NO: 338593
uuucugaguacagugcucc

SEQ ID NO: 338595 - RNA, 19 nt, Artificial Sequence
  Description of Artificial Sequence: Synthetic oligonucleotide
  Sense Strand Starting at position 251 of SEQ ID NO: 318713
guagcaauugaugaucacu

SEQ ID NO: 338596 - RNA, 19 nt, Artificial Sequence
  Description of Artificial Sequence: Synthetic oligonucleotide
  Antisense Strand to SEQ ID NO: 338595
agugaucaucaauugcuac

SEQ ID NO: 338597 - RNA, 19 nt, Artificial Sequence
  Description of Artificial Sequence: Synthetic oligonucleotide
  Sense Strand Starting at position 251 of SEQ ID NO: 319135
ucugauuuaugggaugaag

SEQ ID NO: 338598 - RNA, 19 nt, Artificial Sequence
  Description of Artificial Sequence: Synthetic oligonucleotide
  Antisense Strand to SEQ ID NO: 338597
cuucaucccauaaaucaga

SEQ ID NO: 338599 - RNA, 19 nt, Artificial Sequence
  Description of Artificial Sequence: Synthetic oligonucleotide
  Sense Strand Starting at position 251 of SEQ ID NO: 319173
ugaaguagccucuaagauc

SEQ ID NO: 338600 - RNA, 19 nt, Artificial Sequence
  Description of Artificial Sequence: Synthetic oligonucleotide
  Antisense Strand to SEQ ID NO: 338599
gaucuuagaggcuacuuca

SEQ ID NO: 338601 - RNA, 19 nt, Artificial Sequence
  Description of Artificial Sequence: Synthetic oligonucleotide
  Sense Strand Starting at position 252 of SEQ ID NO: 315246
ugacaaugaucaggaucaa

SEQ ID NO: 338602 - RNA, 19 nt, Artificial Sequence
  Description of Artificial Sequence: Synthetic oligonucleotide
  Antisense Strand to SEQ ID NO: 338601
uugauccugaucauuguca

SEQ ID NO: 338603 - RNA, 19 nt, Artificial Sequence
  Description of Artificial Sequence: Synthetic oligonucleotide
  Sense Strand Starting at position 252 of SEQ ID NO: 315283
aggccauaugcauaaguga

SEQ ID NO: 338604 - RNA, 19 nt, Artificial Sequence
  Description of Artificial Sequence: Synthetic oligonucleotide
  Antisense Strand to SEQ ID NO: 338603
ucacuuaugcauauggccu

SEQ ID NO: 338605 - RNA, 19 nt, Artificial Sequence
  Description of Artificial Sequence: Synthetic oligonucleotide
  Sense Strand Starting at position 252 of SEQ ID NO: 315407
gcaggagagguugaccuua

SEQ ID NO: 338606 - RNA, 19 nt, Artificial Sequence
  Description of Artificial Sequence: Synthetic oligonucleotide
  Antisense Strand to SEQ ID NO: 338605
uaaggucaaccucuccugc

SEQ ID NO: 338607 - RNA, 19 nt, Artificial Sequence
  Description of Artificial Sequence: Synthetic oligonucleotide
  Sense Strand Starting at position 252 of SEQ ID NO: 315435
cagggaagauaaucuuguu

SEQ ID NO: 338608 - RNA, 19 nt, Artificial Sequence
  Description of Artificial Sequence: Synthetic oligonucleotide
  Antisense Strand to SEQ ID NO: 338607
aacaagauuaucuucccug

SEQ ID NO: 338609 - RNA, 19 nt, Artificial Sequence
  Description of Artificial Sequence: Synthetic oligonucleotide
  Sense Strand Starting at position 252 of SEQ ID NO: 315496
ggagauaagauccguugac

SEQ ID NO: 338610 - RNA, 19 nt, Artificial Sequence
  Description of Artificial Sequence: Synthetic oligonucleotide
  Antisense Strand to SEQ ID NO: 338609
gucaacggaucuuaucucc

SEQ ID NO: 338611 - RNA, 19 nt, Artificial Sequence
  Description of Artificial Sequence: Synthetic oligonucleotide
  Sense Strand Starting at position 252 of SEQ ID NO: 315497
gagauaagauccguugaca

SEQ ID NO: 338612 - RNA, 19 nt, Artificial Sequence
  Description of Artificial Sequence: Synthetic oligonucleotide
  Antisense Strand to SEQ ID NO: 338611
ugucaacggaucuuaucuc

SEQ ID NO: 338613 - RNA, 19 nt, Artificial Sequence
  Description of Artificial Sequence: Synthetic oligonucleotide
  Sense Strand Starting at position 252 of SEQ ID NO: 315561
uuaggagagugggaauauu

SEQ ID NO: 338614 - RNA, 19 nt, Artificial Sequence
  Description of Artificial Sequence: Synthetic oligonucleotide
  Antisense Strand to SEQ ID NO: 338613
aauauucccacucuccuaa

SEQ ID NO: 338615 - RNA, 19 nt, Artificial Sequence
  Description of Artificial Sequence: Synthetic oligonucleotide
  Sense Strand Starting at position 252 of SEQ ID NO: 315590
auguauggagacugugaua

SEQ ID NO: 338616 - RNA, 19 nt, Artificial Sequence
  Description of Artificial Sequence: Synthetic oligonucleotide
  Antisense Strand to SEQ ID NO: 338615
uaucacagucuccauacau

SEQ ID NO: 338617 - RNA, 19 nt, Artificial Sequence
  Description of Artificial Sequence: Synthetic oligonucleotide
  Sense Strand Starting at position 252 of SEQ ID NO: 315617
gcaagagauugauaauaug

SEQ ID NO: 338618 - RNA, 19 nt, Artificial Sequence
  Description of Artificial Sequence: Synthetic oligonucleotide
  Antisense Strand to SEQ ID NO: 338617
cauauuaucaaucucuugc

SEQ ID NO: 338619 - RNA, 19 nt, Artificial Sequence
  Description of Artificial Sequence: Synthetic oligonucleotide
  Sense Strand Starting at position 252 of SEQ ID NO: 315620
agagauugauaauauguag

SEQ ID NO: 338620 - RNA, 19 nt, Artificial Sequence
  Description of Artificial Sequence: Synthetic oligonucleotide
  Antisense Strand to SEQ ID NO: 338619
cuacauauuaucaaucucu

SEQ ID NO: 338621 - RNA, 19 nt, Artificial Sequence
  Description of Artificial Sequence: Synthetic oligonucleotide
  Sense Strand Starting at position 252 of SEQ ID NO: 315655
gguuauugaacaugaaguc

SEQ ID NO: 338622 - RNA, 19 nt, Artificial Sequence
  Description of Artificial Sequence: Synthetic oligonucleotide
  Antisense Strand to SEQ ID NO: 338621
gacuucauguucaauaacc

SEQ ID NO: 338623 - RNA, 19 nt, Artificial Sequence
  Description of Artificial Sequence: Synthetic oligonucleotide
  Sense Strand Starting at position 252 of SEQ ID NO: 315885
cggagucagucauccuguu

SEQ ID NO: 338624 - RNA, 19 nt, Artificial Sequence
  Description of Artificial Sequence: Synthetic oligonucleotide
  Antisense Strand to SEQ ID NO: 338623
aacaggaugacugacuccg

SEQ ID NO: 338625 - RNA, 19 nt, Artificial Sequence
  Description of Artificial Sequence: Synthetic oligonucleotide
  Sense Strand Starting at position 252 of SEQ ID NO: 315909
ugcaauaaguggcuuccaa

SEQ ID NO: 338626 - RNA, 19 nt, Artificial Sequence
  Description of Artificial Sequence: Synthetic oligonucleotide
  Antisense Strand to SEQ ID NO: 338625
uuggaagccacuuauugca

SEQ ID NO: 338627 - RNA, 19 nt, Artificial Sequence
  Description of Artificial Sequence: Synthetic oligonucleotide
  Sense Strand Starting at position 252 of SEQ ID NO: 315991
gaacuuggauuaguugaau

SEQ ID NO: 338628 - RNA, 19 nt, Artificial Sequence
  Description of Artificial Sequence: Synthetic oligonucleotide
  Antisense Strand to SEQ ID NO: 338627
auucaacuaauccaaguuc

SEQ ID NO: 338629 - RNA, 19 nt, Artificial Sequence
  Description of Artificial Sequence: Synthetic oligonucleotide
  Sense Strand Starting at position 252 of SEQ ID NO: 316166
acuaauuagcuagagcuau

SEQ ID NO: 338630 - RNA, 19 nt, Artificial Sequence
  Description of Artificial Sequence: Synthetic oligonucleotide
  Antisense Strand to SEQ ID NO: 338629
auagcucuagcuaauuagu

SEQ ID NO: 338631 - RNA, 19 nt, Artificial Sequence
  Description of Artificial Sequence: Synthetic oligonucleotide
  Sense Strand Starting at position 252 of SEQ ID NO: 316237
aaugcaaaguugcuaugau

SEQ ID NO: 338632 - RNA, 19 nt, Artificial Sequence
  Description of Artificial Sequence: Synthetic oligonucleotide
  Antisense Strand to SEQ ID NO: 338631
aucauagcaacuuugcauu

SEQ ID NO: 338633 - RNA, 19 nt, Artificial Sequence
  Description of Artificial Sequence: Synthetic oligonucleotide
  Sense Strand Starting at position 252 of SEQ ID NO: 316252
ugaugcauauuugaaguaa

SEQ ID NO: 338634 - RNA, 19 nt, Artificial Sequence
  Description of Artificial Sequence: Synthetic oligonucleotide
  Antisense Strand to SEQ ID NO: 338633
uuacuucaaauaugcauca

SEQ ID NO: 338635 - RNA, 19 nt, Artificial Sequence
  Description of Artificial Sequence: Synthetic oligonucleotide
  Sense Strand Starting at position 252 of SEQ ID NO: 316628
gcaaguaaugcacacaauu

SEQ ID NO: 338636 - RNA, 19 nt, Artificial Sequence
  Description of Artificial Sequence: Synthetic oligonucleotide
  Antisense Strand to SEQ ID NO: 338635
aauugugugcauuacuugc

SEQ ID NO: 338637 - RNA, 19 nt, Artificial Sequence
  Description of Artificial Sequence: Synthetic oligonucleotide
  Sense Strand Starting at position 252 of SEQ ID NO: 316655
ccuugagaaacacgaguuu

SEQ ID NO: 338638 - RNA, 19 nt, Artificial Sequence
  Description of Artificial Sequence: Synthetic oligonucleotide
  Antisense Strand to SEQ ID NO: 338637
aaacucguguuucucaagg

SEQ ID NO: 338639 - RNA, 19 nt, Artificial Sequence
  Description of Artificial Sequence: Synthetic oligonucleotide
  Sense Strand Starting at position 252 of SEQ ID NO: 316664
acacgaguuuauuccaggu

SEQ ID NO: 338640 - RNA, 19 nt, Artificial Sequence
  Description of Artificial Sequence: Synthetic oligonucleotide
  Antisense Strand to SEQ ID NO: 338639
accuggaauaaacucgugu

SEQ ID NO: 338641 - RNA, 19 nt, Artificial Sequence
  Description of Artificial Sequence: Synthetic oligonucleotide
  Sense Strand Starting at position 252 of SEQ ID NO: 316668
gaguuuauuccagguauca

SEQ ID NO: 338642 - RNA, 19 nt, Artificial Sequence
  Description of Artificial Sequence: Synthetic oligonucleotide
  Antisense Strand to SEQ ID NO: 338641
ugauaccuggaauaaacuc

SEQ ID NO: 338643 - RNA, 19 nt, Artificial Sequence
  Description of Artificial Sequence: Synthetic oligonucleotide
  Sense Strand Starting at position 252 of SEQ ID NO: 316740
cgauuccuucgccuugagu

SEQ ID NO: 338644 - RNA, 19 nt, Artificial Sequence
  Description of Artificial Sequence: Synthetic oligonucleotide
  Antisense Strand to SEQ ID NO: 338643
acucaaggcgaaggaaucg

SEQ ID NO: 338645 - RNA, 19 nt, Artificial Sequence
  Description of Artificial Sequence: Synthetic oligonucleotide
  Sense Strand Starting at position 252 of SEQ ID NO: 316742
auuccuucgccuugaguau

SEQ ID NO: 338646 - RNA, 19 nt, Artificial Sequence
  Description of Artificial Sequence: Synthetic oligonucleotide
  Antisense Strand to SEQ ID NO: 338645
auacucaaggcgaaggaau

SEQ ID NO: 338647 - RNA, 19 nt, Artificial Sequence
  Description of Artificial Sequence: Synthetic oligonucleotide
  Sense Strand Starting at position 252 of SEQ ID NO: 316743
uuccuucgccuugaguauu

SEQ ID NO: 338648 - RNA, 19 nt, Artificial Sequence
  Description of Artificial Sequence: Synthetic oligonucleotide
  Antisense Strand to SEQ ID NO: 338647
aauacucaaggcgaaggaa

SEQ ID NO: 338649 - RNA, 19 nt, Artificial Sequence
  Description of Artificial Sequence: Synthetic oligonucleotide
  Sense Strand Starting at position 252 of SEQ ID NO: 316781
gcaugacuguugcccuauu

SEQ ID NO: 338650 - RNA, 19 nt, Artificial Sequence
  Description of Artificial Sequence: Synthetic oligonucleotide
  Antisense Strand to SEQ ID NO: 338649
aauagggcaacagucaugc

SEQ ID NO: 338651 - RNA, 19 nt, Artificial Sequence
  Description of Artificial Sequence: Synthetic oligonucleotide
  Sense Strand Starting at position 252 of SEQ ID NO: 317290
cucaguauuugcucacagu

SEQ ID NO: 338652 - RNA, 19 nt, Artificial Sequence
  Description of Artificial Sequence: Synthetic oligonucleotide
  Antisense Strand to SEQ ID NO: 338651
acugugagcaaauacugag

SEQ ID NO: 338653 - RNA, 19 nt, Artificial Sequence
  Description of Artificial Sequence: Synthetic oligonucleotide
  Sense Strand Starting at position 252 of SEQ ID NO: 317569
gcugaccucgcuuaagaug

SEQ ID NO: 338654 - RNA, 19 nt, Artificial Sequence
  Description of Artificial Sequence: Synthetic oligonucleotide
  Antisense Strand to SEQ ID NO: 338653
caucuuaagcgaggucagc

SEQ ID NO: 338655 - RNA, 19 nt, Artificial Sequence
  Description of Artificial Sequence: Synthetic oligonucleotide
  Sense Strand Starting at position 252 of SEQ ID NO: 317930
cuaugcucuugguccauaa

SEQ ID NO: 338656 - RNA, 19 nt, Artificial Sequence
  Description of Artificial Sequence: Synthetic oligonucleotide
  Antisense Strand to SEQ ID NO: 338655
uuauggaccaagagcauag

SEQ ID NO: 338657 - RNA, 19 nt, Artificial Sequence
  Description of Artificial Sequence: Synthetic oligonucleotide
  Sense Strand Starting at position 252 of SEQ ID NO: 317934
gcucuugguccauaagcau

SEQ ID NO: 338658 - RNA, 19 nt, Artificial Sequence
  Description of Artificial Sequence: Synthetic oligonucleotide
  Antisense Strand to SEQ ID NO: 338657
augcuuauggaccaagagc

SEQ ID NO: 338659 - RNA, 19 nt, Artificial Sequence
  Description of Artificial Sequence: Synthetic oligonucleotide
  Sense Strand Starting at position 252 of SEQ ID NO: 317941
guccauaagcauuggaacu

SEQ ID NO: 338660 - RNA, 19 nt, Artificial Sequence
  Description of Artificial Sequence: Synthetic oligonucleotide
  Antisense Strand to SEQ ID NO: 338659
aguuccaaugcuuauggac

SEQ ID NO: 338661 - RNA, 19 nt, Artificial Sequence
  Description of Artificial Sequence: Synthetic oligonucleotide
  Sense Strand Starting at position 252 of SEQ ID NO: 317984
cguugauuuccaugucaug

SEQ ID NO: 338662 - RNA, 19 nt, Artificial Sequence
  Description of Artificial Sequence: Synthetic oligonucleotide
  Antisense Strand to SEQ ID NO: 338661
caugacauggaaaucaacg

SEQ ID NO: 338663 - RNA, 19 nt, Artificial Sequence
  Description of Artificial Sequence: Synthetic oligonucleotide
  Sense Strand Starting at position 252 of SEQ ID NO: 318325
ggaauuguauaaucacagu

SEQ ID NO: 338664 - RNA, 19 nt, Artificial Sequence
  Description of Artificial Sequence: Synthetic oligonucleotide
  Antisense Strand to SEQ ID NO: 338663
acugugauuauacaauucc

SEQ ID NO: 338665 - RNA, 19 nt, Artificial Sequence
  Description of Artificial Sequence: Synthetic oligonucleotide
  Sense Strand Starting at position 252 of SEQ ID NO: 318345
gagagacuuggcugaagac

SEQ ID NO: 338666 - RNA, 19 nt, Artificial Sequence
  Description of Artificial Sequence: Synthetic oligonucleotide
  Antisense Strand to SEQ ID NO: 338665
gucuucagccaagucucuc

SEQ ID NO: 338667 - RNA, 19 nt, Artificial Sequence
  Description of Artificial Sequence: Synthetic oligonucleotide
  Sense Strand Starting at position 252 of SEQ ID NO: 318358
gaagacaucagguguuaug

SEQ ID NO: 338668 - RNA, 19 nt, Artificial Sequence
  Description of Artificial Sequence: Synthetic oligonucleotide
  Antisense Strand to SEQ ID NO: 338667
cauaacaccugaugucuuc

SEQ ID NO: 338669 - RNA, 19 nt, Artificial Sequence
  Description of Artificial Sequence: Synthetic oligonucleotide
  Sense Strand Starting at position 252 of SEQ ID NO: 318398
uugcuagagaauugguuga

SEQ ID NO: 338670 - RNA, 19 nt, Artificial Sequence
  Description of Artificial Sequence: Synthetic oligonucleotide
  Antisense Strand to SEQ ID NO: 338669
ucaaccaauucucuagcaa

SEQ ID NO: 338671 - RNA, 19 nt, Artificial Sequence
  Description of Artificial Sequence: Synthetic oligonucleotide
  Sense Strand Starting at position 252 of SEQ ID NO: 318402
uagagaauugguugacgga

SEQ ID NO: 338672 - RNA, 19 nt, Artificial Sequence
  Description of Artificial Sequence: Synthetic oligonucleotide
  Antisense Strand to SEQ ID NO: 338671
uccgucaaccaauucucua

SEQ ID NO: 338673 - RNA, 19 nt, Artificial Sequence
  Description of Artificial Sequence: Synthetic oligonucleotide
  Sense Strand Starting at position 252 of SEQ ID NO: 318431
agguaugucuggccucuga

SEQ ID NO: 338674 - RNA, 19 nt, Artificial Sequence
  Description of Artificial Sequence: Synthetic oligonucleotide
  Antisense Strand to SEQ ID NO: 338673
ucagaggccagacauaccu

SEQ ID NO: 338675 - RNA, 19 nt, Artificial Sequence
  Description of Artificial Sequence: Synthetic oligonucleotide
  Sense Strand Starting at position 252 of SEQ ID NO: 318578
uccagaguauuuggaacua

SEQ ID NO: 338676 - RNA, 19 nt, Artificial Sequence
  Description of Artificial Sequence: Synthetic oligonucleotide
  Antisense Strand to SEQ ID NO: 338675
uaguuccaaauacucugga

SEQ ID NO: 338677 - RNA, 19 nt, Artificial Sequence
  Description of Artificial Sequence: Synthetic oligonucleotide
  Sense Strand Starting at position 252 of SEQ ID NO: 319117
ccucaaggcccugaaacau

SEQ ID NO: 338678 - RNA, 19 nt, Artificial Sequence
  Description of Artificial Sequence: Synthetic oligonucleotide
  Antisense Strand to SEQ ID NO: 338677
auguuucagggccuugagg

SEQ ID NO: 338679 - RNA, 19 nt, Artificial Sequence
  Description of Artificial Sequence: Synthetic oligonucleotide
  Sense Strand Starting at position 252 of SEQ ID NO: 319217
uuuacagguucuccaggaa

SEQ ID NO: 338680 - RNA, 19 nt, Artificial Sequence
  Description of Artificial Sequence: Synthetic oligonucleotide
  Antisense Strand to SEQ ID NO: 338679
uuccuggagaaccuguaaa

SEQ ID NO: 338681 - RNA, 19 nt, Artificial Sequence
  Description of Artificial Sequence: Synthetic oligonucleotide
  Sense Strand Starting at position 253 of SEQ ID NO: 315255
uauuauuaaccaggugaag

SEQ ID NO: 338682 - RNA, 19 nt, Artificial Sequence
  Description of Artificial Sequence: Synthetic oligonucleotide
  Antisense Strand to SEQ ID NO: 338681
cuucaccugguuaauaaua

SEQ ID NO: 338683 - RNA, 19 nt, Artificial Sequence
  Description of Artificial Sequence: Synthetic oligonucleotide
  Sense Strand Starting at position 253 of SEQ ID NO: 315475
ugaacuggacuucgauauu

SEQ ID NO: 338684 - RNA, 19 nt, Artificial Sequence
  Description of Artificial Sequence: Synthetic oligonucleotide
  Antisense Strand to SEQ ID NO: 338683
aauaucgaaguccaguuca

SEQ ID NO: 338685 - RNA, 19 nt, Artificial Sequence
  Description of Artificial Sequence: Synthetic oligonucleotide
  Sense Strand Starting at position 253 of SEQ ID NO: 315563
uuacaaaugcuguagcaaa

SEQ ID NO: 338686 - RNA, 19 nt, Artificial Sequence
  Description of Artificial Sequence: Synthetic oligonucleotide
  Antisense Strand to SEQ ID NO: 338685
uuugcuacagcauuuguaa

SEQ ID NO: 338687 - RNA, 19 nt, Artificial Sequence
  Description of Artificial Sequence: Synthetic oligonucleotide
  Sense Strand Starting at position 253 of SEQ ID NO: 315605
gacugcucuguuuagaagu

SEQ ID NO: 338688 - RNA, 19 nt, Artificial Sequence
  Description of Artificial Sequence: Synthetic oligonucleotide
  Antisense Strand to SEQ ID NO: 338687
acuucuaaacagagcaguc

SEQ ID NO: 338689 - RNA, 19 nt, Artificial Sequence
  Description of Artificial Sequence: Synthetic oligonucleotide
  Sense Strand Starting at position 253 of SEQ ID NO: 315612
cuguuuagaaguugaagaa

SEQ ID NO: 338690 - RNA, 19 nt, Artificial Sequence
  Description of Artificial Sequence: Synthetic oligonucleotide
  Antisense Strand to SEQ ID NO: 338689
uucuucaacuucuaaacag

SEQ ID NO: 338691 - RNA, 19 nt, Artificial Sequence
  Description of Artificial Sequence: Synthetic oligonucleotide
  Sense Strand Starting at position 253 of SEQ ID NO: 315857
gucuaucaccugcauacua

SEQ ID NO: 338692 - RNA, 19 nt, Artificial Sequence
  Description of Artificial Sequence: Synthetic oligonucleotide
  Antisense Strand to SEQ ID NO: 338691
uaguaugcaggugauagac

SEQ ID NO: 338693 - RNA, 19 nt, Artificial Sequence
  Description of Artificial Sequence: Synthetic oligonucleotide
  Sense Strand Starting at position 253 of SEQ ID NO: 315996
aggauuaaguguucugggu

SEQ ID NO: 338694 - RNA, 19 nt, Artificial Sequence
  Description of Artificial Sequence: Synthetic oligonucleotide
  Antisense Strand to SEQ ID NO: 338693
acccagaacacuuaauccu

SEQ ID NO: 338695 - RNA, 19 nt, Artificial Sequence
  Description of Artificial Sequence: Synthetic oligonucleotide
  Sense Strand Starting at position 253 of SEQ ID NO: 316064
cccaguuuccucugaagag

SEQ ID NO: 338696 - RNA, 19 nt, Artificial Sequence
  Description of Artificial Sequence: Synthetic oligonucleotide
  Antisense Strand to SEQ ID NO: 338695
cucuucagaggaaacuggg

SEQ ID NO: 338697 - RNA, 19 nt, Artificial Sequence
  Description of Artificial Sequence: Synthetic oligonucleotide
  Sense Strand Starting at position 253 of SEQ ID NO: 316129
cagaguugaagauguuugu

SEQ ID NO: 338698 - RNA, 19 nt, Artificial Sequence
  Description of Artificial Sequence: Synthetic oligonucleotide
  Antisense Strand to SEQ ID NO: 338697
acaaacaucuucaacucug

SEQ ID NO: 338699 - RNA, 19 nt, Artificial Sequence
  Description of Artificial Sequence: Synthetic oligonucleotide
  Sense Strand Starting at position 253 of SEQ ID NO: 316132
aguugaagauguuuguuaa

SEQ ID NO: 338700 - RNA, 19 nt, Artificial Sequence
  Description of Artificial Sequence: Synthetic oligonucleotide
  Antisense Strand to SEQ ID NO: 338699
uuaacaaacaucuucaacu

SEQ ID NO: 338701 - RNA, 19 nt, Artificial Sequence
  Description of Artificial Sequence: Synthetic oligonucleotide
  Sense Strand Starting at position 253 of SEQ ID NO: 316157
gggaaagguuguucuaggu

SEQ ID NO: 338702 - RNA, 19 nt, Artificial Sequence
  Description of Artificial Sequence: Synthetic oligonucleotide
  Antisense Strand to SEQ ID NO: 338701
accuagaacaaccuuuccc

SEQ ID NO: 338703 - RNA, 19 nt, Artificial Sequence
  Description of Artificial Sequence: Synthetic oligonucleotide
  Sense Strand Starting at position 253 of SEQ ID NO: 316205
guaauaaugcuagauagca

SEQ ID NO: 338704 - RNA, 19 nt, Artificial Sequence
  Description of Artificial Sequence: Synthetic oligonucleotide
  Antisense Strand to SEQ ID NO: 338703
ugcuaucuagcauuauuac

SEQ ID NO: 338705 - RNA, 19 nt, Artificial Sequence
  Description of Artificial Sequence: Synthetic oligonucleotide
  Sense Strand Starting at position 253 of SEQ ID NO: 317181
gggccuugugggaguugua

SEQ ID NO: 338706 - RNA, 19 nt, Artificial Sequence
  Description of Artificial Sequence: Synthetic oligonucleotide
  Antisense Strand to SEQ ID NO: 338705
uacaacucccacaaggccc

SEQ ID NO: 338707 - RNA, 19 nt, Artificial Sequence
  Description of Artificial Sequence: Synthetic oligonucleotide
  Sense Strand Starting at position 253 of SEQ ID NO: 317258
gcgcauugugggagaugua

SEQ ID NO: 338708 - RNA, 19 nt, Artificial Sequence
  Description of Artificial Sequence: Synthetic oligonucleotide
  Antisense Strand to SEQ ID NO: 338707
uacaucucccacaaugcgc

SEQ ID NO: 338709 - RNA, 19 nt, Artificial Sequence
  Description of Artificial Sequence: Synthetic oligonucleotide
  Sense Strand Starting at position 253 of SEQ ID NO: 317261
cauugugggagauguaguu

SEQ ID NO: 338710 - RNA, 19 nt, Artificial Sequence
  Description of Artificial Sequence: Synthetic oligonucleotide
  Antisense Strand to SEQ ID NO: 338709
aacuacaucucccacaaug

SEQ ID NO: 338711 - RNA, 19 nt, Artificial Sequence
  Description of Artificial Sequence: Synthetic oligonucleotide
  Sense Strand Starting at position 253 of SEQ ID NO: 317308
aagggaagucuaggcuguu

SEQ ID NO: 338712 - RNA, 19 nt, Artificial Sequence
  Description of Artificial Sequence: Synthetic oligonucleotide
  Antisense Strand to SEQ ID NO: 338711
aacagccuagacuucccuu

SEQ ID NO: 338713 - RNA, 19 nt, Artificial Sequence
  Description of Artificial Sequence: Synthetic oligonucleotide
  Sense Strand Starting at position 253 of SEQ ID NO: 317378
gccuguuuccggucaucuc

SEQ ID NO: 338714 - RNA, 19 nt, Artificial Sequence
  Description of Artificial Sequence: Synthetic oligonucleotide
  Antisense Strand to SEQ ID NO: 338713
gagaugaccggaaacaggc

SEQ ID NO: 338715 - RNA, 19 nt, Artificial Sequence
  Description of Artificial Sequence: Synthetic oligonucleotide
  Sense Strand Starting at position 253 of SEQ ID NO: 317407
ccgugacuuguauaacuua

SEQ ID NO: 338716 - RNA, 19 nt, Artificial Sequence
  Description of Artificial Sequence: Synthetic oligonucleotide
  Antisense Strand to SEQ ID NO: 338715
uaaguuauacaagucacgg

SEQ ID NO: 338717 - RNA, 19 nt, Artificial Sequence
  Description of Artificial Sequence: Synthetic oligonucleotide
  Sense Strand Starting at position 253 of SEQ ID NO: 317410
ugacuuguauaacuuagau

SEQ ID NO: 338718 - RNA, 19 nt, Artificial Sequence
  Description of Artificial Sequence: Synthetic oligonucleotide
  Antisense Strand to SEQ ID NO: 338717
aucuaaguuauacaaguca

SEQ ID NO: 338719 - RNA, 19 nt, Artificial Sequence
  Description of Artificial Sequence: Synthetic oligonucleotide
  Sense Strand Starting at position 253 of SEQ ID NO: 317498
augggauucuacuugugaa

SEQ ID NO: 338720 - RNA, 19 nt, Artificial Sequence
  Description of Artificial Sequence: Synthetic oligonucleotide
  Antisense Strand to SEQ ID NO: 338719
uucacaaguagaaucccau

SEQ ID NO: 338721 - RNA, 19 nt, Artificial Sequence
  Description of Artificial Sequence: Synthetic oligonucleotide
  Sense Strand Starting at position 253 of SEQ ID NO: 317499
ugggauucuacuugugaaa

SEQ ID NO: 338722 - RNA, 19 nt, Artificial Sequence
  Description of Artificial Sequence: Synthetic oligonucleotide
  Antisense Strand to SEQ ID NO: 338721
uuucacaaguagaauccca

SEQ ID NO: 338723 - RNA, 19 nt, Artificial Sequence
  Description of Artificial Sequence: Synthetic oligonucleotide
  Sense Strand Starting at position 253 of SEQ ID NO: 317510
uugugaaacguugacccau

SEQ ID NO: 338724 - RNA, 19 nt, Artificial Sequence
  Description of Artificial Sequence: Synthetic oligonucleotide
  Antisense Strand to SEQ ID NO: 338723
augggucaacguuucacaa

SEQ ID NO: 338725 - RNA, 19 nt, Artificial Sequence
  Description of Artificial Sequence: Synthetic oligonucleotide
  Sense Strand Starting at position 253 of SEQ ID NO: 317587
gcauaaguuuaggcuaaga

SEQ ID NO: 338726 - RNA, 19 nt, Artificial Sequence
  Description of Artificial Sequence: Synthetic oligonucleotide
  Antisense Strand to SEQ ID NO: 338725
ucuuagccuaaacuuaugc

SEQ ID NO: 338727 - RNA, 19 nt, Artificial Sequence
  Description of Artificial Sequence: Synthetic oligonucleotide
  Sense Strand Starting at position 253 of SEQ ID NO: 317603
agaaguaugugaccuggca

SEQ ID NO: 338728 - RNA, 19 nt, Artificial Sequence
  Description of Artificial Sequence: Synthetic oligonucleotide
  Antisense Strand to SEQ ID NO: 338727
ugccaggucacauacuucu

SEQ ID NO: 338729 - RNA, 19 nt, Artificial Sequence
  Description of Artificial Sequence: Synthetic oligonucleotide
  Sense Strand Starting at position 253 of SEQ ID NO: 317605
aaguaugugaccuggcaga

SEQ ID NO: 338730 - RNA, 19 nt, Artificial Sequence
  Description of Artificial Sequence: Synthetic oligonucleotide
  Antisense Strand to SEQ ID NO: 338729
ucugccaggucacauacuu

SEQ ID NO: 338731 - RNA, 19 nt, Artificial Sequence
  Description of Artificial Sequence: Synthetic oligonucleotide
  Sense Strand Starting at position 253 of SEQ ID NO: 317618
ggcagacaguauccaucaa

SEQ ID NO: 338732 - RNA, 19 nt, Artificial Sequence
  Description of Artificial Sequence: Synthetic oligonucleotide
  Antisense Strand to SEQ ID NO: 338731
uugauggauacugucugcc

SEQ ID NO: 338733 - RNA, 19 nt, Artificial Sequence
  Description of Artificial Sequence: Synthetic oligonucleotide
  Sense Strand Starting at position 253 of SEQ ID NO: 317884
agcauuggagauugcagau

SEQ ID NO: 338734 - RNA, 19 nt, Artificial Sequence
  Description of Artificial Sequence: Synthetic oligonucleotide
  Antisense Strand to SEQ ID NO: 338733
aucugcaaucuccaaugcu

SEQ ID NO: 338735 - RNA, 19 nt, Artificial Sequence
  Description of Artificial Sequence: Synthetic oligonucleotide
  Sense Strand Starting at position 253 of SEQ ID NO: 317890
ggagauugcagaugaugug

SEQ ID NO: 338736 - RNA, 19 nt, Artificial Sequence
  Description of Artificial Sequence: Synthetic oligonucleotide
  Antisense Strand to SEQ ID NO: 338735
cacaucaucugcaaucucc

SEQ ID NO: 338737 - RNA, 19 nt, Artificial Sequence
  Description of Artificial Sequence: Synthetic oligonucleotide
  Sense Strand Starting at position 253 of SEQ ID NO: 317917
gggcaacaaugauucugaa

SEQ ID NO: 338738 - RNA, 19 nt, Artificial Sequence
  Description of Artificial Sequence: Synthetic oligonucleotide
  Antisense Strand to SEQ ID NO: 338737
uucagaaucauuguugccc

SEQ ID NO: 338739 - RNA, 19 nt, Artificial Sequence
  Description of Artificial Sequence: Synthetic oligonucleotide
  Sense Strand Starting at position 253 of SEQ ID NO: 318191
augauauguuucucuaucu

SEQ ID NO: 338740 - RNA, 19 nt, Artificial Sequence
  Description of Artificial Sequence: Synthetic oligonucleotide
  Antisense Strand to SEQ ID NO: 338739
agauagagaaacauaucau

SEQ ID NO: 338741 - RNA, 19 nt, Artificial Sequence
  Description of Artificial Sequence: Synthetic oligonucleotide
  Sense Strand Starting at position 253 of SEQ ID NO: 318192
ugauauguuucucuaucug

SEQ ID NO: 338742 - RNA, 19 nt, Artificial Sequence
  Description of Artificial Sequence: Synthetic oligonucleotide
  Antisense Strand to SEQ ID NO: 338741
cagauagagaaacauauca

SEQ ID NO: 338743 - RNA, 19 nt, Artificial Sequence
  Description of Artificial Sequence: Synthetic oligonucleotide
  Sense Strand Starting at position 253 of SEQ ID NO: 318233
gugggugaaacugauauuc

SEQ ID NO: 338744 - RNA, 19 nt, Artificial Sequence
  Description of Artificial Sequence: Synthetic oligonucleotide
  Antisense Strand to SEQ ID NO: 338743
gaauaucaguuucacccac

SEQ ID NO: 338745 - RNA, 19 nt, Artificial Sequence
  Description of Artificial Sequence: Synthetic oligonucleotide
  Sense Strand Starting at position 253 of SEQ ID NO: 318412
gcccuuauacuccaggaaa

SEQ ID NO: 338746 - RNA, 19 nt, Artificial Sequence
  Description of Artificial Sequence: Synthetic oligonucleotide
  Antisense Strand to SEQ ID NO: 338745
uuuccuggaguauaagggc

SEQ ID NO: 338747 - RNA, 19 nt, Artificial Sequence
  Description of Artificial Sequence: Synthetic oligonucleotide
  Sense Strand Starting at position 253 of SEQ ID NO: 318414
ccuuauacuccaggaaaug

SEQ ID NO: 338748 - RNA, 19 nt, Artificial Sequence
  Description of Artificial Sequence: Synthetic oligonucleotide
  Antisense Strand to SEQ ID NO: 338747
cauuuccuggaguauaagg

SEQ ID NO: 338749 - RNA, 19 nt, Artificial Sequence
  Description of Artificial Sequence: Synthetic oligonucleotide
  Sense Strand Starting at position 253 of SEQ ID NO: 318793
gagaucauguggucaguaa

SEQ ID NO: 338750 - RNA, 19 nt, Artificial Sequence
  Description of Artificial Sequence: Synthetic oligonucleotide
  Antisense Strand to SEQ ID NO: 338749
uuacugaccacaugaucuc

SEQ ID NO: 338751 - RNA, 19 nt, Artificial Sequence
  Description of Artificial Sequence: Synthetic oligonucleotide
  Sense Strand Starting at position 253 of SEQ ID NO: 318797
ucauguggucaguaaacca

SEQ ID NO: 338752 - RNA, 19 nt, Artificial Sequence
  Description of Artificial Sequence: Synthetic oligonucleotide
  Antisense Strand to SEQ ID NO: 338751
ugguuuacugaccacauga

SEQ ID NO: 338753 - RNA, 19 nt, Artificial Sequence
  Description of Artificial Sequence: Synthetic oligonucleotide
  Sense Strand Starting at position 253 of SEQ ID NO: 318879
gagaguaacugacuuggua

SEQ ID NO: 338754 - RNA, 19 nt, Artificial Sequence
  Description of Artificial Sequence: Synthetic oligonucleotide
  Antisense Strand to SEQ ID NO: 338753
uaccaagucaguuacucuc

SEQ ID NO: 338755 - RNA, 19 nt, Artificial Sequence
  Description of Artificial Sequence: Synthetic oligonucleotide
  Sense Strand Starting at position 253 of SEQ ID NO: 318883
guaacugacuugguagcaa

SEQ ID NO: 338756 - RNA, 19 nt, Artificial Sequence
  Description of Artificial Sequence: Synthetic oligonucleotide
  Antisense Strand to SEQ ID NO: 338755
uugcuaccaagucaguuac

SEQ ID NO: 338757 - RNA, 19 nt, Artificial Sequence
  Description of Artificial Sequence: Synthetic oligonucleotide
  Sense Strand Starting at position 253 of SEQ ID NO: 319035
cccacaugaucauugugaa

SEQ ID NO: 338758 - RNA, 19 nt, Artificial Sequence
  Description of Artificial Sequence: Synthetic oligonucleotide
  Antisense Strand to SEQ ID NO: 338757
uucacaaugaucauguggg

SEQ ID NO: 338759 - RNA, 19 nt, Artificial Sequence
  Description of Artificial Sequence: Synthetic oligonucleotide
  Sense Strand Starting at position 253 of SEQ ID NO: 319036
ccacaugaucauugugaag

SEQ ID NO: 338760 - RNA, 19 nt, Artificial Sequence
  Description of Artificial Sequence: Synthetic oligonucleotide
  Antisense Strand to SEQ ID NO: 338759
cuucacaaugaucaugugg

SEQ ID NO: 338761 - RNA, 19 nt, Artificial Sequence
  Description of Artificial Sequence: Synthetic oligonucleotide
  Sense Strand Starting at position 254 of SEQ ID NO: 315265
guugaugccugagugagaa

SEQ ID NO: 338762 - RNA, 19 nt, Artificial Sequence
  Description of Artificial Sequence: Synthetic oligonucleotide
  Antisense Strand to SEQ ID NO: 338761
uucucacucaggcaucaac

SEQ ID NO: 338763 - RNA, 19 nt, Artificial Sequence
  Description of Artificial Sequence: Synthetic oligonucleotide
  Sense Strand Starting at position 254 of SEQ ID NO: 315363
gaaagagcucuauaagugc

SEQ ID NO: 338764 - RNA, 19 nt, Artificial Sequence
  Description of Artificial Sequence: Synthetic oligonucleotide
  Antisense Strand to SEQ ID NO: 338763
gcacuuauagagcucuuuc

SEQ ID NO: 338765 - RNA, 19 nt, Artificial Sequence
  Description of Artificial Sequence: Synthetic oligonucleotide
  Sense Strand Starting at position 254 of SEQ ID NO: 315604
acugaaucuuugguaaacu

SEQ ID NO: 338766 - RNA, 19 nt, Artificial Sequence
  Description of Artificial Sequence: Synthetic oligonucleotide
  Antisense Strand to SEQ ID NO: 338765
aguuuaccaaagauucagu

SEQ ID NO: 338767 - RNA, 19 nt, Artificial Sequence
  Description of Artificial Sequence: Synthetic oligonucleotide
  Sense Strand Starting at position 254 of SEQ ID NO: 315902
ucuuguggauccuuccaga

SEQ ID NO: 338768 - RNA, 19 nt, Artificial Sequence
  Description of Artificial Sequence: Synthetic oligonucleotide
  Antisense Strand to SEQ ID NO: 338767
ucuggaaggauccacaaga

SEQ ID NO: 338769 - RNA, 19 nt, Artificial Sequence
  Description of Artificial Sequence: Synthetic oligonucleotide
  Sense Strand Starting at position 254 of SEQ ID NO: 315976
agcaaaugucagcaucaua

SEQ ID NO: 338770 - RNA, 19 nt, Artificial Sequence
  Description of Artificial Sequence: Synthetic oligonucleotide
  Antisense Strand to SEQ ID NO: 338769
uaugaugcugacauuugcu

SEQ ID NO: 338771 - RNA, 19 nt, Artificial Sequence
  Description of Artificial Sequence: Synthetic oligonucleotide
  Sense Strand Starting at position 254 of SEQ ID NO: 316150
gugggcaacuguccauuua

SEQ ID NO: 338772 - RNA, 19 nt, Artificial Sequence
  Description of Artificial Sequence: Synthetic oligonucleotide
  Antisense Strand to SEQ ID NO: 338771
uaaauggacaguugcccac

SEQ ID NO: 338773 - RNA, 19 nt, Artificial Sequence
  Description of Artificial Sequence: Synthetic oligonucleotide
  Sense Strand Starting at position 254 of SEQ ID NO: 316334
augacauuccacugauguu

SEQ ID NO: 338774 - RNA, 19 nt, Artificial Sequence
  Description of Artificial Sequence: Synthetic oligonucleotide
  Antisense Strand to SEQ ID NO: 338773
aacaucaguggaaugucau

SEQ ID NO: 338775 - RNA, 19 nt, Artificial Sequence
  Description of Artificial Sequence: Synthetic oligonucleotide
  Sense Strand Starting at position 254 of SEQ ID NO: 316400
gcaagucuugcuguagcca

SEQ ID NO: 338776 - RNA, 19 nt, Artificial Sequence
  Description of Artificial Sequence: Synthetic oligonucleotide
  Antisense Strand to SEQ ID NO: 338775
uggcuacagcaagacuugc

SEQ ID NO: 338777 - RNA, 19 nt, Artificial Sequence
  Description of Artificial Sequence: Synthetic oligonucleotide
  Sense Strand Starting at position 254 of SEQ ID NO: 316480
ggacuagucugaguuacau

SEQ ID NO: 338778 - RNA, 19 nt, Artificial Sequence
  Description of Artificial Sequence: Synthetic oligonucleotide
  Antisense Strand to SEQ ID NO: 338777
auguaacucagacuagucc

SEQ ID NO: 338779 - RNA, 19 nt, Artificial Sequence
  Description of Artificial Sequence: Synthetic oligonucleotide
  Sense Strand Starting at position 254 of SEQ ID NO: 316504
uccugaaggcugugauaug

SEQ ID NO: 338780 - RNA, 19 nt, Artificial Sequence
  Description of Artificial Sequence: Synthetic oligonucleotide
  Antisense Strand to SEQ ID NO: 338779
cauaucacagccuucagga

SEQ ID NO: 338781 - RNA, 19 nt, Artificial Sequence
  Description of Artificial Sequence: Synthetic oligonucleotide
  Sense Strand Starting at position 254 of SEQ ID NO: 316514
ugugauaugcuacagaaau

SEQ ID NO: 338782 - RNA, 19 nt, Artificial Sequence
  Description of Artificial Sequence: Synthetic oligonucleotide
  Antisense Strand to SEQ ID NO: 338781
auuucuguagcauaucaca

SEQ ID NO: 338783 - RNA, 19 nt, Artificial Sequence
  Description of Artificial Sequence: Synthetic oligonucleotide
  Sense Strand Starting at position 254 of SEQ ID NO: 316747
aagguuugguuucuuuaaa

SEQ ID NO: 338784 - RNA, 19 nt, Artificial Sequence
  Description of Artificial Sequence: Synthetic oligonucleotide
  Antisense Strand to SEQ ID NO: 338783
uuuaaagaaaccaaaccuu

SEQ ID NO: 338785 - RNA, 19 nt, Artificial Sequence
  Description of Artificial Sequence: Synthetic oligonucleotide
  Sense Strand Starting at position 254 of SEQ ID NO: 316792
gagcaaagaucaguuugga

SEQ ID NO: 338786 - RNA, 19 nt, Artificial Sequence
  Description of Artificial Sequence: Synthetic oligonucleotide
  Antisense Strand to SEQ ID NO: 338785
uccaaacugaucuuugcuc

SEQ ID NO: 338787 - RNA, 19 nt, Artificial Sequence
  Description of Artificial Sequence: Synthetic oligonucleotide
  Sense Strand Starting at position 254 of SEQ ID NO: 316802
caguuuggaugaucuggaa

SEQ ID NO: 338788 - RNA, 19 nt, Artificial Sequence
  Description of Artificial Sequence: Synthetic oligonucleotide
  Antisense Strand to SEQ ID NO: 338787
uuccagaucauccaaacug

SEQ ID NO: 338789 - RNA, 19 nt, Artificial Sequence
  Description of Artificial Sequence: Synthetic oligonucleotide
  Sense Strand Starting at position 254 of SEQ ID NO: 316814
ucuggaagguucuucccaa

SEQ ID NO: 338790 - RNA, 19 nt, Artificial Sequence
  Description of Artificial Sequence: Synthetic oligonucleotide
  Antisense Strand to SEQ ID NO: 338789
uugggaagaaccuuccaga

SEQ ID NO: 338791 - RNA, 19 nt, Artificial Sequence
  Description of Artificial Sequence: Synthetic oligonucleotide
  Sense Strand Starting at position 254 of SEQ ID NO: 316867
ccaacucugcuaugagaga

SEQ ID NO: 338792 - RNA, 19 nt, Artificial Sequence
  Description of Artificial Sequence: Synthetic oligonucleotide
  Antisense Strand to SEQ ID NO: 338791
ucucucauagcagaguugg

SEQ ID NO: 338793 - RNA, 19 nt, Artificial Sequence
  Description of Artificial Sequence: Synthetic oligonucleotide
  Sense Strand Starting at position 254 of SEQ ID NO: 316915
ucaaguucccuagaugacu

SEQ ID NO: 338794 - RNA, 19 nt, Artificial Sequence
  Description of Artificial Sequence: Synthetic oligonucleotide
  Antisense Strand to SEQ ID NO: 338793
agucaucuagggaacuuga

SEQ ID NO: 338795 - RNA, 19 nt, Artificial Sequence
  Description of Artificial Sequence: Synthetic oligonucleotide
  Sense Strand Starting at position 254 of SEQ ID NO: 316985
ggaccugcucccuggaaga

SEQ ID NO: 338796 - RNA, 19 nt, Artificial Sequence
  Description of Artificial Sequence: Synthetic oligonucleotide
  Antisense Strand to SEQ ID NO: 338795
ucuuccagggagcaggucc

SEQ ID NO: 338797 - RNA, 19 nt, Artificial Sequence
  Description of Artificial Sequence: Synthetic oligonucleotide
  Sense Strand Starting at position 254 of SEQ ID NO: 317380
cccugccuucuagaaagaa

SEQ ID NO: 338798 - RNA, 19 nt, Artificial Sequence
  Description of Artificial Sequence: Synthetic oligonucleotide
  Antisense Strand to SEQ ID NO: 338797
uucuuucuagaaggcaggg

SEQ ID NO: 338799 - RNA, 19 nt, Artificial Sequence
  Description of Artificial Sequence: Synthetic oligonucleotide
  Sense Strand Starting at position 254 of SEQ ID NO: 317658
cugucugauugguuuagaa

SEQ ID NO: 338800 - RNA, 19 nt, Artificial Sequence
  Description of Artificial Sequence: Synthetic oligonucleotide
  Antisense Strand to SEQ ID NO: 338799
uucuaaaccaaucagacag

SEQ ID NO: 338801 - RNA, 19 nt, Artificial Sequence
  Description of Artificial Sequence: Synthetic oligonucleotide
  Sense Strand Starting at position 254 of SEQ ID NO: 317660
gucugauugguuuagaaua

SEQ ID NO: 338802 - RNA, 19 nt, Artificial Sequence
  Description of Artificial Sequence: Synthetic oligonucleotide
  Antisense Strand to SEQ ID NO: 338801
uauucuaaaccaaucagac

SEQ ID NO: 338803 - RNA, 19 nt, Artificial Sequence
  Description of Artificial Sequence: Synthetic oligonucleotide
  Sense Strand Starting at position 254 of SEQ ID NO: 317867
gggagaaugugcccucaag

SEQ ID NO: 338804 - RNA, 19 nt, Artificial Sequence
  Description of Artificial Sequence: Synthetic oligonucleotide
  Antisense Strand to SEQ ID NO: 338803
cuugagggcacauucuccc

SEQ ID NO: 338805 - RNA, 19 nt, Artificial Sequence
  Description of Artificial Sequence: Synthetic oligonucleotide
  Sense Strand Starting at position 254 of SEQ ID NO: 318022
acgggagauugguuacaca

SEQ ID NO: 338806 - RNA, 19 nt, Artificial Sequence
  Description of Artificial Sequence: Synthetic oligonucleotide
  Antisense Strand to SEQ ID NO: 338805
uguguaaccaaucucccgu

SEQ ID NO: 338807 - RNA, 19 nt, Artificial Sequence
  Description of Artificial Sequence: Synthetic oligonucleotide
  Sense Strand Starting at position 254 of SEQ ID NO: 318078
ggaguuagguuuccuauug

SEQ ID NO: 338808 - RNA, 19 nt, Artificial Sequence
  Description of Artificial Sequence: Synthetic oligonucleotide
  Antisense Strand to SEQ ID NO: 338807
caauaggaaaccuaacucc

SEQ ID NO: 338809 - RNA, 19 nt, Artificial Sequence
  Description of Artificial Sequence: Synthetic oligonucleotide
  Sense Strand Starting at position 254 of SEQ ID NO: 318085
gguuuccuauugucagaga

SEQ ID NO: 338810 - RNA, 19 nt, Artificial Sequence
  Description of Artificial Sequence: Synthetic oligonucleotide
  Antisense Strand to SEQ ID NO: 338809
ucucugacaauaggaaacc

SEQ ID NO: 338811 - RNA, 19 nt, Artificial Sequence
  Description of Artificial Sequence: Synthetic oligonucleotide
  Sense Strand Starting at position 254 of SEQ ID NO: 318102
gaaggaaguuauguauaug

SEQ ID NO: 338812 - RNA, 19 nt, Artificial Sequence
  Description of Artificial Sequence: Synthetic oligonucleotide
  Antisense Strand to SEQ ID NO: 338811
cauauacauaacuuccuuc

SEQ ID NO: 338813 - RNA, 19 nt, Artificial Sequence
  Description of Artificial Sequence: Synthetic oligonucleotide
  Sense Strand Starting at position 254 of SEQ ID NO: 318107
aaguuauguauauggagag

SEQ ID NO: 338814 - RNA, 19 nt, Artificial Sequence
  Description of Artificial Sequence: Synthetic oligonucleotide
  Antisense Strand to SEQ ID NO: 338813
cucuccauauacauaacuu

SEQ ID NO: 338815 - RNA, 19 nt, Artificial Sequence
  Description of Artificial Sequence: Synthetic oligonucleotide
  Sense Strand Starting at position 254 of SEQ ID NO: 318164
gaaugaucaguguacccuu

SEQ ID NO: 338816 - RNA, 19 nt, Artificial Sequence
  Description of Artificial Sequence: Synthetic oligonucleotide
  Antisense Strand to SEQ ID NO: 338815
aaggguacacugaucauuc

SEQ ID NO: 338817 - RNA, 19 nt, Artificial Sequence
  Description of Artificial Sequence: Synthetic oligonucleotide
  Sense Strand Starting at position 254 of SEQ ID NO: 318179
ccuuguggccuugaauaca

SEQ ID NO: 338818 - RNA, 19 nt, Artificial Sequence
  Description of Artificial Sequence: Synthetic oligonucleotide
  Antisense Strand to SEQ ID NO: 338817
uguauucaaggccacaagg

SEQ ID NO: 338819 - RNA, 19 nt, Artificial Sequence
  Description of Artificial Sequence: Synthetic oligonucleotide
  Sense Strand Starting at position 254 of SEQ ID NO: 318182
uguggccuugaauacauaa

SEQ ID NO: 338820 - RNA, 19 nt, Artificial Sequence
  Description of Artificial Sequence: Synthetic oligonucleotide
  Antisense Strand to SEQ ID NO: 338819
uuauguauucaaggccaca

SEQ ID NO: 338821 - RNA, 19 nt, Artificial Sequence
  Description of Artificial Sequence: Synthetic oligonucleotide
  Sense Strand Starting at position 254 of SEQ ID NO: 318305
ccugaauacuggcuucuga

SEQ ID NO: 338822 - RNA, 19 nt, Artificial Sequence
  Description of Artificial Sequence: Synthetic oligonucleotide
  Antisense Strand to SEQ ID NO: 338821
ucagaagccaguauucagg

SEQ ID NO: 338823 - RNA, 19 nt, Artificial Sequence
  Description of Artificial Sequence: Synthetic oligonucleotide
  Sense Strand Starting at position 254 of SEQ ID NO: 318313
cuggcuucugaauaugacu

SEQ ID NO: 338824 - RNA, 19 nt, Artificial Sequence
  Description of Artificial Sequence: Synthetic oligonucleotide
  Antisense Strand to SEQ ID NO: 338823
agucauauucagaagccag

SEQ ID NO: 338825 - RNA, 19 nt, Artificial Sequence
  Description of Artificial Sequence: Synthetic oligonucleotide
  Sense Strand Starting at position 254 of SEQ ID NO: 318358
gcagaaacggcugauucua

SEQ ID NO: 338826 - RNA, 19 nt, Artificial Sequence
  Description of Artificial Sequence: Synthetic oligonucleotide
  Antisense Strand to SEQ ID NO: 338825
uagaaucagccguuucugc

SEQ ID NO: 338827 - RNA, 19 nt, Artificial Sequence
  Description of Artificial Sequence: Synthetic oligonucleotide
  Sense Strand Starting at position 254 of SEQ ID NO: 318371
auucuagcacugggaagua

SEQ ID NO: 338828 - RNA, 19 nt, Artificial Sequence
  Description of Artificial Sequence: Synthetic oligonucleotide
  Antisense Strand to SEQ ID NO: 338827
uacuucccagugcuagaau

SEQ ID NO: 338829 - RNA, 19 nt, Artificial Sequence
  Description of Artificial Sequence: Synthetic oligonucleotide
  Sense Strand Starting at position 254 of SEQ ID NO: 318592
aagggaacgcauugaaagu

SEQ ID NO: 338830 - RNA, 19 nt, Artificial Sequence
  Description of Artificial Sequence: Synthetic oligonucleotide
  Antisense Strand to SEQ ID NO: 338829
acuuucaaugcguucccuu

SEQ ID NO: 338831 - RNA, 19 nt, Artificial Sequence
  Description of Artificial Sequence: Synthetic oligonucleotide
  Sense Strand Starting at position 254 of SEQ ID NO: 318725
ccucaucugugaccaaagu

SEQ ID NO: 338832 - RNA, 19 nt, Artificial Sequence
  Description of Artificial Sequence: Synthetic oligonucleotide
  Antisense Strand to SEQ ID NO: 338831
acuuuggucacagaugagg

SEQ ID NO: 338833 - RNA, 19 nt, Artificial Sequence
  Description of Artificial Sequence: Synthetic oligonucleotide
  Sense Strand Starting at position 254 of SEQ ID NO: 318726
cucaucugugaccaaagua

SEQ ID NO: 338834 - RNA, 19 nt, Artificial Sequence
  Description of Artificial Sequence: Synthetic oligonucleotide
  Antisense Strand to SEQ ID NO: 338833
uacuuuggucacagaugag

SEQ ID NO: 338835 - RNA, 19 nt, Artificial Sequence
  Description of Artificial Sequence: Synthetic oligonucleotide
  Sense Strand Starting at position 254 of SEQ ID NO: 318800
guggcaucacuccauagga

SEQ ID NO: 338836 - RNA, 19 nt, Artificial Sequence
  Description of Artificial Sequence: Synthetic oligonucleotide
  Antisense Strand to SEQ ID NO: 338835
uccuauggagugaugccac

SEQ ID NO: 338837 - RNA, 19 nt, Artificial Sequence
  Description of Artificial Sequence: Synthetic oligonucleotide
  Sense Strand Starting at position 254 of SEQ ID NO: 318802
ggcaucacuccauaggacu

SEQ ID NO: 338838 - RNA, 19 nt, Artificial Sequence
  Description of Artificial Sequence: Synthetic oligonucleotide
  Antisense Strand to SEQ ID NO: 338837
aguccuauggagugaugcc

SEQ ID NO: 338839 - RNA, 19 nt, Artificial Sequence
  Description of Artificial Sequence: Synthetic oligonucleotide
  Sense Strand Starting at position 254 of SEQ ID NO: 319151
gucacaaaggguuguaaag

SEQ ID NO: 338840 - RNA, 19 nt, Artificial Sequence
  Description of Artificial Sequence: Synthetic oligonucleotide
  Antisense Strand to SEQ ID NO: 338839
cuuuacaacccuuugugac

SEQ ID NO: 338841 - RNA, 19 nt, Artificial Sequence
  Description of Artificial Sequence: Synthetic oligonucleotide
  Sense Strand Starting at position 255 of SEQ ID NO: 315344
gugacucacgguuaaauca

SEQ ID NO: 338842 - RNA, 19 nt, Artificial Sequence
  Description of Artificial Sequence: Synthetic oligonucleotide
  Antisense Strand to SEQ ID NO: 338841
ugauuuaaccgugagucac

SEQ ID NO: 338843 - RNA, 19 nt, Artificial Sequence
  Description of Artificial Sequence: Synthetic oligonucleotide
  Sense Strand Starting at position 255 of SEQ ID NO: 315351
acgguuaaaucaucucucu

SEQ ID NO: 338844 - RNA, 19 nt, Artificial Sequence
  Description of Artificial Sequence: Synthetic oligonucleotide
  Antisense Strand to SEQ ID NO: 338843
agagagaugauuuaaccgu

SEQ ID NO: 338845 - RNA, 19 nt, Artificial Sequence
  Description of Artificial Sequence: Synthetic oligonucleotide
  Sense Strand Starting at position 255 of SEQ ID NO: 315613
gaagguugguguccaauga

SEQ ID NO: 338846 - RNA, 19 nt, Artificial Sequence
  Description of Artificial Sequence: Synthetic oligonucleotide
  Antisense Strand to SEQ ID NO: 338845
ucauuggacaccaaccuuc

SEQ ID NO: 338847 - RNA, 19 nt, Artificial Sequence
  Description of Artificial Sequence: Synthetic oligonucleotide
  Sense Strand Starting at position 255 of SEQ ID NO: 315669
auagaccagcacugaaauu

SEQ ID NO: 338848 - RNA, 19 nt, Artificial Sequence
  Description of Artificial Sequence: Synthetic oligonucleotide
  Antisense Strand to SEQ ID NO: 338847
aauuucagugcuggucuau

SEQ ID NO: 338849 - RNA, 19 nt, Artificial Sequence
  Description of Artificial Sequence: Synthetic oligonucleotide
  Sense Strand Starting at position 255 of SEQ ID NO: 315805
accuccuuuccugaagagu

SEQ ID NO: 338850 - RNA, 19 nt, Artificial Sequence
  Description of Artificial Sequence: Synthetic oligonucleotide
  Antisense Strand to SEQ ID NO: 338849
acucuucaggaaaggaggu

SEQ ID NO: 338851 - RNA, 19 nt, Artificial Sequence
  Description of Artificial Sequence: Synthetic oligonucleotide
  Sense Strand Starting at position 255 of SEQ ID NO: 315808
uccuuuccugaagagugau

SEQ ID NO: 338852 - RNA, 19 nt, Artificial Sequence
  Description of Artificial Sequence: Synthetic oligonucleotide
  Antisense Strand to SEQ ID NO: 338851
aucacucuucaggaaagga

SEQ ID NO: 338853 - RNA, 19 nt, Artificial Sequence
  Description of Artificial Sequence: Synthetic oligonucleotide
  Sense Strand Starting at position 255 of SEQ ID NO: 315854
ucauaagguuguuccaaac

SEQ ID NO: 338854 - RNA, 19 nt, Artificial Sequence
  Description of Artificial Sequence: Synthetic oligonucleotide
  Antisense Strand to SEQ ID NO: 338853
guuuggaacaaccuuauga

SEQ ID NO: 338855 - RNA, 19 nt, Artificial Sequence
  Description of Artificial Sequence: Synthetic oligonucleotide
  Sense Strand Starting at position 255 of SEQ ID NO: 315906
uguguuguaagagauauaa

SEQ ID NO: 338856 - RNA, 19 nt, Artificial Sequence
  Description of Artificial Sequence: Synthetic oligonucleotide
  Antisense Strand to SEQ ID NO: 338855
uuauaucucuuacaacaca

SEQ ID NO: 338857 - RNA, 19 nt, Artificial Sequence
  Description of Artificial Sequence: Synthetic oligonucleotide
  Sense Strand Starting at position 255 of SEQ ID NO: 316227
aaggucuuagcaggaauaa

SEQ ID NO: 338858 - RNA, 19 nt, Artificial Sequence
  Description of Artificial Sequence: Synthetic oligonucleotide
  Antisense Strand to SEQ ID NO: 338857
uuauuccugcuaagaccuu

SEQ ID NO: 338859 - RNA, 19 nt, Artificial Sequence
  Description of Artificial Sequence: Synthetic oligonucleotide
  Sense Strand Starting at position 255 of SEQ ID NO: 316286
guggcaaccugguuaaaua

SEQ ID NO: 338860 - RNA, 19 nt, Artificial Sequence
  Description of Artificial Sequence: Synthetic oligonucleotide
  Antisense Strand to SEQ ID NO: 338859
uauuuaaccagguugccac

SEQ ID NO: 338861 - RNA, 19 nt, Artificial Sequence
  Description of Artificial Sequence: Synthetic oligonucleotide
  Sense Strand Starting at position 255 of SEQ ID NO: 316639
cugggaagagucugccuaa

SEQ ID NO: 338862 - RNA, 19 nt, Artificial Sequence
  Description of Artificial Sequence: Synthetic oligonucleotide
  Antisense Strand to SEQ ID NO: 338861
uuaggcagacucuucccag

SEQ ID NO: 338863 - RNA, 19 nt, Artificial Sequence
  Description of Artificial Sequence: Synthetic oligonucleotide
  Sense Strand Starting at position 255 of SEQ ID NO: 316642
ggaagagucugccuaaagc

SEQ ID NO: 338864 - RNA, 19 nt, Artificial Sequence
  Description of Artificial Sequence: Synthetic oligonucleotide
  Antisense Strand to SEQ ID NO: 338863
gcuuuaggcagacucuucc

SEQ ID NO: 338865 - RNA, 19 nt, Artificial Sequence
  Description of Artificial Sequence: Synthetic oligonucleotide
  Sense Strand Starting at position 255 of SEQ ID NO: 316837
ggcuuugauccacaacggu

SEQ ID NO: 338866 - RNA, 19 nt, Artificial Sequence
  Description of Artificial Sequence: Synthetic oligonucleotide
  Antisense Strand to SEQ ID NO: 338865
accguuguggaucaaagcc

SEQ ID NO: 338867 - RNA, 19 nt, Artificial Sequence
  Description of Artificial Sequence: Synthetic oligonucleotide
  Sense Strand Starting at position 255 of SEQ ID NO: 317320
gucugauugggugaguuga

SEQ ID NO: 338868 - RNA, 19 nt, Artificial Sequence
  Description of Artificial Sequence: Synthetic oligonucleotide
  Antisense Strand to SEQ ID NO: 338867
ucaacucacccaaucagac

SEQ ID NO: 338869 - RNA, 19 nt, Artificial Sequence
  Description of Artificial Sequence: Synthetic oligonucleotide
  Sense Strand Starting at position 255 of SEQ ID NO: 317322
cugauugggugaguugaaa

SEQ ID NO: 338870 - RNA, 19 nt, Artificial Sequence
  Description of Artificial Sequence: Synthetic oligonucleotide
  Antisense Strand to SEQ ID NO: 338869
uuucaacucacccaaucag

SEQ ID NO: 338871 - RNA, 19 nt, Artificial Sequence
  Description of Artificial Sequence: Synthetic oligonucleotide
  Sense Strand Starting at position 255 of SEQ ID NO: 317355
cuugaaucugaugguacau

SEQ ID NO: 338872 - RNA, 19 nt, Artificial Sequence
  Description of Artificial Sequence: Synthetic oligonucleotide
  Antisense Strand to SEQ ID NO: 338871
auguaccaucagauucaag

SEQ ID NO: 338873 - RNA, 19 nt, Artificial Sequence
  Description of Artificial Sequence: Synthetic oligonucleotide
  Sense Strand Starting at position 255 of SEQ ID NO: 317357
ugaaucugaugguacauuu

SEQ ID NO: 338874 - RNA, 19 nt, Artificial Sequence
  Description of Artificial Sequence: Synthetic oligonucleotide
  Antisense Strand to SEQ ID NO: 338873
aaauguaccaucagauuca

SEQ ID NO: 338875 - RNA, 19 nt, Artificial Sequence
  Description of Artificial Sequence: Synthetic oligonucleotide
  Sense Strand Starting at position 255 of SEQ ID NO: 317549
uugguccuacacgaauauu

SEQ ID NO: 338876 - RNA, 19 nt, Artificial Sequence
  Description of Artificial Sequence: Synthetic oligonucleotide
  Antisense Strand to SEQ ID NO: 338875
aauauucguguaggaccaa

SEQ ID NO: 338877 - RNA, 19 nt, Artificial Sequence
  Description of Artificial Sequence: Synthetic oligonucleotide
  Sense Strand Starting at position 255 of SEQ ID NO: 317552
guccuacacgaauauuaag

SEQ ID NO: 338878 - RNA, 19 nt, Artificial Sequence
  Description of Artificial Sequence: Synthetic oligonucleotide
  Antisense Strand to SEQ ID NO: 338877
cuuaauauucguguaggac

SEQ ID NO: 338879 - RNA, 19 nt, Artificial Sequence
  Description of Artificial Sequence: Synthetic oligonucleotide
  Sense Strand Starting at position 255 of SEQ ID NO: 317562
aauauuaagugcucuggau

SEQ ID NO: 338880 - RNA, 19 nt, Artificial Sequence
  Description of Artificial Sequence: Synthetic oligonucleotide
  Antisense Strand to SEQ ID NO: 338879
auccagagcacuuaauauu

SEQ ID NO: 338881 - RNA, 19 nt, Artificial Sequence
  Description of Artificial Sequence: Synthetic oligonucleotide
  Sense Strand Starting at position 255 of SEQ ID NO: 317564
uauuaagugcucuggauca

SEQ ID NO: 338882 - RNA, 19 nt, Artificial Sequence
  Description of Artificial Sequence: Synthetic oligonucleotide
  Antisense Strand to SEQ ID NO: 338881
ugauccagagcacuuaaua

SEQ ID NO: 338883 - RNA, 19 nt, Artificial Sequence
  Description of Artificial Sequence: Synthetic oligonucleotide
  Sense Strand Starting at position 255 of SEQ ID NO: 317566
uuaagugcucuggaucaac

SEQ ID NO: 338884 - RNA, 19 nt, Artificial Sequence
  Description of Artificial Sequence: Synthetic oligonucleotide
  Antisense Strand to SEQ ID NO: 338883
guugauccagagcacuuaa

SEQ ID NO: 338885 - RNA, 19 nt, Artificial Sequence
  Description of Artificial Sequence: Synthetic oligonucleotide
  Sense Strand Starting at position 255 of SEQ ID NO: 317614
cucccagauccaugguuua

SEQ ID NO: 338886 - RNA, 19 nt, Artificial Sequence
  Description of Artificial Sequence: Synthetic oligonucleotide
  Antisense Strand to SEQ ID NO: 338885
uaaaccauggaucugggag

SEQ ID NO: 338887 - RNA, 19 nt, Artificial Sequence
  Description of Artificial Sequence: Synthetic oligonucleotide
  Sense Strand Starting at position 255 of SEQ ID NO: 317617
ccagauccaugguuuauac

SEQ ID NO: 338888 - RNA, 19 nt, Artificial Sequence
  Description of Artificial Sequence: Synthetic oligonucleotide
  Antisense Strand to SEQ ID NO: 338887
guauaaaccauggaucugg

SEQ ID NO: 338889 - RNA, 19 nt, Artificial Sequence
  Description of Artificial Sequence: Synthetic oligonucleotide
  Sense Strand Starting at position 255 of SEQ ID NO: 317697
aggagcagauaucuagauu

SEQ ID NO: 338890 - RNA, 19 nt, Artificial Sequence
  Description of Artificial Sequence: Synthetic oligonucleotide
  Antisense Strand to SEQ ID NO: 338889
aaucuagauaucugcuccu

SEQ ID NO: 338891 - RNA, 19 nt, Artificial Sequence
  Description of Artificial Sequence: Synthetic oligonucleotide
  Sense Strand Starting at position 255 of SEQ ID NO: 317828
gagggaugguggucagaua

SEQ ID NO: 338892 - RNA, 19 nt, Artificial Sequence
  Description of Artificial Sequence: Synthetic oligonucleotide
  Antisense Strand to SEQ ID NO: 338891
uaucugaccaccaucccuc

SEQ ID NO: 338893 - RNA, 19 nt, Artificial Sequence
  Description of Artificial Sequence: Synthetic oligonucleotide
  Sense Strand Starting at position 255 of SEQ ID NO: 317890
aagguaaucuguuugggag

SEQ ID NO: 338894 - RNA, 19 nt, Artificial Sequence
  Description of Artificial Sequence: Synthetic oligonucleotide
  Antisense Strand to SEQ ID NO: 338893
cucccaaacagauuaccuu

SEQ ID NO: 338895 - RNA, 19 nt, Artificial Sequence
  Description of Artificial Sequence: Synthetic oligonucleotide
  Sense Strand Starting at position 255 of SEQ ID NO: 317891
agguaaucuguuugggaga

SEQ ID NO: 338896 - RNA, 19 nt, Artificial Sequence
  Description of Artificial Sequence: Synthetic oligonucleotide
  Antisense Strand to SEQ ID NO: 338895
ucucccaaacagauuaccu

SEQ ID NO: 338897 - RNA, 19 nt, Artificial Sequence
  Description of Artificial Sequence: Synthetic oligonucleotide
  Sense Strand Starting at position 255 of SEQ ID NO: 317959
cggucaagaccuggaaacu

SEQ ID NO: 338898 - RNA, 19 nt, Artificial Sequence
  Description of Artificial Sequence: Synthetic oligonucleotide
  Antisense Strand to SEQ ID NO: 338897
aguuuccaggucuugaccg

SEQ ID NO: 338899 - RNA, 19 nt, Artificial Sequence
  Description of Artificial Sequence: Synthetic oligonucleotide
  Sense Strand Starting at position 255 of SEQ ID NO: 318092
gugugaagugucuagugaa

SEQ ID NO: 338900 - RNA, 19 nt, Artificial Sequence
  Description of Artificial Sequence: Synthetic oligonucleotide
  Antisense Strand to SEQ ID NO: 338899
uucacuagacacuucacac

SEQ ID NO: 338901 - RNA, 19 nt, Artificial Sequence
  Description of Artificial Sequence: Synthetic oligonucleotide
  Sense Strand Starting at position 255 of SEQ ID NO: 318140
agcucugaccuacaaaguu

SEQ ID NO: 338902 - RNA, 19 nt, Artificial Sequence
  Description of Artificial Sequence: Synthetic oligonucleotide
  Antisense Strand to SEQ ID NO: 338901
aacuuuguaggucagagcu

SEQ ID NO: 338903 - RNA, 19 nt, Artificial Sequence
  Description of Artificial Sequence: Synthetic oligonucleotide
  Sense Strand Starting at position 255 of SEQ ID NO: 318170
agaacuuaugucuggcaac

SEQ ID NO: 338904 - RNA, 19 nt, Artificial Sequence
  Description of Artificial Sequence: Synthetic oligonucleotide
  Antisense Strand to SEQ ID NO: 338903
guugccagacauaaguucu

SEQ ID NO: 338905 - RNA, 19 nt, Artificial Sequence
  Description of Artificial Sequence: Synthetic oligonucleotide
  Sense Strand Starting at position 255 of SEQ ID NO: 318546
ggcagacuagcccauuauu

SEQ ID NO: 338906 - RNA, 19 nt, Artificial Sequence
  Description of Artificial Sequence: Synthetic oligonucleotide
  Antisense Strand to SEQ ID NO: 338905
aauaaugggcuagucugcc

SEQ ID NO: 338907 - RNA, 19 nt, Artificial Sequence
  Description of Artificial Sequence: Synthetic oligonucleotide
  Sense Strand Starting at position 255 of SEQ ID NO: 318549
agacuagcccauuauuagu

SEQ ID NO: 338908 - RNA, 19 nt, Artificial Sequence
  Description of Artificial Sequence: Synthetic oligonucleotide
  Antisense Strand to SEQ ID NO: 338907
acuaauaaugggcuagucu

SEQ ID NO: 338909 - RNA, 19 nt, Artificial Sequence
  Description of Artificial Sequence: Synthetic oligonucleotide
  Sense Strand Starting at position 255 of SEQ ID NO: 318555
gcccauuauuaguuacaca

SEQ ID NO: 338910 - RNA, 19 nt, Artificial Sequence
  Description of Artificial Sequence: Synthetic oligonucleotide
  Antisense Strand to SEQ ID NO: 338909
uguguaacuaauaaugggc

SEQ ID NO: 338911 - RNA, 19 nt, Artificial Sequence
  Description of Artificial Sequence: Synthetic oligonucleotide
  Sense Strand Starting at position 255 of SEQ ID NO: 318569
acacauauugaguguuuga

SEQ ID NO: 338912 - RNA, 19 nt, Artificial Sequence
  Description of Artificial Sequence: Synthetic oligonucleotide
  Antisense Strand to SEQ ID NO: 338911
ucaaacacucaauaugugu

SEQ ID NO: 338913 - RNA, 19 nt, Artificial Sequence
  Description of Artificial Sequence: Synthetic oligonucleotide
  Sense Strand Starting at position 255 of SEQ ID NO: 318572
cauauugaguguuugaaga

SEQ ID NO: 338914 - RNA, 19 nt, Artificial Sequence
  Description of Artificial Sequence: Synthetic oligonucleotide
  Antisense Strand to SEQ ID NO: 338913
ucuucaaacacucaauaug

SEQ ID NO: 338915 - RNA, 19 nt, Artificial Sequence
  Description of Artificial Sequence: Synthetic oligonucleotide
  Sense Strand Starting at position 255 of SEQ ID NO: 318773
gagguauagacucggagua

SEQ ID NO: 338916 - RNA, 19 nt, Artificial Sequence
  Description of Artificial Sequence: Synthetic oligonucleotide
  Antisense Strand to SEQ ID NO: 338915
uacuccgagucuauaccuc

SEQ ID NO: 338917 - RNA, 19 nt, Artificial Sequence
  Description of Artificial Sequence: Synthetic oligonucleotide
  Sense Strand Starting at position 255 of SEQ ID NO: 319080
uuagaauaauugcuagaac

SEQ ID NO: 338918 - RNA, 19 nt, Artificial Sequence
  Description of Artificial Sequence: Synthetic oligonucleotide
  Antisense Strand to SEQ ID NO: 338917
guucuagcaauuauucuaa

SEQ ID NO: 338919 - RNA, 19 nt, Artificial Sequence
  Description of Artificial Sequence: Synthetic oligonucleotide
  Sense Strand Starting at position 255 of SEQ ID NO: 319156
uuagaauaaucgcuaucau

SEQ ID NO: 338920 - RNA, 19 nt, Artificial Sequence
  Description of Artificial Sequence: Synthetic oligonucleotide
  Antisense Strand to SEQ ID NO: 338919
augauagcgauuauucuaa

SEQ ID NO: 338921 - RNA, 19 nt, Artificial Sequence
  Description of Artificial Sequence: Synthetic oligonucleotide
  Sense Strand Starting at position 256 of SEQ ID NO: 315278
agcacaaagcugugggaaa

SEQ ID NO: 338922 - RNA, 19 nt, Artificial Sequence
  Description of Artificial Sequence: Synthetic oligonucleotide
  Antisense Strand to SEQ ID NO: 338921
uuucccacagcuuugugcu

SEQ ID NO: 338923 - RNA, 19 nt, Artificial Sequence
  Description of Artificial Sequence: Synthetic oligonucleotide
  Sense Strand Starting at position 256 of SEQ ID NO: 315303
ucugguacuacgggaaaua

SEQ ID NO: 338924 - RNA, 19 nt, Artificial Sequence
  Description of Artificial Sequence: Synthetic oligonucleotide
  Antisense Strand to SEQ ID NO: 338923
uauuucccguaguaccaga

SEQ ID NO: 338925 - RNA, 19 nt, Artificial Sequence
  Description of Artificial Sequence: Synthetic oligonucleotide
  Sense Strand Starting at position 256 of SEQ ID NO: 315675
acaaauaaacgugauagcu

SEQ ID NO: 338926 - RNA, 19 nt, Artificial Sequence
  Description of Artificial Sequence: Synthetic oligonucleotide
  Antisense Strand to SEQ ID NO: 338925
agcuaucacguuuauuugu

SEQ ID NO: 338927 - RNA, 19 nt, Artificial Sequence
  Description of Artificial Sequence: Synthetic oligonucleotide
  Sense Strand Starting at position 256 of SEQ ID NO: 315824
ugaauauggcagcagaagu

SEQ ID NO: 338928 - RNA, 19 nt, Artificial Sequence
  Description of Artificial Sequence: Synthetic oligonucleotide
  Antisense Strand to SEQ ID NO: 338927
acuucugcugccauauuca

SEQ ID NO: 338929 - RNA, 19 nt, Artificial Sequence
  Description of Artificial Sequence: Synthetic oligonucleotide
  Sense Strand Starting at position 256 of SEQ ID NO: 315920
ccaagaaguccaggcuacu

SEQ ID NO: 338930 - RNA, 19 nt, Artificial Sequence
  Description of Artificial Sequence: Synthetic oligonucleotide
  Antisense Strand to SEQ ID NO: 338929
aguagccuggacuucuugg

SEQ ID NO: 338931 - RNA, 19 nt, Artificial Sequence
  Description of Artificial Sequence: Synthetic oligonucleotide
  Sense Strand Starting at position 256 of SEQ ID NO: 315991
ggaagaagcuguccuggau

SEQ ID NO: 338932 - RNA, 19 nt, Artificial Sequence
  Description of Artificial Sequence: Synthetic oligonucleotide
  Antisense Strand to SEQ ID NO: 338931
auccaggacagcuucuucc

SEQ ID NO: 338933 - RNA, 19 nt, Artificial Sequence
  Description of Artificial Sequence: Synthetic oligonucleotide
  Sense Strand Starting at position 256 of SEQ ID NO: 315995
gaagcuguccuggauguca

SEQ ID NO: 338934 - RNA, 19 nt, Artificial Sequence
  Description of Artificial Sequence: Synthetic oligonucleotide
  Antisense Strand to SEQ ID NO: 338933
ugacauccaggacagcuuc

SEQ ID NO: 338935 - RNA, 19 nt, Artificial Sequence
  Description of Artificial Sequence: Synthetic oligonucleotide
  Sense Strand Starting at position 256 of SEQ ID NO: 316078
aagaacuguccgggugaau

SEQ ID NO: 338936 - RNA, 19 nt, Artificial Sequence
  Description of Artificial Sequence: Synthetic oligonucleotide
  Antisense Strand to SEQ ID NO: 338935
auucacccggacaguucuu

SEQ ID NO: 338937 - RNA, 19 nt, Artificial Sequence
  Description of Artificial Sequence: Synthetic oligonucleotide
  Sense Strand Starting at position 256 of SEQ ID NO: 316136
agcuguuauccagcgguau

SEQ ID NO: 338938 - RNA, 19 nt, Artificial Sequence
  Description of Artificial Sequence: Synthetic oligonucleotide
  Antisense Strand to SEQ ID NO: 338937
auaccgcuggauaacagcu

SEQ ID NO: 338939 - RNA, 19 nt, Artificial Sequence
  Description of Artificial Sequence: Synthetic oligonucleotide
  Sense Strand Starting at position 256 of SEQ ID NO: 316147
agcgguaucaaugacagaa

SEQ ID NO: 338940 - RNA, 19 nt, Artificial Sequence
  Description of Artificial Sequence: Synthetic oligonucleotide
  Antisense Strand to SEQ ID NO: 338939
uucugucauugauaccgcu

SEQ ID NO: 338941 - RNA, 19 nt, Artificial Sequence
  Description of Artificial Sequence: Synthetic oligonucleotide
  Sense Strand Starting at position 256 of SEQ ID NO: 316151
guaucaaugacagaagugu

SEQ ID NO: 338942 - RNA, 19 nt, Artificial Sequence
  Description of Artificial Sequence: Synthetic oligonucleotide
  Antisense Strand to SEQ ID NO: 338941
acacuucugucauugauac

SEQ ID NO: 338943 - RNA, 19 nt, Artificial Sequence
  Description of Artificial Sequence: Synthetic oligonucleotide
  Sense Strand Starting at position 256 of SEQ ID NO: 316281
cccaauugguucuuuauga

SEQ ID NO: 338944 - RNA, 19 nt, Artificial Sequence
  Description of Artificial Sequence: Synthetic oligonucleotide
  Antisense Strand to SEQ ID NO: 338943
ucauaaagaaccaauuggg

SEQ ID NO: 338945 - RNA, 19 nt, Artificial Sequence
  Description of Artificial Sequence: Synthetic oligonucleotide
  Sense Strand Starting at position 256 of SEQ ID NO: 316282
ccaauugguucuuuaugaa

SEQ ID NO: 338946 - RNA, 19 nt, Artificial Sequence
  Description of Artificial Sequence: Synthetic oligonucleotide
  Antisense Strand to SEQ ID NO: 338945
uucauaaagaaccaauugg

SEQ ID NO: 338947 - RNA, 19 nt, Artificial Sequence
  Description of Artificial Sequence: Synthetic oligonucleotide
  Sense Strand Starting at position 256 of SEQ ID NO: 316289
guucuuuaugaauaauguc

SEQ ID NO: 338948 - RNA, 19 nt, Artificial Sequence
  Description of Artificial Sequence: Synthetic oligonucleotide
  Antisense Strand to SEQ ID NO: 338947
gacauuauucauaaagaac

SEQ ID NO: 338949 - RNA, 19 nt, Artificial Sequence
  Description of Artificial Sequence: Synthetic oligonucleotide
  Sense Strand Starting at position 256 of SEQ ID NO: 316404
aggagaaguggcuggacau

SEQ ID NO: 338950 - RNA, 19 nt, Artificial Sequence
  Description of Artificial Sequence: Synthetic oligonucleotide
  Antisense Strand to SEQ ID NO: 338949
auguccagccacuucuccu

SEQ ID NO: 338951 - RNA, 19 nt, Artificial Sequence
  Description of Artificial Sequence: Synthetic oligonucleotide
  Sense Strand Starting at position 256 of SEQ ID NO: 316405
ggagaaguggcuggacauc

SEQ ID NO: 338952 - RNA, 19 nt, Artificial Sequence
  Description of Artificial Sequence: Synthetic oligonucleotide
  Antisense Strand to SEQ ID NO: 338951
gauguccagccacuucucc

SEQ ID NO: 338953 - RNA, 19 nt, Artificial Sequence
  Description of Artificial Sequence: Synthetic oligonucleotide
  Sense Strand Starting at position 256 of SEQ ID NO: 316467
agagaugugacuugacuuc

SEQ ID NO: 338954 - RNA, 19 nt, Artificial Sequence
  Description of Artificial Sequence: Synthetic oligonucleotide
  Antisense Strand to SEQ ID NO: 338953
gaagucaagucacaucucu

SEQ ID NO: 338955 - RNA, 19 nt, Artificial Sequence
  Description of Artificial Sequence: Synthetic oligonucleotide
  Sense Strand Starting at position 256 of SEQ ID NO: 316599
auucuucuugggcaccaaa

SEQ ID NO: 338956 - RNA, 19 nt, Artificial Sequence
  Description of Artificial Sequence: Synthetic oligonucleotide
  Antisense Strand to SEQ ID NO: 338955
uuuggugcccaagaagaau

SEQ ID NO: 338957 - RNA, 19 nt, Artificial Sequence
  Description of Artificial Sequence: Synthetic oligonucleotide
  Sense Strand Starting at position 256 of SEQ ID NO: 317064
agugaucucugaguggaug

SEQ ID NO: 338958 - RNA, 19 nt, Artificial Sequence
  Description of Artificial Sequence: Synthetic oligonucleotide
  Antisense Strand to SEQ ID NO: 338957
cauccacucagagaucacu

SEQ ID NO: 338959 - RNA, 19 nt, Artificial Sequence
  Description of Artificial Sequence: Synthetic oligonucleotide
  Sense Strand Starting at position 256 of SEQ ID NO: 317230
gaggcagaagugggauuau

SEQ ID NO: 338960 - RNA, 19 nt, Artificial Sequence
  Description of Artificial Sequence: Synthetic oligonucleotide
  Antisense Strand to SEQ ID NO: 338959
auaaucccacuucugccuc

SEQ ID NO: 338961 - RNA, 19 nt, Artificial Sequence
  Description of Artificial Sequence: Synthetic oligonucleotide
  Sense Strand Starting at position 256 of SEQ ID NO: 317240
ugggauuauugugcuggga

SEQ ID NO: 338962 - RNA, 19 nt, Artificial Sequence
  Description of Artificial Sequence: Synthetic oligonucleotide
  Antisense Strand to SEQ ID NO: 338961
ucccagcacaauaauccca

SEQ ID NO: 338963 - RNA, 19 nt, Artificial Sequence
  Description of Artificial Sequence: Synthetic oligonucleotide
  Sense Strand Starting at position 256 of SEQ ID NO: 317243
gauuauugugcugggaaca

SEQ ID NO: 338964 - RNA, 19 nt, Artificial Sequence
  Description of Artificial Sequence: Synthetic oligonucleotide
  Antisense Strand to SEQ ID NO: 338963
uguucccagcacaauaauc

SEQ ID NO: 338965 - RNA, 19 nt, Artificial Sequence
  Description of Artificial Sequence: Synthetic oligonucleotide
  Sense Strand Starting at position 256 of SEQ ID NO: 317253
cugggaacagauuguugua

SEQ ID NO: 338966 - RNA, 19 nt, Artificial Sequence
  Description of Artificial Sequence: Synthetic oligonucleotide
  Antisense Strand to SEQ ID NO: 338965
uacaacaaucuguucccag

SEQ ID NO: 338967 - RNA, 19 nt, Artificial Sequence
  Description of Artificial Sequence: Synthetic oligonucleotide
  Sense Strand Starting at position 256 of SEQ ID NO: 317399
cugaaugcugaauagugau

SEQ ID NO: 338968 - RNA, 19 nt, Artificial Sequence
  Description of Artificial Sequence: Synthetic oligonucleotide
  Antisense Strand to SEQ ID NO: 338967
aucacuauucagcauucag

SEQ ID NO: 338969 - RNA, 19 nt, Artificial Sequence
  Description of Artificial Sequence: Synthetic oligonucleotide
  Sense Strand Starting at position 256 of SEQ ID NO: 317405
gcugaauagugaucacaag

SEQ ID NO: 338970 - RNA, 19 nt, Artificial Sequence
  Description of Artificial Sequence: Synthetic oligonucleotide
  Antisense Strand to SEQ ID NO: 338969
cuugugaucacuauucagc

SEQ ID NO: 338971 - RNA, 19 nt, Artificial Sequence
  Description of Artificial Sequence: Synthetic oligonucleotide
  Sense Strand Starting at position 256 of SEQ ID NO: 317498
ggugggagagguugucaga

SEQ ID NO: 338972 - RNA, 19 nt, Artificial Sequence
  Description of Artificial Sequence: Synthetic oligonucleotide
  Antisense Strand to SEQ ID NO: 338971
ucugacaaccucucccacc

SEQ ID NO: 338973 - RNA, 19 nt, Artificial Sequence
  Description of Artificial Sequence: Synthetic oligonucleotide
  Sense Strand Starting at position 256 of SEQ ID NO: 317872
ugggaagugaugcaagagu

SEQ ID NO: 338974 - RNA, 19 nt, Artificial Sequence
  Description of Artificial Sequence: Synthetic oligonucleotide
  Antisense Strand to SEQ ID NO: 338973
acucuugcaucacuuccca

SEQ ID NO: 338975 - RNA, 19 nt, Artificial Sequence
  Description of Artificial Sequence: Synthetic oligonucleotide
  Sense Strand Starting at position 256 of SEQ ID NO: 318081
uugcaugggccugauaaag

SEQ ID NO: 338976 - RNA, 19 nt, Artificial Sequence
  Description of Artificial Sequence: Synthetic oligonucleotide
  Antisense Strand to SEQ ID NO: 338975
cuuuaucaggcccaugcaa

SEQ ID NO: 338977 - RNA, 19 nt, Artificial Sequence
  Description of Artificial Sequence: Synthetic oligonucleotide
  Sense Strand Starting at position 256 of SEQ ID NO: 318212
gcuguaguucaagagagaa

SEQ ID NO: 338978 - RNA, 19 nt, Artificial Sequence
  Description of Artificial Sequence: Synthetic oligonucleotide
  Antisense Strand to SEQ ID NO: 338977
uucucucuugaacuacagc

SEQ ID NO: 338979 - RNA, 19 nt, Artificial Sequence
  Description of Artificial Sequence: Synthetic oligonucleotide
  Sense Strand Starting at position 256 of SEQ ID NO: 318315
ggagcagacccaugaguga

SEQ ID NO: 338980 - RNA, 19 nt, Artificial Sequence
  Description of Artificial Sequence: Synthetic oligonucleotide
  Antisense Strand to SEQ ID NO: 338979
ucacucaugggucugcucc

SEQ ID NO: 338981 - RNA, 19 nt, Artificial Sequence
  Description of Artificial Sequence: Synthetic oligonucleotide
  Sense Strand Starting at position 256 of SEQ ID NO: 318360
auguuucaaggaggaguaa

SEQ ID NO: 338982 - RNA, 19 nt, Artificial Sequence
  Description of Artificial Sequence: Synthetic oligonucleotide
  Antisense Strand to SEQ ID NO: 338981
uuacuccuccuugaaacau

SEQ ID NO: 338983 - RNA, 19 nt, Artificial Sequence
  Description of Artificial Sequence: Synthetic oligonucleotide
  Sense Strand Starting at position 256 of SEQ ID NO: 318372
ggaguaaguagucaucugu

SEQ ID NO: 338984 - RNA, 19 nt, Artificial Sequence
  Description of Artificial Sequence: Synthetic oligonucleotide
  Antisense Strand to SEQ ID NO: 338983
acagaugacuacuuacucc

SEQ ID NO: 338985 - RNA, 19 nt, Artificial Sequence
  Description of Artificial Sequence: Synthetic oligonucleotide
  Sense Strand Starting at position 256 of SEQ ID NO: 318378
aguagucaucuguacaaau

SEQ ID NO: 338986 - RNA, 19 nt, Artificial Sequence
  Description of Artificial Sequence: Synthetic oligonucleotide
  Antisense Strand to SEQ ID NO: 338985
auuuguacagaugacuacu

SEQ ID NO: 338987 - RNA, 19 nt, Artificial Sequence
  Description of Artificial Sequence: Synthetic oligonucleotide
  Sense Strand Starting at position 256 of SEQ ID NO: 318611
guccucacucaggagucau

SEQ ID NO: 338988 - RNA, 19 nt, Artificial Sequence
  Description of Artificial Sequence: Synthetic oligonucleotide
  Antisense Strand to SEQ ID NO: 338987
augacuccugagugaggac

SEQ ID NO: 338989 - RNA, 19 nt, Artificial Sequence
  Description of Artificial Sequence: Synthetic oligonucleotide
  Sense Strand Starting at position 256 of SEQ ID NO: 318818
gggaguguaaauuguuaua

SEQ ID NO: 338990 - RNA, 19 nt, Artificial Sequence
  Description of Artificial Sequence: Synthetic oligonucleotide
  Antisense Strand to SEQ ID NO: 338989
uauaacaauuuacacuccc

SEQ ID NO: 338991 - RNA, 19 nt, Artificial Sequence
  Description of Artificial Sequence: Synthetic oligonucleotide
  Sense Strand Starting at position 256 of SEQ ID NO: 318820
gaguguaaauuguuauaac

SEQ ID NO: 338992 - RNA, 19 nt, Artificial Sequence
  Description of Artificial Sequence: Synthetic oligonucleotide
  Antisense Strand to SEQ ID NO: 338991
guuauaacaauuuacacuc

SEQ ID NO: 338993 - RNA, 19 nt, Artificial Sequence
  Description of Artificial Sequence: Synthetic oligonucleotide
  Sense Strand Starting at position 256 of SEQ ID NO: 318853
cugggcaaucuauaaagca

SEQ ID NO: 338994 - RNA, 19 nt, Artificial Sequence
  Description of Artificial Sequence: Synthetic oligonucleotide
  Antisense Strand to SEQ ID NO: 338993
ugcuuuauagauugcccag

SEQ ID NO: 338995 - RNA, 19 nt, Artificial Sequence
  Description of Artificial Sequence: Synthetic oligonucleotide
  Sense Strand Starting at position 256 of SEQ ID NO: 318977
agcauuucuugauaauaag

SEQ ID NO: 338996 - RNA, 19 nt, Artificial Sequence
  Description of Artificial Sequence: Synthetic oligonucleotide
  Antisense Strand to SEQ ID NO: 338995
cuuauuaucaagaaaugcu

SEQ ID NO: 338997 - RNA, 19 nt, Artificial Sequence
  Description of Artificial Sequence: Synthetic oligonucleotide
  Sense Strand Starting at position 256 of SEQ ID NO: 318999
uuggaaauaacguacaugu

SEQ ID NO: 338998 - RNA, 19 nt, Artificial Sequence
  Description of Artificial Sequence: Synthetic oligonucleotide
  Antisense Strand to SEQ ID NO: 338997
acauguacguuauuuccaa

SEQ ID NO: 338999 - RNA, 19 nt, Artificial Sequence
  Description of Artificial Sequence: Synthetic oligonucleotide
  Sense Strand Starting at position 256 of SEQ ID NO: 319001
ggaaauaacguacauguuu

SEQ ID NO: 339000 - RNA, 19 nt, Artificial Sequence
  Description of Artificial Sequence: Synthetic oligonucleotide
  Antisense Strand to SEQ ID NO: 338999
aaacauguacguuauuucc

SEQ ID NO: 339001 - RNA, 19 nt, Artificial Sequence
  Description of Artificial Sequence: Synthetic oligonucleotide
  Sense Strand Starting at position 257 of SEQ ID NO: 315252
gcagacaucugcuuauauc

SEQ ID NO: 339002 - RNA, 19 nt, Artificial Sequence
  Description of Artificial Sequence: Synthetic oligonucleotide
  Antisense Strand to SEQ ID NO: 339001
gauauaagcagaugucugc

SEQ ID NO: 339003 - RNA, 19 nt, Artificial Sequence
  Description of Artificial Sequence: Synthetic oligonucleotide
  Sense Strand Starting at position 257 of SEQ ID NO: 315457
uuuaccgcacucugagaua

SEQ ID NO: 339004 - RNA, 19 nt, Artificial Sequence
  Description of Artificial Sequence: Synthetic oligonucleotide
  Antisense Strand to SEQ ID NO: 339003
uaucucagagugcgguaaa

SEQ ID NO: 339005 - RNA, 19 nt, Artificial Sequence
  Description of Artificial Sequence: Synthetic oligonucleotide
  Sense Strand Starting at position 257 of SEQ ID NO: 315460
accgcacucugagauauuu

SEQ ID NO: 339006 - RNA, 19 nt, Artificial Sequence
  Description of Artificial Sequence: Synthetic oligonucleotide
  Antisense Strand to SEQ ID NO: 339005
aaauaucucagagugcggu

SEQ ID NO: 339007 - RNA, 19 nt, Artificial Sequence
  Description of Artificial Sequence: Synthetic oligonucleotide
  Sense Strand Starting at position 257 of SEQ ID NO: 315521
auagaaacugccugucaaa

SEQ ID NO: 339008 - RNA, 19 nt, Artificial Sequence
  Description of Artificial Sequence: Synthetic oligonucleotide
  Antisense Strand to SEQ ID NO: 339007
uuugacaggcaguuucuau

SEQ ID NO: 339009 - RNA, 19 nt, Artificial Sequence
  Description of Artificial Sequence: Synthetic oligonucleotide
  Sense Strand Starting at position 257 of SEQ ID NO: 315675
aaguuauuggagggccagu

SEQ ID NO: 339010 - RNA, 19 nt, Artificial Sequence
  Description of Artificial Sequence: Synthetic oligonucleotide
  Antisense Strand to SEQ ID NO: 339009
acuggcccuccaauaacuu

SEQ ID NO: 339011 - RNA, 19 nt, Artificial Sequence
  Description of Artificial Sequence: Synthetic oligonucleotide
  Sense Strand Starting at position 257 of SEQ ID NO: 315791
ucaaguguagcucaaagca

SEQ ID NO: 339012 - RNA, 19 nt, Artificial Sequence
  Description of Artificial Sequence: Synthetic oligonucleotide
  Antisense Strand to SEQ ID NO: 339011
ugcuuugagcuacacuuga

SEQ ID NO: 339013 - RNA, 19 nt, Artificial Sequence
  Description of Artificial Sequence: Synthetic oligonucleotide
  Sense Strand Starting at position 257 of SEQ ID NO: 315877
ugaugauugccaggcagga

SEQ ID NO: 339014 - RNA, 19 nt, Artificial Sequence
  Description of Artificial Sequence: Synthetic oligonucleotide
  Antisense Strand to SEQ ID NO: 339013
uccugccuggcaaucauca

SEQ ID NO: 339015 - RNA, 19 nt, Artificial Sequence
  Description of Artificial Sequence: Synthetic oligonucleotide
  Sense Strand Starting at position 257 of SEQ ID NO: 315879
augauugccaggcaggauu

SEQ ID NO: 339016 - RNA, 19 nt, Artificial Sequence
  Description of Artificial Sequence: Synthetic oligonucleotide
  Antisense Strand to SEQ ID NO: 339015
aauccugccuggcaaucau

SEQ ID NO: 339017 - RNA, 19 nt, Artificial Sequence
  Description of Artificial Sequence: Synthetic oligonucleotide
  Sense Strand Starting at position 257 of SEQ ID NO: 315991
acaaguuaucacuaagcug

SEQ ID NO: 339018 - RNA, 19 nt, Artificial Sequence
  Description of Artificial Sequence: Synthetic oligonucleotide
  Antisense Strand to SEQ ID NO: 339017
cagcuuagugauaacuugu

SEQ ID NO: 339019 - RNA, 19 nt, Artificial Sequence
  Description of Artificial Sequence: Synthetic oligonucleotide
  Sense Strand Starting at position 257 of SEQ ID NO: 316665
acagacagcccucaaaguu

SEQ ID NO: 339020 - RNA, 19 nt, Artificial Sequence
  Description of Artificial Sequence: Synthetic oligonucleotide
  Antisense Strand to SEQ ID NO: 339019
aacuuugagggcugucugu

SEQ ID NO: 339021 - RNA, 19 nt, Artificial Sequence
  Description of Artificial Sequence: Synthetic oligonucleotide
  Sense Strand Starting at position 257 of SEQ ID NO: 316781
gggaacugacuucgggaau

SEQ ID NO: 339022 - RNA, 19 nt, Artificial Sequence
  Description of Artificial Sequence: Synthetic oligonucleotide
  Antisense Strand to SEQ ID NO: 339021
auucccgaagucaguuccc

SEQ ID NO: 339023 - RNA, 19 nt, Artificial Sequence
  Description of Artificial Sequence: Synthetic oligonucleotide
  Sense Strand Starting at position 257 of SEQ ID NO: 317615
acugauaucugggcggaga

SEQ ID NO: 339024 - RNA, 19 nt, Artificial Sequence
  Description of Artificial Sequence: Synthetic oligonucleotide
  Antisense Strand to SEQ ID NO: 339023
ucuccgcccagauaucagu

SEQ ID NO: 339025 - RNA, 19 nt, Artificial Sequence
  Description of Artificial Sequence: Synthetic oligonucleotide
  Sense Strand Starting at position 257 of SEQ ID NO: 317762
aguagauagccuuggaccu

SEQ ID NO: 339026 - RNA, 19 nt, Artificial Sequence
  Description of Artificial Sequence: Synthetic oligonucleotide
  Antisense Strand to SEQ ID NO: 339025
agguccaaggcuaucuacu

SEQ ID NO: 339027 - RNA, 19 nt, Artificial Sequence
  Description of Artificial Sequence: Synthetic oligonucleotide
  Sense Strand Starting at position 257 of SEQ ID NO: 317833
gcucuuagaggcugauaga

SEQ ID NO: 339028 - RNA, 19 nt, Artificial Sequence
  Description of Artificial Sequence: Synthetic oligonucleotide
  Antisense Strand to SEQ ID NO: 339027
ucuaucagccucuaagagc

SEQ ID NO: 339029 - RNA, 19 nt, Artificial Sequence
  Description of Artificial Sequence: Synthetic oligonucleotide
  Sense Strand Starting at position 257 of SEQ ID NO: 318000
cuugacgucaugcauugua

SEQ ID NO: 339030 - RNA, 19 nt, Artificial Sequence
  Description of Artificial Sequence: Synthetic oligonucleotide
  Antisense Strand to SEQ ID NO: 339029
uacaaugcaugacgucaag

SEQ ID NO: 339031 - RNA, 19 nt, Artificial Sequence
  Description of Artificial Sequence: Synthetic oligonucleotide
  Sense Strand Starting at position 257 of SEQ ID NO: 318020
aaucucgugccguugagua

SEQ ID NO: 339032 - RNA, 19 nt, Artificial Sequence
  Description of Artificial Sequence: Synthetic oligonucleotide
  Antisense Strand to SEQ ID NO: 339031
uacucaacggcacgagauu

SEQ ID NO: 339033 - RNA, 19 nt, Artificial Sequence
  Description of Artificial Sequence: Synthetic oligonucleotide
  Sense Strand Starting at position 257 of SEQ ID NO: 318033
ugaguauugucaguucccu

SEQ ID NO: 339034 - RNA, 19 nt, Artificial Sequence
  Description of Artificial Sequence: Synthetic oligonucleotide
  Antisense Strand to SEQ ID NO: 339033
agggaacugacaauacuca

SEQ ID NO: 339035 - RNA, 19 nt, Artificial Sequence
  Description of Artificial Sequence: Synthetic oligonucleotide
  Sense Strand Starting at position 257 of SEQ ID NO: 318037
uauugucaguucccugagu

SEQ ID NO: 339036 - RNA, 19 nt, Artificial Sequence
  Description of Artificial Sequence: Synthetic oligonucleotide
  Antisense Strand to SEQ ID NO: 339035
acucagggaacugacaaua

SEQ ID NO: 339037 - RNA, 19 nt, Artificial Sequence
  Description of Artificial Sequence: Synthetic oligonucleotide
  Sense Strand Starting at position 257 of SEQ ID NO: 318088
ccaucucuaggccgugaaa

SEQ ID NO: 339038 - RNA, 19 nt, Artificial Sequence
  Description of Artificial Sequence: Synthetic oligonucleotide
  Antisense Strand to SEQ ID NO: 339037
uuucacggccuagagaugg

SEQ ID NO: 339039 - RNA, 19 nt, Artificial Sequence
  Description of Artificial Sequence: Synthetic oligonucleotide
  Sense Strand Starting at position 257 of SEQ ID NO: 318320
gcuguaucacccugacagu

SEQ ID NO: 339040 - RNA, 19 nt, Artificial Sequence
  Description of Artificial Sequence: Synthetic oligonucleotide
  Antisense Strand to SEQ ID NO: 339039
acugucagggugauacagc

SEQ ID NO: 339041 - RNA, 19 nt, Artificial Sequence
  Description of Artificial Sequence: Synthetic oligonucleotide
  Sense Strand Starting at position 257 of SEQ ID NO: 318333
gacagugagcacuggauua

SEQ ID NO: 339042 - RNA, 19 nt, Artificial Sequence
  Description of Artificial Sequence: Synthetic oligonucleotide
  Antisense Strand to SEQ ID NO: 339041
uaauccagugcucacuguc

SEQ ID NO: 339043 - RNA, 19 nt, Artificial Sequence
  Description of Artificial Sequence: Synthetic oligonucleotide
  Sense Strand Starting at position 257 of SEQ ID NO: 318335
cagugagcacuggauuagu

SEQ ID NO: 339044 - RNA, 19 nt, Artificial Sequence
  Description of Artificial Sequence: Synthetic oligonucleotide
  Antisense Strand to SEQ ID NO: 339043
acuaauccagugcucacug

SEQ ID NO: 339045 - RNA, 19 nt, Artificial Sequence
  Description of Artificial Sequence: Synthetic oligonucleotide
  Sense Strand Starting at position 257 of SEQ ID NO: 318344
cuggauuagucguuggaga

SEQ ID NO: 339046 - RNA, 19 nt, Artificial Sequence
  Description of Artificial Sequence: Synthetic oligonucleotide
  Antisense Strand to SEQ ID NO: 339045
ucuccaacgacuaauccag

SEQ ID NO: 339047 - RNA, 19 nt, Artificial Sequence
  Description of Artificial Sequence: Synthetic oligonucleotide
  Sense Strand Starting at position 257 of SEQ ID NO: 318345
uggauuagucguuggagau

SEQ ID NO: 339048 - RNA, 19 nt, Artificial Sequence
  Description of Artificial Sequence: Synthetic oligonucleotide
  Antisense Strand to SEQ ID NO: 339047
aucuccaacgacuaaucca

SEQ ID NO: 339049 - RNA, 19 nt, Artificial Sequence
  Description of Artificial Sequence: Synthetic oligonucleotide
  Sense Strand Starting at position 257 of SEQ ID NO: 318346
ggauuagucguuggagauc

SEQ ID NO: 339050 - RNA, 19 nt, Artificial Sequence
  Description of Artificial Sequence: Synthetic oligonucleotide
  Antisense Strand to SEQ ID NO: 339049
gaucuccaacgacuaaucc

SEQ ID NO: 339051 - RNA, 19 nt, Artificial Sequence
  Description of Artificial Sequence: Synthetic oligonucleotide
  Sense Strand Starting at position 257 of SEQ ID NO: 318349
uuagucguuggagauccaa

SEQ ID NO: 339052 - RNA, 19 nt, Artificial Sequence
  Description of Artificial Sequence: Synthetic oligonucleotide
  Antisense Strand to SEQ ID NO: 339051
uuggaucuccaacgacuaa

SEQ ID NO: 339053 - RNA, 19 nt, Artificial Sequence
  Description of Artificial Sequence: Synthetic oligonucleotide
  Sense Strand Starting at position 257 of SEQ ID NO: 318384
ggguccuauccucaaagcu

SEQ ID NO: 339054 - RNA, 19 nt, Artificial Sequence
  Description of Artificial Sequence: Synthetic oligonucleotide
  Antisense Strand to SEQ ID NO: 339053
agcuuugaggauaggaccc

SEQ ID NO: 339055 - RNA, 19 nt, Artificial Sequence
  Description of Artificial Sequence: Synthetic oligonucleotide
  Sense Strand Starting at position 257 of SEQ ID NO: 318444
auuacaaucccuuguaagu

SEQ ID NO: 339056 - RNA, 19 nt, Artificial Sequence
  Description of Artificial Sequence: Synthetic oligonucleotide
  Antisense Strand to SEQ ID NO: 339055
acuuacaagggauuguaau

SEQ ID NO: 339057 - RNA, 19 nt, Artificial Sequence
  Description of Artificial Sequence: Synthetic oligonucleotide
  Sense Strand Starting at position 257 of SEQ ID NO: 318533
uugcaagagugccuaaaca

SEQ ID NO: 339058 - RNA, 19 nt, Artificial Sequence
  Description of Artificial Sequence: Synthetic oligonucleotide
  Antisense Strand to SEQ ID NO: 339057
uguuuaggcacucuugcaa

SEQ ID NO: 339059 - RNA, 19 nt, Artificial Sequence
  Description of Artificial Sequence: Synthetic oligonucleotide
  Sense Strand Starting at position 257 of SEQ ID NO: 318566
auaacuguaguuugaggua

SEQ ID NO: 339060 - RNA, 19 nt, Artificial Sequence
  Description of Artificial Sequence: Synthetic oligonucleotide
  Antisense Strand to SEQ ID NO: 339059
uaccucaaacuacaguuau

SEQ ID NO: 339061 - RNA, 19 nt, Artificial Sequence
  Description of Artificial Sequence: Synthetic oligonucleotide
  Sense Strand Starting at position 257 of SEQ ID NO: 318571
uguaguuugagguacucaa

SEQ ID NO: 339062 - RNA, 19 nt, Artificial Sequence
  Description of Artificial Sequence: Synthetic oligonucleotide
  Antisense Strand to SEQ ID NO: 339061
uugaguaccucaaacuaca

SEQ ID NO: 339063 - RNA, 19 nt, Artificial Sequence
  Description of Artificial Sequence: Synthetic oligonucleotide
  Sense Strand Starting at position 257 of SEQ ID NO: 318802
caacaugugcgcuauuauu

SEQ ID NO: 339064 - RNA, 19 nt, Artificial Sequence
  Description of Artificial Sequence: Synthetic oligonucleotide
  Antisense Strand to SEQ ID NO: 339063
aauaauagcgcacauguug

SEQ ID NO: 339065 - RNA, 19 nt, Artificial Sequence
  Description of Artificial Sequence: Synthetic oligonucleotide
  Sense Strand Starting at position 257 of SEQ ID NO: 318810
gcgcuauuauucucauuuc

SEQ ID NO: 339066 - RNA, 19 nt, Artificial Sequence
  Description of Artificial Sequence: Synthetic oligonucleotide
  Antisense Strand to SEQ ID NO: 339065
gaaaugagaauaauagcgc

SEQ ID NO: 339067 - RNA, 19 nt, Artificial Sequence
  Description of Artificial Sequence: Synthetic oligonucleotide
  Sense Strand Starting at position 257 of SEQ ID NO: 318915
ggaccuugccuuugucaga

SEQ ID NO: 339068 - RNA, 19 nt, Artificial Sequence
  Description of Artificial Sequence: Synthetic oligonucleotide
  Antisense Strand to SEQ ID NO: 339067
ucugacaaaggcaaggucc

SEQ ID NO: 339069 - RNA, 19 nt, Artificial Sequence
  Description of Artificial Sequence: Synthetic oligonucleotide
  Sense Strand Starting at position 257 of SEQ ID NO: 318916
gaccuugccuuugucagau

SEQ ID NO: 339070 - RNA, 19 nt, Artificial Sequence
  Description of Artificial Sequence: Synthetic oligonucleotide
  Antisense Strand to SEQ ID NO: 339069
aucugacaaaggcaagguc

SEQ ID NO: 339071 - RNA, 19 nt, Artificial Sequence
  Description of Artificial Sequence: Synthetic oligonucleotide
  Sense Strand Starting at position 257 of SEQ ID NO: 319132
cuuugaugucauuauacug

SEQ ID NO: 339072 - RNA, 19 nt, Artificial Sequence
  Description of Artificial Sequence: Synthetic oligonucleotide
  Antisense Strand to SEQ ID NO: 339071
caguauaaugacaucaaag

SEQ ID NO: 339073 - RNA, 19 nt, Artificial Sequence
  Description of Artificial Sequence: Synthetic oligonucleotide
  Sense Strand Starting at position 257 of SEQ ID NO: 319153
cuuuguuaagaucacugau

SEQ ID NO: 339074 - RNA, 19 nt, Artificial Sequence
  Description of Artificial Sequence: Synthetic oligonucleotide
  Antisense Strand to SEQ ID NO: 339073
aucagugaucuuaacaaag

SEQ ID NO: 339075 - RNA, 19 nt, Artificial Sequence
  Description of Artificial Sequence: Synthetic oligonucleotide
  Sense Strand Starting at position 257 of SEQ ID NO: 319155
uuguuaagaucacugauug

SEQ ID NO: 339076 - RNA, 19 nt, Artificial Sequence
  Description of Artificial Sequence: Synthetic oligonucleotide
  Antisense Strand to SEQ ID NO: 339075
caaucagugaucuuaacaa

SEQ ID NO: 339077 - RNA, 19 nt, Artificial Sequence
  Description of Artificial Sequence: Synthetic oligonucleotide
  Sense Strand Starting at position 257 of SEQ ID NO: 319162
gaucacugauugguccuaa

SEQ ID NO: 339078 - RNA, 19 nt, Artificial Sequence
  Description of Artificial Sequence: Synthetic oligonucleotide
  Antisense Strand to SEQ ID NO: 339077
uuaggaccaaucagugauc

SEQ ID NO: 339079 - RNA, 19 nt, Artificial Sequence
  Description of Artificial Sequence: Synthetic oligonucleotide
  Sense Strand Starting at position 257 of SEQ ID NO: 319163
aucacugauugguccuaau

SEQ ID NO: 339080 - RNA, 19 nt, Artificial Sequence
  Description of Artificial Sequence: Synthetic oligonucleotide
  Antisense Strand to SEQ ID NO: 339079
auuaggaccaaucagugau

SEQ ID NO: 339081 - RNA, 19 nt, Artificial Sequence
  Description of Artificial Sequence: Synthetic oligonucleotide
  Sense Strand Starting at position 258 of SEQ ID NO: 315249
ugaaauuaccuagguucua

SEQ ID NO: 339082 - RNA, 19 nt, Artificial Sequence
  Description of Artificial Sequence: Synthetic oligonucleotide
  Antisense Strand to SEQ ID NO: 339081
uagaaccuagguaauuuca

SEQ ID NO: 339083 - RNA, 19 nt, Artificial Sequence
  Description of Artificial Sequence: Synthetic oligonucleotide
  Sense Strand Starting at position 258 of SEQ ID NO: 315316
acaagauuggaguggcuua

SEQ ID NO: 339084 - RNA, 19 nt, Artificial Sequence
  Description of Artificial Sequence: Synthetic oligonucleotide
  Antisense Strand to SEQ ID NO: 339083
uaagccacuccaaucuugu

SEQ ID NO: 339085 - RNA, 19 nt, Artificial Sequence
  Description of Artificial Sequence: Synthetic oligonucleotide
  Sense Strand Starting at position 258 of SEQ ID NO: 315321
auuggaguggcuuaugagu

SEQ ID NO: 339086 - RNA, 19 nt, Artificial Sequence
  Description of Artificial Sequence: Synthetic oligonucleotide
  Antisense Strand to SEQ ID NO: 339085
acucauaagccacuccaau

SEQ ID NO: 339087 - RNA, 19 nt, Artificial Sequence
  Description of Artificial Sequence: Synthetic oligonucleotide
  Sense Strand Starting at position 258 of SEQ ID NO: 315413
aguguagauauauggaaau

SEQ ID NO: 339088 - RNA, 19 nt, Artificial Sequence
  Description of Artificial Sequence: Synthetic oligonucleotide
  Antisense Strand to SEQ ID NO: 339087
auuuccauauaucuacacu

SEQ ID NO: 339089 - RNA, 19 nt, Artificial Sequence
  Description of Artificial Sequence: Synthetic oligonucleotide
  Sense Strand Starting at position 258 of SEQ ID NO: 315454
ucuccucauccguaugaga

SEQ ID NO: 339090 - RNA, 19 nt, Artificial Sequence
  Description of Artificial Sequence: Synthetic oligonucleotide
  Antisense Strand to SEQ ID NO: 339089
ucucauacggaugaggaga

SEQ ID NO: 339091 - RNA, 19 nt, Artificial Sequence
  Description of Artificial Sequence: Synthetic oligonucleotide
  Sense Strand Starting at position 258 of SEQ ID NO: 315462
uccguaugagauuacuuua

SEQ ID NO: 339092 - RNA, 19 nt, Artificial Sequence
  Description of Artificial Sequence: Synthetic oligonucleotide
  Antisense Strand to SEQ ID NO: 339091
uaaaguaaucucauacgga

SEQ ID NO: 339093 - RNA, 19 nt, Artificial Sequence
  Description of Artificial Sequence: Synthetic oligonucleotide
  Sense Strand Starting at position 258 of SEQ ID NO: 315465
guaugagauuacuuuaaag

SEQ ID NO: 339094 - RNA, 19 nt, Artificial Sequence
  Description of Artificial Sequence: Synthetic oligonucleotide
  Antisense Strand to SEQ ID NO: 339093
cuuuaaaguaaucucauac

SEQ ID NO: 339095 - RNA, 19 nt, Artificial Sequence
  Description of Artificial Sequence: Synthetic oligonucleotide
  Sense Strand Starting at position 258 of SEQ ID NO: 315822
auuauaugggccuaaacuu

SEQ ID NO: 339096 - RNA, 19 nt, Artificial Sequence
  Description of Artificial Sequence: Synthetic oligonucleotide
  Antisense Strand to SEQ ID NO: 339095
aaguuuaggcccauauaau

SEQ ID NO: 339097 - RNA, 19 nt, Artificial Sequence
  Description of Artificial Sequence: Synthetic oligonucleotide
  Sense Strand Starting at position 258 of SEQ ID NO: 315903
gguagucauccugaaacca

SEQ ID NO: 339098 - RNA, 19 nt, Artificial Sequence
  Description of Artificial Sequence: Synthetic oligonucleotide
  Antisense Strand to SEQ ID NO: 339097
ugguuucaggaugacuacc

SEQ ID NO: 339099 - RNA, 19 nt, Artificial Sequence
  Description of Artificial Sequence: Synthetic oligonucleotide
  Sense Strand Starting at position 258 of SEQ ID NO: 316062
ugaucauuauguuccagaa

SEQ ID NO: 339100 - RNA, 19 nt, Artificial Sequence
  Description of Artificial Sequence: Synthetic oligonucleotide
  Antisense Strand to SEQ ID NO: 339099
uucuggaacauaaugauca

SEQ ID NO: 339101 - RNA, 19 nt, Artificial Sequence
  Description of Artificial Sequence: Synthetic oligonucleotide
  Sense Strand Starting at position 258 of SEQ ID NO: 316100
agaguacucccugaucuac

SEQ ID NO: 339102 - RNA, 19 nt, Artificial Sequence
  Description of Artificial Sequence: Synthetic oligonucleotide
  Antisense Strand to SEQ ID NO: 339101
guagaucagggaguacucu

SEQ ID NO: 339103 - RNA, 19 nt, Artificial Sequence
  Description of Artificial Sequence: Synthetic oligonucleotide
  Sense Strand Starting at position 258 of SEQ ID NO: 316128
cuggacuagucacuuaacu

SEQ ID NO: 339104 - RNA, 19 nt, Artificial Sequence
  Description of Artificial Sequence: Synthetic oligonucleotide
  Antisense Strand to SEQ ID NO: 339103
aguuaagugacuaguccag

SEQ ID NO: 339105 - RNA, 19 nt, Artificial Sequence
  Description of Artificial Sequence: Synthetic oligonucleotide
  Sense Strand Starting at position 258 of SEQ ID NO: 316226
gaacacuuagcaugguaau

SEQ ID NO: 339106 - RNA, 19 nt, Artificial Sequence
  Description of Artificial Sequence: Synthetic oligonucleotide
  Antisense Strand to SEQ ID NO: 339105
auuaccaugcuaaguguuc

SEQ ID NO: 339107 - RNA, 19 nt, Artificial Sequence
  Description of Artificial Sequence: Synthetic oligonucleotide
  Sense Strand Starting at position 258 of SEQ ID NO: 316295
ccuugaaggcuccgaaaga

SEQ ID NO: 339108 - RNA, 19 nt, Artificial Sequence
  Description of Artificial Sequence: Synthetic oligonucleotide
  Antisense Strand to SEQ ID NO: 339107
ucuuucggagccuucaagg

SEQ ID NO: 339109 - RNA, 19 nt, Artificial Sequence
  Description of Artificial Sequence: Synthetic oligonucleotide
  Sense Strand Starting at position 258 of SEQ ID NO: 316493
acgggaauucgaggguaag

SEQ ID NO: 339110 - RNA, 19 nt, Artificial Sequence
  Description of Artificial Sequence: Synthetic oligonucleotide
  Antisense Strand to SEQ ID NO: 339109
cuuacccucgaauucccgu

SEQ ID NO: 339111 - RNA, 19 nt, Artificial Sequence
  Description of Artificial Sequence: Synthetic oligonucleotide
  Sense Strand Starting at position 258 of SEQ ID NO: 316496
ggaauucgaggguaaguua

SEQ ID NO: 339112 - RNA, 19 nt, Artificial Sequence
  Description of Artificial Sequence: Synthetic oligonucleotide
  Antisense Strand to SEQ ID NO: 339111
uaacuuacccucgaauucc

SEQ ID NO: 339113 - RNA, 19 nt, Artificial Sequence
  Description of Artificial Sequence: Synthetic oligonucleotide
  Sense Strand Starting at position 258 of SEQ ID NO: 316505
ggguaaguuaacuauugcu

SEQ ID NO: 339114 - RNA, 19 nt, Artificial Sequence
  Description of Artificial Sequence: Synthetic oligonucleotide
  Antisense Strand to SEQ ID NO: 339113
agcaauaguuaacuuaccc

SEQ ID NO: 339115 - RNA, 19 nt, Artificial Sequence
  Description of Artificial Sequence: Synthetic oligonucleotide
  Sense Strand Starting at position 258 of SEQ ID NO: 316596
ugacuccugccauagugau

SEQ ID NO: 339116 - RNA, 19 nt, Artificial Sequence
  Description of Artificial Sequence: Synthetic oligonucleotide
  Antisense Strand to SEQ ID NO: 339115
aucacuauggcaggaguca

SEQ ID NO: 339117 - RNA, 19 nt, Artificial Sequence
  Description of Artificial Sequence: Synthetic oligonucleotide
  Sense Strand Starting at position 258 of SEQ ID NO: 316604
gccauagugauggauccuu

SEQ ID NO: 339118 - RNA, 19 nt, Artificial Sequence
  Description of Artificial Sequence: Synthetic oligonucleotide
  Antisense Strand to SEQ ID NO: 339117
aaggauccaucacuauggc

SEQ ID NO: 339119 - RNA, 19 nt, Artificial Sequence
  Description of Artificial Sequence: Synthetic oligonucleotide
  Sense Strand Starting at position 258 of SEQ ID NO: 316609
agugauggauccuuugaaa

SEQ ID NO: 339120 - RNA, 19 nt, Artificial Sequence
  Description of Artificial Sequence: Synthetic oligonucleotide
  Antisense Strand to SEQ ID NO: 339119
uuucaaaggauccaucacu

SEQ ID NO: 339121 - RNA, 19 nt, Artificial Sequence
  Description of Artificial Sequence: Synthetic oligonucleotide
  Sense Strand Starting at position 258 of SEQ ID NO: 316692
aacugugcgccagaacaaa

SEQ ID NO: 339122 - RNA, 19 nt, Artificial Sequence
  Description of Artificial Sequence: Synthetic oligonucleotide
  Antisense Strand to SEQ ID NO: 339121
uuuguucuggcgcacaguu

SEQ ID NO: 339123 - RNA, 19 nt, Artificial Sequence
  Description of Artificial Sequence: Synthetic oligonucleotide
  Sense Strand Starting at position 258 of SEQ ID NO: 316799
agacuagucgcguuaaguu

SEQ ID NO: 339124 - RNA, 19 nt, Artificial Sequence
  Description of Artificial Sequence: Synthetic oligonucleotide
  Antisense Strand to SEQ ID NO: 339123
aacuuaacgcgacuagucu

SEQ ID NO: 339125 - RNA, 19 nt, Artificial Sequence
  Description of Artificial Sequence: Synthetic oligonucleotide
  Sense Strand Starting at position 258 of SEQ ID NO: 317760
cuuguucuaccauaaaggu

SEQ ID NO: 339126 - RNA, 19 nt, Artificial Sequence
  Description of Artificial Sequence: Synthetic oligonucleotide
  Antisense Strand to SEQ ID NO: 339125
accuuuaugguagaacaag

SEQ ID NO: 339127 - RNA, 19 nt, Artificial Sequence
  Description of Artificial Sequence: Synthetic oligonucleotide
  Sense Strand Starting at position 258 of SEQ ID NO: 317785
gugugugcaauaucguuau

SEQ ID NO: 339128 - RNA, 19 nt, Artificial Sequence
  Description of Artificial Sequence: Synthetic oligonucleotide
  Antisense Strand to SEQ ID NO: 339127
auaacgauauugcacacac

SEQ ID NO: 339129 - RNA, 19 nt, Artificial Sequence
  Description of Artificial Sequence: Synthetic oligonucleotide
  Sense Strand Starting at position 258 of SEQ ID NO: 317788
ugugcaauaucguuauuuc

SEQ ID NO: 339130 - RNA, 19 nt, Artificial Sequence
  Description of Artificial Sequence: Synthetic oligonucleotide
  Antisense Strand to SEQ ID NO: 339129
gaaauaacgauauugcaca

SEQ ID NO: 339131 - RNA, 19 nt, Artificial Sequence
  Description of Artificial Sequence: Synthetic oligonucleotide
  Sense Strand Starting at position 258 of SEQ ID NO: 317789
gugcaauaucguuauuucu

SEQ ID NO: 339132 - RNA, 19 nt, Artificial Sequence
  Description of Artificial Sequence: Synthetic oligonucleotide
  Antisense Strand to SEQ ID NO: 339131
agaaauaacgauauugcac

SEQ ID NO: 339133 - RNA, 19 nt, Artificial Sequence
  Description of Artificial Sequence: Synthetic oligonucleotide
  Sense Strand Starting at position 258 of SEQ ID NO: 317889
caggacguacaguaugauu

SEQ ID NO: 339134 - RNA, 19 nt, Artificial Sequence
  Description of Artificial Sequence: Synthetic oligonucleotide
  Antisense Strand to SEQ ID NO: 339133
aaucauacuguacguccug

SEQ ID NO: 339135 - RNA, 19 nt, Artificial Sequence
  Description of Artificial Sequence: Synthetic oligonucleotide
  Sense Strand Starting at position 258 of SEQ ID NO: 318183
gcuucuucccugcaaggga

SEQ ID NO: 339136 - RNA, 19 nt, Artificial Sequence
  Description of Artificial Sequence: Synthetic oligonucleotide
  Antisense Strand to SEQ ID NO: 339135
ucccuugcagggaagaagc

SEQ ID NO: 339137 - RNA, 19 nt, Artificial Sequence
  Description of Artificial Sequence: Synthetic oligonucleotide
  Sense Strand Starting at position 258 of SEQ ID NO: 318269
ccuggucaguuggcagaaa

SEQ ID NO: 339138 - RNA, 19 nt, Artificial Sequence
  Description of Artificial Sequence: Synthetic oligonucleotide
  Antisense Strand to SEQ ID NO: 339137
uuucugccaacugaccagg

SEQ ID NO: 339139 - RNA, 19 nt, Artificial Sequence
  Description of Artificial Sequence: Synthetic oligonucleotide
  Sense Strand Starting at position 258 of SEQ ID NO: 318510
uauuguucugaaggugaag

SEQ ID NO: 339140 - RNA, 19 nt, Artificial Sequence
  Description of Artificial Sequence: Synthetic oligonucleotide
  Antisense Strand to SEQ ID NO: 339139
cuucaccuucagaacaaua

SEQ ID NO: 339141 - RNA, 19 nt, Artificial Sequence
  Description of Artificial Sequence: Synthetic oligonucleotide
  Sense Strand Starting at position 258 of SEQ ID NO: 318652
aggaaaguuugaucuguua

SEQ ID NO: 339142 - RNA, 19 nt, Artificial Sequence
  Description of Artificial Sequence: Synthetic oligonucleotide
  Antisense Strand to SEQ ID NO: 339141
uaacagaucaaacuuuccu

SEQ ID NO: 339143 - RNA, 19 nt, Artificial Sequence
  Description of Artificial Sequence: Synthetic oligonucleotide
  Sense Strand Starting at position 258 of SEQ ID NO: 318666
uguuaucuuagugaguuga

SEQ ID NO: 339144 - RNA, 19 nt, Artificial Sequence
  Description of Artificial Sequence: Synthetic oligonucleotide
  Antisense Strand to SEQ ID NO: 339143
ucaacucacuaagauaaca

SEQ ID NO: 339145 - RNA, 19 nt, Artificial Sequence
  Description of Artificial Sequence: Synthetic oligonucleotide
  Sense Strand Starting at position 258 of SEQ ID NO: 318670
aucuuagugaguugaguaa

SEQ ID NO: 339146 - RNA, 19 nt, Artificial Sequence
  Description of Artificial Sequence: Synthetic oligonucleotide
  Antisense Strand to SEQ ID NO: 339145
uuacucaacucacuaagau

SEQ ID NO: 339147 - RNA, 19 nt, Artificial Sequence
  Description of Artificial Sequence: Synthetic oligonucleotide
  Sense Strand Starting at position 258 of SEQ ID NO: 318674
uagugaguugaguaaguuc

SEQ ID NO: 339148 - RNA, 19 nt, Artificial Sequence
  Description of Artificial Sequence: Synthetic oligonucleotide
  Antisense Strand to SEQ ID NO: 339147
gaacuuacucaacucacua

SEQ ID NO: 339149 - RNA, 19 nt, Artificial Sequence
  Description of Artificial Sequence: Synthetic oligonucleotide
  Sense Strand Starting at position 258 of SEQ ID NO: 318677
ugaguugaguaaguucuau

SEQ ID NO: 339150 - RNA, 19 nt, Artificial Sequence
  Description of Artificial Sequence: Synthetic oligonucleotide
  Antisense Strand to SEQ ID NO: 339149
auagaacuuacucaacuca

SEQ ID NO: 339151 - RNA, 19 nt, Artificial Sequence
  Description of Artificial Sequence: Synthetic oligonucleotide
  Sense Strand Starting at position 258 of SEQ ID NO: 318702
ucuggacuuugguuuccaa

SEQ ID NO: 339152 - RNA, 19 nt, Artificial Sequence
  Description of Artificial Sequence: Synthetic oligonucleotide
  Antisense Strand to SEQ ID NO: 339151
uuggaaaccaaaguccaga

SEQ ID NO: 339153 - RNA, 19 nt, Artificial Sequence
  Description of Artificial Sequence: Synthetic oligonucleotide
  Sense Strand Starting at position 258 of SEQ ID NO: 318947
aaugaacugcuagacguau

SEQ ID NO: 339154 - RNA, 19 nt, Artificial Sequence
  Description of Artificial Sequence: Synthetic oligonucleotide
  Antisense Strand to SEQ ID NO: 339153
auacgucuagcaguucauu

SEQ ID NO: 339155 - RNA, 19 nt, Artificial Sequence
  Description of Artificial Sequence: Synthetic oligonucleotide
  Sense Strand Starting at position 258 of SEQ ID NO: 319157
gaggcaucgcauuauuaau

SEQ ID NO: 339156 - RNA, 19 nt, Artificial Sequence
  Description of Artificial Sequence: Synthetic oligonucleotide
  Antisense Strand to SEQ ID NO: 339155
auuaauaaugcgaugccuc

SEQ ID NO: 339157 - RNA, 19 nt, Artificial Sequence
  Description of Artificial Sequence: Synthetic oligonucleotide
  Sense Strand Starting at position 258 of SEQ ID NO: 319174
auaggcaauucuuugggua

SEQ ID NO: 339158 - RNA, 19 nt, Artificial Sequence
  Description of Artificial Sequence: Synthetic oligonucleotide
  Antisense Strand to SEQ ID NO: 339157
uacccaaagaauugccuau

SEQ ID NO: 339159 - RNA, 19 nt, Artificial Sequence
  Description of Artificial Sequence: Synthetic oligonucleotide
  Sense Strand Starting at position 258 of SEQ ID NO: 319179
caauucuuuggguaguaac

SEQ ID NO: 339160 - RNA, 19 nt, Artificial Sequence
  Description of Artificial Sequence: Synthetic oligonucleotide
  Antisense Strand to SEQ ID NO: 339159
guuacuacccaaagaauug

SEQ ID NO: 339161 - RNA, 19 nt, Artificial Sequence
  Description of Artificial Sequence: Synthetic oligonucleotide
  Sense Strand Starting at position 259 of SEQ ID NO: 315443
ccagauuaugucuauggug

SEQ ID NO: 339162 - RNA, 19 nt, Artificial Sequence
  Description of Artificial Sequence: Synthetic oligonucleotide
  Antisense Strand to SEQ ID NO: 339161
caccauagacauaaucugg

SEQ ID NO: 339163 - RNA, 19 nt, Artificial Sequence
  Description of Artificial Sequence: Synthetic oligonucleotide
  Sense Strand Starting at position 259 of SEQ ID NO: 315457
ugguguuagauuggaaaug

SEQ ID NO: 339164 - RNA, 19 nt, Artificial Sequence
  Description of Artificial Sequence: Synthetic oligonucleotide
  Antisense Strand to SEQ ID NO: 339163
cauuuccaaucuaacacca

SEQ ID NO: 339165 - RNA, 19 nt, Artificial Sequence
  Description of Artificial Sequence: Synthetic oligonucleotide
  Sense Strand Starting at position 259 of SEQ ID NO: 315468
uggaaaugcagcuaucagu

SEQ ID NO: 339166 - RNA, 19 nt, Artificial Sequence
  Description of Artificial Sequence: Synthetic oligonucleotide
  Antisense Strand to SEQ ID NO: 339165
acugauagcugcauuucca

SEQ ID NO: 339167 - RNA, 19 nt, Artificial Sequence
  Description of Artificial Sequence: Synthetic oligonucleotide
  Sense Strand Starting at position 259 of SEQ ID NO: 315657
agauauggcuaauuccaga

SEQ ID NO: 339168 - RNA, 19 nt, Artificial Sequence
  Description of Artificial Sequence: Synthetic oligonucleotide
  Antisense Strand to SEQ ID NO: 339167
ucuggaauuagccauaucu

SEQ ID NO: 339169 - RNA, 19 nt, Artificial Sequence
  Description of Artificial Sequence: Synthetic oligonucleotide
  Sense Strand Starting at position 259 of SEQ ID NO: 315836
ugagcucauguugauauaa

SEQ ID NO: 339170 - RNA, 19 nt, Artificial Sequence
  Description of Artificial Sequence: Synthetic oligonucleotide
  Antisense Strand to SEQ ID NO: 339169
uuauaucaacaugagcuca

SEQ ID NO: 339171 - RNA, 19 nt, Artificial Sequence
  Description of Artificial Sequence: Synthetic oligonucleotide
  Sense Strand Starting at position 259 of SEQ ID NO: 315917
agagcaauauguuuaccua

SEQ ID NO: 339172 - RNA, 19 nt, Artificial Sequence
  Description of Artificial Sequence: Synthetic oligonucleotide
  Antisense Strand to SEQ ID NO: 339171
uagguaaacauauugcucu

SEQ ID NO: 339173 - RNA, 19 nt, Artificial Sequence
  Description of Artificial Sequence: Synthetic oligonucleotide
  Sense Strand Starting at position 259 of SEQ ID NO: 315918
gagcaauauguuuaccuag

SEQ ID NO: 339174 - RNA, 19 nt, Artificial Sequence
  Description of Artificial Sequence: Synthetic oligonucleotide
  Antisense Strand to SEQ ID NO: 339173
cuagguaaacauauugcuc

SEQ ID NO: 339175 - RNA, 19 nt, Artificial Sequence
  Description of Artificial Sequence: Synthetic oligonucleotide
  Sense Strand Starting at position 259 of SEQ ID NO: 315929
uuaccuagucuccaaguau

SEQ ID NO: 339176 - RNA, 19 nt, Artificial Sequence
  Description of Artificial Sequence: Synthetic oligonucleotide
  Antisense Strand to SEQ ID NO: 339175
auacuuggagacuagguaa

SEQ ID NO: 339177 - RNA, 19 nt, Artificial Sequence
  Description of Artificial Sequence: Synthetic oligonucleotide
  Sense Strand Starting at position 259 of SEQ ID NO: 316282
acacauaaucguggacuaa

SEQ ID NO: 339178 - RNA, 19 nt, Artificial Sequence
  Description of Artificial Sequence: Synthetic oligonucleotide
  Antisense Strand to SEQ ID NO: 339177
uuaguccacgauuaugugu

SEQ ID NO: 339179 - RNA, 19 nt, Artificial Sequence
  Description of Artificial Sequence: Synthetic oligonucleotide
  Sense Strand Starting at position 259 of SEQ ID NO: 316323
ggauauuauugagacauuu

SEQ ID NO: 339180 - RNA, 19 nt, Artificial Sequence
  Description of Artificial Sequence: Synthetic oligonucleotide
  Antisense Strand to SEQ ID NO: 339179
aaaugucucaauaauaucc

SEQ ID NO: 339181 - RNA, 19 nt, Artificial Sequence
  Description of Artificial Sequence: Synthetic oligonucleotide
  Sense Strand Starting at position 259 of SEQ ID NO: 316412
gguuauguagaagaguaua

SEQ ID NO: 339182 - RNA, 19 nt, Artificial Sequence
  Description of Artificial Sequence: Synthetic oligonucleotide
  Antisense Strand to SEQ ID NO: 339181
uauacucuucuacauaacc

SEQ ID NO: 339183 - RNA, 19 nt, Artificial Sequence
  Description of Artificial Sequence: Synthetic oligonucleotide
  Sense Strand Starting at position 259 of SEQ ID NO: 316625
gaauacaaccagugguaaa

SEQ ID NO: 339184 - RNA, 19 nt, Artificial Sequence
  Description of Artificial Sequence: Synthetic oligonucleotide
  Antisense Strand to SEQ ID NO: 339183
uuuaccacugguuguauuc

SEQ ID NO: 339185 - RNA, 19 nt, Artificial Sequence
  Description of Artificial Sequence: Synthetic oligonucleotide
  Sense Strand Starting at position 259 of SEQ ID NO: 316757
ugggcuuuggaguaacuca

SEQ ID NO: 339186 - RNA, 19 nt, Artificial Sequence
  Description of Artificial Sequence: Synthetic oligonucleotide
  Antisense Strand to SEQ ID NO: 339185
ugaguuacuccaaagccca

SEQ ID NO: 339187 - RNA, 19 nt, Artificial Sequence
  Description of Artificial Sequence: Synthetic oligonucleotide
  Sense Strand Starting at position 259 of SEQ ID NO: 316799
uuauaucuaucaucuguga

SEQ ID NO: 339188 - RNA, 19 nt, Artificial Sequence
  Description of Artificial Sequence: Synthetic oligonucleotide
  Antisense Strand to SEQ ID NO: 339187
ucacagaugauagauauaa

SEQ ID NO: 339189 - RNA, 19 nt, Artificial Sequence
  Description of Artificial Sequence: Synthetic oligonucleotide
  Sense Strand Starting at position 259 of SEQ ID NO: 316803
aucuaucaucugugagauc

SEQ ID NO: 339190 - RNA, 19 nt, Artificial Sequence
  Description of Artificial Sequence: Synthetic oligonucleotide
  Antisense Strand to SEQ ID NO: 339189
gaucucacagaugauagau

SEQ ID NO: 339191 - RNA, 19 nt, Artificial Sequence
  Description of Artificial Sequence: Synthetic oligonucleotide
  Sense Strand Starting at position 259 of SEQ ID NO: 316955
ucugguaagugaucugaua

SEQ ID NO: 339192 - RNA, 19 nt, Artificial Sequence
  Description of Artificial Sequence: Synthetic oligonucleotide
  Antisense Strand to SEQ ID NO: 339191
uaucagaucacuuaccaga

SEQ ID NO: 339193 - RNA, 19 nt, Artificial Sequence
  Description of Artificial Sequence: Synthetic oligonucleotide
  Sense Strand Starting at position 259 of SEQ ID NO: 316957
ugguaagugaucugauaca

SEQ ID NO: 339194 - RNA, 19 nt, Artificial Sequence
  Description of Artificial Sequence: Synthetic oligonucleotide
  Antisense Strand to SEQ ID NO: 339193
uguaucagaucacuuacca

SEQ ID NO: 339195 - RNA, 19 nt, Artificial Sequence
  Description of Artificial Sequence: Synthetic oligonucleotide
  Sense Strand Starting at position 259 of SEQ ID NO: 316971
auacauaauggaugcugaa

SEQ ID NO: 339196 - RNA, 19 nt, Artificial Sequence
  Description of Artificial Sequence: Synthetic oligonucleotide
  Antisense Strand to SEQ ID NO: 339195
uucagcauccauuauguau

SEQ ID NO: 339197 - RNA, 19 nt, Artificial Sequence
  Description of Artificial Sequence: Synthetic oligonucleotide
  Sense Strand Starting at position 259 of SEQ ID NO: 317265
ccaacacagcguuaauaau

SEQ ID NO: 339198 - RNA, 19 nt, Artificial Sequence
  Description of Artificial Sequence: Synthetic oligonucleotide
  Antisense Strand to SEQ ID NO: 339197
auuauuaacgcuguguugg

SEQ ID NO: 339199 - RNA, 19 nt, Artificial Sequence
  Description of Artificial Sequence: Synthetic oligonucleotide
  Sense Strand Starting at position 259 of SEQ ID NO: 317530
ccaagaugugcacaugaau

SEQ ID NO: 339200 - RNA, 19 nt, Artificial Sequence
  Description of Artificial Sequence: Synthetic oligonucleotide
  Antisense Strand to SEQ ID NO: 339199
auucaugugcacaucuugg

SEQ ID NO: 339201 - RNA, 19 nt, Artificial Sequence
  Description of Artificial Sequence: Synthetic oligonucleotide
  Sense Strand Starting at position 259 of SEQ ID NO: 317598
ucuucuaaucuggagagca

SEQ ID NO: 339202 - RNA, 19 nt, Artificial Sequence
  Description of Artificial Sequence: Synthetic oligonucleotide
  Antisense Strand to SEQ ID NO: 339201
ugcucuccagauuagaaga

SEQ ID NO: 339203 - RNA, 19 nt, Artificial Sequence
  Description of Artificial Sequence: Synthetic oligonucleotide
  Sense Strand Starting at position 259 of SEQ ID NO: 318032
ccuggauuccacuguugga

SEQ ID NO: 339204 - RNA, 19 nt, Artificial Sequence
  Description of Artificial Sequence: Synthetic oligonucleotide
  Antisense Strand to SEQ ID NO: 339203
uccaacaguggaauccagg

SEQ ID NO: 339205 - RNA, 19 nt, Artificial Sequence
  Description of Artificial Sequence: Synthetic oligonucleotide
  Sense Strand Starting at position 259 of SEQ ID NO: 318070
aaggaauuaccagguguga

SEQ ID NO: 339206 - RNA, 19 nt, Artificial Sequence
  Description of Artificial Sequence: Synthetic oligonucleotide
  Antisense Strand to SEQ ID NO: 339205
ucacaccugguaauuccuu

SEQ ID NO: 339207 - RNA, 19 nt, Artificial Sequence
  Description of Artificial Sequence: Synthetic oligonucleotide
  Sense Strand Starting at position 259 of SEQ ID NO: 318072
ggaauuaccaggugugauc

SEQ ID NO: 339208 - RNA, 19 nt, Artificial Sequence
  Description of Artificial Sequence: Synthetic oligonucleotide
  Antisense Strand to SEQ ID NO: 339207
gaucacaccugguaauucc

SEQ ID NO: 339209 - RNA, 19 nt, Artificial Sequence
  Description of Artificial Sequence: Synthetic oligonucleotide
  Sense Strand Starting at position 259 of SEQ ID NO: 318074
aauuaccaggugugaucaa

SEQ ID NO: 339210 - RNA, 19 nt, Artificial Sequence
  Description of Artificial Sequence: Synthetic oligonucleotide
  Antisense Strand to SEQ ID NO: 339209
uugaucacaccugguaauu

SEQ ID NO: 339211 - RNA, 19 nt, Artificial Sequence
  Description of Artificial Sequence: Synthetic oligonucleotide
  Sense Strand Starting at position 259 of SEQ ID NO: 318128
cccauccuugcugagaaga

SEQ ID NO: 339212 - RNA, 19 nt, Artificial Sequence
  Description of Artificial Sequence: Synthetic oligonucleotide
  Antisense Strand to SEQ ID NO: 339211
ucuucucagcaaggauggg

SEQ ID NO: 339213 - RNA, 19 nt, Artificial Sequence
  Description of Artificial Sequence: Synthetic oligonucleotide
  Sense Strand Starting at position 259 of SEQ ID NO: 318232
gggaacguaguaugauuaa

SEQ ID NO: 339214 - RNA, 19 nt, Artificial Sequence
  Description of Artificial Sequence: Synthetic oligonucleotide
  Antisense Strand to SEQ ID NO: 339213
uuaaucauacuacguuccc

SEQ ID NO: 339215 - RNA, 19 nt, Artificial Sequence
  Description of Artificial Sequence: Synthetic oligonucleotide
  Sense Strand Starting at position 259 of SEQ ID NO: 318235
aacguaguaugauuaagag

SEQ ID NO: 339216 - RNA, 19 nt, Artificial Sequence
  Description of Artificial Sequence: Synthetic oligonucleotide
  Antisense Strand to SEQ ID NO: 339215
cucuuaaucauacuacguu

SEQ ID NO: 339217 - RNA, 19 nt, Artificial Sequence
  Description of Artificial Sequence: Synthetic oligonucleotide
  Sense Strand Starting at position 259 of SEQ ID NO: 318253
gcuuaugacagaugaugac

SEQ ID NO: 339218 - RNA, 19 nt, Artificial Sequence
  Description of Artificial Sequence: Synthetic oligonucleotide
  Antisense Strand to SEQ ID NO: 339217
gucaucaucugucauaagc

SEQ ID NO: 339219 - RNA, 19 nt, Artificial Sequence
  Description of Artificial Sequence: Synthetic oligonucleotide
  Sense Strand Starting at position 259 of SEQ ID NO: 318477
agcugaugugaaugaucaa

SEQ ID NO: 339220 - RNA, 19 nt, Artificial Sequence
  Description of Artificial Sequence: Synthetic oligonucleotide
  Antisense Strand to SEQ ID NO: 339219
uugaucauucacaucagcu

SEQ ID NO: 339221 - RNA, 19 nt, Artificial Sequence
  Description of Artificial Sequence: Synthetic oligonucleotide
  Sense Strand Starting at position 259 of SEQ ID NO: 318478
gcugaugugaaugaucaau

SEQ ID NO: 339222 - RNA, 19 nt, Artificial Sequence
  Description of Artificial Sequence: Synthetic oligonucleotide
  Antisense Strand to SEQ ID NO: 339221
auugaucauucacaucagc

SEQ ID NO: 339223 - RNA, 19 nt, Artificial Sequence
  Description of Artificial Sequence: Synthetic oligonucleotide
  Sense Strand Starting at position 259 of SEQ ID NO: 318480
ugaugugaaugaucaauau

SEQ ID NO: 339224 - RNA, 19 nt, Artificial Sequence
  Description of Artificial Sequence: Synthetic oligonucleotide
  Antisense Strand to SEQ ID NO: 339223
auauugaucauucacauca

SEQ ID NO: 339225 - RNA, 19 nt, Artificial Sequence
  Description of Artificial Sequence: Synthetic oligonucleotide
  Sense Strand Starting at position 259 of SEQ ID NO: 318491
aucaauauacagugucaaa

SEQ ID NO: 339226 - RNA, 19 nt, Artificial Sequence
  Description of Artificial Sequence: Synthetic oligonucleotide
  Antisense Strand to SEQ ID NO: 339225
uuugacacuguauauugau

SEQ ID NO: 339227 - RNA, 19 nt, Artificial Sequence
  Description of Artificial Sequence: Synthetic oligonucleotide
  Sense Strand Starting at position 259 of SEQ ID NO: 318698
agaagcagguuucugagau

SEQ ID NO: 339228 - RNA, 19 nt, Artificial Sequence
  Description of Artificial Sequence: Synthetic oligonucleotide
  Antisense Strand to SEQ ID NO: 339227
aucucagaaaccugcuucu

SEQ ID NO: 339229 - RNA, 19 nt, Artificial Sequence
  Description of Artificial Sequence: Synthetic oligonucleotide
  Sense Strand Starting at position 259 of SEQ ID NO: 318704
agguuucugagauaagguu

SEQ ID NO: 339230 - RNA, 19 nt, Artificial Sequence
  Description of Artificial Sequence: Synthetic oligonucleotide
  Antisense Strand to SEQ ID NO: 339229
aaccuuaucucagaaaccu

SEQ ID NO: 339231 - RNA, 19 nt, Artificial Sequence
  Description of Artificial Sequence: Synthetic oligonucleotide
  Sense Strand Starting at position 259 of SEQ ID NO: 318748
ucaagaacuuguucuguaa

SEQ ID NO: 339232 - RNA, 19 nt, Artificial Sequence
  Description of Artificial Sequence: Synthetic oligonucleotide
  Antisense Strand to SEQ ID NO: 339231
uuacagaacaaguucuuga

SEQ ID NO: 339233 - RNA, 19 nt, Artificial Sequence
  Description of Artificial Sequence: Synthetic oligonucleotide
  Sense Strand Starting at position 259 of SEQ ID NO: 318784
cuggauauccaugggcaca

SEQ ID NO: 339234 - RNA, 19 nt, Artificial Sequence
  Description of Artificial Sequence: Synthetic oligonucleotide
  Antisense Strand to SEQ ID NO: 339233
ugugcccauggauauccag

SEQ ID NO: 339235 - RNA, 19 nt, Artificial Sequence
  Description of Artificial Sequence: Synthetic oligonucleotide
  Sense Strand Starting at position 259 of SEQ ID NO: 318785
uggauauccaugggcacau

SEQ ID NO: 339236 - RNA, 19 nt, Artificial Sequence
  Description of Artificial Sequence: Synthetic oligonucleotide
  Antisense Strand to SEQ ID NO: 339235
augugcccauggauaucca

SEQ ID NO: 339237 - RNA, 19 nt, Artificial Sequence
  Description of Artificial Sequence: Synthetic oligonucleotide
  Sense Strand Starting at position 259 of SEQ ID NO: 319138
gagaacaugguguaguuaa

SEQ ID NO: 339238 - RNA, 19 nt, Artificial Sequence
  Description of Artificial Sequence: Synthetic oligonucleotide
  Antisense Strand to SEQ ID NO: 339237
uuaacuacaccauguucuc

SEQ ID NO: 339239 - RNA, 19 nt, Artificial Sequence
  Description of Artificial Sequence: Synthetic oligonucleotide
  Sense Strand Starting at position 259 of SEQ ID NO: 319162
gagagaaugcauugcaauu

SEQ ID NO: 339240 - RNA, 19 nt, Artificial Sequence
  Description of Artificial Sequence: Synthetic oligonucleotide
  Antisense Strand to SEQ ID NO: 339239
aauugcaaugcauucucuc

SEQ ID NO: 339241 - RNA, 19 nt, Artificial Sequence
  Description of Artificial Sequence: Synthetic oligonucleotide
  Sense Strand Starting at position 260 of SEQ ID NO: 315362
gggcucuuuacagauuaug

SEQ ID NO: 339242 - RNA, 19 nt, Artificial Sequence
  Description of Artificial Sequence: Synthetic oligonucleotide
  Antisense Strand to SEQ ID NO: 339241
cauaaucuguaaagagccc

SEQ ID NO: 339243 - RNA, 19 nt, Artificial Sequence
  Description of Artificial Sequence: Synthetic oligonucleotide
  Sense Strand Starting at position 260 of SEQ ID NO: 315633
ccuuucuuccaacggauga

SEQ ID NO: 339244 - RNA, 19 nt, Artificial Sequence
  Description of Artificial Sequence: Synthetic oligonucleotide
  Antisense Strand to SEQ ID NO: 339243
ucauccguuggaagaaagg

SEQ ID NO: 339245 - RNA, 19 nt, Artificial Sequence
  Description of Artificial Sequence: Synthetic oligonucleotide
  Sense Strand Starting at position 260 of SEQ ID NO: 315637
ucuuccaacggaugaauaa

SEQ ID NO: 339246 - RNA, 19 nt, Artificial Sequence
  Description of Artificial Sequence: Synthetic oligonucleotide
  Antisense Strand to SEQ ID NO: 339245
uuauucauccguuggaaga

SEQ ID NO: 339247 - RNA, 19 nt, Artificial Sequence
  Description of Artificial Sequence: Synthetic oligonucleotide
  Sense Strand Starting at position 260 of SEQ ID NO: 315948
acaaaugaaguugguuauu

SEQ ID NO: 339248 - RNA, 19 nt, Artificial Sequence
  Description of Artificial Sequence: Synthetic oligonucleotide
  Antisense Strand to SEQ ID NO: 339247
aauaaccaacuucauuugu

SEQ ID NO: 339249 - RNA, 19 nt, Artificial Sequence
  Description of Artificial Sequence: Synthetic oligonucleotide
  Sense Strand Starting at position 260 of SEQ ID NO: 315998
gauuguuugcagcaaauag

SEQ ID NO: 339250 - RNA, 19 nt, Artificial Sequence
  Description of Artificial Sequence: Synthetic oligonucleotide
  Antisense Strand to SEQ ID NO: 339249
cuauuugcugcaaacaauc

SEQ ID NO: 339251 - RNA, 19 nt, Artificial Sequence
  Description of Artificial Sequence: Synthetic oligonucleotide
  Sense Strand Starting at position 260 of SEQ ID NO: 316151
guaggugugauggaacuua

SEQ ID NO: 339252 - RNA, 19 nt, Artificial Sequence
  Description of Artificial Sequence: Synthetic oligonucleotide
  Antisense Strand to SEQ ID NO: 339251
uaaguuccaucacaccuac

SEQ ID NO: 339253 - RNA, 19 nt, Artificial Sequence
  Description of Artificial Sequence: Synthetic oligonucleotide
  Sense Strand Starting at position 260 of SEQ ID NO: 316223
ggaugaaaugcccacugca

SEQ ID NO: 339254 - RNA, 19 nt, Artificial Sequence
  Description of Artificial Sequence: Synthetic oligonucleotide
  Antisense Strand to SEQ ID NO: 339253
ugcagugggcauuucaucc

SEQ ID NO: 339255 - RNA, 19 nt, Artificial Sequence
  Description of Artificial Sequence: Synthetic oligonucleotide
  Sense Strand Starting at position 260 of SEQ ID NO: 316303
cuaguauuguuucugaaag

SEQ ID NO: 339256 - RNA, 19 nt, Artificial Sequence
  Description of Artificial Sequence: Synthetic oligonucleotide
  Antisense Strand to SEQ ID NO: 339255
cuuucagaaacaauacuag

SEQ ID NO: 339257 - RNA, 19 nt, Artificial Sequence
  Description of Artificial Sequence: Synthetic oligonucleotide
  Sense Strand Starting at position 260 of SEQ ID NO: 316314
ucugaaaggagcuagcuuu

SEQ ID NO: 339258 - RNA, 19 nt, Artificial Sequence
  Description of Artificial Sequence: Synthetic oligonucleotide
  Antisense Strand to SEQ ID NO: 339257
aaagcuagcuccuuucaga

SEQ ID NO: 339259 - RNA, 19 nt, Artificial Sequence
  Description of Artificial Sequence: Synthetic oligonucleotide
  Sense Strand Starting at position 260 of SEQ ID NO: 316349
acuugacaucuuuagguua

SEQ ID NO: 339260 - RNA, 19 nt, Artificial Sequence
  Description of Artificial Sequence: Synthetic oligonucleotide
  Antisense Strand to SEQ ID NO: 339259
uaaccuaaagaugucaagu

SEQ ID NO: 339261 - RNA, 19 nt, Artificial Sequence
  Description of Artificial Sequence: Synthetic oligonucleotide
  Sense Strand Starting at position 260 of SEQ ID NO: 316522
agugcauuacuguacuaac

SEQ ID NO: 339262 - RNA, 19 nt, Artificial Sequence
  Description of Artificial Sequence: Synthetic oligonucleotide
  Antisense Strand to SEQ ID NO: 339261
guuaguacaguaaugcacu

SEQ ID NO: 339263 - RNA, 19 nt, Artificial Sequence
  Description of Artificial Sequence: Synthetic oligonucleotide
  Sense Strand Starting at position 260 of SEQ ID NO: 316564
cgaaauggacauuauuguu

SEQ ID NO: 339264 - RNA, 19 nt, Artificial Sequence
  Description of Artificial Sequence: Synthetic oligonucleotide
  Antisense Strand to SEQ ID NO: 339263
aacaauaauguccauuucg

SEQ ID NO: 339265 - RNA, 19 nt, Artificial Sequence
  Description of Artificial Sequence: Synthetic oligonucleotide
  Sense Strand Starting at position 260 of SEQ ID NO: 316709
augggucacccuuaaccau

SEQ ID NO: 339266 - RNA, 19 nt, Artificial Sequence
  Description of Artificial Sequence: Synthetic oligonucleotide
  Antisense Strand to SEQ ID NO: 339265
augguuaagggugacccau

SEQ ID NO: 339267 - RNA, 19 nt, Artificial Sequence
  Description of Artificial Sequence: Synthetic oligonucleotide
  Sense Strand Starting at position 260 of SEQ ID NO: 316820
ggcagacagaucugaguua

SEQ ID NO: 339268 - RNA, 19 nt, Artificial Sequence
  Description of Artificial Sequence: Synthetic oligonucleotide
  Antisense Strand to SEQ ID NO: 339267
uaacucagaucugucugcc

SEQ ID NO: 339269 - RNA, 19 nt, Artificial Sequence
  Description of Artificial Sequence: Synthetic oligonucleotide
  Sense Strand Starting at position 260 of SEQ ID NO: 317268
cccagacucgucgcaguuu

SEQ ID NO: 339270 - RNA, 19 nt, Artificial Sequence
  Description of Artificial Sequence: Synthetic oligonucleotide
  Antisense Strand to SEQ ID NO: 339269
aaacugcgacgagucuggg

SEQ ID NO: 339271 - RNA, 19 nt, Artificial Sequence
  Description of Artificial Sequence: Synthetic oligonucleotide
  Sense Strand Starting at position 260 of SEQ ID NO: 317413
uuuguuuacguguuacguu

SEQ ID NO: 339272 - RNA, 19 nt, Artificial Sequence
  Description of Artificial Sequence: Synthetic oligonucleotide
  Antisense Strand to SEQ ID NO: 339271
aacguaacacguaaacaaa

SEQ ID NO: 339273 - RNA, 19 nt, Artificial Sequence
  Description of Artificial Sequence: Synthetic oligonucleotide
  Sense Strand Starting at position 260 of SEQ ID NO: 317420
acguguuacguuucccgau

SEQ ID NO: 339274 - RNA, 19 nt, Artificial Sequence
  Description of Artificial Sequence: Synthetic oligonucleotide
  Antisense Strand to SEQ ID NO: 339273
aucgggaaacguaacacgu

SEQ ID NO: 339275 - RNA, 19 nt, Artificial Sequence
  Description of Artificial Sequence: Synthetic oligonucleotide
  Sense Strand Starting at position 260 of SEQ ID NO: 317426
uacguuucccgauaagauu

SEQ ID NO: 339276 - RNA, 19 nt, Artificial Sequence
  Description of Artificial Sequence: Synthetic oligonucleotide
  Antisense Strand to SEQ ID NO: 339275
aaucuuaucgggaaacgua

SEQ ID NO: 339277 - RNA, 19 nt, Artificial Sequence
  Description of Artificial Sequence: Synthetic oligonucleotide
  Sense Strand Starting at position 260 of SEQ ID NO: 317438
uaagauugugucgaaagug

SEQ ID NO: 339278 - RNA, 19 nt, Artificial Sequence
  Description of Artificial Sequence: Synthetic oligonucleotide
  Antisense Strand to SEQ ID NO: 339277
cacuuucgacacaaucuua

SEQ ID NO: 339279 - RNA, 19 nt, Artificial Sequence
  Description of Artificial Sequence: Synthetic oligonucleotide
  Sense Strand Starting at position 260 of SEQ ID NO: 317550
ugcgucaguguuucagagu

SEQ ID NO: 339280 - RNA, 19 nt, Artificial Sequence
  Description of Artificial Sequence: Synthetic oligonucleotide
  Antisense Strand to SEQ ID NO: 339279
acucugaaacacugacgca

SEQ ID NO: 339281 - RNA, 19 nt, Artificial Sequence
  Description of Artificial Sequence: Synthetic oligonucleotide
  Sense Strand Starting at position 260 of SEQ ID NO: 317610
gauccaugaccaugaaugu

SEQ ID NO: 339282 - RNA, 19 nt, Artificial Sequence
  Description of Artificial Sequence: Synthetic oligonucleotide
  Antisense Strand to SEQ ID NO: 339281
acauucauggucauggauc

SEQ ID NO: 339283 - RNA, 19 nt, Artificial Sequence
  Description of Artificial Sequence: Synthetic oligonucleotide
  Sense Strand Starting at position 260 of SEQ ID NO: 317661
uaugcaauaugaguaaaga

SEQ ID NO: 339284 - RNA, 19 nt, Artificial Sequence
  Description of Artificial Sequence: Synthetic oligonucleotide
  Antisense Strand to SEQ ID NO: 339283
ucuuuacucauauugcaua

SEQ ID NO: 339285 - RNA, 19 nt, Artificial Sequence
  Description of Artificial Sequence: Synthetic oligonucleotide
  Sense Strand Starting at position 260 of SEQ ID NO: 317680
aaauguaauuggccuggaa

SEQ ID NO: 339286 - RNA, 19 nt, Artificial Sequence
  Description of Artificial Sequence: Synthetic oligonucleotide
  Antisense Strand to SEQ ID NO: 339285
uuccaggccaauuacauuu

SEQ ID NO: 339287 - RNA, 19 nt, Artificial Sequence
  Description of Artificial Sequence: Synthetic oligonucleotide
  Sense Strand Starting at position 260 of SEQ ID NO: 317682
auguaauuggccuggaaag

SEQ ID NO: 339288 - RNA, 19 nt, Artificial Sequence
  Description of Artificial Sequence: Synthetic oligonucleotide
  Antisense Strand to SEQ ID NO: 339287
cuuuccaggccaauuacau

SEQ ID NO: 339289 - RNA, 19 nt, Artificial Sequence
  Description of Artificial Sequence: Synthetic oligonucleotide
  Sense Strand Starting at position 260 of SEQ ID NO: 317818
uucguaacuauagguaaga

SEQ ID NO: 339290 - RNA, 19 nt, Artificial Sequence
  Description of Artificial Sequence: Synthetic oligonucleotide
  Antisense Strand to SEQ ID NO: 339289
ucuuaccuauaguuacgaa

SEQ ID NO: 339291 - RNA, 19 nt, Artificial Sequence
  Description of Artificial Sequence: Synthetic oligonucleotide
  Sense Strand Starting at position 260 of SEQ ID NO: 317928
gaaguaauuguggacggua

SEQ ID NO: 339292 - RNA, 19 nt, Artificial Sequence
  Description of Artificial Sequence: Synthetic oligonucleotide
  Antisense Strand to SEQ ID NO: 339291
uaccguccacaauuacuuc

SEQ ID NO: 339293 - RNA, 19 nt, Artificial Sequence
  Description of Artificial Sequence: Synthetic oligonucleotide
  Sense Strand Starting at position 260 of SEQ ID NO: 317931
guaauuguggacgguauuu

SEQ ID NO: 339294 - RNA, 19 nt, Artificial Sequence
  Description of Artificial Sequence: Synthetic oligonucleotide
  Antisense Strand to SEQ ID NO: 339293
aaauaccguccacaauuac

SEQ ID NO: 339295 - RNA, 19 nt, Artificial Sequence
  Description of Artificial Sequence: Synthetic oligonucleotide
  Sense Strand Starting at position 260 of SEQ ID NO: 318012
ugguacuaugcauggaaua

SEQ ID NO: 339296 - RNA, 19 nt, Artificial Sequence
  Description of Artificial Sequence: Synthetic oligonucleotide
  Antisense Strand to SEQ ID NO: 339295
uauuccaugcauaguacca

SEQ ID NO: 339297 - RNA, 19 nt, Artificial Sequence
  Description of Artificial Sequence: Synthetic oligonucleotide
  Sense Strand Starting at position 260 of SEQ ID NO: 318013
gguacuaugcauggaauag

SEQ ID NO: 339298 - RNA, 19 nt, Artificial Sequence
  Description of Artificial Sequence: Synthetic oligonucleotide
  Antisense Strand to SEQ ID NO: 339297
cuauuccaugcauaguacc

SEQ ID NO: 339299 - RNA, 19 nt, Artificial Sequence
  Description of Artificial Sequence: Synthetic oligonucleotide
  Sense Strand Starting at position 260 of SEQ ID NO: 318014
guacuaugcauggaauagu

SEQ ID NO: 339300 - RNA, 19 nt, Artificial Sequence
  Description of Artificial Sequence: Synthetic oligonucleotide
  Antisense Strand to SEQ ID NO: 339299
acuauuccaugcauaguac

SEQ ID NO: 339301 - RNA, 19 nt, Artificial Sequence
  Description of Artificial Sequence: Synthetic oligonucleotide
  Sense Strand Starting at position 260 of SEQ ID NO: 318028
auaguaagaugaguccauu

SEQ ID NO: 339302 - RNA, 19 nt, Artificial Sequence
  Description of Artificial Sequence: Synthetic oligonucleotide
  Antisense Strand to SEQ ID NO: 339301
aauggacucaucuuacuau

SEQ ID NO: 339303 - RNA, 19 nt, Artificial Sequence
  Description of Artificial Sequence: Synthetic oligonucleotide
  Sense Strand Starting at position 260 of SEQ ID NO: 318107
uaggauacauccucggaaa

SEQ ID NO: 339304 - RNA, 19 nt, Artificial Sequence
  Description of Artificial Sequence: Synthetic oligonucleotide
  Antisense Strand to SEQ ID NO: 339303
uuuccgaggauguauccua

SEQ ID NO: 339305 - RNA, 19 nt, Artificial Sequence
  Description of Artificial Sequence: Synthetic oligonucleotide
  Sense Strand Starting at position 260 of SEQ ID NO: 318108
aggauacauccucggaaau

SEQ ID NO: 339306 - RNA, 19 nt, Artificial Sequence
  Description of Artificial Sequence: Synthetic oligonucleotide
  Antisense Strand to SEQ ID NO: 339305
auuuccgaggauguauccu

SEQ ID NO: 339307 - RNA, 19 nt, Artificial Sequence
  Description of Artificial Sequence: Synthetic oligonucleotide
  Sense Strand Starting at position 260 of SEQ ID NO: 318109
ggauacauccucggaaaug

SEQ ID NO: 339308 - RNA, 19 nt, Artificial Sequence
  Description of Artificial Sequence: Synthetic oligonucleotide
  Antisense Strand to SEQ ID NO: 339307
cauuuccgaggauguaucc

SEQ ID NO: 339309 - RNA, 19 nt, Artificial Sequence
  Description of Artificial Sequence: Synthetic oligonucleotide
  Sense Strand Starting at position 260 of SEQ ID NO: 318160
ggauuagccauauguggaa

SEQ ID NO: 339310 - RNA, 19 nt, Artificial Sequence
  Description of Artificial Sequence: Synthetic oligonucleotide
  Antisense Strand to SEQ ID NO: 339309
uuccacauauggcuaaucc

SEQ ID NO: 339311 - RNA, 19 nt, Artificial Sequence
  Description of Artificial Sequence: Synthetic oligonucleotide
  Sense Strand Starting at position 260 of SEQ ID NO: 318388
aagaaaugccaguguggaa

SEQ ID NO: 339312 - RNA, 19 nt, Artificial Sequence
  Description of Artificial Sequence: Synthetic oligonucleotide
  Antisense Strand to SEQ ID NO: 339311
uuccacacuggcauuucuu

SEQ ID NO: 339313 - RNA, 19 nt, Artificial Sequence
  Description of Artificial Sequence: Synthetic oligonucleotide
  Sense Strand Starting at position 260 of SEQ ID NO: 318411
aguugcuauggcuaauaaa

SEQ ID NO: 339314 - RNA, 19 nt, Artificial Sequence
  Description of Artificial Sequence: Synthetic oligonucleotide
  Antisense Strand to SEQ ID NO: 339313
uuuauuagccauagcaacu

SEQ ID NO: 339315 - RNA, 19 nt, Artificial Sequence
  Description of Artificial Sequence: Synthetic oligonucleotide
  Sense Strand Starting at position 260 of SEQ ID NO: 318446
ucugauuauuaaucuggga

SEQ ID NO: 339316 - RNA, 19 nt, Artificial Sequence
  Description of Artificial Sequence: Synthetic oligonucleotide
  Antisense Strand to SEQ ID NO: 339315
ucccagauuaauaaucaga

SEQ ID NO: 339317 - RNA, 19 nt, Artificial Sequence
  Description of Artificial Sequence: Synthetic oligonucleotide
  Sense Strand Starting at position 260 of SEQ ID NO: 318853
uaaauuauggagugucuau

SEQ ID NO: 339318 - RNA, 19 nt, Artificial Sequence
  Description of Artificial Sequence: Synthetic oligonucleotide
  Antisense Strand to SEQ ID NO: 339317
auagacacuccauaauuua

SEQ ID NO: 339319 - RNA, 19 nt, Artificial Sequence
  Description of Artificial Sequence: Synthetic oligonucleotide
  Sense Strand Starting at position 260 of SEQ ID NO: 319105
guauuagaggccuaagcca

SEQ ID NO: 339320 - RNA, 19 nt, Artificial Sequence
  Description of Artificial Sequence: Synthetic oligonucleotide
  Antisense Strand to SEQ ID NO: 339319
uggcuuaggccucuaauac

SEQ ID NO: 339321 - RNA, 19 nt, Artificial Sequence
  Description of Artificial Sequence: Synthetic oligonucleotide
  Sense Strand Starting at position 261 of SEQ ID NO: 315407
ccaacuacucggcacgaga

SEQ ID NO: 339322 - RNA, 19 nt, Artificial Sequence
  Description of Artificial Sequence: Synthetic oligonucleotide
  Antisense Strand to SEQ ID NO: 339321
ucucgugccgaguaguugg

SEQ ID NO: 339323 - RNA, 19 nt, Artificial Sequence
  Description of Artificial Sequence: Synthetic oligonucleotide
  Sense Strand Starting at position 261 of SEQ ID NO: 315409
aacuacucggcacgagaau

SEQ ID NO: 339324 - RNA, 19 nt, Artificial Sequence
  Description of Artificial Sequence: Synthetic oligonucleotide
  Antisense Strand to SEQ ID NO: 339323
auucucgugccgaguaguu

SEQ ID NO: 339325 - RNA, 19 nt, Artificial Sequence
  Description of Artificial Sequence: Synthetic oligonucleotide
  Sense Strand Starting at position 261 of SEQ ID NO: 315410
acuacucggcacgagaauu

SEQ ID NO: 339326 - RNA, 19 nt, Artificial Sequence
  Description of Artificial Sequence: Synthetic oligonucleotide
  Antisense Strand to SEQ ID NO: 339325
aauucucgugccgaguagu

SEQ ID NO: 339327 - RNA, 19 nt, Artificial Sequence
  Description of Artificial Sequence: Synthetic oligonucleotide
  Sense Strand Starting at position 261 of SEQ ID NO: 315589
uuagcuuuacugcagagaa

SEQ ID NO: 339328 - RNA, 19 nt, Artificial Sequence
  Description of Artificial Sequence: Synthetic oligonucleotide
  Antisense Strand to SEQ ID NO: 339327
uucucugcaguaaagcuaa

SEQ ID NO: 339329 - RNA, 19 nt, Artificial Sequence
  Description of Artificial Sequence: Synthetic oligonucleotide
  Sense Strand Starting at position 261 of SEQ ID NO: 315591
agcuuuacugcagagaaau

SEQ ID NO: 339330 - RNA, 19 nt, Artificial Sequence
  Description of Artificial Sequence: Synthetic oligonucleotide
  Antisense Strand to SEQ ID NO: 339329
auuucucugcaguaaagcu

SEQ ID NO: 339331 - RNA, 19 nt, Artificial Sequence
  Description of Artificial Sequence: Synthetic oligonucleotide
  Sense Strand Starting at position 261 of SEQ ID NO: 315846
cagucaucagcagauguga

SEQ ID NO: 339332 - RNA, 19 nt, Artificial Sequence
  Description of Artificial Sequence: Synthetic oligonucleotide
  Antisense Strand to SEQ ID NO: 339331
ucacaucugcugaugacug

SEQ ID NO: 339333 - RNA, 19 nt, Artificial Sequence
  Description of Artificial Sequence: Synthetic oligonucleotide
  Sense Strand Starting at position 261 of SEQ ID NO: 315923
aaaguaggucacuagaguu

SEQ ID NO: 339334 - RNA, 19 nt, Artificial Sequence
  Description of Artificial Sequence: Synthetic oligonucleotide
  Antisense Strand to SEQ ID NO: 339333
aacucuagugaccuacuuu

SEQ ID NO: 339335 - RNA, 19 nt, Artificial Sequence
  Description of Artificial Sequence: Synthetic oligonucleotide
  Sense Strand Starting at position 261 of SEQ ID NO: 315957
cgggucauuugaguuguaa

SEQ ID NO: 339336 - RNA, 19 nt, Artificial Sequence
  Description of Artificial Sequence: Synthetic oligonucleotide
  Antisense Strand to SEQ ID NO: 339335
uuacaacucaaaugacccg

SEQ ID NO: 339337 - RNA, 19 nt, Artificial Sequence
  Description of Artificial Sequence: Synthetic oligonucleotide
  Sense Strand Starting at position 261 of SEQ ID NO: 316094
gguucuauugcagaaauag

SEQ ID NO: 339338 - RNA, 19 nt, Artificial Sequence
  Description of Artificial Sequence: Synthetic oligonucleotide
  Antisense Strand to SEQ ID NO: 339337
cuauuucugcaauagaacc

SEQ ID NO: 339339 - RNA, 19 nt, Artificial Sequence
  Description of Artificial Sequence: Synthetic oligonucleotide
  Sense Strand Starting at position 261 of SEQ ID NO: 316184
acgacuguaaagugaauaa

SEQ ID NO: 339340 - RNA, 19 nt, Artificial Sequence
  Description of Artificial Sequence: Synthetic oligonucleotide
  Antisense Strand to SEQ ID NO: 339339
uuauucacuuuacagucgu

SEQ ID NO: 339341 - RNA, 19 nt, Artificial Sequence
  Description of Artificial Sequence: Synthetic oligonucleotide
  Sense Strand Starting at position 261 of SEQ ID NO: 316209
ucucaaagaugcuuugaug

SEQ ID NO: 339342 - RNA, 19 nt, Artificial Sequence
  Description of Artificial Sequence: Synthetic oligonucleotide
  Antisense Strand to SEQ ID NO: 339341
caucaaagcaucuuugaga

SEQ ID NO: 339343 - RNA, 19 nt, Artificial Sequence
  Description of Artificial Sequence: Synthetic oligonucleotide
  Sense Strand Starting at position 261 of SEQ ID NO: 316286
agaugcauaccauguccua

SEQ ID NO: 339344 - RNA, 19 nt, Artificial Sequence
  Description of Artificial Sequence: Synthetic oligonucleotide
  Antisense Strand to SEQ ID NO: 339343
uaggacaugguaugcaucu

SEQ ID NO: 339345 - RNA, 19 nt, Artificial Sequence
  Description of Artificial Sequence: Synthetic oligonucleotide
  Sense Strand Starting at position 261 of SEQ ID NO: 316473
gacuuuguccagcaaguua

SEQ ID NO: 339346 - RNA, 19 nt, Artificial Sequence
  Description of Artificial Sequence: Synthetic oligonucleotide
  Antisense Strand to SEQ ID NO: 339345
uaacuugcuggacaaaguc

SEQ ID NO: 339347 - RNA, 19 nt, Artificial Sequence
  Description of Artificial Sequence: Synthetic oligonucleotide
  Sense Strand Starting at position 261 of SEQ ID NO: 316609
agaggaaagucgccauaga

SEQ ID NO: 339348 - RNA, 19 nt, Artificial Sequence
  Description of Artificial Sequence: Synthetic oligonucleotide
  Antisense Strand to SEQ ID NO: 339347
ucuauggcgacuuuccucu

SEQ ID NO: 339349 - RNA, 19 nt, Artificial Sequence
  Description of Artificial Sequence: Synthetic oligonucleotide
  Sense Strand Starting at position 261 of SEQ ID NO: 316804
gaacuagagguguggaaac

SEQ ID NO: 339350 - RNA, 19 nt, Artificial Sequence
  Description of Artificial Sequence: Synthetic oligonucleotide
  Antisense Strand to SEQ ID NO: 339349
guuuccacaccucuaguuc

SEQ ID NO: 339351 - RNA, 19 nt, Artificial Sequence
  Description of Artificial Sequence: Synthetic oligonucleotide
  Sense Strand Starting at position 261 of SEQ ID NO: 317237
ucagcaaauuugcuuguua

SEQ ID NO: 339352 - RNA, 19 nt, Artificial Sequence
  Description of Artificial Sequence: Synthetic oligonucleotide
  Antisense Strand to SEQ ID NO: 339351
uaacaagcaaauuugcuga

SEQ ID NO: 339353 - RNA, 19 nt, Artificial Sequence
  Description of Artificial Sequence: Synthetic oligonucleotide
  Sense Strand Starting at position 261 of SEQ ID NO: 317238
cagcaaauuugcuuguuag

SEQ ID NO: 339354 - RNA, 19 nt, Artificial Sequence
  Description of Artificial Sequence: Synthetic oligonucleotide
  Antisense Strand to SEQ ID NO: 339353
cuaacaagcaaauuugcug

SEQ ID NO: 339355 - RNA, 19 nt, Artificial Sequence
  Description of Artificial Sequence: Synthetic oligonucleotide
  Sense Strand Starting at position 261 of SEQ ID NO: 317285
agaauugaguucuuucugu

SEQ ID NO: 339356 - RNA, 19 nt, Artificial Sequence
  Description of Artificial Sequence: Synthetic oligonucleotide
  Antisense Strand to SEQ ID NO: 339355
acagaaagaacucaauucu

SEQ ID NO: 339357 - RNA, 19 nt, Artificial Sequence
  Description of Artificial Sequence: Synthetic oligonucleotide
  Sense Strand Starting at position 261 of SEQ ID NO: 317631
uggagaauugggugcucua

SEQ ID NO: 339358 - RNA, 19 nt, Artificial Sequence
  Description of Artificial Sequence: Synthetic oligonucleotide
  Antisense Strand to SEQ ID NO: 339357
uagagcacccaauucucca

SEQ ID NO: 339359 - RNA, 19 nt, Artificial Sequence
  Description of Artificial Sequence: Synthetic oligonucleotide
  Sense Strand Starting at position 261 of SEQ ID NO: 317634
agaauugggugcucuacuu

SEQ ID NO: 339360 - RNA, 19 nt, Artificial Sequence
  Description of Artificial Sequence: Synthetic oligonucleotide
  Antisense Strand to SEQ ID NO: 339359
aaguagagcacccaauucu

SEQ ID NO: 339361 - RNA, 19 nt, Artificial Sequence
  Description of Artificial Sequence: Synthetic oligonucleotide
  Sense Strand Starting at position 261 of SEQ ID NO: 317662
cuacuaaacugagugguca

SEQ ID NO: 339362 - RNA, 19 nt, Artificial Sequence
  Description of Artificial Sequence: Synthetic oligonucleotide
  Antisense Strand to SEQ ID NO: 339361
ugaccacucaguuuaguag

SEQ ID NO: 339363 - RNA, 19 nt, Artificial Sequence
  Description of Artificial Sequence: Synthetic oligonucleotide
  Sense Strand Starting at position 261 of SEQ ID NO: 317666
uaaacugaguggucaggaa

SEQ ID NO: 339364 - RNA, 19 nt, Artificial Sequence
  Description of Artificial Sequence: Synthetic oligonucleotide
  Antisense Strand to SEQ ID NO: 339363
uuccugaccacucaguuua

SEQ ID NO: 339365 - RNA, 19 nt, Artificial Sequence
  Description of Artificial Sequence: Synthetic oligonucleotide
  Sense Strand Starting at position 261 of SEQ ID NO: 317691
cucugaggaccaugaucuu

SEQ ID NO: 339366 - RNA, 19 nt, Artificial Sequence
  Description of Artificial Sequence: Synthetic oligonucleotide
  Antisense Strand to SEQ ID NO: 339365
aagaucaugguccucagag

SEQ ID NO: 339367 - RNA, 19 nt, Artificial Sequence
  Description of Artificial Sequence: Synthetic oligonucleotide
  Sense Strand Starting at position 261 of SEQ ID NO: 317697
ggaccaugaucuuugaauu

SEQ ID NO: 339368 - RNA, 19 nt, Artificial Sequence
  Description of Artificial Sequence: Synthetic oligonucleotide
  Antisense Strand to SEQ ID NO: 339367
aauucaaagaucauggucc

SEQ ID NO: 339369 - RNA, 19 nt, Artificial Sequence
  Description of Artificial Sequence: Synthetic oligonucleotide
  Sense Strand Starting at position 261 of SEQ ID NO: 317795
accaaaugaguuugacuca

SEQ ID NO: 339370 - RNA, 19 nt, Artificial Sequence
  Description of Artificial Sequence: Synthetic oligonucleotide
  Antisense Strand to SEQ ID NO: 339369
ugagucaaacucauuuggu

SEQ ID NO: 339371 - RNA, 19 nt, Artificial Sequence
  Description of Artificial Sequence: Synthetic oligonucleotide
  Sense Strand Starting at position 261 of SEQ ID NO: 317861
aggagauguuggagaugua

SEQ ID NO: 339372 - RNA, 19 nt, Artificial Sequence
  Description of Artificial Sequence: Synthetic oligonucleotide
  Antisense Strand to SEQ ID NO: 339371
uacaucuccaacaucuccu

SEQ ID NO: 339373 - RNA, 19 nt, Artificial Sequence
  Description of Artificial Sequence: Synthetic oligonucleotide
  Sense Strand Starting at position 261 of SEQ ID NO: 317943
uacaaugaguugucuguaa

SEQ ID NO: 339374 - RNA, 19 nt, Artificial Sequence
  Description of Artificial Sequence: Synthetic oligonucleotide
  Antisense Strand to SEQ ID NO: 339373
uuacagacaacucauugua

SEQ ID NO: 339375 - RNA, 19 nt, Artificial Sequence
  Description of Artificial Sequence: Synthetic oligonucleotide
  Sense Strand Starting at position 261 of SEQ ID NO: 317945
caaugaguugucuguaagg

SEQ ID NO: 339376 - RNA, 19 nt, Artificial Sequence
  Description of Artificial Sequence: Synthetic oligonucleotide
  Antisense Strand to SEQ ID NO: 339375
ccuuacagacaacucauug

SEQ ID NO: 339377 - RNA, 19 nt, Artificial Sequence
  Description of Artificial Sequence: Synthetic oligonucleotide
  Sense Strand Starting at position 261 of SEQ ID NO: 317947
augaguugucuguaaggac

SEQ ID NO: 339378 - RNA, 19 nt, Artificial Sequence
  Description of Artificial Sequence: Synthetic oligonucleotide
  Antisense Strand to SEQ ID NO: 339377
guccuuacagacaacucau

SEQ ID NO: 339379 - RNA, 19 nt, Artificial Sequence
  Description of Artificial Sequence: Synthetic oligonucleotide
  Sense Strand Starting at position 261 of SEQ ID NO: 318060
acagucacauauguuaauu

SEQ ID NO: 339380 - RNA, 19 nt, Artificial Sequence
  Description of Artificial Sequence: Synthetic oligonucleotide
  Antisense Strand to SEQ ID NO: 339379
aauuaacauaugugacugu

SEQ ID NO: 339381 - RNA, 19 nt, Artificial Sequence
  Description of Artificial Sequence: Synthetic oligonucleotide
  Sense Strand Starting at position 261 of SEQ ID NO: 318084
ugaacuugucaaggaaugu

SEQ ID NO: 339382 - RNA, 19 nt, Artificial Sequence
  Description of Artificial Sequence: Synthetic oligonucleotide
  Antisense Strand to SEQ ID NO: 339381
acauuccuugacaaguuca

SEQ ID NO: 339383 - RNA, 19 nt, Artificial Sequence
  Description of Artificial Sequence: Synthetic oligonucleotide
  Sense Strand Starting at position 261 of SEQ ID NO: 318088
cuugucaaggaauguaauu

SEQ ID NO: 339384 - RNA, 19 nt, Artificial Sequence
  Description of Artificial Sequence: Synthetic oligonucleotide
  Antisense Strand to SEQ ID NO: 339383
aauuacauuccuugacaag

SEQ ID NO: 339385 - RNA, 19 nt, Artificial Sequence
  Description of Artificial Sequence: Synthetic oligonucleotide
  Sense Strand Starting at position 261 of SEQ ID NO: 318117
aacugaaguugauugaguu

SEQ ID NO: 339386 - RNA, 19 nt, Artificial Sequence
  Description of Artificial Sequence: Synthetic oligonucleotide
  Antisense Strand to SEQ ID NO: 339385
aacucaaucaacuucaguu

SEQ ID NO: 339387 - RNA, 19 nt, Artificial Sequence
  Description of Artificial Sequence: Synthetic oligonucleotide
  Sense Strand Starting at position 261 of SEQ ID NO: 318118
acugaaguugauugaguua

SEQ ID NO: 339388 - RNA, 19 nt, Artificial Sequence
  Description of Artificial Sequence: Synthetic oligonucleotide
  Antisense Strand to SEQ ID NO: 339387
uaacucaaucaacuucagu

SEQ ID NO: 339389 - RNA, 19 nt, Artificial Sequence
  Description of Artificial Sequence: Synthetic oligonucleotide
  Sense Strand Starting at position 261 of SEQ ID NO: 318127
gauugaguuacaggauguu

SEQ ID NO: 339390 - RNA, 19 nt, Artificial Sequence
  Description of Artificial Sequence: Synthetic oligonucleotide
  Antisense Strand to SEQ ID NO: 339389
aacauccuguaacucaauc

SEQ ID NO: 339391 - RNA, 19 nt, Artificial Sequence
  Description of Artificial Sequence: Synthetic oligonucleotide
  Sense Strand Starting at position 261 of SEQ ID NO: 318161
uagguucgacaguauaaag

SEQ ID NO: 339392 - RNA, 19 nt, Artificial Sequence
  Description of Artificial Sequence: Synthetic oligonucleotide
  Antisense Strand to SEQ ID NO: 339391
cuuuauacugucgaaccua

SEQ ID NO: 339393 - RNA, 19 nt, Artificial Sequence
  Description of Artificial Sequence: Synthetic oligonucleotide
  Sense Strand Starting at position 261 of SEQ ID NO: 318223
cugaaaucauauccaaggu

SEQ ID NO: 339394 - RNA, 19 nt, Artificial Sequence
  Description of Artificial Sequence: Synthetic oligonucleotide
  Antisense Strand to SEQ ID NO: 339393
accuuggauaugauuucag

SEQ ID NO: 339395 - RNA, 19 nt, Artificial Sequence
  Description of Artificial Sequence: Synthetic oligonucleotide
  Sense Strand Starting at position 261 of SEQ ID NO: 318273
uaagcagucugacucgaaa

SEQ ID NO: 339396 - RNA, 19 nt, Artificial Sequence
  Description of Artificial Sequence: Synthetic oligonucleotide
  Antisense Strand to SEQ ID NO: 339395
uuucgagucagacugcuua

SEQ ID NO: 339397 - RNA, 19 nt, Artificial Sequence
  Description of Artificial Sequence: Synthetic oligonucleotide
  Sense Strand Starting at position 261 of SEQ ID NO: 318526
uucugucucugauuacaug

SEQ ID NO: 339398 - RNA, 19 nt, Artificial Sequence
  Description of Artificial Sequence: Synthetic oligonucleotide
  Antisense Strand to SEQ ID NO: 339397
cauguaaucagagacagaa

SEQ ID NO: 339399 - RNA, 19 nt, Artificial Sequence
  Description of Artificial Sequence: Synthetic oligonucleotide
  Sense Strand Starting at position 261 of SEQ ID NO: 318748
aaagauuugugauaggcca

SEQ ID NO: 339400 - RNA, 19 nt, Artificial Sequence
  Description of Artificial Sequence: Synthetic oligonucleotide
  Antisense Strand to SEQ ID NO: 339399
uggccuaucacaaaucuuu

SEQ ID NO: 339401 - RNA, 19 nt, Artificial Sequence
  Description of Artificial Sequence: Synthetic oligonucleotide
  Sense Strand Starting at position 262 of SEQ ID NO: 315295
cgcuauguugccgagguuu

SEQ ID NO: 339402 - RNA, 19 nt, Artificial Sequence
  Description of Artificial Sequence: Synthetic oligonucleotide
  Antisense Strand to SEQ ID NO: 339401
aaaccucggcaacauagcg

SEQ ID NO: 339403 - RNA, 19 nt, Artificial Sequence
  Description of Artificial Sequence: Synthetic oligonucleotide
  Sense Strand Starting at position 262 of SEQ ID NO: 315297
cuauguugccgagguuuca

SEQ ID NO: 339404 - RNA, 19 nt, Artificial Sequence
  Description of Artificial Sequence: Synthetic oligonucleotide
  Antisense Strand to SEQ ID NO: 339403
ugaaaccucggcaacauag

SEQ ID NO: 339405 - RNA, 19 nt, Artificial Sequence
  Description of Artificial Sequence: Synthetic oligonucleotide
  Sense Strand Starting at position 262 of SEQ ID NO: 315316
ucuccauuauguuugugua

SEQ ID NO: 339406 - RNA, 19 nt, Artificial Sequence
  Description of Artificial Sequence: Synthetic oligonucleotide
  Antisense Strand to SEQ ID NO: 339405
uacacaaacauaauggaga

SEQ ID NO: 339407 - RNA, 19 nt, Artificial Sequence
  Description of Artificial Sequence: Synthetic oligonucleotide
  Sense Strand Starting at position 262 of SEQ ID NO: 315407
ggaggcuucugaucccauu

SEQ ID NO: 339408 - RNA, 19 nt, Artificial Sequence
  Description of Artificial Sequence: Synthetic oligonucleotide
  Antisense Strand to SEQ ID NO: 339407
aaugggaucagaagccucc

SEQ ID NO: 339409 - RNA, 19 nt, Artificial Sequence
  Description of Artificial Sequence: Synthetic oligonucleotide
  Sense Strand Starting at position 262 of SEQ ID NO: 315457
ucagguaggauaugucuca

SEQ ID NO: 339410 - RNA, 19 nt, Artificial Sequence
  Description of Artificial Sequence: Synthetic oligonucleotide
  Antisense Strand to SEQ ID NO: 339409
ugagacauauccuaccuga

SEQ ID NO: 339411 - RNA, 19 nt, Artificial Sequence
  Description of Artificial Sequence: Synthetic oligonucleotide
  Sense Strand Starting at position 262 of SEQ ID NO: 315536
ucucuuagccugggccaaa

SEQ ID NO: 339412 - RNA, 19 nt, Artificial Sequence
  Description of Artificial Sequence: Synthetic oligonucleotide
  Antisense Strand to SEQ ID NO: 339411
uuuggcccaggcuaagaga

SEQ ID NO: 339413 - RNA, 19 nt, Artificial Sequence
  Description of Artificial Sequence: Synthetic oligonucleotide
  Sense Strand Starting at position 262 of SEQ ID NO: 315609
ugaaauggcucuuccuagu

SEQ ID NO: 339414 - RNA, 19 nt, Artificial Sequence
  Description of Artificial Sequence: Synthetic oligonucleotide
  Antisense Strand to SEQ ID NO: 339413
acuaggaagagccauuuca

SEQ ID NO: 339415 - RNA, 19 nt, Artificial Sequence
  Description of Artificial Sequence: Synthetic oligonucleotide
  Sense Strand Starting at position 262 of SEQ ID NO: 315632
ggucuaucuagacaccguu

SEQ ID NO: 339416 - RNA, 19 nt, Artificial Sequence
  Description of Artificial Sequence: Synthetic oligonucleotide
  Antisense Strand to SEQ ID NO: 339415
aacggugucuagauagacc

SEQ ID NO: 339417 - RNA, 19 nt, Artificial Sequence
  Description of Artificial Sequence: Synthetic oligonucleotide
  Sense Strand Starting at position 262 of SEQ ID NO: 315735
cuggaauggcagugcuaua

SEQ ID NO: 339418 - RNA, 19 nt, Artificial Sequence
  Description of Artificial Sequence: Synthetic oligonucleotide
  Antisense Strand to SEQ ID NO: 339417
uauagcacugccauuccag

SEQ ID NO: 339419 - RNA, 19 nt, Artificial Sequence
  Description of Artificial Sequence: Synthetic oligonucleotide
  Sense Strand Starting at position 262 of SEQ ID NO: 315890
ccguucuuggugcaaacau

SEQ ID NO: 339420 - RNA, 19 nt, Artificial Sequence
  Description of Artificial Sequence: Synthetic oligonucleotide
  Antisense Strand to SEQ ID NO: 339419
auguuugcaccaagaacgg

SEQ ID NO: 339421 - RNA, 19 nt, Artificial Sequence
  Description of Artificial Sequence: Synthetic oligonucleotide
  Sense Strand Starting at position 262 of SEQ ID NO: 316040
aagagaaucggccaggcaa

SEQ ID NO: 339422 - RNA, 19 nt, Artificial Sequence
  Description of Artificial Sequence: Synthetic oligonucleotide
  Antisense Strand to SEQ ID NO: 339421
uugccuggccgauucucuu

SEQ ID NO: 339423 - RNA, 19 nt, Artificial Sequence
  Description of Artificial Sequence: Synthetic oligonucleotide
  Sense Strand Starting at position 262 of SEQ ID NO: 316082
ugugcugaguuggucacaa

SEQ ID NO: 339424 - RNA, 19 nt, Artificial Sequence
  Description of Artificial Sequence: Synthetic oligonucleotide
  Antisense Strand to SEQ ID NO: 339423
uugugaccaacucagcaca

SEQ ID NO: 339425 - RNA, 19 nt, Artificial Sequence
  Description of Artificial Sequence: Synthetic oligonucleotide
  Sense Strand Starting at position 262 of SEQ ID NO: 316382
gcuggguucggaggaaaga

SEQ ID NO: 339426 - RNA, 19 nt, Artificial Sequence
  Description of Artificial Sequence: Synthetic oligonucleotide
  Antisense Strand to SEQ ID NO: 339425
ucuuuccuccgaacccagc

SEQ ID NO: 339427 - RNA, 19 nt, Artificial Sequence
  Description of Artificial Sequence: Synthetic oligonucleotide
  Sense Strand Starting at position 262 of SEQ ID NO: 316670
gcaacuuucccggaggaag

SEQ ID NO: 339428 - RNA, 19 nt, Artificial Sequence
  Description of Artificial Sequence: Synthetic oligonucleotide
  Antisense Strand to SEQ ID NO: 339427
cuuccuccgggaaaguugc

SEQ ID NO: 339429 - RNA, 19 nt, Artificial Sequence
  Description of Artificial Sequence: Synthetic oligonucleotide
  Sense Strand Starting at position 262 of SEQ ID NO: 317344
ggaugugugcugagagcac

SEQ ID NO: 339430 - RNA, 19 nt, Artificial Sequence
  Description of Artificial Sequence: Synthetic oligonucleotide
  Antisense Strand to SEQ ID NO: 339429
gugcucucagcacacaucc

SEQ ID NO: 339431 - RNA, 19 nt, Artificial Sequence
  Description of Artificial Sequence: Synthetic oligonucleotide
  Sense Strand Starting at position 262 of SEQ ID NO: 317355
gagagcacuuuacugaagu

SEQ ID NO: 339432 - RNA, 19 nt, Artificial Sequence
  Description of Artificial Sequence: Synthetic oligonucleotide
  Antisense Strand to SEQ ID NO: 339431
acuucaguaaagugcucuc

SEQ ID NO: 339433 - RNA, 19 nt, Artificial Sequence
  Description of Artificial Sequence: Synthetic oligonucleotide
  Sense Strand Starting at position 262 of SEQ ID NO: 317388
gugugaugcccagaccuua

SEQ ID NO: 339434 - RNA, 19 nt, Artificial Sequence
  Description of Artificial Sequence: Synthetic oligonucleotide
  Antisense Strand to SEQ ID NO: 339433
uaaggucugggcaucacac

SEQ ID NO: 339435 - RNA, 19 nt, Artificial Sequence
  Description of Artificial Sequence: Synthetic oligonucleotide
  Sense Strand Starting at position 262 of SEQ ID NO: 317446
guguaaccgucgcccagau

SEQ ID NO: 339436 - RNA, 19 nt, Artificial Sequence
  Description of Artificial Sequence: Synthetic oligonucleotide
  Antisense Strand to SEQ ID NO: 339435
aucugggcgacgguuacac

SEQ ID NO: 339437 - RNA, 19 nt, Artificial Sequence
  Description of Artificial Sequence: Synthetic oligonucleotide
  Sense Strand Starting at position 262 of SEQ ID NO: 317570
aguguauucugcuuucugu

SEQ ID NO: 339438 - RNA, 19 nt, Artificial Sequence
  Description of Artificial Sequence: Synthetic oligonucleotide
  Antisense Strand to SEQ ID NO: 339437
acagaaagcagaauacacu

SEQ ID NO: 339439 - RNA, 19 nt, Artificial Sequence
  Description of Artificial Sequence: Synthetic oligonucleotide
  Sense Strand Starting at position 262 of SEQ ID NO: 317674
auccauccuguugggaaua

SEQ ID NO: 339440 - RNA, 19 nt, Artificial Sequence
  Description of Artificial Sequence: Synthetic oligonucleotide
  Antisense Strand to SEQ ID NO: 339439
uauucccaacaggauggau

SEQ ID NO: 339441 - RNA, 19 nt, Artificial Sequence
  Description of Artificial Sequence: Synthetic oligonucleotide
  Sense Strand Starting at position 262 of SEQ ID NO: 317676
ccauccuguugggaauaua

SEQ ID NO: 339442 - RNA, 19 nt, Artificial Sequence
  Description of Artificial Sequence: Synthetic oligonucleotide
  Antisense Strand to SEQ ID NO: 339441
uauauucccaacaggaugg

SEQ ID NO: 339443 - RNA, 19 nt, Artificial Sequence
  Description of Artificial Sequence: Synthetic oligonucleotide
  Sense Strand Starting at position 262 of SEQ ID NO: 317679
uccuguugggaauauaagu

SEQ ID NO: 339444 - RNA, 19 nt, Artificial Sequence
  Description of Artificial Sequence: Synthetic oligonucleotide
  Antisense Strand to SEQ ID NO: 339443
acuuauauucccaacagga

SEQ ID NO: 339445 - RNA, 19 nt, Artificial Sequence
  Description of Artificial Sequence: Synthetic oligonucleotide
  Sense Strand Starting at position 262 of SEQ ID NO: 317731
guaguacuccacugugcaa

SEQ ID NO: 339446 - RNA, 19 nt, Artificial Sequence
  Description of Artificial Sequence: Synthetic oligonucleotide
  Antisense Strand to SEQ ID NO: 339445
uugcacaguggaguacuac

SEQ ID NO: 339447 - RNA, 19 nt, Artificial Sequence
  Description of Artificial Sequence: Synthetic oligonucleotide
  Sense Strand Starting at position 262 of SEQ ID NO: 317744
gugcaaagauaccguauuu

SEQ ID NO: 339448 - RNA, 19 nt, Artificial Sequence
  Description of Artificial Sequence: Synthetic oligonucleotide
  Antisense Strand to SEQ ID NO: 339447
aaauacgguaucuuugcac

SEQ ID NO: 339449 - RNA, 19 nt, Artificial Sequence
  Description of Artificial Sequence: Synthetic oligonucleotide
  Sense Strand Starting at position 262 of SEQ ID NO: 317868
uggcuauagucacuauuau

SEQ ID NO: 339450 - RNA, 19 nt, Artificial Sequence
  Description of Artificial Sequence: Synthetic oligonucleotide
  Antisense Strand to SEQ ID NO: 339449
auaauagugacuauagcca

SEQ ID NO: 339451 - RNA, 19 nt, Artificial Sequence
  Description of Artificial Sequence: Synthetic oligonucleotide
  Sense Strand Starting at position 262 of SEQ ID NO: 317869
ggcuauagucacuauuaug

SEQ ID NO: 339452 - RNA, 19 nt, Artificial Sequence
  Description of Artificial Sequence: Synthetic oligonucleotide
  Antisense Strand to SEQ ID NO: 339451
cauaauagugacuauagcc

SEQ ID NO: 339453 - RNA, 19 nt, Artificial Sequence
  Description of Artificial Sequence: Synthetic oligonucleotide
  Sense Strand Starting at position 262 of SEQ ID NO: 317915
ucucauuucucugggacaa

SEQ ID NO: 339454 - RNA, 19 nt, Artificial Sequence
  Description of Artificial Sequence: Synthetic oligonucleotide
  Antisense Strand to SEQ ID NO: 339453
uugucccagagaaaugaga

SEQ ID NO: 339455 - RNA, 19 nt, Artificial Sequence
  Description of Artificial Sequence: Synthetic oligonucleotide
  Sense Strand Starting at position 262 of SEQ ID NO: 317927
gggacaaauaucugcaagu

SEQ ID NO: 339456 - RNA, 19 nt, Artificial Sequence
  Description of Artificial Sequence: Synthetic oligonucleotide
  Antisense Strand to SEQ ID NO: 339455
acuugcagauauuuguccc

SEQ ID NO: 339457 - RNA, 19 nt, Artificial Sequence
  Description of Artificial Sequence: Synthetic oligonucleotide
  Sense Strand Starting at position 262 of SEQ ID NO: 317928
ggacaaauaucugcaagug

SEQ ID NO: 339458 - RNA, 19 nt, Artificial Sequence
  Description of Artificial Sequence: Synthetic oligonucleotide
  Antisense Strand to SEQ ID NO: 339457
cacuugcagauauuugucc

SEQ ID NO: 339459 - RNA, 19 nt, Artificial Sequence
  Description of Artificial Sequence: Synthetic oligonucleotide
  Sense Strand Starting at position 262 of SEQ ID NO: 317965
ggagcauauguuugcuucu

SEQ ID NO: 339460 - RNA, 19 nt, Artificial Sequence
  Description of Artificial Sequence: Synthetic oligonucleotide
  Antisense Strand to SEQ ID NO: 339459
agaagcaaacauaugcucc

SEQ ID NO: 339461 - RNA, 19 nt, Artificial Sequence
  Description of Artificial Sequence: Synthetic oligonucleotide
  Sense Strand Starting at position 262 of SEQ ID NO: 317968
gcauauguuugcuucuguu

SEQ ID NO: 339462 - RNA, 19 nt, Artificial Sequence
  Description of Artificial Sequence: Synthetic oligonucleotide
  Antisense Strand to SEQ ID NO: 339461
aacagaagcaaacauaugc

SEQ ID NO: 339463 - RNA, 19 nt, Artificial Sequence
  Description of Artificial Sequence: Synthetic oligonucleotide
  Sense Strand Starting at position 262 of SEQ ID NO: 318453
gagccaugacaguggcauu

SEQ ID NO: 339464 - RNA, 19 nt, Artificial Sequence
  Description of Artificial Sequence: Synthetic oligonucleotide
  Antisense Strand to SEQ ID NO: 339463
aaugccacugucauggcuc

SEQ ID NO: 339465 - RNA, 19 nt, Artificial Sequence
  Description of Artificial Sequence: Synthetic oligonucleotide
  Sense Strand Starting at position 262 of SEQ ID NO: 318565
gugacauucuauucuguau

SEQ ID NO: 339466 - RNA, 19 nt, Artificial Sequence
  Description of Artificial Sequence: Synthetic oligonucleotide
  Antisense Strand to SEQ ID NO: 339465
auacagaauagaaugucac

SEQ ID NO: 339467 - RNA, 19 nt, Artificial Sequence
  Description of Artificial Sequence: Synthetic oligonucleotide
  Sense Strand Starting at position 262 of SEQ ID NO: 318654
gaagucaaggcaugaagau

SEQ ID NO: 339468 - RNA, 19 nt, Artificial Sequence
  Description of Artificial Sequence: Synthetic oligonucleotide
  Antisense Strand to SEQ ID NO: 339467
aucuucaugccuugacuuc

SEQ ID NO: 339469 - RNA, 19 nt, Artificial Sequence
  Description of Artificial Sequence: Synthetic oligonucleotide
  Sense Strand Starting at position 262 of SEQ ID NO: 318679
aggccaggaguccgagauu

SEQ ID NO: 339470 - RNA, 19 nt, Artificial Sequence
  Description of Artificial Sequence: Synthetic oligonucleotide
  Antisense Strand to SEQ ID NO: 339469
aaucucggacuccuggccu

SEQ ID NO: 339471 - RNA, 19 nt, Artificial Sequence
  Description of Artificial Sequence: Synthetic oligonucleotide
  Sense Strand Starting at position 262 of SEQ ID NO: 318682
ccaggaguccgagauugca

SEQ ID NO: 339472 - RNA, 19 nt, Artificial Sequence
  Description of Artificial Sequence: Synthetic oligonucleotide
  Antisense Strand to SEQ ID NO: 339471
ugcaaucucggacuccugg

SEQ ID NO: 339473 - RNA, 19 nt, Artificial Sequence
  Description of Artificial Sequence: Synthetic oligonucleotide
  Sense Strand Starting at position 262 of SEQ ID NO: 318721
cgcacucuugucuggguga

SEQ ID NO: 339474 - RNA, 19 nt, Artificial Sequence
  Description of Artificial Sequence: Synthetic oligonucleotide
  Antisense Strand to SEQ ID NO: 339473
ucacccagacaagagugcg

SEQ ID NO: 339475 - RNA, 19 nt, Artificial Sequence
  Description of Artificial Sequence: Synthetic oligonucleotide
  Sense Strand Starting at position 262 of SEQ ID NO: 318832
cgagguauguuaucauguu

SEQ ID NO: 339476 - RNA, 19 nt, Artificial Sequence
  Description of Artificial Sequence: Synthetic oligonucleotide
  Antisense Strand to SEQ ID NO: 339475
aacaugauaacauaccucg

SEQ ID NO: 339477 - RNA, 19 nt, Artificial Sequence
  Description of Artificial Sequence: Synthetic oligonucleotide
  Sense Strand Starting at position 262 of SEQ ID NO: 319210
cuaucuuugugaguuuauu

SEQ ID NO: 339478 - RNA, 19 nt, Artificial Sequence
  Description of Artificial Sequence: Synthetic oligonucleotide
  Antisense Strand to SEQ ID NO: 339477
aauaaacucacaaagauag

SEQ ID NO: 339479 - RNA, 19 nt, Artificial Sequence
  Description of Artificial Sequence: Synthetic oligonucleotide
  Sense Strand Starting at position 262 of SEQ ID NO: 319218
gugaguuuauucccugcca

SEQ ID NO: 339480 - RNA, 19 nt, Artificial Sequence
  Description of Artificial Sequence: Synthetic oligonucleotide
  Antisense Strand to SEQ ID NO: 339479
uggcagggaauaaacucac

SEQ ID NO: 339481 - RNA, 19 nt, Artificial Sequence
  Description of Artificial Sequence: Synthetic oligonucleotide
  Sense Strand Starting at position 263 of SEQ ID NO: 315248
cuaacaugucaacagugau

SEQ ID NO: 339482 - RNA, 19 nt, Artificial Sequence
  Description of Artificial Sequence: Synthetic oligonucleotide
  Antisense Strand to SEQ ID NO: 339481
aucacuguugacauguuag

SEQ ID NO: 339483 - RNA, 19 nt, Artificial Sequence
  Description of Artificial Sequence: Synthetic oligonucleotide
  Sense Strand Starting at position 263 of SEQ ID NO: 315251
acaugucaacagugauuau

SEQ ID NO: 339484 - RNA, 19 nt, Artificial Sequence
  Description of Artificial Sequence: Synthetic oligonucleotide
  Antisense Strand to SEQ ID NO: 339483
auaaucacuguugacaugu

SEQ ID NO: 339485 - RNA, 19 nt, Artificial Sequence
  Description of Artificial Sequence: Synthetic oligonucleotide
  Sense Strand Starting at position 263 of SEQ ID NO: 315264
gauuauuucuaguaauggg

SEQ ID NO: 339486 - RNA, 19 nt, Artificial Sequence
  Description of Artificial Sequence: Synthetic oligonucleotide
  Antisense Strand to SEQ ID NO: 339485
cccauuacuagaaauaauc

SEQ ID NO: 339487 - RNA, 19 nt, Artificial Sequence
  Description of Artificial Sequence: Synthetic oligonucleotide
  Sense Strand Starting at position 263 of SEQ ID NO: 315369
acccaaaggcguuauacuu

SEQ ID NO: 339488 - RNA, 19 nt, Artificial Sequence
  Description of Artificial Sequence: Synthetic oligonucleotide
  Antisense Strand to SEQ ID NO: 339487
aaguauaacgccuuugggu

SEQ ID NO: 339489 - RNA, 19 nt, Artificial Sequence
  Description of Artificial Sequence: Synthetic oligonucleotide
  Sense Strand Starting at position 263 of SEQ ID NO: 315419
aggcccaucucugucauuu

SEQ ID NO: 339490 - RNA, 19 nt, Artificial Sequence
  Description of Artificial Sequence: Synthetic oligonucleotide
  Antisense Strand to SEQ ID NO: 339489
aaaugacagagaugggccu

SEQ ID NO: 339491 - RNA, 19 nt, Artificial Sequence
  Description of Artificial Sequence: Synthetic oligonucleotide
  Sense Strand Starting at position 263 of SEQ ID NO: 315573
cucaauacucgcugaggga

SEQ ID NO: 339492 - RNA, 19 nt, Artificial Sequence
  Description of Artificial Sequence: Synthetic oligonucleotide
  Antisense Strand to SEQ ID NO: 339491
ucccucagcgaguauugag

SEQ ID NO: 339493 - RNA, 19 nt, Artificial Sequence
  Description of Artificial Sequence: Synthetic oligonucleotide
  Sense Strand Starting at position 263 of SEQ ID NO: 315574
ucaauacucgcugagggaa

SEQ ID NO: 339494 - RNA, 19 nt, Artificial Sequence
  Description of Artificial Sequence: Synthetic oligonucleotide
  Antisense Strand to SEQ ID NO: 339493
uucccucagcgaguauuga

SEQ ID NO: 339495 - RNA, 19 nt, Artificial Sequence
  Description of Artificial Sequence: Synthetic oligonucleotide
  Sense Strand Starting at position 263 of SEQ ID NO: 315843
gucugugagagaugacaga

SEQ ID NO: 339496 - RNA, 19 nt, Artificial Sequence
  Description of Artificial Sequence: Synthetic oligonucleotide
  Antisense Strand to SEQ ID NO: 339495
ucugucaucucucacagac

SEQ ID NO: 339497 - RNA, 19 nt, Artificial Sequence
  Description of Artificial Sequence: Synthetic oligonucleotide
  Sense Strand Starting at position 263 of SEQ ID NO: 315959
cauccaccggugugauuua

SEQ ID NO: 339498 - RNA, 19 nt, Artificial Sequence
  Description of Artificial Sequence: Synthetic oligonucleotide
  Antisense Strand to SEQ ID NO: 339497
uaaaucacaccgguggaug

SEQ ID NO: 339499 - RNA, 19 nt, Artificial Sequence
  Description of Artificial Sequence: Synthetic oligonucleotide
  Sense Strand Starting at position 263 of SEQ ID NO: 316014
guuggauuacacgagggua

SEQ ID NO: 339500 - RNA, 19 nt, Artificial Sequence
  Description of Artificial Sequence: Synthetic oligonucleotide
  Antisense Strand to SEQ ID NO: 339499
uacccucguguaauccaac

SEQ ID NO: 339501 - RNA, 19 nt, Artificial Sequence
  Description of Artificial Sequence: Synthetic oligonucleotide
  Sense Strand Starting at position 263 of SEQ ID NO: 316017
ggauuacacgaggguauga

SEQ ID NO: 339502 - RNA, 19 nt, Artificial Sequence
  Description of Artificial Sequence: Synthetic oligonucleotide
  Antisense Strand to SEQ ID NO: 339501
ucauacccucguguaaucc

SEQ ID NO: 339503 - RNA, 19 nt, Artificial Sequence
  Description of Artificial Sequence: Synthetic oligonucleotide
  Sense Strand Starting at position 263 of SEQ ID NO: 316040
aucuaaagggcuugacaag

SEQ ID NO: 339504 - RNA, 19 nt, Artificial Sequence
  Description of Artificial Sequence: Synthetic oligonucleotide
  Antisense Strand to SEQ ID NO: 339503
cuugucaagcccuuuagau

SEQ ID NO: 339505 - RNA, 19 nt, Artificial Sequence
  Description of Artificial Sequence: Synthetic oligonucleotide
  Sense Strand Starting at position 263 of SEQ ID NO: 316121
cuuucucagcuaugaagga

SEQ ID NO: 339506 - RNA, 19 nt, Artificial Sequence
  Description of Artificial Sequence: Synthetic oligonucleotide
  Antisense Strand to SEQ ID NO: 339505
uccuucauagcugagaaag

SEQ ID NO: 339507 - RNA, 19 nt, Artificial Sequence
  Description of Artificial Sequence: Synthetic oligonucleotide
  Sense Strand Starting at position 263 of SEQ ID NO: 316219
ccuccuucccaggaauguu

SEQ ID NO: 339508 - RNA, 19 nt, Artificial Sequence
  Description of Artificial Sequence: Synthetic oligonucleotide
  Antisense Strand to SEQ ID NO: 339507
aacauuccugggaaggagg

SEQ ID NO: 339509 - RNA, 19 nt, Artificial Sequence
  Description of Artificial Sequence: Synthetic oligonucleotide
  Sense Strand Starting at position 263 of SEQ ID NO: 316275
agaccucuuugguccuaaa

SEQ ID NO: 339510 - RNA, 19 nt, Artificial Sequence
  Description of Artificial Sequence: Synthetic oligonucleotide
  Antisense Strand to SEQ ID NO: 339509
uuuaggaccaaagaggucu

SEQ ID NO: 339511 - RNA, 19 nt, Artificial Sequence
  Description of Artificial Sequence: Synthetic oligonucleotide
  Sense Strand Starting at position 263 of SEQ ID NO: 316346
auguuacuaccagggagau

SEQ ID NO: 339512 - RNA, 19 nt, Artificial Sequence
  Description of Artificial Sequence: Synthetic oligonucleotide
  Antisense Strand to SEQ ID NO: 339511
aucucccugguaguaacau

SEQ ID NO: 339513 - RNA, 19 nt, Artificial Sequence
  Description of Artificial Sequence: Synthetic oligonucleotide
  Sense Strand Starting at position 263 of SEQ ID NO: 316347
uguuacuaccagggagaua

SEQ ID NO: 339514 - RNA, 19 nt, Artificial Sequence
  Description of Artificial Sequence: Synthetic oligonucleotide
  Antisense Strand to SEQ ID NO: 339513
uaucucccugguaguaaca

SEQ ID NO: 339515 - RNA, 19 nt, Artificial Sequence
  Description of Artificial Sequence: Synthetic oligonucleotide
  Sense Strand Starting at position 263 of SEQ ID NO: 317656
guggaaauggcaggaauga

SEQ ID NO: 339516 - RNA, 19 nt, Artificial Sequence
  Description of Artificial Sequence: Synthetic oligonucleotide
  Antisense Strand to SEQ ID NO: 339515
ucauuccugccauuuccac

SEQ ID NO: 339517 - RNA, 19 nt, Artificial Sequence
  Description of Artificial Sequence: Synthetic oligonucleotide
  Sense Strand Starting at position 263 of SEQ ID NO: 317794
cccuccugucgggaacaau

SEQ ID NO: 339518 - RNA, 19 nt, Artificial Sequence
  Description of Artificial Sequence: Synthetic oligonucleotide
  Antisense Strand to SEQ ID NO: 339517
auuguucccgacaggaggg

SEQ ID NO: 339519 - RNA, 19 nt, Artificial Sequence
  Description of Artificial Sequence: Synthetic oligonucleotide
  Sense Strand Starting at position 263 of SEQ ID NO: 317805
ggaacaauuugaggaacca

SEQ ID NO: 339520 - RNA, 19 nt, Artificial Sequence
  Description of Artificial Sequence: Synthetic oligonucleotide
  Antisense Strand to SEQ ID NO: 339519
ugguuccucaaauuguucc

SEQ ID NO: 339521 - RNA, 19 nt, Artificial Sequence
  Description of Artificial Sequence: Synthetic oligonucleotide
  Sense Strand Starting at position 263 of SEQ ID NO: 317940
gucccuggccaggaugaau

SEQ ID NO: 339522 - RNA, 19 nt, Artificial Sequence
  Description of Artificial Sequence: Synthetic oligonucleotide
  Antisense Strand to SEQ ID NO: 339521
auucauccuggccagggac

SEQ ID NO: 339523 - RNA, 19 nt, Artificial Sequence
  Description of Artificial Sequence: Synthetic oligonucleotide
  Sense Strand Starting at position 263 of SEQ ID NO: 318016
gugugauuuguguaauguu

SEQ ID NO: 339524 - RNA, 19 nt, Artificial Sequence
  Description of Artificial Sequence: Synthetic oligonucleotide
  Antisense Strand to SEQ ID NO: 339523
aacauuacacaaaucacac

SEQ ID NO: 339525 - RNA, 19 nt, Artificial Sequence
  Description of Artificial Sequence: Synthetic oligonucleotide
  Sense Strand Starting at position 263 of SEQ ID NO: 318211
aaaugcaggcuuugacaga

SEQ ID NO: 339526 - RNA, 19 nt, Artificial Sequence
  Description of Artificial Sequence: Synthetic oligonucleotide
  Antisense Strand to SEQ ID NO: 339525
ucugucaaagccugcauuu

SEQ ID NO: 339527 - RNA, 19 nt, Artificial Sequence
  Description of Artificial Sequence: Synthetic oligonucleotide
  Sense Strand Starting at position 263 of SEQ ID NO: 318341
uggcuauaaaucgagggua

SEQ ID NO: 339528 - RNA, 19 nt, Artificial Sequence
  Description of Artificial Sequence: Synthetic oligonucleotide
  Antisense Strand to SEQ ID NO: 339527
uacccucgauuuauagcca

SEQ ID NO: 339529 - RNA, 19 nt, Artificial Sequence
  Description of Artificial Sequence: Synthetic oligonucleotide
  Sense Strand Starting at position 263 of SEQ ID NO: 318344
cuauaaaucgaggguaucu

SEQ ID NO: 339530 - RNA, 19 nt, Artificial Sequence
  Description of Artificial Sequence: Synthetic oligonucleotide
  Antisense Strand to SEQ ID NO: 339529
agauacccucgauuuauag

SEQ ID NO: 339531 - RNA, 19 nt, Artificial Sequence
  Description of Artificial Sequence: Synthetic oligonucleotide
  Sense Strand Starting at position 263 of SEQ ID NO: 318349
aaucgaggguaucuuugau

SEQ ID NO: 339532 - RNA, 19 nt, Artificial Sequence
  Description of Artificial Sequence: Synthetic oligonucleotide
  Antisense Strand to SEQ ID NO: 339531
aucaaagauacccucgauu

SEQ ID NO: 339533 - RNA, 19 nt, Artificial Sequence
  Description of Artificial Sequence: Synthetic oligonucleotide
  Sense Strand Starting at position 263 of SEQ ID NO: 318378
ggcauuucugcugaucugu

SEQ ID NO: 339534 - RNA, 19 nt, Artificial Sequence
  Description of Artificial Sequence: Synthetic oligonucleotide
  Antisense Strand to SEQ ID NO: 339533
acagaucagcagaaaugcc

SEQ ID NO: 339535 - RNA, 19 nt, Artificial Sequence
  Description of Artificial Sequence: Synthetic oligonucleotide
  Sense Strand Starting at position 263 of SEQ ID NO: 318443
gugucuuaucaagugugcu

SEQ ID NO: 339536 - RNA, 19 nt, Artificial Sequence
  Description of Artificial Sequence: Synthetic oligonucleotide
  Antisense Strand to SEQ ID NO: 339535
agcacacuugauaagacac

SEQ ID NO: 339537 - RNA, 19 nt, Artificial Sequence
  Description of Artificial Sequence: Synthetic oligonucleotide
  Sense Strand Starting at position 263 of SEQ ID NO: 318581
agauguagauuuggagaga

SEQ ID NO: 339538 - RNA, 19 nt, Artificial Sequence
  Description of Artificial Sequence: Synthetic oligonucleotide
  Antisense Strand to SEQ ID NO: 339537
ucucuccaaaucuacaucu

SEQ ID NO: 339539 - RNA, 19 nt, Artificial Sequence
  Description of Artificial Sequence: Synthetic oligonucleotide
  Sense Strand Starting at position 263 of SEQ ID NO: 318582
gauguagauuuggagagau

SEQ ID NO: 339540 - RNA, 19 nt, Artificial Sequence
  Description of Artificial Sequence: Synthetic oligonucleotide
  Antisense Strand to SEQ ID NO: 339539
aucucuccaaaucuacauc

SEQ ID NO: 339541 - RNA, 19 nt, Artificial Sequence
  Description of Artificial Sequence: Synthetic oligonucleotide
  Sense Strand Starting at position 263 of SEQ ID NO: 318691
caaagugguccuuggacca

SEQ ID NO: 339542 - RNA, 19 nt, Artificial Sequence
  Description of Artificial Sequence: Synthetic oligonucleotide
  Antisense Strand to SEQ ID NO: 339541
ugguccaaggaccacuuug

SEQ ID NO: 339543 - RNA, 19 nt, Artificial Sequence
  Description of Artificial Sequence: Synthetic oligonucleotide
  Sense Strand Starting at position 263 of SEQ ID NO: 318714
cagguaaguucccugggaa

SEQ ID NO: 339544 - RNA, 19 nt, Artificial Sequence
  Description of Artificial Sequence: Synthetic oligonucleotide
  Antisense Strand to SEQ ID NO: 339543
uucccagggaacuuaccug

SEQ ID NO: 339545 - RNA, 19 nt, Artificial Sequence
  Description of Artificial Sequence: Synthetic oligonucleotide
  Sense Strand Starting at position 263 of SEQ ID NO: 318715
agguaaguucccugggaac

SEQ ID NO: 339546 - RNA, 19 nt, Artificial Sequence
  Description of Artificial Sequence: Synthetic oligonucleotide
  Antisense Strand to SEQ ID NO: 339545
guucccagggaacuuaccu

SEQ ID NO: 339547 - RNA, 19 nt, Artificial Sequence
  Description of Artificial Sequence: Synthetic oligonucleotide
  Sense Strand Starting at position 263 of SEQ ID NO: 318717
guaaguucccugggaacuu

SEQ ID NO: 339548 - RNA, 19 nt, Artificial Sequence
  Description of Artificial Sequence: Synthetic oligonucleotide
  Antisense Strand to SEQ ID NO: 339547
aaguucccagggaacuuac

SEQ ID NO: 339549 - RNA, 19 nt, Artificial Sequence
  Description of Artificial Sequence: Synthetic oligonucleotide
  Sense Strand Starting at position 263 of SEQ ID NO: 318804
ggaagcuguguuugaacaa

SEQ ID NO: 339550 - RNA, 19 nt, Artificial Sequence
  Description of Artificial Sequence: Synthetic oligonucleotide
  Antisense Strand to SEQ ID NO: 339549
uuguucaaacacagcuucc

SEQ ID NO: 339551 - RNA, 19 nt, Artificial Sequence
  Description of Artificial Sequence: Synthetic oligonucleotide
  Sense Strand Starting at position 263 of SEQ ID NO: 318834
gacacugaugcaugcugaa

SEQ ID NO: 339552 - RNA, 19 nt, Artificial Sequence
  Description of Artificial Sequence: Synthetic oligonucleotide
  Antisense Strand to SEQ ID NO: 339551
uucagcaugcaucaguguc

SEQ ID NO: 339553 - RNA, 19 nt, Artificial Sequence
  Description of Artificial Sequence: Synthetic oligonucleotide
  Sense Strand Starting at position 263 of SEQ ID NO: 318926
agacucaagcauuaugcau

SEQ ID NO: 339554 - RNA, 19 nt, Artificial Sequence
  Description of Artificial Sequence: Synthetic oligonucleotide
  Antisense Strand to SEQ ID NO: 339553
augcauaaugcuugagucu

SEQ ID NO: 339555 - RNA, 19 nt, Artificial Sequence
  Description of Artificial Sequence: Synthetic oligonucleotide
  Sense Strand Starting at position 263 of SEQ ID NO: 319085
gugcauguaccauauauua

SEQ ID NO: 339556 - RNA, 19 nt, Artificial Sequence
  Description of Artificial Sequence: Synthetic oligonucleotide
  Antisense Strand to SEQ ID NO: 339555
uaauauaugguacaugcac

SEQ ID NO: 339557 - RNA, 19 nt, Artificial Sequence
  Description of Artificial Sequence: Synthetic oligonucleotide
  Sense Strand Starting at position 263 of SEQ ID NO: 319103
acauaauaccuuugguaag

SEQ ID NO: 339558 - RNA, 19 nt, Artificial Sequence
  Description of Artificial Sequence: Synthetic oligonucleotide
  Antisense Strand to SEQ ID NO: 339557
cuuaccaaagguauuaugu

SEQ ID NO: 339559 - RNA, 19 nt, Artificial Sequence
  Description of Artificial Sequence: Synthetic oligonucleotide
  Sense Strand Starting at position 263 of SEQ ID NO: 319171
augacauaaguguaugcuu

SEQ ID NO: 339560 - RNA, 19 nt, Artificial Sequence
  Description of Artificial Sequence: Synthetic oligonucleotide
  Antisense Strand to SEQ ID NO: 339559
aagcauacacuuaugucau

SEQ ID NO: 339561 - RNA, 19 nt, Artificial Sequence
  Description of Artificial Sequence: Synthetic oligonucleotide
  Sense Strand Starting at position 264 of SEQ ID NO: 315237
uuuacagguguuugauuau

SEQ ID NO: 339562 - RNA, 19 nt, Artificial Sequence
  Description of Artificial Sequence: Synthetic oligonucleotide
  Antisense Strand to SEQ ID NO: 339561
auaaucaaacaccuguaaa

SEQ ID NO: 339563 - RNA, 19 nt, Artificial Sequence
  Description of Artificial Sequence: Synthetic oligonucleotide
  Sense Strand Starting at position 264 of SEQ ID NO: 315240
acagguguuugauuauccu

SEQ ID NO: 339564 - RNA, 19 nt, Artificial Sequence
  Description of Artificial Sequence: Synthetic oligonucleotide
  Antisense Strand to SEQ ID NO: 339563
aggauaaucaaacaccugu

SEQ ID NO: 339565 - RNA, 19 nt, Artificial Sequence
  Description of Artificial Sequence: Synthetic oligonucleotide
  Sense Strand Starting at position 264 of SEQ ID NO: 315243
gguguuugauuauccuuaa

SEQ ID NO: 339566 - RNA, 19 nt, Artificial Sequence
  Description of Artificial Sequence: Synthetic oligonucleotide
  Antisense Strand to SEQ ID NO: 339565
uuaaggauaaucaaacacc

SEQ ID NO: 339567 - RNA, 19 nt, Artificial Sequence
  Description of Artificial Sequence: Synthetic oligonucleotide
  Sense Strand Starting at position 264 of SEQ ID NO: 315361
agcucuacacuccaguuau

SEQ ID NO: 339568 - RNA, 19 nt, Artificial Sequence
  Description of Artificial Sequence: Synthetic oligonucleotide
  Antisense Strand to SEQ ID NO: 339567
auaacuggaguguagagcu

SEQ ID NO: 339569 - RNA, 19 nt, Artificial Sequence
  Description of Artificial Sequence: Synthetic oligonucleotide
  Sense Strand Starting at position 264 of SEQ ID NO: 315374
aguuauacugcuugaacaa

SEQ ID NO: 339570 - RNA, 19 nt, Artificial Sequence
  Description of Artificial Sequence: Synthetic oligonucleotide
  Antisense Strand to SEQ ID NO: 339569
uuguucaagcaguauaacu

SEQ ID NO: 339571 - RNA, 19 nt, Artificial Sequence
  Description of Artificial Sequence: Synthetic oligonucleotide
  Sense Strand Starting at position 264 of SEQ ID NO: 315375
guuauacugcuugaacaaa

SEQ ID NO: 339572 - RNA, 19 nt, Artificial Sequence
  Description of Artificial Sequence: Synthetic oligonucleotide
  Antisense Strand to SEQ ID NO: 339571
uuuguucaagcaguauaac

SEQ ID NO: 339573 - RNA, 19 nt, Artificial Sequence
  Description of Artificial Sequence: Synthetic oligonucleotide
  Sense Strand Starting at position 264 of SEQ ID NO: 315427
uggaaauaguaacugguua

SEQ ID NO: 339574 - RNA, 19 nt, Artificial Sequence
  Description of Artificial Sequence: Synthetic oligonucleotide
  Antisense Strand to SEQ ID NO: 339573
uaaccaguuacuauuucca

SEQ ID NO: 339575 - RNA, 19 nt, Artificial Sequence
  Description of Artificial Sequence: Synthetic oligonucleotide
  Sense Strand Starting at position 264 of SEQ ID NO: 315589
ucaccugaguccuucugaa

SEQ ID NO: 339576 - RNA, 19 nt, Artificial Sequence
  Description of Artificial Sequence: Synthetic oligonucleotide
  Antisense Strand to SEQ ID NO: 339575
uucagaaggacucagguga

SEQ ID NO: 339577 - RNA, 19 nt, Artificial Sequence
  Description of Artificial Sequence: Synthetic oligonucleotide
  Sense Strand Starting at position 264 of SEQ ID NO: 315602
ucugaauaaugccugaaac

SEQ ID NO: 339578 - RNA, 19 nt, Artificial Sequence
  Description of Artificial Sequence: Synthetic oligonucleotide
  Antisense Strand to SEQ ID NO: 339577
guuucaggcauuauucaga

SEQ ID NO: 339579 - RNA, 19 nt, Artificial Sequence
  Description of Artificial Sequence: Synthetic oligonucleotide
  Sense Strand Starting at position 264 of SEQ ID NO: 315603
cugaauaaugccugaaaca

SEQ ID NO: 339580 - RNA, 19 nt, Artificial Sequence
  Description of Artificial Sequence: Synthetic oligonucleotide
  Antisense Strand to SEQ ID NO: 339579
uguuucaggcauuauucag

SEQ ID NO: 339581 - RNA, 19 nt, Artificial Sequence
  Description of Artificial Sequence: Synthetic oligonucleotide
  Sense Strand Starting at position 264 of SEQ ID NO: 315639
gacgauuacugagcaaugu

SEQ ID NO: 339582 - RNA, 19 nt, Artificial Sequence
  Description of Artificial Sequence: Synthetic oligonucleotide
  Antisense Strand to SEQ ID NO: 339581
acauugcucaguaaucguc

SEQ ID NO: 339583 - RNA, 19 nt, Artificial Sequence
  Description of Artificial Sequence: Synthetic oligonucleotide
  Sense Strand Starting at position 264 of SEQ ID NO: 315640
acgauuacugagcaauguu

SEQ ID NO: 339584 - RNA, 19 nt, Artificial Sequence
  Description of Artificial Sequence: Synthetic oligonucleotide
  Antisense Strand to SEQ ID NO: 339583
aacauugcucaguaaucgu

SEQ ID NO: 339585 - RNA, 19 nt, Artificial Sequence
  Description of Artificial Sequence: Synthetic oligonucleotide
  Sense Strand Starting at position 264 of SEQ ID NO: 315690
agucacuuccuuuggaagu

SEQ ID NO: 339586 - RNA, 19 nt, Artificial Sequence
  Description of Artificial Sequence: Synthetic oligonucleotide
  Antisense Strand to SEQ ID NO: 339585
acuuccaaaggaagugacu

SEQ ID NO: 339587 - RNA, 19 nt, Artificial Sequence
  Description of Artificial Sequence: Synthetic oligonucleotide
  Sense Strand Starting at position 264 of SEQ ID NO: 315720
gaggccauaugguuaacau

SEQ ID NO: 339588 - RNA, 19 nt, Artificial Sequence
  Description of Artificial Sequence: Synthetic oligonucleotide
  Antisense Strand to SEQ ID NO: 339587
auguuaaccauauggccuc

SEQ ID NO: 339589 - RNA, 19 nt, Artificial Sequence
  Description of Artificial Sequence: Synthetic oligonucleotide
  Sense Strand Starting at position 264 of SEQ ID NO: 315721
aggccauaugguuaacaug

SEQ ID NO: 339590 - RNA, 19 nt, Artificial Sequence
  Description of Artificial Sequence: Synthetic oligonucleotide
  Antisense Strand to SEQ ID NO: 339589
cauguuaaccauauggccu

SEQ ID NO: 339591 - RNA, 19 nt, Artificial Sequence
  Description of Artificial Sequence: Synthetic oligonucleotide
  Sense Strand Starting at position 264 of SEQ ID NO: 315728
augguuaacaugugggaac

SEQ ID NO: 339592 - RNA, 19 nt, Artificial Sequence
  Description of Artificial Sequence: Synthetic oligonucleotide
  Antisense Strand to SEQ ID NO: 339591
guucccacauguuaaccau

SEQ ID NO: 339593 - RNA, 19 nt, Artificial Sequence
  Description of Artificial Sequence: Synthetic oligonucleotide
  Sense Strand Starting at position 264 of SEQ ID NO: 315730
gguuaacaugugggaacaa

SEQ ID NO: 339594 - RNA, 19 nt, Artificial Sequence
  Description of Artificial Sequence: Synthetic oligonucleotide
  Antisense Strand to SEQ ID NO: 339593
uuguucccacauguuaacc

SEQ ID NO: 339595 - RNA, 19 nt, Artificial Sequence
  Description of Artificial Sequence: Synthetic oligonucleotide
  Sense Strand Starting at position 264 of SEQ ID NO: 316816
cccagcuuuccaggacgaa

SEQ ID NO: 339596 - RNA, 19 nt, Artificial Sequence
  Description of Artificial Sequence: Synthetic oligonucleotide
  Antisense Strand to SEQ ID NO: 339595
uucguccuggaaagcuggg

SEQ ID NO: 339597 - RNA, 19 nt, Artificial Sequence
  Description of Artificial Sequence: Synthetic oligonucleotide
  Sense Strand Starting at position 264 of SEQ ID NO: 316819
agcuuuccaggacgaagaa

SEQ ID NO: 339598 - RNA, 19 nt, Artificial Sequence
  Description of Artificial Sequence: Synthetic oligonucleotide
  Antisense Strand to SEQ ID NO: 339597
uucuucguccuggaaagcu

SEQ ID NO: 339599 - RNA, 19 nt, Artificial Sequence
  Description of Artificial Sequence: Synthetic oligonucleotide
  Sense Strand Starting at position 264 of SEQ ID NO: 317414
guggaaaucuggcugaccu

SEQ ID NO: 339600 - RNA, 19 nt, Artificial Sequence
  Description of Artificial Sequence: Synthetic oligonucleotide
  Antisense Strand to SEQ ID NO: 339599
aggucagccagauuuccac

SEQ ID NO: 339601 - RNA, 19 nt, Artificial Sequence
  Description of Artificial Sequence: Synthetic oligonucleotide
  Sense Strand Starting at position 264 of SEQ ID NO: 317415
uggaaaucuggcugaccuu

SEQ ID NO: 339602 - RNA, 19 nt, Artificial Sequence
  Description of Artificial Sequence: Synthetic oligonucleotide
  Antisense Strand to SEQ ID NO: 339601
aaggucagccagauuucca

SEQ ID NO: 339603 - RNA, 19 nt, Artificial Sequence
  Description of Artificial Sequence: Synthetic oligonucleotide
  Sense Strand Starting at position 264 of SEQ ID NO: 317648
cucugagauuuguauuaau

SEQ ID NO: 339604 - RNA, 19 nt, Artificial Sequence
  Description of Artificial Sequence: Synthetic oligonucleotide
  Antisense Strand to SEQ ID NO: 339603
auuaauacaaaucucagag

SEQ ID NO: 339605 - RNA, 19 nt, Artificial Sequence
  Description of Artificial Sequence: Synthetic oligonucleotide
  Sense Strand Starting at position 264 of SEQ ID NO: 317709
acugaugugucuucccaag

SEQ ID NO: 339606 - RNA, 19 nt, Artificial Sequence
  Description of Artificial Sequence: Synthetic oligonucleotide
  Antisense Strand to SEQ ID NO: 339605
cuugggaagacacaucagu

SEQ ID NO: 339607 - RNA, 19 nt, Artificial Sequence
  Description of Artificial Sequence: Synthetic oligonucleotide
  Sense Strand Starting at position 264 of SEQ ID NO: 317711
ugaugugucuucccaagau

SEQ ID NO: 339608 - RNA, 19 nt, Artificial Sequence
  Description of Artificial Sequence: Synthetic oligonucleotide
  Antisense Strand to SEQ ID NO: 339607
aucuugggaagacacauca

SEQ ID NO: 339609 - RNA, 19 nt, Artificial Sequence
  Description of Artificial Sequence: Synthetic oligonucleotide
  Sense Strand Starting at position 264 of SEQ ID NO: 317715
gugucuucccaagaugaaa

SEQ ID NO: 339610 - RNA, 19 nt, Artificial Sequence
  Description of Artificial Sequence: Synthetic oligonucleotide
  Antisense Strand to SEQ ID NO: 339609
uuucaucuugggaagacac

SEQ ID NO: 339611 - RNA, 19 nt, Artificial Sequence
  Description of Artificial Sequence: Synthetic oligonucleotide
  Sense Strand Starting at position 264 of SEQ ID NO: 317726
agaugaaagugccugguaa

SEQ ID NO: 339612 - RNA, 19 nt, Artificial Sequence
  Description of Artificial Sequence: Synthetic oligonucleotide
  Antisense Strand to SEQ ID NO: 339611
uuaccaggcacuuucaucu

SEQ ID NO: 339613 - RNA, 19 nt, Artificial Sequence
  Description of Artificial Sequence: Synthetic oligonucleotide
  Sense Strand Starting at position 264 of SEQ ID NO: 317727
gaugaaagugccugguaag

SEQ ID NO: 339614 - RNA, 19 nt, Artificial Sequence
  Description of Artificial Sequence: Synthetic oligonucleotide
  Antisense Strand to SEQ ID NO: 339613
cuuaccaggcacuuucauc

SEQ ID NO: 339615 - RNA, 19 nt, Artificial Sequence
  Description of Artificial Sequence: Synthetic oligonucleotide
  Sense Strand Starting at position 264 of SEQ ID NO: 317764
gaaggucaugagcauguaa

SEQ ID NO: 339616 - RNA, 19 nt, Artificial Sequence
  Description of Artificial Sequence: Synthetic oligonucleotide
  Antisense Strand to SEQ ID NO: 339615
uuacaugcucaugaccuuc

SEQ ID NO: 339617 - RNA, 19 nt, Artificial Sequence
  Description of Artificial Sequence: Synthetic oligonucleotide
  Sense Strand Starting at position 264 of SEQ ID NO: 317924
uguauauagcccuagauag

SEQ ID NO: 339618 - RNA, 19 nt, Artificial Sequence
  Description of Artificial Sequence: Synthetic oligonucleotide
  Antisense Strand to SEQ ID NO: 339617
cuaucuagggcuauauaca

SEQ ID NO: 339619 - RNA, 19 nt, Artificial Sequence
  Description of Artificial Sequence: Synthetic oligonucleotide
  Sense Strand Starting at position 264 of SEQ ID NO: 317936
uagauagucuugucaagau

SEQ ID NO: 339620 - RNA, 19 nt, Artificial Sequence
  Description of Artificial Sequence: Synthetic oligonucleotide
  Antisense Strand to SEQ ID NO: 339619
aucuugacaagacuaucua

SEQ ID NO: 339621 - RNA, 19 nt, Artificial Sequence
  Description of Artificial Sequence: Synthetic oligonucleotide
  Sense Strand Starting at position 264 of SEQ ID NO: 318004
auucuagaauggcuuuauu

SEQ ID NO: 339622 - RNA, 19 nt, Artificial Sequence
  Description of Artificial Sequence: Synthetic oligonucleotide
  Antisense Strand to SEQ ID NO: 339621
aauaaagccauucuagaau

SEQ ID NO: 339623 - RNA, 19 nt, Artificial Sequence
  Description of Artificial Sequence: Synthetic oligonucleotide
  Sense Strand Starting at position 264 of SEQ ID NO: 318007
cuagaauggcuuuauucga

SEQ ID NO: 339624 - RNA, 19 nt, Artificial Sequence
  Description of Artificial Sequence: Synthetic oligonucleotide
  Antisense Strand to SEQ ID NO: 339623
ucgaauaaagccauucuag

SEQ ID NO: 339625 - RNA, 19 nt, Artificial Sequence
  Description of Artificial Sequence: Synthetic oligonucleotide
  Sense Strand Starting at position 264 of SEQ ID NO: 318199
uugaaaucauguucgugag

SEQ ID NO: 339626 - RNA, 19 nt, Artificial Sequence
  Description of Artificial Sequence: Synthetic oligonucleotide
  Antisense Strand to SEQ ID NO: 339625
cucacgaacaugauuucaa

SEQ ID NO: 339627 - RNA, 19 nt, Artificial Sequence
  Description of Artificial Sequence: Synthetic oligonucleotide
  Sense Strand Starting at position 264 of SEQ ID NO: 318200
ugaaaucauguucgugaga

SEQ ID NO: 339628 - RNA, 19 nt, Artificial Sequence
  Description of Artificial Sequence: Synthetic oligonucleotide
  Antisense Strand to SEQ ID NO: 339627
ucucacgaacaugauuuca

SEQ ID NO: 339629 - RNA, 19 nt, Artificial Sequence
  Description of Artificial Sequence: Synthetic oligonucleotide
  Sense Strand Starting at position 264 of SEQ ID NO: 318201
gaaaucauguucgugagaa

SEQ ID NO: 339630 - RNA, 19 nt, Artificial Sequence
  Description of Artificial Sequence: Synthetic oligonucleotide
  Antisense Strand to SEQ ID NO: 339629
uucucacgaacaugauuuc

SEQ ID NO: 339631 - RNA, 19 nt, Artificial Sequence
  Description of Artificial Sequence: Synthetic oligonucleotide
  Sense Strand Starting at position 264 of SEQ ID NO: 318231
uguguugagagucagacuu

SEQ ID NO: 339632 - RNA, 19 nt, Artificial Sequence
  Description of Artificial Sequence: Synthetic oligonucleotide
  Antisense Strand to SEQ ID NO: 339631
aagucugacucucaacaca

SEQ ID NO: 339633 - RNA, 19 nt, Artificial Sequence
  Description of Artificial Sequence: Synthetic oligonucleotide
  Sense Strand Starting at position 264 of SEQ ID NO: 318271
agugcuuaaucauuguaaa

SEQ ID NO: 339634 - RNA, 19 nt, Artificial Sequence
  Description of Artificial Sequence: Synthetic oligonucleotide
  Antisense Strand to SEQ ID NO: 339633
uuuacaaugauuaagcacu

SEQ ID NO: 339635 - RNA, 19 nt, Artificial Sequence
  Description of Artificial Sequence: Synthetic oligonucleotide
  Sense Strand Starting at position 264 of SEQ ID NO: 318297
ggagguugcguucaacaua

SEQ ID NO: 339636 - RNA, 19 nt, Artificial Sequence
  Description of Artificial Sequence: Synthetic oligonucleotide
  Antisense Strand to SEQ ID NO: 339635
uauguugaacgcaaccucc

SEQ ID NO: 339637 - RNA, 19 nt, Artificial Sequence
  Description of Artificial Sequence: Synthetic oligonucleotide
  Sense Strand Starting at position 264 of SEQ ID NO: 319100
agcuuauguguugugcuaa

SEQ ID NO: 339638 - RNA, 19 nt, Artificial Sequence
  Description of Artificial Sequence: Synthetic oligonucleotide
  Antisense Strand to SEQ ID NO: 339637
uuagcacaacacauaagcu

SEQ ID NO: 339639 - RNA, 19 nt, Artificial Sequence
  Description of Artificial Sequence: Synthetic oligonucleotide
  Sense Strand Starting at position 264 of SEQ ID NO: 319122
acgauauauuaucugccaa

SEQ ID NO: 339640 - RNA, 19 nt, Artificial Sequence
  Description of Artificial Sequence: Synthetic oligonucleotide
  Antisense Strand to SEQ ID NO: 339639
uuggcagauaauauaucgu

SEQ ID NO: 339641 - RNA, 19 nt, Artificial Sequence
  Description of Artificial Sequence: Synthetic oligonucleotide
  Sense Strand Starting at position 265 of SEQ ID NO: 315419
gccugucuccuccaacaga

SEQ ID NO: 339642 - RNA, 19 nt, Artificial Sequence
  Description of Artificial Sequence: Synthetic oligonucleotide
  Antisense Strand to SEQ ID NO: 339641
ucuguuggaggagacaggc

SEQ ID NO: 339643 - RNA, 19 nt, Artificial Sequence
  Description of Artificial Sequence: Synthetic oligonucleotide
  Sense Strand Starting at position 265 of SEQ ID NO: 315487
acacucaaucuuugcgaau

SEQ ID NO: 339644 - RNA, 19 nt, Artificial Sequence
  Description of Artificial Sequence: Synthetic oligonucleotide
  Antisense Strand to SEQ ID NO: 339643
auucgcaaagauugagugu

SEQ ID NO: 339645 - RNA, 19 nt, Artificial Sequence
  Description of Artificial Sequence: Synthetic oligonucleotide
  Sense Strand Starting at position 265 of SEQ ID NO: 315519
aguagaaggcuuuaugacu

SEQ ID NO: 339646 - RNA, 19 nt, Artificial Sequence
  Description of Artificial Sequence: Synthetic oligonucleotide
  Antisense Strand to SEQ ID NO: 339645
agucauaaagccuucuacu

SEQ ID NO: 339647 - RNA, 19 nt, Artificial Sequence
  Description of Artificial Sequence: Synthetic oligonucleotide
  Sense Strand Starting at position 265 of SEQ ID NO: 315524
aaggcuuuaugacugagga

SEQ ID NO: 339648 - RNA, 19 nt, Artificial Sequence
  Description of Artificial Sequence: Synthetic oligonucleotide
  Antisense Strand to SEQ ID NO: 339647
uccucagucauaaagccuu

SEQ ID NO: 339649 - RNA, 19 nt, Artificial Sequence
  Description of Artificial Sequence: Synthetic oligonucleotide
  Sense Strand Starting at position 265 of SEQ ID NO: 315525
aggcuuuaugacugaggau

SEQ ID NO: 339650 - RNA, 19 nt, Artificial Sequence
  Description of Artificial Sequence: Synthetic oligonucleotide
  Antisense Strand to SEQ ID NO: 339649
auccucagucauaaagccu

SEQ ID NO: 339651 - RNA, 19 nt, Artificial Sequence
  Description of Artificial Sequence: Synthetic oligonucleotide
  Sense Strand Starting at position 265 of SEQ ID NO: 315526
ggcuuuaugacugaggauu

SEQ ID NO: 339652 - RNA, 19 nt, Artificial Sequence
  Description of Artificial Sequence: Synthetic oligonucleotide
  Antisense Strand to SEQ ID NO: 339651
aauccucagucauaaagcc

SEQ ID NO: 339653 - RNA, 19 nt, Artificial Sequence
  Description of Artificial Sequence: Synthetic oligonucleotide
  Sense Strand Starting at position 265 of SEQ ID NO: 315528
cuuuaugacugaggauuug

SEQ ID NO: 339654 - RNA, 19 nt, Artificial Sequence
  Description of Artificial Sequence: Synthetic oligonucleotide
  Antisense Strand to SEQ ID NO: 339653
caaauccucagucauaaag

SEQ ID NO: 339655 - RNA, 19 nt, Artificial Sequence
  Description of Artificial Sequence: Synthetic oligonucleotide
  Sense Strand Starting at position 265 of SEQ ID NO: 315604
gcaaguaggaaugguaaau

SEQ ID NO: 339656 - RNA, 19 nt, Artificial Sequence
  Description of Artificial Sequence: Synthetic oligonucleotide
  Antisense Strand to SEQ ID NO: 339655
auuuaccauuccuacuugc

SEQ ID NO: 339657 - RNA, 19 nt, Artificial Sequence
  Description of Artificial Sequence: Synthetic oligonucleotide
  Sense Strand Starting at position 265 of SEQ ID NO: 315798
agaggccuucccugaacaa

SEQ ID NO: 339658 - RNA, 19 nt, Artificial Sequence
  Description of Artificial Sequence: Synthetic oligonucleotide
  Antisense Strand to SEQ ID NO: 339657
uuguucagggaaggccucu

SEQ ID NO: 339659 - RNA, 19 nt, Artificial Sequence
  Description of Artificial Sequence: Synthetic oligonucleotide
  Sense Strand Starting at position 265 of SEQ ID NO: 315940
uggcuuaauuuccaaguga

SEQ ID NO: 339660 - RNA, 19 nt, Artificial Sequence
  Description of Artificial Sequence: Synthetic oligonucleotide
  Antisense Strand to SEQ ID NO: 339659
ucacuuggaaauuaagcca

SEQ ID NO: 339661 - RNA, 19 nt, Artificial Sequence
  Description of Artificial Sequence: Synthetic oligonucleotide
  Sense Strand Starting at position 265 of SEQ ID NO: 315970
caguuauugugaccagaac

SEQ ID NO: 339662 - RNA, 19 nt, Artificial Sequence
  Description of Artificial Sequence: Synthetic oligonucleotide
  Antisense Strand to SEQ ID NO: 339661
guucuggucacaauaacug

SEQ ID NO: 339663 - RNA, 19 nt, Artificial Sequence
  Description of Artificial Sequence: Synthetic oligonucleotide
  Sense Strand Starting at position 265 of SEQ ID NO: 316232
uuaaguaauuucgaggaac

SEQ ID NO: 339664 - RNA, 19 nt, Artificial Sequence
  Description of Artificial Sequence: Synthetic oligonucleotide
  Antisense Strand to SEQ ID NO: 339663
guuccucgaaauuacuuaa

SEQ ID NO: 339665 - RNA, 19 nt, Artificial Sequence
  Description of Artificial Sequence: Synthetic oligonucleotide
  Sense Strand Starting at position 265 of SEQ ID NO: 316331
agugguuuacuuugagagg

SEQ ID NO: 339666 - RNA, 19 nt, Artificial Sequence
  Description of Artificial Sequence: Synthetic oligonucleotide
  Antisense Strand to SEQ ID NO: 339665
ccucucaaaguaaaccacu

SEQ ID NO: 339667 - RNA, 19 nt, Artificial Sequence
  Description of Artificial Sequence: Synthetic oligonucleotide
  Sense Strand Starting at position 265 of SEQ ID NO: 316526
ucagccacgcgauauuaua

SEQ ID NO: 339668 - RNA, 19 nt, Artificial Sequence
  Description of Artificial Sequence: Synthetic oligonucleotide
  Antisense Strand to SEQ ID NO: 339667
uauaauaucgcguggcuga

SEQ ID NO: 339669 - RNA, 19 nt, Artificial Sequence
  Description of Artificial Sequence: Synthetic oligonucleotide
  Sense Strand Starting at position 265 of SEQ ID NO: 316533
cgcgauauuauaggcagau

SEQ ID NO: 339670 - RNA, 19 nt, Artificial Sequence
  Description of Artificial Sequence: Synthetic oligonucleotide
  Antisense Strand to SEQ ID NO: 339669
aucugccuauaauaucgcg

SEQ ID NO: 339671 - RNA, 19 nt, Artificial Sequence
  Description of Artificial Sequence: Synthetic oligonucleotide
  Sense Strand Starting at position 265 of SEQ ID NO: 316534
gcgauauuauaggcagaug

SEQ ID NO: 339672 - RNA, 19 nt, Artificial Sequence
  Description of Artificial Sequence: Synthetic oligonucleotide
  Antisense Strand to SEQ ID NO: 339671
caucugccuauaauaucgc

SEQ ID NO: 339673 - RNA, 19 nt, Artificial Sequence
  Description of Artificial Sequence: Synthetic oligonucleotide
  Sense Strand Starting at position 265 of SEQ ID NO: 316535
cgauauuauaggcagaugu

SEQ ID NO: 339674 - RNA, 19 nt, Artificial Sequence
  Description of Artificial Sequence: Synthetic oligonucleotide
  Antisense Strand to SEQ ID NO: 339673
acaucugccuauaauaucg

SEQ ID NO: 339675 - RNA, 19 nt, Artificial Sequence
  Description of Artificial Sequence: Synthetic oligonucleotide
  Sense Strand Starting at position 265 of SEQ ID NO: 316537
auauuauaggcagaugugu

SEQ ID NO: 339676 - RNA, 19 nt, Artificial Sequence
  Description of Artificial Sequence: Synthetic oligonucleotide
  Antisense Strand to SEQ ID NO: 339675
acacaucugccuauaauau

SEQ ID NO: 339677 - RNA, 19 nt, Artificial Sequence
  Description of Artificial Sequence: Synthetic oligonucleotide
  Sense Strand Starting at position 265 of SEQ ID NO: 316562
gggugacuuucucuugucu

SEQ ID NO: 339678 - RNA, 19 nt, Artificial Sequence
  Description of Artificial Sequence: Synthetic oligonucleotide
  Antisense Strand to SEQ ID NO: 339677
agacaagagaaagucaccc

SEQ ID NO: 339679 - RNA, 19 nt, Artificial Sequence
  Description of Artificial Sequence: Synthetic oligonucleotide
  Sense Strand Starting at position 265 of SEQ ID NO: 317352
cgcgucuguccuuugcuua

SEQ ID NO: 339680 - RNA, 19 nt, Artificial Sequence
  Description of Artificial Sequence: Synthetic oligonucleotide
  Antisense Strand to SEQ ID NO: 339679
uaagcaaaggacagacgcg

SEQ ID NO: 339681 - RNA, 19 nt, Artificial Sequence
  Description of Artificial Sequence: Synthetic oligonucleotide
  Sense Strand Starting at position 265 of SEQ ID NO: 317401
uuugucccucaauguuaca

SEQ ID NO: 339682 - RNA, 19 nt, Artificial Sequence
  Description of Artificial Sequence: Synthetic oligonucleotide
  Antisense Strand to SEQ ID NO: 339681
uguaacauugagggacaaa

SEQ ID NO: 339683 - RNA, 19 nt, Artificial Sequence
  Description of Artificial Sequence: Synthetic oligonucleotide
  Sense Strand Starting at position 265 of SEQ ID NO: 317523
uguugaggauucccguuua

SEQ ID NO: 339684 - RNA, 19 nt, Artificial Sequence
  Description of Artificial Sequence: Synthetic oligonucleotide
  Antisense Strand to SEQ ID NO: 339683
uaaacgggaauccucaaca

SEQ ID NO: 339685 - RNA, 19 nt, Artificial Sequence
  Description of Artificial Sequence: Synthetic oligonucleotide
  Sense Strand Starting at position 265 of SEQ ID NO: 317661
cuauguuacguugaucaca

SEQ ID NO: 339686 - RNA, 19 nt, Artificial Sequence
  Description of Artificial Sequence: Synthetic oligonucleotide
  Antisense Strand to SEQ ID NO: 339685
ugugaucaacguaacauag

SEQ ID NO: 339687 - RNA, 19 nt, Artificial Sequence
  Description of Artificial Sequence: Synthetic oligonucleotide
  Sense Strand Starting at position 265 of SEQ ID NO: 317701
gcgcacuauuacucacuaa

SEQ ID NO: 339688 - RNA, 19 nt, Artificial Sequence
  Description of Artificial Sequence: Synthetic oligonucleotide
  Antisense Strand to SEQ ID NO: 339687
uuagugaguaauagugcgc

SEQ ID NO: 339689 - RNA, 19 nt, Artificial Sequence
  Description of Artificial Sequence: Synthetic oligonucleotide
  Sense Strand Starting at position 265 of SEQ ID NO: 317896
aguuacuccucagauauuu

SEQ ID NO: 339690 - RNA, 19 nt, Artificial Sequence
  Description of Artificial Sequence: Synthetic oligonucleotide
  Antisense Strand to SEQ ID NO: 339689
aaauaucugaggaguaacu

SEQ ID NO: 339691 - RNA, 19 nt, Artificial Sequence
  Description of Artificial Sequence: Synthetic oligonucleotide
  Sense Strand Starting at position 265 of SEQ ID NO: 317905
ucagauauuugguggaaug

SEQ ID NO: 339692 - RNA, 19 nt, Artificial Sequence
  Description of Artificial Sequence: Synthetic oligonucleotide
  Antisense Strand to SEQ ID NO: 339691
cauuccaccaaauaucuga

SEQ ID NO: 339693 - RNA, 19 nt, Artificial Sequence
  Description of Artificial Sequence: Synthetic oligonucleotide
  Sense Strand Starting at position 265 of SEQ ID NO: 317915
gguggaaugugccucaauu

SEQ ID NO: 339694 - RNA, 19 nt, Artificial Sequence
  Description of Artificial Sequence: Synthetic oligonucleotide
  Antisense Strand to SEQ ID NO: 339693
aauugaggcacauuccacc

SEQ ID NO: 339695 - RNA, 19 nt, Artificial Sequence
  Description of Artificial Sequence: Synthetic oligonucleotide
  Sense Strand Starting at position 265 of SEQ ID NO: 318007
ggcuguucucaucacauag

SEQ ID NO: 339696 - RNA, 19 nt, Artificial Sequence
  Description of Artificial Sequence: Synthetic oligonucleotide
  Antisense Strand to SEQ ID NO: 339695
cuaugugaugagaacagcc

SEQ ID NO: 339697 - RNA, 19 nt, Artificial Sequence
  Description of Artificial Sequence: Synthetic oligonucleotide
  Sense Strand Starting at position 265 of SEQ ID NO: 318059
ugaucauguuaaccuugau

SEQ ID NO: 339698 - RNA, 19 nt, Artificial Sequence
  Description of Artificial Sequence: Synthetic oligonucleotide
  Antisense Strand to SEQ ID NO: 339697
aucaagguuaacaugauca

SEQ ID NO: 339699 - RNA, 19 nt, Artificial Sequence
  Description of Artificial Sequence: Synthetic oligonucleotide
  Sense Strand Starting at position 265 of SEQ ID NO: 318073
uugauuaccucucuaaggu

SEQ ID NO: 339700 - RNA, 19 nt, Artificial Sequence
  Description of Artificial Sequence: Synthetic oligonucleotide
  Antisense Strand to SEQ ID NO: 339699
accuuagagagguaaucaa

SEQ ID NO: 339701 - RNA, 19 nt, Artificial Sequence
  Description of Artificial Sequence: Synthetic oligonucleotide
  Sense Strand Starting at position 265 of SEQ ID NO: 318074
ugauuaccucucuaaggua

SEQ ID NO: 339702 - RNA, 19 nt, Artificial Sequence
  Description of Artificial Sequence: Synthetic oligonucleotide
  Antisense Strand to SEQ ID NO: 339701
uaccuuagagagguaauca

SEQ ID NO: 339703 - RNA, 19 nt, Artificial Sequence
  Description of Artificial Sequence: Synthetic oligonucleotide
  Sense Strand Starting at position 265 of SEQ ID NO: 318280
agcuauuuauaucaguaug

SEQ ID NO: 339704 - RNA, 19 nt, Artificial Sequence
  Description of Artificial Sequence: Synthetic oligonucleotide
  Antisense Strand to SEQ ID NO: 339703
cauacugauauaaauagcu

SEQ ID NO: 339705 - RNA, 19 nt, Artificial Sequence
  Description of Artificial Sequence: Synthetic oligonucleotide
  Sense Strand Starting at position 265 of SEQ ID NO: 318368
agcuuuguuaauugggaga

SEQ ID NO: 339706 - RNA, 19 nt, Artificial Sequence
  Description of Artificial Sequence: Synthetic oligonucleotide
  Antisense Strand to SEQ ID NO: 339705
ucucccaauuaacaaagcu

SEQ ID NO: 339707 - RNA, 19 nt, Artificial Sequence
  Description of Artificial Sequence: Synthetic oligonucleotide
  Sense Strand Starting at position 265 of SEQ ID NO: 318371
uuuguuaauugggagauuu

SEQ ID NO: 339708 - RNA, 19 nt, Artificial Sequence
  Description of Artificial Sequence: Synthetic oligonucleotide
  Antisense Strand to SEQ ID NO: 339707
aaaucucccaauuaacaaa

SEQ ID NO: 339709 - RNA, 19 nt, Artificial Sequence
  Description of Artificial Sequence: Synthetic oligonucleotide
  Sense Strand Starting at position 265 of SEQ ID NO: 318819
gaaucauaaguacagugua

SEQ ID NO: 339710 - RNA, 19 nt, Artificial Sequence
  Description of Artificial Sequence: Synthetic oligonucleotide
  Antisense Strand to SEQ ID NO: 339709
uacacuguacuuaugauuc

SEQ ID NO: 339711 - RNA, 19 nt, Artificial Sequence
  Description of Artificial Sequence: Synthetic oligonucleotide
  Sense Strand Starting at position 265 of SEQ ID NO: 318888
ggcagagcuuuacccauau

SEQ ID NO: 339712 - RNA, 19 nt, Artificial Sequence
  Description of Artificial Sequence: Synthetic oligonucleotide
  Antisense Strand to SEQ ID NO: 339711
auauggguaaagcucugcc

SEQ ID NO: 339713 - RNA, 19 nt, Artificial Sequence
  Description of Artificial Sequence: Synthetic oligonucleotide
  Sense Strand Starting at position 265 of SEQ ID NO: 319073
gacauuguugaaugaaguu

SEQ ID NO: 339714 - RNA, 19 nt, Artificial Sequence
  Description of Artificial Sequence: Synthetic oligonucleotide
  Antisense Strand to SEQ ID NO: 339713
aacuucauucaacaauguc

SEQ ID NO: 339715 - RNA, 19 nt, Artificial Sequence
  Description of Artificial Sequence: Synthetic oligonucleotide
  Sense Strand Starting at position 265 of SEQ ID NO: 319088
aguuguauuuguuucucau

SEQ ID NO: 339716 - RNA, 19 nt, Artificial Sequence
  Description of Artificial Sequence: Synthetic oligonucleotide
  Antisense Strand to SEQ ID NO: 339715
augagaaacaaauacaacu

SEQ ID NO: 339717 - RNA, 19 nt, Artificial Sequence
  Description of Artificial Sequence: Synthetic oligonucleotide
  Sense Strand Starting at position 265 of SEQ ID NO: 319201
gggccaauaugauuacucu

SEQ ID NO: 339718 - RNA, 19 nt, Artificial Sequence
  Description of Artificial Sequence: Synthetic oligonucleotide
  Antisense Strand to SEQ ID NO: 339717
agaguaaucauauuggccc

SEQ ID NO: 339719 - RNA, 19 nt, Artificial Sequence
  Description of Artificial Sequence: Synthetic oligonucleotide
  Sense Strand Starting at position 265 of SEQ ID NO: 319202
ggccaauaugauuacucua

SEQ ID NO: 339720 - RNA, 19 nt, Artificial Sequence
  Description of Artificial Sequence: Synthetic oligonucleotide
  Antisense Strand to SEQ ID NO: 339719
uagaguaaucauauuggcc

SEQ ID NO: 339721 - RNA, 19 nt, Artificial Sequence
  Description of Artificial Sequence: Synthetic oligonucleotide
  Sense Strand Starting at position 266 of SEQ ID NO: 315519
gaaguaucaggcuggacau

SEQ ID NO: 339722 - RNA, 19 nt, Artificial Sequence
  Description of Artificial Sequence: Synthetic oligonucleotide
  Antisense Strand to SEQ ID NO: 339721
auguccagccugauacuuc

SEQ ID NO: 339723 - RNA, 19 nt, Artificial Sequence
  Description of Artificial Sequence: Synthetic oligonucleotide
  Sense Strand Starting at position 266 of SEQ ID NO: 316035
gcccguaguccugcuacuu

SEQ ID NO: 339724 - RNA, 19 nt, Artificial Sequence
  Description of Artificial Sequence: Synthetic oligonucleotide
  Antisense Strand to SEQ ID NO: 339723
aaguagcaggacuacgggc

SEQ ID NO: 339725 - RNA, 19 nt, Artificial Sequence
  Description of Artificial Sequence: Synthetic oligonucleotide
  Sense Strand Starting at position 266 of SEQ ID NO: 316210
acaagagccucugaaauuc

SEQ ID NO: 339726 - RNA, 19 nt, Artificial Sequence
  Description of Artificial Sequence: Synthetic oligonucleotide
  Antisense Strand to SEQ ID NO: 339725
gaauuucagaggcucuugu

SEQ ID NO: 339727 - RNA, 19 nt, Artificial Sequence
  Description of Artificial Sequence: Synthetic oligonucleotide
  Sense Strand Starting at position 266 of SEQ ID NO: 316385
gcuugagcccaguauauga

SEQ ID NO: 339728 - RNA, 19 nt, Artificial Sequence
  Description of Artificial Sequence: Synthetic oligonucleotide
  Antisense Strand to SEQ ID NO: 339727
ucauauacugggcucaagc

SEQ ID NO: 339729 - RNA, 19 nt, Artificial Sequence
  Description of Artificial Sequence: Synthetic oligonucleotide
  Sense Strand Starting at position 266 of SEQ ID NO: 316834
uuccuuguguauuuguaca

SEQ ID NO: 339730 - RNA, 19 nt, Artificial Sequence
  Description of Artificial Sequence: Synthetic oligonucleotide
  Antisense Strand to SEQ ID NO: 339729
uguacaaauacacaaggaa

SEQ ID NO: 339731 - RNA, 19 nt, Artificial Sequence
  Description of Artificial Sequence: Synthetic oligonucleotide
  Sense Strand Starting at position 266 of SEQ ID NO: 316836
ccuuguguauuuguacauu

SEQ ID NO: 339732 - RNA, 19 nt, Artificial Sequence
  Description of Artificial Sequence: Synthetic oligonucleotide
  Antisense Strand to SEQ ID NO: 339731
aauguacaaauacacaagg

SEQ ID NO: 339733 - RNA, 19 nt, Artificial Sequence
  Description of Artificial Sequence: Synthetic oligonucleotide
  Sense Strand Starting at position 266 of SEQ ID NO: 316845
uuuguacauuucucgaguu

SEQ ID NO: 339734 - RNA, 19 nt, Artificial Sequence
  Description of Artificial Sequence: Synthetic oligonucleotide
  Antisense Strand to SEQ ID NO: 339733
aacucgagaaauguacaaa

SEQ ID NO: 339735 - RNA, 19 nt, Artificial Sequence
  Description of Artificial Sequence: Synthetic oligonucleotide
  Sense Strand Starting at position 266 of SEQ ID NO: 316846
uuguacauuucucgaguuu

SEQ ID NO: 339736 - RNA, 19 nt, Artificial Sequence
  Description of Artificial Sequence: Synthetic oligonucleotide
  Antisense Strand to SEQ ID NO: 339735
aaacucgagaaauguacaa

SEQ ID NO: 339737 - RNA, 19 nt, Artificial Sequence
  Description of Artificial Sequence: Synthetic oligonucleotide
  Sense Strand Starting at position 266 of SEQ ID NO: 317414
caaugaugcccuugugaag

SEQ ID NO: 339738 - RNA, 19 nt, Artificial Sequence
  Description of Artificial Sequence: Synthetic oligonucleotide
  Antisense Strand to SEQ ID NO: 339737
cuucacaagggcaucauug

SEQ ID NO: 339739 - RNA, 19 nt, Artificial Sequence
  Description of Artificial Sequence: Synthetic oligonucleotide
  Sense Strand Starting at position 266 of SEQ ID NO: 317420
ugcccuugugaaggaaagu

SEQ ID NO: 339740 - RNA, 19 nt, Artificial Sequence
  Description of Artificial Sequence: Synthetic oligonucleotide
  Antisense Strand to SEQ ID NO: 339739
acuuuccuucacaagggca

SEQ ID NO: 339741 - RNA, 19 nt, Artificial Sequence
  Description of Artificial Sequence: Synthetic oligonucleotide
  Sense Strand Starting at position 266 of SEQ ID NO: 317421
gcccuugugaaggaaaguu

SEQ ID NO: 339742 - RNA, 19 nt, Artificial Sequence
  Description of Artificial Sequence: Synthetic oligonucleotide
  Antisense Strand to SEQ ID NO: 339741
aacuuuccuucacaagggc

SEQ ID NO: 339743 - RNA, 19 nt, Artificial Sequence
  Description of Artificial Sequence: Synthetic oligonucleotide
  Sense Strand Starting at position 266 of SEQ ID NO: 317454
ggaugccacuucgaagaaa

SEQ ID NO: 339744 - RNA, 19 nt, Artificial Sequence
  Description of Artificial Sequence: Synthetic oligonucleotide
  Antisense Strand to SEQ ID NO: 339743
uuucuucgaaguggcaucc

SEQ ID NO: 339745 - RNA, 19 nt, Artificial Sequence
  Description of Artificial Sequence: Synthetic oligonucleotide
  Sense Strand Starting at position 266 of SEQ ID NO: 317661
agccauuuguaacaagcaa

SEQ ID NO: 339746 - RNA, 19 nt, Artificial Sequence
  Description of Artificial Sequence: Synthetic oligonucleotide
  Antisense Strand to SEQ ID NO: 339745
uugcuuguuacaaauggcu

SEQ ID NO: 339747 - RNA, 19 nt, Artificial Sequence
  Description of Artificial Sequence: Synthetic oligonucleotide
  Sense Strand Starting at position 266 of SEQ ID NO: 317668
uguaacaagcaauguuaca

SEQ ID NO: 339748 - RNA, 19 nt, Artificial Sequence
  Description of Artificial Sequence: Synthetic oligonucleotide
  Antisense Strand to SEQ ID NO: 339747
uguaacauugcuuguuaca

SEQ ID NO: 339749 - RNA, 19 nt, Artificial Sequence
  Description of Artificial Sequence: Synthetic oligonucleotide
  Sense Strand Starting at position 266 of SEQ ID NO: 317700
ugcccaguaguguagaaau

SEQ ID NO: 339750 - RNA, 19 nt, Artificial Sequence
  Description of Artificial Sequence: Synthetic oligonucleotide
  Antisense Strand to SEQ ID NO: 339749
auuucuacacuacugggca

SEQ ID NO: 339751 - RNA, 19 nt, Artificial Sequence
  Description of Artificial Sequence: Synthetic oligonucleotide
  Sense Strand Starting at position 266 of SEQ ID NO: 317702
cccaguaguguagaaauaa

SEQ ID NO: 339752 - RNA, 19 nt, Artificial Sequence
  Description of Artificial Sequence: Synthetic oligonucleotide
  Antisense Strand to SEQ ID NO: 339751
uuauuucuacacuacuggg

SEQ ID NO: 339753 - RNA, 19 nt, Artificial Sequence
  Description of Artificial Sequence: Synthetic oligonucleotide
  Sense Strand Starting at position 266 of SEQ ID NO: 317965
uugagagcauuccgaccaa

SEQ ID NO: 339754 - RNA, 19 nt, Artificial Sequence
  Description of Artificial Sequence: Synthetic oligonucleotide
  Antisense Strand to SEQ ID NO: 339753
uuggucggaaugcucucaa

SEQ ID NO: 339755 - RNA, 19 nt, Artificial Sequence
  Description of Artificial Sequence: Synthetic oligonucleotide
  Sense Strand Starting at position 266 of SEQ ID NO: 317969
gagcauuccgaccaacaug

SEQ ID NO: 339756 - RNA, 19 nt, Artificial Sequence
  Description of Artificial Sequence: Synthetic oligonucleotide
  Antisense Strand to SEQ ID NO: 339755
cauguuggucggaaugcuc

SEQ ID NO: 339757 - RNA, 19 nt, Artificial Sequence
  Description of Artificial Sequence: Synthetic oligonucleotide
  Sense Strand Starting at position 266 of SEQ ID NO: 318213
aucagcaugcuuuaaggaa

SEQ ID NO: 339758 - RNA, 19 nt, Artificial Sequence
  Description of Artificial Sequence: Synthetic oligonucleotide
  Antisense Strand to SEQ ID NO: 339757
uuccuuaaagcaugcugau

SEQ ID NO: 339759 - RNA, 19 nt, Artificial Sequence
  Description of Artificial Sequence: Synthetic oligonucleotide
  Sense Strand Starting at position 266 of SEQ ID NO: 318242
gcagaauauugccacugcu

SEQ ID NO: 339760 - RNA, 19 nt, Artificial Sequence
  Description of Artificial Sequence: Synthetic oligonucleotide
  Antisense Strand to SEQ ID NO: 339759
agcaguggcaauauucugc

SEQ ID NO: 339761 - RNA, 19 nt, Artificial Sequence
  Description of Artificial Sequence: Synthetic oligonucleotide
  Sense Strand Starting at position 266 of SEQ ID NO: 318251
ugccacugcugaugaguau

SEQ ID NO: 339762 - RNA, 19 nt, Artificial Sequence
  Description of Artificial Sequence: Synthetic oligonucleotide
  Antisense Strand to SEQ ID NO: 339761
auacucaucagcaguggca

SEQ ID NO: 339763 - RNA, 19 nt, Artificial Sequence
  Description of Artificial Sequence: Synthetic oligonucleotide
  Sense Strand Starting at position 266 of SEQ ID NO: 318252
gccacugcugaugaguauu

SEQ ID NO: 339764 - RNA, 19 nt, Artificial Sequence
  Description of Artificial Sequence: Synthetic oligonucleotide
  Antisense Strand to SEQ ID NO: 339763
aauacucaucagcaguggc

SEQ ID NO: 339765 - RNA, 19 nt, Artificial Sequence
  Description of Artificial Sequence: Synthetic oligonucleotide
  Sense Strand Starting at position 266 of SEQ ID NO: 318420
auucuacuuggaggucuaa

SEQ ID NO: 339766 - RNA, 19 nt, Artificial Sequence
  Description of Artificial Sequence: Synthetic oligonucleotide
  Antisense Strand to SEQ ID NO: 339765
uuagaccuccaaguagaau

SEQ ID NO: 339767 - RNA, 19 nt, Artificial Sequence
  Description of Artificial Sequence: Synthetic oligonucleotide
  Sense Strand Starting at position 266 of SEQ ID NO: 318440
uuuaaaggccugugaugaa

SEQ ID NO: 339768 - RNA, 19 nt, Artificial Sequence
  Description of Artificial Sequence: Synthetic oligonucleotide
  Antisense Strand to SEQ ID NO: 339767
uucaucacaggccuuuaaa

SEQ ID NO: 339769 - RNA, 19 nt, Artificial Sequence
  Description of Artificial Sequence: Synthetic oligonucleotide
  Sense Strand Starting at position 266 of SEQ ID NO: 318450
ugugaugaaugucuaaacu

SEQ ID NO: 339770 - RNA, 19 nt, Artificial Sequence
  Description of Artificial Sequence: Synthetic oligonucleotide
  Antisense Strand to SEQ ID NO: 339769
aguuuagacauucaucaca

SEQ ID NO: 339771 - RNA, 19 nt, Artificial Sequence
  Description of Artificial Sequence: Synthetic oligonucleotide
  Sense Strand Starting at position 266 of SEQ ID NO: 318563
uacaguuuguuacuggaga

SEQ ID NO: 339772 - RNA, 19 nt, Artificial Sequence
  Description of Artificial Sequence: Synthetic oligonucleotide
  Antisense Strand to SEQ ID NO: 339771
ucuccaguaacaaacugua

SEQ ID NO: 339773 - RNA, 19 nt, Artificial Sequence
  Description of Artificial Sequence: Synthetic oligonucleotide
  Sense Strand Starting at position 266 of SEQ ID NO: 318564
acaguuuguuacuggagaa

SEQ ID NO: 339774 - RNA, 19 nt, Artificial Sequence
  Description of Artificial Sequence: Synthetic oligonucleotide
  Antisense Strand to SEQ ID NO: 339773
uucuccaguaacaaacugu

SEQ ID NO: 339775 - RNA, 19 nt, Artificial Sequence
  Description of Artificial Sequence: Synthetic oligonucleotide
  Sense Strand Starting at position 266 of SEQ ID NO: 318565
caguuuguuacuggagaag

SEQ ID NO: 339776 - RNA, 19 nt, Artificial Sequence
  Description of Artificial Sequence: Synthetic oligonucleotide
  Antisense Strand to SEQ ID NO: 339775
cuucuccaguaacaaacug

SEQ ID NO: 339777 - RNA, 19 nt, Artificial Sequence
  Description of Artificial Sequence: Synthetic oligonucleotide
  Sense Strand Starting at position 266 of SEQ ID NO: 318576
uggagaaguuucucugaaa

SEQ ID NO: 339778 - RNA, 19 nt, Artificial Sequence
  Description of Artificial Sequence: Synthetic oligonucleotide
  Antisense Strand to SEQ ID NO: 339777
uuucagagaaacuucucca

SEQ ID NO: 339779 - RNA, 19 nt, Artificial Sequence
  Description of Artificial Sequence: Synthetic oligonucleotide
  Sense Strand Starting at position 266 of SEQ ID NO: 318639
uuuaucaagugagaacuau

SEQ ID NO: 339780 - RNA, 19 nt, Artificial Sequence
  Description of Artificial Sequence: Synthetic oligonucleotide
  Antisense Strand to SEQ ID NO: 339779
auaguucucacuugauaaa

SEQ ID NO: 339781 - RNA, 19 nt, Artificial Sequence
  Description of Artificial Sequence: Synthetic oligonucleotide
  Sense Strand Starting at position 266 of SEQ ID NO: 318700
guauaauugcuagacuuaa

SEQ ID NO: 339782 - RNA, 19 nt, Artificial Sequence
  Description of Artificial Sequence: Synthetic oligonucleotide
  Antisense Strand to SEQ ID NO: 339781
uuaagucuagcaauuauac

SEQ ID NO: 339783 - RNA, 19 nt, Artificial Sequence
  Description of Artificial Sequence: Synthetic oligonucleotide
  Sense Strand Starting at position 266 of SEQ ID NO: 318738
uuuaacaugugucaagaaa

SEQ ID NO: 339784 - RNA, 19 nt, Artificial Sequence
  Description of Artificial Sequence: Synthetic oligonucleotide
  Antisense Strand to SEQ ID NO: 339783
uuucuugacacauguuaaa

SEQ ID NO: 339785 - RNA, 19 nt, Artificial Sequence
  Description of Artificial Sequence: Synthetic oligonucleotide
  Sense Strand Starting at position 266 of SEQ ID NO: 318801
uauagugacucuuagguac

SEQ ID NO: 339786 - RNA, 19 nt, Artificial Sequence
  Description of Artificial Sequence: Synthetic oligonucleotide
  Antisense Strand to SEQ ID NO: 339785
guaccuaagagucacuaua

SEQ ID NO: 339787 - RNA, 19 nt, Artificial Sequence
  Description of Artificial Sequence: Synthetic oligonucleotide
  Sense Strand Starting at position 267 of SEQ ID NO: 315821
uccucaguacuugaugagu

SEQ ID NO: 339788 - RNA, 19 nt, Artificial Sequence
  Description of Artificial Sequence: Synthetic oligonucleotide
  Antisense Strand to SEQ ID NO: 339787
acucaucaaguacugagga

SEQ ID NO: 339789 - RNA, 19 nt, Artificial Sequence
  Description of Artificial Sequence: Synthetic oligonucleotide
  Sense Strand Starting at position 267 of SEQ ID NO: 315834
augaguagcagucaaugaa

SEQ ID NO: 339790 - RNA, 19 nt, Artificial Sequence
  Description of Artificial Sequence: Synthetic oligonucleotide
  Antisense Strand to SEQ ID NO: 339789
uucauugacugcuacucau

SEQ ID NO: 339791 - RNA, 19 nt, Artificial Sequence
  Description of Artificial Sequence: Synthetic oligonucleotide
  Sense Strand Starting at position 267 of SEQ ID NO: 316000
auguuugaacuuugacaua

SEQ ID NO: 339792 - RNA, 19 nt, Artificial Sequence
  Description of Artificial Sequence: Synthetic oligonucleotide
  Antisense Strand to SEQ ID NO: 339791
uaugucaaaguucaaacau

SEQ ID NO: 339793 - RNA, 19 nt, Artificial Sequence
  Description of Artificial Sequence: Synthetic oligonucleotide
  Sense Strand Starting at position 267 of SEQ ID NO: 316192
gucuucuaaggagaugagu

SEQ ID NO: 339794 - RNA, 19 nt, Artificial Sequence
  Description of Artificial Sequence: Synthetic oligonucleotide
  Antisense Strand to SEQ ID NO: 339793
acucaucuccuuagaagac

SEQ ID NO: 339795 - RNA, 19 nt, Artificial Sequence
  Description of Artificial Sequence: Synthetic oligonucleotide
  Sense Strand Starting at position 267 of SEQ ID NO: 316194
cuucuaaggagaugaguau

SEQ ID NO: 339796 - RNA, 19 nt, Artificial Sequence
  Description of Artificial Sequence: Synthetic oligonucleotide
  Antisense Strand to SEQ ID NO: 339795
auacucaucuccuuagaag

SEQ ID NO: 339797 - RNA, 19 nt, Artificial Sequence
  Description of Artificial Sequence: Synthetic oligonucleotide
  Sense Strand Starting at position 267 of SEQ ID NO: 316201
ggagaugaguauuaaauuu

SEQ ID NO: 339798 - RNA, 19 nt, Artificial Sequence
  Description of Artificial Sequence: Synthetic oligonucleotide
  Antisense Strand to SEQ ID NO: 339797
aaauuuaauacucaucucc

SEQ ID NO: 339799 - RNA, 19 nt, Artificial Sequence
  Description of Artificial Sequence: Synthetic oligonucleotide
  Sense Strand Starting at position 267 of SEQ ID NO: 316410
ggugcuugagaauaucaua

SEQ ID NO: 339800 - RNA, 19 nt, Artificial Sequence
  Description of Artificial Sequence: Synthetic oligonucleotide
  Antisense Strand to SEQ ID NO: 339799
uaugauauucucaagcacc

SEQ ID NO: 339801 - RNA, 19 nt, Artificial Sequence
  Description of Artificial Sequence: Synthetic oligonucleotide
  Sense Strand Starting at position 267 of SEQ ID NO: 316574
guaugugucaaagacgaua

SEQ ID NO: 339802 - RNA, 19 nt, Artificial Sequence
  Description of Artificial Sequence: Synthetic oligonucleotide
  Antisense Strand to SEQ ID NO: 339801
uaucgucuuugacacauac

SEQ ID NO: 339803 - RNA, 19 nt, Artificial Sequence
  Description of Artificial Sequence: Synthetic oligonucleotide
  Sense Strand Starting at position 267 of SEQ ID NO: 316576
augugucaaagacgauaau

SEQ ID NO: 339804 - RNA, 19 nt, Artificial Sequence
  Description of Artificial Sequence: Synthetic oligonucleotide
  Antisense Strand to SEQ ID NO: 339803
auuaucgucuuugacacau

SEQ ID NO: 339805 - RNA, 19 nt, Artificial Sequence
  Description of Artificial Sequence: Synthetic oligonucleotide
  Sense Strand Starting at position 267 of SEQ ID NO: 316577
ugugucaaagacgauaauu

SEQ ID NO: 339806 - RNA, 19 nt, Artificial Sequence
  Description of Artificial Sequence: Synthetic oligonucleotide
  Antisense Strand to SEQ ID NO: 339805
aauuaucgucuuugacaca

SEQ ID NO: 339807 - RNA, 19 nt, Artificial Sequence
  Description of Artificial Sequence: Synthetic oligonucleotide
  Sense Strand Starting at position 267 of SEQ ID NO: 316856
acaguagaucuguaauauc

SEQ ID NO: 339808 - RNA, 19 nt, Artificial Sequence
  Description of Artificial Sequence: Synthetic oligonucleotide
  Antisense Strand to SEQ ID NO: 339807
gauauuacagaucuacugu

SEQ ID NO: 339809 - RNA, 19 nt, Artificial Sequence
  Description of Artificial Sequence: Synthetic oligonucleotide
  Sense Strand Starting at position 267 of SEQ ID NO: 317042
agcauaugacucgaguaua

SEQ ID NO: 339810 - RNA, 19 nt, Artificial Sequence
  Description of Artificial Sequence: Synthetic oligonucleotide
  Antisense Strand to SEQ ID NO: 339809
uauacucgagucauaugcu

SEQ ID NO: 339811 - RNA, 19 nt, Artificial Sequence
  Description of Artificial Sequence: Synthetic oligonucleotide
  Sense Strand Starting at position 267 of SEQ ID NO: 317045
auaugacucgaguauacuu

SEQ ID NO: 339812 - RNA, 19 nt, Artificial Sequence
  Description of Artificial Sequence: Synthetic oligonucleotide
  Antisense Strand to SEQ ID NO: 339811
aaguauacucgagucauau

SEQ ID NO: 339813 - RNA, 19 nt, Artificial Sequence
  Description of Artificial Sequence: Synthetic oligonucleotide
  Sense Strand Starting at position 267 of SEQ ID NO: 317199
ugaauagaaugcuuucucu

SEQ ID NO: 339814 - RNA, 19 nt, Artificial Sequence
  Description of Artificial Sequence: Synthetic oligonucleotide
  Antisense Strand to SEQ ID NO: 339813
agagaaagcauucuauuca

SEQ ID NO: 339815 - RNA, 19 nt, Artificial Sequence
  Description of Artificial Sequence: Synthetic oligonucleotide
  Sense Strand Starting at position 267 of SEQ ID NO: 317250
uacaaagaaguucguuaaa

SEQ ID NO: 339816 - RNA, 19 nt, Artificial Sequence
  Description of Artificial Sequence: Synthetic oligonucleotide
  Antisense Strand to SEQ ID NO: 339815
uuuaacgaacuucuuugua

SEQ ID NO: 339817 - RNA, 19 nt, Artificial Sequence
  Description of Artificial Sequence: Synthetic oligonucleotide
  Sense Strand Starting at position 267 of SEQ ID NO: 317389
gcuugaaauguagauacuu

SEQ ID NO: 339818 - RNA, 19 nt, Artificial Sequence
  Description of Artificial Sequence: Synthetic oligonucleotide
  Antisense Strand to SEQ ID NO: 339817
aaguaucuacauuucaagc

SEQ ID NO: 339819 - RNA, 19 nt, Artificial Sequence
  Description of Artificial Sequence: Synthetic oligonucleotide
  Sense Strand Starting at position 267 of SEQ ID NO: 317427
gguagauggaaacgaucuu

SEQ ID NO: 339820 - RNA, 19 nt, Artificial Sequence
  Description of Artificial Sequence: Synthetic oligonucleotide
  Antisense Strand to SEQ ID NO: 339819
aagaucguuuccaucuacc

SEQ ID NO: 339821 - RNA, 19 nt, Artificial Sequence
  Description of Artificial Sequence: Synthetic oligonucleotide
  Sense Strand Starting at position 267 of SEQ ID NO: 317565
uuucucuaacgauagcauu

SEQ ID NO: 339822 - RNA, 19 nt, Artificial Sequence
  Description of Artificial Sequence: Synthetic oligonucleotide
  Antisense Strand to SEQ ID NO: 339821
aaugcuaucguuagagaaa

SEQ ID NO: 339823 - RNA, 19 nt, Artificial Sequence
  Description of Artificial Sequence: Synthetic oligonucleotide
  Sense Strand Starting at position 267 of SEQ ID NO: 317601
gucaaauaagcagauaucu

SEQ ID NO: 339824 - RNA, 19 nt, Artificial Sequence
  Description of Artificial Sequence: Synthetic oligonucleotide
  Antisense Strand to SEQ ID NO: 339823
agauaucugcuuauuugac

SEQ ID NO: 339825 - RNA, 19 nt, Artificial Sequence
  Description of Artificial Sequence: Synthetic oligonucleotide
  Sense Strand Starting at position 267 of SEQ ID NO: 317609
agcagauaucuugaagcac

SEQ ID NO: 339826 - RNA, 19 nt, Artificial Sequence
  Description of Artificial Sequence: Synthetic oligonucleotide
  Antisense Strand to SEQ ID NO: 339825
gugcuucaagauaucugcu

SEQ ID NO: 339827 - RNA, 19 nt, Artificial Sequence
  Description of Artificial Sequence: Synthetic oligonucleotide
  Sense Strand Starting at position 267 of SEQ ID NO: 317764
augcuaaugguagaaaugu

SEQ ID NO: 339828 - RNA, 19 nt, Artificial Sequence
  Description of Artificial Sequence: Synthetic oligonucleotide
  Antisense Strand to SEQ ID NO: 339827
acauuucuaccauuagcau

SEQ ID NO: 339829 - RNA, 19 nt, Artificial Sequence
  Description of Artificial Sequence: Synthetic oligonucleotide
  Sense Strand Starting at position 267 of SEQ ID NO: 317772
gguagaaauguucagucug

SEQ ID NO: 339830 - RNA, 19 nt, Artificial Sequence
  Description of Artificial Sequence: Synthetic oligonucleotide
  Antisense Strand to SEQ ID NO: 339829
cagacugaacauuucuacc

SEQ ID NO: 339831 - RNA, 19 nt, Artificial Sequence
  Description of Artificial Sequence: Synthetic oligonucleotide
  Sense Strand Starting at position 267 of SEQ ID NO: 317841
uugaauauguugguugaga

SEQ ID NO: 339832 - RNA, 19 nt, Artificial Sequence
  Description of Artificial Sequence: Synthetic oligonucleotide
  Antisense Strand to SEQ ID NO: 339831
ucucaaccaacauauucaa

SEQ ID NO: 339833 - RNA, 19 nt, Artificial Sequence
  Description of Artificial Sequence: Synthetic oligonucleotide
  Sense Strand Starting at position 267 of SEQ ID NO: 317842
ugaauauguugguugagag

SEQ ID NO: 339834 - RNA, 19 nt, Artificial Sequence
  Description of Artificial Sequence: Synthetic oligonucleotide
  Antisense Strand to SEQ ID NO: 339833
cucucaaccaacauauuca

SEQ ID NO: 339835 - RNA, 19 nt, Artificial Sequence
  Description of Artificial Sequence: Synthetic oligonucleotide
  Sense Strand Starting at position 267 of SEQ ID NO: 317843
gaauauguugguugagagg

SEQ ID NO: 339836 - RNA, 19 nt, Artificial Sequence
  Description of Artificial Sequence: Synthetic oligonucleotide
  Antisense Strand to SEQ ID NO: 339835
ccucucaaccaacauauuc

SEQ ID NO: 339837 - RNA, 19 nt, Artificial Sequence
  Description of Artificial Sequence: Synthetic oligonucleotide
  Sense Strand Starting at position 267 of SEQ ID NO: 317921
caugguuaaugaucaagua

SEQ ID NO: 339838 - RNA, 19 nt, Artificial Sequence
  Description of Artificial Sequence: Synthetic oligonucleotide
  Antisense Strand to SEQ ID NO: 339837
uacuugaucauuaaccaug

SEQ ID NO: 339839 - RNA, 19 nt, Artificial Sequence
  Description of Artificial Sequence: Synthetic oligonucleotide
  Sense Strand Starting at position 267 of SEQ ID NO: 318135
aacaauggguuccugacau

SEQ ID NO: 339840 - RNA, 19 nt, Artificial Sequence
  Description of Artificial Sequence: Synthetic oligonucleotide
  Antisense Strand to SEQ ID NO: 339839
augucaggaacccauuguu

SEQ ID NO: 339841 - RNA, 19 nt, Artificial Sequence
  Description of Artificial Sequence: Synthetic oligonucleotide
  Sense Strand Starting at position 267 of SEQ ID NO: 318248
auguuaagucaucauuccu

SEQ ID NO: 339842 - RNA, 19 nt, Artificial Sequence
  Description of Artificial Sequence: Synthetic oligonucleotide
  Antisense Strand to SEQ ID NO: 339841
aggaaugaugacuuaacau

SEQ ID NO: 339843 - RNA, 19 nt, Artificial Sequence
  Description of Artificial Sequence: Synthetic oligonucleotide
  Sense Strand Starting at position 267 of SEQ ID NO: 318314
gguuguaagagauggaauu

SEQ ID NO: 339844 - RNA, 19 nt, Artificial Sequence
  Description of Artificial Sequence: Synthetic oligonucleotide
  Antisense Strand to SEQ ID NO: 339843
aauuccaucucuuacaacc

SEQ ID NO: 339845 - RNA, 19 nt, Artificial Sequence
  Description of Artificial Sequence: Synthetic oligonucleotide
  Sense Strand Starting at position 267 of SEQ ID NO: 318315
guuguaagagauggaauug

SEQ ID NO: 339846 - RNA, 19 nt, Artificial Sequence
  Description of Artificial Sequence: Synthetic oligonucleotide
  Antisense Strand to SEQ ID NO: 339845
caauuccaucucuuacaac

SEQ ID NO: 339847 - RNA, 19 nt, Artificial Sequence
  Description of Artificial Sequence: Synthetic oligonucleotide
  Sense Strand Starting at position 267 of SEQ ID NO: 318326
uggaauugcggcuagaaug

SEQ ID NO: 339848 - RNA, 19 nt, Artificial Sequence
  Description of Artificial Sequence: Synthetic oligonucleotide
  Antisense Strand to SEQ ID NO: 339847
cauucuagccgcaauucca

SEQ ID NO: 339849 - RNA, 19 nt, Artificial Sequence
  Description of Artificial Sequence: Synthetic oligonucleotide
  Sense Strand Starting at position 267 of SEQ ID NO: 318414
cuaagaauugcagguuaac

SEQ ID NO: 339850 - RNA, 19 nt, Artificial Sequence
  Description of Artificial Sequence: Synthetic oligonucleotide
  Antisense Strand to SEQ ID NO: 339849
guuaaccugcaauucuuag

SEQ ID NO: 339851 - RNA, 19 nt, Artificial Sequence
  Description of Artificial Sequence: Synthetic oligonucleotide
  Sense Strand Starting at position 267 of SEQ ID NO: 318549
uaauuuacuugggaaguga

SEQ ID NO: 339852 - RNA, 19 nt, Artificial Sequence
  Description of Artificial Sequence: Synthetic oligonucleotide
  Antisense Strand to SEQ ID NO: 339851
ucacuucccaaguaaauua

SEQ ID NO: 339853 - RNA, 19 nt, Artificial Sequence
  Description of Artificial Sequence: Synthetic oligonucleotide
  Sense Strand Starting at position 267 of SEQ ID NO: 318663
gaaguccaguuccuauaga

SEQ ID NO: 339854 - RNA, 19 nt, Artificial Sequence
  Description of Artificial Sequence: Synthetic oligonucleotide
  Antisense Strand to SEQ ID NO: 339853
ucuauaggaacuggacuuc

SEQ ID NO: 339855 - RNA, 19 nt, Artificial Sequence
  Description of Artificial Sequence: Synthetic oligonucleotide
  Sense Strand Starting at position 267 of SEQ ID NO: 318688
gccuaagagucauccaaga

SEQ ID NO: 339856 - RNA, 19 nt, Artificial Sequence
  Description of Artificial Sequence: Synthetic oligonucleotide
  Antisense Strand to SEQ ID NO: 339855
ucuuggaugacucuuaggc

SEQ ID NO: 339857 - RNA, 19 nt, Artificial Sequence
  Description of Artificial Sequence: Synthetic oligonucleotide
  Sense Strand Starting at position 267 of SEQ ID NO: 318699
auccaagagucaucccuga

SEQ ID NO: 339858 - RNA, 19 nt, Artificial Sequence
  Description of Artificial Sequence: Synthetic oligonucleotide
  Antisense Strand to SEQ ID NO: 339857
ucagggaugacucuuggau

SEQ ID NO: 339859 - RNA, 19 nt, Artificial Sequence
  Description of Artificial Sequence: Synthetic oligonucleotide
  Sense Strand Starting at position 267 of SEQ ID NO: 318703
aagagucaucccugaguua

SEQ ID NO: 339860 - RNA, 19 nt, Artificial Sequence
  Description of Artificial Sequence: Synthetic oligonucleotide
  Antisense Strand to SEQ ID NO: 339859
uaacucagggaugacucuu

SEQ ID NO: 339861 - RNA, 19 nt, Artificial Sequence
  Description of Artificial Sequence: Synthetic oligonucleotide
  Sense Strand Starting at position 267 of SEQ ID NO: 318704
agagucaucccugaguuau

SEQ ID NO: 339862 - RNA, 19 nt, Artificial Sequence
  Description of Artificial Sequence: Synthetic oligonucleotide
  Antisense Strand to SEQ ID NO: 339861
auaacucagggaugacucu

SEQ ID NO: 339863 - RNA, 19 nt, Artificial Sequence
  Description of Artificial Sequence: Synthetic oligonucleotide
  Sense Strand Starting at position 267 of SEQ ID NO: 318880
uggagugaugaaggcaaga

SEQ ID NO: 339864 - RNA, 19 nt, Artificial Sequence
  Description of Artificial Sequence: Synthetic oligonucleotide
  Antisense Strand to SEQ ID NO: 339863
ucuugccuucaucacucca

SEQ ID NO: 339865 - RNA, 19 nt, Artificial Sequence
  Description of Artificial Sequence: Synthetic oligonucleotide
  Sense Strand Starting at position 267 of SEQ ID NO: 319161
ugacauauccuauguccac

SEQ ID NO: 339866 - RNA, 19 nt, Artificial Sequence
  Description of Artificial Sequence: Synthetic oligonucleotide
  Antisense Strand to SEQ ID NO: 339865
guggacauaggauauguca

SEQ ID NO: 339867 - RNA, 19 nt, Artificial Sequence
  Description of Artificial Sequence: Synthetic oligonucleotide
  Sense Strand Starting at position 268 of SEQ ID NO: 315326
ugauguuagugucuuaaua

SEQ ID NO: 339868 - RNA, 19 nt, Artificial Sequence
  Description of Artificial Sequence: Synthetic oligonucleotide
  Antisense Strand to SEQ ID NO: 339867
uauuaagacacuaacauca

SEQ ID NO: 339869 - RNA, 19 nt, Artificial Sequence
  Description of Artificial Sequence: Synthetic oligonucleotide
  Sense Strand Starting at position 268 of SEQ ID NO: 315351
guugcuugacauuaccauu

SEQ ID NO: 339870 - RNA, 19 nt, Artificial Sequence
  Description of Artificial Sequence: Synthetic oligonucleotide
  Antisense Strand to SEQ ID NO: 339869
aaugguaaugucaagcaac

SEQ ID NO: 339871 - RNA, 19 nt, Artificial Sequence
  Description of Artificial Sequence: Synthetic oligonucleotide
  Sense Strand Starting at position 268 of SEQ ID NO: 315416
cuuccauauguagguugaa

SEQ ID NO: 339872 - RNA, 19 nt, Artificial Sequence
  Description of Artificial Sequence: Synthetic oligonucleotide
  Antisense Strand to SEQ ID NO: 339871
uucaaccuacauauggaag

SEQ ID NO: 339873 - RNA, 19 nt, Artificial Sequence
  Description of Artificial Sequence: Synthetic oligonucleotide
  Sense Strand Starting at position 268 of SEQ ID NO: 315417
uuccauauguagguugaau

SEQ ID NO: 339874 - RNA, 19 nt, Artificial Sequence
  Description of Artificial Sequence: Synthetic oligonucleotide
  Antisense Strand to SEQ ID NO: 339873
auucaaccuacauauggaa

SEQ ID NO: 339875 - RNA, 19 nt, Artificial Sequence
  Description of Artificial Sequence: Synthetic oligonucleotide
  Sense Strand Starting at position 268 of SEQ ID NO: 315419
ccauauguagguugaauca

SEQ ID NO: 339876 - RNA, 19 nt, Artificial Sequence
  Description of Artificial Sequence: Synthetic oligonucleotide
  Antisense Strand to SEQ ID NO: 339875
ugauucaaccuacauaugg

SEQ ID NO: 339877 - RNA, 19 nt, Artificial Sequence
  Description of Artificial Sequence: Synthetic oligonucleotide
  Sense Strand Starting at position 268 of SEQ ID NO: 315444
accgacacugucuaacuau

SEQ ID NO: 339878 - RNA, 19 nt, Artificial Sequence
  Description of Artificial Sequence: Synthetic oligonucleotide
  Antisense Strand to SEQ ID NO: 339877
auaguuagacagugucggu

SEQ ID NO: 339879 - RNA, 19 nt, Artificial Sequence
  Description of Artificial Sequence: Synthetic oligonucleotide
  Sense Strand Starting at position 268 of SEQ ID NO: 315485
uuuguagguuuacucuaau

SEQ ID NO: 339880 - RNA, 19 nt, Artificial Sequence
  Description of Artificial Sequence: Synthetic oligonucleotide
  Antisense Strand to SEQ ID NO: 339879
auuagaguaaaccuacaaa

SEQ ID NO: 339881 - RNA, 19 nt, Artificial Sequence
  Description of Artificial Sequence: Synthetic oligonucleotide
  Sense Strand Starting at position 268 of SEQ ID NO: 315488
guagguuuacucuaauaua

SEQ ID NO: 339882 - RNA, 19 nt, Artificial Sequence
  Description of Artificial Sequence: Synthetic oligonucleotide
  Antisense Strand to SEQ ID NO: 339881
uauauuagaguaaaccuac

SEQ ID NO: 339883 - RNA, 19 nt, Artificial Sequence
  Description of Artificial Sequence: Synthetic oligonucleotide
  Sense Strand Starting at position 268 of SEQ ID NO: 315566
aagucuuuggccugguuua

SEQ ID NO: 339884 - RNA, 19 nt, Artificial Sequence
  Description of Artificial Sequence: Synthetic oligonucleotide
  Antisense Strand to SEQ ID NO: 339883
uaaaccaggccaaagacuu

SEQ ID NO: 339885 - RNA, 19 nt, Artificial Sequence
  Description of Artificial Sequence: Synthetic oligonucleotide
  Sense Strand Starting at position 268 of SEQ ID NO: 315591
uuccuucuaguaugaagua

SEQ ID NO: 339886 - RNA, 19 nt, Artificial Sequence
  Description of Artificial Sequence: Synthetic oligonucleotide
  Antisense Strand to SEQ ID NO: 339885
uacuucauacuagaaggaa

SEQ ID NO: 339887 - RNA, 19 nt, Artificial Sequence
  Description of Artificial Sequence: Synthetic oligonucleotide
  Sense Strand Starting at position 268 of SEQ ID NO: 315596
ucuaguaugaaguaauggu

SEQ ID NO: 339888 - RNA, 19 nt, Artificial Sequence
  Description of Artificial Sequence: Synthetic oligonucleotide
  Antisense Strand to SEQ ID NO: 339887
accauuacuucauacuaga

SEQ ID NO: 339889 - RNA, 19 nt, Artificial Sequence
  Description of Artificial Sequence: Synthetic oligonucleotide
  Sense Strand Starting at position 268 of SEQ ID NO: 315600
guaugaaguaauggucauu

SEQ ID NO: 339890 - RNA, 19 nt, Artificial Sequence
  Description of Artificial Sequence: Synthetic oligonucleotide
  Antisense Strand to SEQ ID NO: 339889
aaugaccauuacuucauac

SEQ ID NO: 339891 - RNA, 19 nt, Artificial Sequence
  Description of Artificial Sequence: Synthetic oligonucleotide
  Sense Strand Starting at position 268 of SEQ ID NO: 315951
agauuagcauucuuagaua

SEQ ID NO: 339892 - RNA, 19 nt, Artificial Sequence
  Description of Artificial Sequence: Synthetic oligonucleotide
  Antisense Strand to SEQ ID NO: 339891
uaucuaagaaugcuaaucu

SEQ ID NO: 339893 - RNA, 19 nt, Artificial Sequence
  Description of Artificial Sequence: Synthetic oligonucleotide
  Sense Strand Starting at position 268 of SEQ ID NO: 316099
acaagauaaccuugagcua

SEQ ID NO: 339894 - RNA, 19 nt, Artificial Sequence
  Description of Artificial Sequence: Synthetic oligonucleotide
  Antisense Strand to SEQ ID NO: 339893
uagcucaagguuaucuugu

SEQ ID NO: 339895 - RNA, 19 nt, Artificial Sequence
  Description of Artificial Sequence: Synthetic oligonucleotide
  Sense Strand Starting at position 268 of SEQ ID NO: 316102
agauaaccuugagcuaaca

SEQ ID NO: 339896 - RNA, 19 nt, Artificial Sequence
  Description of Artificial Sequence: Synthetic oligonucleotide
  Antisense Strand to SEQ ID NO: 339895
uguuagcucaagguuaucu

SEQ ID NO: 339897 - RNA, 19 nt, Artificial Sequence
  Description of Artificial Sequence: Synthetic oligonucleotide
  Sense Strand Starting at position 268 of SEQ ID NO: 316112
gagcuaacaugguuaugag

SEQ ID NO: 339898 - RNA, 19 nt, Artificial Sequence
  Description of Artificial Sequence: Synthetic oligonucleotide
  Antisense Strand to SEQ ID NO: 339897
cucauaaccauguuagcuc

SEQ ID NO: 339899 - RNA, 19 nt, Artificial Sequence
  Description of Artificial Sequence: Synthetic oligonucleotide
  Sense Strand Starting at position 268 of SEQ ID NO: 316119
caugguuaugagggauucu

SEQ ID NO: 339900 - RNA, 19 nt, Artificial Sequence
  Description of Artificial Sequence: Synthetic oligonucleotide
  Antisense Strand to SEQ ID NO: 339899
agaaucccucauaaccaug

SEQ ID NO: 339901 - RNA, 19 nt, Artificial Sequence
  Description of Artificial Sequence: Synthetic oligonucleotide
  Sense Strand Starting at position 268 of SEQ ID NO: 316129
agggauucuuucuaaauga

SEQ ID NO: 339902 - RNA, 19 nt, Artificial Sequence
  Description of Artificial Sequence: Synthetic oligonucleotide
  Antisense Strand to SEQ ID NO: 339901
ucauuuagaaagaaucccu

SEQ ID NO: 339903 - RNA, 19 nt, Artificial Sequence
  Description of Artificial Sequence: Synthetic oligonucleotide
  Sense Strand Starting at position 268 of SEQ ID NO: 316523
gaucccaaagcuuguaaga

SEQ ID NO: 339904 - RNA, 19 nt, Artificial Sequence
  Description of Artificial Sequence: Synthetic oligonucleotide
  Antisense Strand to SEQ ID NO: 339903
ucuuacaagcuuugggauc

SEQ ID NO: 339905 - RNA, 19 nt, Artificial Sequence
  Description of Artificial Sequence: Synthetic oligonucleotide
  Sense Strand Starting at position 268 of SEQ ID NO: 316682
cuguguguagcuuagacaa

SEQ ID NO: 339906 - RNA, 19 nt, Artificial Sequence
  Description of Artificial Sequence: Synthetic oligonucleotide
  Antisense Strand to SEQ ID NO: 339905
uugucuaagcuacacacag

SEQ ID NO: 339907 - RNA, 19 nt, Artificial Sequence
  Description of Artificial Sequence: Synthetic oligonucleotide
  Sense Strand Starting at position 268 of SEQ ID NO: 316745
uuucuuaaauggucaguaa

SEQ ID NO: 339908 - RNA, 19 nt, Artificial Sequence
  Description of Artificial Sequence: Synthetic oligonucleotide
  Antisense Strand to SEQ ID NO: 339907
uuacugaccauuuaagaaa

SEQ ID NO: 339909 - RNA, 19 nt, Artificial Sequence
  Description of Artificial Sequence: Synthetic oligonucleotide
  Sense Strand Starting at position 268 of SEQ ID NO: 316746
uucuuaaauggucaguaau

SEQ ID NO: 339910 - RNA, 19 nt, Artificial Sequence
  Description of Artificial Sequence: Synthetic oligonucleotide
  Antisense Strand to SEQ ID NO: 339909
auuacugaccauuuaagaa

SEQ ID NO: 339911 - RNA, 19 nt, Artificial Sequence
  Description of Artificial Sequence: Synthetic oligonucleotide
  Sense Strand Starting at position 268 of SEQ ID NO: 316749
uuaaauggucaguaauccu

SEQ ID NO: 339912 - RNA, 19 nt, Artificial Sequence
  Description of Artificial Sequence: Synthetic oligonucleotide
  Antisense Strand to SEQ ID NO: 339911
aggauuacugaccauuuaa

SEQ ID NO: 339913 - RNA, 19 nt, Artificial Sequence
  Description of Artificial Sequence: Synthetic oligonucleotide
  Sense Strand Starting at position 268 of SEQ ID NO: 316777
caaggaucguccgcauaaa

SEQ ID NO: 339914 - RNA, 19 nt, Artificial Sequence
  Description of Artificial Sequence: Synthetic oligonucleotide
  Antisense Strand to SEQ ID NO: 339913
uuuaugcggacgauccuug

SEQ ID NO: 339915 - RNA, 19 nt, Artificial Sequence
  Description of Artificial Sequence: Synthetic oligonucleotide
  Sense Strand Starting at position 268 of SEQ ID NO: 316778
aaggaucguccgcauaaau

SEQ ID NO: 339916 - RNA, 19 nt, Artificial Sequence
  Description of Artificial Sequence: Synthetic oligonucleotide
  Antisense Strand to SEQ ID NO: 339915
auuuaugcggacgauccuu

SEQ ID NO: 339917 - RNA, 19 nt, Artificial Sequence
  Description of Artificial Sequence: Synthetic oligonucleotide
  Sense Strand Starting at position 268 of SEQ ID NO: 316802
ucuguaaugccacaggauu

SEQ ID NO: 339918 - RNA, 19 nt, Artificial Sequence
  Description of Artificial Sequence: Synthetic oligonucleotide
  Antisense Strand to SEQ ID NO: 339917
aauccuguggcauuacaga

SEQ ID NO: 339919 - RNA, 19 nt, Artificial Sequence
  Description of Artificial Sequence: Synthetic oligonucleotide
  Sense Strand Starting at position 268 of SEQ ID NO: 316813
acaggauuaucggcaacug

SEQ ID NO: 339920 - RNA, 19 nt, Artificial Sequence
  Description of Artificial Sequence: Synthetic oligonucleotide
  Antisense Strand to SEQ ID NO: 339919
caguugccgauaauccugu

SEQ ID NO: 339921 - RNA, 19 nt, Artificial Sequence
  Description of Artificial Sequence: Synthetic oligonucleotide
  Sense Strand Starting at position 268 of SEQ ID NO: 316825
gcaacugcguaaccaaaua

SEQ ID NO: 339922 - RNA, 19 nt, Artificial Sequence
  Description of Artificial Sequence: Synthetic oligonucleotide
  Antisense Strand to SEQ ID NO: 339921
uauuugguuacgcaguugc

SEQ ID NO: 339923 - RNA, 19 nt, Artificial Sequence
  Description of Artificial Sequence: Synthetic oligonucleotide
  Sense Strand Starting at position 268 of SEQ ID NO: 316977
aagguauuagguugacuca

SEQ ID NO: 339924 - RNA, 19 nt, Artificial Sequence
  Description of Artificial Sequence: Synthetic oligonucleotide
  Antisense Strand to SEQ ID NO: 339923
ugagucaaccuaauaccuu

SEQ ID NO: 339925 - RNA, 19 nt, Artificial Sequence
  Description of Artificial Sequence: Synthetic oligonucleotide
  Sense Strand Starting at position 268 of SEQ ID NO: 316980
guauuagguugacucacuu

SEQ ID NO: 339926 - RNA, 19 nt, Artificial Sequence
  Description of Artificial Sequence: Synthetic oligonucleotide
  Antisense Strand to SEQ ID NO: 339925
aagugagucaaccuaauac

SEQ ID NO: 339927 - RNA, 19 nt, Artificial Sequence
  Description of Artificial Sequence: Synthetic oligonucleotide
  Sense Strand Starting at position 268 of SEQ ID NO: 317333
agagccaacugauaauuaa

SEQ ID NO: 339928 - RNA, 19 nt, Artificial Sequence
  Description of Artificial Sequence: Synthetic oligonucleotide
  Antisense Strand to SEQ ID NO: 339927
uuaauuaucaguuggcucu

SEQ ID NO: 339929 - RNA, 19 nt, Artificial Sequence
  Description of Artificial Sequence: Synthetic oligonucleotide
  Sense Strand Starting at position 268 of SEQ ID NO: 317512
cauugaagauuguauuuag

SEQ ID NO: 339930 - RNA, 19 nt, Artificial Sequence
  Description of Artificial Sequence: Synthetic oligonucleotide
  Antisense Strand to SEQ ID NO: 339929
cuaaauacaaucuucaaug

SEQ ID NO: 339931 - RNA, 19 nt, Artificial Sequence
  Description of Artificial Sequence: Synthetic oligonucleotide
  Sense Strand Starting at position 268 of SEQ ID NO: 317817
guuauacaauuccuagaag

SEQ ID NO: 339932 - RNA, 19 nt, Artificial Sequence
  Description of Artificial Sequence: Synthetic oligonucleotide
  Antisense Strand to SEQ ID NO: 339931
cuucuaggaauuguauaac

SEQ ID NO: 339933 - RNA, 19 nt, Artificial Sequence
  Description of Artificial Sequence: Synthetic oligonucleotide
  Sense Strand Starting at position 268 of SEQ ID NO: 318199
aucugaauaucugaaguaa

SEQ ID NO: 339934 - RNA, 19 nt, Artificial Sequence
  Description of Artificial Sequence: Synthetic oligonucleotide
  Antisense Strand to SEQ ID NO: 339933
uuacuucagauauucagau

SEQ ID NO: 339935 - RNA, 19 nt, Artificial Sequence
  Description of Artificial Sequence: Synthetic oligonucleotide
  Sense Strand Starting at position 268 of SEQ ID NO: 318635
uggguuauagcucacugca

SEQ ID NO: 339936 - RNA, 19 nt, Artificial Sequence
  Description of Artificial Sequence: Synthetic oligonucleotide
  Antisense Strand to SEQ ID NO: 339935
ugcagugagcuauaaccca

SEQ ID NO: 339937 - RNA, 19 nt, Artificial Sequence
  Description of Artificial Sequence: Synthetic oligonucleotide
  Sense Strand Starting at position 268 of SEQ ID NO: 318912
guaugaucgucccucuuac

SEQ ID NO: 339938 - RNA, 19 nt, Artificial Sequence
  Description of Artificial Sequence: Synthetic oligonucleotide
  Antisense Strand to SEQ ID NO: 339937
guaagagggacgaucauac

SEQ ID NO: 339939 - RNA, 19 nt, Artificial Sequence
  Description of Artificial Sequence: Synthetic oligonucleotide
  Sense Strand Starting at position 268 of SEQ ID NO: 319016
acugucuggucuuugccaa

SEQ ID NO: 339940 - RNA, 19 nt, Artificial Sequence
  Description of Artificial Sequence: Synthetic oligonucleotide
  Antisense Strand to SEQ ID NO: 339939
uuggcaaagaccagacagu

SEQ ID NO: 339941 - RNA, 19 nt, Artificial Sequence
  Description of Artificial Sequence: Synthetic oligonucleotide
  Sense Strand Starting at position 268 of SEQ ID NO: 319153
cuggcacgaucucucuuaa

SEQ ID NO: 339942 - RNA, 19 nt, Artificial Sequence
  Description of Artificial Sequence: Synthetic oligonucleotide
  Antisense Strand to SEQ ID NO: 339941
uuaagagagaucgugccag

SEQ ID NO: 339943 - RNA, 19 nt, Artificial Sequence
  Description of Artificial Sequence: Synthetic oligonucleotide
  Sense Strand Starting at position 268 of SEQ ID NO: 319172
ccgucuucugccuacucau

SEQ ID NO: 339944 - RNA, 19 nt, Artificial Sequence
  Description of Artificial Sequence: Synthetic oligonucleotide
  Antisense Strand to SEQ ID NO: 339943
augaguaggcagaagacgg

SEQ ID NO: 339945 - RNA, 19 nt, Artificial Sequence
  Description of Artificial Sequence: Synthetic oligonucleotide
  Sense Strand Starting at position 268 of SEQ ID NO: 319210
ugugaucucccuugcuauc

SEQ ID NO: 339946 - RNA, 19 nt, Artificial Sequence
  Description of Artificial Sequence: Synthetic oligonucleotide
  Antisense Strand to SEQ ID NO: 339945
gauagcaagggagaucaca

SEQ ID NO: 339947 - RNA, 19 nt, Artificial Sequence
  Description of Artificial Sequence: Synthetic oligonucleotide
  Sense Strand Starting at position 269 of SEQ ID NO: 315491
auggcauauauggguagau

SEQ ID NO: 339948 - RNA, 19 nt, Artificial Sequence
  Description of Artificial Sequence: Synthetic oligonucleotide
  Antisense Strand to SEQ ID NO: 339947
aucuacccauauaugccau

SEQ ID NO: 339949 - RNA, 19 nt, Artificial Sequence
  Description of Artificial Sequence: Synthetic oligonucleotide
  Sense Strand Starting at position 269 of SEQ ID NO: 315492
uggcauauauggguagaua

SEQ ID NO: 339950 - RNA, 19 nt, Artificial Sequence
  Description of Artificial Sequence: Synthetic oligonucleotide
  Antisense Strand to SEQ ID NO: 339949
uaucuacccauauaugcca

SEQ ID NO: 339951 - RNA, 19 nt, Artificial Sequence
  Description of Artificial Sequence: Synthetic oligonucleotide
  Sense Strand Starting at position 269 of SEQ ID NO: 315528
ggcucuuugagguauccaa

SEQ ID NO: 339952 - RNA, 19 nt, Artificial Sequence
  Description of Artificial Sequence: Synthetic oligonucleotide
  Antisense Strand to SEQ ID NO: 339951
uuggauaccucaaagagcc

SEQ ID NO: 339953 - RNA, 19 nt, Artificial Sequence
  Description of Artificial Sequence: Synthetic oligonucleotide
  Sense Strand Starting at position 269 of SEQ ID NO: 315589
agcccuccugcuuagacaa

SEQ ID NO: 339954 - RNA, 19 nt, Artificial Sequence
  Description of Artificial Sequence: Synthetic oligonucleotide
  Antisense Strand to SEQ ID NO: 339953
uugucuaagcaggagggcu

SEQ ID NO: 339955 - RNA, 19 nt, Artificial Sequence
  Description of Artificial Sequence: Synthetic oligonucleotide
  Sense Strand Starting at position 269 of SEQ ID NO: 315756
auauauuguccuugauaug

SEQ ID NO: 339956 - RNA, 19 nt, Artificial Sequence
  Description of Artificial Sequence: Synthetic oligonucleotide
  Antisense Strand to SEQ ID NO: 339955
cauaucaaggacaauauau

SEQ ID NO: 339957 - RNA, 19 nt, Artificial Sequence
  Description of Artificial Sequence: Synthetic oligonucleotide
  Sense Strand Starting at position 269 of SEQ ID NO: 315797
guuucuuauuaggugagga

SEQ ID NO: 339958 - RNA, 19 nt, Artificial Sequence
  Description of Artificial Sequence: Synthetic oligonucleotide
  Antisense Strand to SEQ ID NO: 339957
uccucaccuaauaagaaac

SEQ ID NO: 339959 - RNA, 19 nt, Artificial Sequence
  Description of Artificial Sequence: Synthetic oligonucleotide
  Sense Strand Starting at position 269 of SEQ ID NO: 315798
uuucuuauuaggugaggac

SEQ ID NO: 339960 - RNA, 19 nt, Artificial Sequence
  Description of Artificial Sequence: Synthetic oligonucleotide
  Antisense Strand to SEQ ID NO: 339959
guccucaccuaauaagaaa

SEQ ID NO: 339961 - RNA, 19 nt, Artificial Sequence
  Description of Artificial Sequence: Synthetic oligonucleotide
  Sense Strand Starting at position 269 of SEQ ID NO: 315983
aucaguucugucuaggaca

SEQ ID NO: 339962 - RNA, 19 nt, Artificial Sequence
  Description of Artificial Sequence: Synthetic oligonucleotide
  Antisense Strand to SEQ ID NO: 339961
uguccuagacagaacugau

SEQ ID NO: 339963 - RNA, 19 nt, Artificial Sequence
  Description of Artificial Sequence: Synthetic oligonucleotide
  Sense Strand Starting at position 269 of SEQ ID NO: 315985
caguucugucuaggacaau

SEQ ID NO: 339964 - RNA, 19 nt, Artificial Sequence
  Description of Artificial Sequence: Synthetic oligonucleotide
  Antisense Strand to SEQ ID NO: 339963
auuguccuagacagaacug

SEQ ID NO: 339965 - RNA, 19 nt, Artificial Sequence
  Description of Artificial Sequence: Synthetic oligonucleotide
  Sense Strand Starting at position 269 of SEQ ID NO: 316023
cugugaaauuaccuuaugu

SEQ ID NO: 339966 - RNA, 19 nt, Artificial Sequence
  Description of Artificial Sequence: Synthetic oligonucleotide
  Antisense Strand to SEQ ID NO: 339965
acauaagguaauuucacag

SEQ ID NO: 339967 - RNA, 19 nt, Artificial Sequence
  Description of Artificial Sequence: Synthetic oligonucleotide
  Sense Strand Starting at position 269 of SEQ ID NO: 316025
gugaaauuaccuuauguac

SEQ ID NO: 339968 - RNA, 19 nt, Artificial Sequence
  Description of Artificial Sequence: Synthetic oligonucleotide
  Antisense Strand to SEQ ID NO: 339967
guacauaagguaauuucac

SEQ ID NO: 339969 - RNA, 19 nt, Artificial Sequence
  Description of Artificial Sequence: Synthetic oligonucleotide
  Sense Strand Starting at position 269 of SEQ ID NO: 316080
cuuugcagggcugaauauu

SEQ ID NO: 339970 - RNA, 19 nt, Artificial Sequence
  Description of Artificial Sequence: Synthetic oligonucleotide
  Antisense Strand to SEQ ID NO: 339969
aauauucagcccugcaaag

SEQ ID NO: 339971 - RNA, 19 nt, Artificial Sequence
  Description of Artificial Sequence: Synthetic oligonucleotide
  Sense Strand Starting at position 269 of SEQ ID NO: 316089
gcugaauauuaucuuguga

SEQ ID NO: 339972 - RNA, 19 nt, Artificial Sequence
  Description of Artificial Sequence: Synthetic oligonucleotide
  Antisense Strand to SEQ ID NO: 339971
ucacaagauaauauucagc

SEQ ID NO: 339973 - RNA, 19 nt, Artificial Sequence
  Description of Artificial Sequence: Synthetic oligonucleotide
  Sense Strand Starting at position 269 of SEQ ID NO: 316096
auuaucuugugaucacaua

SEQ ID NO: 339974 - RNA, 19 nt, Artificial Sequence
  Description of Artificial Sequence: Synthetic oligonucleotide
  Antisense Strand to SEQ ID NO: 339973
uaugugaucacaagauaau

SEQ ID NO: 339975 - RNA, 19 nt, Artificial Sequence
  Description of Artificial Sequence: Synthetic oligonucleotide
  Sense Strand Starting at position 269 of SEQ ID NO: 316097
uuaucuugugaucacauau

SEQ ID NO: 339976 - RNA, 19 nt, Artificial Sequence
  Description of Artificial Sequence: Synthetic oligonucleotide
  Antisense Strand to SEQ ID NO: 339975
auaugugaucacaagauaa

SEQ ID NO: 339977 - RNA, 19 nt, Artificial Sequence
  Description of Artificial Sequence: Synthetic oligonucleotide
  Sense Strand Starting at position 269 of SEQ ID NO: 316150
cuguaagaugcuuaaguau

SEQ ID NO: 339978 - RNA, 19 nt, Artificial Sequence
  Description of Artificial Sequence: Synthetic oligonucleotide
  Antisense Strand to SEQ ID NO: 339977
auacuuaagcaucuuacag

SEQ ID NO: 339979 - RNA, 19 nt, Artificial Sequence
  Description of Artificial Sequence: Synthetic oligonucleotide
  Sense Strand Starting at position 269 of SEQ ID NO: 316256
gcacaaaggcucuagacau

SEQ ID NO: 339980 - RNA, 19 nt, Artificial Sequence
  Description of Artificial Sequence: Synthetic oligonucleotide
  Antisense Strand to SEQ ID NO: 339979
augucuagagccuuugugc

SEQ ID NO: 339981 - RNA, 19 nt, Artificial Sequence
  Description of Artificial Sequence: Synthetic oligonucleotide
  Sense Strand Starting at position 269 of SEQ ID NO: 316421
agaguauccggaugauuga

SEQ ID NO: 339982 - RNA, 19 nt, Artificial Sequence
  Description of Artificial Sequence: Synthetic oligonucleotide
  Antisense Strand to SEQ ID NO: 339981
ucaaucauccggauacucu

SEQ ID NO: 339983 - RNA, 19 nt, Artificial Sequence
  Description of Artificial Sequence: Synthetic oligonucleotide
  Sense Strand Starting at position 269 of SEQ ID NO: 316422
gaguauccggaugauugau

SEQ ID NO: 339984 - RNA, 19 nt, Artificial Sequence
  Description of Artificial Sequence: Synthetic oligonucleotide
  Antisense Strand to SEQ ID NO: 339983
aucaaucauccggauacuc

SEQ ID NO: 339985 - RNA, 19 nt, Artificial Sequence
  Description of Artificial Sequence: Synthetic oligonucleotide
  Sense Strand Starting at position 269 of SEQ ID NO: 316471
aauguuguauuggcaggaa

SEQ ID NO: 339986 - RNA, 19 nt, Artificial Sequence
  Description of Artificial Sequence: Synthetic oligonucleotide
  Antisense Strand to SEQ ID NO: 339985
uuccugccaauacaacauu

SEQ ID NO: 339987 - RNA, 19 nt, Artificial Sequence
  Description of Artificial Sequence: Synthetic oligonucleotide
  Sense Strand Starting at position 269 of SEQ ID NO: 316545
cugcauuaccuugaauaag

SEQ ID NO: 339988 - RNA, 19 nt, Artificial Sequence
  Description of Artificial Sequence: Synthetic oligonucleotide
  Antisense Strand to SEQ ID NO: 339987
cuuauucaagguaaugcag

SEQ ID NO: 339989 - RNA, 19 nt, Artificial Sequence
  Description of Artificial Sequence: Synthetic oligonucleotide
  Sense Strand Starting at position 269 of SEQ ID NO: 316568
uuuguaucucuggaucuua

SEQ ID NO: 339990 - RNA, 19 nt, Artificial Sequence
  Description of Artificial Sequence: Synthetic oligonucleotide
  Antisense Strand to SEQ ID NO: 339989
uaagauccagagauacaaa

SEQ ID NO: 339991 - RNA, 19 nt, Artificial Sequence
  Description of Artificial Sequence: Synthetic oligonucleotide
  Sense Strand Starting at position 269 of SEQ ID NO: 316636
gcuuaaguauuacuggauu

SEQ ID NO: 339992 - RNA, 19 nt, Artificial Sequence
  Description of Artificial Sequence: Synthetic oligonucleotide
  Antisense Strand to SEQ ID NO: 339991
aauccaguaauacuuaagc

SEQ ID NO: 339993 - RNA, 19 nt, Artificial Sequence
  Description of Artificial Sequence: Synthetic oligonucleotide
  Sense Strand Starting at position 269 of SEQ ID NO: 316944
uugccuuagcgcucucauu

SEQ ID NO: 339994 - RNA, 19 nt, Artificial Sequence
  Description of Artificial Sequence: Synthetic oligonucleotide
  Antisense Strand to SEQ ID NO: 339993
aaugagagcgcuaaggcaa

SEQ ID NO: 339995 - RNA, 19 nt, Artificial Sequence
  Description of Artificial Sequence: Synthetic oligonucleotide
  Sense Strand Starting at position 269 of SEQ ID NO: 316946
gccuuagcgcucucauucu

SEQ ID NO: 339996 - RNA, 19 nt, Artificial Sequence
  Description of Artificial Sequence: Synthetic oligonucleotide
  Antisense Strand to SEQ ID NO: 339995
agaaugagagcgcuaaggc

SEQ ID NO: 339997 - RNA, 19 nt, Artificial Sequence
  Description of Artificial Sequence: Synthetic oligonucleotide
  Sense Strand Starting at position 269 of SEQ ID NO: 317028
ggaacaccuucucuugcau

SEQ ID NO: 339998 - RNA, 19 nt, Artificial Sequence
  Description of Artificial Sequence: Synthetic oligonucleotide
  Antisense Strand to SEQ ID NO: 339997
augcaagagaagguguucc

SEQ ID NO: 339999 - RNA, 19 nt, Artificial Sequence
  Description of Artificial Sequence: Synthetic oligonucleotide
  Sense Strand Starting at position 269 of SEQ ID NO: 317096
agagcauucucacuaugug

SEQ ID NO: 340000 - RNA, 19 nt, Artificial Sequence
  Description of Artificial Sequence: Synthetic oligonucleotide
  Antisense Strand to SEQ ID NO: 339999
cacauagugagaaugcucu

SEQ ID NO: 340001 - RNA, 19 nt, Artificial Sequence
  Description of Artificial Sequence: Synthetic oligonucleotide
  Sense Strand Starting at position 269 of SEQ ID NO: 317171
ugguucuacccuggacuua

SEQ ID NO: 340002 - RNA, 19 nt, Artificial Sequence
  Description of Artificial Sequence: Synthetic oligonucleotide
  Antisense Strand to SEQ ID NO: 340001
uaaguccaggguagaacca

SEQ ID NO: 340003 - RNA, 19 nt, Artificial Sequence
  Description of Artificial Sequence: Synthetic oligonucleotide
  Sense Strand Starting at position 269 of SEQ ID NO: 317265
acuuccaagugauugugau

SEQ ID NO: 340004 - RNA, 19 nt, Artificial Sequence
  Description of Artificial Sequence: Synthetic oligonucleotide
  Antisense Strand to SEQ ID NO: 340003
aucacaaucacuuggaagu

SEQ ID NO: 340005 - RNA, 19 nt, Artificial Sequence
  Description of Artificial Sequence: Synthetic oligonucleotide
  Sense Strand Starting at position 269 of SEQ ID NO: 317362
acuuuaaucucuuugggac

SEQ ID NO: 340006 - RNA, 19 nt, Artificial Sequence
  Description of Artificial Sequence: Synthetic oligonucleotide
  Antisense Strand to SEQ ID NO: 340005
gucccaaagagauuaaagu

SEQ ID NO: 340007 - RNA, 19 nt, Artificial Sequence
  Description of Artificial Sequence: Synthetic oligonucleotide
  Sense Strand Starting at position 269 of SEQ ID NO: 317363
cuuuaaucucuuugggacu

SEQ ID NO: 340008 - RNA, 19 nt, Artificial Sequence
  Description of Artificial Sequence: Synthetic oligonucleotide
  Antisense Strand to SEQ ID NO: 340007
agucccaaagagauuaaag

SEQ ID NO: 340009 - RNA, 19 nt, Artificial Sequence
  Description of Artificial Sequence: Synthetic oligonucleotide
  Sense Strand Starting at position 269 of SEQ ID NO: 317899
gggcaauucccagacaagu

SEQ ID NO: 340010 - RNA, 19 nt, Artificial Sequence
  Description of Artificial Sequence: Synthetic oligonucleotide
  Antisense Strand to SEQ ID NO: 340009
acuugucugggaauugccc

SEQ ID NO: 340011 - RNA, 19 nt, Artificial Sequence
  Description of Artificial Sequence: Synthetic oligonucleotide
  Sense Strand Starting at position 269 of SEQ ID NO: 317908
ccagacaagucuuuccuga

SEQ ID NO: 340012 - RNA, 19 nt, Artificial Sequence
  Description of Artificial Sequence: Synthetic oligonucleotide
  Antisense Strand to SEQ ID NO: 340011
ucaggaaagacuugucugg

SEQ ID NO: 340013 - RNA, 19 nt, Artificial Sequence
  Description of Artificial Sequence: Synthetic oligonucleotide
  Sense Strand Starting at position 269 of SEQ ID NO: 317910
agacaagucuuuccugacu

SEQ ID NO: 340014 - RNA, 19 nt, Artificial Sequence
  Description of Artificial Sequence: Synthetic oligonucleotide
  Antisense Strand to SEQ ID NO: 340013
agucaggaaagacuugucu

SEQ ID NO: 340015 - RNA, 19 nt, Artificial Sequence
  Description of Artificial Sequence: Synthetic oligonucleotide
  Sense Strand Starting at position 269 of SEQ ID NO: 318404
gccauagugccugauaaug

SEQ ID NO: 340016 - RNA, 19 nt, Artificial Sequence
  Description of Artificial Sequence: Synthetic oligonucleotide
  Antisense Strand to SEQ ID NO: 340015
cauuaucaggcacuauggc

SEQ ID NO: 340017 - RNA, 19 nt, Artificial Sequence
  Description of Artificial Sequence: Synthetic oligonucleotide
  Sense Strand Starting at position 269 of SEQ ID NO: 318495
uguuuaucuuuaguaacag

SEQ ID NO: 340018 - RNA, 19 nt, Artificial Sequence
  Description of Artificial Sequence: Synthetic oligonucleotide
  Antisense Strand to SEQ ID NO: 340017
cuguuacuaaagauaaaca

SEQ ID NO: 340019 - RNA, 19 nt, Artificial Sequence
  Description of Artificial Sequence: Synthetic oligonucleotide
  Sense Strand Starting at position 269 of SEQ ID NO: 318921
agagcugaugaaugcaaua

SEQ ID NO: 340020 - RNA, 19 nt, Artificial Sequence
  Description of Artificial Sequence: Synthetic oligonucleotide
  Antisense Strand to SEQ ID NO: 340019
uauugcauucaucagcucu

SEQ ID NO: 340021 - RNA, 19 nt, Artificial Sequence
  Description of Artificial Sequence: Synthetic oligonucleotide
  Sense Strand Starting at position 269 of SEQ ID NO: 318972
agcucaaacccaugguuua

SEQ ID NO: 340022 - RNA, 19 nt, Artificial Sequence
  Description of Artificial Sequence: Synthetic oligonucleotide
  Antisense Strand to SEQ ID NO: 340021
uaaaccauggguuugagcu

SEQ ID NO: 340023 - RNA, 19 nt, Artificial Sequence
  Description of Artificial Sequence: Synthetic oligonucleotide
  Sense Strand Starting at position 269 of SEQ ID NO: 318988
uuauaauuccuagguugua

SEQ ID NO: 340024 - RNA, 19 nt, Artificial Sequence
  Description of Artificial Sequence: Synthetic oligonucleotide
  Antisense Strand to SEQ ID NO: 340023
uacaaccuaggaauuauaa

SEQ ID NO: 340025 - RNA, 19 nt, Artificial Sequence
  Description of Artificial Sequence: Synthetic oligonucleotide
  Sense Strand Starting at position 269 of SEQ ID NO: 318991
uaauuccuagguuguaaga

SEQ ID NO: 340026 - RNA, 19 nt, Artificial Sequence
  Description of Artificial Sequence: Synthetic oligonucleotide
  Antisense Strand to SEQ ID NO: 340025
ucuuacaaccuaggaauua

SEQ ID NO: 340027 - RNA, 19 nt, Artificial Sequence
  Description of Artificial Sequence: Synthetic oligonucleotide
  Sense Strand Starting at position 270 of SEQ ID NO: 315244
uaaugacguuuaucagcau

SEQ ID NO: 340028 - RNA, 19 nt, Artificial Sequence
  Description of Artificial Sequence: Synthetic oligonucleotide
  Antisense Strand to SEQ ID NO: 340027
augcugauaaacgucauua

SEQ ID NO: 340029 - RNA, 19 nt, Artificial Sequence
  Description of Artificial Sequence: Synthetic oligonucleotide
  Sense Strand Starting at position 270 of SEQ ID NO: 315247
ugacguuuaucagcaucau

SEQ ID NO: 340030 - RNA, 19 nt, Artificial Sequence
  Description of Artificial Sequence: Synthetic oligonucleotide
  Antisense Strand to SEQ ID NO: 340029
augaugcugauaaacguca

SEQ ID NO: 340031 - RNA, 19 nt, Artificial Sequence
  Description of Artificial Sequence: Synthetic oligonucleotide
  Sense Strand Starting at position 270 of SEQ ID NO: 315248
gacguuuaucagcaucauc

SEQ ID NO: 340032 - RNA, 19 nt, Artificial Sequence
  Description of Artificial Sequence: Synthetic oligonucleotide
  Antisense Strand to SEQ ID NO: 340031
gaugaugcugauaaacguc

SEQ ID NO: 340033 - RNA, 19 nt, Artificial Sequence
  Description of Artificial Sequence: Synthetic oligonucleotide
  Sense Strand Starting at position 270 of SEQ ID NO: 315705
gcgcguuccaaauuaucuu

SEQ ID NO: 340034 - RNA, 19 nt, Artificial Sequence
  Description of Artificial Sequence: Synthetic oligonucleotide
  Antisense Strand to SEQ ID NO: 340033
aagauaauuuggaacgcgc

SEQ ID NO: 340035 - RNA, 19 nt, Artificial Sequence
  Description of Artificial Sequence: Synthetic oligonucleotide
  Sense Strand Starting at position 270 of SEQ ID NO: 315709
guuccaaauuaucuugugu

SEQ ID NO: 340036 - RNA, 19 nt, Artificial Sequence
  Description of Artificial Sequence: Synthetic oligonucleotide
  Antisense Strand to SEQ ID NO: 340035
acacaagauaauuuggaac

SEQ ID NO: 340037 - RNA, 19 nt, Artificial Sequence
  Description of Artificial Sequence: Synthetic oligonucleotide
  Sense Strand Starting at position 270 of SEQ ID NO: 315714
aaauuaucuugugugggua

SEQ ID NO: 340038 - RNA, 19 nt, Artificial Sequence
  Description of Artificial Sequence: Synthetic oligonucleotide
  Antisense Strand to SEQ ID NO: 340037
uacccacacaagauaauuu

SEQ ID NO: 340039 - RNA, 19 nt, Artificial Sequence
  Description of Artificial Sequence: Synthetic oligonucleotide
  Sense Strand Starting at position 270 of SEQ ID NO: 315715
aauuaucuuguguggguau

SEQ ID NO: 340040 - RNA, 19 nt, Artificial Sequence
  Description of Artificial Sequence: Synthetic oligonucleotide
  Antisense Strand to SEQ ID NO: 340039
auacccacacaagauaauu

SEQ ID NO: 340041 - RNA, 19 nt, Artificial Sequence
  Description of Artificial Sequence: Synthetic oligonucleotide
  Sense Strand Starting at position 270 of SEQ ID NO: 315734
ccaaacgacucaguuaugu

SEQ ID NO: 340042 - RNA, 19 nt, Artificial Sequence
  Description of Artificial Sequence: Synthetic oligonucleotide
  Antisense Strand to SEQ ID NO: 340041
acauaacugagucguuugg

SEQ ID NO: 340043 - RNA, 19 nt, Artificial Sequence
  Description of Artificial Sequence: Synthetic oligonucleotide
  Sense Strand Starting at position 270 of SEQ ID NO: 315740
gacucaguuauguggaguu

SEQ ID NO: 340044 - RNA, 19 nt, Artificial Sequence
  Description of Artificial Sequence: Synthetic oligonucleotide
  Antisense Strand to SEQ ID NO: 340043
aacuccacauaacugaguc

SEQ ID NO: 340045 - RNA, 19 nt, Artificial Sequence
  Description of Artificial Sequence: Synthetic oligonucleotide
  Sense Strand Starting at position 270 of SEQ ID NO: 315752
uggaguuacuccuugaacu

SEQ ID NO: 340046 - RNA, 19 nt, Artificial Sequence
  Description of Artificial Sequence: Synthetic oligonucleotide
  Antisense Strand to SEQ ID NO: 340045
aguucaaggaguaacucca

SEQ ID NO: 340047 - RNA, 19 nt, Artificial Sequence
  Description of Artificial Sequence: Synthetic oligonucleotide
  Sense Strand Starting at position 270 of SEQ ID NO: 315753
ggaguuacuccuugaacua

SEQ ID NO: 340048 - RNA, 19 nt, Artificial Sequence
  Description of Artificial Sequence: Synthetic oligonucleotide
  Antisense Strand to SEQ ID NO: 340047
uaguucaaggaguaacucc

SEQ ID NO: 340049 - RNA, 19 nt, Artificial Sequence
  Description of Artificial Sequence: Synthetic oligonucleotide
  Sense Strand Starting at position 270 of SEQ ID NO: 315797
aagagcuucccaugcaguu

SEQ ID NO: 340050 - RNA, 19 nt, Artificial Sequence
  Description of Artificial Sequence: Synthetic oligonucleotide
  Antisense Strand to SEQ ID NO: 340049
aacugcaugggaagcucuu

SEQ ID NO: 340051 - RNA, 19 nt, Artificial Sequence
  Description of Artificial Sequence: Synthetic oligonucleotide
  Sense Strand Starting at position 270 of SEQ ID NO: 315819
ugccacuguuauucugaca

SEQ ID NO: 340052 - RNA, 19 nt, Artificial Sequence
  Description of Artificial Sequence: Synthetic oligonucleotide
  Antisense Strand to SEQ ID NO: 340051
ugucagaauaacaguggca

SEQ ID NO: 340053 - RNA, 19 nt, Artificial Sequence
  Description of Artificial Sequence: Synthetic oligonucleotide
  Sense Strand Starting at position 270 of SEQ ID NO: 315856
uguugauuccagcaggaaa

SEQ ID NO: 340054 - RNA, 19 nt, Artificial Sequence
  Description of Artificial Sequence: Synthetic oligonucleotide
  Antisense Strand to SEQ ID NO: 340053
uuuccugcuggaaucaaca

SEQ ID NO: 340055 - RNA, 19 nt, Artificial Sequence
  Description of Artificial Sequence: Synthetic oligonucleotide
  Sense Strand Starting at position 270 of SEQ ID NO: 316445
ccagguaccuucccuaaga

SEQ ID NO: 340056 - RNA, 19 nt, Artificial Sequence
  Description of Artificial Sequence: Synthetic oligonucleotide
  Antisense Strand to SEQ ID NO: 340055
ucuuagggaagguaccugg

SEQ ID NO: 340057 - RNA, 19 nt, Artificial Sequence
  Description of Artificial Sequence: Synthetic oligonucleotide
  Sense Strand Starting at position 270 of SEQ ID NO: 316751
gaaggcuucccgcagcauu

SEQ ID NO: 340058 - RNA, 19 nt, Artificial Sequence
  Description of Artificial Sequence: Synthetic oligonucleotide
  Antisense Strand to SEQ ID NO: 340057
aaugcugcgggaagccuuc

SEQ ID NO: 340059 - RNA, 19 nt, Artificial Sequence
  Description of Artificial Sequence: Synthetic oligonucleotide
  Sense Strand Starting at position 270 of SEQ ID NO: 317571
aggagauuaucagccggau

SEQ ID NO: 340060 - RNA, 19 nt, Artificial Sequence
  Description of Artificial Sequence: Synthetic oligonucleotide
  Antisense Strand to SEQ ID NO: 340059
auccggcugauaaucuccu

SEQ ID NO: 340061 - RNA, 19 nt, Artificial Sequence
  Description of Artificial Sequence: Synthetic oligonucleotide
  Sense Strand Starting at position 270 of SEQ ID NO: 317824
gcggguggcauugaacuua

SEQ ID NO: 340062 - RNA, 19 nt, Artificial Sequence
  Description of Artificial Sequence: Synthetic oligonucleotide
  Antisense Strand to SEQ ID NO: 340061
uaaguucaaugccacccgc

SEQ ID NO: 340063 - RNA, 19 nt, Artificial Sequence
  Description of Artificial Sequence: Synthetic oligonucleotide
  Sense Strand Starting at position 270 of SEQ ID NO: 317940
cgcaaagugcuuucagguu

SEQ ID NO: 340064 - RNA, 19 nt, Artificial Sequence
  Description of Artificial Sequence: Synthetic oligonucleotide
  Antisense Strand to SEQ ID NO: 340063
aaccugaaagcacuuugcg

SEQ ID NO: 340065 - RNA, 19 nt, Artificial Sequence
  Description of Artificial Sequence: Synthetic oligonucleotide
  Sense Strand Starting at position 270 of SEQ ID NO: 317946
gugcuuucagguuggaaug

SEQ ID NO: 340066 - RNA, 19 nt, Artificial Sequence
  Description of Artificial Sequence: Synthetic oligonucleotide
  Antisense Strand to SEQ ID NO: 340065
cauuccaaccugaaagcac

SEQ ID NO: 340067 - RNA, 19 nt, Artificial Sequence
  Description of Artificial Sequence: Synthetic oligonucleotide
  Sense Strand Starting at position 270 of SEQ ID NO: 317990
agggaacaguugcuguaaa

SEQ ID NO: 340068 - RNA, 19 nt, Artificial Sequence
  Description of Artificial Sequence: Synthetic oligonucleotide
  Antisense Strand to SEQ ID NO: 340067
uuuacagcaacuguucccu

SEQ ID NO: 340069 - RNA, 19 nt, Artificial Sequence
  Description of Artificial Sequence: Synthetic oligonucleotide
  Sense Strand Starting at position 270 of SEQ ID NO: 318062
aaagccuuguuauucgaaa

SEQ ID NO: 340070 - RNA, 19 nt, Artificial Sequence
  Description of Artificial Sequence: Synthetic oligonucleotide
  Antisense Strand to SEQ ID NO: 340069
uuucgaauaacaaggcuuu

SEQ ID NO: 340071 - RNA, 19 nt, Artificial Sequence
  Description of Artificial Sequence: Synthetic oligonucleotide
  Sense Strand Starting at position 270 of SEQ ID NO: 318063
aagccuuguuauucgaaag

SEQ ID NO: 340072 - RNA, 19 nt, Artificial Sequence
  Description of Artificial Sequence: Synthetic oligonucleotide
  Antisense Strand to SEQ ID NO: 340071
cuuucgaauaacaaggcuu

SEQ ID NO: 340073 - RNA, 19 nt, Artificial Sequence
  Description of Artificial Sequence: Synthetic oligonucleotide
  Sense Strand Starting at position 270 of SEQ ID NO: 318064
agccuuguuauucgaaaga

SEQ ID NO: 340074 - RNA, 19 nt, Artificial Sequence
  Description of Artificial Sequence: Synthetic oligonucleotide
  Antisense Strand to SEQ ID NO: 340073
ucuuucgaauaacaaggcu

SEQ ID NO: 340075 - RNA, 19 nt, Artificial Sequence
  Description of Artificial Sequence: Synthetic oligonucleotide
  Sense Strand Starting at position 270 of SEQ ID NO: 318069
uguuauucgaaagaaugug

SEQ ID NO: 340076 - RNA, 19 nt, Artificial Sequence
  Description of Artificial Sequence: Synthetic oligonucleotide
  Antisense Strand to SEQ ID NO: 340075
cacauucuuucgaauaaca

SEQ ID NO: 340077 - RNA, 19 nt, Artificial Sequence
  Description of Artificial Sequence: Synthetic oligonucleotide
  Sense Strand Starting at position 270 of SEQ ID NO: 318075
ucgaaagaaugugcuuuga

SEQ ID NO: 340078 - RNA, 19 nt, Artificial Sequence
  Description of Artificial Sequence: Synthetic oligonucleotide
  Antisense Strand to SEQ ID NO: 340077
ucaaagcacauucuuucga

SEQ ID NO: 340079 - RNA, 19 nt, Artificial Sequence
  Description of Artificial Sequence: Synthetic oligonucleotide
  Sense Strand Starting at position 270 of SEQ ID NO: 318077
gaaagaaugugcuuugaac

SEQ ID NO: 340080 - RNA, 19 nt, Artificial Sequence
  Description of Artificial Sequence: Synthetic oligonucleotide
  Antisense Strand to SEQ ID NO: 340079
guucaaagcacauucuuuc

SEQ ID NO: 340081 - RNA, 19 nt, Artificial Sequence
  Description of Artificial Sequence: Synthetic oligonucleotide
  Sense Strand Starting at position 270 of SEQ ID NO: 318079
aagaaugugcuuugaacga

SEQ ID NO: 340082 - RNA, 19 nt, Artificial Sequence
  Description of Artificial Sequence: Synthetic oligonucleotide
  Antisense Strand to SEQ ID NO: 340081
ucguucaaagcacauucuu

SEQ ID NO: 340083 - RNA, 19 nt, Artificial Sequence
  Description of Artificial Sequence: Synthetic oligonucleotide
  Sense Strand Starting at position 270 of SEQ ID NO: 318126
ucuacuguuuccuugcaga

SEQ ID NO: 340084 - RNA, 19 nt, Artificial Sequence
  Description of Artificial Sequence: Synthetic oligonucleotide
  Antisense Strand to SEQ ID NO: 340083
ucugcaaggaaacaguaga

SEQ ID NO: 340085 - RNA, 19 nt, Artificial Sequence
  Description of Artificial Sequence: Synthetic oligonucleotide
  Sense Strand Starting at position 270 of SEQ ID NO: 318264
gucgaauucgucuggaaag

SEQ ID NO: 340086 - RNA, 19 nt, Artificial Sequence
  Description of Artificial Sequence: Synthetic oligonucleotide
  Antisense Strand to SEQ ID NO: 340085
cuuuccagacgaauucgac

SEQ ID NO: 340087 - RNA, 19 nt, Artificial Sequence
  Description of Artificial Sequence: Synthetic oligonucleotide
  Sense Strand Starting at position 270 of SEQ ID NO: 318266
cgaauucgucuggaaagca

SEQ ID NO: 340088 - RNA, 19 nt, Artificial Sequence
  Description of Artificial Sequence: Synthetic oligonucleotide
  Antisense Strand to SEQ ID NO: 340087
ugcuuuccagacgaauucg

SEQ ID NO: 340089 - RNA, 19 nt, Artificial Sequence
  Description of Artificial Sequence: Synthetic oligonucleotide
  Sense Strand Starting at position 270 of SEQ ID NO: 318607
uauaauuccuguucgagaa

SEQ ID NO: 340090 - RNA, 19 nt, Artificial Sequence
  Description of Artificial Sequence: Synthetic oligonucleotide
  Antisense Strand to SEQ ID NO: 340089
uucucgaacaggaauuaua

SEQ ID NO: 340091 - RNA, 19 nt, Artificial Sequence
  Description of Artificial Sequence: Synthetic oligonucleotide
  Sense Strand Starting at position 270 of SEQ ID NO: 318608
auaauuccuguucgagaag

SEQ ID NO: 340092 - RNA, 19 nt, Artificial Sequence
  Description of Artificial Sequence: Synthetic oligonucleotide
  Antisense Strand to SEQ ID NO: 340091
cuucucgaacaggaauuau

SEQ ID NO: 340093 - RNA, 19 nt, Artificial Sequence
  Description of Artificial Sequence: Synthetic oligonucleotide
  Sense Strand Starting at position 270 of SEQ ID NO: 318640
gcuagugauagguauuguu

SEQ ID NO: 340094 - RNA, 19 nt, Artificial Sequence
  Description of Artificial Sequence: Synthetic oligonucleotide
  Antisense Strand to SEQ ID NO: 340093
aacaauaccuaucacuagc

SEQ ID NO: 340095 - RNA, 19 nt, Artificial Sequence
  Description of Artificial Sequence: Synthetic oligonucleotide
  Sense Strand Starting at position 270 of SEQ ID NO: 318700
gauugcugagauuaaugcu

SEQ ID NO: 340096 - RNA, 19 nt, Artificial Sequence
  Description of Artificial Sequence: Synthetic oligonucleotide
  Antisense Strand to SEQ ID NO: 340095
agcauuaaucucagcaauc

SEQ ID NO: 340097 - RNA, 19 nt, Artificial Sequence
  Description of Artificial Sequence: Synthetic oligonucleotide
  Sense Strand Starting at position 270 of SEQ ID NO: 318828
cugguaugugucuguaaua

SEQ ID NO: 340098 - RNA, 19 nt, Artificial Sequence
  Description of Artificial Sequence: Synthetic oligonucleotide
  Antisense Strand to SEQ ID NO: 340097
uauuacagacacauaccag

SEQ ID NO: 340099 - RNA, 19 nt, Artificial Sequence
  Description of Artificial Sequence: Synthetic oligonucleotide
  Sense Strand Starting at position 270 of SEQ ID NO: 318829
ugguaugugucuguaauag

SEQ ID NO: 340100 - RNA, 19 nt, Artificial Sequence
  Description of Artificial Sequence: Synthetic oligonucleotide
  Antisense Strand to SEQ ID NO: 340099
cuauuacagacacauacca

SEQ ID NO: 340101 - RNA, 19 nt, Artificial Sequence
  Description of Artificial Sequence: Synthetic oligonucleotide
  Sense Strand Starting at position 270 of SEQ ID NO: 318837
gucuguaauagagguacuu

SEQ ID NO: 340102 - RNA, 19 nt, Artificial Sequence
  Description of Artificial Sequence: Synthetic oligonucleotide
  Antisense Strand to SEQ ID NO: 340101
aaguaccucuauuacagac

SEQ ID NO: 340103 - RNA, 19 nt, Artificial Sequence
  Description of Artificial Sequence: Synthetic oligonucleotide
  Sense Strand Starting at position 270 of SEQ ID NO: 318980
cuaccuguacuauguauga

SEQ ID NO: 340104 - RNA, 19 nt, Artificial Sequence
  Description of Artificial Sequence: Synthetic oligonucleotide
  Antisense Strand to SEQ ID NO: 340103
ucauacauaguacagguag

SEQ ID NO: 340105 - RNA, 19 nt, Artificial Sequence
  Description of Artificial Sequence: Synthetic oligonucleotide
  Sense Strand Starting at position 270 of SEQ ID NO: 319116
uguguagucaugcauacuc

SEQ ID NO: 340106 - RNA, 19 nt, Artificial Sequence
  Description of Artificial Sequence: Synthetic oligonucleotide
  Antisense Strand to SEQ ID NO: 340105
gaguaugcaugacuacaca

SEQ ID NO: 340107 - RNA, 19 nt, Artificial Sequence
  Description of Artificial Sequence: Synthetic oligonucleotide
  Sense Strand Starting at position 271 of SEQ ID NO: 315325
gaaguaaugcaaugaaguc

SEQ ID NO: 340108 - RNA, 19 nt, Artificial Sequence
  Description of Artificial Sequence: Synthetic oligonucleotide
  Antisense Strand to SEQ ID NO: 340107
gacuucauugcauuacuuc

SEQ ID NO: 340109 - RNA, 19 nt, Artificial Sequence
  Description of Artificial Sequence: Synthetic oligonucleotide
  Sense Strand Starting at position 271 of SEQ ID NO: 315364
uuugcuaagaugugauaag

SEQ ID NO: 340110 - RNA, 19 nt, Artificial Sequence
  Description of Artificial Sequence: Synthetic oligonucleotide
  Antisense Strand to SEQ ID NO: 340109
cuuaucacaucuuagcaaa

SEQ ID NO: 340111 - RNA, 19 nt, Artificial Sequence
  Description of Artificial Sequence: Synthetic oligonucleotide
  Sense Strand Starting at position 271 of SEQ ID NO: 315455
cugcacagccaugauuauu

SEQ ID NO: 340112 - RNA, 19 nt, Artificial Sequence
  Description of Artificial Sequence: Synthetic oligonucleotide
  Antisense Strand to SEQ ID NO: 340111
aauaaucauggcugugcag

SEQ ID NO: 340113 - RNA, 19 nt, Artificial Sequence
  Description of Artificial Sequence: Synthetic oligonucleotide
  Sense Strand Starting at position 271 of SEQ ID NO: 315515
ugaaaugcuucuguauuuc

SEQ ID NO: 340114 - RNA, 19 nt, Artificial Sequence
  Description of Artificial Sequence: Synthetic oligonucleotide
  Antisense Strand to SEQ ID NO: 340113
gaaauacagaagcauuuca

SEQ ID NO: 340115 - RNA, 19 nt, Artificial Sequence
  Description of Artificial Sequence: Synthetic oligonucleotide
  Sense Strand Starting at position 271 of SEQ ID NO: 315543
acacaaauuguguaaguau

SEQ ID NO: 340116 - RNA, 19 nt, Artificial Sequence
  Description of Artificial Sequence: Synthetic oligonucleotide
  Antisense Strand to SEQ ID NO: 340115
auacuuacacaauuugugu

SEQ ID NO: 340117 - RNA, 19 nt, Artificial Sequence
  Description of Artificial Sequence: Synthetic oligonucleotide
  Sense Strand Starting at position 271 of SEQ ID NO: 315841
caaauugauucugugugau

SEQ ID NO: 340118 - RNA, 19 nt, Artificial Sequence
  Description of Artificial Sequence: Synthetic oligonucleotide
  Antisense Strand to SEQ ID NO: 340117
aucacacagaaucaauuug

SEQ ID NO: 340119 - RNA, 19 nt, Artificial Sequence
  Description of Artificial Sequence: Synthetic oligonucleotide
  Sense Strand Starting at position 271 of SEQ ID NO: 315908
cugugaauguuucucagag

SEQ ID NO: 340120 - RNA, 19 nt, Artificial Sequence
  Description of Artificial Sequence: Synthetic oligonucleotide
  Antisense Strand to SEQ ID NO: 340119
cucugagaaacauucacag

SEQ ID NO: 340121 - RNA, 19 nt, Artificial Sequence
  Description of Artificial Sequence: Synthetic oligonucleotide
  Sense Strand Starting at position 271 of SEQ ID NO: 315909
ugugaauguuucucagagg

SEQ ID NO: 340122 - RNA, 19 nt, Artificial Sequence
  Description of Artificial Sequence: Synthetic oligonucleotide
  Antisense Strand to SEQ ID NO: 340121
ccucugagaaacauucaca

SEQ ID NO: 340123 - RNA, 19 nt, Artificial Sequence
  Description of Artificial Sequence: Synthetic oligonucleotide
  Sense Strand Starting at position 271 of SEQ ID NO: 316035
aacauaauggguuauacgu

SEQ ID NO: 340124 - RNA, 19 nt, Artificial Sequence
  Description of Artificial Sequence: Synthetic oligonucleotide
  Antisense Strand to SEQ ID NO: 340123
acguauaacccauuauguu

SEQ ID NO: 340125 - RNA, 19 nt, Artificial Sequence
  Description of Artificial Sequence: Synthetic oligonucleotide
  Sense Strand Starting at position 271 of SEQ ID NO: 316179
ggcuguuaucuagaagcug

SEQ ID NO: 340126 - RNA, 19 nt, Artificial Sequence
  Description of Artificial Sequence: Synthetic oligonucleotide
  Antisense Strand to SEQ ID NO: 340125
cagcuucuagauaacagcc

SEQ ID NO: 340127 - RNA, 19 nt, Artificial Sequence
  Description of Artificial Sequence: Synthetic oligonucleotide
  Sense Strand Starting at position 271 of SEQ ID NO: 316185
uaucuagaagcuggguaua

SEQ ID NO: 340128 - RNA, 19 nt, Artificial Sequence
  Description of Artificial Sequence: Synthetic oligonucleotide
  Antisense Strand to SEQ ID NO: 340127
uauacccagcuucuagaua

SEQ ID NO: 340129 - RNA, 19 nt, Artificial Sequence
  Description of Artificial Sequence: Synthetic oligonucleotide
  Sense Strand Starting at position 271 of SEQ ID NO: 316187
ucuagaagcuggguauaaa

SEQ ID NO: 340130 - RNA, 19 nt, Artificial Sequence
  Description of Artificial Sequence: Synthetic oligonucleotide
  Antisense Strand to SEQ ID NO: 340129
uuuauacccagcuucuaga

SEQ ID NO: 340131 - RNA, 19 nt, Artificial Sequence
  Description of Artificial Sequence: Synthetic oligonucleotide
  Sense Strand Starting at position 271 of SEQ ID NO: 316234
ccauaugaccuccagucuu

SEQ ID NO: 340132 - RNA, 19 nt, Artificial Sequence
  Description of Artificial Sequence: Synthetic oligonucleotide
  Antisense Strand to SEQ ID NO: 340131
aagacuggaggucauaugg

SEQ ID NO: 340133 - RNA, 19 nt, Artificial Sequence
  Description of Artificial Sequence: Synthetic oligonucleotide
  Sense Strand Starting at position 271 of SEQ ID NO: 316305
uaaaucauccggugagaac

SEQ ID NO: 340134 - RNA, 19 nt, Artificial Sequence
  Description of Artificial Sequence: Synthetic oligonucleotide
  Antisense Strand to SEQ ID NO: 340133
guucucaccggaugauuua

SEQ ID NO: 340135 - RNA, 19 nt, Artificial Sequence
  Description of Artificial Sequence: Synthetic oligonucleotide
  Sense Strand Starting at position 271 of SEQ ID NO: 316458
ccgucuugcccauuaguuu

SEQ ID NO: 340136 - RNA, 19 nt, Artificial Sequence
  Description of Artificial Sequence: Synthetic oligonucleotide
  Antisense Strand to SEQ ID NO: 340135
aaacuaaugggcaagacgg

SEQ ID NO: 340137 - RNA, 19 nt, Artificial Sequence
  Description of Artificial Sequence: Synthetic oligonucleotide
  Sense Strand Starting at position 271 of SEQ ID NO: 316503
ugagaaauauaccuguagu

SEQ ID NO: 340138 - RNA, 19 nt, Artificial Sequence
  Description of Artificial Sequence: Synthetic oligonucleotide
  Antisense Strand to SEQ ID NO: 340137
acuacagguauauuucuca

SEQ ID NO: 340139 - RNA, 19 nt, Artificial Sequence
  Description of Artificial Sequence: Synthetic oligonucleotide
  Sense Strand Starting at position 271 of SEQ ID NO: 317244
gggucagacuaacuacuua

SEQ ID NO: 340140 - RNA, 19 nt, Artificial Sequence
  Description of Artificial Sequence: Synthetic oligonucleotide
  Antisense Strand to SEQ ID NO: 340139
uaaguaguuagucugaccc

SEQ ID NO: 340141 - RNA, 19 nt, Artificial Sequence
  Description of Artificial Sequence: Synthetic oligonucleotide
  Sense Strand Starting at position 271 of SEQ ID NO: 317311
acugcauugucauuugcaa

SEQ ID NO: 340142 - RNA, 19 nt, Artificial Sequence
  Description of Artificial Sequence: Synthetic oligonucleotide
  Antisense Strand to SEQ ID NO: 340141
uugcaaaugacaaugcagu

SEQ ID NO: 340143 - RNA, 19 nt, Artificial Sequence
  Description of Artificial Sequence: Synthetic oligonucleotide
  Sense Strand Starting at position 271 of SEQ ID NO: 317332
aaagauuaagcuggucaag

SEQ ID NO: 340144 - RNA, 19 nt, Artificial Sequence
  Description of Artificial Sequence: Synthetic oligonucleotide
  Antisense Strand to SEQ ID NO: 340143
cuugaccagcuuaaucuuu

SEQ ID NO: 340145 - RNA, 19 nt, Artificial Sequence
  Description of Artificial Sequence: Synthetic oligonucleotide
  Sense Strand Starting at position 271 of SEQ ID NO: 317503
guaugaggcuucuuaaaga

SEQ ID NO: 340146 - RNA, 19 nt, Artificial Sequence
  Description of Artificial Sequence: Synthetic oligonucleotide
  Antisense Strand to SEQ ID NO: 340145
ucuuuaagaagccucauac

SEQ ID NO: 340147 - RNA, 19 nt, Artificial Sequence
  Description of Artificial Sequence: Synthetic oligonucleotide
  Sense Strand Starting at position 271 of SEQ ID NO: 317564
cugcuuuccgaguaacaua

SEQ ID NO: 340148 - RNA, 19 nt, Artificial Sequence
  Description of Artificial Sequence: Synthetic oligonucleotide
  Antisense Strand to SEQ ID NO: 340147
uauguuacucggaaagcag

SEQ ID NO: 340149 - RNA, 19 nt, Artificial Sequence
  Description of Artificial Sequence: Synthetic oligonucleotide
  Sense Strand Starting at position 271 of SEQ ID NO: 317583
uuuguaauuccagaggcag

SEQ ID NO: 340150 - RNA, 19 nt, Artificial Sequence
  Description of Artificial Sequence: Synthetic oligonucleotide
  Antisense Strand to SEQ ID NO: 340149
cugccucuggaauuacaaa

SEQ ID NO: 340151 - RNA, 19 nt, Artificial Sequence
  Description of Artificial Sequence: Synthetic oligonucleotide
  Sense Strand Starting at position 271 of SEQ ID NO: 317602
agaacaagugucuaugugu

SEQ ID NO: 340152 - RNA, 19 nt, Artificial Sequence
  Description of Artificial Sequence: Synthetic oligonucleotide
  Antisense Strand to SEQ ID NO: 340151
acacauagacacuuguucu

SEQ ID NO: 340153 - RNA, 19 nt, Artificial Sequence
  Description of Artificial Sequence: Synthetic oligonucleotide
  Sense Strand Starting at position 271 of SEQ ID NO: 317724
ggacuaacugcuugaagga

SEQ ID NO: 340154 - RNA, 19 nt, Artificial Sequence
  Description of Artificial Sequence: Synthetic oligonucleotide
  Antisense Strand to SEQ ID NO: 340153
uccuucaagcaguuagucc

SEQ ID NO: 340155 - RNA, 19 nt, Artificial Sequence
  Description of Artificial Sequence: Synthetic oligonucleotide
  Sense Strand Starting at position 271 of SEQ ID NO: 317782
gagacucuagugcauacaa

SEQ ID NO: 340156 - RNA, 19 nt, Artificial Sequence
  Description of Artificial Sequence: Synthetic oligonucleotide
  Antisense Strand to SEQ ID NO: 340155
uuguaugcacuagagucuc

SEQ ID NO: 340157 - RNA, 19 nt, Artificial Sequence
  Description of Artificial Sequence: Synthetic oligonucleotide
  Sense Strand Starting at position 271 of SEQ ID NO: 317879
aucuuaaaguaaguggaua

SEQ ID NO: 340158 - RNA, 19 nt, Artificial Sequence
  Description of Artificial Sequence: Synthetic oligonucleotide
  Antisense Strand to SEQ ID NO: 340157
uauccacuuacuuuaagau

SEQ ID NO: 340159 - RNA, 19 nt, Artificial Sequence
  Description of Artificial Sequence: Synthetic oligonucleotide
  Sense Strand Starting at position 271 of SEQ ID NO: 317941
gauauuucuuggccucagu

SEQ ID NO: 340160 - RNA, 19 nt, Artificial Sequence
  Description of Artificial Sequence: Synthetic oligonucleotide
  Antisense Strand to SEQ ID NO: 340159
acugaggccaagaaauauc

SEQ ID NO: 340161 - RNA, 19 nt, Artificial Sequence
  Description of Artificial Sequence: Synthetic oligonucleotide
  Sense Strand Starting at position 271 of SEQ ID NO: 318064
aggagaugaugcuuccuaa

SEQ ID NO: 340162 - RNA, 19 nt, Artificial Sequence
  Description of Artificial Sequence: Synthetic oligonucleotide
  Antisense Strand to SEQ ID NO: 340161
uuaggaagcaucaucuccu

SEQ ID NO: 340163 - RNA, 19 nt, Artificial Sequence
  Description of Artificial Sequence: Synthetic oligonucleotide
  Sense Strand Starting at position 271 of SEQ ID NO: 318067
agaugaugcuuccuaacac

SEQ ID NO: 340164 - RNA, 19 nt, Artificial Sequence
  Description of Artificial Sequence: Synthetic oligonucleotide
  Antisense Strand to SEQ ID NO: 340163
guguuaggaagcaucaucu

SEQ ID NO: 340165 - RNA, 19 nt, Artificial Sequence
  Description of Artificial Sequence: Synthetic oligonucleotide
  Sense Strand Starting at position 271 of SEQ ID NO: 318215
uauuucuugcucuguagga

SEQ ID NO: 340166 - RNA, 19 nt, Artificial Sequence
  Description of Artificial Sequence: Synthetic oligonucleotide
  Antisense Strand to SEQ ID NO: 340165
uccuacagagcaagaaaua

SEQ ID NO: 340167 - RNA, 19 nt, Artificial Sequence
  Description of Artificial Sequence: Synthetic oligonucleotide
  Sense Strand Starting at position 271 of SEQ ID NO: 318217
uuucuugcucuguaggaau

SEQ ID NO: 340168 - RNA, 19 nt, Artificial Sequence
  Description of Artificial Sequence: Synthetic oligonucleotide
  Antisense Strand to SEQ ID NO: 340167
auuccuacagagcaagaaa

SEQ ID NO: 340169 - RNA, 19 nt, Artificial Sequence
  Description of Artificial Sequence: Synthetic oligonucleotide
  Sense Strand Starting at position 271 of SEQ ID NO: 318575
ccaccugugcuuuagauag

SEQ ID NO: 340170 - RNA, 19 nt, Artificial Sequence
  Description of Artificial Sequence: Synthetic oligonucleotide
  Antisense Strand to SEQ ID NO: 340169
cuaucuaaagcacaggugg

SEQ ID NO: 340171 - RNA, 19 nt, Artificial Sequence
  Description of Artificial Sequence: Synthetic oligonucleotide
  Sense Strand Starting at position 271 of SEQ ID NO: 318585
uuuagauagucuucuacuc

SEQ ID NO: 340172 - RNA, 19 nt, Artificial Sequence
  Description of Artificial Sequence: Synthetic oligonucleotide
  Antisense Strand to SEQ ID NO: 340171
gaguagaagacuaucuaaa

SEQ ID NO: 340173 - RNA, 19 nt, Artificial Sequence
  Description of Artificial Sequence: Synthetic oligonucleotide
  Sense Strand Starting at position 271 of SEQ ID NO: 318787
gaaggaauucucuguacuu

SEQ ID NO: 340174 - RNA, 19 nt, Artificial Sequence
  Description of Artificial Sequence: Synthetic oligonucleotide
  Antisense Strand to SEQ ID NO: 340173
aaguacagagaauuccuuc

SEQ ID NO: 340175 - RNA, 19 nt, Artificial Sequence
  Description of Artificial Sequence: Synthetic oligonucleotide
  Sense Strand Starting at position 271 of SEQ ID NO: 318789
aggaauucucuguacuuac

SEQ ID NO: 340176 - RNA, 19 nt, Artificial Sequence
  Description of Artificial Sequence: Synthetic oligonucleotide
  Antisense Strand to SEQ ID NO: 340175
guaaguacagagaauuccu

SEQ ID NO: 340177 - RNA, 19 nt, Artificial Sequence
  Description of Artificial Sequence: Synthetic oligonucleotide
  Sense Strand Starting at position 271 of SEQ ID NO: 318837
uugaaucugcuuugauuag

SEQ ID NO: 340178 - RNA, 19 nt, Artificial Sequence
  Description of Artificial Sequence: Synthetic oligonucleotide
  Antisense Strand to SEQ ID NO: 340177
cuaaucaaagcagauucaa

SEQ ID NO: 340179 - RNA, 19 nt, Artificial Sequence
  Description of Artificial Sequence: Synthetic oligonucleotide
  Sense Strand Starting at position 271 of SEQ ID NO: 318865
cccacuguuccacauaagu

SEQ ID NO: 340180 - RNA, 19 nt, Artificial Sequence
  Description of Artificial Sequence: Synthetic oligonucleotide
  Antisense Strand to SEQ ID NO: 340179
acuuauguggaacaguggg

SEQ ID NO: 340181 - RNA, 19 nt, Artificial Sequence
  Description of Artificial Sequence: Synthetic oligonucleotide
  Sense Strand Starting at position 271 of SEQ ID NO: 318917
agaauaaugcaauggucaa

SEQ ID NO: 340182 - RNA, 19 nt, Artificial Sequence
  Description of Artificial Sequence: Synthetic oligonucleotide
  Antisense Strand to SEQ ID NO: 340181
uugaccauugcauuauucu

SEQ ID NO: 340183 - RNA, 19 nt, Artificial Sequence
  Description of Artificial Sequence: Synthetic oligonucleotide
  Sense Strand Starting at position 271 of SEQ ID NO: 318929
uggucaacuuaguccuaau

SEQ ID NO: 340184 - RNA, 19 nt, Artificial Sequence
  Description of Artificial Sequence: Synthetic oligonucleotide
  Antisense Strand to SEQ ID NO: 340183
auuaggacuaaguugacca

SEQ ID NO: 340185 - RNA, 19 nt, Artificial Sequence
  Description of Artificial Sequence: Synthetic oligonucleotide
  Sense Strand Starting at position 271 of SEQ ID NO: 319058
ucagaucccuuugcugaua

SEQ ID NO: 340186 - RNA, 19 nt, Artificial Sequence
  Description of Artificial Sequence: Synthetic oligonucleotide
  Antisense Strand to SEQ ID NO: 340185
uaucagcaaagggaucuga

SEQ ID NO: 340187 - RNA, 19 nt, Artificial Sequence
  Description of Artificial Sequence: Synthetic oligonucleotide
  Sense Strand Starting at position 272 of SEQ ID NO: 315497
cuagcagguucccuaucaa

SEQ ID NO: 340188 - RNA, 19 nt, Artificial Sequence
  Description of Artificial Sequence: Synthetic oligonucleotide
  Antisense Strand to SEQ ID NO: 340187
uugauagggaaccugcuag

SEQ ID NO: 340189 - RNA, 19 nt, Artificial Sequence
  Description of Artificial Sequence: Synthetic oligonucleotide
  Sense Strand Starting at position 272 of SEQ ID NO: 315529
gcacccacccauugaagaa

SEQ ID NO: 340190 - RNA, 19 nt, Artificial Sequence
  Description of Artificial Sequence: Synthetic oligonucleotide
  Antisense Strand to SEQ ID NO: 340189
uucuucaaugggugggugc

SEQ ID NO: 340191 - RNA, 19 nt, Artificial Sequence
  Description of Artificial Sequence: Synthetic oligonucleotide
  Sense Strand Starting at position 272 of SEQ ID NO: 315598
guaagucagcaguggauuu

SEQ ID NO: 340192 - RNA, 19 nt, Artificial Sequence
  Description of Artificial Sequence: Synthetic oligonucleotide
  Antisense Strand to SEQ ID NO: 340191
aaauccacugcugacuuac

SEQ ID NO: 340193 - RNA, 19 nt, Artificial Sequence
  Description of Artificial Sequence: Synthetic oligonucleotide
  Sense Strand Starting at position 272 of SEQ ID NO: 315705
gguucucagcagugaugaa

SEQ ID NO: 340194 - RNA, 19 nt, Artificial Sequence
  Description of Artificial Sequence: Synthetic oligonucleotide
  Antisense Strand to SEQ ID NO: 340193
uucaucacugcugagaacc

SEQ ID NO: 340195 - RNA, 19 nt, Artificial Sequence
  Description of Artificial Sequence: Synthetic oligonucleotide
  Sense Strand Starting at position 272 of SEQ ID NO: 315730
gccucaucugaaggaguua

SEQ ID NO: 340196 - RNA, 19 nt, Artificial Sequence
  Description of Artificial Sequence: Synthetic oligonucleotide
  Antisense Strand to SEQ ID NO: 340195
uaacuccuucagaugaggc

SEQ ID NO: 340197 - RNA, 19 nt, Artificial Sequence
  Description of Artificial Sequence: Synthetic oligonucleotide
  Sense Strand Starting at position 272 of SEQ ID NO: 315759
ugggaauuaucuucucuac

SEQ ID NO: 340198 - RNA, 19 nt, Artificial Sequence
  Description of Artificial Sequence: Synthetic oligonucleotide
  Antisense Strand to SEQ ID NO: 340197
guagagaagauaauuccca

SEQ ID NO: 340199 - RNA, 19 nt, Artificial Sequence
  Description of Artificial Sequence: Synthetic oligonucleotide
  Sense Strand Starting at position 272 of SEQ ID NO: 315824
auuguagcacuguaaacuu

SEQ ID NO: 340200 - RNA, 19 nt, Artificial Sequence
  Description of Artificial Sequence: Synthetic oligonucleotide
  Antisense Strand to SEQ ID NO: 340199
aaguuuacagugcuacaau

SEQ ID NO: 340201 - RNA, 19 nt, Artificial Sequence
  Description of Artificial Sequence: Synthetic oligonucleotide
  Sense Strand Starting at position 272 of SEQ ID NO: 315863
aaucuugcagugugaauuu

SEQ ID NO: 340202 - RNA, 19 nt, Artificial Sequence
  Description of Artificial Sequence: Synthetic oligonucleotide
  Antisense Strand to SEQ ID NO: 340201
aaauucacacugcaagauu

SEQ ID NO: 340203 - RNA, 19 nt, Artificial Sequence
  Description of Artificial Sequence: Synthetic oligonucleotide
  Sense Strand Starting at position 272 of SEQ ID NO: 315943
cugacacccugaguuaaca

SEQ ID NO: 340204 - RNA, 19 nt, Artificial Sequence
  Description of Artificial Sequence: Synthetic oligonucleotide
  Antisense Strand to SEQ ID NO: 340203
uguuaacucagggugucag

SEQ ID NO: 340205 - RNA, 19 nt, Artificial Sequence
  Description of Artificial Sequence: Synthetic oligonucleotide
  Sense Strand Starting at position 272 of SEQ ID NO: 316006
aaaugugauguaugaagca

SEQ ID NO: 340206 - RNA, 19 nt, Artificial Sequence
  Description of Artificial Sequence: Synthetic oligonucleotide
  Antisense Strand to SEQ ID NO: 340205
ugcuucauacaucacauuu

SEQ ID NO: 340207 - RNA, 19 nt, Artificial Sequence
  Description of Artificial Sequence: Synthetic oligonucleotide
  Sense Strand Starting at position 272 of SEQ ID NO: 316100
ccuccagcacuuugaaaga

SEQ ID NO: 340208 - RNA, 19 nt, Artificial Sequence
  Description of Artificial Sequence: Synthetic oligonucleotide
  Antisense Strand to SEQ ID NO: 340207
ucuuucaaagugcuggagg

SEQ ID NO: 340209 - RNA, 19 nt, Artificial Sequence
  Description of Artificial Sequence: Synthetic oligonucleotide
  Sense Strand Starting at position 272 of SEQ ID NO: 316127
uggagacuugcacacagua

SEQ ID NO: 340210 - RNA, 19 nt, Artificial Sequence
  Description of Artificial Sequence: Synthetic oligonucleotide
  Antisense Strand to SEQ ID NO: 340209
uacugugugcaagucucca

SEQ ID NO: 340211 - RNA, 19 nt, Artificial Sequence
  Description of Artificial Sequence: Synthetic oligonucleotide
  Sense Strand Starting at position 272 of SEQ ID NO: 316201
aucacaguuucguuuggga

SEQ ID NO: 340212 - RNA, 19 nt, Artificial Sequence
  Description of Artificial Sequence: Synthetic oligonucleotide
  Antisense Strand to SEQ ID NO: 340211
ucccaaacgaaacugugau

SEQ ID NO: 340213 - RNA, 19 nt, Artificial Sequence
  Description of Artificial Sequence: Synthetic oligonucleotide
  Sense Strand Starting at position 272 of SEQ ID NO: 316208
uuucguuugggacagaaua

SEQ ID NO: 340214 - RNA, 19 nt, Artificial Sequence
  Description of Artificial Sequence: Synthetic oligonucleotide
  Antisense Strand to SEQ ID NO: 340213
uauucugucccaaacgaaa

SEQ ID NO: 340215 - RNA, 19 nt, Artificial Sequence
  Description of Artificial Sequence: Synthetic oligonucleotide
  Sense Strand Starting at position 272 of SEQ ID NO: 316238
aaccaagaguguuuagaag

SEQ ID NO: 340216 - RNA, 19 nt, Artificial Sequence
  Description of Artificial Sequence: Synthetic oligonucleotide
  Antisense Strand to SEQ ID NO: 340215
cuucuaaacacucuugguu

SEQ ID NO: 340217 - RNA, 19 nt, Artificial Sequence
  Description of Artificial Sequence: Synthetic oligonucleotide
  Sense Strand Starting at position 272 of SEQ ID NO: 316356
ggcucaaauguaggacuaa

SEQ ID NO: 340218 - RNA, 19 nt, Artificial Sequence
  Description of Artificial Sequence: Synthetic oligonucleotide
  Antisense Strand to SEQ ID NO: 340217
uuaguccuacauuugagcc

SEQ ID NO: 340219 - RNA, 19 nt, Artificial Sequence
  Description of Artificial Sequence: Synthetic oligonucleotide
  Sense Strand Starting at position 272 of SEQ ID NO: 316367
aggacuaagugacuucuaa

SEQ ID NO: 340220 - RNA, 19 nt, Artificial Sequence
  Description of Artificial Sequence: Synthetic oligonucleotide
  Antisense Strand to SEQ ID NO: 340219
uuagaagucacuuaguccu

SEQ ID NO: 340221 - RNA, 19 nt, Artificial Sequence
  Description of Artificial Sequence: Synthetic oligonucleotide
  Sense Strand Starting at position 272 of SEQ ID NO: 316413
ucagaaucccguggaggau

SEQ ID NO: 340222 - RNA, 19 nt, Artificial Sequence
  Description of Artificial Sequence: Synthetic oligonucleotide
  Antisense Strand to SEQ ID NO: 340221
auccuccacgggauucuga

SEQ ID NO: 340223 - RNA, 19 nt, Artificial Sequence
  Description of Artificial Sequence: Synthetic oligonucleotide
  Sense Strand Starting at position 272 of SEQ ID NO: 316414
cagaaucccguggaggauu

SEQ ID NO: 340224 - RNA, 19 nt, Artificial Sequence
  Description of Artificial Sequence: Synthetic oligonucleotide
  Antisense Strand to SEQ ID NO: 340223
aauccuccacgggauucug

SEQ ID NO: 340225 - RNA, 19 nt, Artificial Sequence
  Description of Artificial Sequence: Synthetic oligonucleotide
  Sense Strand Starting at position 272 of SEQ ID NO: 316666
aggugcaaaucaccagaaa

SEQ ID NO: 340226 - RNA, 19 nt, Artificial Sequence
  Description of Artificial Sequence: Synthetic oligonucleotide
  Antisense Strand to SEQ ID NO: 340225
uuucuggugauuugcaccu

SEQ ID NO: 340227 - RNA, 19 nt, Artificial Sequence
  Description of Artificial Sequence: Synthetic oligonucleotide
  Sense Strand Starting at position 272 of SEQ ID NO: 316685
ggagaauccuucucacauc

SEQ ID NO: 340228 - RNA, 19 nt, Artificial Sequence
  Description of Artificial Sequence: Synthetic oligonucleotide
  Antisense Strand to SEQ ID NO: 340227
gaugugagaaggauucucc

SEQ ID NO: 340229 - RNA, 19 nt, Artificial Sequence
  Description of Artificial Sequence: Synthetic oligonucleotide
  Sense Strand Starting at position 272 of SEQ ID NO: 316705
accugucuacucgagguuu

SEQ ID NO: 340230 - RNA, 19 nt, Artificial Sequence
  Description of Artificial Sequence: Synthetic oligonucleotide
  Antisense Strand to SEQ ID NO: 340229
aaaccucgaguagacaggu

SEQ ID NO: 340231 - RNA, 19 nt, Artificial Sequence
  Description of Artificial Sequence: Synthetic oligonucleotide
  Sense Strand Starting at position 272 of SEQ ID NO: 317516
guguacucagguugagauu

SEQ ID NO: 340232 - RNA, 19 nt, Artificial Sequence
  Description of Artificial Sequence: Synthetic oligonucleotide
  Antisense Strand to SEQ ID NO: 340231
aaucucaaccugaguacac

SEQ ID NO: 340233 - RNA, 19 nt, Artificial Sequence
  Description of Artificial Sequence: Synthetic oligonucleotide
  Sense Strand Starting at position 272 of SEQ ID NO: 317634
gcugucugugaagagauau

SEQ ID NO: 340234 - RNA, 19 nt, Artificial Sequence
  Description of Artificial Sequence: Synthetic oligonucleotide
  Antisense Strand to SEQ ID NO: 340233
auaucucuucacagacagc

SEQ ID NO: 340235 - RNA, 19 nt, Artificial Sequence
  Description of Artificial Sequence: Synthetic oligonucleotide
  Sense Strand Starting at position 272 of SEQ ID NO: 317640
ugugaagagauauguuaca

SEQ ID NO: 340236 - RNA, 19 nt, Artificial Sequence
  Description of Artificial Sequence: Synthetic oligonucleotide
  Antisense Strand to SEQ ID NO: 340235
uguaacauaucucuucaca

SEQ ID NO: 340237 - RNA, 19 nt, Artificial Sequence
  Description of Artificial Sequence: Synthetic oligonucleotide
  Sense Strand Starting at position 272 of SEQ ID NO: 318013
uggaauagucaggguuaug

SEQ ID NO: 340238 - RNA, 19 nt, Artificial Sequence
  Description of Artificial Sequence: Synthetic oligonucleotide
  Antisense Strand to SEQ ID NO: 340237
cauaacccugacuauucca

SEQ ID NO: 340239 - RNA, 19 nt, Artificial Sequence
  Description of Artificial Sequence: Synthetic oligonucleotide
  Sense Strand Starting at position 272 of SEQ ID NO: 318032
ggguguucugcacagaaca

SEQ ID NO: 340240 - RNA, 19 nt, Artificial Sequence
  Description of Artificial Sequence: Synthetic oligonucleotide
  Antisense Strand to SEQ ID NO: 340239
uguucugugcagaacaccc

SEQ ID NO: 340241 - RNA, 19 nt, Artificial Sequence
  Description of Artificial Sequence: Synthetic oligonucleotide
  Sense Strand Starting at position 272 of SEQ ID NO: 318063
ggauuugaaugccaagacu

SEQ ID NO: 340242 - RNA, 19 nt, Artificial Sequence
  Description of Artificial Sequence: Synthetic oligonucleotide
  Antisense Strand to SEQ ID NO: 340241
agucuuggcauucaaaucc

SEQ ID NO: 340243 - RNA, 19 nt, Artificial Sequence
  Description of Artificial Sequence: Synthetic oligonucleotide
  Sense Strand Starting at position 272 of SEQ ID NO: 318101
gucucagauuuguccaggu

SEQ ID NO: 340244 - RNA, 19 nt, Artificial Sequence
  Description of Artificial Sequence: Synthetic oligonucleotide
  Antisense Strand to SEQ ID NO: 340243
accuggacaaaucugagac

SEQ ID NO: 340245 - RNA, 19 nt, Artificial Sequence
  Description of Artificial Sequence: Synthetic oligonucleotide
  Sense Strand Starting at position 272 of SEQ ID NO: 318134
uuccauuggucaccagagu

SEQ ID NO: 340246 - RNA, 19 nt, Artificial Sequence
  Description of Artificial Sequence: Synthetic oligonucleotide
  Antisense Strand to SEQ ID NO: 340245
acucuggugaccaauggaa

SEQ ID NO: 340247 - RNA, 19 nt, Artificial Sequence
  Description of Artificial Sequence: Synthetic oligonucleotide
  Sense Strand Starting at position 272 of SEQ ID NO: 318165
gaaucuaugggcuggaaua

SEQ ID NO: 340248 - RNA, 19 nt, Artificial Sequence
  Description of Artificial Sequence: Synthetic oligonucleotide
  Antisense Strand to SEQ ID NO: 340247
uauuccagcccauagauuc

SEQ ID NO: 340249 - RNA, 19 nt, Artificial Sequence
  Description of Artificial Sequence: Synthetic oligonucleotide
  Sense Strand Starting at position 272 of SEQ ID NO: 318166
aaucuaugggcuggaauau

SEQ ID NO: 340250 - RNA, 19 nt, Artificial Sequence
  Description of Artificial Sequence: Synthetic oligonucleotide
  Antisense Strand to SEQ ID NO: 340249
auauuccagcccauagauu

SEQ ID NO: 340251 - RNA, 19 nt, Artificial Sequence
  Description of Artificial Sequence: Synthetic oligonucleotide
  Sense Strand Starting at position 272 of SEQ ID NO: 318275
uacccucaguguguaaaga

SEQ ID NO: 340252 - RNA, 19 nt, Artificial Sequence
  Description of Artificial Sequence: Synthetic oligonucleotide
  Antisense Strand to SEQ ID NO: 340251
ucuuuacacacugagggua

SEQ ID NO: 340253 - RNA, 19 nt, Artificial Sequence
  Description of Artificial Sequence: Synthetic oligonucleotide
  Sense Strand Starting at position 272 of SEQ ID NO: 318276
acccucaguguguaaagau

SEQ ID NO: 340254 - RNA, 19 nt, Artificial Sequence
  Description of Artificial Sequence: Synthetic oligonucleotide
  Antisense Strand to SEQ ID NO: 340253
aucuuuacacacugagggu

SEQ ID NO: 340255 - RNA, 19 nt, Artificial Sequence
  Description of Artificial Sequence: Synthetic oligonucleotide
  Sense Strand Starting at position 272 of SEQ ID NO: 318725
aaaguagaaguuuggaguu

SEQ ID NO: 340256 - RNA, 19 nt, Artificial Sequence
  Description of Artificial Sequence: Synthetic oligonucleotide
  Antisense Strand to SEQ ID NO: 340255
aacuccaaacuucuacuuu

SEQ ID NO: 340257 - RNA, 19 nt, Artificial Sequence
  Description of Artificial Sequence: Synthetic oligonucleotide
  Sense Strand Starting at position 272 of SEQ ID NO: 318732
aaguuuggaguuuaauauc

SEQ ID NO: 340258 - RNA, 19 nt, Artificial Sequence
  Description of Artificial Sequence: Synthetic oligonucleotide
  Antisense Strand to SEQ ID NO: 340257
gauauuaaacuccaaacuu

SEQ ID NO: 340259 - RNA, 19 nt, Artificial Sequence
  Description of Artificial Sequence: Synthetic oligonucleotide
  Sense Strand Starting at position 272 of SEQ ID NO: 319061
guugauucccacugggaaa

SEQ ID NO: 340260 - RNA, 19 nt, Artificial Sequence
  Description of Artificial Sequence: Synthetic oligonucleotide
  Antisense Strand to SEQ ID NO: 340259
uuucccagugggaaucaac

SEQ ID NO: 340261 - RNA, 19 nt, Artificial Sequence
  Description of Artificial Sequence: Synthetic oligonucleotide
  Sense Strand Starting at position 272 of SEQ ID NO: 319075
ggaaauauugaugguaugu

SEQ ID NO: 340262 - RNA, 19 nt, Artificial Sequence
  Description of Artificial Sequence: Synthetic oligonucleotide
  Antisense Strand to SEQ ID NO: 340261
acauaccaucaauauuucc

SEQ ID NO: 340263 - RNA, 19 nt, Artificial Sequence
  Description of Artificial Sequence: Synthetic oligonucleotide
  Sense Strand Starting at position 272 of SEQ ID NO: 319084
gaugguaugucugcaaaug

SEQ ID NO: 340264 - RNA, 19 nt, Artificial Sequence
  Description of Artificial Sequence: Synthetic oligonucleotide
  Antisense Strand to SEQ ID NO: 340263
cauuugcagacauaccauc

SEQ ID NO: 340265 - RNA, 19 nt, Artificial Sequence
  Description of Artificial Sequence: Synthetic oligonucleotide
  Sense Strand Starting at position 272 of SEQ ID NO: 319085
augguaugucugcaaaugu

SEQ ID NO: 340266 - RNA, 19 nt, Artificial Sequence
  Description of Artificial Sequence: Synthetic oligonucleotide
  Antisense Strand to SEQ ID NO: 340265
acauuugcagacauaccau

SEQ ID NO: 340267 - RNA, 19 nt, Artificial Sequence
  Description of Artificial Sequence: Synthetic oligonucleotide
  Sense Strand Starting at position 273 of SEQ ID NO: 315377
cuaacuguuguuuaguaau

SEQ ID NO: 340268 - RNA, 19 nt, Artificial Sequence
  Description of Artificial Sequence: Synthetic oligonucleotide
  Antisense Strand to SEQ ID NO: 340267
auuacuaaacaacaguuag

SEQ ID NO: 340269 - RNA, 19 nt, Artificial Sequence
  Description of Artificial Sequence: Synthetic oligonucleotide
  Sense Strand Starting at position 273 of SEQ ID NO: 315995
aaugguuacuagguaaguu

SEQ ID NO: 340270 - RNA, 19 nt, Artificial Sequence
  Description of Artificial Sequence: Synthetic oligonucleotide
  Antisense Strand to SEQ ID NO: 340269
aacuuaccuaguaaccauu

SEQ ID NO: 340271 - RNA, 19 nt, Artificial Sequence
  Description of Artificial Sequence: Synthetic oligonucleotide
  Sense Strand Starting at position 273 of SEQ ID NO: 316075
gcagaccuguguguuauuu

SEQ ID NO: 340272 - RNA, 19 nt, Artificial Sequence
  Description of Artificial Sequence: Synthetic oligonucleotide
  Antisense Strand to SEQ ID NO: 340271
aaauaacacacaggucugc

SEQ ID NO: 340273 - RNA, 19 nt, Artificial Sequence
  Description of Artificial Sequence: Synthetic oligonucleotide
  Sense Strand Starting at position 273 of SEQ ID NO: 316108
ccaucugaucgaggcauaa

SEQ ID NO: 340274 - RNA, 19 nt, Artificial Sequence
  Description of Artificial Sequence: Synthetic oligonucleotide
  Antisense Strand to SEQ ID NO: 340273
uuaugccucgaucagaugg

SEQ ID NO: 340275 - RNA, 19 nt, Artificial Sequence
  Description of Artificial Sequence: Synthetic oligonucleotide
  Sense Strand Starting at position 273 of SEQ ID NO: 316110
aucugaucgaggcauaaug

SEQ ID NO: 340276 - RNA, 19 nt, Artificial Sequence
  Description of Artificial Sequence: Synthetic oligonucleotide
  Antisense Strand to SEQ ID NO: 340275
cauuaugccucgaucagau

SEQ ID NO: 340277 - RNA, 19 nt, Artificial Sequence
  Description of Artificial Sequence: Synthetic oligonucleotide
  Sense Strand Starting at position 273 of SEQ ID NO: 316261
ccugaaacccugugaagac

SEQ ID NO: 340278 - RNA, 19 nt, Artificial Sequence
  Description of Artificial Sequence: Synthetic oligonucleotide
  Antisense Strand to SEQ ID NO: 340277
gucuucacaggguuucagg

SEQ ID NO: 340279 - RNA, 19 nt, Artificial Sequence
  Description of Artificial Sequence: Synthetic oligonucleotide
  Sense Strand Starting at position 273 of SEQ ID NO: 316408
ucugauaagguccaucacu

SEQ ID NO: 340280 - RNA, 19 nt, Artificial Sequence
  Description of Artificial Sequence: Synthetic oligonucleotide
  Antisense Strand to SEQ ID NO: 340279
agugauggaccuuaucaga

SEQ ID NO: 340281 - RNA, 19 nt, Artificial Sequence
  Description of Artificial Sequence: Synthetic oligonucleotide
  Sense Strand Starting at position 273 of SEQ ID NO: 316427
acgucugaaccaugaaaca

SEQ ID NO: 340282 - RNA, 19 nt, Artificial Sequence
  Description of Artificial Sequence: Synthetic oligonucleotide
  Antisense Strand to SEQ ID NO: 340281
uguuucaugguucagacgu

SEQ ID NO: 340283 - RNA, 19 nt, Artificial Sequence
  Description of Artificial Sequence: Synthetic oligonucleotide
  Sense Strand Starting at position 273 of SEQ ID NO: 316460
auggcuucuacuugagaag

SEQ ID NO: 340284 - RNA, 19 nt, Artificial Sequence
  Description of Artificial Sequence: Synthetic oligonucleotide
  Antisense Strand to SEQ ID NO: 340283
cuucucaaguagaagccau

SEQ ID NO: 340285 - RNA, 19 nt, Artificial Sequence
  Description of Artificial Sequence: Synthetic oligonucleotide
  Sense Strand Starting at position 273 of SEQ ID NO: 316476
aagcucaaggcuuagagau

SEQ ID NO: 340286 - RNA, 19 nt, Artificial Sequence
  Description of Artificial Sequence: Synthetic oligonucleotide
  Antisense Strand to SEQ ID NO: 340285
aucucuaagccuugagcuu

SEQ ID NO: 340287 - RNA, 19 nt, Artificial Sequence
  Description of Artificial Sequence: Synthetic oligonucleotide
  Sense Strand Starting at position 273 of SEQ ID NO: 316593
uaaguugcucuggacaaga

SEQ ID NO: 340288 - RNA, 19 nt, Artificial Sequence
  Description of Artificial Sequence: Synthetic oligonucleotide
  Antisense Strand to SEQ ID NO: 340287
ucuuguccagagcaacuua

SEQ ID NO: 340289 - RNA, 19 nt, Artificial Sequence
  Description of Artificial Sequence: Synthetic oligonucleotide
  Sense Strand Starting at position 273 of SEQ ID NO: 316612
accaauuauuuaggagaug

SEQ ID NO: 340290 - RNA, 19 nt, Artificial Sequence
  Description of Artificial Sequence: Synthetic oligonucleotide
  Antisense Strand to SEQ ID NO: 340289
caucuccuaaauaauuggu

SEQ ID NO: 340291 - RNA, 19 nt, Artificial Sequence
  Description of Artificial Sequence: Synthetic oligonucleotide
  Sense Strand Starting at position 273 of SEQ ID NO: 316654
gugucuuaaguccacagga

SEQ ID NO: 340292 - RNA, 19 nt, Artificial Sequence
  Description of Artificial Sequence: Synthetic oligonucleotide
  Antisense Strand to SEQ ID NO: 340291
uccuguggacuuaagacac

SEQ ID NO: 340293 - RNA, 19 nt, Artificial Sequence
  Description of Artificial Sequence: Synthetic oligonucleotide
  Sense Strand Starting at position 273 of SEQ ID NO: 316656
gucuuaaguccacaggaca

SEQ ID NO: 340294 - RNA, 19 nt, Artificial Sequence
  Description of Artificial Sequence: Synthetic oligonucleotide
  Antisense Strand to SEQ ID NO: 340293
uguccuguggacuuaagac

SEQ ID NO: 340295 - RNA, 19 nt, Artificial Sequence
  Description of Artificial Sequence: Synthetic oligonucleotide
  Sense Strand Starting at position 273 of SEQ ID NO: 316706
gaagcuuucucuccaggga

SEQ ID NO: 340296 - RNA, 19 nt, Artificial Sequence
  Description of Artificial Sequence: Synthetic oligonucleotide
  Antisense Strand to SEQ ID NO: 340295
ucccuggagagaaagcuuc

SEQ ID NO: 340297 - RNA, 19 nt, Artificial Sequence
  Description of Artificial Sequence: Synthetic oligonucleotide
  Sense Strand Starting at position 273 of SEQ ID NO: 317258
caaauuguuguggauauua

SEQ ID NO: 340298 - RNA, 19 nt, Artificial Sequence
  Description of Artificial Sequence: Synthetic oligonucleotide
  Antisense Strand to SEQ ID NO: 340297
uaauauccacaacaauuug

SEQ ID NO: 340299 - RNA, 19 nt, Artificial Sequence
  Description of Artificial Sequence: Synthetic oligonucleotide
  Sense Strand Starting at position 273 of SEQ ID NO: 317269
ggauauuauuugggaauua

SEQ ID NO: 340300 - RNA, 19 nt, Artificial Sequence
  Description of Artificial Sequence: Synthetic oligonucleotide
  Antisense Strand to SEQ ID NO: 340299
uaauucccaaauaauaucc

SEQ ID NO: 340301 - RNA, 19 nt, Artificial Sequence
  Description of Artificial Sequence: Synthetic oligonucleotide
  Sense Strand Starting at position 273 of SEQ ID NO: 317319
uaauaaauuggguguaaca

SEQ ID NO: 340302 - RNA, 19 nt, Artificial Sequence
  Description of Artificial Sequence: Synthetic oligonucleotide
  Antisense Strand to SEQ ID NO: 340301
uguuacacccaauuuauua

SEQ ID NO: 340303 - RNA, 19 nt, Artificial Sequence
  Description of Artificial Sequence: Synthetic oligonucleotide
  Sense Strand Starting at position 273 of SEQ ID NO: 317343
caaggaauuucugagguuc

SEQ ID NO: 340304 - RNA, 19 nt, Artificial Sequence
  Description of Artificial Sequence: Synthetic oligonucleotide
  Antisense Strand to SEQ ID NO: 340303
gaaccucagaaauuccuug

SEQ ID NO: 340305 - RNA, 19 nt, Artificial Sequence
  Description of Artificial Sequence: Synthetic oligonucleotide
  Sense Strand Starting at position 273 of SEQ ID NO: 317619
ucauaaucucgccaucaug

SEQ ID NO: 340306 - RNA, 19 nt, Artificial Sequence
  Description of Artificial Sequence: Synthetic oligonucleotide
  Antisense Strand to SEQ ID NO: 340305
caugauggcgagauuauga

SEQ ID NO: 340307 - RNA, 19 nt, Artificial Sequence
  Description of Artificial Sequence: Synthetic oligonucleotide
  Sense Strand Starting at position 273 of SEQ ID NO: 317648
uguacuuuaucuuugaaga

SEQ ID NO: 340308 - RNA, 19 nt, Artificial Sequence
  Description of Artificial Sequence: Synthetic oligonucleotide
  Antisense Strand to SEQ ID NO: 340307
ucuucaaagauaaaguaca

SEQ ID NO: 340309 - RNA, 19 nt, Artificial Sequence
  Description of Artificial Sequence: Synthetic oligonucleotide
  Sense Strand Starting at position 273 of SEQ ID NO: 317649
guacuuuaucuuugaagac

SEQ ID NO: 340310 - RNA, 19 nt, Artificial Sequence
  Description of Artificial Sequence: Synthetic oligonucleotide
  Antisense Strand to SEQ ID NO: 340309
gucuucaaagauaaaguac

SEQ ID NO: 340311 - RNA, 19 nt, Artificial Sequence
  Description of Artificial Sequence: Synthetic oligonucleotide
  Sense Strand Starting at position 273 of SEQ ID NO: 317773
ugucuugcuccucagaaua

SEQ ID NO: 340312 - RNA, 19 nt, Artificial Sequence
  Description of Artificial Sequence: Synthetic oligonucleotide
  Antisense Strand to SEQ ID NO: 340311
uauucugaggagcaagaca

SEQ ID NO: 340313 - RNA, 19 nt, Artificial Sequence
  Description of Artificial Sequence: Synthetic oligonucleotide
  Sense Strand Starting at position 273 of SEQ ID NO: 317787
gaauaaggagcucagcuua

SEQ ID NO: 340314 - RNA, 19 nt, Artificial Sequence
  Description of Artificial Sequence: Synthetic oligonucleotide
  Antisense Strand to SEQ ID NO: 340313
uaagcugagcuccuuauuc

SEQ ID NO: 340315 - RNA, 19 nt, Artificial Sequence
  Description of Artificial Sequence: Synthetic oligonucleotide
  Sense Strand Starting at position 273 of SEQ ID NO: 318122
ggacauuuaucaugagaag

SEQ ID NO: 340316 - RNA, 19 nt, Artificial Sequence
  Description of Artificial Sequence: Synthetic oligonucleotide
  Antisense Strand to SEQ ID NO: 340315
cuucucaugauaaaugucc

SEQ ID NO: 340317 - RNA, 19 nt, Artificial Sequence
  Description of Artificial Sequence: Synthetic oligonucleotide
  Sense Strand Starting at position 273 of SEQ ID NO: 318304
ggaggcaauguguaguaca

SEQ ID NO: 340318 - RNA, 19 nt, Artificial Sequence
  Description of Artificial Sequence: Synthetic oligonucleotide
  Antisense Strand to SEQ ID NO: 340317
uguacuacacauugccucc

SEQ ID NO: 340319 - RNA, 19 nt, Artificial Sequence
  Description of Artificial Sequence: Synthetic oligonucleotide
  Sense Strand Starting at position 273 of SEQ ID NO: 318609
gguaaagugagccacaauu

SEQ ID NO: 340320 - RNA, 19 nt, Artificial Sequence
  Description of Artificial Sequence: Synthetic oligonucleotide
  Antisense Strand to SEQ ID NO: 340319
aauuguggcucacuuuacc

SEQ ID NO: 340321 - RNA, 19 nt, Artificial Sequence
  Description of Artificial Sequence: Synthetic oligonucleotide
  Sense Strand Starting at position 273 of SEQ ID NO: 318671
ucaguuacccugcagauua

SEQ ID NO: 340322 - RNA, 19 nt, Artificial Sequence
  Description of Artificial Sequence: Synthetic oligonucleotide
  Antisense Strand to SEQ ID NO: 340321
uaaucugcaggguaacuga

SEQ ID NO: 340323 - RNA, 19 nt, Artificial Sequence
  Description of Artificial Sequence: Synthetic oligonucleotide
  Sense Strand Starting at position 273 of SEQ ID NO: 318673
aguuacccugcagauuaaa

SEQ ID NO: 340324 - RNA, 19 nt, Artificial Sequence
  Description of Artificial Sequence: Synthetic oligonucleotide
  Antisense Strand to SEQ ID NO: 340323
uuuaaucugcaggguaacu

SEQ ID NO: 340325 - RNA, 19 nt, Artificial Sequence
  Description of Artificial Sequence: Synthetic oligonucleotide
  Sense Strand Starting at position 273 of SEQ ID NO: 318943
augggaagaaaucgguauu

SEQ ID NO: 340326 - RNA, 19 nt, Artificial Sequence
  Description of Artificial Sequence: Synthetic oligonucleotide
  Antisense Strand to SEQ ID NO: 340325
aauaccgauuucuucccau

SEQ ID NO: 340327 - RNA, 19 nt, Artificial Sequence
  Description of Artificial Sequence: Synthetic oligonucleotide
  Sense Strand Starting at position 273 of SEQ ID NO: 318950
gaaaucgguauugagugaa

SEQ ID NO: 340328 - RNA, 19 nt, Artificial Sequence
  Description of Artificial Sequence: Synthetic oligonucleotide
  Antisense Strand to SEQ ID NO: 340327
uucacucaauaccgauuuc

SEQ ID NO: 340329 - RNA, 19 nt, Artificial Sequence
  Description of Artificial Sequence: Synthetic oligonucleotide
  Sense Strand Starting at position 273 of SEQ ID NO: 318953
aucgguauugagugaagga

SEQ ID NO: 340330 - RNA, 19 nt, Artificial Sequence
  Description of Artificial Sequence: Synthetic oligonucleotide
  Antisense Strand to SEQ ID NO: 340329
uccuucacucaauaccgau

SEQ ID NO: 340331 - RNA, 19 nt, Artificial Sequence
  Description of Artificial Sequence: Synthetic oligonucleotide
  Sense Strand Starting at position 273 of SEQ ID NO: 318954
ucgguauugagugaaggau

SEQ ID NO: 340332 - RNA, 19 nt, Artificial Sequence
  Description of Artificial Sequence: Synthetic oligonucleotide
  Antisense Strand to SEQ ID NO: 340331
auccuucacucaauaccga

SEQ ID NO: 340333 - RNA, 19 nt, Artificial Sequence
  Description of Artificial Sequence: Synthetic oligonucleotide
  Sense Strand Starting at position 273 of SEQ ID NO: 318956
gguauugagugaaggauga

SEQ ID NO: 340334 - RNA, 19 nt, Artificial Sequence
  Description of Artificial Sequence: Synthetic oligonucleotide
  Antisense Strand to SEQ ID NO: 340333
ucauccuucacucaauacc

SEQ ID NO: 340335 - RNA, 19 nt, Artificial Sequence
  Description of Artificial Sequence: Synthetic oligonucleotide
  Sense Strand Starting at position 273 of SEQ ID NO: 319045
uuuccauaugcagauguca

SEQ ID NO: 340336 - RNA, 19 nt, Artificial Sequence
  Description of Artificial Sequence: Synthetic oligonucleotide
  Antisense Strand to SEQ ID NO: 340335
ugacaucugcauauggaaa

SEQ ID NO: 340337 - RNA, 19 nt, Artificial Sequence
  Description of Artificial Sequence: Synthetic oligonucleotide
  Sense Strand Starting at position 273 of SEQ ID NO: 319088
aaaguuaaguucucuggau

SEQ ID NO: 340338 - RNA, 19 nt, Artificial Sequence
  Description of Artificial Sequence: Synthetic oligonucleotide
  Antisense Strand to SEQ ID NO: 340337
auccagagaacuuaacuuu

SEQ ID NO: 340339 - RNA, 19 nt, Artificial Sequence
  Description of Artificial Sequence: Synthetic oligonucleotide
  Sense Strand Starting at position 273 of SEQ ID NO: 319089
aaguuaaguucucuggauu

SEQ ID NO: 340340 - RNA, 19 nt, Artificial Sequence
  Description of Artificial Sequence: Synthetic oligonucleotide
  Antisense Strand to SEQ ID NO: 340339
aauccagagaacuuaacuu

SEQ ID NO: 340341 - RNA, 19 nt, Artificial Sequence
  Description of Artificial Sequence: Synthetic oligonucleotide
  Sense Strand Starting at position 273 of SEQ ID NO: 319090
aguuaaguucucuggauua

SEQ ID NO: 340342 - RNA, 19 nt, Artificial Sequence
  Description of Artificial Sequence: Synthetic oligonucleotide
  Antisense Strand to SEQ ID NO: 340341
uaauccagagaacuuaacu

SEQ ID NO: 340343 - RNA, 19 nt, Artificial Sequence
  Description of Artificial Sequence: Synthetic oligonucleotide
  Sense Strand Starting at position 273 of SEQ ID NO: 319107
uagcaucuuguggaacaau

SEQ ID NO: 340344 - RNA, 19 nt, Artificial Sequence
  Description of Artificial Sequence: Synthetic oligonucleotide
  Antisense Strand to SEQ ID NO: 340343
auuguuccacaagaugcua

SEQ ID NO: 340345 - RNA, 19 nt, Artificial Sequence
  Description of Artificial Sequence: Synthetic oligonucleotide
  Sense Strand Starting at position 273 of SEQ ID NO: 319164
gcuguaaggcuauacaaug

SEQ ID NO: 340346 - RNA, 19 nt, Artificial Sequence
  Description of Artificial Sequence: Synthetic oligonucleotide
  Antisense Strand to SEQ ID NO: 340345
cauuguauagccuuacagc

SEQ ID NO: 340347 - RNA, 19 nt, Artificial Sequence
  Description of Artificial Sequence: Synthetic oligonucleotide
  Sense Strand Starting at position 274 of SEQ ID NO: 315252
ugcugaagucauugacgaa

SEQ ID NO: 340348 - RNA, 19 nt, Artificial Sequence
  Description of Artificial Sequence: Synthetic oligonucleotide
  Antisense Strand to SEQ ID NO: 340347
uucgucaaugacuucagca

SEQ ID NO: 340349 - RNA, 19 nt, Artificial Sequence
  Description of Artificial Sequence: Synthetic oligonucleotide
  Sense Strand Starting at position 274 of SEQ ID NO: 315253
gcugaagucauugacgaag

SEQ ID NO: 340350 - RNA, 19 nt, Artificial Sequence
  Description of Artificial Sequence: Synthetic oligonucleotide
  Antisense Strand to SEQ ID NO: 340349
cuucgucaaugacuucagc

SEQ ID NO: 340351 - RNA, 19 nt, Artificial Sequence
  Description of Artificial Sequence: Synthetic oligonucleotide
  Sense Strand Starting at position 274 of SEQ ID NO: 315255
ugaagucauugacgaagaa

SEQ ID NO: 340352 - RNA, 19 nt, Artificial Sequence
  Description of Artificial Sequence: Synthetic oligonucleotide
  Antisense Strand to SEQ ID NO: 340351
uucuucgucaaugacuuca

SEQ ID NO: 340353 - RNA, 19 nt, Artificial Sequence
  Description of Artificial Sequence: Synthetic oligonucleotide
  Sense Strand Starting at position 274 of SEQ ID NO: 315328
auucuugaucccugaagug

SEQ ID NO: 340354 - RNA, 19 nt, Artificial Sequence
  Description of Artificial Sequence: Synthetic oligonucleotide
  Antisense Strand to SEQ ID NO: 340353
cacuucagggaucaagaau

SEQ ID NO: 340355 - RNA, 19 nt, Artificial Sequence
  Description of Artificial Sequence: Synthetic oligonucleotide
  Sense Strand Starting at position 274 of SEQ ID NO: 315422
gguccuuacccacagcaaa

SEQ ID NO: 340356 - RNA, 19 nt, Artificial Sequence
  Description of Artificial Sequence: Synthetic oligonucleotide
  Antisense Strand to SEQ ID NO: 340355
uuugcuguggguaaggacc

SEQ ID NO: 340357 - RNA, 19 nt, Artificial Sequence
  Description of Artificial Sequence: Synthetic oligonucleotide
  Sense Strand Starting at position 274 of SEQ ID NO: 315495
ggacuucccgucugugauc

SEQ ID NO: 340358 - RNA, 19 nt, Artificial Sequence
  Description of Artificial Sequence: Synthetic oligonucleotide
  Antisense Strand to SEQ ID NO: 340357
gaucacagacgggaagucc

SEQ ID NO: 340359 - RNA, 19 nt, Artificial Sequence
  Description of Artificial Sequence: Synthetic oligonucleotide
  Sense Strand Starting at position 274 of SEQ ID NO: 315500
ucccgucugugaucaggau

SEQ ID NO: 340360 - RNA, 19 nt, Artificial Sequence
  Description of Artificial Sequence: Synthetic oligonucleotide
  Antisense Strand to SEQ ID NO: 340359
auccugaucacagacggga

SEQ ID NO: 340361 - RNA, 19 nt, Artificial Sequence
  Description of Artificial Sequence: Synthetic oligonucleotide
  Sense Strand Starting at position 274 of SEQ ID NO: 315575
gggucaucuugggaggcau

SEQ ID NO: 340362 - RNA, 19 nt, Artificial Sequence
  Description of Artificial Sequence: Synthetic oligonucleotide
  Antisense Strand to SEQ ID NO: 340361
augccucccaagaugaccc

SEQ ID NO: 340363 - RNA, 19 nt, Artificial Sequence
  Description of Artificial Sequence: Synthetic oligonucleotide
  Sense Strand Starting at position 274 of SEQ ID NO: 315646
aagacauggucagccacau

SEQ ID NO: 340364 - RNA, 19 nt, Artificial Sequence
  Description of Artificial Sequence: Synthetic oligonucleotide
  Antisense Strand to SEQ ID NO: 340363
auguggcugaccaugucuu

SEQ ID NO: 340365 - RNA, 19 nt, Artificial Sequence
  Description of Artificial Sequence: Synthetic oligonucleotide
  Sense Strand Starting at position 274 of SEQ ID NO: 315761
cgaacucuguccuguugga

SEQ ID NO: 340366 - RNA, 19 nt, Artificial Sequence
  Description of Artificial Sequence: Synthetic oligonucleotide
  Antisense Strand to SEQ ID NO: 340365
uccaacaggacagaguucg

SEQ ID NO: 340367 - RNA, 19 nt, Artificial Sequence
  Description of Artificial Sequence: Synthetic oligonucleotide
  Sense Strand Starting at position 274 of SEQ ID NO: 315880
gucccuucguucugucauu

SEQ ID NO: 340368 - RNA, 19 nt, Artificial Sequence
  Description of Artificial Sequence: Synthetic oligonucleotide
  Antisense Strand to SEQ ID NO: 340367
aaugacagaacgaagggac

SEQ ID NO: 340369 - RNA, 19 nt, Artificial Sequence
  Description of Artificial Sequence: Synthetic oligonucleotide
  Sense Strand Starting at position 274 of SEQ ID NO: 316021
ggaacaagaugcugcuuaa

SEQ ID NO: 340370 - RNA, 19 nt, Artificial Sequence
  Description of Artificial Sequence: Synthetic oligonucleotide
  Antisense Strand to SEQ ID NO: 340369
uuaagcagcaucuuguucc

SEQ ID NO: 340371 - RNA, 19 nt, Artificial Sequence
  Description of Artificial Sequence: Synthetic oligonucleotide
  Sense Strand Starting at position 274 of SEQ ID NO: 316061
gguccagauguaggaaagu

SEQ ID NO: 340372 - RNA, 19 nt, Artificial Sequence
  Description of Artificial Sequence: Synthetic oligonucleotide
  Antisense Strand to SEQ ID NO: 340371
acuuuccuacaucuggacc

SEQ ID NO: 340373 - RNA, 19 nt, Artificial Sequence
  Description of Artificial Sequence: Synthetic oligonucleotide
  Sense Strand Starting at position 274 of SEQ ID NO: 316446
gggucaucgcuguacugca

SEQ ID NO: 340374 - RNA, 19 nt, Artificial Sequence
  Description of Artificial Sequence: Synthetic oligonucleotide
  Antisense Strand to SEQ ID NO: 340373
ugcaguacagcgaugaccc

SEQ ID NO: 340375 - RNA, 19 nt, Artificial Sequence
  Description of Artificial Sequence: Synthetic oligonucleotide
  Sense Strand Starting at position 274 of SEQ ID NO: 316513
gcaccagcccuucgagaaa

SEQ ID NO: 340376 - RNA, 19 nt, Artificial Sequence
  Description of Artificial Sequence: Synthetic oligonucleotide
  Antisense Strand to SEQ ID NO: 340375
uuucucgaagggcuggugc

SEQ ID NO: 340377 - RNA, 19 nt, Artificial Sequence
  Description of Artificial Sequence: Synthetic oligonucleotide
  Sense Strand Starting at position 274 of SEQ ID NO: 316534
ugcggaccucgcggaaauu

SEQ ID NO: 340378 - RNA, 19 nt, Artificial Sequence
  Description of Artificial Sequence: Synthetic oligonucleotide
  Antisense Strand to SEQ ID NO: 340377
aauuuccgcgagguccgca

SEQ ID NO: 340379 - RNA, 19 nt, Artificial Sequence
  Description of Artificial Sequence: Synthetic oligonucleotide
  Sense Strand Starting at position 274 of SEQ ID NO: 316546
ggaaauugcugcggccaau

SEQ ID NO: 340380 - RNA, 19 nt, Artificial Sequence
  Description of Artificial Sequence: Synthetic oligonucleotide
  Antisense Strand to SEQ ID NO: 340379
auuggccgcagcaauuucc

SEQ ID NO: 340381 - RNA, 19 nt, Artificial Sequence
  Description of Artificial Sequence: Synthetic oligonucleotide
  Sense Strand Starting at position 274 of SEQ ID NO: 316715
gagaguaggccucaucuua

SEQ ID NO: 340382 - RNA, 19 nt, Artificial Sequence
  Description of Artificial Sequence: Synthetic oligonucleotide
  Antisense Strand to SEQ ID NO: 340381
uaagaugaggccuacucuc

SEQ ID NO: 340383 - RNA, 19 nt, Artificial Sequence
  Description of Artificial Sequence: Synthetic oligonucleotide
  Sense Strand Starting at position 274 of SEQ ID NO: 316722
ggccucaucuuaugcaaac

SEQ ID NO: 340384 - RNA, 19 nt, Artificial Sequence
  Description of Artificial Sequence: Synthetic oligonucleotide
  Antisense Strand to SEQ ID NO: 340383
guuugcauaagaugaggcc

SEQ ID NO: 340385 - RNA, 19 nt, Artificial Sequence
  Description of Artificial Sequence: Synthetic oligonucleotide
  Sense Strand Starting at position 274 of SEQ ID NO: 316895
cguggauuggcauaaggca

SEQ ID NO: 340386 - RNA, 19 nt, Artificial Sequence
  Description of Artificial Sequence: Synthetic oligonucleotide
  Antisense Strand to SEQ ID NO: 340385
ugccuuaugccaauccacg

SEQ ID NO: 340387 - RNA, 19 nt, Artificial Sequence
  Description of Artificial Sequence: Synthetic oligonucleotide
  Sense Strand Starting at position 274 of SEQ ID NO: 317227
agcgucauccuaggcagua

SEQ ID NO: 340388 - RNA, 19 nt, Artificial Sequence
  Description of Artificial Sequence: Synthetic oligonucleotide
  Antisense Strand to SEQ ID NO: 340387
uacugccuaggaugacgcu

SEQ ID NO: 340389 - RNA, 19 nt, Artificial Sequence
  Description of Artificial Sequence: Synthetic oligonucleotide
  Sense Strand Starting at position 274 of SEQ ID NO: 317228
gcgucauccuaggcaguaa

SEQ ID NO: 340390 - RNA, 19 nt, Artificial Sequence
  Description of Artificial Sequence: Synthetic oligonucleotide
  Antisense Strand to SEQ ID NO: 340389
uuacugccuaggaugacgc

SEQ ID NO: 340391 - RNA, 19 nt, Artificial Sequence
  Description of Artificial Sequence: Synthetic oligonucleotide
  Sense Strand Starting at position 274 of SEQ ID NO: 317229
cgucauccuaggcaguaaa

SEQ ID NO: 340392 - RNA, 19 nt, Artificial Sequence
  Description of Artificial Sequence: Synthetic oligonucleotide
  Antisense Strand to SEQ ID NO: 340391
uuuacugccuaggaugacg

SEQ ID NO: 340393 - RNA, 19 nt, Artificial Sequence
  Description of Artificial Sequence: Synthetic oligonucleotide
  Sense Strand Starting at position 274 of SEQ ID NO: 317510
ugacgcacuuaacuauaaa

SEQ ID NO: 340394 - RNA, 19 nt, Artificial Sequence
  Description of Artificial Sequence: Synthetic oligonucleotide
  Antisense Strand to SEQ ID NO: 340393
uuuauaguuaagugcguca

SEQ ID NO: 340395 - RNA, 19 nt, Artificial Sequence
  Description of Artificial Sequence: Synthetic oligonucleotide
  Sense Strand Starting at position 274 of SEQ ID NO: 317618
acaggucuuggcugcuuua

SEQ ID NO: 340396 - RNA, 19 nt, Artificial Sequence
  Description of Artificial Sequence: Synthetic oligonucleotide
  Antisense Strand to SEQ ID NO: 340395
uaaagcagccaagaccugu

SEQ ID NO: 340397 - RNA, 19 nt, Artificial Sequence
  Description of Artificial Sequence: Synthetic oligonucleotide
  Sense Strand Starting at position 274 of SEQ ID NO: 317784
gccggccacuccugugauu

SEQ ID NO: 340398 - RNA, 19 nt, Artificial Sequence
  Description of Artificial Sequence: Synthetic oligonucleotide
  Antisense Strand to SEQ ID NO: 340397
aaucacaggaguggccggc

SEQ ID NO: 340399 - RNA, 19 nt, Artificial Sequence
  Description of Artificial Sequence: Synthetic oligonucleotide
  Sense Strand Starting at position 274 of SEQ ID NO: 317854
gcaagaagcccuggcaaau

SEQ ID NO: 340400 - RNA, 19 nt, Artificial Sequence
  Description of Artificial Sequence: Synthetic oligonucleotide
  Antisense Strand to SEQ ID NO: 340399
auuugccagggcuucuugc

SEQ ID NO: 340401 - RNA, 19 nt, Artificial Sequence
  Description of Artificial Sequence: Synthetic oligonucleotide
  Sense Strand Starting at position 274 of SEQ ID NO: 317969
gagaaccugugucaugcuu

SEQ ID NO: 340402 - RNA, 19 nt, Artificial Sequence
  Description of Artificial Sequence: Synthetic oligonucleotide
  Antisense Strand to SEQ ID NO: 340401
aagcaugacacagguucuc

SEQ ID NO: 340403 - RNA, 19 nt, Artificial Sequence
  Description of Artificial Sequence: Synthetic oligonucleotide
  Sense Strand Starting at position 274 of SEQ ID NO: 317971
gaaccugugucaugcuuau

SEQ ID NO: 340404 - RNA, 19 nt, Artificial Sequence
  Description of Artificial Sequence: Synthetic oligonucleotide
  Antisense Strand to SEQ ID NO: 340403
auaagcaugacacagguuc

SEQ ID NO: 340405 - RNA, 19 nt, Artificial Sequence
  Description of Artificial Sequence: Synthetic oligonucleotide
  Sense Strand Starting at position 274 of SEQ ID NO: 317977
gugucaugcuuaugcauac

SEQ ID NO: 340406 - RNA, 19 nt, Artificial Sequence
  Description of Artificial Sequence: Synthetic oligonucleotide
  Antisense Strand to SEQ ID NO: 340405
guaugcauaagcaugacac

SEQ ID NO: 340407 - RNA, 19 nt, Artificial Sequence
  Description of Artificial Sequence: Synthetic oligonucleotide
  Sense Strand Starting at position 274 of SEQ ID NO: 317978
ugucaugcuuaugcauaca

SEQ ID NO: 340408 - RNA, 19 nt, Artificial Sequence
  Description of Artificial Sequence: Synthetic oligonucleotide
  Antisense Strand to SEQ ID NO: 340407
uguaugcauaagcaugaca

SEQ ID NO: 340409 - RNA, 19 nt, Artificial Sequence
  Description of Artificial Sequence: Synthetic oligonucleotide
  Sense Strand Starting at position 274 of SEQ ID NO: 318377
uguggacaguccuccaaca

SEQ ID NO: 340410 - RNA, 19 nt, Artificial Sequence
  Description of Artificial Sequence: Synthetic oligonucleotide
  Antisense Strand to SEQ ID NO: 340409
uguuggaggacuguccaca

SEQ ID NO: 340411 - RNA, 19 nt, Artificial Sequence
  Description of Artificial Sequence: Synthetic oligonucleotide
  Sense Strand Starting at position 274 of SEQ ID NO: 318430
gggcucuguauaugcauau

SEQ ID NO: 340412 - RNA, 19 nt, Artificial Sequence
  Description of Artificial Sequence: Synthetic oligonucleotide
  Antisense Strand to SEQ ID NO: 340411
auaugcauauacagagccc

SEQ ID NO: 340413 - RNA, 19 nt, Artificial Sequence
  Description of Artificial Sequence: Synthetic oligonucleotide
  Sense Strand Starting at position 274 of SEQ ID NO: 318451
cuccauuagaugggugaca

SEQ ID NO: 340414 - RNA, 19 nt, Artificial Sequence
  Description of Artificial Sequence: Synthetic oligonucleotide
  Antisense Strand to SEQ ID NO: 340413
ugucacccaucuaauggag

SEQ ID NO: 340415 - RNA, 19 nt, Artificial Sequence
  Description of Artificial Sequence: Synthetic oligonucleotide
  Sense Strand Starting at position 274 of SEQ ID NO: 318453
ccauuagaugggugacacu

SEQ ID NO: 340416 - RNA, 19 nt, Artificial Sequence
  Description of Artificial Sequence: Synthetic oligonucleotide
  Antisense Strand to SEQ ID NO: 340415
agugucacccaucuaaugg

SEQ ID NO: 340417 - RNA, 19 nt, Artificial Sequence
  Description of Artificial Sequence: Synthetic oligonucleotide
  Sense Strand Starting at position 274 of SEQ ID NO: 318741
uuuccuauugcccaaggaa

SEQ ID NO: 340418 - RNA, 19 nt, Artificial Sequence
  Description of Artificial Sequence: Synthetic oligonucleotide
  Antisense Strand to SEQ ID NO: 340417
uuccuugggcaauaggaaa

SEQ ID NO: 340419 - RNA, 19 nt, Artificial Sequence
  Description of Artificial Sequence: Synthetic oligonucleotide
  Sense Strand Starting at position 274 of SEQ ID NO: 318811
gugcuaugaccuuauucca

SEQ ID NO: 340420 - RNA, 19 nt, Artificial Sequence
  Description of Artificial Sequence: Synthetic oligonucleotide
  Antisense Strand to SEQ ID NO: 340419
uggaauaaggucauagcac

SEQ ID NO: 340421 - RNA, 19 nt, Artificial Sequence
  Description of Artificial Sequence: Synthetic oligonucleotide
  Sense Strand Starting at position 274 of SEQ ID NO: 318907
ccagguauguuaucacaca

SEQ ID NO: 340422 - RNA, 19 nt, Artificial Sequence
  Description of Artificial Sequence: Synthetic oligonucleotide
  Antisense Strand to SEQ ID NO: 340421
ugugugauaacauaccugg

SEQ ID NO: 340423 - RNA, 19 nt, Artificial Sequence
  Description of Artificial Sequence: Synthetic oligonucleotide
  Sense Strand Starting at position 274 of SEQ ID NO: 319079
aggcaaaccucaucagaau

SEQ ID NO: 340424 - RNA, 19 nt, Artificial Sequence
  Description of Artificial Sequence: Synthetic oligonucleotide
  Antisense Strand to SEQ ID NO: 340423
auucugaugagguuugccu

SEQ ID NO: 340425 - RNA, 19 nt, Artificial Sequence
  Description of Artificial Sequence: Synthetic oligonucleotide
  Sense Strand Starting at position 274 of SEQ ID NO: 319130
gugagagggucucucaaag

SEQ ID NO: 340426 - RNA, 19 nt, Artificial Sequence
  Description of Artificial Sequence: Synthetic oligonucleotide
  Antisense Strand to SEQ ID NO: 340425
cuuugagagacccucucac

SEQ ID NO: 340427 - RNA, 19 nt, Artificial Sequence
  Description of Artificial Sequence: Synthetic oligonucleotide
  Sense Strand Starting at position 275 of SEQ ID NO: 315243
guggauuaauugccagaga

SEQ ID NO: 340428 - RNA, 19 nt, Artificial Sequence
  Description of Artificial Sequence: Synthetic oligonucleotide
  Antisense Strand to SEQ ID NO: 340427
ucucuggcaauuaauccac

SEQ ID NO: 340429 - RNA, 19 nt, Artificial Sequence
  Description of Artificial Sequence: Synthetic oligonucleotide
  Sense Strand Starting at position 275 of SEQ ID NO: 315379
ggaucuggugaaugaagca

SEQ ID NO: 340430 - RNA, 19 nt, Artificial Sequence
  Description of Artificial Sequence: Synthetic oligonucleotide
  Antisense Strand to SEQ ID NO: 340429
ugcuucauucaccagaucc

SEQ ID NO: 340431 - RNA, 19 nt, Artificial Sequence
  Description of Artificial Sequence: Synthetic oligonucleotide
  Sense Strand Starting at position 275 of SEQ ID NO: 315415
ugauaaugggugugaguca

SEQ ID NO: 340432 - RNA, 19 nt, Artificial Sequence
  Description of Artificial Sequence: Synthetic oligonucleotide
  Antisense Strand to SEQ ID NO: 340431
ugacucacacccauuauca

SEQ ID NO: 340433 - RNA, 19 nt, Artificial Sequence
  Description of Artificial Sequence: Synthetic oligonucleotide
  Sense Strand Starting at position 275 of SEQ ID NO: 315460
uugaaugugccacauacuu

SEQ ID NO: 340434 - RNA, 19 nt, Artificial Sequence
  Description of Artificial Sequence: Synthetic oligonucleotide
  Antisense Strand to SEQ ID NO: 340433
aaguauguggcacauucaa

SEQ ID NO: 340435 - RNA, 19 nt, Artificial Sequence
  Description of Artificial Sequence: Synthetic oligonucleotide
  Sense Strand Starting at position 275 of SEQ ID NO: 315490
gucccauaccuguacucuu

SEQ ID NO: 340436 - RNA, 19 nt, Artificial Sequence
  Description of Artificial Sequence: Synthetic oligonucleotide
  Antisense Strand to SEQ ID NO: 340435
aagaguacagguaugggac

SEQ ID NO: 340437 - RNA, 19 nt, Artificial Sequence
  Description of Artificial Sequence: Synthetic oligonucleotide
  Sense Strand Starting at position 275 of SEQ ID NO: 315502
uacucuugucaugguugau

SEQ ID NO: 340438 - RNA, 19 nt, Artificial Sequence
  Description of Artificial Sequence: Synthetic oligonucleotide
  Antisense Strand to SEQ ID NO: 340437
aucaaccaugacaagagua

SEQ ID NO: 340439 - RNA, 19 nt, Artificial Sequence
  Description of Artificial Sequence: Synthetic oligonucleotide
  Sense Strand Starting at position 275 of SEQ ID NO: 315508
ugucaugguugauuaccua

SEQ ID NO: 340440 - RNA, 19 nt, Artificial Sequence
  Description of Artificial Sequence: Synthetic oligonucleotide
  Antisense Strand to SEQ ID NO: 340439
uagguaaucaaccaugaca

SEQ ID NO: 340441 - RNA, 19 nt, Artificial Sequence
  Description of Artificial Sequence: Synthetic oligonucleotide
  Sense Strand Starting at position 275 of SEQ ID NO: 315522
accuaugugcaucagauau

SEQ ID NO: 340442 - RNA, 19 nt, Artificial Sequence
  Description of Artificial Sequence: Synthetic oligonucleotide
  Antisense Strand to SEQ ID NO: 340441
auaucugaugcacauaggu

SEQ ID NO: 340443 - RNA, 19 nt, Artificial Sequence
  Description of Artificial Sequence: Synthetic oligonucleotide
  Sense Strand Starting at position 275 of SEQ ID NO: 315580
uguuaauaugcucagguca

SEQ ID NO: 340444 - RNA, 19 nt, Artificial Sequence
  Description of Artificial Sequence: Synthetic oligonucleotide
  Antisense Strand to SEQ ID NO: 340443
ugaccugagcauauuaaca

SEQ ID NO: 340445 - RNA, 19 nt, Artificial Sequence
  Description of Artificial Sequence: Synthetic oligonucleotide
  Sense Strand Starting at position 275 of SEQ ID NO: 315600
auacuaucuuggccaauag

SEQ ID NO: 340446 - RNA, 19 nt, Artificial Sequence
  Description of Artificial Sequence: Synthetic oligonucleotide
  Antisense Strand to SEQ ID NO: 340445
cuauuggccaagauaguau

SEQ ID NO: 340447 - RNA, 19 nt, Artificial Sequence
  Description of Artificial Sequence: Synthetic oligonucleotide
  Sense Strand Starting at position 275 of SEQ ID NO: 315840
agucuuguuucuuuaauag

SEQ ID NO: 340448 - RNA, 19 nt, Artificial Sequence
  Description of Artificial Sequence: Synthetic oligonucleotide
  Antisense Strand to SEQ ID NO: 340447
cuauuaaagaaacaagacu

SEQ ID NO: 340449 - RNA, 19 nt, Artificial Sequence
  Description of Artificial Sequence: Synthetic oligonucleotide
  Sense Strand Starting at position 275 of SEQ ID NO: 316020
cuaaguggucuugagcaau

SEQ ID NO: 340450 - RNA, 19 nt, Artificial Sequence
  Description of Artificial Sequence: Synthetic oligonucleotide
  Antisense Strand to SEQ ID NO: 340449
auugcucaagaccacuuag

SEQ ID NO: 340451 - RNA, 19 nt, Artificial Sequence
  Description of Artificial Sequence: Synthetic oligonucleotide
  Sense Strand Starting at position 275 of SEQ ID NO: 316106
agaauuugauggcaaacuu

SEQ ID NO: 340452 - RNA, 19 nt, Artificial Sequence
  Description of Artificial Sequence: Synthetic oligonucleotide
  Antisense Strand to SEQ ID NO: 340451
aaguuugccaucaaauucu

SEQ ID NO: 340453 - RNA, 19 nt, Artificial Sequence
  Description of Artificial Sequence: Synthetic oligonucleotide
  Sense Strand Starting at position 275 of SEQ ID NO: 316260
cugauaauuggaugccagu

SEQ ID NO: 340454 - RNA, 19 nt, Artificial Sequence
  Description of Artificial Sequence: Synthetic oligonucleotide
  Antisense Strand to SEQ ID NO: 340453
acuggcauccaauuaucag

SEQ ID NO: 340455 - RNA, 19 nt, Artificial Sequence
  Description of Artificial Sequence: Synthetic oligonucleotide
  Sense Strand Starting at position 275 of SEQ ID NO: 316832
cccacugaugugugaaaua

SEQ ID NO: 340456 - RNA, 19 nt, Artificial Sequence
  Description of Artificial Sequence: Synthetic oligonucleotide
  Antisense Strand to SEQ ID NO: 340455
uauuucacacaucaguggg

SEQ ID NO: 340457 - RNA, 19 nt, Artificial Sequence
  Description of Artificial Sequence: Synthetic oligonucleotide
  Sense Strand Starting at position 275 of SEQ ID NO: 316837
ugaugugugaaauauguac

SEQ ID NO: 340458 - RNA, 19 nt, Artificial Sequence
  Description of Artificial Sequence: Synthetic oligonucleotide
  Antisense Strand to SEQ ID NO: 340457
guacauauuucacacauca

SEQ ID NO: 340459 - RNA, 19 nt, Artificial Sequence
  Description of Artificial Sequence: Synthetic oligonucleotide
  Sense Strand Starting at position 275 of SEQ ID NO: 316841
gugugaaauauguacagug

SEQ ID NO: 340460 - RNA, 19 nt, Artificial Sequence
  Description of Artificial Sequence: Synthetic oligonucleotide
  Antisense Strand to SEQ ID NO: 340459
cacuguacauauuucacac

SEQ ID NO: 340461 - RNA, 19 nt, Artificial Sequence
  Description of Artificial Sequence: Synthetic oligonucleotide
  Sense Strand Starting at position 275 of SEQ ID NO: 316941
gagaaagguuucgcaauau

SEQ ID NO: 340462 - RNA, 19 nt, Artificial Sequence
  Description of Artificial Sequence: Synthetic oligonucleotide
  Antisense Strand to SEQ ID NO: 340461
auauugcgaaaccuuucuc

SEQ ID NO: 340463 - RNA, 19 nt, Artificial Sequence
  Description of Artificial Sequence: Synthetic oligonucleotide
  Sense Strand Starting at position 275 of SEQ ID NO: 316968
cuguuucuucccugaagga

SEQ ID NO: 340464 - RNA, 19 nt, Artificial Sequence
  Description of Artificial Sequence: Synthetic oligonucleotide
  Antisense Strand to SEQ ID NO: 340463
uccuucagggaagaaacag

SEQ ID NO: 340465 - RNA, 19 nt, Artificial Sequence
  Description of Artificial Sequence: Synthetic oligonucleotide
  Sense Strand Starting at position 275 of SEQ ID NO: 317026
ccaguugcuaguuaaagga

SEQ ID NO: 340466 - RNA, 19 nt, Artificial Sequence
  Description of Artificial Sequence: Synthetic oligonucleotide
  Antisense Strand to SEQ ID NO: 340465
uccuuuaacuagcaacugg

SEQ ID NO: 340467 - RNA, 19 nt, Artificial Sequence
  Description of Artificial Sequence: Synthetic oligonucleotide
  Sense Strand Starting at position 275 of SEQ ID NO: 317061
ccguaagaaucagcucuaa

SEQ ID NO: 340468 - RNA, 19 nt, Artificial Sequence
  Description of Artificial Sequence: Synthetic oligonucleotide
  Antisense Strand to SEQ ID NO: 340467
uuagagcugauucuuacgg

SEQ ID NO: 340469 - RNA, 19 nt, Artificial Sequence
  Description of Artificial Sequence: Synthetic oligonucleotide
  Sense Strand Starting at position 275 of SEQ ID NO: 317164
uuaccuugagcacguaaga

SEQ ID NO: 340470 - RNA, 19 nt, Artificial Sequence
  Description of Artificial Sequence: Synthetic oligonucleotide
  Antisense Strand to SEQ ID NO: 340469
ucuuacgugcucaagguaa

SEQ ID NO: 340471 - RNA, 19 nt, Artificial Sequence
  Description of Artificial Sequence: Synthetic oligonucleotide
  Sense Strand Starting at position 275 of SEQ ID NO: 317230
cugugauccgcugcuggua

SEQ ID NO: 340472 - RNA, 19 nt, Artificial Sequence
  Description of Artificial Sequence: Synthetic oligonucleotide
  Antisense Strand to SEQ ID NO: 340471
uaccagcagcggaucacag

SEQ ID NO: 340473 - RNA, 19 nt, Artificial Sequence
  Description of Artificial Sequence: Synthetic oligonucleotide
  Sense Strand Starting at position 275 of SEQ ID NO: 317280
ggagcugcuccucauagua

SEQ ID NO: 340474 - RNA, 19 nt, Artificial Sequence
  Description of Artificial Sequence: Synthetic oligonucleotide
  Antisense Strand to SEQ ID NO: 340473
uacuaugaggagcagcucc

SEQ ID NO: 340475 - RNA, 19 nt, Artificial Sequence
  Description of Artificial Sequence: Synthetic oligonucleotide
  Sense Strand Starting at position 275 of SEQ ID NO: 317631
gagggaguugugggugauu

SEQ ID NO: 340476 - RNA, 19 nt, Artificial Sequence
  Description of Artificial Sequence: Synthetic oligonucleotide
  Antisense Strand to SEQ ID NO: 340475
aaucacccacaacucccuc

SEQ ID NO: 340477 - RNA, 19 nt, Artificial Sequence
  Description of Artificial Sequence: Synthetic oligonucleotide
  Sense Strand Starting at position 275 of SEQ ID NO: 317720
ggguuucuaagcgaggcaa

SEQ ID NO: 340478 - RNA, 19 nt, Artificial Sequence
  Description of Artificial Sequence: Synthetic oligonucleotide
  Antisense Strand to SEQ ID NO: 340477
uugccucgcuuagaaaccc

SEQ ID NO: 340479 - RNA, 19 nt, Artificial Sequence
  Description of Artificial Sequence: Synthetic oligonucleotide
  Sense Strand Starting at position 275 of SEQ ID NO: 317901
aggcuuauuugacaaggaa

SEQ ID NO: 340480 - RNA, 19 nt, Artificial Sequence
  Description of Artificial Sequence: Synthetic oligonucleotide
  Antisense Strand to SEQ ID NO: 340479
uuccuugucaaauaagccu

SEQ ID NO: 340481 - RNA, 19 nt, Artificial Sequence
  Description of Artificial Sequence: Synthetic oligonucleotide
  Sense Strand Starting at position 275 of SEQ ID NO: 317961
uugagacuucggcagcauu

SEQ ID NO: 340482 - RNA, 19 nt, Artificial Sequence
  Description of Artificial Sequence: Synthetic oligonucleotide
  Antisense Strand to SEQ ID NO: 340481
aaugcugccgaagucucaa

SEQ ID NO: 340483 - RNA, 19 nt, Artificial Sequence
  Description of Artificial Sequence: Synthetic oligonucleotide
  Sense Strand Starting at position 275 of SEQ ID NO: 317964
agacuucggcagcauuaaa

SEQ ID NO: 340484 - RNA, 19 nt, Artificial Sequence
  Description of Artificial Sequence: Synthetic oligonucleotide
  Antisense Strand to SEQ ID NO: 340483
uuuaaugcugccgaagucu

SEQ ID NO: 340485 - RNA, 19 nt, Artificial Sequence
  Description of Artificial Sequence: Synthetic oligonucleotide
  Sense Strand Starting at position 275 of SEQ ID NO: 318057
ccagcaucugcuuauguaa

SEQ ID NO: 340486 - RNA, 19 nt, Artificial Sequence
  Description of Artificial Sequence: Synthetic oligonucleotide
  Antisense Strand to SEQ ID NO: 340485
uuacauaagcagaugcugg

SEQ ID NO: 340487 - RNA, 19 nt, Artificial Sequence
  Description of Artificial Sequence: Synthetic oligonucleotide
  Sense Strand Starting at position 275 of SEQ ID NO: 318066
gcuuauguaacguaggauu

SEQ ID NO: 340488 - RNA, 19 nt, Artificial Sequence
  Description of Artificial Sequence: Synthetic oligonucleotide
  Antisense Strand to SEQ ID NO: 340487
aauccuacguuacauaagc

SEQ ID NO: 340489 - RNA, 19 nt, Artificial Sequence
  Description of Artificial Sequence: Synthetic oligonucleotide
  Sense Strand Starting at position 275 of SEQ ID NO: 318217
gcuaaaggaucagucugaa

SEQ ID NO: 340490 - RNA, 19 nt, Artificial Sequence
  Description of Artificial Sequence: Synthetic oligonucleotide
  Antisense Strand to SEQ ID NO: 340489
uucagacugauccuuuagc

SEQ ID NO: 340491 - RNA, 19 nt, Artificial Sequence
  Description of Artificial Sequence: Synthetic oligonucleotide
  Sense Strand Starting at position 275 of SEQ ID NO: 318287
aguggugacucacuuccua

SEQ ID NO: 340492 - RNA, 19 nt, Artificial Sequence
  Description of Artificial Sequence: Synthetic oligonucleotide
  Antisense Strand to SEQ ID NO: 340491
uaggaagugagucaccacu

SEQ ID NO: 340493 - RNA, 19 nt, Artificial Sequence
  Description of Artificial Sequence: Synthetic oligonucleotide
  Sense Strand Starting at position 275 of SEQ ID NO: 318450
cgaacuuguacugaauaug

SEQ ID NO: 340494 - RNA, 19 nt, Artificial Sequence
  Description of Artificial Sequence: Synthetic oligonucleotide
  Antisense Strand to SEQ ID NO: 340493
cauauucaguacaaguucg

SEQ ID NO: 340495 - RNA, 19 nt, Artificial Sequence
  Description of Artificial Sequence: Synthetic oligonucleotide
  Sense Strand Starting at position 275 of SEQ ID NO: 318453
acuuguacugaauauguau

SEQ ID NO: 340496 - RNA, 19 nt, Artificial Sequence
  Description of Artificial Sequence: Synthetic oligonucleotide
  Antisense Strand to SEQ ID NO: 340495
auacauauucaguacaagu

SEQ ID NO: 340497 - RNA, 19 nt, Artificial Sequence
  Description of Artificial Sequence: Synthetic oligonucleotide
  Sense Strand Starting at position 275 of SEQ ID NO: 318501
ccuuaugagguagguauga

SEQ ID NO: 340498 - RNA, 19 nt, Artificial Sequence
  Description of Artificial Sequence: Synthetic oligonucleotide
  Antisense Strand to SEQ ID NO: 340497
ucauaccuaccucauaagg

SEQ ID NO: 340499 - RNA, 19 nt, Artificial Sequence
  Description of Artificial Sequence: Synthetic oligonucleotide
  Sense Strand Starting at position 275 of SEQ ID NO: 318503
uuaugagguagguaugauu

SEQ ID NO: 340500 - RNA, 19 nt, Artificial Sequence
  Description of Artificial Sequence: Synthetic oligonucleotide
  Antisense Strand to SEQ ID NO: 340499
aaucauaccuaccucauaa

SEQ ID NO: 340501 - RNA, 19 nt, Artificial Sequence
  Description of Artificial Sequence: Synthetic oligonucleotide
  Sense Strand Starting at position 275 of SEQ ID NO: 318565
ggcaucucuaaggguuuaa

SEQ ID NO: 340502 - RNA, 19 nt, Artificial Sequence
  Description of Artificial Sequence: Synthetic oligonucleotide
  Antisense Strand to SEQ ID NO: 340501
uuaaacccuuagagaugcc

SEQ ID NO: 340503 - RNA, 19 nt, Artificial Sequence
  Description of Artificial Sequence: Synthetic oligonucleotide
  Sense Strand Starting at position 275 of SEQ ID NO: 318691
agguuagauccugauguca

SEQ ID NO: 340504 - RNA, 19 nt, Artificial Sequence
  Description of Artificial Sequence: Synthetic oligonucleotide
  Antisense Strand to SEQ ID NO: 340503
ugacaucaggaucuaaccu

SEQ ID NO: 340505 - RNA, 19 nt, Artificial Sequence
  Description of Artificial Sequence: Synthetic oligonucleotide
  Sense Strand Starting at position 275 of SEQ ID NO: 319081
cguccauaugugccgaguu

SEQ ID NO: 340506 - RNA, 19 nt, Artificial Sequence
  Description of Artificial Sequence: Synthetic oligonucleotide
  Antisense Strand to SEQ ID NO: 340505
aacucggcacauauggacg

SEQ ID NO: 340507 - RNA, 19 nt, Artificial Sequence
  Description of Artificial Sequence: Synthetic oligonucleotide
  Sense Strand Starting at position 276 of SEQ ID NO: 315342
ccaguuugcagaugagaag

SEQ ID NO: 340508 - RNA, 19 nt, Artificial Sequence
  Description of Artificial Sequence: Synthetic oligonucleotide
  Antisense Strand to SEQ ID NO: 340507
cuucucaucugcaaacugg

SEQ ID NO: 340509 - RNA, 19 nt, Artificial Sequence
  Description of Artificial Sequence: Synthetic oligonucleotide
  Sense Strand Starting at position 276 of SEQ ID NO: 315411
cuguucugacccugggaaa

SEQ ID NO: 340510 - RNA, 19 nt, Artificial Sequence
  Description of Artificial Sequence: Synthetic oligonucleotide
  Antisense Strand to SEQ ID NO: 340509
uuucccagggucagaacag

SEQ ID NO: 340511 - RNA, 19 nt, Artificial Sequence
  Description of Artificial Sequence: Synthetic oligonucleotide
  Sense Strand Starting at position 276 of SEQ ID NO: 315693
ugaugcucuuaacuugaau

SEQ ID NO: 340512 - RNA, 19 nt, Artificial Sequence
  Description of Artificial Sequence: Synthetic oligonucleotide
  Antisense Strand to SEQ ID NO: 340511
auucaaguuaagagcauca

SEQ ID NO: 340513 - RNA, 19 nt, Artificial Sequence
  Description of Artificial Sequence: Synthetic oligonucleotide
  Sense Strand Starting at position 276 of SEQ ID NO: 316025
ugaaguauuuaugagacuc

SEQ ID NO: 340514 - RNA, 19 nt, Artificial Sequence
  Description of Artificial Sequence: Synthetic oligonucleotide
  Antisense Strand to SEQ ID NO: 340513
gagucucauaaauacuuca

SEQ ID NO: 340515 - RNA, 19 nt, Artificial Sequence
  Description of Artificial Sequence: Synthetic oligonucleotide
  Sense Strand Starting at position 276 of SEQ ID NO: 316040
acucauguuggaggcauaa

SEQ ID NO: 340516 - RNA, 19 nt, Artificial Sequence
  Description of Artificial Sequence: Synthetic oligonucleotide
  Antisense Strand to SEQ ID NO: 340515
uuaugccuccaacaugagu

SEQ ID NO: 340517 - RNA, 19 nt, Artificial Sequence
  Description of Artificial Sequence: Synthetic oligonucleotide
  Sense Strand Starting at position 276 of SEQ ID NO: 316042
ucauguuggaggcauaacu

SEQ ID NO: 340518 - RNA, 19 nt, Artificial Sequence
  Description of Artificial Sequence: Synthetic oligonucleotide
  Antisense Strand to SEQ ID NO: 340517
aguuaugccuccaacauga

SEQ ID NO: 340519 - RNA, 19 nt, Artificial Sequence
  Description of Artificial Sequence: Synthetic oligonucleotide
  Sense Strand Starting at position 276 of SEQ ID NO: 316084
gggucacugaggugaauug

SEQ ID NO: 340520 - RNA, 19 nt, Artificial Sequence
  Description of Artificial Sequence: Synthetic oligonucleotide
  Antisense Strand to SEQ ID NO: 340519
caauucaccucagugaccc

SEQ ID NO: 340521 - RNA, 19 nt, Artificial Sequence
  Description of Artificial Sequence: Synthetic oligonucleotide
  Sense Strand Starting at position 276 of SEQ ID NO: 316170
guuuaaauaggccauacua

SEQ ID NO: 340522 - RNA, 19 nt, Artificial Sequence
  Description of Artificial Sequence: Synthetic oligonucleotide
  Antisense Strand to SEQ ID NO: 340521
uaguauggccuauuuaaac

SEQ ID NO: 340523 - RNA, 19 nt, Artificial Sequence
  Description of Artificial Sequence: Synthetic oligonucleotide
  Sense Strand Starting at position 276 of SEQ ID NO: 316172
uuaaauaggccauacuagu

SEQ ID NO: 340524 - RNA, 19 nt, Artificial Sequence
  Description of Artificial Sequence: Synthetic oligonucleotide
  Antisense Strand to SEQ ID NO: 340523
acuaguauggccuauuuaa

SEQ ID NO: 340525 - RNA, 19 nt, Artificial Sequence
  Description of Artificial Sequence: Synthetic oligonucleotide
  Sense Strand Starting at position 276 of SEQ ID NO: 316181
ccauacuaguaaccgaaua

SEQ ID NO: 340526 - RNA, 19 nt, Artificial Sequence
  Description of Artificial Sequence: Synthetic oligonucleotide
  Antisense Strand to SEQ ID NO: 340525
uauucgguuacuaguaugg

SEQ ID NO: 340527 - RNA, 19 nt, Artificial Sequence
  Description of Artificial Sequence: Synthetic oligonucleotide
  Sense Strand Starting at position 276 of SEQ ID NO: 316355
uccacuucucccuggaaag

SEQ ID NO: 340528 - RNA, 19 nt, Artificial Sequence
  Description of Artificial Sequence: Synthetic oligonucleotide
  Antisense Strand to SEQ ID NO: 340527
cuuuccagggagaagugga

SEQ ID NO: 340529 - RNA, 19 nt, Artificial Sequence
  Description of Artificial Sequence: Synthetic oligonucleotide
  Sense Strand Starting at position 276 of SEQ ID NO: 316540
ggacuauuguggccaugga

SEQ ID NO: 340530 - RNA, 19 nt, Artificial Sequence
  Description of Artificial Sequence: Synthetic oligonucleotide
  Antisense Strand to SEQ ID NO: 340529
uccauggccacaauagucc

SEQ ID NO: 340531 - RNA, 19 nt, Artificial Sequence
  Description of Artificial Sequence: Synthetic oligonucleotide
  Sense Strand Starting at position 276 of SEQ ID NO: 316541
gacuauuguggccauggau

SEQ ID NO: 340532 - RNA, 19 nt, Artificial Sequence
  Description of Artificial Sequence: Synthetic oligonucleotide
  Antisense Strand to SEQ ID NO: 340531
auccauggccacaauaguc

SEQ ID NO: 340533 - RNA, 19 nt, Artificial Sequence
  Description of Artificial Sequence: Synthetic oligonucleotide
  Sense Strand Starting at position 276 of SEQ ID NO: 316572
uggaaagagguuuguuuac

SEQ ID NO: 340534 - RNA, 19 nt, Artificial Sequence
  Description of Artificial Sequence: Synthetic oligonucleotide
  Antisense Strand to SEQ ID NO: 340533
guaaacaaaccucuuucca

SEQ ID NO: 340535 - RNA, 19 nt, Artificial Sequence
  Description of Artificial Sequence: Synthetic oligonucleotide
  Sense Strand Starting at position 276 of SEQ ID NO: 316574
gaaagagguuuguuuacuc

SEQ ID NO: 340536 - RNA, 19 nt, Artificial Sequence
  Description of Artificial Sequence: Synthetic oligonucleotide
  Antisense Strand to SEQ ID NO: 340535
gaguaaacaaaccucuuuc

SEQ ID NO: 340537 - RNA, 19 nt, Artificial Sequence
  Description of Artificial Sequence: Synthetic oligonucleotide
  Sense Strand Starting at position 276 of SEQ ID NO: 316581
guuuguuuacuccacaaca

SEQ ID NO: 340538 - RNA, 19 nt, Artificial Sequence
  Description of Artificial Sequence: Synthetic oligonucleotide
  Antisense Strand to SEQ ID NO: 340537
uguuguggaguaaacaaac

SEQ ID NO: 340539 - RNA, 19 nt, Artificial Sequence
  Description of Artificial Sequence: Synthetic oligonucleotide
  Sense Strand Starting at position 276 of SEQ ID NO: 316982
gaaaguuguggccaucauu

SEQ ID NO: 340540 - RNA, 19 nt, Artificial Sequence
  Description of Artificial Sequence: Synthetic oligonucleotide
  Antisense Strand to SEQ ID NO: 340539
aaugauggccacaacuuuc

SEQ ID NO: 340541 - RNA, 19 nt, Artificial Sequence
  Description of Artificial Sequence: Synthetic oligonucleotide
  Sense Strand Starting at position 276 of SEQ ID NO: 317002
accugcugagauuggaaga

SEQ ID NO: 340542 - RNA, 19 nt, Artificial Sequence
  Description of Artificial Sequence: Synthetic oligonucleotide
  Antisense Strand to SEQ ID NO: 340541
ucuuccaaucucagcaggu

SEQ ID NO: 340543 - RNA, 19 nt, Artificial Sequence
  Description of Artificial Sequence: Synthetic oligonucleotide
  Sense Strand Starting at position 276 of SEQ ID NO: 317003
ccugcugagauuggaagaa

SEQ ID NO: 340544 - RNA, 19 nt, Artificial Sequence
  Description of Artificial Sequence: Synthetic oligonucleotide
  Antisense Strand to SEQ ID NO: 340543
uucuuccaaucucagcagg

SEQ ID NO: 340545 - RNA, 19 nt, Artificial Sequence
  Description of Artificial Sequence: Synthetic oligonucleotide
  Sense Strand Starting at position 276 of SEQ ID NO: 317017
aagaacgcuguugaugaaa

SEQ ID NO: 340546 - RNA, 19 nt, Artificial Sequence
  Description of Artificial Sequence: Synthetic oligonucleotide
  Antisense Strand to SEQ ID NO: 340545
uuucaucaacagcguucuu

SEQ ID NO: 340547 - RNA, 19 nt, Artificial Sequence
  Description of Artificial Sequence: Synthetic oligonucleotide
  Sense Strand Starting at position 276 of SEQ ID NO: 317028
ugaugaaagucggcugaga

SEQ ID NO: 340548 - RNA, 19 nt, Artificial Sequence
  Description of Artificial Sequence: Synthetic oligonucleotide
  Antisense Strand to SEQ ID NO: 340547
ucucagccgacuuucauca

SEQ ID NO: 340549 - RNA, 19 nt, Artificial Sequence
  Description of Artificial Sequence: Synthetic oligonucleotide
  Sense Strand Starting at position 276 of SEQ ID NO: 317030
augaaagucggcugagaca

SEQ ID NO: 340550 - RNA, 19 nt, Artificial Sequence
  Description of Artificial Sequence: Synthetic oligonucleotide
  Antisense Strand to SEQ ID NO: 340549
ugucucagccgacuuucau

SEQ ID NO: 340551 - RNA, 19 nt, Artificial Sequence
  Description of Artificial Sequence: Synthetic oligonucleotide
  Sense Strand Starting at position 276 of SEQ ID NO: 317079
uucccaaagucauuggauu

SEQ ID NO: 340552 - RNA, 19 nt, Artificial Sequence
  Description of Artificial Sequence: Synthetic oligonucleotide
  Antisense Strand to SEQ ID NO: 340551
aauccaaugacuuugggaa

SEQ ID NO: 340553 - RNA, 19 nt, Artificial Sequence
  Description of Artificial Sequence: Synthetic oligonucleotide
  Sense Strand Starting at position 276 of SEQ ID NO: 317080
ucccaaagucauuggauuc

SEQ ID NO: 340554 - RNA, 19 nt, Artificial Sequence
  Description of Artificial Sequence: Synthetic oligonucleotide
  Antisense Strand to SEQ ID NO: 340553
gaauccaaugacuuuggga

SEQ ID NO: 340555 - RNA, 19 nt, Artificial Sequence
  Description of Artificial Sequence: Synthetic oligonucleotide
  Sense Strand Starting at position 276 of SEQ ID NO: 317474
gagguaaguggcuagugaa

SEQ ID NO: 340556 - RNA, 19 nt, Artificial Sequence
  Description of Artificial Sequence: Synthetic oligonucleotide
  Antisense Strand to SEQ ID NO: 340555
uucacuagccacuuaccuc

SEQ ID NO: 340557 - RNA, 19 nt, Artificial Sequence
  Description of Artificial Sequence: Synthetic oligonucleotide
  Sense Strand Starting at position 276 of SEQ ID NO: 317552
agagauuccuaauugguua

SEQ ID NO: 340558 - RNA, 19 nt, Artificial Sequence
  Description of Artificial Sequence: Synthetic oligonucleotide
  Antisense Strand to SEQ ID NO: 340557
uaaccaauuaggaaucucu

SEQ ID NO: 340559 - RNA, 19 nt, Artificial Sequence
  Description of Artificial Sequence: Synthetic oligonucleotide
  Sense Strand Starting at position 276 of SEQ ID NO: 317672
uuacccauuguguaacaaa

SEQ ID NO: 340560 - RNA, 19 nt, Artificial Sequence
  Description of Artificial Sequence: Synthetic oligonucleotide
  Antisense Strand to SEQ ID NO: 340559
uuuguuacacaauggguaa

SEQ ID NO: 340561 - RNA, 19 nt, Artificial Sequence
  Description of Artificial Sequence: Synthetic oligonucleotide
  Sense Strand Starting at position 276 of SEQ ID NO: 317681
guguaacaaauguaaaguu

SEQ ID NO: 340562 - RNA, 19 nt, Artificial Sequence
  Description of Artificial Sequence: Synthetic oligonucleotide
  Antisense Strand to SEQ ID NO: 340561
aacuuuacauuuguuacac

SEQ ID NO: 340563 - RNA, 19 nt, Artificial Sequence
  Description of Artificial Sequence: Synthetic oligonucleotide
  Sense Strand Starting at position 276 of SEQ ID NO: 317907
acuuaaucuuuggcuagac

SEQ ID NO: 340564 - RNA, 19 nt, Artificial Sequence
  Description of Artificial Sequence: Synthetic oligonucleotide
  Antisense Strand to SEQ ID NO: 340563
gucuagccaaagauuaagu

SEQ ID NO: 340565 - RNA, 19 nt, Artificial Sequence
  Description of Artificial Sequence: Synthetic oligonucleotide
  Sense Strand Starting at position 276 of SEQ ID NO: 317908
cuuaaucuuuggcuagaca

SEQ ID NO: 340566 - RNA, 19 nt, Artificial Sequence
  Description of Artificial Sequence: Synthetic oligonucleotide
  Antisense Strand to SEQ ID NO: 340565
ugucuagccaaagauuaag

SEQ ID NO: 340567 - RNA, 19 nt, Artificial Sequence
  Description of Artificial Sequence: Synthetic oligonucleotide
  Sense Strand Starting at position 276 of SEQ ID NO: 317909
uuaaucuuuggcuagacaa

SEQ ID NO: 340568 - RNA, 19 nt, Artificial Sequence
  Description of Artificial Sequence: Synthetic oligonucleotide
  Antisense Strand to SEQ ID NO: 340567
uugucuagccaaagauuaa

SEQ ID NO: 340569 - RNA, 19 nt, Artificial Sequence
  Description of Artificial Sequence: Synthetic oligonucleotide
  Sense Strand Starting at position 276 of SEQ ID NO: 317982
gccuguuauagagaugauu

SEQ ID NO: 340570 - RNA, 19 nt, Artificial Sequence
  Description of Artificial Sequence: Synthetic oligonucleotide
  Antisense Strand to SEQ ID NO: 340569
aaucaucucuauaacaggc

SEQ ID NO: 340571 - RNA, 19 nt, Artificial Sequence
  Description of Artificial Sequence: Synthetic oligonucleotide
  Sense Strand Starting at position 276 of SEQ ID NO: 317984
cuguuauagagaugauuag

SEQ ID NO: 340572 - RNA, 19 nt, Artificial Sequence
  Description of Artificial Sequence: Synthetic oligonucleotide
  Antisense Strand to SEQ ID NO: 340571
cuaaucaucucuauaacag

SEQ ID NO: 340573 - RNA, 19 nt, Artificial Sequence
  Description of Artificial Sequence: Synthetic oligonucleotide
  Sense Strand Starting at position 276 of SEQ ID NO: 318297
uuuaaagguuuguuggaaa

SEQ ID NO: 340574 - RNA, 19 nt, Artificial Sequence
  Description of Artificial Sequence: Synthetic oligonucleotide
  Antisense Strand to SEQ ID NO: 340573
uuuccaacaaaccuuuaaa

SEQ ID NO: 340575 - RNA, 19 nt, Artificial Sequence
  Description of Artificial Sequence: Synthetic oligonucleotide
  Sense Strand Starting at position 276 of SEQ ID NO: 318310
uggaaaguuaagugaggua

SEQ ID NO: 340576 - RNA, 19 nt, Artificial Sequence
  Description of Artificial Sequence: Synthetic oligonucleotide
  Antisense Strand to SEQ ID NO: 340575
uaccucacuuaacuuucca

SEQ ID NO: 340577 - RNA, 19 nt, Artificial Sequence
  Description of Artificial Sequence: Synthetic oligonucleotide
  Sense Strand Starting at position 276 of SEQ ID NO: 318688
uguucugacuaucccagau

SEQ ID NO: 340578 - RNA, 19 nt, Artificial Sequence
  Description of Artificial Sequence: Synthetic oligonucleotide
  Antisense Strand to SEQ ID NO: 340577
aucugggauagucagaaca

SEQ ID NO: 340579 - RNA, 19 nt, Artificial Sequence
  Description of Artificial Sequence: Synthetic oligonucleotide
  Sense Strand Starting at position 276 of SEQ ID NO: 318791
aagugagacccucgaaaga

SEQ ID NO: 340580 - RNA, 19 nt, Artificial Sequence
  Description of Artificial Sequence: Synthetic oligonucleotide
  Antisense Strand to SEQ ID NO: 340579
ucuuucgagggucucacuu

SEQ ID NO: 340581 - RNA, 19 nt, Artificial Sequence
  Description of Artificial Sequence: Synthetic oligonucleotide
  Sense Strand Starting at position 276 of SEQ ID NO: 318825
uuacgaagucaugagcaaa

SEQ ID NO: 340582 - RNA, 19 nt, Artificial Sequence
  Description of Artificial Sequence: Synthetic oligonucleotide
  Antisense Strand to SEQ ID NO: 340581
uuugcucaugacuucguaa

SEQ ID NO: 340583 - RNA, 19 nt, Artificial Sequence
  Description of Artificial Sequence: Synthetic oligonucleotide
  Sense Strand Starting at position 276 of SEQ ID NO: 318828
cgaagucaugagcaaauaa

SEQ ID NO: 340584 - RNA, 19 nt, Artificial Sequence
  Description of Artificial Sequence: Synthetic oligonucleotide
  Antisense Strand to SEQ ID NO: 340583
uuauuugcucaugacuucg

SEQ ID NO: 340585 - RNA, 19 nt, Artificial Sequence
  Description of Artificial Sequence: Synthetic oligonucleotide
  Sense Strand Starting at position 276 of SEQ ID NO: 319026
acaagaaggagcugugauu

SEQ ID NO: 340586 - RNA, 19 nt, Artificial Sequence
  Description of Artificial Sequence: Synthetic oligonucleotide
  Antisense Strand to SEQ ID NO: 340585
aaucacagcuccuucuugu

SEQ ID NO: 340587 - RNA, 19 nt, Artificial Sequence
  Description of Artificial Sequence: Synthetic oligonucleotide
  Sense Strand Starting at position 277 of SEQ ID NO: 315239
ccaauuuacucuuggaaag

SEQ ID NO: 340588 - RNA, 19 nt, Artificial Sequence
  Description of Artificial Sequence: Synthetic oligonucleotide
  Antisense Strand to SEQ ID NO: 340587
cuuuccaagaguaaauugg

SEQ ID NO: 340589 - RNA, 19 nt, Artificial Sequence
  Description of Artificial Sequence: Synthetic oligonucleotide
  Sense Strand Starting at position 277 of SEQ ID NO: 315266
uugauuaaagaguguuaag

SEQ ID NO: 340590 - RNA, 19 nt, Artificial Sequence
  Description of Artificial Sequence: Synthetic oligonucleotide
  Antisense Strand to SEQ ID NO: 340589
cuuaacacucuuuaaucaa

SEQ ID NO: 340591 - RNA, 19 nt, Artificial Sequence
  Description of Artificial Sequence: Synthetic oligonucleotide
  Sense Strand Starting at position 277 of SEQ ID NO: 315871
uccaacaaaugugucauua

SEQ ID NO: 340592 - RNA, 19 nt, Artificial Sequence
  Description of Artificial Sequence: Synthetic oligonucleotide
  Antisense Strand to SEQ ID NO: 340591
uaaugacacauuuguugga

SEQ ID NO: 340593 - RNA, 19 nt, Artificial Sequence
  Description of Artificial Sequence: Synthetic oligonucleotide
  Sense Strand Starting at position 277 of SEQ ID NO: 315875
acaaaugugucauuagaaa

SEQ ID NO: 340594 - RNA, 19 nt, Artificial Sequence
  Description of Artificial Sequence: Synthetic oligonucleotide
  Antisense Strand to SEQ ID NO: 340593
uuucuaaugacacauuugu

SEQ ID NO: 340595 - RNA, 19 nt, Artificial Sequence
  Description of Artificial Sequence: Synthetic oligonucleotide
  Sense Strand Starting at position 277 of SEQ ID NO: 316047
ugggaacuugcaugagaga

SEQ ID NO: 340596 - RNA, 19 nt, Artificial Sequence
  Description of Artificial Sequence: Synthetic oligonucleotide
  Antisense Strand to SEQ ID NO: 340595
ucucucaugcaaguuccca

SEQ ID NO: 340597 - RNA, 19 nt, Artificial Sequence
  Description of Artificial Sequence: Synthetic oligonucleotide
  Sense Strand Starting at position 277 of SEQ ID NO: 316102
cgcuguauggcagcucaga

SEQ ID NO: 340598 - RNA, 19 nt, Artificial Sequence
  Description of Artificial Sequence: Synthetic oligonucleotide
  Antisense Strand to SEQ ID NO: 340597
ucugagcugccauacagcg

SEQ ID NO: 340599 - RNA, 19 nt, Artificial Sequence
  Description of Artificial Sequence: Synthetic oligonucleotide
  Sense Strand Starting at position 277 of SEQ ID NO: 316121
gugcuuugacuuuauugua

SEQ ID NO: 340600 - RNA, 19 nt, Artificial Sequence
  Description of Artificial Sequence: Synthetic oligonucleotide
  Antisense Strand to SEQ ID NO: 340599
uacaauaaagucaaagcac

SEQ ID NO: 340601 - RNA, 19 nt, Artificial Sequence
  Description of Artificial Sequence: Synthetic oligonucleotide
  Sense Strand Starting at position 277 of SEQ ID NO: 316145
uugggucucagcuacagua

SEQ ID NO: 340602 - RNA, 19 nt, Artificial Sequence
  Description of Artificial Sequence: Synthetic oligonucleotide
  Antisense Strand to SEQ ID NO: 340601
uacuguagcugagacccaa

SEQ ID NO: 340603 - RNA, 19 nt, Artificial Sequence
  Description of Artificial Sequence: Synthetic oligonucleotide
  Sense Strand Starting at position 277 of SEQ ID NO: 316147
gggucucagcuacaguaaa

SEQ ID NO: 340604 - RNA, 19 nt, Artificial Sequence
  Description of Artificial Sequence: Synthetic oligonucleotide
  Antisense Strand to SEQ ID NO: 340603
uuuacuguagcugagaccc

SEQ ID NO: 340605 - RNA, 19 nt, Artificial Sequence
  Description of Artificial Sequence: Synthetic oligonucleotide
  Sense Strand Starting at position 277 of SEQ ID NO: 316158
acaguaaaguucuuacauu

SEQ ID NO: 340606 - RNA, 19 nt, Artificial Sequence
  Description of Artificial Sequence: Synthetic oligonucleotide
  Antisense Strand to SEQ ID NO: 340605
aauguaagaacuuuacugu

SEQ ID NO: 340607 - RNA, 19 nt, Artificial Sequence
  Description of Artificial Sequence: Synthetic oligonucleotide
  Sense Strand Starting at position 277 of SEQ ID NO: 316213
acauguuccagagaaggcu

SEQ ID NO: 340608 - RNA, 19 nt, Artificial Sequence
  Description of Artificial Sequence: Synthetic oligonucleotide
  Antisense Strand to SEQ ID NO: 340607
agccuucucuggaacaugu

SEQ ID NO: 340609 - RNA, 19 nt, Artificial Sequence
  Description of Artificial Sequence: Synthetic oligonucleotide
  Sense Strand Starting at position 277 of SEQ ID NO: 316306
uuugaacuucucugaaaga

SEQ ID NO: 340610 - RNA, 19 nt, Artificial Sequence
  Description of Artificial Sequence: Synthetic oligonucleotide
  Antisense Strand to SEQ ID NO: 340609
ucuuucagagaaguucaaa

SEQ ID NO: 340611 - RNA, 19 nt, Artificial Sequence
  Description of Artificial Sequence: Synthetic oligonucleotide
  Sense Strand Starting at position 277 of SEQ ID NO: 316434
caguccacucaagagugau

SEQ ID NO: 340612 - RNA, 19 nt, Artificial Sequence
  Description of Artificial Sequence: Synthetic oligonucleotide
  Antisense Strand to SEQ ID NO: 340611
aucacucuugaguggacug

SEQ ID NO: 340613 - RNA, 19 nt, Artificial Sequence
  Description of Artificial Sequence: Synthetic oligonucleotide
  Sense Strand Starting at position 277 of SEQ ID NO: 316717
gagaaacagcccugugaaa

SEQ ID NO: 340614 - RNA, 19 nt, Artificial Sequence
  Description of Artificial Sequence: Synthetic oligonucleotide
  Antisense Strand to SEQ ID NO: 340613
uuucacagggcuguuucuc

SEQ ID NO: 340615 - RNA, 19 nt, Artificial Sequence
  Description of Artificial Sequence: Synthetic oligonucleotide
  Sense Strand Starting at position 277 of SEQ ID NO: 316789
ucugcuuuccaagagucuu

SEQ ID NO: 340616 - RNA, 19 nt, Artificial Sequence
  Description of Artificial Sequence: Synthetic oligonucleotide
  Antisense Strand to SEQ ID NO: 340615
aagacucuuggaaagcaga

SEQ ID NO: 340617 - RNA, 19 nt, Artificial Sequence
  Description of Artificial Sequence: Synthetic oligonucleotide
  Sense Strand Starting at position 277 of SEQ ID NO: 316933
gaaugaugagcccgucauu

SEQ ID NO: 340618 - RNA, 19 nt, Artificial Sequence
  Description of Artificial Sequence: Synthetic oligonucleotide
  Antisense Strand to SEQ ID NO: 340617
aaugacgggcucaucauuc

SEQ ID NO: 340619 - RNA, 19 nt, Artificial Sequence
  Description of Artificial Sequence: Synthetic oligonucleotide
  Sense Strand Starting at position 277 of SEQ ID NO: 317124
uccugagcuccugggagua

SEQ ID NO: 340620 - RNA, 19 nt, Artificial Sequence
  Description of Artificial Sequence: Synthetic oligonucleotide
  Antisense Strand to SEQ ID NO: 340619
uacucccaggagcucagga

SEQ ID NO: 340621 - RNA, 19 nt, Artificial Sequence
  Description of Artificial Sequence: Synthetic oligonucleotide
  Sense Strand Starting at position 277 of SEQ ID NO: 317353
uauugacugcucugguaag

SEQ ID NO: 340622 - RNA, 19 nt, Artificial Sequence
  Description of Artificial Sequence: Synthetic oligonucleotide
  Antisense Strand to SEQ ID NO: 340621
cuuaccagagcagucaaua

SEQ ID NO: 340623 - RNA, 19 nt, Artificial Sequence
  Description of Artificial Sequence: Synthetic oligonucleotide
  Sense Strand Starting at position 277 of SEQ ID NO: 317462
uaauccugucugggccaaa

SEQ ID NO: 340624 - RNA, 19 nt, Artificial Sequence
  Description of Artificial Sequence: Synthetic oligonucleotide
  Antisense Strand to SEQ ID NO: 340623
uuuggcccagacaggauua

SEQ ID NO: 340625 - RNA, 19 nt, Artificial Sequence
  Description of Artificial Sequence: Synthetic oligonucleotide
  Sense Strand Starting at position 277 of SEQ ID NO: 317477
caaaguguugcugacaaag

SEQ ID NO: 340626 - RNA, 19 nt, Artificial Sequence
  Description of Artificial Sequence: Synthetic oligonucleotide
  Antisense Strand to SEQ ID NO: 340625
cuuugucagcaacacuuug

SEQ ID NO: 340627 - RNA, 19 nt, Artificial Sequence
  Description of Artificial Sequence: Synthetic oligonucleotide
  Sense Strand Starting at position 277 of SEQ ID NO: 317607
gcuuaaaucuaucugguac

SEQ ID NO: 340628 - RNA, 19 nt, Artificial Sequence
  Description of Artificial Sequence: Synthetic oligonucleotide
  Antisense Strand to SEQ ID NO: 340627
guaccagauagauuuaagc

SEQ ID NO: 340629 - RNA, 19 nt, Artificial Sequence
  Description of Artificial Sequence: Synthetic oligonucleotide
  Sense Strand Starting at position 277 of SEQ ID NO: 317726
uugaucagcuuaguaaaga

SEQ ID NO: 340630 - RNA, 19 nt, Artificial Sequence
  Description of Artificial Sequence: Synthetic oligonucleotide
  Antisense Strand to SEQ ID NO: 340629
ucuuuacuaagcugaucaa

SEQ ID NO: 340631 - RNA, 19 nt, Artificial Sequence
  Description of Artificial Sequence: Synthetic oligonucleotide
  Sense Strand Starting at position 277 of SEQ ID NO: 317776
ugcuauaaaggucaacaua

SEQ ID NO: 340632 - RNA, 19 nt, Artificial Sequence
  Description of Artificial Sequence: Synthetic oligonucleotide
  Antisense Strand to SEQ ID NO: 340631
uauguugaccuuuauagca

SEQ ID NO: 340633 - RNA, 19 nt, Artificial Sequence
  Description of Artificial Sequence: Synthetic oligonucleotide
  Sense Strand Starting at position 277 of SEQ ID NO: 317885
gaaugagauuggucauguu

SEQ ID NO: 340634 - RNA, 19 nt, Artificial Sequence
  Description of Artificial Sequence: Synthetic oligonucleotide
  Antisense Strand to SEQ ID NO: 340633
aacaugaccaaucucauuc

SEQ ID NO: 340635 - RNA, 19 nt, Artificial Sequence
  Description of Artificial Sequence: Synthetic oligonucleotide
  Sense Strand Starting at position 277 of SEQ ID NO: 318134
ccuggagucauccaaguug

SEQ ID NO: 340636 - RNA, 19 nt, Artificial Sequence
  Description of Artificial Sequence: Synthetic oligonucleotide
  Antisense Strand to SEQ ID NO: 340635
caacuuggaugacuccagg

SEQ ID NO: 340637 - RNA, 19 nt, Artificial Sequence
  Description of Artificial Sequence: Synthetic oligonucleotide
  Sense Strand Starting at position 277 of SEQ ID NO: 318264
gauaguuugcugugaggau

SEQ ID NO: 340638 - RNA, 19 nt, Artificial Sequence
  Description of Artificial Sequence: Synthetic oligonucleotide
  Antisense Strand to SEQ ID NO: 340637
auccucacagcaaacuauc

SEQ ID NO: 340639 - RNA, 19 nt, Artificial Sequence
  Description of Artificial Sequence: Synthetic oligonucleotide
  Sense Strand Starting at position 277 of SEQ ID NO: 318268
guuugcugugaggauuaga

SEQ ID NO: 340640 - RNA, 19 nt, Artificial Sequence
  Description of Artificial Sequence: Synthetic oligonucleotide
  Antisense Strand to SEQ ID NO: 340639
ucuaauccucacagcaaac

SEQ ID NO: 340641 - RNA, 19 nt, Artificial Sequence
  Description of Artificial Sequence: Synthetic oligonucleotide
  Sense Strand Starting at position 277 of SEQ ID NO: 318279
ggauuagagcuacagcuuu

SEQ ID NO: 340642 - RNA, 19 nt, Artificial Sequence
  Description of Artificial Sequence: Synthetic oligonucleotide
  Antisense Strand to SEQ ID NO: 340641
aaagcuguagcucuaaucc

SEQ ID NO: 340643 - RNA, 19 nt, Artificial Sequence
  Description of Artificial Sequence: Synthetic oligonucleotide
  Sense Strand Starting at position 277 of SEQ ID NO: 318319
agggcucucuuauugacau

SEQ ID NO: 340644 - RNA, 19 nt, Artificial Sequence
  Description of Artificial Sequence: Synthetic oligonucleotide
  Antisense Strand to SEQ ID NO: 340643
augucaauaagagagcccu

SEQ ID NO: 340645 - RNA, 19 nt, Artificial Sequence
  Description of Artificial Sequence: Synthetic oligonucleotide
  Sense Strand Starting at position 277 of SEQ ID NO: 318332
ugacauauucuuggauaac

SEQ ID NO: 340646 - RNA, 19 nt, Artificial Sequence
  Description of Artificial Sequence: Synthetic oligonucleotide
  Antisense Strand to SEQ ID NO: 340645
guuauccaagaauauguca

SEQ ID NO: 340647 - RNA, 19 nt, Artificial Sequence
  Description of Artificial Sequence: Synthetic oligonucleotide
  Sense Strand Starting at position 277 of SEQ ID NO: 318346
auaacuguuguauaaggua

SEQ ID NO: 340648 - RNA, 19 nt, Artificial Sequence
  Description of Artificial Sequence: Synthetic oligonucleotide
  Antisense Strand to SEQ ID NO: 340647
uaccuuauacaacaguuau

SEQ ID NO: 340649 - RNA, 19 nt, Artificial Sequence
  Description of Artificial Sequence: Synthetic oligonucleotide
  Sense Strand Starting at position 277 of SEQ ID NO: 318368
aaagaagaguggcuaacau

SEQ ID NO: 340650 - RNA, 19 nt, Artificial Sequence
  Description of Artificial Sequence: Synthetic oligonucleotide
  Antisense Strand to SEQ ID NO: 340649
auguuagccacucuucuuu

SEQ ID NO: 340651 - RNA, 19 nt, Artificial Sequence
  Description of Artificial Sequence: Synthetic oligonucleotide
  Sense Strand Starting at position 277 of SEQ ID NO: 318511
agcagagacuugcuauauc

SEQ ID NO: 340652 - RNA, 19 nt, Artificial Sequence
  Description of Artificial Sequence: Synthetic oligonucleotide
  Antisense Strand to SEQ ID NO: 340651
gauauagcaagucucugcu

SEQ ID NO: 340653 - RNA, 19 nt, Artificial Sequence
  Description of Artificial Sequence: Synthetic oligonucleotide
  Sense Strand Starting at position 277 of SEQ ID NO: 318655
uccugaguccuagagaguu

SEQ ID NO: 340654 - RNA, 19 nt, Artificial Sequence
  Description of Artificial Sequence: Synthetic oligonucleotide
  Antisense Strand to SEQ ID NO: 340653
aacucucuaggacucagga

SEQ ID NO: 340655 - RNA, 19 nt, Artificial Sequence
  Description of Artificial Sequence: Synthetic oligonucleotide
  Sense Strand Starting at position 277 of SEQ ID NO: 318661
guccuagagaguugcagaa

SEQ ID NO: 340656 - RNA, 19 nt, Artificial Sequence
  Description of Artificial Sequence: Synthetic oligonucleotide
  Antisense Strand to SEQ ID NO: 340655
uucugcaacucucuaggac

SEQ ID NO: 340657 - RNA, 19 nt, Artificial Sequence
  Description of Artificial Sequence: Synthetic oligonucleotide
  Sense Strand Starting at position 277 of SEQ ID NO: 318665
uagagaguugcagaaguau

SEQ ID NO: 340658 - RNA, 19 nt, Artificial Sequence
  Description of Artificial Sequence: Synthetic oligonucleotide
  Antisense Strand to SEQ ID NO: 340657
auacuucugcaacucucua

SEQ ID NO: 340659 - RNA, 19 nt, Artificial Sequence
  Description of Artificial Sequence: Synthetic oligonucleotide
  Sense Strand Starting at position 277 of SEQ ID NO: 318706
ucucuauucugagucauau

SEQ ID NO: 340660 - RNA, 19 nt, Artificial Sequence
  Description of Artificial Sequence: Synthetic oligonucleotide
  Antisense Strand to SEQ ID NO: 340659
auaugacucagaauagaga

SEQ ID NO: 340661 - RNA, 19 nt, Artificial Sequence
  Description of Artificial Sequence: Synthetic oligonucleotide
  Sense Strand Starting at position 277 of SEQ ID NO: 319068
gugucucucuaucuauaac

SEQ ID NO: 340662 - RNA, 19 nt, Artificial Sequence
  Description of Artificial Sequence: Synthetic oligonucleotide
  Antisense Strand to SEQ ID NO: 340661
guuauagauagagagacac

SEQ ID NO: 340663 - RNA, 19 nt, Artificial Sequence
  Description of Artificial Sequence: Synthetic oligonucleotide
  Sense Strand Starting at position 277 of SEQ ID NO: 319153
cuggauguaugcucaacua

SEQ ID NO: 340664 - RNA, 19 nt, Artificial Sequence
  Description of Artificial Sequence: Synthetic oligonucleotide
  Antisense Strand to SEQ ID NO: 340663
uaguugagcauacauccag

SEQ ID NO: 340665 - RNA, 19 nt, Artificial Sequence
  Description of Artificial Sequence: Synthetic oligonucleotide
  Sense Strand Starting at position 277 of SEQ ID NO: 319208
gauuaagagcccuggucuu

SEQ ID NO: 340666 - RNA, 19 nt, Artificial Sequence
  Description of Artificial Sequence: Synthetic oligonucleotide
  Antisense Strand to SEQ ID NO: 340665
aagaccagggcucuuaauc

SEQ ID NO: 340667 - RNA, 19 nt, Artificial Sequence
  Description of Artificial Sequence: Synthetic oligonucleotide
  Sense Strand Starting at position 278 of SEQ ID NO: 315261
augaaugauuugugaaaug

SEQ ID NO: 340668 - RNA, 19 nt, Artificial Sequence
  Description of Artificial Sequence: Synthetic oligonucleotide
  Antisense Strand to SEQ ID NO: 340667
cauuucacaaaucauucau

SEQ ID NO: 340669 - RNA, 19 nt, Artificial Sequence
  Description of Artificial Sequence: Synthetic oligonucleotide
  Sense Strand Starting at position 278 of SEQ ID NO: 315405
augcuauaccuguacaucu

SEQ ID NO: 340670 - RNA, 19 nt, Artificial Sequence
  Description of Artificial Sequence: Synthetic oligonucleotide
  Antisense Strand to SEQ ID NO: 340669
agauguacagguauagcau

SEQ ID NO: 340671 - RNA, 19 nt, Artificial Sequence
  Description of Artificial Sequence: Synthetic oligonucleotide
  Sense Strand Starting at position 278 of SEQ ID NO: 315470
cacucagaaucguucugau

SEQ ID NO: 340672 - RNA, 19 nt, Artificial Sequence
  Description of Artificial Sequence: Synthetic oligonucleotide
  Antisense Strand to SEQ ID NO: 340671
aucagaacgauucugagug

SEQ ID NO: 340673 - RNA, 19 nt, Artificial Sequence
  Description of Artificial Sequence: Synthetic oligonucleotide
  Sense Strand Starting at position 278 of SEQ ID NO: 315494
uucuguuguccagauaaag

SEQ ID NO: 340674 - RNA, 19 nt, Artificial Sequence
  Description of Artificial Sequence: Synthetic oligonucleotide
  Antisense Strand to SEQ ID NO: 340673
cuuuaucuggacaacagaa

SEQ ID NO: 340675 - RNA, 19 nt, Artificial Sequence
  Description of Artificial Sequence: Synthetic oligonucleotide
  Sense Strand Starting at position 278 of SEQ ID NO: 315619
auuuaucuuugucuagcua

SEQ ID NO: 340676 - RNA, 19 nt, Artificial Sequence
  Description of Artificial Sequence: Synthetic oligonucleotide
  Antisense Strand to SEQ ID NO: 340675
uagcuagacaaagauaaau

SEQ ID NO: 340677 - RNA, 19 nt, Artificial Sequence
  Description of Artificial Sequence: Synthetic oligonucleotide
  Sense Strand Starting at position 278 of SEQ ID NO: 315735
cuguguuaccaauacauaa

SEQ ID NO: 340678 - RNA, 19 nt, Artificial Sequence
  Description of Artificial Sequence: Synthetic oligonucleotide
  Antisense Strand to SEQ ID NO: 340677
uuauguauugguaacacag

SEQ ID NO: 340679 - RNA, 19 nt, Artificial Sequence
  Description of Artificial Sequence: Synthetic oligonucleotide
  Sense Strand Starting at position 278 of SEQ ID NO: 315914
ugcagaauuagagguacuu

SEQ ID NO: 340680 - RNA, 19 nt, Artificial Sequence
  Description of Artificial Sequence: Synthetic oligonucleotide
  Antisense Strand to SEQ ID NO: 340679
aaguaccucuaauucugca

SEQ ID NO: 340681 - RNA, 19 nt, Artificial Sequence
  Description of Artificial Sequence: Synthetic oligonucleotide
  Sense Strand Starting at position 278 of SEQ ID NO: 315946
uuauacuagcaagagguau

SEQ ID NO: 340682 - RNA, 19 nt, Artificial Sequence
  Description of Artificial Sequence: Synthetic oligonucleotide
  Antisense Strand to SEQ ID NO: 340681
auaccucuugcuaguauaa

SEQ ID NO: 340683 - RNA, 19 nt, Artificial Sequence
  Description of Artificial Sequence: Synthetic oligonucleotide
  Sense Strand Starting at position 278 of SEQ ID NO: 316059
cugccaggacuaugaugua

SEQ ID NO: 340684 - RNA, 19 nt, Artificial Sequence
  Description of Artificial Sequence: Synthetic oligonucleotide
  Antisense Strand to SEQ ID NO: 340683
uacaucauaguccuggcag

SEQ ID NO: 340685 - RNA, 19 nt, Artificial Sequence
  Description of Artificial Sequence: Synthetic oligonucleotide
  Sense Strand Starting at position 278 of SEQ ID NO: 316084
accagaccguucuuaagaa

SEQ ID NO: 340686 - RNA, 19 nt, Artificial Sequence
  Description of Artificial Sequence: Synthetic oligonucleotide
  Antisense Strand to SEQ ID NO: 340685
uucuuaagaacggucuggu

SEQ ID NO: 340687 - RNA, 19 nt, Artificial Sequence
  Description of Artificial Sequence: Synthetic oligonucleotide
  Sense Strand Starting at position 278 of SEQ ID NO: 316148
ugagcucucagugaggaga

SEQ ID NO: 340688 - RNA, 19 nt, Artificial Sequence
  Description of Artificial Sequence: Synthetic oligonucleotide
  Antisense Strand to SEQ ID NO: 340687
ucuccucacugagagcuca

SEQ ID NO: 340689 - RNA, 19 nt, Artificial Sequence
  Description of Artificial Sequence: Synthetic oligonucleotide
  Sense Strand Starting at position 278 of SEQ ID NO: 316653
uuccacagacuuugguaua

SEQ ID NO: 340690 - RNA, 19 nt, Artificial Sequence
  Description of Artificial Sequence: Synthetic oligonucleotide
  Antisense Strand to SEQ ID NO: 340689
uauaccaaagucuguggaa

SEQ ID NO: 340691 - RNA, 19 nt, Artificial Sequence
  Description of Artificial Sequence: Synthetic oligonucleotide
  Sense Strand Starting at position 278 of SEQ ID NO: 316698
cugaaaguaaggugguauu

SEQ ID NO: 340692 - RNA, 19 nt, Artificial Sequence
  Description of Artificial Sequence: Synthetic oligonucleotide
  Antisense Strand to SEQ ID NO: 340691
aauaccaccuuacuuucag

SEQ ID NO: 340693 - RNA, 19 nt, Artificial Sequence
  Description of Artificial Sequence: Synthetic oligonucleotide
  Sense Strand Starting at position 278 of SEQ ID NO: 316870
guuucucucccgggagaca

SEQ ID NO: 340694 - RNA, 19 nt, Artificial Sequence
  Description of Artificial Sequence: Synthetic oligonucleotide
  Antisense Strand to SEQ ID NO: 340693
ugucucccgggagagaaac

SEQ ID NO: 340695 - RNA, 19 nt, Artificial Sequence
  Description of Artificial Sequence: Synthetic oligonucleotide
  Sense Strand Starting at position 278 of SEQ ID NO: 317018
cgaccacugcaaugaaagu

SEQ ID NO: 340696 - RNA, 19 nt, Artificial Sequence
  Description of Artificial Sequence: Synthetic oligonucleotide
  Antisense Strand to SEQ ID NO: 340695
acuuucauugcaguggucg

SEQ ID NO: 340697 - RNA, 19 nt, Artificial Sequence
  Description of Artificial Sequence: Synthetic oligonucleotide
  Sense Strand Starting at position 278 of SEQ ID NO: 317150
ccuuaugcuccucggacaa

SEQ ID NO: 340698 - RNA, 19 nt, Artificial Sequence
  Description of Artificial Sequence: Synthetic oligonucleotide
  Antisense Strand to SEQ ID NO: 340697
uuguccgaggagcauaagg

SEQ ID NO: 340699 - RNA, 19 nt, Artificial Sequence
  Description of Artificial Sequence: Synthetic oligonucleotide
  Sense Strand Starting at position 278 of SEQ ID NO: 317163
ggacaauuccagcagcauc

SEQ ID NO: 340700 - RNA, 19 nt, Artificial Sequence
  Description of Artificial Sequence: Synthetic oligonucleotide
  Antisense Strand to SEQ ID NO: 340699
gaugcugcuggaauugucc

SEQ ID NO: 340701 - RNA, 19 nt, Artificial Sequence
  Description of Artificial Sequence: Synthetic oligonucleotide
  Sense Strand Starting at position 278 of SEQ ID NO: 317401
ggugcuaggcucuauggga

SEQ ID NO: 340702 - RNA, 19 nt, Artificial Sequence
  Description of Artificial Sequence: Synthetic oligonucleotide
  Antisense Strand to SEQ ID NO: 340701
ucccauagagccuagcacc

SEQ ID NO: 340703 - RNA, 19 nt, Artificial Sequence
  Description of Artificial Sequence: Synthetic oligonucleotide
  Sense Strand Starting at position 278 of SEQ ID NO: 317451
ccucguggagcauacauua

SEQ ID NO: 340704 - RNA, 19 nt, Artificial Sequence
  Description of Artificial Sequence: Synthetic oligonucleotide
  Antisense Strand to SEQ ID NO: 340703
uaauguaugcuccacgagg

SEQ ID NO: 340705 - RNA, 19 nt, Artificial Sequence
  Description of Artificial Sequence: Synthetic oligonucleotide
  Sense Strand Starting at position 278 of SEQ ID NO: 317510
caggaaguguucuuacauu

SEQ ID NO: 340706 - RNA, 19 nt, Artificial Sequence
  Description of Artificial Sequence: Synthetic oligonucleotide
  Antisense Strand to SEQ ID NO: 340705
aauguaagaacacuuccug

SEQ ID NO: 340707 - RNA, 19 nt, Artificial Sequence
  Description of Artificial Sequence: Synthetic oligonucleotide
  Sense Strand Starting at position 278 of SEQ ID NO: 317667
ucuuaaauguaucucaguu

SEQ ID NO: 340708 - RNA, 19 nt, Artificial Sequence
  Description of Artificial Sequence: Synthetic oligonucleotide
  Antisense Strand to SEQ ID NO: 340707
aacugagauacauuuaaga

SEQ ID NO: 340709 - RNA, 19 nt, Artificial Sequence
  Description of Artificial Sequence: Synthetic oligonucleotide
  Sense Strand Starting at position 278 of SEQ ID NO: 317734
uccagagauuaugugacaa

SEQ ID NO: 340710 - RNA, 19 nt, Artificial Sequence
  Description of Artificial Sequence: Synthetic oligonucleotide
  Antisense Strand to SEQ ID NO: 340709
uugucacauaaucucugga

SEQ ID NO: 340711 - RNA, 19 nt, Artificial Sequence
  Description of Artificial Sequence: Synthetic oligonucleotide
  Sense Strand Starting at position 278 of SEQ ID NO: 317736
cagagauuaugugacaaag

SEQ ID NO: 340712 - RNA, 19 nt, Artificial Sequence
  Description of Artificial Sequence: Synthetic oligonucleotide
  Antisense Strand to SEQ ID NO: 340711
cuuugucacauaaucucug

SEQ ID NO: 340713 - RNA, 19 nt, Artificial Sequence
  Description of Artificial Sequence: Synthetic oligonucleotide
  Sense Strand Starting at position 278 of SEQ ID NO: 317745
ugugacaaagccugugaca

SEQ ID NO: 340714 - RNA, 19 nt, Artificial Sequence
  Description of Artificial Sequence: Synthetic oligonucleotide
  Antisense Strand to SEQ ID NO: 340713
ugucacaggcuuugucaca

SEQ ID NO: 340715 - RNA, 19 nt, Artificial Sequence
  Description of Artificial Sequence: Synthetic oligonucleotide
  Sense Strand Starting at position 278 of SEQ ID NO: 318239
guauuuagcgccugugaua

SEQ ID NO: 340716 - RNA, 19 nt, Artificial Sequence
  Description of Artificial Sequence: Synthetic oligonucleotide
  Antisense Strand to SEQ ID NO: 340715
uaucacaggcgcuaaauac

SEQ ID NO: 340717 - RNA, 19 nt, Artificial Sequence
  Description of Artificial Sequence: Synthetic oligonucleotide
  Sense Strand Starting at position 278 of SEQ ID NO: 318315
uaaaguugcuaauugauag

SEQ ID NO: 340718 - RNA, 19 nt, Artificial Sequence
  Description of Artificial Sequence: Synthetic oligonucleotide
  Antisense Strand to SEQ ID NO: 340717
cuaucaauuagcaacuuua

SEQ ID NO: 340719 - RNA, 19 nt, Artificial Sequence
  Description of Artificial Sequence: Synthetic oligonucleotide
  Sense Strand Starting at position 278 of SEQ ID NO: 318424
cuaucuaaggcuugagaca

SEQ ID NO: 340720 - RNA, 19 nt, Artificial Sequence
  Description of Artificial Sequence: Synthetic oligonucleotide
  Antisense Strand to SEQ ID NO: 340719
ugucucaagccuuagauag

SEQ ID NO: 340721 - RNA, 19 nt, Artificial Sequence
  Description of Artificial Sequence: Synthetic oligonucleotide
  Sense Strand Starting at position 278 of SEQ ID NO: 318539
uguuucuuccacugggaca

SEQ ID NO: 340722 - RNA, 19 nt, Artificial Sequence
  Description of Artificial Sequence: Synthetic oligonucleotide
  Antisense Strand to SEQ ID NO: 340721
ugucccaguggaagaaaca

SEQ ID NO: 340723 - RNA, 19 nt, Artificial Sequence
  Description of Artificial Sequence: Synthetic oligonucleotide
  Sense Strand Starting at position 278 of SEQ ID NO: 318561
aaagacagguccuugaacu

SEQ ID NO: 340724 - RNA, 19 nt, Artificial Sequence
  Description of Artificial Sequence: Synthetic oligonucleotide
  Antisense Strand to SEQ ID NO: 340723
aguucaaggaccugucuuu

SEQ ID NO: 340725 - RNA, 19 nt, Artificial Sequence
  Description of Artificial Sequence: Synthetic oligonucleotide
  Sense Strand Starting at position 278 of SEQ ID NO: 318581
auuaguuaguucuugaagu

SEQ ID NO: 340726 - RNA, 19 nt, Artificial Sequence
  Description of Artificial Sequence: Synthetic oligonucleotide
  Antisense Strand to SEQ ID NO: 340725
acuucaagaacuaacuaau

SEQ ID NO: 340727 - RNA, 19 nt, Artificial Sequence
  Description of Artificial Sequence: Synthetic oligonucleotide
  Sense Strand Starting at position 278 of SEQ ID NO: 318583
uaguuaguucuugaaguag

SEQ ID NO: 340728 - RNA, 19 nt, Artificial Sequence
  Description of Artificial Sequence: Synthetic oligonucleotide
  Antisense Strand to SEQ ID NO: 340727
cuacuucaagaacuaacua

SEQ ID NO: 340729 - RNA, 19 nt, Artificial Sequence
  Description of Artificial Sequence: Synthetic oligonucleotide
  Sense Strand Starting at position 278 of SEQ ID NO: 318625
uuacuuagacugugaauug

SEQ ID NO: 340730 - RNA, 19 nt, Artificial Sequence
  Description of Artificial Sequence: Synthetic oligonucleotide
  Antisense Strand to SEQ ID NO: 340729
caauucacagucuaaguaa

SEQ ID NO: 340731 - RNA, 19 nt, Artificial Sequence
  Description of Artificial Sequence: Synthetic oligonucleotide
  Sense Strand Starting at position 278 of SEQ ID NO: 318637
ugaauugcagauuagcaaa

SEQ ID NO: 340732 - RNA, 19 nt, Artificial Sequence
  Description of Artificial Sequence: Synthetic oligonucleotide
  Antisense Strand to SEQ ID NO: 340731
uuugcuaaucugcaauuca

SEQ ID NO: 340733 - RNA, 19 nt, Artificial Sequence
  Description of Artificial Sequence: Synthetic oligonucleotide
  Sense Strand Starting at position 278 of SEQ ID NO: 318668
uccugaaguugccuuuauu

SEQ ID NO: 340734 - RNA, 19 nt, Artificial Sequence
  Description of Artificial Sequence: Synthetic oligonucleotide
  Antisense Strand to SEQ ID NO: 340733
aauaaaggcaacuucagga

SEQ ID NO: 340735 - RNA, 19 nt, Artificial Sequence
  Description of Artificial Sequence: Synthetic oligonucleotide
  Sense Strand Starting at position 278 of SEQ ID NO: 318745
augauucuucuacaagugu

SEQ ID NO: 340736 - RNA, 19 nt, Artificial Sequence
  Description of Artificial Sequence: Synthetic oligonucleotide
  Antisense Strand to SEQ ID NO: 340735
acacuuguagaagaaucau

SEQ ID NO: 340737 - RNA, 19 nt, Artificial Sequence
  Description of Artificial Sequence: Synthetic oligonucleotide
  Sense Strand Starting at position 278 of SEQ ID NO: 318819
agcauucuguaauuaauga

SEQ ID NO: 340738 - RNA, 19 nt, Artificial Sequence
  Description of Artificial Sequence: Synthetic oligonucleotide
  Antisense Strand to SEQ ID NO: 340737
ucauuaauuacagaaugcu

SEQ ID NO: 340739 - RNA, 19 nt, Artificial Sequence
  Description of Artificial Sequence: Synthetic oligonucleotide
  Sense Strand Starting at position 278 of SEQ ID NO: 318890
uguacauauauagggagua

SEQ ID NO: 340740 - RNA, 19 nt, Artificial Sequence
  Description of Artificial Sequence: Synthetic oligonucleotide
  Antisense Strand to SEQ ID NO: 340739
uacucccuauauauguaca

SEQ ID NO: 340741 - RNA, 19 nt, Artificial Sequence
  Description of Artificial Sequence: Synthetic oligonucleotide
  Sense Strand Starting at position 278 of SEQ ID NO: 318973
cuguaaucucagggaauga

SEQ ID NO: 340742 - RNA, 19 nt, Artificial Sequence
  Description of Artificial Sequence: Synthetic oligonucleotide
  Antisense Strand to SEQ ID NO: 340741
ucauucccugagauuacag

SEQ ID NO: 340743 - RNA, 19 nt, Artificial Sequence
  Description of Artificial Sequence: Synthetic oligonucleotide
  Sense Strand Starting at position 278 of SEQ ID NO: 319029
agcacaauaggcugucuaa

SEQ ID NO: 340744 - RNA, 19 nt, Artificial Sequence
  Description of Artificial Sequence: Synthetic oligonucleotide
  Antisense Strand to SEQ ID NO: 340743
uuagacagccuauugugcu

SEQ ID NO: 340745 - RNA, 19 nt, Artificial Sequence
  Description of Artificial Sequence: Synthetic oligonucleotide
  Sense Strand Starting at position 278 of SEQ ID NO: 319151
ucaagucuagccugaccaa

SEQ ID NO: 340746 - RNA, 19 nt, Artificial Sequence
  Description of Artificial Sequence: Synthetic oligonucleotide
  Antisense Strand to SEQ ID NO: 340745
uuggucaggcuagacuuga

SEQ ID NO: 340747 - RNA, 19 nt, Artificial Sequence
  Description of Artificial Sequence: Synthetic oligonucleotide
  Sense Strand Starting at position 279 of SEQ ID NO: 315311
ugugcaauagugggcaaau

SEQ ID NO: 340748 - RNA, 19 nt, Artificial Sequence
  Description of Artificial Sequence: Synthetic oligonucleotide
  Antisense Strand to SEQ ID NO: 340747
auuugcccacuauugcaca

SEQ ID NO: 340749 - RNA, 19 nt, Artificial Sequence
  Description of Artificial Sequence: Synthetic oligonucleotide
  Sense Strand Starting at position 279 of SEQ ID NO: 315312
gugcaauagugggcaaauu

SEQ ID NO: 340750 - RNA, 19 nt, Artificial Sequence
  Description of Artificial Sequence: Synthetic oligonucleotide
  Antisense Strand to SEQ ID NO: 340749
aauuugcccacuauugcac

SEQ ID NO: 340751 - RNA, 19 nt, Artificial Sequence
  Description of Artificial Sequence: Synthetic oligonucleotide
  Sense Strand Starting at position 279 of SEQ ID NO: 315387
cucuuagugcuguaagaau

SEQ ID NO: 340752 - RNA, 19 nt, Artificial Sequence
  Description of Artificial Sequence: Synthetic oligonucleotide
  Antisense Strand to SEQ ID NO: 340751
auucuuacagcacuaagag

SEQ ID NO: 340753 - RNA, 19 nt, Artificial Sequence
  Description of Artificial Sequence: Synthetic oligonucleotide
  Sense Strand Starting at position 279 of SEQ ID NO: 315414
gaguuagccaguuagagca

SEQ ID NO: 340754 - RNA, 19 nt, Artificial Sequence
  Description of Artificial Sequence: Synthetic oligonucleotide
  Antisense Strand to SEQ ID NO: 340753
ugcucuaacuggcuaacuc

SEQ ID NO: 340755 - RNA, 19 nt, Artificial Sequence
  Description of Artificial Sequence: Synthetic oligonucleotide
  Sense Strand Starting at position 279 of SEQ ID NO: 315488
gugagaauuaggcagccau

SEQ ID NO: 340756 - RNA, 19 nt, Artificial Sequence
  Description of Artificial Sequence: Synthetic oligonucleotide
  Antisense Strand to SEQ ID NO: 340755
auggcugccuaauucucac

SEQ ID NO: 340757 - RNA, 19 nt, Artificial Sequence
  Description of Artificial Sequence: Synthetic oligonucleotide
  Sense Strand Starting at position 279 of SEQ ID NO: 315498
ggcagccauguuuagcaaa

SEQ ID NO: 340758 - RNA, 19 nt, Artificial Sequence
  Description of Artificial Sequence: Synthetic oligonucleotide
  Antisense Strand to SEQ ID NO: 340757
uuugcuaaacauggcugcc

SEQ ID NO: 340759 - RNA, 19 nt, Artificial Sequence
  Description of Artificial Sequence: Synthetic oligonucleotide
  Sense Strand Starting at position 279 of SEQ ID NO: 315500
cagccauguuuagcaaagu

SEQ ID NO: 340760 - RNA, 19 nt, Artificial Sequence
  Description of Artificial Sequence: Synthetic oligonucleotide
  Antisense Strand to SEQ ID NO: 340759
acuuugcuaaacauggcug

SEQ ID NO: 340761 - RNA, 19 nt, Artificial Sequence
  Description of Artificial Sequence: Synthetic oligonucleotide
  Sense Strand Starting at position 279 of SEQ ID NO: 315737
acaucagguaguuaguaau

SEQ ID NO: 340762 - RNA, 19 nt, Artificial Sequence
  Description of Artificial Sequence: Synthetic oligonucleotide
  Antisense Strand to SEQ ID NO: 340761
auuacuaacuaccugaugu

SEQ ID NO: 340763 - RNA, 19 nt, Artificial Sequence
  Description of Artificial Sequence: Synthetic oligonucleotide
  Sense Strand Starting at position 279 of SEQ ID NO: 315750
aguaauacgaagugcucua

SEQ ID NO: 340764 - RNA, 19 nt, Artificial Sequence
  Description of Artificial Sequence: Synthetic oligonucleotide
  Antisense Strand to SEQ ID NO: 340763
uagagcacuucguauuacu

SEQ ID NO: 340765 - RNA, 19 nt, Artificial Sequence
  Description of Artificial Sequence: Synthetic oligonucleotide
  Sense Strand Starting at position 279 of SEQ ID NO: 315783
ggucuuguucagggacugu

SEQ ID NO: 340766 - RNA, 19 nt, Artificial Sequence
  Description of Artificial Sequence: Synthetic oligonucleotide
  Antisense Strand to SEQ ID NO: 340765
acagucccugaacaagacc

SEQ ID NO: 340767 - RNA, 19 nt, Artificial Sequence
  Description of Artificial Sequence: Synthetic oligonucleotide
  Sense Strand Starting at position 279 of SEQ ID NO: 315815
aagaaaguccacggauagu

SEQ ID NO: 340768 - RNA, 19 nt, Artificial Sequence
  Description of Artificial Sequence: Synthetic oligonucleotide
  Antisense Strand to SEQ ID NO: 340767
acuauccguggacuuucuu

SEQ ID NO: 340769 - RNA, 19 nt, Artificial Sequence
  Description of Artificial Sequence: Synthetic oligonucleotide
  Sense Strand Starting at position 279 of SEQ ID NO: 315969
gugucugugaaugaaugca

SEQ ID NO: 340770 - RNA, 19 nt, Artificial Sequence
  Description of Artificial Sequence: Synthetic oligonucleotide
  Antisense Strand to SEQ ID NO: 340769
ugcauucauucacagacac

SEQ ID NO: 340771 - RNA, 19 nt, Artificial Sequence
  Description of Artificial Sequence: Synthetic oligonucleotide
  Sense Strand Starting at position 279 of SEQ ID NO: 316008
uuuguuucucugugcauuu

SEQ ID NO: 340772 - RNA, 19 nt, Artificial Sequence
  Description of Artificial Sequence: Synthetic oligonucleotide
  Antisense Strand to SEQ ID NO: 340771
aaaugcacagagaaacaaa

SEQ ID NO: 340773 - RNA, 19 nt, Artificial Sequence
  Description of Artificial Sequence: Synthetic oligonucleotide
  Sense Strand Starting at position 279 of SEQ ID NO: 316030
cugggaguauuccuaacuu

SEQ ID NO: 340774 - RNA, 19 nt, Artificial Sequence
  Description of Artificial Sequence: Synthetic oligonucleotide
  Antisense Strand to SEQ ID NO: 340773
aaguuaggaauacucccag

SEQ ID NO: 340775 - RNA, 19 nt, Artificial Sequence
  Description of Artificial Sequence: Synthetic oligonucleotide
  Sense Strand Starting at position 279 of SEQ ID NO: 316122
gggacuuaaucccuagcgu

SEQ ID NO: 340776 - RNA, 19 nt, Artificial Sequence
  Description of Artificial Sequence: Synthetic oligonucleotide
  Antisense Strand to SEQ ID NO: 340775
acgcuagggauuaaguccc

SEQ ID NO: 340777 - RNA, 19 nt, Artificial Sequence
  Description of Artificial Sequence: Synthetic oligonucleotide
  Sense Strand Starting at position 279 of SEQ ID NO: 316380
gacggaagauauucuuaua

SEQ ID NO: 340778 - RNA, 19 nt, Artificial Sequence
  Description of Artificial Sequence: Synthetic oligonucleotide
  Antisense Strand to SEQ ID NO: 340777
uauaagaauaucuuccguc

SEQ ID NO: 340779 - RNA, 19 nt, Artificial Sequence
  Description of Artificial Sequence: Synthetic oligonucleotide
  Sense Strand Starting at position 279 of SEQ ID NO: 316383
ggaagauauucuuauacua

SEQ ID NO: 340780 - RNA, 19 nt, Artificial Sequence
  Description of Artificial Sequence: Synthetic oligonucleotide
  Antisense Strand to SEQ ID NO: 340779
uaguauaagaauaucuucc

SEQ ID NO: 340781 - RNA, 19 nt, Artificial Sequence
  Description of Artificial Sequence: Synthetic oligonucleotide
  Sense Strand Starting at position 279 of SEQ ID NO: 316459
uaggguuacggugauaaua

SEQ ID NO: 340782 - RNA, 19 nt, Artificial Sequence
  Description of Artificial Sequence: Synthetic oligonucleotide
  Antisense Strand to SEQ ID NO: 340781
uauuaucaccguaacccua

SEQ ID NO: 340783 - RNA, 19 nt, Artificial Sequence
  Description of Artificial Sequence: Synthetic oligonucleotide
  Sense Strand Starting at position 279 of SEQ ID NO: 317048
aggaaucggccguaaccua

SEQ ID NO: 340784 - RNA, 19 nt, Artificial Sequence
  Description of Artificial Sequence: Synthetic oligonucleotide
  Antisense Strand to SEQ ID NO: 340783
uagguuacggccgauuccu

SEQ ID NO: 340785 - RNA, 19 nt, Artificial Sequence
  Description of Artificial Sequence: Synthetic oligonucleotide
  Sense Strand Starting at position 279 of SEQ ID NO: 317148
cuacucaggccuugagaua

SEQ ID NO: 340786 - RNA, 19 nt, Artificial Sequence
  Description of Artificial Sequence: Synthetic oligonucleotide
  Antisense Strand to SEQ ID NO: 340785
uaucucaaggccugaguag

SEQ ID NO: 340787 - RNA, 19 nt, Artificial Sequence
  Description of Artificial Sequence: Synthetic oligonucleotide
  Sense Strand Starting at position 279 of SEQ ID NO: 317503
guuguaguuguguuucgga

SEQ ID NO: 340788 - RNA, 19 nt, Artificial Sequence
  Description of Artificial Sequence: Synthetic oligonucleotide
  Antisense Strand to SEQ ID NO: 340787
uccgaaacacaacuacaac

SEQ ID NO: 340789 - RNA, 19 nt, Artificial Sequence
  Description of Artificial Sequence: Synthetic oligonucleotide
  Sense Strand Starting at position 279 of SEQ ID NO: 317622
gugcgaggcccagagaauu

SEQ ID NO: 340790 - RNA, 19 nt, Artificial Sequence
  Description of Artificial Sequence: Synthetic oligonucleotide
  Antisense Strand to SEQ ID NO: 340789
aauucucugggccucgcac

SEQ ID NO: 340791 - RNA, 19 nt, Artificial Sequence
  Description of Artificial Sequence: Synthetic oligonucleotide
  Sense Strand Starting at position 279 of SEQ ID NO: 317634
gagaauucucugcaggccu

SEQ ID NO: 340792 - RNA, 19 nt, Artificial Sequence
  Description of Artificial Sequence: Synthetic oligonucleotide
  Antisense Strand to SEQ ID NO: 340791
aggccugcagagaauucuc

SEQ ID NO: 340793 - RNA, 19 nt, Artificial Sequence
  Description of Artificial Sequence: Synthetic oligonucleotide
  Sense Strand Starting at position 279 of SEQ ID NO: 317948
gcucaaagaaguuaagugu

SEQ ID NO: 340794 - RNA, 19 nt, Artificial Sequence
  Description of Artificial Sequence: Synthetic oligonucleotide
  Antisense Strand to SEQ ID NO: 340793
acacuuaacuucuuugagc

SEQ ID NO: 340795 - RNA, 19 nt, Artificial Sequence
  Description of Artificial Sequence: Synthetic oligonucleotide
  Sense Strand Starting at position 279 of SEQ ID NO: 318196
acaggagaaucgcuuagaa

SEQ ID NO: 340796 - RNA, 19 nt, Artificial Sequence
  Description of Artificial Sequence: Synthetic oligonucleotide
  Antisense Strand to SEQ ID NO: 340795
uucuaagcgauucuccugu

SEQ ID NO: 340797 - RNA, 19 nt, Artificial Sequence
  Description of Artificial Sequence: Synthetic oligonucleotide
  Sense Strand Starting at position 279 of SEQ ID NO: 318345
ucauuaauguggcugaauu

SEQ ID NO: 340798 - RNA, 19 nt, Artificial Sequence
  Description of Artificial Sequence: Synthetic oligonucleotide
  Antisense Strand to SEQ ID NO: 340797
aauucagccacauuaauga

SEQ ID NO: 340799 - RNA, 19 nt, Artificial Sequence
  Description of Artificial Sequence: Synthetic oligonucleotide
  Sense Strand Starting at position 279 of SEQ ID NO: 318346
cauuaauguggcugaauuc

SEQ ID NO: 340800 - RNA, 19 nt, Artificial Sequence
  Description of Artificial Sequence: Synthetic oligonucleotide
  Antisense Strand to SEQ ID NO: 340799
gaauucagccacauuaaug

SEQ ID NO: 340801 - RNA, 19 nt, Artificial Sequence
  Description of Artificial Sequence: Synthetic oligonucleotide
  Sense Strand Starting at position 279 of SEQ ID NO: 318406
cgagaacauuugccuguca

SEQ ID NO: 340802 - RNA, 19 nt, Artificial Sequence
  Description of Artificial Sequence: Synthetic oligonucleotide
  Antisense Strand to SEQ ID NO: 340801
ugacaggcaaauguucucg

SEQ ID NO: 340803 - RNA, 19 nt, Artificial Sequence
  Description of Artificial Sequence: Synthetic oligonucleotide
  Sense Strand Starting at position 279 of SEQ ID NO: 318641
gcacgaaauuauuuggcuu

SEQ ID NO: 340804 - RNA, 19 nt, Artificial Sequence
  Description of Artificial Sequence: Synthetic oligonucleotide
  Antisense Strand to SEQ ID NO: 340803
aagccaaauaauuucgugc

SEQ ID NO: 340805 - RNA, 19 nt, Artificial Sequence
  Description of Artificial Sequence: Synthetic oligonucleotide
  Sense Strand Starting at position 279 of SEQ ID NO: 318673
gagcuaaugugacucucuu

SEQ ID NO: 340806 - RNA, 19 nt, Artificial Sequence
  Description of Artificial Sequence: Synthetic oligonucleotide
  Antisense Strand to SEQ ID NO: 340805
aagagagucacauuagcuc

SEQ ID NO: 340807 - RNA, 19 nt, Artificial Sequence
  Description of Artificial Sequence: Synthetic oligonucleotide
  Sense Strand Starting at position 279 of SEQ ID NO: 318726
ccagcuacaugguuucuaa

SEQ ID NO: 340808 - RNA, 19 nt, Artificial Sequence
  Description of Artificial Sequence: Synthetic oligonucleotide
  Antisense Strand to SEQ ID NO: 340807
uuagaaaccauguagcugg

SEQ ID NO: 340809 - RNA, 19 nt, Artificial Sequence
  Description of Artificial Sequence: Synthetic oligonucleotide
  Sense Strand Starting at position 279 of SEQ ID NO: 318777
uguggcauucaauagugga

SEQ ID NO: 340810 - RNA, 19 nt, Artificial Sequence
  Description of Artificial Sequence: Synthetic oligonucleotide
  Antisense Strand to SEQ ID NO: 340809
uccacuauugaaugccaca

SEQ ID NO: 340811 - RNA, 19 nt, Artificial Sequence
  Description of Artificial Sequence: Synthetic oligonucleotide
  Sense Strand Starting at position 279 of SEQ ID NO: 318824
ccagcagugugaucuuaug

SEQ ID NO: 340812 - RNA, 19 nt, Artificial Sequence
  Description of Artificial Sequence: Synthetic oligonucleotide
  Antisense Strand to SEQ ID NO: 340811
cauaagaucacacugcugg

SEQ ID NO: 340813 - RNA, 19 nt, Artificial Sequence
  Description of Artificial Sequence: Synthetic oligonucleotide
  Sense Strand Starting at position 279 of SEQ ID NO: 318830
gugugaucuuauguaaauu

SEQ ID NO: 340814 - RNA, 19 nt, Artificial Sequence
  Description of Artificial Sequence: Synthetic oligonucleotide
  Antisense Strand to SEQ ID NO: 340813
aauuuacauaagaucacac

SEQ ID NO: 340815 - RNA, 19 nt, Artificial Sequence
  Description of Artificial Sequence: Synthetic oligonucleotide
  Sense Strand Starting at position 279 of SEQ ID NO: 318848
ugagacuaauaauucuagu

SEQ ID NO: 340816 - RNA, 19 nt, Artificial Sequence
  Description of Artificial Sequence: Synthetic oligonucleotide
  Antisense Strand to SEQ ID NO: 340815
acuagaauuauuagucuca

SEQ ID NO: 340817 - RNA, 19 nt, Artificial Sequence
  Description of Artificial Sequence: Synthetic oligonucleotide
  Sense Strand Starting at position 279 of SEQ ID NO: 318943
gcuugaauaguggaacuuu

SEQ ID NO: 340818 - RNA, 19 nt, Artificial Sequence
  Description of Artificial Sequence: Synthetic oligonucleotide
  Antisense Strand to SEQ ID NO: 340817
aaaguuccacuauucaagc

SEQ ID NO: 340819 - RNA, 19 nt, Artificial Sequence
  Description of Artificial Sequence: Synthetic oligonucleotide
  Sense Strand Starting at position 279 of SEQ ID NO: 318987
uugcacuugagagaguauu

SEQ ID NO: 340820 - RNA, 19 nt, Artificial Sequence
  Description of Artificial Sequence: Synthetic oligonucleotide
  Antisense Strand to SEQ ID NO: 340819
aauacucucucaagugcaa

SEQ ID NO: 340821 - RNA, 19 nt, Artificial Sequence
  Description of Artificial Sequence: Synthetic oligonucleotide
  Sense Strand Starting at position 279 of SEQ ID NO: 319146
ccucaagugucauucuuac

SEQ ID NO: 340822 - RNA, 19 nt, Artificial Sequence
  Description of Artificial Sequence: Synthetic oligonucleotide
  Antisense Strand to SEQ ID NO: 340821
guaagaaugacacuugagg

SEQ ID NO: 340823 - RNA, 19 nt, Artificial Sequence
  Description of Artificial Sequence: Synthetic oligonucleotide
  Sense Strand Starting at position 279 of SEQ ID NO: 319152
gugucauucuuacuuggac

SEQ ID NO: 340824 - RNA, 19 nt, Artificial Sequence
  Description of Artificial Sequence: Synthetic oligonucleotide
  Antisense Strand to SEQ ID NO: 340823
guccaaguaagaaugacac

SEQ ID NO: 340825 - RNA, 19 nt, Artificial Sequence
  Description of Artificial Sequence: Synthetic oligonucleotide
  Sense Strand Starting at position 279 of SEQ ID NO: 319153
ugucauucuuacuuggacu

SEQ ID NO: 340826 - RNA, 19 nt, Artificial Sequence
  Description of Artificial Sequence: Synthetic oligonucleotide
  Antisense Strand to SEQ ID NO: 340825
aguccaaguaagaaugaca

SEQ ID NO: 340827 - RNA, 19 nt, Artificial Sequence
  Description of Artificial Sequence: Synthetic oligonucleotide
  Sense Strand Starting at position 280 of SEQ ID NO: 316031
cacuuugaauguguuggua

SEQ ID NO: 340828 - RNA, 19 nt, Artificial Sequence
  Description of Artificial Sequence: Synthetic oligonucleotide
  Antisense Strand to SEQ ID NO: 340827
uaccaacacauucaaagug

SEQ ID NO: 340829 - RNA, 19 nt, Artificial Sequence
  Description of Artificial Sequence: Synthetic oligonucleotide
  Sense Strand Starting at position 280 of SEQ ID NO: 316039
auguguugguauuucaguu

SEQ ID NO: 340830 - RNA, 19 nt, Artificial Sequence
  Description of Artificial Sequence: Synthetic oligonucleotide
  Antisense Strand to SEQ ID NO: 340829
aacugaaauaccaacacau

SEQ ID NO: 340831 - RNA, 19 nt, Artificial Sequence
  Description of Artificial Sequence: Synthetic oligonucleotide
  Sense Strand Starting at position 280 of SEQ ID NO: 316054
aguugcauugguggugaau

SEQ ID NO: 340832 - RNA, 19 nt, Artificial Sequence
  Description of Artificial Sequence: Synthetic oligonucleotide
  Antisense Strand to SEQ ID NO: 340831
auucaccaccaaugcaacu

SEQ ID NO: 340833 - RNA, 19 nt, Artificial Sequence
  Description of Artificial Sequence: Synthetic oligonucleotide
  Sense Strand Starting at position 280 of SEQ ID NO: 316057
ugcauugguggugaauauu

SEQ ID NO: 340834 - RNA, 19 nt, Artificial Sequence
  Description of Artificial Sequence: Synthetic oligonucleotide
  Antisense Strand to SEQ ID NO: 340833
aauauucaccaccaaugca

SEQ ID NO: 340835 - RNA, 19 nt, Artificial Sequence
  Description of Artificial Sequence: Synthetic oligonucleotide
  Sense Strand Starting at position 280 of SEQ ID NO: 316067
gugaauauuuaugauggaa

SEQ ID NO: 340836 - RNA, 19 nt, Artificial Sequence
  Description of Artificial Sequence: Synthetic oligonucleotide
  Antisense Strand to SEQ ID NO: 340835
uuccaucauaaauauucac

SEQ ID NO: 340837 - RNA, 19 nt, Artificial Sequence
  Description of Artificial Sequence: Synthetic oligonucleotide
  Sense Strand Starting at position 280 of SEQ ID NO: 316069
gaauauuuaugauggaagc

SEQ ID NO: 340838 - RNA, 19 nt, Artificial Sequence
  Description of Artificial Sequence: Synthetic oligonucleotide
  Antisense Strand to SEQ ID NO: 340837
gcuuccaucauaaauauuc

SEQ ID NO: 340839 - RNA, 19 nt, Artificial Sequence
  Description of Artificial Sequence: Synthetic oligonucleotide
  Sense Strand Starting at position 280 of SEQ ID NO: 316095
gagcaaaugucacuugccu

SEQ ID NO: 340840 - RNA, 19 nt, Artificial Sequence
  Description of Artificial Sequence: Synthetic oligonucleotide
  Antisense Strand to SEQ ID NO: 340839
aggcaagugacauuugcuc

SEQ ID NO: 340841 - RNA, 19 nt, Artificial Sequence
  Description of Artificial Sequence: Synthetic oligonucleotide
  Sense Strand Starting at position 280 of SEQ ID NO: 316239
agaugucccuuccuaggaa

SEQ ID NO: 340842 - RNA, 19 nt, Artificial Sequence
  Description of Artificial Sequence: Synthetic oligonucleotide
  Antisense Strand to SEQ ID NO: 340841
uuccuaggaagggacaucu

SEQ ID NO: 340843 - RNA, 19 nt, Artificial Sequence
  Description of Artificial Sequence: Synthetic oligonucleotide
  Sense Strand Starting at position 280 of SEQ ID NO: 316242
ugucccuuccuaggaaauc

SEQ ID NO: 340844 - RNA, 19 nt, Artificial Sequence
  Description of Artificial Sequence: Synthetic oligonucleotide
  Antisense Strand to SEQ ID NO: 340843
gauuuccuaggaagggaca

SEQ ID NO: 340845 - RNA, 19 nt, Artificial Sequence
  Description of Artificial Sequence: Synthetic oligonucleotide
  Sense Strand Starting at position 280 of SEQ ID NO: 316299
ucuacaaucugucuaggga

SEQ ID NO: 340846 - RNA, 19 nt, Artificial Sequence
  Description of Artificial Sequence: Synthetic oligonucleotide
  Antisense Strand to SEQ ID NO: 340845
ucccuagacagauuguaga

SEQ ID NO: 340847 - RNA, 19 nt, Artificial Sequence
  Description of Artificial Sequence: Synthetic oligonucleotide
  Sense Strand Starting at position 280 of SEQ ID NO: 316411
gugccaugucuuguguuca

SEQ ID NO: 340848 - RNA, 19 nt, Artificial Sequence
  Description of Artificial Sequence: Synthetic oligonucleotide
  Antisense Strand to SEQ ID NO: 340847
ugaacacaagacauggcac

SEQ ID NO: 340849 - RNA, 19 nt, Artificial Sequence
  Description of Artificial Sequence: Synthetic oligonucleotide
  Sense Strand Starting at position 280 of SEQ ID NO: 316472
ccaccaucucguuguaacu

SEQ ID NO: 340850 - RNA, 19 nt, Artificial Sequence
  Description of Artificial Sequence: Synthetic oligonucleotide
  Antisense Strand to SEQ ID NO: 340849
aguuacaacgagauggugg

SEQ ID NO: 340851 - RNA, 19 nt, Artificial Sequence
  Description of Artificial Sequence: Synthetic oligonucleotide
  Sense Strand Starting at position 280 of SEQ ID NO: 316523
uaauuacacgugugauuau

SEQ ID NO: 340852 - RNA, 19 nt, Artificial Sequence
  Description of Artificial Sequence: Synthetic oligonucleotide
  Antisense Strand to SEQ ID NO: 340851
auaaucacacguguaauua

SEQ ID NO: 340853 - RNA, 19 nt, Artificial Sequence
  Description of Artificial Sequence: Synthetic oligonucleotide
  Sense Strand Starting at position 280 of SEQ ID NO: 316833
uccuuugacagauggguaa

SEQ ID NO: 340854 - RNA, 19 nt, Artificial Sequence
  Description of Artificial Sequence: Synthetic oligonucleotide
  Antisense Strand to SEQ ID NO: 340853
uuacccaucugucaaagga

SEQ ID NO: 340855 - RNA, 19 nt, Artificial Sequence
  Description of Artificial Sequence: Synthetic oligonucleotide
  Sense Strand Starting at position 280 of SEQ ID NO: 316835
cuuugacagauggguaaau

SEQ ID NO: 340856 - RNA, 19 nt, Artificial Sequence
  Description of Artificial Sequence: Synthetic oligonucleotide
  Antisense Strand to SEQ ID NO: 340855
auuuacccaucugucaaag

SEQ ID NO: 340857 - RNA, 19 nt, Artificial Sequence
  Description of Artificial Sequence: Synthetic oligonucleotide
  Sense Strand Starting at position 280 of SEQ ID NO: 316836
uuugacagauggguaaauu

SEQ ID NO: 340858 - RNA, 19 nt, Artificial Sequence
  Description of Artificial Sequence: Synthetic oligonucleotide
  Antisense Strand to SEQ ID NO: 340857
aauuuacccaucugucaaa

SEQ ID NO: 340859 - RNA, 19 nt, Artificial Sequence
  Description of Artificial Sequence: Synthetic oligonucleotide
  Sense Strand Starting at position 280 of SEQ ID NO: 316913
agcuuacaagagugagaca

SEQ ID NO: 340860 - RNA, 19 nt, Artificial Sequence
  Description of Artificial Sequence: Synthetic oligonucleotide
  Antisense Strand to SEQ ID NO: 340859
ugucucacucuuguaagcu

SEQ ID NO: 340861 - RNA, 19 nt, Artificial Sequence
  Description of Artificial Sequence: Synthetic oligonucleotide
  Sense Strand Starting at position 280 of SEQ ID NO: 317543
aauugaugugaccggucua

SEQ ID NO: 340862 - RNA, 19 nt, Artificial Sequence
  Description of Artificial Sequence: Synthetic oligonucleotide
  Antisense Strand to SEQ ID NO: 340861
uagaccggucacaucaauu

SEQ ID NO: 340863 - RNA, 19 nt, Artificial Sequence
  Description of Artificial Sequence: Synthetic oligonucleotide
  Sense Strand Starting at position 280 of SEQ ID NO: 317544
auugaugugaccggucuau

SEQ ID NO: 340864 - RNA, 19 nt, Artificial Sequence
  Description of Artificial Sequence: Synthetic oligonucleotide
  Antisense Strand to SEQ ID NO: 340863
auagaccggucacaucaau

SEQ ID NO: 340865 - RNA, 19 nt, Artificial Sequence
  Description of Artificial Sequence: Synthetic oligonucleotide
  Sense Strand Starting at position 280 of SEQ ID NO: 317548
augugaccggucuaugacu

SEQ ID NO: 340866 - RNA, 19 nt, Artificial Sequence
  Description of Artificial Sequence: Synthetic oligonucleotide
  Antisense Strand to SEQ ID NO: 340865
agucauagaccggucacau

SEQ ID NO: 340867 - RNA, 19 nt, Artificial Sequence
  Description of Artificial Sequence: Synthetic oligonucleotide
  Sense Strand Starting at position 280 of SEQ ID NO: 317553
accggucuaugacuguuau

SEQ ID NO: 340868 - RNA, 19 nt, Artificial Sequence
  Description of Artificial Sequence: Synthetic oligonucleotide
  Antisense Strand to SEQ ID NO: 340867
auaacagucauagaccggu

SEQ ID NO: 340869 - RNA, 19 nt, Artificial Sequence
  Description of Artificial Sequence: Synthetic oligonucleotide
  Sense Strand Starting at position 280 of SEQ ID NO: 317554
ccggucuaugacuguuauu

SEQ ID NO: 340870 - RNA, 19 nt, Artificial Sequence
  Description of Artificial Sequence: Synthetic oligonucleotide
  Antisense Strand to SEQ ID NO: 340869
aauaacagucauagaccgg

SEQ ID NO: 340871 - RNA, 19 nt, Artificial Sequence
  Description of Artificial Sequence: Synthetic oligonucleotide
  Sense Strand Starting at position 280 of SEQ ID NO: 317858
gaggucucacuaugauguu

SEQ ID NO: 340872 - RNA, 19 nt, Artificial Sequence
  Description of Artificial Sequence: Synthetic oligonucleotide
  Antisense Strand to SEQ ID NO: 340871
aacaucauagugagaccuc

SEQ ID NO: 340873 - RNA, 19 nt, Artificial Sequence
  Description of Artificial Sequence: Synthetic oligonucleotide
  Sense Strand Starting at position 280 of SEQ ID NO: 317998
uuguuauuugcuuguuugu

SEQ ID NO: 340874 - RNA, 19 nt, Artificial Sequence
  Description of Artificial Sequence: Synthetic oligonucleotide
  Antisense Strand to SEQ ID NO: 340873
acaaacaagcaaauaacaa

SEQ ID NO: 340875 - RNA, 19 nt, Artificial Sequence
  Description of Artificial Sequence: Synthetic oligonucleotide
  Sense Strand Starting at position 280 of SEQ ID NO: 318036
guggauaauguuggcacau

SEQ ID NO: 340876 - RNA, 19 nt, Artificial Sequence
  Description of Artificial Sequence: Synthetic oligonucleotide
  Antisense Strand to SEQ ID NO: 340875
augugccaacauuauccac

SEQ ID NO: 340877 - RNA, 19 nt, Artificial Sequence
  Description of Artificial Sequence: Synthetic oligonucleotide
  Sense Strand Starting at position 280 of SEQ ID NO: 318037
uggauaauguuggcacaua

SEQ ID NO: 340878 - RNA, 19 nt, Artificial Sequence
  Description of Artificial Sequence: Synthetic oligonucleotide
  Antisense Strand to SEQ ID NO: 340877
uaugugccaacauuaucca

SEQ ID NO: 340879 - RNA, 19 nt, Artificial Sequence
  Description of Artificial Sequence: Synthetic oligonucleotide
  Sense Strand Starting at position 280 of SEQ ID NO: 318052
cauaguaguugcucaguga

SEQ ID NO: 340880 - RNA, 19 nt, Artificial Sequence
  Description of Artificial Sequence: Synthetic oligonucleotide
  Antisense Strand to SEQ ID NO: 340879
ucacugagcaacuacuaug

SEQ ID NO: 340881 - RNA, 19 nt, Artificial Sequence
  Description of Artificial Sequence: Synthetic oligonucleotide
  Sense Strand Starting at position 280 of SEQ ID NO: 318053
auaguaguugcucagugag

SEQ ID NO: 340882 - RNA, 19 nt, Artificial Sequence
  Description of Artificial Sequence: Synthetic oligonucleotide
  Antisense Strand to SEQ ID NO: 340881
cucacugagcaacuacuau

SEQ ID NO: 340883 - RNA, 19 nt, Artificial Sequence
  Description of Artificial Sequence: Synthetic oligonucleotide
  Sense Strand Starting at position 280 of SEQ ID NO: 318061
ugcucagugaguucucguu

SEQ ID NO: 340884 - RNA, 19 nt, Artificial Sequence
  Description of Artificial Sequence: Synthetic oligonucleotide
  Antisense Strand to SEQ ID NO: 340883
aacgagaacucacugagca

SEQ ID NO: 340885 - RNA, 19 nt, Artificial Sequence
  Description of Artificial Sequence: Synthetic oligonucleotide
  Sense Strand Starting at position 280 of SEQ ID NO: 318067
gugaguucucguugaauga

SEQ ID NO: 340886 - RNA, 19 nt, Artificial Sequence
  Description of Artificial Sequence: Synthetic oligonucleotide
  Antisense Strand to SEQ ID NO: 340885
ucauucaacgagaacucac

SEQ ID NO: 340887 - RNA, 19 nt, Artificial Sequence
  Description of Artificial Sequence: Synthetic oligonucleotide
  Sense Strand Starting at position 280 of SEQ ID NO: 318068
ugaguucucguugaaugaa

SEQ ID NO: 340888 - RNA, 19 nt, Artificial Sequence
  Description of Artificial Sequence: Synthetic oligonucleotide
  Antisense Strand to SEQ ID NO: 340887
uucauucaacgagaacuca

SEQ ID NO: 340889 - RNA, 19 nt, Artificial Sequence
  Description of Artificial Sequence: Synthetic oligonucleotide
  Sense Strand Starting at position 280 of SEQ ID NO: 318078
uugaaugaaugcgugcaau

SEQ ID NO: 340890 - RNA, 19 nt, Artificial Sequence
  Description of Artificial Sequence: Synthetic oligonucleotide
  Antisense Strand to SEQ ID NO: 340889
auugcacgcauucauucaa

SEQ ID NO: 340891 - RNA, 19 nt, Artificial Sequence
  Description of Artificial Sequence: Synthetic oligonucleotide
  Sense Strand Starting at position 280 of SEQ ID NO: 318084
gaaugcgugcaauugcauu

SEQ ID NO: 340892 - RNA, 19 nt, Artificial Sequence
  Description of Artificial Sequence: Synthetic oligonucleotide
  Antisense Strand to SEQ ID NO: 340891
aaugcaauugcacgcauuc

SEQ ID NO: 340893 - RNA, 19 nt, Artificial Sequence
  Description of Artificial Sequence: Synthetic oligonucleotide
  Sense Strand Starting at position 280 of SEQ ID NO: 318144
ugcaaauugccuuguacau

SEQ ID NO: 340894 - RNA, 19 nt, Artificial Sequence
  Description of Artificial Sequence: Synthetic oligonucleotide
  Antisense Strand to SEQ ID NO: 340893
auguacaaggcaauuugca

SEQ ID NO: 340895 - RNA, 19 nt, Artificial Sequence
  Description of Artificial Sequence: Synthetic oligonucleotide
  Sense Strand Starting at position 280 of SEQ ID NO: 318193
auagaacuucuacguuauu

SEQ ID NO: 340896 - RNA, 19 nt, Artificial Sequence
  Description of Artificial Sequence: Synthetic oligonucleotide
  Antisense Strand to SEQ ID NO: 340895
aauaacguagaaguucuau

SEQ ID NO: 340897 - RNA, 19 nt, Artificial Sequence
  Description of Artificial Sequence: Synthetic oligonucleotide
  Sense Strand Starting at position 280 of SEQ ID NO: 318311
acacaucacccaggguuua

SEQ ID NO: 340898 - RNA, 19 nt, Artificial Sequence
  Description of Artificial Sequence: Synthetic oligonucleotide
  Antisense Strand to SEQ ID NO: 340897
uaaacccugggugaugugu

SEQ ID NO: 340899 - RNA, 19 nt, Artificial Sequence
  Description of Artificial Sequence: Synthetic oligonucleotide
  Sense Strand Starting at position 280 of SEQ ID NO: 318391
gccagauugcauuggcaau

SEQ ID NO: 340900 - RNA, 19 nt, Artificial Sequence
  Description of Artificial Sequence: Synthetic oligonucleotide
  Antisense Strand to SEQ ID NO: 340899
auugccaaugcaaucuggc

SEQ ID NO: 340901 - RNA, 19 nt, Artificial Sequence
  Description of Artificial Sequence: Synthetic oligonucleotide
  Sense Strand Starting at position 280 of SEQ ID NO: 318397
uugcauuggcaauggcaaa

SEQ ID NO: 340902 - RNA, 19 nt, Artificial Sequence
  Description of Artificial Sequence: Synthetic oligonucleotide
  Antisense Strand to SEQ ID NO: 340901
uuugccauugccaaugcaa

SEQ ID NO: 340903 - RNA, 19 nt, Artificial Sequence
  Description of Artificial Sequence: Synthetic oligonucleotide
  Sense Strand Starting at position 280 of SEQ ID NO: 319002
ccuggagucugggcaacaa

SEQ ID NO: 340904 - RNA, 19 nt, Artificial Sequence
  Description of Artificial Sequence: Synthetic oligonucleotide
  Antisense Strand to SEQ ID NO: 340903
uuguugcccagacuccagg

SEQ ID NO: 340905 - RNA, 19 nt, Artificial Sequence
  Description of Artificial Sequence: Synthetic oligonucleotide
  Sense Strand Starting at position 280 of SEQ ID NO: 319092
uuguaaacacccuaaaugu

SEQ ID NO: 340906 - RNA, 19 nt, Artificial Sequence
  Description of Artificial Sequence: Synthetic oligonucleotide
  Antisense Strand to SEQ ID NO: 340905
acauuuaggguguuuacaa

SEQ ID NO: 340907 - RNA, 19 nt, Artificial Sequence
  Description of Artificial Sequence: Synthetic oligonucleotide
  Sense Strand Starting at position 281 of SEQ ID NO: 315329
gucaauauccaaggaguaa

SEQ ID NO: 340908 - RNA, 19 nt, Artificial Sequence
  Description of Artificial Sequence: Synthetic oligonucleotide
  Antisense Strand to SEQ ID NO: 340907
uuacuccuuggauauugac

SEQ ID NO: 340909 - RNA, 19 nt, Artificial Sequence
  Description of Artificial Sequence: Synthetic oligonucleotide
  Sense Strand Starting at position 281 of SEQ ID NO: 315344
guaacacugcucuauaaag

SEQ ID NO: 340910 - RNA, 19 nt, Artificial Sequence
  Description of Artificial Sequence: Synthetic oligonucleotide
  Antisense Strand to SEQ ID NO: 340909
cuuuauagagcaguguuac

SEQ ID NO: 340911 - RNA, 19 nt, Artificial Sequence
  Description of Artificial Sequence: Synthetic oligonucleotide
  Sense Strand Starting at position 281 of SEQ ID NO: 315680
gacuccugacuauggauau

SEQ ID NO: 340912 - RNA, 19 nt, Artificial Sequence
  Description of Artificial Sequence: Synthetic oligonucleotide
  Antisense Strand to SEQ ID NO: 340911
auauccauagucaggaguc

SEQ ID NO: 340913 - RNA, 19 nt, Artificial Sequence
  Description of Artificial Sequence: Synthetic oligonucleotide
  Sense Strand Starting at position 281 of SEQ ID NO: 315753
ggaauagguucuccuucca

SEQ ID NO: 340914 - RNA, 19 nt, Artificial Sequence
  Description of Artificial Sequence: Synthetic oligonucleotide
  Antisense Strand to SEQ ID NO: 340913
uggaaggagaaccuauucc

SEQ ID NO: 340915 - RNA, 19 nt, Artificial Sequence
  Description of Artificial Sequence: Synthetic oligonucleotide
  Sense Strand Starting at position 281 of SEQ ID NO: 315760
guucuccuuccauggaaac

SEQ ID NO: 340916 - RNA, 19 nt, Artificial Sequence
  Description of Artificial Sequence: Synthetic oligonucleotide
  Antisense Strand to SEQ ID NO: 340915
guuuccauggaaggagaac

SEQ ID NO: 340917 - RNA, 19 nt, Artificial Sequence
  Description of Artificial Sequence: Synthetic oligonucleotide
  Sense Strand Starting at position 281 of SEQ ID NO: 315818
gggagauugccugggauag

SEQ ID NO: 340918 - RNA, 19 nt, Artificial Sequence
  Description of Artificial Sequence: Synthetic oligonucleotide
  Antisense Strand to SEQ ID NO: 340917
cuaucccaggcaaucuccc

SEQ ID NO: 340919 - RNA, 19 nt, Artificial Sequence
  Description of Artificial Sequence: Synthetic oligonucleotide
  Sense Strand Starting at position 281 of SEQ ID NO: 315819
ggagauugccugggauagu

SEQ ID NO: 340920 - RNA, 19 nt, Artificial Sequence
  Description of Artificial Sequence: Synthetic oligonucleotide
  Antisense Strand to SEQ ID NO: 340919
acuaucccaggcaaucucc

SEQ ID NO: 340921 - RNA, 19 nt, Artificial Sequence
  Description of Artificial Sequence: Synthetic oligonucleotide
  Sense Strand Starting at position 281 of SEQ ID NO: 315834
uagugagaucauugugaag

SEQ ID NO: 340922 - RNA, 19 nt, Artificial Sequence
  Description of Artificial Sequence: Synthetic oligonucleotide
  Antisense Strand to SEQ ID NO: 340921
cuucacaaugaucucacua

SEQ ID NO: 340923 - RNA, 19 nt, Artificial Sequence
  Description of Artificial Sequence: Synthetic oligonucleotide
  Sense Strand Starting at position 281 of SEQ ID NO: 315848
ugaagauaauagcuagcau

SEQ ID NO: 340924 - RNA, 19 nt, Artificial Sequence
  Description of Artificial Sequence: Synthetic oligonucleotide
  Antisense Strand to SEQ ID NO: 340923
augcuagcuauuaucuuca

SEQ ID NO: 340925 - RNA, 19 nt, Artificial Sequence
  Description of Artificial Sequence: Synthetic oligonucleotide
  Sense Strand Starting at position 281 of SEQ ID NO: 315895
guguuagccacuugacaug

SEQ ID NO: 340926 - RNA, 19 nt, Artificial Sequence
  Description of Artificial Sequence: Synthetic oligonucleotide
  Antisense Strand to SEQ ID NO: 340925
caugucaaguggcuaacac

SEQ ID NO: 340927 - RNA, 19 nt, Artificial Sequence
  Description of Artificial Sequence: Synthetic oligonucleotide
  Sense Strand Starting at position 281 of SEQ ID NO: 315905
cuugacauggcuuguauca

SEQ ID NO: 340928 - RNA, 19 nt, Artificial Sequence
  Description of Artificial Sequence: Synthetic oligonucleotide
  Antisense Strand to SEQ ID NO: 340927
ugauacaagccaugucaag

SEQ ID NO: 340929 - RNA, 19 nt, Artificial Sequence
  Description of Artificial Sequence: Synthetic oligonucleotide
  Sense Strand Starting at position 281 of SEQ ID NO: 315912
uggcuuguaucauuaaccu

SEQ ID NO: 340930 - RNA, 19 nt, Artificial Sequence
  Description of Artificial Sequence: Synthetic oligonucleotide
  Antisense Strand to SEQ ID NO: 340929
agguuaaugauacaagcca

SEQ ID NO: 340931 - RNA, 19 nt, Artificial Sequence
  Description of Artificial Sequence: Synthetic oligonucleotide
  Sense Strand Starting at position 281 of SEQ ID NO: 315987
gcucaaggucaccaaguua

SEQ ID NO: 340932 - RNA, 19 nt, Artificial Sequence
  Description of Artificial Sequence: Synthetic oligonucleotide
  Antisense Strand to SEQ ID NO: 340931
uaacuuggugaccuugagc

SEQ ID NO: 340933 - RNA, 19 nt, Artificial Sequence
  Description of Artificial Sequence: Synthetic oligonucleotide
  Sense Strand Starting at position 281 of SEQ ID NO: 316479
guccuacugucucuaaauu

SEQ ID NO: 340934 - RNA, 19 nt, Artificial Sequence
  Description of Artificial Sequence: Synthetic oligonucleotide
  Antisense Strand to SEQ ID NO: 340933
aauuuagagacaguaggac

SEQ ID NO: 340935 - RNA, 19 nt, Artificial Sequence
  Description of Artificial Sequence: Synthetic oligonucleotide
  Sense Strand Starting at position 281 of SEQ ID NO: 316562
gcccuuaccacgucguaua

SEQ ID NO: 340936 - RNA, 19 nt, Artificial Sequence
  Description of Artificial Sequence: Synthetic oligonucleotide
  Antisense Strand to SEQ ID NO: 340935
uauacgacgugguaagggc

SEQ ID NO: 340937 - RNA, 19 nt, Artificial Sequence
  Description of Artificial Sequence: Synthetic oligonucleotide
  Sense Strand Starting at position 281 of SEQ ID NO: 316580
acaagucacugguuuaugu

SEQ ID NO: 340938 - RNA, 19 nt, Artificial Sequence
  Description of Artificial Sequence: Synthetic oligonucleotide
  Antisense Strand to SEQ ID NO: 340937
acauaaaccagugacuugu

SEQ ID NO: 340939 - RNA, 19 nt, Artificial Sequence
  Description of Artificial Sequence: Synthetic oligonucleotide
  Sense Strand Starting at position 281 of SEQ ID NO: 316587
acugguuuaugucuccauu

SEQ ID NO: 340940 - RNA, 19 nt, Artificial Sequence
  Description of Artificial Sequence: Synthetic oligonucleotide
  Antisense Strand to SEQ ID NO: 340939
aauggagacauaaaccagu

SEQ ID NO: 340941 - RNA, 19 nt, Artificial Sequence
  Description of Artificial Sequence: Synthetic oligonucleotide
  Sense Strand Starting at position 281 of SEQ ID NO: 316589
ugguuuaugucuccauuaa

SEQ ID NO: 340942 - RNA, 19 nt, Artificial Sequence
  Description of Artificial Sequence: Synthetic oligonucleotide
  Antisense Strand to SEQ ID NO: 340941
uuaauggagacauaaacca

SEQ ID NO: 340943 - RNA, 19 nt, Artificial Sequence
  Description of Artificial Sequence: Synthetic oligonucleotide
  Sense Strand Starting at position 281 of SEQ ID NO: 316590
gguuuaugucuccauuaac

SEQ ID NO: 340944 - RNA, 19 nt, Artificial Sequence
  Description of Artificial Sequence: Synthetic oligonucleotide
  Antisense Strand to SEQ ID NO: 340943
guuaauggagacauaaacc

SEQ ID NO: 340945 - RNA, 19 nt, Artificial Sequence
  Description of Artificial Sequence: Synthetic oligonucleotide
  Sense Strand Starting at position 281 of SEQ ID NO: 316670
gugcuuaacccauaacaga

SEQ ID NO: 340946 - RNA, 19 nt, Artificial Sequence
  Description of Artificial Sequence: Synthetic oligonucleotide
  Antisense Strand to SEQ ID NO: 340945
ucuguuauggguuaagcac

SEQ ID NO: 340947 - RNA, 19 nt, Artificial Sequence
  Description of Artificial Sequence: Synthetic oligonucleotide
  Sense Strand Starting at position 281 of SEQ ID NO: 316697
acacauuuguaggaaggaa

SEQ ID NO: 340948 - RNA, 19 nt, Artificial Sequence
  Description of Artificial Sequence: Synthetic oligonucleotide
  Antisense Strand to SEQ ID NO: 340947
uuccuuccuacaaaugugu

SEQ ID NO: 340949 - RNA, 19 nt, Artificial Sequence
  Description of Artificial Sequence: Synthetic oligonucleotide
  Sense Strand Starting at position 281 of SEQ ID NO: 316713
gaaugagugguugaagcuu

SEQ ID NO: 340950 - RNA, 19 nt, Artificial Sequence
  Description of Artificial Sequence: Synthetic oligonucleotide
  Antisense Strand to SEQ ID NO: 340949
aagcuucaaccacucauuc

SEQ ID NO: 340951 - RNA, 19 nt, Artificial Sequence
  Description of Artificial Sequence: Synthetic oligonucleotide
  Sense Strand Starting at position 281 of SEQ ID NO: 316751
aucguuucccgguacuaag

SEQ ID NO: 340952 - RNA, 19 nt, Artificial Sequence
  Description of Artificial Sequence: Synthetic oligonucleotide
  Antisense Strand to SEQ ID NO: 340951
cuuaguaccgggaaacgau

SEQ ID NO: 340953 - RNA, 19 nt, Artificial Sequence
  Description of Artificial Sequence: Synthetic oligonucleotide
  Sense Strand Starting at position 281 of SEQ ID NO: 316761
gguacuaagcuacgggaua

SEQ ID NO: 340954 - RNA, 19 nt, Artificial Sequence
  Description of Artificial Sequence: Synthetic oligonucleotide
  Antisense Strand to SEQ ID NO: 340953
uaucccguagcuuaguacc

SEQ ID NO: 340955 - RNA, 19 nt, Artificial Sequence
  Description of Artificial Sequence: Synthetic oligonucleotide
  Sense Strand Starting at position 281 of SEQ ID NO: 317164
gcagcuaugagcggagaca

SEQ ID NO: 340956 - RNA, 19 nt, Artificial Sequence
  Description of Artificial Sequence: Synthetic oligonucleotide
  Antisense Strand to SEQ ID NO: 340955
ugucuccgcucauagcugc

SEQ ID NO: 340957 - RNA, 19 nt, Artificial Sequence
  Description of Artificial Sequence: Synthetic oligonucleotide
  Sense Strand Starting at position 281 of SEQ ID NO: 317586
gccaguucccuugaauaac

SEQ ID NO: 340958 - RNA, 19 nt, Artificial Sequence
  Description of Artificial Sequence: Synthetic oligonucleotide
  Antisense Strand to SEQ ID NO: 340957
guuauucaagggaacuggc

SEQ ID NO: 340959 - RNA, 19 nt, Artificial Sequence
  Description of Artificial Sequence: Synthetic oligonucleotide
  Sense Strand Starting at position 281 of SEQ ID NO: 317847
ucagucauauauucguuaa

SEQ ID NO: 340960 - RNA, 19 nt, Artificial Sequence
  Description of Artificial Sequence: Synthetic oligonucleotide
  Antisense Strand to SEQ ID NO: 340959
uuaacgaauauaugacuga

SEQ ID NO: 340961 - RNA, 19 nt, Artificial Sequence
  Description of Artificial Sequence: Synthetic oligonucleotide
  Sense Strand Starting at position 281 of SEQ ID NO: 317939
ucuuauucgcaaugaaaug

SEQ ID NO: 340962 - RNA, 19 nt, Artificial Sequence
  Description of Artificial Sequence: Synthetic oligonucleotide
  Antisense Strand to SEQ ID NO: 340961
cauuucauugcgaauaaga

SEQ ID NO: 340963 - RNA, 19 nt, Artificial Sequence
  Description of Artificial Sequence: Synthetic oligonucleotide
  Sense Strand Starting at position 281 of SEQ ID NO: 317982
ugcagaguauuguuggaaa

SEQ ID NO: 340964 - RNA, 19 nt, Artificial Sequence
  Description of Artificial Sequence: Synthetic oligonucleotide
  Antisense Strand to SEQ ID NO: 340963
uuuccaacaauacucugca

SEQ ID NO: 340965 - RNA, 19 nt, Artificial Sequence
  Description of Artificial Sequence: Synthetic oligonucleotide
  Sense Strand Starting at position 281 of SEQ ID NO: 317984
cagaguauuguuggaaaca

SEQ ID NO: 340966 - RNA, 19 nt, Artificial Sequence
  Description of Artificial Sequence: Synthetic oligonucleotide
  Antisense Strand to SEQ ID NO: 340965
uguuuccaacaauacucug

SEQ ID NO: 340967 - RNA, 19 nt, Artificial Sequence
  Description of Artificial Sequence: Synthetic oligonucleotide
  Sense Strand Starting at position 281 of SEQ ID NO: 318458
ggaauuuacaggcgugucu

SEQ ID NO: 340968 - RNA, 19 nt, Artificial Sequence
  Description of Artificial Sequence: Synthetic oligonucleotide
  Antisense Strand to SEQ ID NO: 340967
agacacgccuguaaauucc

SEQ ID NO: 340969 - RNA, 19 nt, Artificial Sequence
  Description of Artificial Sequence: Synthetic oligonucleotide
  Sense Strand Starting at position 281 of SEQ ID NO: 318481
acuggugcuguauaagagu

SEQ ID NO: 340970 - RNA, 19 nt, Artificial Sequence
  Description of Artificial Sequence: Synthetic oligonucleotide
  Antisense Strand to SEQ ID NO: 340969
acucuuauacagcaccagu

SEQ ID NO: 340971 - RNA, 19 nt, Artificial Sequence
  Description of Artificial Sequence: Synthetic oligonucleotide
  Sense Strand Starting at position 281 of SEQ ID NO: 318582
uuccuucuggauugauauu

SEQ ID NO: 340972 - RNA, 19 nt, Artificial Sequence
  Description of Artificial Sequence: Synthetic oligonucleotide
  Antisense Strand to SEQ ID NO: 340971
aauaucaauccagaaggaa

SEQ ID NO: 340973 - RNA, 19 nt, Artificial Sequence
  Description of Artificial Sequence: Synthetic oligonucleotide
  Sense Strand Starting at position 281 of SEQ ID NO: 318712
gugcuuccuggaugagcaa

SEQ ID NO: 340974 - RNA, 19 nt, Artificial Sequence
  Description of Artificial Sequence: Synthetic oligonucleotide
  Antisense Strand to SEQ ID NO: 340973
uugcucauccaggaagcac

SEQ ID NO: 340975 - RNA, 19 nt, Artificial Sequence
  Description of Artificial Sequence: Synthetic oligonucleotide
  Sense Strand Starting at position 281 of SEQ ID NO: 318839
ggaagagcucuagaugcau

SEQ ID NO: 340976 - RNA, 19 nt, Artificial Sequence
  Description of Artificial Sequence: Synthetic oligonucleotide
  Antisense Strand to SEQ ID NO: 340975
augcaucuagagcucuucc

SEQ ID NO: 340977 - RNA, 19 nt, Artificial Sequence
  Description of Artificial Sequence: Synthetic oligonucleotide
  Sense Strand Starting at position 281 of SEQ ID NO: 318861
agaccuagauuggaaagau

SEQ ID NO: 340978 - RNA, 19 nt, Artificial Sequence
  Description of Artificial Sequence: Synthetic oligonucleotide
  Antisense Strand to SEQ ID NO: 340977
aucuuuccaaucuaggucu

SEQ ID NO: 340979 - RNA, 19 nt, Artificial Sequence
  Description of Artificial Sequence: Synthetic oligonucleotide
  Sense Strand Starting at position 281 of SEQ ID NO: 318898
gcaaauuguggaggagaau

SEQ ID NO: 340980 - RNA, 19 nt, Artificial Sequence
  Description of Artificial Sequence: Synthetic oligonucleotide
  Antisense Strand to SEQ ID NO: 340979
auucuccuccacaauuugc

SEQ ID NO: 340981 - RNA, 19 nt, Artificial Sequence
  Description of Artificial Sequence: Synthetic oligonucleotide
  Sense Strand Starting at position 281 of SEQ ID NO: 318938
ggaauaacuuauguuacau

SEQ ID NO: 340982 - RNA, 19 nt, Artificial Sequence
  Description of Artificial Sequence: Synthetic oligonucleotide
  Antisense Strand to SEQ ID NO: 340981
auguaacauaaguuauucc

SEQ ID NO: 340983 - RNA, 19 nt, Artificial Sequence
  Description of Artificial Sequence: Synthetic oligonucleotide
  Sense Strand Starting at position 281 of SEQ ID NO: 318964
guacaaauugcaugucaaa

SEQ ID NO: 340984 - RNA, 19 nt, Artificial Sequence
  Description of Artificial Sequence: Synthetic oligonucleotide
  Antisense Strand to SEQ ID NO: 340983
uuugacaugcaauuuguac

SEQ ID NO: 340985 - RNA, 19 nt, Artificial Sequence
  Description of Artificial Sequence: Synthetic oligonucleotide
  Sense Strand Starting at position 281 of SEQ ID NO: 319061
augauagaauugggagaaa

SEQ ID NO: 340986 - RNA, 19 nt, Artificial Sequence
  Description of Artificial Sequence: Synthetic oligonucleotide
  Antisense Strand to SEQ ID NO: 340985
uuucucccaauucuaucau

SEQ ID NO: 340987 - RNA, 19 nt, Artificial Sequence
  Description of Artificial Sequence: Synthetic oligonucleotide
  Sense Strand Starting at position 282 of SEQ ID NO: 315427
uaguuuaugccugauaaag

SEQ ID NO: 340988 - RNA, 19 nt, Artificial Sequence
  Description of Artificial Sequence: Synthetic oligonucleotide
  Antisense Strand to SEQ ID NO: 340987
cuuuaucaggcauaaacua

SEQ ID NO: 340989 - RNA, 19 nt, Artificial Sequence
  Description of Artificial Sequence: Synthetic oligonucleotide
  Sense Strand Starting at position 282 of SEQ ID NO: 315638
augucauauuccuuagaag

SEQ ID NO: 340990 - RNA, 19 nt, Artificial Sequence
  Description of Artificial Sequence: Synthetic oligonucleotide
  Antisense Strand to SEQ ID NO: 340989
cuucuaaggaauaugacau

SEQ ID NO: 340991 - RNA, 19 nt, Artificial Sequence
  Description of Artificial Sequence: Synthetic oligonucleotide
  Sense Strand Starting at position 282 of SEQ ID NO: 316022
cccauuuggugguuaaugu

SEQ ID NO: 340992 - RNA, 19 nt, Artificial Sequence
  Description of Artificial Sequence: Synthetic oligonucleotide
  Antisense Strand to SEQ ID NO: 340991
acauuaaccaccaaauggg

SEQ ID NO: 340993 - RNA, 19 nt, Artificial Sequence
  Description of Artificial Sequence: Synthetic oligonucleotide
  Sense Strand Starting at position 282 of SEQ ID NO: 316337
ggacccugaagcugugaaa

SEQ ID NO: 340994 - RNA, 19 nt, Artificial Sequence
  Description of Artificial Sequence: Synthetic oligonucleotide
  Antisense Strand to SEQ ID NO: 340993
uuucacagcuucagggucc

SEQ ID NO: 340995 - RNA, 19 nt, Artificial Sequence
  Description of Artificial Sequence: Synthetic oligonucleotide
  Sense Strand Starting at position 282 of SEQ ID NO: 316350
gugaaagauuaaccuacuu

SEQ ID NO: 340996 - RNA, 19 nt, Artificial Sequence
  Description of Artificial Sequence: Synthetic oligonucleotide
  Antisense Strand to SEQ ID NO: 340995
aaguagguuaaucuuucac

SEQ ID NO: 340997 - RNA, 19 nt, Artificial Sequence
  Description of Artificial Sequence: Synthetic oligonucleotide
  Sense Strand Starting at position 282 of SEQ ID NO: 316566
acagauuccuaaucggaga

SEQ ID NO: 340998 - RNA, 19 nt, Artificial Sequence
  Description of Artificial Sequence: Synthetic oligonucleotide
  Antisense Strand to SEQ ID NO: 340997
ucuccgauuaggaaucugu

SEQ ID NO: 340999 - RNA, 19 nt, Artificial Sequence
  Description of Artificial Sequence: Synthetic oligonucleotide
  Sense Strand Starting at position 282 of SEQ ID NO: 316602
gagguaguaagaugugaac

SEQ ID NO: 341000 - RNA, 19 nt, Artificial Sequence
  Description of Artificial Sequence: Synthetic oligonucleotide
  Antisense Strand to SEQ ID NO: 340999
guucacaucuuacuaccuc

SEQ ID NO: 341001 - RNA, 19 nt, Artificial Sequence
  Description of Artificial Sequence: Synthetic oligonucleotide
  Sense Strand Starting at position 282 of SEQ ID NO: 316604
gguaguaagaugugaacac

SEQ ID NO: 341002 - RNA, 19 nt, Artificial Sequence
  Description of Artificial Sequence: Synthetic oligonucleotide
  Antisense Strand to SEQ ID NO: 341001
guguucacaucuuacuacc

SEQ ID NO: 341003 - RNA, 19 nt, Artificial Sequence
  Description of Artificial Sequence: Synthetic oligonucleotide
  Sense Strand Starting at position 282 of SEQ ID NO: 316731
gcaguuucuguauauaaga

SEQ ID NO: 341004 - RNA, 19 nt, Artificial Sequence
  Description of Artificial Sequence: Synthetic oligonucleotide
  Antisense Strand to SEQ ID NO: 341003
ucuuauauacagaaacugc

SEQ ID NO: 341005 - RNA, 19 nt, Artificial Sequence
  Description of Artificial Sequence: Synthetic oligonucleotide
  Sense Strand Starting at position 282 of SEQ ID NO: 316992
cuucuuggagccugagaag

SEQ ID NO: 341006 - RNA, 19 nt, Artificial Sequence
  Description of Artificial Sequence: Synthetic oligonucleotide
  Antisense Strand to SEQ ID NO: 341005
cuucucaggcuccaagaag

SEQ ID NO: 341007 - RNA, 19 nt, Artificial Sequence
  Description of Artificial Sequence: Synthetic oligonucleotide
  Sense Strand Starting at position 282 of SEQ ID NO: 317085
aguguugcacaagaguaaa

SEQ ID NO: 341008 - RNA, 19 nt, Artificial Sequence
  Description of Artificial Sequence: Synthetic oligonucleotide
  Antisense Strand to SEQ ID NO: 341007
uuuacucuugugcaacacu

SEQ ID NO: 341009 - RNA, 19 nt, Artificial Sequence
  Description of Artificial Sequence: Synthetic oligonucleotide
  Sense Strand Starting at position 282 of SEQ ID NO: 317283
cagagaacgugucuaaaug

SEQ ID NO: 341010 - RNA, 19 nt, Artificial Sequence
  Description of Artificial Sequence: Synthetic oligonucleotide
  Antisense Strand to SEQ ID NO: 341009
cauuuagacacguucucug

SEQ ID NO: 341011 - RNA, 19 nt, Artificial Sequence
  Description of Artificial Sequence: Synthetic oligonucleotide
  Sense Strand Starting at position 282 of SEQ ID NO: 317534
cuagguaggcuauauggua

SEQ ID NO: 341012 - RNA, 19 nt, Artificial Sequence
  Description of Artificial Sequence: Synthetic oligonucleotide
  Antisense Strand to SEQ ID NO: 341011
uaccauauagccuaccuag

SEQ ID NO: 341013 - RNA, 19 nt, Artificial Sequence
  Description of Artificial Sequence: Synthetic oligonucleotide
  Sense Strand Starting at position 282 of SEQ ID NO: 317576
accuguacagucuauaacu

SEQ ID NO: 341014 - RNA, 19 nt, Artificial Sequence
  Description of Artificial Sequence: Synthetic oligonucleotide
  Antisense Strand to SEQ ID NO: 341013
aguuauagacuguacaggu

SEQ ID NO: 341015 - RNA, 19 nt, Artificial Sequence
  Description of Artificial Sequence: Synthetic oligonucleotide
  Sense Strand Starting at position 282 of SEQ ID NO: 317578
cuguacagucuauaacuau

SEQ ID NO: 341016 - RNA, 19 nt, Artificial Sequence
  Description of Artificial Sequence: Synthetic oligonucleotide
  Antisense Strand to SEQ ID NO: 341015
auaguuauagacuguacag

SEQ ID NO: 341017 - RNA, 19 nt, Artificial Sequence
  Description of Artificial Sequence: Synthetic oligonucleotide
  Sense Strand Starting at position 282 of SEQ ID NO: 317596
ugcugaaugcuauagacaa

SEQ ID NO: 341018 - RNA, 19 nt, Artificial Sequence
  Description of Artificial Sequence: Synthetic oligonucleotide
  Antisense Strand to SEQ ID NO: 341017
uugucuauagcauucagca

SEQ ID NO: 341019 - RNA, 19 nt, Artificial Sequence
  Description of Artificial Sequence: Synthetic oligonucleotide
  Sense Strand Starting at position 282 of SEQ ID NO: 317710
auaugcaguuugucauuua

SEQ ID NO: 341020 - RNA, 19 nt, Artificial Sequence
  Description of Artificial Sequence: Synthetic oligonucleotide
  Antisense Strand to SEQ ID NO: 341019
uaaaugacaaacugcauau

SEQ ID NO: 341021 - RNA, 19 nt, Artificial Sequence
  Description of Artificial Sequence: Synthetic oligonucleotide
  Sense Strand Starting at position 282 of SEQ ID NO: 317713
ugcaguuugucauuuacuc

SEQ ID NO: 341022 - RNA, 19 nt, Artificial Sequence
  Description of Artificial Sequence: Synthetic oligonucleotide
  Antisense Strand to SEQ ID NO: 341021
gaguaaaugacaaacugca

SEQ ID NO: 341023 - RNA, 19 nt, Artificial Sequence
  Description of Artificial Sequence: Synthetic oligonucleotide
  Sense Strand Starting at position 282 of SEQ ID NO: 317882
uggaccaaaucugcauaaa

SEQ ID NO: 341024 - RNA, 19 nt, Artificial Sequence
  Description of Artificial Sequence: Synthetic oligonucleotide
  Antisense Strand to SEQ ID NO: 341023
uuuaugcagauuuggucca

SEQ ID NO: 341025 - RNA, 19 nt, Artificial Sequence
  Description of Artificial Sequence: Synthetic oligonucleotide
  Sense Strand Starting at position 282 of SEQ ID NO: 317904
uuuaccagaucauucugua

SEQ ID NO: 341026 - RNA, 19 nt, Artificial Sequence
  Description of Artificial Sequence: Synthetic oligonucleotide
  Antisense Strand to SEQ ID NO: 341025
uacagaaugaucugguaaa

SEQ ID NO: 341027 - RNA, 19 nt, Artificial Sequence
  Description of Artificial Sequence: Synthetic oligonucleotide
  Sense Strand Starting at position 282 of SEQ ID NO: 318049
cccaguuuaucauuagacu

SEQ ID NO: 341028 - RNA, 19 nt, Artificial Sequence
  Description of Artificial Sequence: Synthetic oligonucleotide
  Antisense Strand to SEQ ID NO: 341027
agucuaaugauaaacuggg

SEQ ID NO: 341029 - RNA, 19 nt, Artificial Sequence
  Description of Artificial Sequence: Synthetic oligonucleotide
  Sense Strand Starting at position 282 of SEQ ID NO: 318050
ccaguuuaucauuagacug

SEQ ID NO: 341030 - RNA, 19 nt, Artificial Sequence
  Description of Artificial Sequence: Synthetic oligonucleotide
  Antisense Strand to SEQ ID NO: 341029
cagucuaaugauaaacugg

SEQ ID NO: 341031 - RNA, 19 nt, Artificial Sequence
  Description of Artificial Sequence: Synthetic oligonucleotide
  Sense Strand Starting at position 282 of SEQ ID NO: 318138
caggaaguauaugucuaaa

SEQ ID NO: 341032 - RNA, 19 nt, Artificial Sequence
  Description of Artificial Sequence: Synthetic oligonucleotide
  Antisense Strand to SEQ ID NO: 341031
uuuagacauauacuuccug

SEQ ID NO: 341033 - RNA, 19 nt, Artificial Sequence
  Description of Artificial Sequence: Synthetic oligonucleotide
  Sense Strand Starting at position 282 of SEQ ID NO: 318267
gaaggccacuuguugaaau

SEQ ID NO: 341034 - RNA, 19 nt, Artificial Sequence
  Description of Artificial Sequence: Synthetic oligonucleotide
  Antisense Strand to SEQ ID NO: 341033
auuucaacaaguggccuuc

SEQ ID NO: 341035 - RNA, 19 nt, Artificial Sequence
  Description of Artificial Sequence: Synthetic oligonucleotide
  Sense Strand Starting at position 282 of SEQ ID NO: 318278
guugaaauagauugguaua

SEQ ID NO: 341036 - RNA, 19 nt, Artificial Sequence
  Description of Artificial Sequence: Synthetic oligonucleotide
  Antisense Strand to SEQ ID NO: 341035
uauaccaaucuauuucaac

SEQ ID NO: 341037 - RNA, 19 nt, Artificial Sequence
  Description of Artificial Sequence: Synthetic oligonucleotide
  Sense Strand Starting at position 282 of SEQ ID NO: 318361
cuguucuacucacugggaa

SEQ ID NO: 341038 - RNA, 19 nt, Artificial Sequence
  Description of Artificial Sequence: Synthetic oligonucleotide
  Antisense Strand to SEQ ID NO: 341037
uucccagugaguagaacag

SEQ ID NO: 341039 - RNA, 19 nt, Artificial Sequence
  Description of Artificial Sequence: Synthetic oligonucleotide
  Sense Strand Starting at position 282 of SEQ ID NO: 318362
uguucuacucacugggaau

SEQ ID NO: 341040 - RNA, 19 nt, Artificial Sequence
  Description of Artificial Sequence: Synthetic oligonucleotide
  Antisense Strand to SEQ ID NO: 341039
auucccagugaguagaaca

SEQ ID NO: 341041 - RNA, 19 nt, Artificial Sequence
  Description of Artificial Sequence: Synthetic oligonucleotide
  Sense Strand Starting at position 282 of SEQ ID NO: 318639
aucucagguuaauugaaau

SEQ ID NO: 341042 - RNA, 19 nt, Artificial Sequence
  Description of Artificial Sequence: Synthetic oligonucleotide
  Antisense Strand to SEQ ID NO: 341041
auuucaauuaaccugagau

SEQ ID NO: 341043 - RNA, 19 nt, Artificial Sequence
  Description of Artificial Sequence: Synthetic oligonucleotide
  Sense Strand Starting at position 282 of SEQ ID NO: 318652
ugaaaugaccuauguuaag

SEQ ID NO: 341044 - RNA, 19 nt, Artificial Sequence
  Description of Artificial Sequence: Synthetic oligonucleotide
  Antisense Strand to SEQ ID NO: 341043
cuuaacauaggucauuuca

SEQ ID NO: 341045 - RNA, 19 nt, Artificial Sequence
  Description of Artificial Sequence: Synthetic oligonucleotide
  Sense Strand Starting at position 282 of SEQ ID NO: 318714
aacuaaauggcuugguaca

SEQ ID NO: 341046 - RNA, 19 nt, Artificial Sequence
  Description of Artificial Sequence: Synthetic oligonucleotide
  Antisense Strand to SEQ ID NO: 341045
uguaccaagccauuuaguu

SEQ ID NO: 341047 - RNA, 19 nt, Artificial Sequence
  Description of Artificial Sequence: Synthetic oligonucleotide
  Sense Strand Starting at position 282 of SEQ ID NO: 318716
cuaaauggcuugguacaga

SEQ ID NO: 341048 - RNA, 19 nt, Artificial Sequence
  Description of Artificial Sequence: Synthetic oligonucleotide
  Antisense Strand to SEQ ID NO: 341047
ucuguaccaagccauuuag

SEQ ID NO: 341049 - RNA, 19 nt, Artificial Sequence
  Description of Artificial Sequence: Synthetic oligonucleotide
  Sense Strand Starting at position 282 of SEQ ID NO: 318775
cuaggacugccuugaacaa

SEQ ID NO: 341050 - RNA, 19 nt, Artificial Sequence
  Description of Artificial Sequence: Synthetic oligonucleotide
  Antisense Strand to SEQ ID NO: 341049
uuguucaaggcaguccuag

SEQ ID NO: 341051 - RNA, 19 nt, Artificial Sequence
  Description of Artificial Sequence: Synthetic oligonucleotide
  Sense Strand Starting at position 282 of SEQ ID NO: 318790
acaauugugccgucauguc

SEQ ID NO: 341052 - RNA, 19 nt, Artificial Sequence
  Description of Artificial Sequence: Synthetic oligonucleotide
  Antisense Strand to SEQ ID NO: 341051
gacaugacggcacaauugu

SEQ ID NO: 341053 - RNA, 19 nt, Artificial Sequence
  Description of Artificial Sequence: Synthetic oligonucleotide
  Sense Strand Starting at position 282 of SEQ ID NO: 319001
gcaacugucucagccauuu

SEQ ID NO: 341054 - RNA, 19 nt, Artificial Sequence
  Description of Artificial Sequence: Synthetic oligonucleotide
  Antisense Strand to SEQ ID NO: 341053
aaauggcugagacaguugc

SEQ ID NO: 341055 - RNA, 19 nt, Artificial Sequence
  Description of Artificial Sequence: Synthetic oligonucleotide
  Sense Strand Starting at position 282 of SEQ ID NO: 319054
cccaaucuugugcauggaa

SEQ ID NO: 341056 - RNA, 19 nt, Artificial Sequence
  Description of Artificial Sequence: Synthetic oligonucleotide
  Antisense Strand to SEQ ID NO: 341055
uuccaugcacaagauuggg

SEQ ID NO: 341057 - RNA, 19 nt, Artificial Sequence
  Description of Artificial Sequence: Synthetic oligonucleotide
  Sense Strand Starting at position 282 of SEQ ID NO: 319056
caaucuugugcauggaaag

SEQ ID NO: 341058 - RNA, 19 nt, Artificial Sequence
  Description of Artificial Sequence: Synthetic oligonucleotide
  Antisense Strand to SEQ ID NO: 341057
cuuuccaugcacaagauug

SEQ ID NO: 341059 - RNA, 19 nt, Artificial Sequence
  Description of Artificial Sequence: Synthetic oligonucleotide
  Sense Strand Starting at position 282 of SEQ ID NO: 319057
aaucuugugcauggaaaga

SEQ ID NO: 341060 - RNA, 19 nt, Artificial Sequence
  Description of Artificial Sequence: Synthetic oligonucleotide
  Antisense Strand to SEQ ID NO: 341059
ucuuuccaugcacaagauu

SEQ ID NO: 341061 - RNA, 19 nt, Artificial Sequence
  Description of Artificial Sequence: Synthetic oligonucleotide
  Sense Strand Starting at position 282 of SEQ ID NO: 319070
gaaagauguugaucagagc

SEQ ID NO: 341062 - RNA, 19 nt, Artificial Sequence
  Description of Artificial Sequence: Synthetic oligonucleotide
  Antisense Strand to SEQ ID NO: 341061
gcucugaucaacaucuuuc

SEQ ID NO: 341063 - RNA, 19 nt, Artificial Sequence
  Description of Artificial Sequence: Synthetic oligonucleotide
  Sense Strand Starting at position 282 of SEQ ID NO: 319160
caaauaguugcugaggguu

SEQ ID NO: 341064 - RNA, 19 nt, Artificial Sequence
  Description of Artificial Sequence: Synthetic oligonucleotide
  Antisense Strand to SEQ ID NO: 341063
aacccucagcaacuauuug

SEQ ID NO: 341065 - RNA, 19 nt, Artificial Sequence
  Description of Artificial Sequence: Synthetic oligonucleotide
  Sense Strand Starting at position 282 of SEQ ID NO: 319202
ccucauauugguggugaaa

SEQ ID NO: 341066 - RNA, 19 nt, Artificial Sequence
  Description of Artificial Sequence: Synthetic oligonucleotide
  Antisense Strand to SEQ ID NO: 341065
uuucaccaccaauaugagg

SEQ ID NO: 341067 - RNA, 19 nt, Artificial Sequence
  Description of Artificial Sequence: Synthetic oligonucleotide
  Sense Strand Starting at position 283 of SEQ ID NO: 315237
aggacuuacccaggucaaa

SEQ ID NO: 341068 - RNA, 19 nt, Artificial Sequence
  Description of Artificial Sequence: Synthetic oligonucleotide
  Antisense Strand to SEQ ID NO: 341067
uuugaccuggguaaguccu

SEQ ID NO: 341069 - RNA, 19 nt, Artificial Sequence
  Description of Artificial Sequence: Synthetic oligonucleotide
  Sense Strand Starting at position 283 of SEQ ID NO: 315294
ggccaaggugggugagauu

SEQ ID NO: 341070 - RNA, 19 nt, Artificial Sequence
  Description of Artificial Sequence: Synthetic oligonucleotide
  Antisense Strand to SEQ ID NO: 341069
aaucucacccaccuuggcc

SEQ ID NO: 341071 - RNA, 19 nt, Artificial Sequence
  Description of Artificial Sequence: Synthetic oligonucleotide
  Sense Strand Starting at position 283 of SEQ ID NO: 315327
gcuugaaggguguggaaga

SEQ ID NO: 341072 - RNA, 19 nt, Artificial Sequence
  Description of Artificial Sequence: Synthetic oligonucleotide
  Antisense Strand to SEQ ID NO: 341071
ucuuccacacccuucaagc

SEQ ID NO: 341073 - RNA, 19 nt, Artificial Sequence
  Description of Artificial Sequence: Synthetic oligonucleotide
  Sense Strand Starting at position 283 of SEQ ID NO: 315375
gguaguuuggcagaucaua

SEQ ID NO: 341074 - RNA, 19 nt, Artificial Sequence
  Description of Artificial Sequence: Synthetic oligonucleotide
  Antisense Strand to SEQ ID NO: 341073
uaugaucugccaaacuacc

SEQ ID NO: 341075 - RNA, 19 nt, Artificial Sequence
  Description of Artificial Sequence: Synthetic oligonucleotide
  Sense Strand Starting at position 283 of SEQ ID NO: 315738
cgcuucuauggugcuuaau

SEQ ID NO: 341076 - RNA, 19 nt, Artificial Sequence
  Description of Artificial Sequence: Synthetic oligonucleotide
  Antisense Strand to SEQ ID NO: 341075
auuaagcaccauagaagcg

SEQ ID NO: 341077 - RNA, 19 nt, Artificial Sequence
  Description of Artificial Sequence: Synthetic oligonucleotide
  Sense Strand Starting at position 283 of SEQ ID NO: 315741
uucuauggugcuuaauaug

SEQ ID NO: 341078 - RNA, 19 nt, Artificial Sequence
  Description of Artificial Sequence: Synthetic oligonucleotide
  Antisense Strand to SEQ ID NO: 341077
cauauuaagcaccauagaa

SEQ ID NO: 341079 - RNA, 19 nt, Artificial Sequence
  Description of Artificial Sequence: Synthetic oligonucleotide
  Sense Strand Starting at position 283 of SEQ ID NO: 315812
cuaggaaguagcuaugacu

SEQ ID NO: 341080 - RNA, 19 nt, Artificial Sequence
  Description of Artificial Sequence: Synthetic oligonucleotide
  Antisense Strand to SEQ ID NO: 341079
agucauagcuacuuccuag

SEQ ID NO: 341081 - RNA, 19 nt, Artificial Sequence
  Description of Artificial Sequence: Synthetic oligonucleotide
  Sense Strand Starting at position 283 of SEQ ID NO: 315866
cagagauguugaguaaguu

SEQ ID NO: 341082 - RNA, 19 nt, Artificial Sequence
  Description of Artificial Sequence: Synthetic oligonucleotide
  Antisense Strand to SEQ ID NO: 341081
aacuuacucaacaucucug

SEQ ID NO: 341083 - RNA, 19 nt, Artificial Sequence
  Description of Artificial Sequence: Synthetic oligonucleotide
  Sense Strand Starting at position 283 of SEQ ID NO: 315902
uagcguagagcuuggauuu

SEQ ID NO: 341084 - RNA, 19 nt, Artificial Sequence
  Description of Artificial Sequence: Synthetic oligonucleotide
  Antisense Strand to SEQ ID NO: 341083
aaauccaagcucuacgcua

SEQ ID NO: 341085 - RNA, 19 nt, Artificial Sequence
  Description of Artificial Sequence: Synthetic oligonucleotide
  Sense Strand Starting at position 283 of SEQ ID NO: 316050
cuuugugggagucaagacu

SEQ ID NO: 341086 - RNA, 19 nt, Artificial Sequence
  Description of Artificial Sequence: Synthetic oligonucleotide
  Antisense Strand to SEQ ID NO: 341085
agucuugacucccacaaag

SEQ ID NO: 341087 - RNA, 19 nt, Artificial Sequence
  Description of Artificial Sequence: Synthetic oligonucleotide
  Sense Strand Starting at position 283 of SEQ ID NO: 316075
cugauugcuaguuaaggga

SEQ ID NO: 341088 - RNA, 19 nt, Artificial Sequence
  Description of Artificial Sequence: Synthetic oligonucleotide
  Antisense Strand to SEQ ID NO: 341087
ucccuuaacuagcaaucag

SEQ ID NO: 341089 - RNA, 19 nt, Artificial Sequence
  Description of Artificial Sequence: Synthetic oligonucleotide
  Sense Strand Starting at position 283 of SEQ ID NO: 316079
uugcuaguuaagggacuau

SEQ ID NO: 341090 - RNA, 19 nt, Artificial Sequence
  Description of Artificial Sequence: Synthetic oligonucleotide
  Antisense Strand to SEQ ID NO: 341089
auagucccuuaacuagcaa

SEQ ID NO: 341091 - RNA, 19 nt, Artificial Sequence
  Description of Artificial Sequence: Synthetic oligonucleotide
  Sense Strand Starting at position 283 of SEQ ID NO: 316097
uggaaauucuccuugcaag

SEQ ID NO: 341092 - RNA, 19 nt, Artificial Sequence
  Description of Artificial Sequence: Synthetic oligonucleotide
  Antisense Strand to SEQ ID NO: 341091
cuugcaaggagaauuucca

SEQ ID NO: 341093 - RNA, 19 nt, Artificial Sequence
  Description of Artificial Sequence: Synthetic oligonucleotide
  Sense Strand Starting at position 283 of SEQ ID NO: 316098
ggaaauucuccuugcaaga

SEQ ID NO: 341094 - RNA, 19 nt, Artificial Sequence
  Description of Artificial Sequence: Synthetic oligonucleotide
  Antisense Strand to SEQ ID NO: 341093
ucuugcaaggagaauuucc

SEQ ID NO: 341095 - RNA, 19 nt, Artificial Sequence
  Description of Artificial Sequence: Synthetic oligonucleotide
  Sense Strand Starting at position 283 of SEQ ID NO: 316174
gagaaacauuugggaguua

SEQ ID NO: 341096 - RNA, 19 nt, Artificial Sequence
  Description of Artificial Sequence: Synthetic oligonucleotide
  Antisense Strand to SEQ ID NO: 341095
uaacucccaaauguuucuc

SEQ ID NO: 341097 - RNA, 19 nt, Artificial Sequence
  Description of Artificial Sequence: Synthetic oligonucleotide
  Sense Strand Starting at position 283 of SEQ ID NO: 316232
cuguauguuugacuggaau

SEQ ID NO: 341098 - RNA, 19 nt, Artificial Sequence
  Description of Artificial Sequence: Synthetic oligonucleotide
  Antisense Strand to SEQ ID NO: 341097
auuccagucaaacauacag

SEQ ID NO: 341099 - RNA, 19 nt, Artificial Sequence
  Description of Artificial Sequence: Synthetic oligonucleotide
  Sense Strand Starting at position 283 of SEQ ID NO: 316234
guauguuugacuggaauaa

SEQ ID NO: 341100 - RNA, 19 nt, Artificial Sequence
  Description of Artificial Sequence: Synthetic oligonucleotide
  Antisense Strand to SEQ ID NO: 341099
uuauuccagucaaacauac

SEQ ID NO: 341101 - RNA, 19 nt, Artificial Sequence
  Description of Artificial Sequence: Synthetic oligonucleotide
  Sense Strand Starting at position 283 of SEQ ID NO: 316259
gacccaguucuggguuuaa

SEQ ID NO: 341102 - RNA, 19 nt, Artificial Sequence
  Description of Artificial Sequence: Synthetic oligonucleotide
  Antisense Strand to SEQ ID NO: 341101
uuaaacccagaacuggguc

SEQ ID NO: 341103 - RNA, 19 nt, Artificial Sequence
  Description of Artificial Sequence: Synthetic oligonucleotide
  Sense Strand Starting at position 283 of SEQ ID NO: 316284
uguguaaucuuggucauuu

SEQ ID NO: 341104 - RNA, 19 nt, Artificial Sequence
  Description of Artificial Sequence: Synthetic oligonucleotide
  Antisense Strand to SEQ ID NO: 341103
aaaugaccaagauuacaca

SEQ ID NO: 341105 - RNA, 19 nt, Artificial Sequence
  Description of Artificial Sequence: Synthetic oligonucleotide
  Sense Strand Starting at position 283 of SEQ ID NO: 316285
guguaaucuuggucauuua

SEQ ID NO: 341106 - RNA, 19 nt, Artificial Sequence
  Description of Artificial Sequence: Synthetic oligonucleotide
  Antisense Strand to SEQ ID NO: 341105
uaaaugaccaagauuacac

SEQ ID NO: 341107 - RNA, 19 nt, Artificial Sequence
  Description of Artificial Sequence: Synthetic oligonucleotide
  Sense Strand Starting at position 283 of SEQ ID NO: 316365
ugagaaucugcuggagaau

SEQ ID NO: 341108 - RNA, 19 nt, Artificial Sequence
  Description of Artificial Sequence: Synthetic oligonucleotide
  Antisense Strand to SEQ ID NO: 341107
auucuccagcagauucuca

SEQ ID NO: 341109 - RNA, 19 nt, Artificial Sequence
  Description of Artificial Sequence: Synthetic oligonucleotide
  Sense Strand Starting at position 283 of SEQ ID NO: 316504
aaauguaccugcucuugga

SEQ ID NO: 341110 - RNA, 19 nt, Artificial Sequence
  Description of Artificial Sequence: Synthetic oligonucleotide
  Antisense Strand to SEQ ID NO: 341109
uccaagagcagguacauuu

SEQ ID NO: 341111 - RNA, 19 nt, Artificial Sequence
  Description of Artificial Sequence: Synthetic oligonucleotide
  Sense Strand Starting at position 283 of SEQ ID NO: 316796
uggccauuggcugaauuau

SEQ ID NO: 341112 - RNA, 19 nt, Artificial Sequence
  Description of Artificial Sequence: Synthetic oligonucleotide
  Antisense Strand to SEQ ID NO: 341111
auaauucagccaauggcca

SEQ ID NO: 341113 - RNA, 19 nt, Artificial Sequence
  Description of Artificial Sequence: Synthetic oligonucleotide
  Sense Strand Starting at position 283 of SEQ ID NO: 316806
cugaauuauccagauagcu

SEQ ID NO: 341114 - RNA, 19 nt, Artificial Sequence
  Description of Artificial Sequence: Synthetic oligonucleotide
  Antisense Strand to SEQ ID NO: 341113
agcuaucuggauaauucag

SEQ ID NO: 341115 - RNA, 19 nt, Artificial Sequence
  Description of Artificial Sequence: Synthetic oligonucleotide
  Sense Strand Starting at position 283 of SEQ ID NO: 317513
accauucugcuugaauuga

SEQ ID NO: 341116 - RNA, 19 nt, Artificial Sequence
  Description of Artificial Sequence: Synthetic oligonucleotide
  Antisense Strand to SEQ ID NO: 341115
ucaauucaagcagaauggu

SEQ ID NO: 341117 - RNA, 19 nt, Artificial Sequence
  Description of Artificial Sequence: Synthetic oligonucleotide
  Sense Strand Starting at position 283 of SEQ ID NO: 317918
aaguacuauggcgaacauu

SEQ ID NO: 341118 - RNA, 19 nt, Artificial Sequence
  Description of Artificial Sequence: Synthetic oligonucleotide
  Antisense Strand to SEQ ID NO: 341117
aauguucgccauaguacuu

SEQ ID NO: 341119 - RNA, 19 nt, Artificial Sequence
  Description of Artificial Sequence: Synthetic oligonucleotide
  Sense Strand Starting at position 283 of SEQ ID NO: 317990
uguacuucucuggguaaag

SEQ ID NO: 341120 - RNA, 19 nt, Artificial Sequence
  Description of Artificial Sequence: Synthetic oligonucleotide
  Antisense Strand to SEQ ID NO: 341119
cuuuacccagagaaguaca

SEQ ID NO: 341121 - RNA, 19 nt, Artificial Sequence
  Description of Artificial Sequence: Synthetic oligonucleotide
  Sense Strand Starting at position 283 of SEQ ID NO: 317991
guacuucucuggguaaaga

SEQ ID NO: 341122 - RNA, 19 nt, Artificial Sequence
  Description of Artificial Sequence: Synthetic oligonucleotide
  Antisense Strand to SEQ ID NO: 341121
ucuuuacccagagaaguac

SEQ ID NO: 341123 - RNA, 19 nt, Artificial Sequence
  Description of Artificial Sequence: Synthetic oligonucleotide
  Sense Strand Starting at position 283 of SEQ ID NO: 318124
auaucaaugcuguaauguu

SEQ ID NO: 341124 - RNA, 19 nt, Artificial Sequence
  Description of Artificial Sequence: Synthetic oligonucleotide
  Antisense Strand to SEQ ID NO: 341123
aacauuacagcauugauau

SEQ ID NO: 341125 - RNA, 19 nt, Artificial Sequence
  Description of Artificial Sequence: Synthetic oligonucleotide
  Sense Strand Starting at position 283 of SEQ ID NO: 318251
gagggauguuuagucuuga

SEQ ID NO: 341126 - RNA, 19 nt, Artificial Sequence
  Description of Artificial Sequence: Synthetic oligonucleotide
  Antisense Strand to SEQ ID NO: 341125
ucaagacuaaacaucccuc

SEQ ID NO: 341127 - RNA, 19 nt, Artificial Sequence
  Description of Artificial Sequence: Synthetic oligonucleotide
  Sense Strand Starting at position 283 of SEQ ID NO: 318252
agggauguuuagucuugaa

SEQ ID NO: 341128 - RNA, 19 nt, Artificial Sequence
  Description of Artificial Sequence: Synthetic oligonucleotide
  Antisense Strand to SEQ ID NO: 341127
uucaagacuaaacaucccu

SEQ ID NO: 341129 - RNA, 19 nt, Artificial Sequence
  Description of Artificial Sequence: Synthetic oligonucleotide
  Sense Strand Starting at position 283 of SEQ ID NO: 318256
auguuuagucuugaacaca

SEQ ID NO: 341130 - RNA, 19 nt, Artificial Sequence
  Description of Artificial Sequence: Synthetic oligonucleotide
  Antisense Strand to SEQ ID NO: 341129
uguguucaagacuaaacau

SEQ ID NO: 341131 - RNA, 19 nt, Artificial Sequence
  Description of Artificial Sequence: Synthetic oligonucleotide
  Sense Strand Starting at position 283 of SEQ ID NO: 318267
ugaacacaacuugguuaau

SEQ ID NO: 341132 - RNA, 19 nt, Artificial Sequence
  Description of Artificial Sequence: Synthetic oligonucleotide
  Antisense Strand to SEQ ID NO: 341131
auuaaccaaguuguguuca

SEQ ID NO: 341133 - RNA, 19 nt, Artificial Sequence
  Description of Artificial Sequence: Synthetic oligonucleotide
  Sense Strand Starting at position 283 of SEQ ID NO: 318402
aaacguauagcugacugua

SEQ ID NO: 341134 - RNA, 19 nt, Artificial Sequence
  Description of Artificial Sequence: Synthetic oligonucleotide
  Antisense Strand to SEQ ID NO: 341133
uacagucagcuauacguuu

SEQ ID NO: 341135 - RNA, 19 nt, Artificial Sequence
  Description of Artificial Sequence: Synthetic oligonucleotide
  Sense Strand Starting at position 283 of SEQ ID NO: 318407
uauagcugacuguagauaa

SEQ ID NO: 341136 - RNA, 19 nt, Artificial Sequence
  Description of Artificial Sequence: Synthetic oligonucleotide
  Antisense Strand to SEQ ID NO: 341135
uuaucuacagucagcuaua

SEQ ID NO: 341137 - RNA, 19 nt, Artificial Sequence
  Description of Artificial Sequence: Synthetic oligonucleotide
  Sense Strand Starting at position 283 of SEQ ID NO: 318748
uggguuucgacagacauca

SEQ ID NO: 341138 - RNA, 19 nt, Artificial Sequence
  Description of Artificial Sequence: Synthetic oligonucleotide
  Antisense Strand to SEQ ID NO: 341137
ugaugucugucgaaaccca

SEQ ID NO: 341139 - RNA, 19 nt, Artificial Sequence
  Description of Artificial Sequence: Synthetic oligonucleotide
  Sense Strand Starting at position 283 of SEQ ID NO: 318750
gguuucgacagacaucacu

SEQ ID NO: 341140 - RNA, 19 nt, Artificial Sequence
  Description of Artificial Sequence: Synthetic oligonucleotide
  Antisense Strand to SEQ ID NO: 341139
agugaugucugucgaaacc

SEQ ID NO: 341141 - RNA, 19 nt, Artificial Sequence
  Description of Artificial Sequence: Synthetic oligonucleotide
  Sense Strand Starting at position 283 of SEQ ID NO: 318857
augcuaaugugacucuaac

SEQ ID NO: 341142 - RNA, 19 nt, Artificial Sequence
  Description of Artificial Sequence: Synthetic oligonucleotide
  Antisense Strand to SEQ ID NO: 341141
guuagagucacauuagcau

SEQ ID NO: 341143 - RNA, 19 nt, Artificial Sequence
  Description of Artificial Sequence: Synthetic oligonucleotide
  Sense Strand Starting at position 283 of SEQ ID NO: 318943
ccaugcucucuagacaguu

SEQ ID NO: 341144 - RNA, 19 nt, Artificial Sequence
  Description of Artificial Sequence: Synthetic oligonucleotide
  Antisense Strand to SEQ ID NO: 341143
aacugucuagagagcaugg

SEQ ID NO: 341145 - RNA, 19 nt, Artificial Sequence
  Description of Artificial Sequence: Synthetic oligonucleotide
  Sense Strand Starting at position 283 of SEQ ID NO: 319060
ggccgugaccuuuagggau

SEQ ID NO: 341146 - RNA, 19 nt, Artificial Sequence
  Description of Artificial Sequence: Synthetic oligonucleotide
  Antisense Strand to SEQ ID NO: 341145
aucccuaaaggucacggcc

SEQ ID NO: 341147 - RNA, 19 nt, Artificial Sequence
  Description of Artificial Sequence: Synthetic oligonucleotide
  Sense Strand Starting at position 284 of SEQ ID NO: 315244
auauguacugaaugaguga

SEQ ID NO: 341148 - RNA, 19 nt, Artificial Sequence
  Description of Artificial Sequence: Synthetic oligonucleotide
  Antisense Strand to SEQ ID NO: 341147
ucacucauucaguacauau

SEQ ID NO: 341149 - RNA, 19 nt, Artificial Sequence
  Description of Artificial Sequence: Synthetic oligonucleotide
  Sense Strand Starting at position 284 of SEQ ID NO: 315253
gaaugagugaaacguaaag

SEQ ID NO: 341150 - RNA, 19 nt, Artificial Sequence
  Description of Artificial Sequence: Synthetic oligonucleotide
  Antisense Strand to SEQ ID NO: 341149
cuuuacguuucacucauuc

SEQ ID NO: 341151 - RNA, 19 nt, Artificial Sequence
  Description of Artificial Sequence: Synthetic oligonucleotide
  Sense Strand Starting at position 284 of SEQ ID NO: 315352
uuaucaaacuuguuggaga

SEQ ID NO: 341152 - RNA, 19 nt, Artificial Sequence
  Description of Artificial Sequence: Synthetic oligonucleotide
  Antisense Strand to SEQ ID NO: 341151
ucuccaacaaguuugauaa

SEQ ID NO: 341153 - RNA, 19 nt, Artificial Sequence
  Description of Artificial Sequence: Synthetic oligonucleotide
  Sense Strand Starting at position 284 of SEQ ID NO: 315536
cuguuugagggugauucau

SEQ ID NO: 341154 - RNA, 19 nt, Artificial Sequence
  Description of Artificial Sequence: Synthetic oligonucleotide
  Antisense Strand to SEQ ID NO: 341153
augaaucacccucaaacag

SEQ ID NO: 341155 - RNA, 19 nt, Artificial Sequence
  Description of Artificial Sequence: Synthetic oligonucleotide
  Sense Strand Starting at position 284 of SEQ ID NO: 315594
agguuaauauaagcucaua

SEQ ID NO: 341156 - RNA, 19 nt, Artificial Sequence
  Description of Artificial Sequence: Synthetic oligonucleotide
  Antisense Strand to SEQ ID NO: 341155
uaugagcuuauauuaaccu

SEQ ID NO: 341157 - RNA, 19 nt, Artificial Sequence
  Description of Artificial Sequence: Synthetic oligonucleotide
  Sense Strand Starting at position 284 of SEQ ID NO: 315616
uucuaugacuguuuaagau

SEQ ID NO: 341158 - RNA, 19 nt, Artificial Sequence
  Description of Artificial Sequence: Synthetic oligonucleotide
  Antisense Strand to SEQ ID NO: 341157
aucuuaaacagucauagaa

SEQ ID NO: 341159 - RNA, 19 nt, Artificial Sequence
  Description of Artificial Sequence: Synthetic oligonucleotide
  Sense Strand Starting at position 284 of SEQ ID NO: 315725
ccuggagguccauagucaa

SEQ ID NO: 341160 - RNA, 19 nt, Artificial Sequence
  Description of Artificial Sequence: Synthetic oligonucleotide
  Antisense Strand to SEQ ID NO: 341159
uugacuauggaccuccagg

SEQ ID NO: 341161 - RNA, 19 nt, Artificial Sequence
  Description of Artificial Sequence: Synthetic oligonucleotide
  Sense Strand Starting at position 284 of SEQ ID NO: 315778
cagaaagacugagcuguau

SEQ ID NO: 341162 - RNA, 19 nt, Artificial Sequence
  Description of Artificial Sequence: Synthetic oligonucleotide
  Antisense Strand to SEQ ID NO: 341161
auacagcucagucuuucug

SEQ ID NO: 341163 - RNA, 19 nt, Artificial Sequence
  Description of Artificial Sequence: Synthetic oligonucleotide
  Sense Strand Starting at position 284 of SEQ ID NO: 315801
aucugagcagaaugaucaa

SEQ ID NO: 341164 - RNA, 19 nt, Artificial Sequence
  Description of Artificial Sequence: Synthetic oligonucleotide
  Antisense Strand to SEQ ID NO: 341163
uugaucauucugcucagau

SEQ ID NO: 341165 - RNA, 19 nt, Artificial Sequence
  Description of Artificial Sequence: Synthetic oligonucleotide
  Sense Strand Starting at position 284 of SEQ ID NO: 315877
gagguaacaugauauuuga

SEQ ID NO: 341166 - RNA, 19 nt, Artificial Sequence
  Description of Artificial Sequence: Synthetic oligonucleotide
  Antisense Strand to SEQ ID NO: 341165
ucaaauaucauguuaccuc

SEQ ID NO: 341167 - RNA, 19 nt, Artificial Sequence
  Description of Artificial Sequence: Synthetic oligonucleotide
  Sense Strand Starting at position 284 of SEQ ID NO: 316063
ugcuguuucccagaaggaa

SEQ ID NO: 341168 - RNA, 19 nt, Artificial Sequence
  Description of Artificial Sequence: Synthetic oligonucleotide
  Antisense Strand to SEQ ID NO: 341167
uuccuucugggaaacagca

SEQ ID NO: 341169 - RNA, 19 nt, Artificial Sequence
  Description of Artificial Sequence: Synthetic oligonucleotide
  Sense Strand Starting at position 284 of SEQ ID NO: 316144
ugagccugugauuaugaca

SEQ ID NO: 341170 - RNA, 19 nt, Artificial Sequence
  Description of Artificial Sequence: Synthetic oligonucleotide
  Antisense Strand to SEQ ID NO: 341169
ugucauaaucacaggcuca

SEQ ID NO: 341171 - RNA, 19 nt, Artificial Sequence
  Description of Artificial Sequence: Synthetic oligonucleotide
  Sense Strand Starting at position 284 of SEQ ID NO: 316315
cuguauuuguggucagcaa

SEQ ID NO: 341172 - RNA, 19 nt, Artificial Sequence
  Description of Artificial Sequence: Synthetic oligonucleotide
  Antisense Strand to SEQ ID NO: 341171
uugcugaccacaaauacag

SEQ ID NO: 341173 - RNA, 19 nt, Artificial Sequence
  Description of Artificial Sequence: Synthetic oligonucleotide
  Sense Strand Starting at position 284 of SEQ ID NO: 316316
uguauuuguggucagcaau

SEQ ID NO: 341174 - RNA, 19 nt, Artificial Sequence
  Description of Artificial Sequence: Synthetic oligonucleotide
  Antisense Strand to SEQ ID NO: 341173
auugcugaccacaaauaca

SEQ ID NO: 341175 - RNA, 19 nt, Artificial Sequence
  Description of Artificial Sequence: Synthetic oligonucleotide
  Sense Strand Starting at position 284 of SEQ ID NO: 316664
aaggaaagugacuguacau

SEQ ID NO: 341176 - RNA, 19 nt, Artificial Sequence
  Description of Artificial Sequence: Synthetic oligonucleotide
  Antisense Strand to SEQ ID NO: 341175
auguacagucacuuuccuu

SEQ ID NO: 341177 - RNA, 19 nt, Artificial Sequence
  Description of Artificial Sequence: Synthetic oligonucleotide
  Sense Strand Starting at position 284 of SEQ ID NO: 316671
gugacuguacauuagaugu

SEQ ID NO: 341178 - RNA, 19 nt, Artificial Sequence
  Description of Artificial Sequence: Synthetic oligonucleotide
  Antisense Strand to SEQ ID NO: 341177
acaucuaauguacagucac

SEQ ID NO: 341179 - RNA, 19 nt, Artificial Sequence
  Description of Artificial Sequence: Synthetic oligonucleotide
  Sense Strand Starting at position 284 of SEQ ID NO: 316811
acauuauggcacuaaaugu

SEQ ID NO: 341180 - RNA, 19 nt, Artificial Sequence
  Description of Artificial Sequence: Synthetic oligonucleotide
  Antisense Strand to SEQ ID NO: 341179
acauuuagugccauaaugu

SEQ ID NO: 341181 - RNA, 19 nt, Artificial Sequence
  Description of Artificial Sequence: Synthetic oligonucleotide
  Sense Strand Starting at position 284 of SEQ ID NO: 317112
aggacuugcuccuuaaaga

SEQ ID NO: 341182 - RNA, 19 nt, Artificial Sequence
  Description of Artificial Sequence: Synthetic oligonucleotide
  Antisense Strand to SEQ ID NO: 341181
ucuuuaaggagcaaguccu

SEQ ID NO: 341183 - RNA, 19 nt, Artificial Sequence
  Description of Artificial Sequence: Synthetic oligonucleotide
  Sense Strand Starting at position 284 of SEQ ID NO: 317113
ggacuugcuccuuaaagau

SEQ ID NO: 341184 - RNA, 19 nt, Artificial Sequence
  Description of Artificial Sequence: Synthetic oligonucleotide
  Antisense Strand to SEQ ID NO: 341183
aucuuuaaggagcaagucc

SEQ ID NO: 341185 - RNA, 19 nt, Artificial Sequence
  Description of Artificial Sequence: Synthetic oligonucleotide
  Sense Strand Starting at position 284 of SEQ ID NO: 317375
ucucaacaccuguggaaau

SEQ ID NO: 341186 - RNA, 19 nt, Artificial Sequence
  Description of Artificial Sequence: Synthetic oligonucleotide
  Antisense Strand to SEQ ID NO: 341185
auuuccacagguguugaga

SEQ ID NO: 341187 - RNA, 19 nt, Artificial Sequence
  Description of Artificial Sequence: Synthetic oligonucleotide
  Sense Strand Starting at position 284 of SEQ ID NO: 317437
acuugaauagucugagagu

SEQ ID NO: 341188 - RNA, 19 nt, Artificial Sequence
  Description of Artificial Sequence: Synthetic oligonucleotide
  Antisense Strand to SEQ ID NO: 341187
acucucagacuauucaagu

SEQ ID NO: 341189 - RNA, 19 nt, Artificial Sequence
  Description of Artificial Sequence: Synthetic oligonucleotide
  Sense Strand Starting at position 284 of SEQ ID NO: 317623
acaaguucccuugagcacu

SEQ ID NO: 341190 - RNA, 19 nt, Artificial Sequence
  Description of Artificial Sequence: Synthetic oligonucleotide
  Antisense Strand to SEQ ID NO: 341189
agugcucaagggaacuugu

SEQ ID NO: 341191 - RNA, 19 nt, Artificial Sequence
  Description of Artificial Sequence: Synthetic oligonucleotide
  Sense Strand Starting at position 284 of SEQ ID NO: 318192
ugucauaauuuguuuagcu

SEQ ID NO: 341192 - RNA, 19 nt, Artificial Sequence
  Description of Artificial Sequence: Synthetic oligonucleotide
  Antisense Strand to SEQ ID NO: 341191
agcuaaacaaauuaugaca

SEQ ID NO: 341193 - RNA, 19 nt, Artificial Sequence
  Description of Artificial Sequence: Synthetic oligonucleotide
  Sense Strand Starting at position 284 of SEQ ID NO: 318193
gucauaauuuguuuagcua

SEQ ID NO: 341194 - RNA, 19 nt, Artificial Sequence
  Description of Artificial Sequence: Synthetic oligonucleotide
  Antisense Strand to SEQ ID NO: 341193
uagcuaaacaaauuaugac

SEQ ID NO: 341195 - RNA, 19 nt, Artificial Sequence
  Description of Artificial Sequence: Synthetic oligonucleotide
  Sense Strand Starting at position 284 of SEQ ID NO: 318325
uggacaugugaguggaauu

SEQ ID NO: 341196 - RNA, 19 nt, Artificial Sequence
  Description of Artificial Sequence: Synthetic oligonucleotide
  Antisense Strand to SEQ ID NO: 341195
aauuccacucacaugucca

SEQ ID NO: 341197 - RNA, 19 nt, Artificial Sequence
  Description of Artificial Sequence: Synthetic oligonucleotide
  Sense Strand Starting at position 284 of SEQ ID NO: 318326
ggacaugugaguggaauug

SEQ ID NO: 341198 - RNA, 19 nt, Artificial Sequence
  Description of Artificial Sequence: Synthetic oligonucleotide
  Antisense Strand to SEQ ID NO: 341197
caauuccacucacaugucc

SEQ ID NO: 341199 - RNA, 19 nt, Artificial Sequence
  Description of Artificial Sequence: Synthetic oligonucleotide
  Sense Strand Starting at position 284 of SEQ ID NO: 318337
uggaauuguuaaguaauag

SEQ ID NO: 341200 - RNA, 19 nt, Artificial Sequence
  Description of Artificial Sequence: Synthetic oligonucleotide
  Antisense Strand to SEQ ID NO: 341199
cuauuacuuaacaauucca

SEQ ID NO: 341201 - RNA, 19 nt, Artificial Sequence
  Description of Artificial Sequence: Synthetic oligonucleotide
  Sense Strand Starting at position 284 of SEQ ID NO: 318338
ggaauuguuaaguaauagu

SEQ ID NO: 341202 - RNA, 19 nt, Artificial Sequence
  Description of Artificial Sequence: Synthetic oligonucleotide
  Antisense Strand to SEQ ID NO: 341201
acuauuacuuaacaauucc

SEQ ID NO: 341203 - RNA, 19 nt, Artificial Sequence
  Description of Artificial Sequence: Synthetic oligonucleotide
  Sense Strand Starting at position 284 of SEQ ID NO: 318491
gguguuucuaaugaguaua

SEQ ID NO: 341204 - RNA, 19 nt, Artificial Sequence
  Description of Artificial Sequence: Synthetic oligonucleotide
  Antisense Strand to SEQ ID NO: 341203
uauacucauuagaaacacc

SEQ ID NO: 341205 - RNA, 19 nt, Artificial Sequence
  Description of Artificial Sequence: Synthetic oligonucleotide
  Sense Strand Starting at position 284 of SEQ ID NO: 318640
uaaagaaauugguugucuu

SEQ ID NO: 341206 - RNA, 19 nt, Artificial Sequence
  Description of Artificial Sequence: Synthetic oligonucleotide
  Antisense Strand to SEQ ID NO: 341205
aagacaaccaauuucuuua

SEQ ID NO: 341207 - RNA, 19 nt, Artificial Sequence
  Description of Artificial Sequence: Synthetic oligonucleotide
  Sense Strand Starting at position 284 of SEQ ID NO: 318669
uguuguagccguucuuuau

SEQ ID NO: 341208 - RNA, 19 nt, Artificial Sequence
  Description of Artificial Sequence: Synthetic oligonucleotide
  Antisense Strand to SEQ ID NO: 341207
auaaagaacggcuacaaca

SEQ ID NO: 341209 - RNA, 19 nt, Artificial Sequence
  Description of Artificial Sequence: Synthetic oligonucleotide
  Sense Strand Starting at position 284 of SEQ ID NO: 318670
guuguagccguucuuuaua

SEQ ID NO: 341210 - RNA, 19 nt, Artificial Sequence
  Description of Artificial Sequence: Synthetic oligonucleotide
  Antisense Strand to SEQ ID NO: 341209
uauaaagaacggcuacaac

SEQ ID NO: 341211 - RNA, 19 nt, Artificial Sequence
  Description of Artificial Sequence: Synthetic oligonucleotide
  Sense Strand Starting at position 284 of SEQ ID NO: 318683
uuuauauagcauggauaca

SEQ ID NO: 341212 - RNA, 19 nt, Artificial Sequence
  Description of Artificial Sequence: Synthetic oligonucleotide
  Antisense Strand to SEQ ID NO: 341211
uguauccaugcuauauaaa

SEQ ID NO: 341213 - RNA, 19 nt, Artificial Sequence
  Description of Artificial Sequence: Synthetic oligonucleotide
  Sense Strand Starting at position 284 of SEQ ID NO: 318695
ggauacaagaccuguguua

SEQ ID NO: 341214 - RNA, 19 nt, Artificial Sequence
  Description of Artificial Sequence: Synthetic oligonucleotide
  Antisense Strand to SEQ ID NO: 341213
uaacacaggucuuguaucc

SEQ ID NO: 341215 - RNA, 19 nt, Artificial Sequence
  Description of Artificial Sequence: Synthetic oligonucleotide
  Sense Strand Starting at position 284 of SEQ ID NO: 318697
auacaagaccuguguuaga

SEQ ID NO: 341216 - RNA, 19 nt, Artificial Sequence
  Description of Artificial Sequence: Synthetic oligonucleotide
  Antisense Strand to SEQ ID NO: 341215
ucuaacacaggucuuguau

SEQ ID NO: 341217 - RNA, 19 nt, Artificial Sequence
  Description of Artificial Sequence: Synthetic oligonucleotide
  Sense Strand Starting at position 284 of SEQ ID NO: 318706
cuguguuagaaauauaugu

SEQ ID NO: 341218 - RNA, 19 nt, Artificial Sequence
  Description of Artificial Sequence: Synthetic oligonucleotide
  Antisense Strand to SEQ ID NO: 341217
acauauauuucuaacacag

SEQ ID NO: 341219 - RNA, 19 nt, Artificial Sequence
  Description of Artificial Sequence: Synthetic oligonucleotide
  Sense Strand Starting at position 284 of SEQ ID NO: 318708
guguuagaaauauauguuc

SEQ ID NO: 341220 - RNA, 19 nt, Artificial Sequence
  Description of Artificial Sequence: Synthetic oligonucleotide
  Antisense Strand to SEQ ID NO: 341219
gaacauauauuucuaacac

SEQ ID NO: 341221 - RNA, 19 nt, Artificial Sequence
  Description of Artificial Sequence: Synthetic oligonucleotide
  Sense Strand Starting at position 284 of SEQ ID NO: 318953
gagucuuuaguguaagaua

SEQ ID NO: 341222 - RNA, 19 nt, Artificial Sequence
  Description of Artificial Sequence: Synthetic oligonucleotide
  Antisense Strand to SEQ ID NO: 341221
uaucuuacacuaaagacuc

SEQ ID NO: 341223 - RNA, 19 nt, Artificial Sequence
  Description of Artificial Sequence: Synthetic oligonucleotide
  Sense Strand Starting at position 284 of SEQ ID NO: 319062
uggaucucaauguauggua

SEQ ID NO: 341224 - RNA, 19 nt, Artificial Sequence
  Description of Artificial Sequence: Synthetic oligonucleotide
  Antisense Strand to SEQ ID NO: 341223
uaccauacauugagaucca

SEQ ID NO: 341225 - RNA, 19 nt, Artificial Sequence
  Description of Artificial Sequence: Synthetic oligonucleotide
  Sense Strand Starting at position 284 of SEQ ID NO: 319105
uuuguuucucaugagaaac

SEQ ID NO: 341226 - RNA, 19 nt, Artificial Sequence
  Description of Artificial Sequence: Synthetic oligonucleotide
  Antisense Strand to SEQ ID NO: 341225
guuucucaugagaaacaaa

SEQ ID NO: 341227 - RNA, 19 nt, Artificial Sequence
  Description of Artificial Sequence: Synthetic oligonucleotide
  Sense Strand Starting at position 285 of SEQ ID NO: 315283
uguagucauuaccucugaa

SEQ ID NO: 341228 - RNA, 19 nt, Artificial Sequence
  Description of Artificial Sequence: Synthetic oligonucleotide
  Antisense Strand to SEQ ID NO: 341227
uucagagguaaugacuaca

SEQ ID NO: 341229 - RNA, 19 nt, Artificial Sequence
  Description of Artificial Sequence: Synthetic oligonucleotide
  Sense Strand Starting at position 285 of SEQ ID NO: 315575
cuaagaggccguugugaac

SEQ ID NO: 341230 - RNA, 19 nt, Artificial Sequence
  Description of Artificial Sequence: Synthetic oligonucleotide
  Antisense Strand to SEQ ID NO: 341229
guucacaacggccucuuag

SEQ ID NO: 341231 - RNA, 19 nt, Artificial Sequence
  Description of Artificial Sequence: Synthetic oligonucleotide
  Sense Strand Starting at position 285 of SEQ ID NO: 316029
ccucuuguacuguguugaa

SEQ ID NO: 341232 - RNA, 19 nt, Artificial Sequence
  Description of Artificial Sequence: Synthetic oligonucleotide
  Antisense Strand to SEQ ID NO: 341231
uucaacacaguacaagagg

SEQ ID NO: 341233 - RNA, 19 nt, Artificial Sequence
  Description of Artificial Sequence: Synthetic oligonucleotide
  Sense Strand Starting at position 285 of SEQ ID NO: 316118
ugcuguggugucucugcaa

SEQ ID NO: 341234 - RNA, 19 nt, Artificial Sequence
  Description of Artificial Sequence: Synthetic oligonucleotide
  Antisense Strand to SEQ ID NO: 341233
uugcagagacaccacagca

SEQ ID NO: 341235 - RNA, 19 nt, Artificial Sequence
  Description of Artificial Sequence: Synthetic oligonucleotide
  Sense Strand Starting at position 285 of SEQ ID NO: 316196
gugugcugaauugaaggaa

SEQ ID NO: 341236 - RNA, 19 nt, Artificial Sequence
  Description of Artificial Sequence: Synthetic oligonucleotide
  Antisense Strand to SEQ ID NO: 341235
uuccuucaauucagcacac

SEQ ID NO: 341237 - RNA, 19 nt, Artificial Sequence
  Description of Artificial Sequence: Synthetic oligonucleotide
  Sense Strand Starting at position 285 of SEQ ID NO: 316199
ugcugaauugaaggaaugu

SEQ ID NO: 341238 - RNA, 19 nt, Artificial Sequence
  Description of Artificial Sequence: Synthetic oligonucleotide
  Antisense Strand to SEQ ID NO: 341237
acauuccuucaauucagca

SEQ ID NO: 341239 - RNA, 19 nt, Artificial Sequence
  Description of Artificial Sequence: Synthetic oligonucleotide
  Sense Strand Starting at position 285 of SEQ ID NO: 316209
aaggaauguguuuguggcu

SEQ ID NO: 341240 - RNA, 19 nt, Artificial Sequence
  Description of Artificial Sequence: Synthetic oligonucleotide
  Antisense Strand to SEQ ID NO: 341239
agccacaaacacauuccuu

SEQ ID NO: 341241 - RNA, 19 nt, Artificial Sequence
  Description of Artificial Sequence: Synthetic oligonucleotide
  Sense Strand Starting at position 285 of SEQ ID NO: 316215
uguguuuguggcuuucagu

SEQ ID NO: 341242 - RNA, 19 nt, Artificial Sequence
  Description of Artificial Sequence: Synthetic oligonucleotide
  Antisense Strand to SEQ ID NO: 341241
acugaaagccacaaacaca

SEQ ID NO: 341243 - RNA, 19 nt, Artificial Sequence
  Description of Artificial Sequence: Synthetic oligonucleotide
  Sense Strand Starting at position 285 of SEQ ID NO: 316343
cggugugggcuugugcaaa

SEQ ID NO: 341244 - RNA, 19 nt, Artificial Sequence
  Description of Artificial Sequence: Synthetic oligonucleotide
  Antisense Strand to SEQ ID NO: 341243
uuugcacaagcccacaccg

SEQ ID NO: 341245 - RNA, 19 nt, Artificial Sequence
  Description of Artificial Sequence: Synthetic oligonucleotide
  Sense Strand Starting at position 285 of SEQ ID NO: 317182
ugucuuccucaggagcaga

SEQ ID NO: 341246 - RNA, 19 nt, Artificial Sequence
  Description of Artificial Sequence: Synthetic oligonucleotide
  Antisense Strand to SEQ ID NO: 341245
ucugcuccugaggaagaca

SEQ ID NO: 341247 - RNA, 19 nt, Artificial Sequence
  Description of Artificial Sequence: Synthetic oligonucleotide
  Sense Strand Starting at position 285 of SEQ ID NO: 317334
uggcaaggccucugaagau

SEQ ID NO: 341248 - RNA, 19 nt, Artificial Sequence
  Description of Artificial Sequence: Synthetic oligonucleotide
  Antisense Strand to SEQ ID NO: 341247
aucuucagaggccuugcca

SEQ ID NO: 341249 - RNA, 19 nt, Artificial Sequence
  Description of Artificial Sequence: Synthetic oligonucleotide
  Sense Strand Starting at position 285 of SEQ ID NO: 317630
ugucuuguuguguuuguuu

SEQ ID NO: 341250 - RNA, 19 nt, Artificial Sequence
  Description of Artificial Sequence: Synthetic oligonucleotide
  Antisense Strand to SEQ ID NO: 341249
aaacaaacacaacaagaca

SEQ ID NO: 341251 - RNA, 19 nt, Artificial Sequence
  Description of Artificial Sequence: Synthetic oligonucleotide
  Sense Strand Starting at position 285 of SEQ ID NO: 317702
gcuauagggagaugaauug

SEQ ID NO: 341252 - RNA, 19 nt, Artificial Sequence
  Description of Artificial Sequence: Synthetic oligonucleotide
  Antisense Strand to SEQ ID NO: 341251
caauucaucucccuauagc

SEQ ID NO: 341253 - RNA, 19 nt, Artificial Sequence
  Description of Artificial Sequence: Synthetic oligonucleotide
  Sense Strand Starting at position 285 of SEQ ID NO: 317770
gaaagaugcugcuuuggaa

SEQ ID NO: 341254 - RNA, 19 nt, Artificial Sequence
  Description of Artificial Sequence: Synthetic oligonucleotide
  Antisense Strand to SEQ ID NO: 341253
uuccaaagcagcaucuuuc

SEQ ID NO: 341255 - RNA, 19 nt, Artificial Sequence
  Description of Artificial Sequence: Synthetic oligonucleotide
  Sense Strand Starting at position 285 of SEQ ID NO: 317879
gcauguaaguggguguaaa

SEQ ID NO: 341256 - RNA, 19 nt, Artificial Sequence
  Description of Artificial Sequence: Synthetic oligonucleotide
  Antisense Strand to SEQ ID NO: 341255
uuuacacccacuuacaugc

SEQ ID NO: 341257 - RNA, 19 nt, Artificial Sequence
  Description of Artificial Sequence: Synthetic oligonucleotide
  Sense Strand Starting at position 285 of SEQ ID NO: 317880
cauguaaguggguguaaau

SEQ ID NO: 341258 - RNA, 19 nt, Artificial Sequence
  Description of Artificial Sequence: Synthetic oligonucleotide
  Antisense Strand to SEQ ID NO: 341257
auuuacacccacuuacaug

SEQ ID NO: 341259 - RNA, 19 nt, Artificial Sequence
  Description of Artificial Sequence: Synthetic oligonucleotide
  Sense Strand Starting at position 285 of SEQ ID NO: 317890
gguguaaaugugaguggcu

SEQ ID NO: 341260 - RNA, 19 nt, Artificial Sequence
  Description of Artificial Sequence: Synthetic oligonucleotide
  Antisense Strand to SEQ ID NO: 341259
agccacucacauuuacacc

SEQ ID NO: 341261 - RNA, 19 nt, Artificial Sequence
  Description of Artificial Sequence: Synthetic oligonucleotide
  Sense Strand Starting at position 285 of SEQ ID NO: 318087
gggugugguauguaaagag

SEQ ID NO: 341262 - RNA, 19 nt, Artificial Sequence
  Description of Artificial Sequence: Synthetic oligonucleotide
  Antisense Strand to SEQ ID NO: 341261
cucuuuacauaccacaccc

SEQ ID NO: 341263 - RNA, 19 nt, Artificial Sequence
  Description of Artificial Sequence: Synthetic oligonucleotide
  Sense Strand Starting at position 285 of SEQ ID NO: 318096
auguaaagaggguguauau

SEQ ID NO: 341264 - RNA, 19 nt, Artificial Sequence
  Description of Artificial Sequence: Synthetic oligonucleotide
  Antisense Strand to SEQ ID NO: 341263
auauacacccucuuuacau

SEQ ID NO: 341265 - RNA, 19 nt, Artificial Sequence
  Description of Artificial Sequence: Synthetic oligonucleotide
  Sense Strand Starting at position 285 of SEQ ID NO: 318126
uguguaugugaguguagga

SEQ ID NO: 341266 - RNA, 19 nt, Artificial Sequence
  Description of Artificial Sequence: Synthetic oligonucleotide
  Antisense Strand to SEQ ID NO: 341265
uccuacacucacauacaca

SEQ ID NO: 341267 - RNA, 19 nt, Artificial Sequence
  Description of Artificial Sequence: Synthetic oligonucleotide
  Sense Strand Starting at position 285 of SEQ ID NO: 318289
uguguaaauggguauaugu

SEQ ID NO: 341268 - RNA, 19 nt, Artificial Sequence
  Description of Artificial Sequence: Synthetic oligonucleotide
  Antisense Strand to SEQ ID NO: 341267
acauauacccauuuacaca

SEQ ID NO: 341269 - RNA, 19 nt, Artificial Sequence
  Description of Artificial Sequence: Synthetic oligonucleotide
  Sense Strand Starting at position 285 of SEQ ID NO: 318302
auaugugugaaugggugua

SEQ ID NO: 341270 - RNA, 19 nt, Artificial Sequence
  Description of Artificial Sequence: Synthetic oligonucleotide
  Antisense Strand to SEQ ID NO: 341269
uacacccauucacacauau

SEQ ID NO: 341271 - RNA, 19 nt, Artificial Sequence
  Description of Artificial Sequence: Synthetic oligonucleotide
  Sense Strand Starting at position 285 of SEQ ID NO: 318353
guguaugugugaaugggua

SEQ ID NO: 341272 - RNA, 19 nt, Artificial Sequence
  Description of Artificial Sequence: Synthetic oligonucleotide
  Antisense Strand to SEQ ID NO: 341271
uacccauucacacauacac

SEQ ID NO: 341273 - RNA, 19 nt, Artificial Sequence
  Description of Artificial Sequence: Synthetic oligonucleotide
  Sense Strand Starting at position 285 of SEQ ID NO: 318357
augugugaauggguaugua

SEQ ID NO: 341274 - RNA, 19 nt, Artificial Sequence
  Description of Artificial Sequence: Synthetic oligonucleotide
  Antisense Strand to SEQ ID NO: 341273
uacauacccauucacacau

SEQ ID NO: 341275 - RNA, 19 nt, Artificial Sequence
  Description of Artificial Sequence: Synthetic oligonucleotide
  Sense Strand Starting at position 285 of SEQ ID NO: 318360
ugugaauggguauguaagu

SEQ ID NO: 341276 - RNA, 19 nt, Artificial Sequence
  Description of Artificial Sequence: Synthetic oligonucleotide
  Antisense Strand to SEQ ID NO: 341275
acuuacauacccauucaca

SEQ ID NO: 341277 - RNA, 19 nt, Artificial Sequence
  Description of Artificial Sequence: Synthetic oligonucleotide
  Sense Strand Starting at position 285 of SEQ ID NO: 318389
gaguguuuggugagugcgu

SEQ ID NO: 341278 - RNA, 19 nt, Artificial Sequence
  Description of Artificial Sequence: Synthetic oligonucleotide
  Antisense Strand to SEQ ID NO: 341277
acgcacucaccaaacacuc

SEQ ID NO: 341279 - RNA, 19 nt, Artificial Sequence
  Description of Artificial Sequence: Synthetic oligonucleotide
  Sense Strand Starting at position 285 of SEQ ID NO: 318424
ggugugaguggguauaugu

SEQ ID NO: 341280 - RNA, 19 nt, Artificial Sequence
  Description of Artificial Sequence: Synthetic oligonucleotide
  Antisense Strand to SEQ ID NO: 341279
acauauacccacucacacc

SEQ ID NO: 341281 - RNA, 19 nt, Artificial Sequence
  Description of Artificial Sequence: Synthetic oligonucleotide
  Sense Strand Starting at position 285 of SEQ ID NO: 318431
guggguauaugugugaaug

SEQ ID NO: 341282 - RNA, 19 nt, Artificial Sequence
  Description of Artificial Sequence: Synthetic oligonucleotide
  Antisense Strand to SEQ ID NO: 341281
cauucacacauauacccac

SEQ ID NO: 341283 - RNA, 19 nt, Artificial Sequence
  Description of Artificial Sequence: Synthetic oligonucleotide
  Sense Strand Starting at position 285 of SEQ ID NO: 318552
ugguauaagugggugugua

SEQ ID NO: 341284 - RNA, 19 nt, Artificial Sequence
  Description of Artificial Sequence: Synthetic oligonucleotide
  Antisense Strand to SEQ ID NO: 341283
uacacacccacuuauacca

SEQ ID NO: 341285 - RNA, 19 nt, Artificial Sequence
  Description of Artificial Sequence: Synthetic oligonucleotide
  Sense Strand Starting at position 285 of SEQ ID NO: 318553
gguauaaguggguguguau

SEQ ID NO: 341286 - RNA, 19 nt, Artificial Sequence
  Description of Artificial Sequence: Synthetic oligonucleotide
  Antisense Strand to SEQ ID NO: 341285
auacacacccacuuauacc

SEQ ID NO: 341287 - RNA, 19 nt, Artificial Sequence
  Description of Artificial Sequence: Synthetic oligonucleotide
  Sense Strand Starting at position 285 of SEQ ID NO: 318565
uguguauaugcaugaguau

SEQ ID NO: 341288 - RNA, 19 nt, Artificial Sequence
  Description of Artificial Sequence: Synthetic oligonucleotide
  Antisense Strand to SEQ ID NO: 341287
auacucaugcauauacaca

SEQ ID NO: 341289 - RNA, 19 nt, Artificial Sequence
  Description of Artificial Sequence: Synthetic oligonucleotide
  Sense Strand Starting at position 285 of SEQ ID NO: 318595
guagaaugagaguguguga

SEQ ID NO: 341290 - RNA, 19 nt, Artificial Sequence
  Description of Artificial Sequence: Synthetic oligonucleotide
  Antisense Strand to SEQ ID NO: 341289
ucacacacucucauucuac

SEQ ID NO: 341291 - RNA, 19 nt, Artificial Sequence
  Description of Artificial Sequence: Synthetic oligonucleotide
  Sense Strand Starting at position 285 of SEQ ID NO: 318598
gaaugagagugugugagaa

SEQ ID NO: 341292 - RNA, 19 nt, Artificial Sequence
  Description of Artificial Sequence: Synthetic oligonucleotide
  Antisense Strand to SEQ ID NO: 341291
uucucacacacucucauuc

SEQ ID NO: 341293 - RNA, 19 nt, Artificial Sequence
  Description of Artificial Sequence: Synthetic oligonucleotide
  Sense Strand Starting at position 285 of SEQ ID NO: 318905
ggacgagcagucuaagauc

SEQ ID NO: 341294 - RNA, 19 nt, Artificial Sequence
  Description of Artificial Sequence: Synthetic oligonucleotide
  Antisense Strand to SEQ ID NO: 341293
gaucuuagacugcucgucc

SEQ ID NO: 341295 - RNA, 19 nt, Artificial Sequence
  Description of Artificial Sequence: Synthetic oligonucleotide
  Sense Strand Starting at position 285 of SEQ ID NO: 318930
augccaggagucuaccauu

SEQ ID NO: 341296 - RNA, 19 nt, Artificial Sequence
  Description of Artificial Sequence: Synthetic oligonucleotide
  Antisense Strand to SEQ ID NO: 341295
aaugguagacuccuggcau

SEQ ID NO: 341297 - RNA, 19 nt, Artificial Sequence
  Description of Artificial Sequence: Synthetic oligonucleotide
  Sense Strand Starting at position 285 of SEQ ID NO: 318933
ccaggagucuaccauuuaa

SEQ ID NO: 341298 - RNA, 19 nt, Artificial Sequence
  Description of Artificial Sequence: Synthetic oligonucleotide
  Antisense Strand to SEQ ID NO: 341297
uuaaaugguagacuccugg

SEQ ID NO: 341299 - RNA, 19 nt, Artificial Sequence
  Description of Artificial Sequence: Synthetic oligonucleotide
  Sense Strand Starting at position 285 of SEQ ID NO: 318970
ucacucauugcaugguauu

SEQ ID NO: 341300 - RNA, 19 nt, Artificial Sequence
  Description of Artificial Sequence: Synthetic oligonucleotide
  Antisense Strand to SEQ ID NO: 341299
aauaccaugcaaugaguga

SEQ ID NO: 341301 - RNA, 19 nt, Artificial Sequence
  Description of Artificial Sequence: Synthetic oligonucleotide
  Sense Strand Starting at position 285 of SEQ ID NO: 319041
agcugauugcaucagccaa

SEQ ID NO: 341302 - RNA, 19 nt, Artificial Sequence
  Description of Artificial Sequence: Synthetic oligonucleotide
  Antisense Strand to SEQ ID NO: 341301
uuggcugaugcaaucagcu

SEQ ID NO: 341303 - RNA, 19 nt, Artificial Sequence
  Description of Artificial Sequence: Synthetic oligonucleotide
  Sense Strand Starting at position 285 of SEQ ID NO: 319068
ggucuaauggaguguggca

SEQ ID NO: 341304 - RNA, 19 nt, Artificial Sequence
  Description of Artificial Sequence: Synthetic oligonucleotide
  Antisense Strand to SEQ ID NO: 341303
ugccacacuccauuagacc

SEQ ID NO: 341305 - RNA, 19 nt, Artificial Sequence
  Description of Artificial Sequence: Synthetic oligonucleotide
  Sense Strand Starting at position 285 of SEQ ID NO: 319086
aaggaaguguguuucagug

SEQ ID NO: 341306 - RNA, 19 nt, Artificial Sequence
  Description of Artificial Sequence: Synthetic oligonucleotide
  Antisense Strand to SEQ ID NO: 341305
cacugaaacacacuuccuu

SEQ ID NO: 341307 - RNA, 19 nt, Artificial Sequence
  Description of Artificial Sequence: Synthetic oligonucleotide
  Sense Strand Starting at position 286 of SEQ ID NO: 315272
cugacauugggaugguaua

SEQ ID NO: 341308 - RNA, 19 nt, Artificial Sequence
  Description of Artificial Sequence: Synthetic oligonucleotide
  Antisense Strand to SEQ ID NO: 341307
uauaccaucccaaugucag

SEQ ID NO: 341309 - RNA, 19 nt, Artificial Sequence
  Description of Artificial Sequence: Synthetic oligonucleotide
  Sense Strand Starting at position 286 of SEQ ID NO: 315319
gauggaaggucuuccuucu

SEQ ID NO: 341310 - RNA, 19 nt, Artificial Sequence
  Description of Artificial Sequence: Synthetic oligonucleotide
  Antisense Strand to SEQ ID NO: 341309
agaaggaagaccuuccauc

SEQ ID NO: 341311 - RNA, 19 nt, Artificial Sequence
  Description of Artificial Sequence: Synthetic oligonucleotide
  Sense Strand Starting at position 286 of SEQ ID NO: 315375
ccugaagguuggaggagau

SEQ ID NO: 341312 - RNA, 19 nt, Artificial Sequence
  Description of Artificial Sequence: Synthetic oligonucleotide
  Antisense Strand to SEQ ID NO: 341311
aucuccuccaaccuucagg

SEQ ID NO: 341313 - RNA, 19 nt, Artificial Sequence
  Description of Artificial Sequence: Synthetic oligonucleotide
  Sense Strand Starting at position 286 of SEQ ID NO: 315633
cagggagcuucucuguaca

SEQ ID NO: 341314 - RNA, 19 nt, Artificial Sequence
  Description of Artificial Sequence: Synthetic oligonucleotide
  Antisense Strand to SEQ ID NO: 341313
uguacagagaagcucccug

SEQ ID NO: 341315 - RNA, 19 nt, Artificial Sequence
  Description of Artificial Sequence: Synthetic oligonucleotide
  Sense Strand Starting at position 286 of SEQ ID NO: 315700
gggucacauggcuaugcau

SEQ ID NO: 341316 - RNA, 19 nt, Artificial Sequence
  Description of Artificial Sequence: Synthetic oligonucleotide
  Antisense Strand to SEQ ID NO: 341315
augcauagccaugugaccc

SEQ ID NO: 341317 - RNA, 19 nt, Artificial Sequence
  Description of Artificial Sequence: Synthetic oligonucleotide
  Sense Strand Starting at position 286 of SEQ ID NO: 315706
cauggcuaugcauaaguca

SEQ ID NO: 341318 - RNA, 19 nt, Artificial Sequence
  Description of Artificial Sequence: Synthetic oligonucleotide
  Antisense Strand to SEQ ID NO: 341317
ugacuuaugcauagccaug

SEQ ID NO: 341319 - RNA, 19 nt, Artificial Sequence
  Description of Artificial Sequence: Synthetic oligonucleotide
  Sense Strand Starting at position 286 of SEQ ID NO: 315772
ccacaaugucuaggagcau

SEQ ID NO: 341320 - RNA, 19 nt, Artificial Sequence
  Description of Artificial Sequence: Synthetic oligonucleotide
  Antisense Strand to SEQ ID NO: 341319
augcuccuagacauugugg

SEQ ID NO: 341321 - RNA, 19 nt, Artificial Sequence
  Description of Artificial Sequence: Synthetic oligonucleotide
  Sense Strand Starting at position 286 of SEQ ID NO: 315792
ugaugucuucuauagcacu

SEQ ID NO: 341322 - RNA, 19 nt, Artificial Sequence
  Description of Artificial Sequence: Synthetic oligonucleotide
  Antisense Strand to SEQ ID NO: 341321
agugcuauagaagacauca

SEQ ID NO: 341323 - RNA, 19 nt, Artificial Sequence
  Description of Artificial Sequence: Synthetic oligonucleotide
  Sense Strand Starting at position 286 of SEQ ID NO: 315844
acacauugcgagugagaca

SEQ ID NO: 341324 - RNA, 19 nt, Artificial Sequence
  Description of Artificial Sequence: Synthetic oligonucleotide
  Antisense Strand to SEQ ID NO: 341323
ugucucacucgcaaugugu

SEQ ID NO: 341325 - RNA, 19 nt, Artificial Sequence
  Description of Artificial Sequence: Synthetic oligonucleotide
  Sense Strand Starting at position 286 of SEQ ID NO: 315935
accaguguaugacuacuaa

SEQ ID NO: 341326 - RNA, 19 nt, Artificial Sequence
  Description of Artificial Sequence: Synthetic oligonucleotide
  Antisense Strand to SEQ ID NO: 341325
uuaguagucauacacuggu

SEQ ID NO: 341327 - RNA, 19 nt, Artificial Sequence
  Description of Artificial Sequence: Synthetic oligonucleotide
  Sense Strand Starting at position 286 of SEQ ID NO: 316027
uuugaauuggauugaacuu

SEQ ID NO: 341328 - RNA, 19 nt, Artificial Sequence
  Description of Artificial Sequence: Synthetic oligonucleotide
  Antisense Strand to SEQ ID NO: 341327
aaguucaauccaauucaaa

SEQ ID NO: 341329 - RNA, 19 nt, Artificial Sequence
  Description of Artificial Sequence: Synthetic oligonucleotide
  Sense Strand Starting at position 286 of SEQ ID NO: 316115
uuuaauuucuaugaaggca

SEQ ID NO: 341330 - RNA, 19 nt, Artificial Sequence
  Description of Artificial Sequence: Synthetic oligonucleotide
  Antisense Strand to SEQ ID NO: 341329
ugccuucauagaaauuaaa

SEQ ID NO: 341331 - RNA, 19 nt, Artificial Sequence
  Description of Artificial Sequence: Synthetic oligonucleotide
  Sense Strand Starting at position 286 of SEQ ID NO: 316731
agcuuuaugccagaaacuu

SEQ ID NO: 341332 - RNA, 19 nt, Artificial Sequence
  Description of Artificial Sequence: Synthetic oligonucleotide
  Antisense Strand to SEQ ID NO: 341331
aaguuucuggcauaaagcu

SEQ ID NO: 341333 - RNA, 19 nt, Artificial Sequence
  Description of Artificial Sequence: Synthetic oligonucleotide
  Sense Strand Starting at position 286 of SEQ ID NO: 316851
agcucaucuguacaaauga

SEQ ID NO: 341334 - RNA, 19 nt, Artificial Sequence
  Description of Artificial Sequence: Synthetic oligonucleotide
  Antisense Strand to SEQ ID NO: 341333
ucauuuguacagaugagcu

SEQ ID NO: 341335 - RNA, 19 nt, Artificial Sequence
  Description of Artificial Sequence: Synthetic oligonucleotide
  Sense Strand Starting at position 286 of SEQ ID NO: 317029
uucuacagccauggucaaa

SEQ ID NO: 341336 - RNA, 19 nt, Artificial Sequence
  Description of Artificial Sequence: Synthetic oligonucleotide
  Antisense Strand to SEQ ID NO: 341335
uuugaccauggcuguagaa

SEQ ID NO: 341337 - RNA, 19 nt, Artificial Sequence
  Description of Artificial Sequence: Synthetic oligonucleotide
  Sense Strand Starting at position 286 of SEQ ID NO: 317177
gucuuaugccaauaugaaa

SEQ ID NO: 341338 - RNA, 19 nt, Artificial Sequence
  Description of Artificial Sequence: Synthetic oligonucleotide
  Antisense Strand to SEQ ID NO: 341337
uuucauauuggcauaagac

SEQ ID NO: 341339 - RNA, 19 nt, Artificial Sequence
  Description of Artificial Sequence: Synthetic oligonucleotide
  Sense Strand Starting at position 286 of SEQ ID NO: 317358
cuuggauccuucccugaau

SEQ ID NO: 341340 - RNA, 19 nt, Artificial Sequence
  Description of Artificial Sequence: Synthetic oligonucleotide
  Antisense Strand to SEQ ID NO: 341339
auucagggaaggauccaag

SEQ ID NO: 341341 - RNA, 19 nt, Artificial Sequence
  Description of Artificial Sequence: Synthetic oligonucleotide
  Sense Strand Starting at position 286 of SEQ ID NO: 317360
uggauccuucccugaauga

SEQ ID NO: 341342 - RNA, 19 nt, Artificial Sequence
  Description of Artificial Sequence: Synthetic oligonucleotide
  Antisense Strand to SEQ ID NO: 341341
ucauucagggaaggaucca

SEQ ID NO: 341343 - RNA, 19 nt, Artificial Sequence
  Description of Artificial Sequence: Synthetic oligonucleotide
  Sense Strand Starting at position 286 of SEQ ID NO: 317375
augagucagggugagcauu

SEQ ID NO: 341344 - RNA, 19 nt, Artificial Sequence
  Description of Artificial Sequence: Synthetic oligonucleotide
  Antisense Strand to SEQ ID NO: 341343
aaugcucacccugacucau

SEQ ID NO: 341345 - RNA, 19 nt, Artificial Sequence
  Description of Artificial Sequence: Synthetic oligonucleotide
  Sense Strand Starting at position 286 of SEQ ID NO: 317634
ugaggugugauguauuacu

SEQ ID NO: 341346 - RNA, 19 nt, Artificial Sequence
  Description of Artificial Sequence: Synthetic oligonucleotide
  Antisense Strand to SEQ ID NO: 341345
aguaauacaucacaccuca

SEQ ID NO: 341347 - RNA, 19 nt, Artificial Sequence
  Description of Artificial Sequence: Synthetic oligonucleotide
  Sense Strand Starting at position 286 of SEQ ID NO: 317639
ugugauguauuacuggaaa

SEQ ID NO: 341348 - RNA, 19 nt, Artificial Sequence
  Description of Artificial Sequence: Synthetic oligonucleotide
  Antisense Strand to SEQ ID NO: 341347
uuuccaguaauacaucaca

SEQ ID NO: 341349 - RNA, 19 nt, Artificial Sequence
  Description of Artificial Sequence: Synthetic oligonucleotide
  Sense Strand Starting at position 286 of SEQ ID NO: 317641
ugauguauuacuggaaagc

SEQ ID NO: 341350 - RNA, 19 nt, Artificial Sequence
  Description of Artificial Sequence: Synthetic oligonucleotide
  Antisense Strand to SEQ ID NO: 341349
gcuuuccaguaauacauca

SEQ ID NO: 341351 - RNA, 19 nt, Artificial Sequence
  Description of Artificial Sequence: Synthetic oligonucleotide
  Sense Strand Starting at position 286 of SEQ ID NO: 317731
caagcugaugcaggaauua

SEQ ID NO: 341352 - RNA, 19 nt, Artificial Sequence
  Description of Artificial Sequence: Synthetic oligonucleotide
  Antisense Strand to SEQ ID NO: 341351
uaauuccugcaucagcuug

SEQ ID NO: 341353 - RNA, 19 nt, Artificial Sequence
  Description of Artificial Sequence: Synthetic oligonucleotide
  Sense Strand Starting at position 286 of SEQ ID NO: 317802
ugccucuaacauuggguaa

SEQ ID NO: 341354 - RNA, 19 nt, Artificial Sequence
  Description of Artificial Sequence: Synthetic oligonucleotide
  Antisense Strand to SEQ ID NO: 341353
uuacccaauguuagaggca

SEQ ID NO: 341355 - RNA, 19 nt, Artificial Sequence
  Description of Artificial Sequence: Synthetic oligonucleotide
  Sense Strand Starting at position 286 of SEQ ID NO: 317805
cucuaacauuggguaacaa

SEQ ID NO: 341356 - RNA, 19 nt, Artificial Sequence
  Description of Artificial Sequence: Synthetic oligonucleotide
  Antisense Strand to SEQ ID NO: 341355
uuguuacccaauguuagag

SEQ ID NO: 341357 - RNA, 19 nt, Artificial Sequence
  Description of Artificial Sequence: Synthetic oligonucleotide
  Sense Strand Starting at position 286 of SEQ ID NO: 317962
uguuauaaaggccacuaaa

SEQ ID NO: 341358 - RNA, 19 nt, Artificial Sequence
  Description of Artificial Sequence: Synthetic oligonucleotide
  Antisense Strand to SEQ ID NO: 341357
uuuaguggccuuuauaaca

SEQ ID NO: 341359 - RNA, 19 nt, Artificial Sequence
  Description of Artificial Sequence: Synthetic oligonucleotide
  Sense Strand Starting at position 286 of SEQ ID NO: 318073
aagaaaguauuuggauuga

SEQ ID NO: 341360 - RNA, 19 nt, Artificial Sequence
  Description of Artificial Sequence: Synthetic oligonucleotide
  Antisense Strand to SEQ ID NO: 341359
ucaauccaaauacuuucuu

SEQ ID NO: 341361 - RNA, 19 nt, Artificial Sequence
  Description of Artificial Sequence: Synthetic oligonucleotide
  Sense Strand Starting at position 286 of SEQ ID NO: 318360
uagugaugugauuaagguc

SEQ ID NO: 341362 - RNA, 19 nt, Artificial Sequence
  Description of Artificial Sequence: Synthetic oligonucleotide
  Antisense Strand to SEQ ID NO: 341361
gaccuuaaucacaucacua

SEQ ID NO: 341363 - RNA, 19 nt, Artificial Sequence
  Description of Artificial Sequence: Synthetic oligonucleotide
  Sense Strand Starting at position 286 of SEQ ID NO: 318470
uugucaguuccacaaguga

SEQ ID NO: 341364 - RNA, 19 nt, Artificial Sequence
  Description of Artificial Sequence: Synthetic oligonucleotide
  Antisense Strand to SEQ ID NO: 341363
ucacuuguggaacugacaa

SEQ ID NO: 341365 - RNA, 19 nt, Artificial Sequence
  Description of Artificial Sequence: Synthetic oligonucleotide
  Sense Strand Starting at position 286 of SEQ ID NO: 318523
agcuaacaucuuggauagu

SEQ ID NO: 341366 - RNA, 19 nt, Artificial Sequence
  Description of Artificial Sequence: Synthetic oligonucleotide
  Antisense Strand to SEQ ID NO: 341365
acuauccaagauguuagcu

SEQ ID NO: 341367 - RNA, 19 nt, Artificial Sequence
  Description of Artificial Sequence: Synthetic oligonucleotide
  Sense Strand Starting at position 286 of SEQ ID NO: 318579
guuauauagcacugaucua

SEQ ID NO: 341368 - RNA, 19 nt, Artificial Sequence
  Description of Artificial Sequence: Synthetic oligonucleotide
  Antisense Strand to SEQ ID NO: 341367
uagaucagugcuauauaac

SEQ ID NO: 341369 - RNA, 19 nt, Artificial Sequence
  Description of Artificial Sequence: Synthetic oligonucleotide
  Sense Strand Starting at position 286 of SEQ ID NO: 318591
ugaucuagccauugagaug

SEQ ID NO: 341370 - RNA, 19 nt, Artificial Sequence
  Description of Artificial Sequence: Synthetic oligonucleotide
  Antisense Strand to SEQ ID NO: 341369
caucucaauggcuagauca

SEQ ID NO: 341371 - RNA, 19 nt, Artificial Sequence
  Description of Artificial Sequence: Synthetic oligonucleotide
  Sense Strand Starting at position 286 of SEQ ID NO: 318607
augagaugucaguagaagu

SEQ ID NO: 341372 - RNA, 19 nt, Artificial Sequence
  Description of Artificial Sequence: Synthetic oligonucleotide
  Antisense Strand to SEQ ID NO: 341371
acuucuacugacaucucau

SEQ ID NO: 341373 - RNA, 19 nt, Artificial Sequence
  Description of Artificial Sequence: Synthetic oligonucleotide
  Sense Strand Starting at position 286 of SEQ ID NO: 318668
cugaaucagcugggaugua

SEQ ID NO: 341374 - RNA, 19 nt, Artificial Sequence
  Description of Artificial Sequence: Synthetic oligonucleotide
  Antisense Strand to SEQ ID NO: 341373
uacaucccagcugauucag

SEQ ID NO: 341375 - RNA, 19 nt, Artificial Sequence
  Description of Artificial Sequence: Synthetic oligonucleotide
  Sense Strand Starting at position 286 of SEQ ID NO: 318710
uucuuucuaccugaagguu

SEQ ID NO: 341376 - RNA, 19 nt, Artificial Sequence
  Description of Artificial Sequence: Synthetic oligonucleotide
  Antisense Strand to SEQ ID NO: 341375
aaccuucagguagaaagaa

SEQ ID NO: 341377 - RNA, 19 nt, Artificial Sequence
  Description of Artificial Sequence: Synthetic oligonucleotide
  Sense Strand Starting at position 286 of SEQ ID NO: 318733
uaagucagccaucauguga

SEQ ID NO: 341378 - RNA, 19 nt, Artificial Sequence
  Description of Artificial Sequence: Synthetic oligonucleotide
  Antisense Strand to SEQ ID NO: 341377
ucacaugauggcugacuua

SEQ ID NO: 341379 - RNA, 19 nt, Artificial Sequence
  Description of Artificial Sequence: Synthetic oligonucleotide
  Sense Strand Starting at position 286 of SEQ ID NO: 318740
gccaucaugugacuaugaa

SEQ ID NO: 341380 - RNA, 19 nt, Artificial Sequence
  Description of Artificial Sequence: Synthetic oligonucleotide
  Antisense Strand to SEQ ID NO: 341379
uucauagucacaugauggc

SEQ ID NO: 341381 - RNA, 19 nt, Artificial Sequence
  Description of Artificial Sequence: Synthetic oligonucleotide
  Sense Strand Starting at position 286 of SEQ ID NO: 318778
gcagguuaagcagaaagau

SEQ ID NO: 341382 - RNA, 19 nt, Artificial Sequence
  Description of Artificial Sequence: Synthetic oligonucleotide
  Antisense Strand to SEQ ID NO: 341381
aucuuucugcuuaaccugc

SEQ ID NO: 341383 - RNA, 19 nt, Artificial Sequence
  Description of Artificial Sequence: Synthetic oligonucleotide
  Sense Strand Starting at position 286 of SEQ ID NO: 319006
cuuuacuuugguuagaguu

SEQ ID NO: 341384 - RNA, 19 nt, Artificial Sequence
  Description of Artificial Sequence: Synthetic oligonucleotide
  Antisense Strand to SEQ ID NO: 341383
aacucuaaccaaaguaaag

SEQ ID NO: 341385 - RNA, 19 nt, Artificial Sequence
  Description of Artificial Sequence: Synthetic oligonucleotide
  Sense Strand Starting at position 286 of SEQ ID NO: 319131
ggguauuaaugauucccaa

SEQ ID NO: 341386 - RNA, 19 nt, Artificial Sequence
  Description of Artificial Sequence: Synthetic oligonucleotide
  Antisense Strand to SEQ ID NO: 341385
uugggaaucauuaauaccc

SEQ ID NO: 341387 - RNA, 19 nt, Artificial Sequence
  Description of Artificial Sequence: Synthetic oligonucleotide
  Sense Strand Starting at position 287 of SEQ ID NO: 315387
ugacuuucccuggagccua

SEQ ID NO: 341388 - RNA, 19 nt, Artificial Sequence
  Description of Artificial Sequence: Synthetic oligonucleotide
  Antisense Strand to SEQ ID NO: 341387
uaggcuccagggaaaguca

SEQ ID NO: 341389 - RNA, 19 nt, Artificial Sequence
  Description of Artificial Sequence: Synthetic oligonucleotide
  Sense Strand Starting at position 287 of SEQ ID NO: 315450
cgccgucagauuuggaaca

SEQ ID NO: 341390 - RNA, 19 nt, Artificial Sequence
  Description of Artificial Sequence: Synthetic oligonucleotide
  Antisense Strand to SEQ ID NO: 341389
uguuccaaaucugacggcg

SEQ ID NO: 341391 - RNA, 19 nt, Artificial Sequence
  Description of Artificial Sequence: Synthetic oligonucleotide
  Sense Strand Starting at position 287 of SEQ ID NO: 315452
ccgucagauuuggaacaua

SEQ ID NO: 341392 - RNA, 19 nt, Artificial Sequence
  Description of Artificial Sequence: Synthetic oligonucleotide
  Antisense Strand to SEQ ID NO: 341391
uauguuccaaaucugacgg

SEQ ID NO: 341393 - RNA, 19 nt, Artificial Sequence
  Description of Artificial Sequence: Synthetic oligonucleotide
  Sense Strand Starting at position 287 of SEQ ID NO: 315657
ucgugaucuccuuacucag

SEQ ID NO: 341394 - RNA, 19 nt, Artificial Sequence
  Description of Artificial Sequence: Synthetic oligonucleotide
  Antisense Strand to SEQ ID NO: 341393
cugaguaaggagaucacga

SEQ ID NO: 341395 - RNA, 19 nt, Artificial Sequence
  Description of Artificial Sequence: Synthetic oligonucleotide
  Sense Strand Starting at position 287 of SEQ ID NO: 315769
gaaggacuacguugaauca

SEQ ID NO: 341396 - RNA, 19 nt, Artificial Sequence
  Description of Artificial Sequence: Synthetic oligonucleotide
  Antisense Strand to SEQ ID NO: 341395
ugauucaacguaguccuuc

SEQ ID NO: 341397 - RNA, 19 nt, Artificial Sequence
  Description of Artificial Sequence: Synthetic oligonucleotide
  Sense Strand Starting at position 287 of SEQ ID NO: 315846
auuagaaccucauuguaag

SEQ ID NO: 341398 - RNA, 19 nt, Artificial Sequence
  Description of Artificial Sequence: Synthetic oligonucleotide
  Antisense Strand to SEQ ID NO: 341397
cuuacaaugagguucuaau

SEQ ID NO: 341399 - RNA, 19 nt, Artificial Sequence
  Description of Artificial Sequence: Synthetic oligonucleotide
  Sense Strand Starting at position 287 of SEQ ID NO: 315847
uuagaaccucauuguaaga

SEQ ID NO: 341400 - RNA, 19 nt, Artificial Sequence
  Description of Artificial Sequence: Synthetic oligonucleotide
  Antisense Strand to SEQ ID NO: 341399
ucuuacaaugagguucuaa

SEQ ID NO: 341401 - RNA, 19 nt, Artificial Sequence
  Description of Artificial Sequence: Synthetic oligonucleotide
  Sense Strand Starting at position 287 of SEQ ID NO: 316039
ucgggacuucccugaccua

SEQ ID NO: 341402 - RNA, 19 nt, Artificial Sequence
  Description of Artificial Sequence: Synthetic oligonucleotide
  Antisense Strand to SEQ ID NO: 341401
uaggucagggaagucccga

SEQ ID NO: 341403 - RNA, 19 nt, Artificial Sequence
  Description of Artificial Sequence: Synthetic oligonucleotide
  Sense Strand Starting at position 287 of SEQ ID NO: 316040
cgggacuucccugaccuau

SEQ ID NO: 341404 - RNA, 19 nt, Artificial Sequence
  Description of Artificial Sequence: Synthetic oligonucleotide
  Antisense Strand to SEQ ID NO: 341403
auaggucagggaagucccg

SEQ ID NO: 341405 - RNA, 19 nt, Artificial Sequence
  Description of Artificial Sequence: Synthetic oligonucleotide
  Sense Strand Starting at position 287 of SEQ ID NO: 316576
cggaaacccugacuccauu

SEQ ID NO: 341406 - RNA, 19 nt, Artificial Sequence
  Description of Artificial Sequence: Synthetic oligonucleotide
  Antisense Strand to SEQ ID NO: 341405
aauggagucaggguuuccg

SEQ ID NO: 341407 - RNA, 19 nt, Artificial Sequence
  Description of Artificial Sequence: Synthetic oligonucleotide
  Sense Strand Starting at position 287 of SEQ ID NO: 316770
gauggcagcuucucacaga

SEQ ID NO: 341408 - RNA, 19 nt, Artificial Sequence
  Description of Artificial Sequence: Synthetic oligonucleotide
  Antisense Strand to SEQ ID NO: 341407
ucugugagaagcugccauc

SEQ ID NO: 341409 - RNA, 19 nt, Artificial Sequence
  Description of Artificial Sequence: Synthetic oligonucleotide
  Sense Strand Starting at position 287 of SEQ ID NO: 316832
gcaagagacugguuccgaa

SEQ ID NO: 341410 - RNA, 19 nt, Artificial Sequence
  Description of Artificial Sequence: Synthetic oligonucleotide
  Antisense Strand to SEQ ID NO: 341409
uucggaaccagucucuugc

SEQ ID NO: 341411 - RNA, 19 nt, Artificial Sequence
  Description of Artificial Sequence: Synthetic oligonucleotide
  Sense Strand Starting at position 287 of SEQ ID NO: 317138
uucuuagaugggugcuuaa

SEQ ID NO: 341412 - RNA, 19 nt, Artificial Sequence
  Description of Artificial Sequence: Synthetic oligonucleotide
  Antisense Strand to SEQ ID NO: 341411
uuaagcacccaucuaagaa

SEQ ID NO: 341413 - RNA, 19 nt, Artificial Sequence
  Description of Artificial Sequence: Synthetic oligonucleotide
  Sense Strand Starting at position 287 of SEQ ID NO: 317182
ugcuaaucucuggauccuu

SEQ ID NO: 341414 - RNA, 19 nt, Artificial Sequence
  Description of Artificial Sequence: Synthetic oligonucleotide
  Antisense Strand to SEQ ID NO: 341413
aaggauccagagauuagca

SEQ ID NO: 341415 - RNA, 19 nt, Artificial Sequence
  Description of Artificial Sequence: Synthetic oligonucleotide
  Sense Strand Starting at position 287 of SEQ ID NO: 317252
guaaguaaugcaugaguaa

SEQ ID NO: 341416 - RNA, 19 nt, Artificial Sequence
  Description of Artificial Sequence: Synthetic oligonucleotide
  Antisense Strand to SEQ ID NO: 341415
uuacucaugcauuacuuac

SEQ ID NO: 341417 - RNA, 19 nt, Artificial Sequence
  Description of Artificial Sequence: Synthetic oligonucleotide
  Sense Strand Starting at position 287 of SEQ ID NO: 317253
uaaguaaugcaugaguaaa

SEQ ID NO: 341418 - RNA, 19 nt, Artificial Sequence
  Description of Artificial Sequence: Synthetic oligonucleotide
  Antisense Strand to SEQ ID NO: 341417
uuuacucaugcauuacuua

SEQ ID NO: 341419 - RNA, 19 nt, Artificial Sequence
  Description of Artificial Sequence: Synthetic oligonucleotide
  Sense Strand Starting at position 287 of SEQ ID NO: 317255
aguaaugcaugaguaaauu

SEQ ID NO: 341420 - RNA, 19 nt, Artificial Sequence
  Description of Artificial Sequence: Synthetic oligonucleotide
  Antisense Strand to SEQ ID NO: 341419
aauuuacucaugcauuacu

SEQ ID NO: 341421 - RNA, 19 nt, Artificial Sequence
  Description of Artificial Sequence: Synthetic oligonucleotide
  Sense Strand Starting at position 287 of SEQ ID NO: 317301
caugaugaguuucugaaua

SEQ ID NO: 341422 - RNA, 19 nt, Artificial Sequence
  Description of Artificial Sequence: Synthetic oligonucleotide
  Antisense Strand to SEQ ID NO: 341421
uauucagaaacucaucaug

SEQ ID NO: 341423 - RNA, 19 nt, Artificial Sequence
  Description of Artificial Sequence: Synthetic oligonucleotide
  Sense Strand Starting at position 287 of SEQ ID NO: 317306
ugaguuucugaauacaucu

SEQ ID NO: 341424 - RNA, 19 nt, Artificial Sequence
  Description of Artificial Sequence: Synthetic oligonucleotide
  Antisense Strand to SEQ ID NO: 341423
agauguauucagaaacuca

SEQ ID NO: 341425 - RNA, 19 nt, Artificial Sequence
  Description of Artificial Sequence: Synthetic oligonucleotide
  Sense Strand Starting at position 287 of SEQ ID NO: 317354
gggaguacuuaugcuuaaa

SEQ ID NO: 341426 - RNA, 19 nt, Artificial Sequence
  Description of Artificial Sequence: Synthetic oligonucleotide
  Antisense Strand to SEQ ID NO: 341425
uuuaagcauaaguacuccc

SEQ ID NO: 341427 - RNA, 19 nt, Artificial Sequence
  Description of Artificial Sequence: Synthetic oligonucleotide
  Sense Strand Starting at position 287 of SEQ ID NO: 317356
gaguacuuaugcuuaaaga

SEQ ID NO: 341428 - RNA, 19 nt, Artificial Sequence
  Description of Artificial Sequence: Synthetic oligonucleotide
  Antisense Strand to SEQ ID NO: 341427
ucuuuaagcauaaguacuc

SEQ ID NO: 341429 - RNA, 19 nt, Artificial Sequence
  Description of Artificial Sequence: Synthetic oligonucleotide
  Sense Strand Starting at position 287 of SEQ ID NO: 317357
aguacuuaugcuuaaagau

SEQ ID NO: 341430 - RNA, 19 nt, Artificial Sequence
  Description of Artificial Sequence: Synthetic oligonucleotide
  Antisense Strand to SEQ ID NO: 341429
aucuuuaagcauaaguacu

SEQ ID NO: 341431 - RNA, 19 nt, Artificial Sequence
  Description of Artificial Sequence: Synthetic oligonucleotide
  Sense Strand Starting at position 287 of SEQ ID NO: 317406
ugaccacuuccacauguuu

SEQ ID NO: 341432 - RNA, 19 nt, Artificial Sequence
  Description of Artificial Sequence: Synthetic oligonucleotide
  Antisense Strand to SEQ ID NO: 341431
aaacauguggaagugguca

SEQ ID NO: 341433 - RNA, 19 nt, Artificial Sequence
  Description of Artificial Sequence: Synthetic oligonucleotide
  Sense Strand Starting at position 287 of SEQ ID NO: 317503
agggcauuguuucugauua

SEQ ID NO: 341434 - RNA, 19 nt, Artificial Sequence
  Description of Artificial Sequence: Synthetic oligonucleotide
  Antisense Strand to SEQ ID NO: 341433
uaaucagaaacaaugcccu

SEQ ID NO: 341435 - RNA, 19 nt, Artificial Sequence
  Description of Artificial Sequence: Synthetic oligonucleotide
  Sense Strand Starting at position 287 of SEQ ID NO: 317634
cugacauugggaugguaua

SEQ ID NO: 341436 - RNA, 19 nt, Artificial Sequence
  Description of Artificial Sequence: Synthetic oligonucleotide
  Antisense Strand to SEQ ID NO: 341435
uauaccaucccaaugucag

SEQ ID NO: 341437 - RNA, 19 nt, Artificial Sequence
  Description of Artificial Sequence: Synthetic oligonucleotide
  Sense Strand Starting at position 287 of SEQ ID NO: 317681
gauggaaggucuuccuucu

SEQ ID NO: 341438 - RNA, 19 nt, Artificial Sequence
  Description of Artificial Sequence: Synthetic oligonucleotide
  Antisense Strand to SEQ ID NO: 341437
agaaggaagaccuuccauc

SEQ ID NO: 341439 - RNA, 19 nt, Artificial Sequence
  Description of Artificial Sequence: Synthetic oligonucleotide
  Sense Strand Starting at position 287 of SEQ ID NO: 317737
ccugaagguuggaggagau

SEQ ID NO: 341440 - RNA, 19 nt, Artificial Sequence
  Description of Artificial Sequence: Synthetic oligonucleotide
  Antisense Strand to SEQ ID NO: 341439
aucuccuccaaccuucagg

SEQ ID NO: 341441 - RNA, 19 nt, Artificial Sequence
  Description of Artificial Sequence: Synthetic oligonucleotide
  Sense Strand Starting at position 287 of SEQ ID NO: 317995
cagggagcuucucuguaca

SEQ ID NO: 341442 - RNA, 19 nt, Artificial Sequence
  Description of Artificial Sequence: Synthetic oligonucleotide
  Antisense Strand to SEQ ID NO: 341441
uguacagagaagcucccug

SEQ ID NO: 341443 - RNA, 19 nt, Artificial Sequence
  Description of Artificial Sequence: Synthetic oligonucleotide
  Sense Strand Starting at position 287 of SEQ ID NO: 318062
gggucacauggcuaugcau

SEQ ID NO: 341444 - RNA, 19 nt, Artificial Sequence
  Description of Artificial Sequence: Synthetic oligonucleotide
  Antisense Strand to SEQ ID NO: 341443
augcauagccaugugaccc

SEQ ID NO: 341445 - RNA, 19 nt, Artificial Sequence
  Description of Artificial Sequence: Synthetic oligonucleotide
  Sense Strand Starting at position 287 of SEQ ID NO: 318068
cauggcuaugcauaaguca

SEQ ID NO: 341446 - RNA, 19 nt, Artificial Sequence
  Description of Artificial Sequence: Synthetic oligonucleotide
  Antisense Strand to SEQ ID NO: 341445
ugacuuaugcauagccaug

SEQ ID NO: 341447 - RNA, 19 nt, Artificial Sequence
  Description of Artificial Sequence: Synthetic oligonucleotide
  Sense Strand Starting at position 287 of SEQ ID NO: 318134
ccacaaugucuaggagcau

SEQ ID NO: 341448 - RNA, 19 nt, Artificial Sequence
  Description of Artificial Sequence: Synthetic oligonucleotide
  Antisense Strand to SEQ ID NO: 341447
augcuccuagacauugugg

SEQ ID NO: 341449 - RNA, 19 nt, Artificial Sequence
  Description of Artificial Sequence: Synthetic oligonucleotide
  Sense Strand Starting at position 287 of SEQ ID NO: 318154
ugaugucuucuauagcacu

SEQ ID NO: 341450 - RNA, 19 nt, Artificial Sequence
  Description of Artificial Sequence: Synthetic oligonucleotide
  Antisense Strand to SEQ ID NO: 341449
agugcuauagaagacauca

SEQ ID NO: 341451 - RNA, 19 nt, Artificial Sequence
  Description of Artificial Sequence: Synthetic oligonucleotide
  Sense Strand Starting at position 287 of SEQ ID NO: 318206
acacauugcgagugagaca

SEQ ID NO: 341452 - RNA, 19 nt, Artificial Sequence
  Description of Artificial Sequence: Synthetic oligonucleotide
  Antisense Strand to SEQ ID NO: 341451
ugucucacucgcaaugugu

SEQ ID NO: 341453 - RNA, 19 nt, Artificial Sequence
  Description of Artificial Sequence: Synthetic oligonucleotide
  Sense Strand Starting at position 287 of SEQ ID NO: 318297
accaguguaugacuacuaa

SEQ ID NO: 341454 - RNA, 19 nt, Artificial Sequence
  Description of Artificial Sequence: Synthetic oligonucleotide
  Antisense Strand to SEQ ID NO: 341453
uuaguagucauacacuggu

SEQ ID NO: 341455 - RNA, 19 nt, Artificial Sequence
  Description of Artificial Sequence: Synthetic oligonucleotide
  Sense Strand Starting at position 287 of SEQ ID NO: 318389
uuugaauuggauugaacuu

SEQ ID NO: 341456 - RNA, 19 nt, Artificial Sequence
  Description of Artificial Sequence: Synthetic oligonucleotide
  Antisense Strand to SEQ ID NO: 341455
aaguucaauccaauucaaa

SEQ ID NO: 341457 - RNA, 19 nt, Artificial Sequence
  Description of Artificial Sequence: Synthetic oligonucleotide
  Sense Strand Starting at position 287 of SEQ ID NO: 318456
uguuaauuguauccucuaa

SEQ ID NO: 341458 - RNA, 19 nt, Artificial Sequence
  Description of Artificial Sequence: Synthetic oligonucleotide
  Antisense Strand to SEQ ID NO: 341457
uuagaggauacaauuaaca

SEQ ID NO: 341459 - RNA, 19 nt, Artificial Sequence
  Description of Artificial Sequence: Synthetic oligonucleotide
  Sense Strand Starting at position 287 of SEQ ID NO: 318477
uuuaauuucuaugaaggca

SEQ ID NO: 341460 - RNA, 19 nt, Artificial Sequence
  Description of Artificial Sequence: Synthetic oligonucleotide
  Antisense Strand to SEQ ID NO: 341459
ugccuucauagaaauuaaa

SEQ ID NO: 341461 - RNA, 19 nt, Artificial Sequence
  Description of Artificial Sequence: Synthetic oligonucleotide
  Sense Strand Starting at position 287 of SEQ ID NO: 319036
ucagcuccguaauuagaaa

SEQ ID NO: 341462 - RNA, 19 nt, Artificial Sequence
  Description of Artificial Sequence: Synthetic oligonucleotide
  Antisense Strand to SEQ ID NO: 341461
uuucuaauuacggagcuga

SEQ ID NO: 341463 - RNA, 19 nt, Artificial Sequence
  Description of Artificial Sequence: Synthetic oligonucleotide
  Sense Strand Starting at position 287 of SEQ ID NO: 319093
agcuuuaugccagaaacuu

SEQ ID NO: 341464 - RNA, 19 nt, Artificial Sequence
  Description of Artificial Sequence: Synthetic oligonucleotide
  Antisense Strand to SEQ ID NO: 341463
aaguuucuggcauaaagcu

SEQ ID NO: 341465 - RNA, 19 nt, Artificial Sequence
  Description of Artificial Sequence: Synthetic oligonucleotide
  Sense Strand Starting at position 287 of SEQ ID NO: 319213
agcucaucuguacaaauga

SEQ ID NO: 341466 - RNA, 19 nt, Artificial Sequence
  Description of Artificial Sequence: Synthetic oligonucleotide
  Antisense Strand to SEQ ID NO: 341465
ucauuuguacagaugagcu

SEQ ID NO: 341467 - RNA, 19 nt, Artificial Sequence
  Description of Artificial Sequence: Synthetic oligonucleotide
  Sense Strand Starting at position 288 of SEQ ID NO: 315375
gucuuaugccaauaugaaa

SEQ ID NO: 341468 - RNA, 19 nt, Artificial Sequence
  Description of Artificial Sequence: Synthetic oligonucleotide
  Antisense Strand to SEQ ID NO: 341467
uuucauauuggcauaagac

SEQ ID NO: 341469 - RNA, 19 nt, Artificial Sequence
  Description of Artificial Sequence: Synthetic oligonucleotide
  Sense Strand Starting at position 288 of SEQ ID NO: 315556
cuuggauccuucccugaau

SEQ ID NO: 341470 - RNA, 19 nt, Artificial Sequence
  Description of Artificial Sequence: Synthetic oligonucleotide
  Antisense Strand to SEQ ID NO: 341469
auucagggaaggauccaag

SEQ ID NO: 341471 - RNA, 19 nt, Artificial Sequence
  Description of Artificial Sequence: Synthetic oligonucleotide
  Sense Strand Starting at position 288 of SEQ ID NO: 315558
uggauccuucccugaauga

SEQ ID NO: 341472 - RNA, 19 nt, Artificial Sequence
  Description of Artificial Sequence: Synthetic oligonucleotide
  Antisense Strand to SEQ ID NO: 341471
ucauucagggaaggaucca

SEQ ID NO: 341473 - RNA, 19 nt, Artificial Sequence
  Description of Artificial Sequence: Synthetic oligonucleotide
  Sense Strand Starting at position 288 of SEQ ID NO: 315573
augagucagggugagcauu

SEQ ID NO: 341474 - RNA, 19 nt, Artificial Sequence
  Description of Artificial Sequence: Synthetic oligonucleotide
  Antisense Strand to SEQ ID NO: 341473
aaugcucacccugacucau

SEQ ID NO: 341475 - RNA, 19 nt, Artificial Sequence
  Description of Artificial Sequence: Synthetic oligonucleotide
  Sense Strand Starting at position 288 of SEQ ID NO: 315832
ugaggugugauguauuacu

SEQ ID NO: 341476 - RNA, 19 nt, Artificial Sequence
  Description of Artificial Sequence: Synthetic oligonucleotide
  Antisense Strand to SEQ ID NO: 341475
aguaauacaucacaccuca

SEQ ID NO: 341477 - RNA, 19 nt, Artificial Sequence
  Description of Artificial Sequence: Synthetic oligonucleotide
  Sense Strand Starting at position 288 of SEQ ID NO: 315837
ugugauguauuacuggaaa

SEQ ID NO: 341478 - RNA, 19 nt, Artificial Sequence
  Description of Artificial Sequence: Synthetic oligonucleotide
  Antisense Strand to SEQ ID NO: 341477
uuuccaguaauacaucaca

SEQ ID NO: 341479 - RNA, 19 nt, Artificial Sequence
  Description of Artificial Sequence: Synthetic oligonucleotide
  Sense Strand Starting at position 288 of SEQ ID NO: 316003
cucuaacauuggguaacaa

SEQ ID NO: 341480 - RNA, 19 nt, Artificial Sequence
  Description of Artificial Sequence: Synthetic oligonucleotide
  Antisense Strand to SEQ ID NO: 341479
uuguuacccaauguuagag

SEQ ID NO: 341481 - RNA, 19 nt, Artificial Sequence
  Description of Artificial Sequence: Synthetic oligonucleotide
  Sense Strand Starting at position 288 of SEQ ID NO: 316160
uguuauaaaggccacuaaa

SEQ ID NO: 341482 - RNA, 19 nt, Artificial Sequence
  Description of Artificial Sequence: Synthetic oligonucleotide
  Antisense Strand to SEQ ID NO: 341481
uuuaguggccuuuauaaca

SEQ ID NO: 341483 - RNA, 19 nt, Artificial Sequence
  Description of Artificial Sequence: Synthetic oligonucleotide
  Sense Strand Starting at position 288 of SEQ ID NO: 316558
uagugaugugauuaagguc

SEQ ID NO: 341484 - RNA, 19 nt, Artificial Sequence
  Description of Artificial Sequence: Synthetic oligonucleotide
  Antisense Strand to SEQ ID NO: 341483
gaccuuaaucacaucacua

SEQ ID NO: 341485 - RNA, 19 nt, Artificial Sequence
  Description of Artificial Sequence: Synthetic oligonucleotide
  Sense Strand Starting at position 288 of SEQ ID NO: 316789
ugaucuagccauugagaug

SEQ ID NO: 341486 - RNA, 19 nt, Artificial Sequence
  Description of Artificial Sequence: Synthetic oligonucleotide
  Antisense Strand to SEQ ID NO: 341485
caucucaauggcuagauca

SEQ ID NO: 341487 - RNA, 19 nt, Artificial Sequence
  Description of Artificial Sequence: Synthetic oligonucleotide
  Sense Strand Starting at position 288 of SEQ ID NO: 316805
augagaugucaguagaagu

SEQ ID NO: 341488 - RNA, 19 nt, Artificial Sequence
  Description of Artificial Sequence: Synthetic oligonucleotide
  Antisense Strand to SEQ ID NO: 341487
acuucuacugacaucucau

SEQ ID NO: 341489 - RNA, 19 nt, Artificial Sequence
  Description of Artificial Sequence: Synthetic oligonucleotide
  Sense Strand Starting at position 288 of SEQ ID NO: 316908
uucuuucuaccugaagguu

SEQ ID NO: 341490 - RNA, 19 nt, Artificial Sequence
  Description of Artificial Sequence: Synthetic oligonucleotide
  Antisense Strand to SEQ ID NO: 341489
aaccuucagguagaaagaa

SEQ ID NO: 341491 - RNA, 19 nt, Artificial Sequence
  Description of Artificial Sequence: Synthetic oligonucleotide
  Sense Strand Starting at position 288 of SEQ ID NO: 316976
gcagguuaagcagaaagau

SEQ ID NO: 341492 - RNA, 19 nt, Artificial Sequence
  Description of Artificial Sequence: Synthetic oligonucleotide
  Antisense Strand to SEQ ID NO: 341491
aucuuucugcuuaaccugc

SEQ ID NO: 341493 - RNA, 19 nt, Artificial Sequence
  Description of Artificial Sequence: Synthetic oligonucleotide
  Sense Strand Starting at position 288 of SEQ ID NO: 317329
ggguauuaaugauucccaa

SEQ ID NO: 341494 - RNA, 19 nt, Artificial Sequence
  Description of Artificial Sequence: Synthetic oligonucleotide
  Antisense Strand to SEQ ID NO: 341493
uugggaaucauuaauaccc

SEQ ID NO: 341495 - RNA, 19 nt, Artificial Sequence
  Description of Artificial Sequence: Synthetic oligonucleotide
  Sense Strand Starting at position 288 of SEQ ID NO: 317453
cuagaaacuuggcugaaug

SEQ ID NO: 341496 - RNA, 19 nt, Artificial Sequence
  Description of Artificial Sequence: Synthetic oligonucleotide
  Antisense Strand to SEQ ID NO: 341495
cauucagccaaguuucuag

SEQ ID NO: 341497 - RNA, 19 nt, Artificial Sequence
  Description of Artificial Sequence: Synthetic oligonucleotide
  Sense Strand Starting at position 288 of SEQ ID NO: 317454
uagaaacuuggcugaauga

SEQ ID NO: 341498 - RNA, 19 nt, Artificial Sequence
  Description of Artificial Sequence: Synthetic oligonucleotide
  Antisense Strand to SEQ ID NO: 341497
ucauucagccaaguuucua

SEQ ID NO: 341499 - RNA, 19 nt, Artificial Sequence
  Description of Artificial Sequence: Synthetic oligonucleotide
  Sense Strand Starting at position 288 of SEQ ID NO: 317582
aaaucuacaucguugaaga

SEQ ID NO: 341500 - RNA, 19 nt, Artificial Sequence
  Description of Artificial Sequence: Synthetic oligonucleotide
  Antisense Strand to SEQ ID NO: 341499
ucuucaacgauguagauuu

SEQ ID NO: 341501 - RNA, 19 nt, Artificial Sequence
  Description of Artificial Sequence: Synthetic oligonucleotide
  Sense Strand Starting at position 288 of SEQ ID NO: 317583
aaucuacaucguugaagag

SEQ ID NO: 341502 - RNA, 19 nt, Artificial Sequence
  Description of Artificial Sequence: Synthetic oligonucleotide
  Antisense Strand to SEQ ID NO: 341501
cucuucaacgauguagauu

SEQ ID NO: 341503 - RNA, 19 nt, Artificial Sequence
  Description of Artificial Sequence: Synthetic oligonucleotide
  Sense Strand Starting at position 288 of SEQ ID NO: 317649
ugaaauuccaugggugagu

SEQ ID NO: 341504 - RNA, 19 nt, Artificial Sequence
  Description of Artificial Sequence: Synthetic oligonucleotide
  Antisense Strand to SEQ ID NO: 341503
acucacccauggaauuuca

SEQ ID NO: 341505 - RNA, 19 nt, Artificial Sequence
  Description of Artificial Sequence: Synthetic oligonucleotide
  Sense Strand Starting at position 288 of SEQ ID NO: 317681
gguccauccuugcuuauuu

SEQ ID NO: 341506 - RNA, 19 nt, Artificial Sequence
  Description of Artificial Sequence: Synthetic oligonucleotide
  Antisense Strand to SEQ ID NO: 341505
aaauaagcaaggauggacc

SEQ ID NO: 341507 - RNA, 19 nt, Artificial Sequence
  Description of Artificial Sequence: Synthetic oligonucleotide
  Sense Strand Starting at position 288 of SEQ ID NO: 317789
ucuccauaagcuuggaaau

SEQ ID NO: 341508 - RNA, 19 nt, Artificial Sequence
  Description of Artificial Sequence: Synthetic oligonucleotide
  Antisense Strand to SEQ ID NO: 341507
auuuccaagcuuauggaga

SEQ ID NO: 341509 - RNA, 19 nt, Artificial Sequence
  Description of Artificial Sequence: Synthetic oligonucleotide
  Sense Strand Starting at position 288 of SEQ ID NO: 317790
cuccauaagcuuggaaaua

SEQ ID NO: 341510 - RNA, 19 nt, Artificial Sequence
  Description of Artificial Sequence: Synthetic oligonucleotide
  Antisense Strand to SEQ ID NO: 341509
uauuuccaagcuuauggag

SEQ ID NO: 341511 - RNA, 19 nt, Artificial Sequence
  Description of Artificial Sequence: Synthetic oligonucleotide
  Sense Strand Starting at position 288 of SEQ ID NO: 317885
ggcgguuuggaugagaauu

SEQ ID NO: 341512 - RNA, 19 nt, Artificial Sequence
  Description of Artificial Sequence: Synthetic oligonucleotide
  Antisense Strand to SEQ ID NO: 341511
aauucucauccaaaccgcc

SEQ ID NO: 341513 - RNA, 19 nt, Artificial Sequence
  Description of Artificial Sequence: Synthetic oligonucleotide
  Sense Strand Starting at position 288 of SEQ ID NO: 317893
ggaugagaauuauucucuu

SEQ ID NO: 341514 - RNA, 19 nt, Artificial Sequence
  Description of Artificial Sequence: Synthetic oligonucleotide
  Antisense Strand to SEQ ID NO: 341513
aagagaauaauucucaucc

SEQ ID NO: 341515 - RNA, 19 nt, Artificial Sequence
  Description of Artificial Sequence: Synthetic oligonucleotide
  Sense Strand Starting at position 288 of SEQ ID NO: 317932
augacaucuuuacugguau

SEQ ID NO: 341516 - RNA, 19 nt, Artificial Sequence
  Description of Artificial Sequence: Synthetic oligonucleotide
  Antisense Strand to SEQ ID NO: 341515
auaccaguaaagaugucau

SEQ ID NO: 341517 - RNA, 19 nt, Artificial Sequence
  Description of Artificial Sequence: Synthetic oligonucleotide
  Sense Strand Starting at position 288 of SEQ ID NO: 317939
cuuuacugguaucugaaau

SEQ ID NO: 341518 - RNA, 19 nt, Artificial Sequence
  Description of Artificial Sequence: Synthetic oligonucleotide
  Antisense Strand to SEQ ID NO: 341517
auuucagauaccaguaaag

SEQ ID NO: 341519 - RNA, 19 nt, Artificial Sequence
  Description of Artificial Sequence: Synthetic oligonucleotide
  Sense Strand Starting at position 288 of SEQ ID NO: 318272
gauguuuauggugaccuga

SEQ ID NO: 341520 - RNA, 19 nt, Artificial Sequence
  Description of Artificial Sequence: Synthetic oligonucleotide
  Antisense Strand to SEQ ID NO: 341519
ucaggucaccauaaacauc

SEQ ID NO: 341521 - RNA, 19 nt, Artificial Sequence
  Description of Artificial Sequence: Synthetic oligonucleotide
  Sense Strand Starting at position 288 of SEQ ID NO: 318281
ggugaccugaauuguuaag

SEQ ID NO: 341522 - RNA, 19 nt, Artificial Sequence
  Description of Artificial Sequence: Synthetic oligonucleotide
  Antisense Strand to SEQ ID NO: 341521
cuuaacaauucaggucacc

SEQ ID NO: 341523 - RNA, 19 nt, Artificial Sequence
  Description of Artificial Sequence: Synthetic oligonucleotide
  Sense Strand Starting at position 288 of SEQ ID NO: 318283
ugaccugaauuguuaagag

SEQ ID NO: 341524 - RNA, 19 nt, Artificial Sequence
  Description of Artificial Sequence: Synthetic oligonucleotide
  Antisense Strand to SEQ ID NO: 341523
cucuuaacaauucagguca

SEQ ID NO: 341525 - RNA, 19 nt, Artificial Sequence
  Description of Artificial Sequence: Synthetic oligonucleotide
  Sense Strand Starting at position 288 of SEQ ID NO: 318318
cugaguuacugauuaagaa

SEQ ID NO: 341526 - RNA, 19 nt, Artificial Sequence
  Description of Artificial Sequence: Synthetic oligonucleotide
  Antisense Strand to SEQ ID NO: 341525
uucuuaaucaguaacucag

SEQ ID NO: 341527 - RNA, 19 nt, Artificial Sequence
  Description of Artificial Sequence: Synthetic oligonucleotide
  Sense Strand Starting at position 288 of SEQ ID NO: 318400
ucacuaagaucagccuaga

SEQ ID NO: 341528 - RNA, 19 nt, Artificial Sequence
  Description of Artificial Sequence: Synthetic oligonucleotide
  Antisense Strand to SEQ ID NO: 341527
ucuaggcugaucuuaguga

SEQ ID NO: 341529 - RNA, 19 nt, Artificial Sequence
  Description of Artificial Sequence: Synthetic oligonucleotide
  Sense Strand Starting at position 288 of SEQ ID NO: 318403
cuaagaucagccuagauuc

SEQ ID NO: 341530 - RNA, 19 nt, Artificial Sequence
  Description of Artificial Sequence: Synthetic oligonucleotide
  Antisense Strand to SEQ ID NO: 341529
gaaucuaggcugaucuuag

SEQ ID NO: 341531 - RNA, 19 nt, Artificial Sequence
  Description of Artificial Sequence: Synthetic oligonucleotide
  Sense Strand Starting at position 288 of SEQ ID NO: 318585
aaagauguucuaggcaaau

SEQ ID NO: 341532 - RNA, 19 nt, Artificial Sequence
  Description of Artificial Sequence: Synthetic oligonucleotide
  Antisense Strand to SEQ ID NO: 341531
auuugccuagaacaucuuu

SEQ ID NO: 341533 - RNA, 19 nt, Artificial Sequence
  Description of Artificial Sequence: Synthetic oligonucleotide
  Sense Strand Starting at position 288 of SEQ ID NO: 318587
agauguucuaggcaaaugu

SEQ ID NO: 341534 - RNA, 19 nt, Artificial Sequence
  Description of Artificial Sequence: Synthetic oligonucleotide
  Antisense Strand to SEQ ID NO: 341533
acauuugccuagaacaucu

SEQ ID NO: 341535 - RNA, 19 nt, Artificial Sequence
  Description of Artificial Sequence: Synthetic oligonucleotide
  Sense Strand Starting at position 288 of SEQ ID NO: 318626
ggagauuaagcccaaguuu

SEQ ID NO: 341536 - RNA, 19 nt, Artificial Sequence
  Description of Artificial Sequence: Synthetic oligonucleotide
  Antisense Strand to SEQ ID NO: 341535
aaacuugggcuuaaucucc

SEQ ID NO: 341537 - RNA, 19 nt, Artificial Sequence
  Description of Artificial Sequence: Synthetic oligonucleotide
  Sense Strand Starting at position 288 of SEQ ID NO: 318747
cuacauuggcuauaucaag

SEQ ID NO: 341538 - RNA, 19 nt, Artificial Sequence
  Description of Artificial Sequence: Synthetic oligonucleotide
  Antisense Strand to SEQ ID NO: 341537
cuugauauagccaauguag

SEQ ID NO: 341539 - RNA, 19 nt, Artificial Sequence
  Description of Artificial Sequence: Synthetic oligonucleotide
  Sense Strand Starting at position 288 of SEQ ID NO: 318753
uggcuauaucaagaguauc

SEQ ID NO: 341540 - RNA, 19 nt, Artificial Sequence
  Description of Artificial Sequence: Synthetic oligonucleotide
  Antisense Strand to SEQ ID NO: 341539
gauacucuugauauagcca

SEQ ID NO: 341541 - RNA, 19 nt, Artificial Sequence
  Description of Artificial Sequence: Synthetic oligonucleotide
  Sense Strand Starting at position 288 of SEQ ID NO: 318756
cuauaucaagaguaucagu

SEQ ID NO: 341542 - RNA, 19 nt, Artificial Sequence
  Description of Artificial Sequence: Synthetic oligonucleotide
  Antisense Strand to SEQ ID NO: 341541
acugauacucuugauauag

SEQ ID NO: 341543 - RNA, 19 nt, Artificial Sequence
  Description of Artificial Sequence: Synthetic oligonucleotide
  Sense Strand Starting at position 288 of SEQ ID NO: 318769
aucagucuaucagcaagaa

SEQ ID NO: 341544 - RNA, 19 nt, Artificial Sequence
  Description of Artificial Sequence: Synthetic oligonucleotide
  Antisense Strand to SEQ ID NO: 341543
uucuugcugauagacugau

SEQ ID NO: 341545 - RNA, 19 nt, Artificial Sequence
  Description of Artificial Sequence: Synthetic oligonucleotide
  Sense Strand Starting at position 288 of SEQ ID NO: 318962
uuauuuguguugcuuuaac

SEQ ID NO: 341546 - RNA, 19 nt, Artificial Sequence
  Description of Artificial Sequence: Synthetic oligonucleotide
  Antisense Strand to SEQ ID NO: 341545
guuaaagcaacacaaauaa

SEQ ID NO: 341547 - RNA, 19 nt, Artificial Sequence
  Description of Artificial Sequence: Synthetic oligonucleotide
  Sense Strand Starting at position 289 of SEQ ID NO: 315245
cgagcaaucucugccuugu

SEQ ID NO: 341548 - RNA, 19 nt, Artificial Sequence
  Description of Artificial Sequence: Synthetic oligonucleotide
  Antisense Strand to SEQ ID NO: 341547
acaaggcagagauugcucg

SEQ ID NO: 341549 - RNA, 19 nt, Artificial Sequence
  Description of Artificial Sequence: Synthetic oligonucleotide
  Sense Strand Starting at position 289 of SEQ ID NO: 315248
gcaaucucugccuuguagu

SEQ ID NO: 341550 - RNA, 19 nt, Artificial Sequence
  Description of Artificial Sequence: Synthetic oligonucleotide
  Antisense Strand to SEQ ID NO: 341549
acuacaaggcagagauugc

SEQ ID NO: 341551 - RNA, 19 nt, Artificial Sequence
  Description of Artificial Sequence: Synthetic oligonucleotide
  Sense Strand Starting at position 289 of SEQ ID NO: 315259
cuuguagugggucaucagu

SEQ ID NO: 341552 - RNA, 19 nt, Artificial Sequence
  Description of Artificial Sequence: Synthetic oligonucleotide
  Antisense Strand to SEQ ID NO: 341551
acugaugacccacuacaag

SEQ ID NO: 341553 - RNA, 19 nt, Artificial Sequence
  Description of Artificial Sequence: Synthetic oligonucleotide
  Sense Strand Starting at position 289 of SEQ ID NO: 315481
ugggaggaguucugagagu

SEQ ID NO: 341554 - RNA, 19 nt, Artificial Sequence
  Description of Artificial Sequence: Synthetic oligonucleotide
  Antisense Strand to SEQ ID NO: 341553
acucucagaacuccuccca

SEQ ID NO: 341555 - RNA, 19 nt, Artificial Sequence
  Description of Artificial Sequence: Synthetic oligonucleotide
  Sense Strand Starting at position 289 of SEQ ID NO: 315482
gggaggaguucugagaguc

SEQ ID NO: 341556 - RNA, 19 nt, Artificial Sequence
  Description of Artificial Sequence: Synthetic oligonucleotide
  Antisense Strand to SEQ ID NO: 341555
gacucucagaacuccuccc

SEQ ID NO: 341557 - RNA, 19 nt, Artificial Sequence
  Description of Artificial Sequence: Synthetic oligonucleotide
  Sense Strand Starting at position 289 of SEQ ID NO: 315488
aguucugagagucguugaa

SEQ ID NO: 341558 - RNA, 19 nt, Artificial Sequence
  Description of Artificial Sequence: Synthetic oligonucleotide
  Antisense Strand to SEQ ID NO: 341557
uucaacgacucucagaacu

SEQ ID NO: 341559 - RNA, 19 nt, Artificial Sequence
  Description of Artificial Sequence: Synthetic oligonucleotide
  Sense Strand Starting at position 289 of SEQ ID NO: 315490
uucugagagucguugaaca

SEQ ID NO: 341560 - RNA, 19 nt, Artificial Sequence
  Description of Artificial Sequence: Synthetic oligonucleotide
  Antisense Strand to SEQ ID NO: 341559
uguucaacgacucucagaa

SEQ ID NO: 341561 - RNA, 19 nt, Artificial Sequence
  Description of Artificial Sequence: Synthetic oligonucleotide
  Sense Strand Starting at position 289 of SEQ ID NO: 315492
cugagagucguugaacaca

SEQ ID NO: 341562 - RNA, 19 nt, Artificial Sequence
  Description of Artificial Sequence: Synthetic oligonucleotide
  Antisense Strand to SEQ ID NO: 341561
uguguucaacgacucucag

SEQ ID NO: 341563 - RNA, 19 nt, Artificial Sequence
  Description of Artificial Sequence: Synthetic oligonucleotide
  Sense Strand Starting at position 289 of SEQ ID NO: 315532
ccgccaacccucgaggaaa

SEQ ID NO: 341564 - RNA, 19 nt, Artificial Sequence
  Description of Artificial Sequence: Synthetic oligonucleotide
  Antisense Strand to SEQ ID NO: 341563
uuuccucgaggguuggcgg

SEQ ID NO: 341565 - RNA, 19 nt, Artificial Sequence
  Description of Artificial Sequence: Synthetic oligonucleotide
  Sense Strand Starting at position 289 of SEQ ID NO: 315588
ccacguuguaccugggaaa

SEQ ID NO: 341566 - RNA, 19 nt, Artificial Sequence
  Description of Artificial Sequence: Synthetic oligonucleotide
  Antisense Strand to SEQ ID NO: 341565
uuucccagguacaacgugg

SEQ ID NO: 341567 - RNA, 19 nt, Artificial Sequence
  Description of Artificial Sequence: Synthetic oligonucleotide
  Sense Strand Starting at position 289 of SEQ ID NO: 315662
ggcaccgagucuuggugaa

SEQ ID NO: 341568 - RNA, 19 nt, Artificial Sequence
  Description of Artificial Sequence: Synthetic oligonucleotide
  Antisense Strand to SEQ ID NO: 341567
uucaccaagacucggugcc

SEQ ID NO: 341569 - RNA, 19 nt, Artificial Sequence
  Description of Artificial Sequence: Synthetic oligonucleotide
  Sense Strand Starting at position 289 of SEQ ID NO: 315755
ggcugaguagucagacggu

SEQ ID NO: 341570 - RNA, 19 nt, Artificial Sequence
  Description of Artificial Sequence: Synthetic oligonucleotide
  Antisense Strand to SEQ ID NO: 341569
accgucugacuacucagcc

SEQ ID NO: 341571 - RNA, 19 nt, Artificial Sequence
  Description of Artificial Sequence: Synthetic oligonucleotide
  Sense Strand Starting at position 289 of SEQ ID NO: 315758
ugaguagucagacggucaa

SEQ ID NO: 341572 - RNA, 19 nt, Artificial Sequence
  Description of Artificial Sequence: Synthetic oligonucleotide
  Antisense Strand to SEQ ID NO: 341571
uugaccgucugacuacuca

SEQ ID NO: 341573 - RNA, 19 nt, Artificial Sequence
  Description of Artificial Sequence: Synthetic oligonucleotide
  Sense Strand Starting at position 289 of SEQ ID NO: 316004
gccagaauuccgggcggau

SEQ ID NO: 341574 - RNA, 19 nt, Artificial Sequence
  Description of Artificial Sequence: Synthetic oligonucleotide
  Antisense Strand to SEQ ID NO: 341573
auccgcccggaauucuggc

SEQ ID NO: 341575 - RNA, 19 nt, Artificial Sequence
  Description of Artificial Sequence: Synthetic oligonucleotide
  Sense Strand Starting at position 289 of SEQ ID NO: 316465
cuagcagguuccuagagaa

SEQ ID NO: 341576 - RNA, 19 nt, Artificial Sequence
  Description of Artificial Sequence: Synthetic oligonucleotide
  Antisense Strand to SEQ ID NO: 341575
uucucuaggaaccugcuag

SEQ ID NO: 341577 - RNA, 19 nt, Artificial Sequence
  Description of Artificial Sequence: Synthetic oligonucleotide
  Sense Strand Starting at position 289 of SEQ ID NO: 316641
ggaaaucgcuguccaggaa

SEQ ID NO: 341578 - RNA, 19 nt, Artificial Sequence
  Description of Artificial Sequence: Synthetic oligonucleotide
  Antisense Strand to SEQ ID NO: 341577
uuccuggacagcgauuucc

SEQ ID NO: 341579 - RNA, 19 nt, Artificial Sequence
  Description of Artificial Sequence: Synthetic oligonucleotide
  Sense Strand Starting at position 289 of SEQ ID NO: 316761
accggauaucugcgaccca

SEQ ID NO: 341580 - RNA, 19 nt, Artificial Sequence
  Description of Artificial Sequence: Synthetic oligonucleotide
  Antisense Strand to SEQ ID NO: 341579
ugggucgcagauauccggu

SEQ ID NO: 341581 - RNA, 19 nt, Artificial Sequence
  Description of Artificial Sequence: Synthetic oligonucleotide
  Sense Strand Starting at position 289 of SEQ ID NO: 317406
ccuagaguuguccaugaug

SEQ ID NO: 341582 - RNA, 19 nt, Artificial Sequence
  Description of Artificial Sequence: Synthetic oligonucleotide
  Antisense Strand to SEQ ID NO: 341581
caucauggacaacucuagg

SEQ ID NO: 341583 - RNA, 19 nt, Artificial Sequence
  Description of Artificial Sequence: Synthetic oligonucleotide
  Sense Strand Starting at position 289 of SEQ ID NO: 317408
uagaguuguccaugaugcu

SEQ ID NO: 341584 - RNA, 19 nt, Artificial Sequence
  Description of Artificial Sequence: Synthetic oligonucleotide
  Antisense Strand to SEQ ID NO: 341583
agcaucauggacaacucua

SEQ ID NO: 341585 - RNA, 19 nt, Artificial Sequence
  Description of Artificial Sequence: Synthetic oligonucleotide
  Sense Strand Starting at position 289 of SEQ ID NO: 317414
uguccaugaugcugaaaca

SEQ ID NO: 341586 - RNA, 19 nt, Artificial Sequence
  Description of Artificial Sequence: Synthetic oligonucleotide
  Antisense Strand to SEQ ID NO: 341585
uguuucagcaucauggaca

SEQ ID NO: 341587 - RNA, 19 nt, Artificial Sequence
  Description of Artificial Sequence: Synthetic oligonucleotide
  Sense Strand Starting at position 289 of SEQ ID NO: 317415
guccaugaugcugaaacau

SEQ ID NO: 341588 - RNA, 19 nt, Artificial Sequence
  Description of Artificial Sequence: Synthetic oligonucleotide
  Antisense Strand to SEQ ID NO: 341587
auguuucagcaucauggac

SEQ ID NO: 341589 - RNA, 19 nt, Artificial Sequence
  Description of Artificial Sequence: Synthetic oligonucleotide
  Sense Strand Starting at position 289 of SEQ ID NO: 317453
cuggaauuguugccucuua

SEQ ID NO: 341590 - RNA, 19 nt, Artificial Sequence
  Description of Artificial Sequence: Synthetic oligonucleotide
  Antisense Strand to SEQ ID NO: 341589
uaagaggcaacaauuccag

SEQ ID NO: 341591 - RNA, 19 nt, Artificial Sequence
  Description of Artificial Sequence: Synthetic oligonucleotide
  Sense Strand Starting at position 289 of SEQ ID NO: 317474
gagccacucccuuaguguu

SEQ ID NO: 341592 - RNA, 19 nt, Artificial Sequence
  Description of Artificial Sequence: Synthetic oligonucleotide
  Antisense Strand to SEQ ID NO: 341591
aacacuaagggaguggcuc

SEQ ID NO: 341593 - RNA, 19 nt, Artificial Sequence
  Description of Artificial Sequence: Synthetic oligonucleotide
  Sense Strand Starting at position 289 of SEQ ID NO: 317482
cccuuaguguuucugucuu

SEQ ID NO: 341594 - RNA, 19 nt, Artificial Sequence
  Description of Artificial Sequence: Synthetic oligonucleotide
  Antisense Strand to SEQ ID NO: 341593
aagacagaaacacuaaggg

SEQ ID NO: 341595 - RNA, 19 nt, Artificial Sequence
  Description of Artificial Sequence: Synthetic oligonucleotide
  Sense Strand Starting at position 289 of SEQ ID NO: 317515
cugccuaggucucugaaua

SEQ ID NO: 341596 - RNA, 19 nt, Artificial Sequence
  Description of Artificial Sequence: Synthetic oligonucleotide
  Antisense Strand to SEQ ID NO: 341595
uauucagagaccuaggcag

SEQ ID NO: 341597 - RNA, 19 nt, Artificial Sequence
  Description of Artificial Sequence: Synthetic oligonucleotide
  Sense Strand Starting at position 289 of SEQ ID NO: 317516
ugccuaggucucugaauag

SEQ ID NO: 341598 - RNA, 19 nt, Artificial Sequence
  Description of Artificial Sequence: Synthetic oligonucleotide
  Antisense Strand to SEQ ID NO: 341597
cuauucagagaccuaggca

SEQ ID NO: 341599 - RNA, 19 nt, Artificial Sequence
  Description of Artificial Sequence: Synthetic oligonucleotide
  Sense Strand Starting at position 289 of SEQ ID NO: 317724
ugauuuguccucuggguau

SEQ ID NO: 341600 - RNA, 19 nt, Artificial Sequence
  Description of Artificial Sequence: Synthetic oligonucleotide
  Antisense Strand to SEQ ID NO: 341599
auacccagaggacaaauca

SEQ ID NO: 341601 - RNA, 19 nt, Artificial Sequence
  Description of Artificial Sequence: Synthetic oligonucleotide
  Sense Strand Starting at position 289 of SEQ ID NO: 317743
ucacaaugaugacaguaaa

SEQ ID NO: 341602 - RNA, 19 nt, Artificial Sequence
  Description of Artificial Sequence: Synthetic oligonucleotide
  Antisense Strand to SEQ ID NO: 341601
uuuacugucaucauuguga

SEQ ID NO: 341603 - RNA, 19 nt, Artificial Sequence
  Description of Artificial Sequence: Synthetic oligonucleotide
  Sense Strand Starting at position 289 of SEQ ID NO: 317800
gccuuuaacccucacgacu

SEQ ID NO: 341604 - RNA, 19 nt, Artificial Sequence
  Description of Artificial Sequence: Synthetic oligonucleotide
  Antisense Strand to SEQ ID NO: 341603
agucgugaggguuaaaggc

SEQ ID NO: 341605 - RNA, 19 nt, Artificial Sequence
  Description of Artificial Sequence: Synthetic oligonucleotide
  Sense Strand Starting at position 289 of SEQ ID NO: 317814
cgacuuucauggcguuaca

SEQ ID NO: 341606 - RNA, 19 nt, Artificial Sequence
  Description of Artificial Sequence: Synthetic oligonucleotide
  Antisense Strand to SEQ ID NO: 341605
uguaacgccaugaaagucg

SEQ ID NO: 341607 - RNA, 19 nt, Artificial Sequence
  Description of Artificial Sequence: Synthetic oligonucleotide
  Sense Strand Starting at position 289 of SEQ ID NO: 317852
gacgcaaucuacuguaggu

SEQ ID NO: 341608 - RNA, 19 nt, Artificial Sequence
  Description of Artificial Sequence: Synthetic oligonucleotide
  Antisense Strand to SEQ ID NO: 341607
accuacaguagauugcguc

SEQ ID NO: 341609 - RNA, 19 nt, Artificial Sequence
  Description of Artificial Sequence: Synthetic oligonucleotide
  Sense Strand Starting at position 289 of SEQ ID NO: 317854
cgcaaucuacuguagguua

SEQ ID NO: 341610 - RNA, 19 nt, Artificial Sequence
  Description of Artificial Sequence: Synthetic oligonucleotide
  Antisense Strand to SEQ ID NO: 341609
uaaccuacaguagauugcg

SEQ ID NO: 341611 - RNA, 19 nt, Artificial Sequence
  Description of Artificial Sequence: Synthetic oligonucleotide
  Sense Strand Starting at position 289 of SEQ ID NO: 318041
ugaagauccuggucaggua

SEQ ID NO: 341612 - RNA, 19 nt, Artificial Sequence
  Description of Artificial Sequence: Synthetic oligonucleotide
  Antisense Strand to SEQ ID NO: 341611
uaccugaccaggaucuuca

SEQ ID NO: 341613 - RNA, 19 nt, Artificial Sequence
  Description of Artificial Sequence: Synthetic oligonucleotide
  Sense Strand Starting at position 289 of SEQ ID NO: 318353
gcuccuaauucccaggcaa

SEQ ID NO: 341614 - RNA, 19 nt, Artificial Sequence
  Description of Artificial Sequence: Synthetic oligonucleotide
  Antisense Strand to SEQ ID NO: 341613
uugccugggaauuaggagc

SEQ ID NO: 341615 - RNA, 19 nt, Artificial Sequence
  Description of Artificial Sequence: Synthetic oligonucleotide
  Sense Strand Starting at position 289 of SEQ ID NO: 318477
ucucaacagucuugagugu

SEQ ID NO: 341616 - RNA, 19 nt, Artificial Sequence
  Description of Artificial Sequence: Synthetic oligonucleotide
  Antisense Strand to SEQ ID NO: 341615
acacucaagacuguugaga

SEQ ID NO: 341617 - RNA, 19 nt, Artificial Sequence
  Description of Artificial Sequence: Synthetic oligonucleotide
  Sense Strand Starting at position 289 of SEQ ID NO: 318521
gcucaugaguggagaggua

SEQ ID NO: 341618 - RNA, 19 nt, Artificial Sequence
  Description of Artificial Sequence: Synthetic oligonucleotide
  Antisense Strand to SEQ ID NO: 341617
uaccucuccacucaugagc

SEQ ID NO: 341619 - RNA, 19 nt, Artificial Sequence
  Description of Artificial Sequence: Synthetic oligonucleotide
  Sense Strand Starting at position 289 of SEQ ID NO: 318536
gguauaccugucgccaguu

SEQ ID NO: 341620 - RNA, 19 nt, Artificial Sequence
  Description of Artificial Sequence: Synthetic oligonucleotide
  Antisense Strand to SEQ ID NO: 341619
aacuggcgacagguauacc

SEQ ID NO: 341621 - RNA, 19 nt, Artificial Sequence
  Description of Artificial Sequence: Synthetic oligonucleotide
  Sense Strand Starting at position 289 of SEQ ID NO: 318548
gccaguucucuuccuguuu

SEQ ID NO: 341622 - RNA, 19 nt, Artificial Sequence
  Description of Artificial Sequence: Synthetic oligonucleotide
  Antisense Strand to SEQ ID NO: 341621
aaacaggaagagaacuggc

SEQ ID NO: 341623 - RNA, 19 nt, Artificial Sequence
  Description of Artificial Sequence: Synthetic oligonucleotide
  Sense Strand Starting at position 289 of SEQ ID NO: 318614
augagaaccuuccuaguag

SEQ ID NO: 341624 - RNA, 19 nt, Artificial Sequence
  Description of Artificial Sequence: Synthetic oligonucleotide
  Antisense Strand to SEQ ID NO: 341623
cuacuaggaagguucucau

SEQ ID NO: 341625 - RNA, 19 nt, Artificial Sequence
  Description of Artificial Sequence: Synthetic oligonucleotide
  Sense Strand Starting at position 289 of SEQ ID NO: 318649
accaaaugaugacacaaga

SEQ ID NO: 341626 - RNA, 19 nt, Artificial Sequence
  Description of Artificial Sequence: Synthetic oligonucleotide
  Antisense Strand to SEQ ID NO: 341625
ucuugugucaucauuuggu

SEQ ID NO: 341627 - RNA, 19 nt, Artificial Sequence
  Description of Artificial Sequence: Synthetic oligonucleotide
  Sense Strand Starting at position 290 of SEQ ID NO: 315266
agaaccuuagagugaguga

SEQ ID NO: 341628 - RNA, 19 nt, Artificial Sequence
  Description of Artificial Sequence: Synthetic oligonucleotide
  Antisense Strand to SEQ ID NO: 341627
ucacucacucuaagguucu

SEQ ID NO: 341629 - RNA, 19 nt, Artificial Sequence
  Description of Artificial Sequence: Synthetic oligonucleotide
  Sense Strand Starting at position 290 of SEQ ID NO: 315277
gugagugagacgcacauua

SEQ ID NO: 341630 - RNA, 19 nt, Artificial Sequence
  Description of Artificial Sequence: Synthetic oligonucleotide
  Antisense Strand to SEQ ID NO: 341629
uaaugugcgucucacucac

SEQ ID NO: 341631 - RNA, 19 nt, Artificial Sequence
  Description of Artificial Sequence: Synthetic oligonucleotide
  Sense Strand Starting at position 290 of SEQ ID NO: 315279
gagugagacgcacauuagu

SEQ ID NO: 341632 - RNA, 19 nt, Artificial Sequence
  Description of Artificial Sequence: Synthetic oligonucleotide
  Antisense Strand to SEQ ID NO: 341631
acuaaugugcgucucacuc

SEQ ID NO: 341633 - RNA, 19 nt, Artificial Sequence
  Description of Artificial Sequence: Synthetic oligonucleotide
  Sense Strand Starting at position 290 of SEQ ID NO: 315500
gaucaaacugcugacaagu

SEQ ID NO: 341634 - RNA, 19 nt, Artificial Sequence
  Description of Artificial Sequence: Synthetic oligonucleotide
  Antisense Strand to SEQ ID NO: 341633
acuugucagcaguuugauc

SEQ ID NO: 341635 - RNA, 19 nt, Artificial Sequence
  Description of Artificial Sequence: Synthetic oligonucleotide
  Sense Strand Starting at position 290 of SEQ ID NO: 315740
gguuguguccugguucagu

SEQ ID NO: 341636 - RNA, 19 nt, Artificial Sequence
  Description of Artificial Sequence: Synthetic oligonucleotide
  Antisense Strand to SEQ ID NO: 341635
acugaaccaggacacaacc

SEQ ID NO: 341637 - RNA, 19 nt, Artificial Sequence
  Description of Artificial Sequence: Synthetic oligonucleotide
  Sense Strand Starting at position 290 of SEQ ID NO: 315806
uaauauagaugugucagua

SEQ ID NO: 341638 - RNA, 19 nt, Artificial Sequence
  Description of Artificial Sequence: Synthetic oligonucleotide
  Antisense Strand to SEQ ID NO: 341637
uacugacacaucuauauua

SEQ ID NO: 341639 - RNA, 19 nt, Artificial Sequence
  Description of Artificial Sequence: Synthetic oligonucleotide
  Sense Strand Starting at position 290 of SEQ ID NO: 315810
auagaugugucaguaucac

SEQ ID NO: 341640 - RNA, 19 nt, Artificial Sequence
  Description of Artificial Sequence: Synthetic oligonucleotide
  Antisense Strand to SEQ ID NO: 341639
gugauacugacacaucuau

SEQ ID NO: 341641 - RNA, 19 nt, Artificial Sequence
  Description of Artificial Sequence: Synthetic oligonucleotide
  Sense Strand Starting at position 290 of SEQ ID NO: 316022
aaaucugaugcgugcauuu

SEQ ID NO: 341642 - RNA, 19 nt, Artificial Sequence
  Description of Artificial Sequence: Synthetic oligonucleotide
  Antisense Strand to SEQ ID NO: 341641
aaaugcacgcaucagauuu

SEQ ID NO: 341643 - RNA, 19 nt, Artificial Sequence
  Description of Artificial Sequence: Synthetic oligonucleotide
  Sense Strand Starting at position 290 of SEQ ID NO: 316041
gguagugcuacugagaaac

SEQ ID NO: 341644 - RNA, 19 nt, Artificial Sequence
  Description of Artificial Sequence: Synthetic oligonucleotide
  Antisense Strand to SEQ ID NO: 341643
guuucucaguagcacuacc

SEQ ID NO: 341645 - RNA, 19 nt, Artificial Sequence
  Description of Artificial Sequence: Synthetic oligonucleotide
  Sense Strand Starting at position 290 of SEQ ID NO: 316067
auauaucuuguguaacagu

SEQ ID NO: 341646 - RNA, 19 nt, Artificial Sequence
  Description of Artificial Sequence: Synthetic oligonucleotide
  Antisense Strand to SEQ ID NO: 341645
acuguuacacaagauauau

SEQ ID NO: 341647 - RNA, 19 nt, Artificial Sequence
  Description of Artificial Sequence: Synthetic oligonucleotide
  Sense Strand Starting at position 290 of SEQ ID NO: 316129
aggaguuuagccgacacuu

SEQ ID NO: 341648 - RNA, 19 nt, Artificial Sequence
  Description of Artificial Sequence: Synthetic oligonucleotide
  Antisense Strand to SEQ ID NO: 341647
aagugucggcuaaacuccu

SEQ ID NO: 341649 - RNA, 19 nt, Artificial Sequence
  Description of Artificial Sequence: Synthetic oligonucleotide
  Sense Strand Starting at position 290 of SEQ ID NO: 316156
ggagaugaguucuuuccau

SEQ ID NO: 341650 - RNA, 19 nt, Artificial Sequence
  Description of Artificial Sequence: Synthetic oligonucleotide
  Antisense Strand to SEQ ID NO: 341649
auggaaagaacucaucucc

SEQ ID NO: 341651 - RNA, 19 nt, Artificial Sequence
  Description of Artificial Sequence: Synthetic oligonucleotide
  Sense Strand Starting at position 290 of SEQ ID NO: 316341
uuugaaaugcaguacuaca

SEQ ID NO: 341652 - RNA, 19 nt, Artificial Sequence
  Description of Artificial Sequence: Synthetic oligonucleotide
  Antisense Strand to SEQ ID NO: 341651
uguaguacugcauuucaaa

SEQ ID NO: 341653 - RNA, 19 nt, Artificial Sequence
  Description of Artificial Sequence: Synthetic oligonucleotide
  Sense Strand Starting at position 290 of SEQ ID NO: 316397
gcuagugacccuuucgugu

SEQ ID NO: 341654 - RNA, 19 nt, Artificial Sequence
  Description of Artificial Sequence: Synthetic oligonucleotide
  Antisense Strand to SEQ ID NO: 341653
acacgaaagggucacuagc

SEQ ID NO: 341655 - RNA, 19 nt, Artificial Sequence
  Description of Artificial Sequence: Synthetic oligonucleotide
  Sense Strand Starting at position 290 of SEQ ID NO: 316645
gggccugggucuccagaau

SEQ ID NO: 341656 - RNA, 19 nt, Artificial Sequence
  Description of Artificial Sequence: Synthetic oligonucleotide
  Antisense Strand to SEQ ID NO: 341655
auucuggagacccaggccc

SEQ ID NO: 341657 - RNA, 19 nt, Artificial Sequence
  Description of Artificial Sequence: Synthetic oligonucleotide
  Sense Strand Starting at position 290 of SEQ ID NO: 317123
ggccauguucccgcacuau

SEQ ID NO: 341658 - RNA, 19 nt, Artificial Sequence
  Description of Artificial Sequence: Synthetic oligonucleotide
  Antisense Strand to SEQ ID NO: 341657
auagugcgggaacauggcc

SEQ ID NO: 341659 - RNA, 19 nt, Artificial Sequence
  Description of Artificial Sequence: Synthetic oligonucleotide
  Sense Strand Starting at position 290 of SEQ ID NO: 317604
ggcucaggaucuguauaga

SEQ ID NO: 341660 - RNA, 19 nt, Artificial Sequence
  Description of Artificial Sequence: Synthetic oligonucleotide
  Antisense Strand to SEQ ID NO: 341659
ucuauacagauccugagcc

SEQ ID NO: 341661 - RNA, 19 nt, Artificial Sequence
  Description of Artificial Sequence: Synthetic oligonucleotide
  Sense Strand Starting at position 290 of SEQ ID NO: 317678
cugggaaacucuuugcuga

SEQ ID NO: 341662 - RNA, 19 nt, Artificial Sequence
  Description of Artificial Sequence: Synthetic oligonucleotide
  Antisense Strand to SEQ ID NO: 341661
ucagcaaagaguuucccag

SEQ ID NO: 341663 - RNA, 19 nt, Artificial Sequence
  Description of Artificial Sequence: Synthetic oligonucleotide
  Sense Strand Starting at position 290 of SEQ ID NO: 317679
ugggaaacucuuugcugaa

SEQ ID NO: 341664 - RNA, 19 nt, Artificial Sequence
  Description of Artificial Sequence: Synthetic oligonucleotide
  Antisense Strand to SEQ ID NO: 341663
uucagcaaagaguuuccca

SEQ ID NO: 341665 - RNA, 19 nt, Artificial Sequence
  Description of Artificial Sequence: Synthetic oligonucleotide
  Sense Strand Starting at position 290 of SEQ ID NO: 317680
gggaaacucuuugcugaag

SEQ ID NO: 341666 - RNA, 19 nt, Artificial Sequence
  Description of Artificial Sequence: Synthetic oligonucleotide
  Antisense Strand to SEQ ID NO: 341665
cuucagcaaagaguuuccc

SEQ ID NO: 341667 - RNA, 19 nt, Artificial Sequence
  Description of Artificial Sequence: Synthetic oligonucleotide
  Sense Strand Starting at position 290 of SEQ ID NO: 317728
uaguaauggacucggaaga

SEQ ID NO: 341668 - RNA, 19 nt, Artificial Sequence
  Description of Artificial Sequence: Synthetic oligonucleotide
  Antisense Strand to SEQ ID NO: 341667
ucuuccgaguccauuacua

SEQ ID NO: 341669 - RNA, 19 nt, Artificial Sequence
  Description of Artificial Sequence: Synthetic oligonucleotide
  Sense Strand Starting at position 290 of SEQ ID NO: 317754
ggagaagacuuucugugau

SEQ ID NO: 341670 - RNA, 19 nt, Artificial Sequence
  Description of Artificial Sequence: Synthetic oligonucleotide
  Antisense Strand to SEQ ID NO: 341669
aucacagaaagucuucucc

SEQ ID NO: 341671 - RNA, 19 nt, Artificial Sequence
  Description of Artificial Sequence: Synthetic oligonucleotide
  Sense Strand Starting at position 290 of SEQ ID NO: 317757
gaagacuuucugugaucga

SEQ ID NO: 341672 - RNA, 19 nt, Artificial Sequence
  Description of Artificial Sequence: Synthetic oligonucleotide
  Antisense Strand to SEQ ID NO: 341671
ucgaucacagaaagucuuc

SEQ ID NO: 341673 - RNA, 19 nt, Artificial Sequence
  Description of Artificial Sequence: Synthetic oligonucleotide
  Sense Strand Starting at position 290 of SEQ ID NO: 317785
acaguucuguccuuaagau

SEQ ID NO: 341674 - RNA, 19 nt, Artificial Sequence
  Description of Artificial Sequence: Synthetic oligonucleotide
  Antisense Strand to SEQ ID NO: 341673
aucuuaaggacagaacugu

SEQ ID NO: 341675 - RNA, 19 nt, Artificial Sequence
  Description of Artificial Sequence: Synthetic oligonucleotide
  Sense Strand Starting at position 290 of SEQ ID NO: 318135
uucuauagugccuacuuga

SEQ ID NO: 341676 - RNA, 19 nt, Artificial Sequence
  Description of Artificial Sequence: Synthetic oligonucleotide
  Antisense Strand to SEQ ID NO: 341675
ucaaguaggcacuauagaa

SEQ ID NO: 341677 - RNA, 19 nt, Artificial Sequence
  Description of Artificial Sequence: Synthetic oligonucleotide
  Sense Strand Starting at position 290 of SEQ ID NO: 318481
aacuauugucaugggcuaa

SEQ ID NO: 341678 - RNA, 19 nt, Artificial Sequence
  Description of Artificial Sequence: Synthetic oligonucleotide
  Antisense Strand to SEQ ID NO: 341677
uuagcccaugacaauaguu

SEQ ID NO: 341679 - RNA, 19 nt, Artificial Sequence
  Description of Artificial Sequence: Synthetic oligonucleotide
  Sense Strand Starting at position 290 of SEQ ID NO: 318505
cccauaagucuccgggaug

SEQ ID NO: 341680 - RNA, 19 nt, Artificial Sequence
  Description of Artificial Sequence: Synthetic oligonucleotide
  Antisense Strand to SEQ ID NO: 341679
caucccggagacuuauggg

SEQ ID NO: 341681 - RNA, 19 nt, Artificial Sequence
  Description of Artificial Sequence: Synthetic oligonucleotide
  Sense Strand Starting at position 290 of SEQ ID NO: 318508
auaagucuccgggaugauu

SEQ ID NO: 341682 - RNA, 19 nt, Artificial Sequence
  Description of Artificial Sequence: Synthetic oligonucleotide
  Antisense Strand to SEQ ID NO: 341681
aaucaucccggagacuuau

SEQ ID NO: 341683 - RNA, 19 nt, Artificial Sequence
  Description of Artificial Sequence: Synthetic oligonucleotide
  Sense Strand Starting at position 290 of SEQ ID NO: 318593
gcaggaugcacugauggaa

SEQ ID NO: 341684 - RNA, 19 nt, Artificial Sequence
  Description of Artificial Sequence: Synthetic oligonucleotide
  Antisense Strand to SEQ ID NO: 341683
uuccaucagugcauccugc

SEQ ID NO: 341685 - RNA, 19 nt, Artificial Sequence
  Description of Artificial Sequence: Synthetic oligonucleotide
  Sense Strand Starting at position 290 of SEQ ID NO: 318742
aaguaaaggcuuggauuga

SEQ ID NO: 341686 - RNA, 19 nt, Artificial Sequence
  Description of Artificial Sequence: Synthetic oligonucleotide
  Antisense Strand to SEQ ID NO: 341685
ucaauccaagccuuuacuu

SEQ ID NO: 341687 - RNA, 19 nt, Artificial Sequence
  Description of Artificial Sequence: Synthetic oligonucleotide
  Sense Strand Starting at position 290 of SEQ ID NO: 318757
uugagaagugacuaagcga

SEQ ID NO: 341688 - RNA, 19 nt, Artificial Sequence
  Description of Artificial Sequence: Synthetic oligonucleotide
  Antisense Strand to SEQ ID NO: 341687
ucgcuuagucacuucucaa

SEQ ID NO: 341689 - RNA, 19 nt, Artificial Sequence
  Description of Artificial Sequence: Synthetic oligonucleotide
  Sense Strand Starting at position 290 of SEQ ID NO: 318856
uaagaauugucauuguagg

SEQ ID NO: 341690 - RNA, 19 nt, Artificial Sequence
  Description of Artificial Sequence: Synthetic oligonucleotide
  Antisense Strand to SEQ ID NO: 341689
ccuacaaugacaauucuua

SEQ ID NO: 341691 - RNA, 19 nt, Artificial Sequence
  Description of Artificial Sequence: Synthetic oligonucleotide
  Sense Strand Starting at position 290 of SEQ ID NO: 318857
aagaauugucauuguagga

SEQ ID NO: 341692 - RNA, 19 nt, Artificial Sequence
  Description of Artificial Sequence: Synthetic oligonucleotide
  Antisense Strand to SEQ ID NO: 341691
uccuacaaugacaauucuu

SEQ ID NO: 341693 - RNA, 19 nt, Artificial Sequence
  Description of Artificial Sequence: Synthetic oligonucleotide
  Sense Strand Starting at position 290 of SEQ ID NO: 318919
gggccuggugaugauaaau

SEQ ID NO: 341694 - RNA, 19 nt, Artificial Sequence
  Description of Artificial Sequence: Synthetic oligonucleotide
  Antisense Strand to SEQ ID NO: 341693
auuuaucaucaccaggccc

SEQ ID NO: 341695 - RNA, 19 nt, Artificial Sequence
  Description of Artificial Sequence: Synthetic oligonucleotide
  Sense Strand Starting at position 290 of SEQ ID NO: 318966
cugguacguuuauuuguaa

SEQ ID NO: 341696 - RNA, 19 nt, Artificial Sequence
  Description of Artificial Sequence: Synthetic oligonucleotide
  Antisense Strand to SEQ ID NO: 341695
uuacaaauaaacguaccag

SEQ ID NO: 341697 - RNA, 19 nt, Artificial Sequence
  Description of Artificial Sequence: Synthetic oligonucleotide
  Sense Strand Starting at position 290 of SEQ ID NO: 318969
guacguuuauuuguaagaa

SEQ ID NO: 341698 - RNA, 19 nt, Artificial Sequence
  Description of Artificial Sequence: Synthetic oligonucleotide
  Antisense Strand to SEQ ID NO: 341697
uucuuacaaauaaacguac

SEQ ID NO: 341699 - RNA, 19 nt, Artificial Sequence
  Description of Artificial Sequence: Synthetic oligonucleotide
  Sense Strand Starting at position 290 of SEQ ID NO: 319041
cccauaaaguuaguuaaag

SEQ ID NO: 341700 - RNA, 19 nt, Artificial Sequence
  Description of Artificial Sequence: Synthetic oligonucleotide
  Antisense Strand to SEQ ID NO: 341699
cuuuaacuaacuuuauggg

SEQ ID NO: 341701 - RNA, 19 nt, Artificial Sequence
  Description of Artificial Sequence: Synthetic oligonucleotide
  Sense Strand Starting at position 290 of SEQ ID NO: 319052
aguuaaagcuaaguaagaa

SEQ ID NO: 341702 - RNA, 19 nt, Artificial Sequence
  Description of Artificial Sequence: Synthetic oligonucleotide
  Antisense Strand to SEQ ID NO: 341701
uucuuacuuagcuuuaacu

SEQ ID NO: 341703 - RNA, 19 nt, Artificial Sequence
  Description of Artificial Sequence: Synthetic oligonucleotide
  Sense Strand Starting at position 290 of SEQ ID NO: 319082
gaacauuugcccggucaca

SEQ ID NO: 341704 - RNA, 19 nt, Artificial Sequence
  Description of Artificial Sequence: Synthetic oligonucleotide
  Antisense Strand to SEQ ID NO: 341703
ugugaccgggcaaauguuc

SEQ ID NO: 341705 - RNA, 19 nt, Artificial Sequence
  Description of Artificial Sequence: Synthetic oligonucleotide
  Sense Strand Starting at position 290 of SEQ ID NO: 319101
aaggcugauccugagcaaa

SEQ ID NO: 341706 - RNA, 19 nt, Artificial Sequence
  Description of Artificial Sequence: Synthetic oligonucleotide
  Antisense Strand to SEQ ID NO: 341705
uuugcucaggaucagccuu

SEQ ID NO: 341707 - RNA, 19 nt, Artificial Sequence
  Description of Artificial Sequence: Synthetic oligonucleotide
  Sense Strand Starting at position 291 of SEQ ID NO: 315389
cucguacuacauggaauua

SEQ ID NO: 341708 - RNA, 19 nt, Artificial Sequence
  Description of Artificial Sequence: Synthetic oligonucleotide
  Antisense Strand to SEQ ID NO: 341707
uaauuccauguaguacgag

SEQ ID NO: 341709 - RNA, 19 nt, Artificial Sequence
  Description of Artificial Sequence: Synthetic oligonucleotide
  Sense Strand Starting at position 291 of SEQ ID NO: 315572
agagcuaucagugaagucu

SEQ ID NO: 341710 - RNA, 19 nt, Artificial Sequence
  Description of Artificial Sequence: Synthetic oligonucleotide
  Antisense Strand to SEQ ID NO: 341709
agacuucacugauagcucu

SEQ ID NO: 341711 - RNA, 19 nt, Artificial Sequence
  Description of Artificial Sequence: Synthetic oligonucleotide
  Sense Strand Starting at position 291 of SEQ ID NO: 315588
ucugaugacucaucucaug

SEQ ID NO: 341712 - RNA, 19 nt, Artificial Sequence
  Description of Artificial Sequence: Synthetic oligonucleotide
  Antisense Strand to SEQ ID NO: 341711
caugagaugagucaucaga

SEQ ID NO: 341713 - RNA, 19 nt, Artificial Sequence
  Description of Artificial Sequence: Synthetic oligonucleotide
  Sense Strand Starting at position 291 of SEQ ID NO: 315618
ugugaaugucgacagaaga

SEQ ID NO: 341714 - RNA, 19 nt, Artificial Sequence
  Description of Artificial Sequence: Synthetic oligonucleotide
  Antisense Strand to SEQ ID NO: 341713
ucuucugucgacauucaca

SEQ ID NO: 341715 - RNA, 19 nt, Artificial Sequence
  Description of Artificial Sequence: Synthetic oligonucleotide
  Sense Strand Starting at position 291 of SEQ ID NO: 315628
gacagaagaucaguauccu

SEQ ID NO: 341716 - RNA, 19 nt, Artificial Sequence
  Description of Artificial Sequence: Synthetic oligonucleotide
  Antisense Strand to SEQ ID NO: 341715
aggauacugaucuucuguc

SEQ ID NO: 341717 - RNA, 19 nt, Artificial Sequence
  Description of Artificial Sequence: Synthetic oligonucleotide
  Sense Strand Starting at position 291 of SEQ ID NO: 315771
cuagaauggcuucgagaac

SEQ ID NO: 341718 - RNA, 19 nt, Artificial Sequence
  Description of Artificial Sequence: Synthetic oligonucleotide
  Antisense Strand to SEQ ID NO: 341717
guucucgaagccauucuag

SEQ ID NO: 341719 - RNA, 19 nt, Artificial Sequence
  Description of Artificial Sequence: Synthetic oligonucleotide
  Sense Strand Starting at position 291 of SEQ ID NO: 315877
gcuaccaguggacaaauua

SEQ ID NO: 341720 - RNA, 19 nt, Artificial Sequence
  Description of Artificial Sequence: Synthetic oligonucleotide
  Antisense Strand to SEQ ID NO: 341719
uaauuuguccacugguagc

SEQ ID NO: 341721 - RNA, 19 nt, Artificial Sequence
  Description of Artificial Sequence: Synthetic oligonucleotide
  Sense Strand Starting at position 291 of SEQ ID NO: 316252
uuguguauuaccucucguu

SEQ ID NO: 341722 - RNA, 19 nt, Artificial Sequence
  Description of Artificial Sequence: Synthetic oligonucleotide
  Antisense Strand to SEQ ID NO: 341721
aacgagagguaauacacaa

SEQ ID NO: 341723 - RNA, 19 nt, Artificial Sequence
  Description of Artificial Sequence: Synthetic oligonucleotide
  Sense Strand Starting at position 291 of SEQ ID NO: 316253
uguguauuaccucucguuu

SEQ ID NO: 341724 - RNA, 19 nt, Artificial Sequence
  Description of Artificial Sequence: Synthetic oligonucleotide
  Antisense Strand to SEQ ID NO: 341723
aaacgagagguaauacaca

SEQ ID NO: 341725 - RNA, 19 nt, Artificial Sequence
  Description of Artificial Sequence: Synthetic oligonucleotide
  Sense Strand Starting at position 291 of SEQ ID NO: 316254
guguauuaccucucguuuc

SEQ ID NO: 341726 - RNA, 19 nt, Artificial Sequence
  Description of Artificial Sequence: Synthetic oligonucleotide
  Antisense Strand to SEQ ID NO: 341725
gaaacgagagguaauacac

SEQ ID NO: 341727 - RNA, 19 nt, Artificial Sequence
  Description of Artificial Sequence: Synthetic oligonucleotide
  Sense Strand Starting at position 291 of SEQ ID NO: 316351
uggaaagcaucucuugaaa

SEQ ID NO: 341728 - RNA, 19 nt, Artificial Sequence
  Description of Artificial Sequence: Synthetic oligonucleotide
  Antisense Strand to SEQ ID NO: 341727
uuucaagagaugcuuucca

SEQ ID NO: 341729 - RNA, 19 nt, Artificial Sequence
  Description of Artificial Sequence: Synthetic oligonucleotide
  Sense Strand Starting at position 291 of SEQ ID NO: 316484
aguaucucugauuaagcau

SEQ ID NO: 341730 - RNA, 19 nt, Artificial Sequence
  Description of Artificial Sequence: Synthetic oligonucleotide
  Antisense Strand to SEQ ID NO: 341729
augcuuaaucagagauacu

SEQ ID NO: 341731 - RNA, 19 nt, Artificial Sequence
  Description of Artificial Sequence: Synthetic oligonucleotide
  Sense Strand Starting at position 291 of SEQ ID NO: 316490
ucugauuaagcauaaucgu

SEQ ID NO: 341732 - RNA, 19 nt, Artificial Sequence
  Description of Artificial Sequence: Synthetic oligonucleotide
  Antisense Strand to SEQ ID NO: 341731
acgauuaugcuuaaucaga

SEQ ID NO: 341733 - RNA, 19 nt, Artificial Sequence
  Description of Artificial Sequence: Synthetic oligonucleotide
  Sense Strand Starting at position 291 of SEQ ID NO: 316505
ucguacaugccugagaaag

SEQ ID NO: 341734 - RNA, 19 nt, Artificial Sequence
  Description of Artificial Sequence: Synthetic oligonucleotide
  Antisense Strand to SEQ ID NO: 341733
cuuucucaggcauguacga

SEQ ID NO: 341735 - RNA, 19 nt, Artificial Sequence
  Description of Artificial Sequence: Synthetic oligonucleotide
  Sense Strand Starting at position 291 of SEQ ID NO: 316615
ugggcaagucauugaacua

SEQ ID NO: 341736 - RNA, 19 nt, Artificial Sequence
  Description of Artificial Sequence: Synthetic oligonucleotide
  Antisense Strand to SEQ ID NO: 341735
uaguucaaugacuugccca

SEQ ID NO: 341737 - RNA, 19 nt, Artificial Sequence
  Description of Artificial Sequence: Synthetic oligonucleotide
  Sense Strand Starting at position 291 of SEQ ID NO: 317475
agcccuuagcaugacuuau

SEQ ID NO: 341738 - RNA, 19 nt, Artificial Sequence
  Description of Artificial Sequence: Synthetic oligonucleotide
  Antisense Strand to SEQ ID NO: 341737
auaagucaugcuaagggcu

SEQ ID NO: 341739 - RNA, 19 nt, Artificial Sequence
  Description of Artificial Sequence: Synthetic oligonucleotide
  Sense Strand Starting at position 291 of SEQ ID NO: 317647
ggaaauccaucaguuauuc

SEQ ID NO: 341740 - RNA, 19 nt, Artificial Sequence
  Description of Artificial Sequence: Synthetic oligonucleotide
  Antisense Strand to SEQ ID NO: 341739
gaauaacugauggauuucc

SEQ ID NO: 341741 - RNA, 19 nt, Artificial Sequence
  Description of Artificial Sequence: Synthetic oligonucleotide
  Sense Strand Starting at position 291 of SEQ ID NO: 317797
uugaaaugaugauugcaca

SEQ ID NO: 341742 - RNA, 19 nt, Artificial Sequence
  Description of Artificial Sequence: Synthetic oligonucleotide
  Antisense Strand to SEQ ID NO: 341741
ugugcaaucaucauuucaa

SEQ ID NO: 341743 - RNA, 19 nt, Artificial Sequence
  Description of Artificial Sequence: Synthetic oligonucleotide
  Sense Strand Starting at position 291 of SEQ ID NO: 317827
gccuuauaauugguaaaua

SEQ ID NO: 341744 - RNA, 19 nt, Artificial Sequence
  Description of Artificial Sequence: Synthetic oligonucleotide
  Antisense Strand to SEQ ID NO: 341743
uauuuaccaauuauaaggc

SEQ ID NO: 341745 - RNA, 19 nt, Artificial Sequence
  Description of Artificial Sequence: Synthetic oligonucleotide
  Sense Strand Starting at position 291 of SEQ ID NO: 317961
ggaguugugacugguaaga

SEQ ID NO: 341746 - RNA, 19 nt, Artificial Sequence
  Description of Artificial Sequence: Synthetic oligonucleotide
  Antisense Strand to SEQ ID NO: 341745
ucuuaccagucacaacucc

SEQ ID NO: 341747 - RNA, 19 nt, Artificial Sequence
  Description of Artificial Sequence: Synthetic oligonucleotide
  Sense Strand Starting at position 291 of SEQ ID NO: 318125
agcagcauugcucaacaga

SEQ ID NO: 341748 - RNA, 19 nt, Artificial Sequence
  Description of Artificial Sequence: Synthetic oligonucleotide
  Antisense Strand to SEQ ID NO: 341747
ucuguugagcaaugcugcu

SEQ ID NO: 341749 - RNA, 19 nt, Artificial Sequence
  Description of Artificial Sequence: Synthetic oligonucleotide
  Sense Strand Starting at position 291 of SEQ ID NO: 318146
agucauggaucugagauuu

SEQ ID NO: 341750 - RNA, 19 nt, Artificial Sequence
  Description of Artificial Sequence: Synthetic oligonucleotide
  Antisense Strand to SEQ ID NO: 341749
aaaucucagauccaugacu

SEQ ID NO: 341751 - RNA, 19 nt, Artificial Sequence
  Description of Artificial Sequence: Synthetic oligonucleotide
  Sense Strand Starting at position 291 of SEQ ID NO: 318348
caaauagugucgccuauuu

SEQ ID NO: 341752 - RNA, 19 nt, Artificial Sequence
  Description of Artificial Sequence: Synthetic oligonucleotide
  Antisense Strand to SEQ ID NO: 341751
aaauaggcgacacuauuug

SEQ ID NO: 341753 - RNA, 19 nt, Artificial Sequence
  Description of Artificial Sequence: Synthetic oligonucleotide
  Sense Strand Starting at position 291 of SEQ ID NO: 318350
aauagugucgccuauuugu

SEQ ID NO: 341754 - RNA, 19 nt, Artificial Sequence
  Description of Artificial Sequence: Synthetic oligonucleotide
  Antisense Strand to SEQ ID NO: 341753
acaaauaggcgacacuauu

SEQ ID NO: 341755 - RNA, 19 nt, Artificial Sequence
  Description of Artificial Sequence: Synthetic oligonucleotide
  Sense Strand Starting at position 291 of SEQ ID NO: 318432
uuacauauacuacguaaug

SEQ ID NO: 341756 - RNA, 19 nt, Artificial Sequence
  Description of Artificial Sequence: Synthetic oligonucleotide
  Antisense Strand to SEQ ID NO: 341755
cauuacguaguauauguaa

SEQ ID NO: 341757 - RNA, 19 nt, Artificial Sequence
  Description of Artificial Sequence: Synthetic oligonucleotide
  Sense Strand Starting at position 291 of SEQ ID NO: 318457
cggaguuaaggugaucacu

SEQ ID NO: 341758 - RNA, 19 nt, Artificial Sequence
  Description of Artificial Sequence: Synthetic oligonucleotide
  Antisense Strand to SEQ ID NO: 341757
agugaucaccuuaacuccg

SEQ ID NO: 341759 - RNA, 19 nt, Artificial Sequence
  Description of Artificial Sequence: Synthetic oligonucleotide
  Sense Strand Starting at position 291 of SEQ ID NO: 318465
aggugaucacuccagucaa

SEQ ID NO: 341760 - RNA, 19 nt, Artificial Sequence
  Description of Artificial Sequence: Synthetic oligonucleotide
  Antisense Strand to SEQ ID NO: 341759
uugacuggagugaucaccu

SEQ ID NO: 341761 - RNA, 19 nt, Artificial Sequence
  Description of Artificial Sequence: Synthetic oligonucleotide
  Sense Strand Starting at position 291 of SEQ ID NO: 318489
ggaugauucuaugccagaa

SEQ ID NO: 341762 - RNA, 19 nt, Artificial Sequence
  Description of Artificial Sequence: Synthetic oligonucleotide
  Antisense Strand to SEQ ID NO: 341761
uucuggcauagaaucaucc

SEQ ID NO: 341763 - RNA, 19 nt, Artificial Sequence
  Description of Artificial Sequence: Synthetic oligonucleotide
  Sense Strand Starting at position 291 of SEQ ID NO: 318597
gggagcaugcacuaaguaa

SEQ ID NO: 341764 - RNA, 19 nt, Artificial Sequence
  Description of Artificial Sequence: Synthetic oligonucleotide
  Antisense Strand to SEQ ID NO: 341763
uuacuuagugcaugcuccc

SEQ ID NO: 341765 - RNA, 19 nt, Artificial Sequence
  Description of Artificial Sequence: Synthetic oligonucleotide
  Sense Strand Starting at position 291 of SEQ ID NO: 318649
cucacuacaguuuguagaa

SEQ ID NO: 341766 - RNA, 19 nt, Artificial Sequence
  Description of Artificial Sequence: Synthetic oligonucleotide
  Antisense Strand to SEQ ID NO: 341765
uucuacaaacuguagugag

SEQ ID NO: 341767 - RNA, 19 nt, Artificial Sequence
  Description of Artificial Sequence: Synthetic oligonucleotide
  Sense Strand Starting at position 291 of SEQ ID NO: 318650
ucacuacaguuuguagaau

SEQ ID NO: 341768 - RNA, 19 nt, Artificial Sequence
  Description of Artificial Sequence: Synthetic oligonucleotide
  Antisense Strand to SEQ ID NO: 341767
auucuacaaacuguaguga

SEQ ID NO: 341769 - RNA, 19 nt, Artificial Sequence
  Description of Artificial Sequence: Synthetic oligonucleotide
  Sense Strand Starting at position 291 of SEQ ID NO: 318717
cuagcuucugaauaaguaa

SEQ ID NO: 341770 - RNA, 19 nt, Artificial Sequence
  Description of Artificial Sequence: Synthetic oligonucleotide
  Antisense Strand to SEQ ID NO: 341769
uuacuuauucagaagcuag

SEQ ID NO: 341771 - RNA, 19 nt, Artificial Sequence
  Description of Artificial Sequence: Synthetic oligonucleotide
  Sense Strand Starting at position 291 of SEQ ID NO: 318769
auaccagaauugucugaac

SEQ ID NO: 341772 - RNA, 19 nt, Artificial Sequence
  Description of Artificial Sequence: Synthetic oligonucleotide
  Antisense Strand to SEQ ID NO: 341771
guucagacaauucugguau

SEQ ID NO: 341773 - RNA, 19 nt, Artificial Sequence
  Description of Artificial Sequence: Synthetic oligonucleotide
  Sense Strand Starting at position 291 of SEQ ID NO: 318798
ucaagacuucuccggacga

SEQ ID NO: 341774 - RNA, 19 nt, Artificial Sequence
  Description of Artificial Sequence: Synthetic oligonucleotide
  Antisense Strand to SEQ ID NO: 341773
ucguccggagaagucuuga

SEQ ID NO: 341775 - RNA, 19 nt, Artificial Sequence
  Description of Artificial Sequence: Synthetic oligonucleotide
  Sense Strand Starting at position 291 of SEQ ID NO: 318802
gacuucuccggacgagaaa

SEQ ID NO: 341776 - RNA, 19 nt, Artificial Sequence
  Description of Artificial Sequence: Synthetic oligonucleotide
  Antisense Strand to SEQ ID NO: 341775
uuucucguccggagaaguc

SEQ ID NO: 341777 - RNA, 19 nt, Artificial Sequence
  Description of Artificial Sequence: Synthetic oligonucleotide
  Sense Strand Starting at position 291 of SEQ ID NO: 318834
gcugguggagucuacaaau

SEQ ID NO: 341778 - RNA, 19 nt, Artificial Sequence
  Description of Artificial Sequence: Synthetic oligonucleotide
  Antisense Strand to SEQ ID NO: 341777
auuuguagacuccaccagc

SEQ ID NO: 341779 - RNA, 19 nt, Artificial Sequence
  Description of Artificial Sequence: Synthetic oligonucleotide
  Sense Strand Starting at position 291 of SEQ ID NO: 318846
uacaaauguggcuggagaa

SEQ ID NO: 341780 - RNA, 19 nt, Artificial Sequence
  Description of Artificial Sequence: Synthetic oligonucleotide
  Antisense Strand to SEQ ID NO: 341779
uucuccagccacauuugua

SEQ ID NO: 341781 - RNA, 19 nt, Artificial Sequence
  Description of Artificial Sequence: Synthetic oligonucleotide
  Sense Strand Starting at position 291 of SEQ ID NO: 319098
uuaagcacugguuauuaaa

SEQ ID NO: 341782 - RNA, 19 nt, Artificial Sequence
  Description of Artificial Sequence: Synthetic oligonucleotide
  Antisense Strand to SEQ ID NO: 341781
uuuaauaaccagugcuuaa

SEQ ID NO: 341783 - RNA, 19 nt, Artificial Sequence
  Description of Artificial Sequence: Synthetic oligonucleotide
  Sense Strand Starting at position 291 of SEQ ID NO: 319155
uugguaacuuuauccugaa

SEQ ID NO: 341784 - RNA, 19 nt, Artificial Sequence
  Description of Artificial Sequence: Synthetic oligonucleotide
  Antisense Strand to SEQ ID NO: 341783
uucaggauaaaguuaccaa

SEQ ID NO: 341785 - RNA, 19 nt, Artificial Sequence
  Description of Artificial Sequence: Synthetic oligonucleotide
  Sense Strand Starting at position 291 of SEQ ID NO: 319156
ugguaacuuuauccugaaa

SEQ ID NO: 341786 - RNA, 19 nt, Artificial Sequence
  Description of Artificial Sequence: Synthetic oligonucleotide
  Antisense Strand to SEQ ID NO: 341785
uuucaggauaaaguuacca

SEQ ID NO: 341787 - RNA, 19 nt, Artificial Sequence
  Description of Artificial Sequence: Synthetic oligonucleotide
  Sense Strand Starting at position 292 of SEQ ID NO: 315291
cccuaaaccuucucgguuu

SEQ ID NO: 341788 - RNA, 19 nt, Artificial Sequence
  Description of Artificial Sequence: Synthetic oligonucleotide
  Antisense Strand to SEQ ID NO: 341787
aaaccgagaagguuuaggg

SEQ ID NO: 341789 - RNA, 19 nt, Artificial Sequence
  Description of Artificial Sequence: Synthetic oligonucleotide
  Sense Strand Starting at position 292 of SEQ ID NO: 315575
uuacaauccguuugcuaca

SEQ ID NO: 341790 - RNA, 19 nt, Artificial Sequence
  Description of Artificial Sequence: Synthetic oligonucleotide
  Antisense Strand to SEQ ID NO: 341789
uguagcaaacggauuguaa

SEQ ID NO: 341791 - RNA, 19 nt, Artificial Sequence
  Description of Artificial Sequence: Synthetic oligonucleotide
  Sense Strand Starting at position 292 of SEQ ID NO: 315577
acaauccguuugcuacaua

SEQ ID NO: 341792 - RNA, 19 nt, Artificial Sequence
  Description of Artificial Sequence: Synthetic oligonucleotide
  Antisense Strand to SEQ ID NO: 341791
uauguagcaaacggauugu

SEQ ID NO: 341793 - RNA, 19 nt, Artificial Sequence
  Description of Artificial Sequence: Synthetic oligonucleotide
  Sense Strand Starting at position 292 of SEQ ID NO: 315580
auccguuugcuacauagca

SEQ ID NO: 341794 - RNA, 19 nt, Artificial Sequence
  Description of Artificial Sequence: Synthetic oligonucleotide
  Antisense Strand to SEQ ID NO: 341793
ugcuauguagcaaacggau

SEQ ID NO: 341795 - RNA, 19 nt, Artificial Sequence
  Description of Artificial Sequence: Synthetic oligonucleotide
  Sense Strand Starting at position 292 of SEQ ID NO: 315588
gcuacauagcagugugagu

SEQ ID NO: 341796 - RNA, 19 nt, Artificial Sequence
  Description of Artificial Sequence: Synthetic oligonucleotide
  Antisense Strand to SEQ ID NO: 341795
acucacacugcuauguagc

SEQ ID NO: 341797 - RNA, 19 nt, Artificial Sequence
  Description of Artificial Sequence: Synthetic oligonucleotide
  Sense Strand Starting at position 292 of SEQ ID NO: 315590
uacauagcagugugaguaa

SEQ ID NO: 341798 - RNA, 19 nt, Artificial Sequence
  Description of Artificial Sequence: Synthetic oligonucleotide
  Antisense Strand to SEQ ID NO: 341797
uuacucacacugcuaugua

SEQ ID NO: 341799 - RNA, 19 nt, Artificial Sequence
  Description of Artificial Sequence: Synthetic oligonucleotide
  Sense Strand Starting at position 292 of SEQ ID NO: 315593
auagcagugugaguaaucu

SEQ ID NO: 341800 - RNA, 19 nt, Artificial Sequence
  Description of Artificial Sequence: Synthetic oligonucleotide
  Antisense Strand to SEQ ID NO: 341799
agauuacucacacugcuau

SEQ ID NO: 341801 - RNA, 19 nt, Artificial Sequence
  Description of Artificial Sequence: Synthetic oligonucleotide
  Sense Strand Starting at position 292 of SEQ ID NO: 315597
cagugugaguaaucuuuaa

SEQ ID NO: 341802 - RNA, 19 nt, Artificial Sequence
  Description of Artificial Sequence: Synthetic oligonucleotide
  Antisense Strand to SEQ ID NO: 341801
uuaaagauuacucacacug

SEQ ID NO: 341803 - RNA, 19 nt, Artificial Sequence
  Description of Artificial Sequence: Synthetic oligonucleotide
  Sense Strand Starting at position 292 of SEQ ID NO: 315601
gugaguaaucuuuaaaggu

SEQ ID NO: 341804 - RNA, 19 nt, Artificial Sequence
  Description of Artificial Sequence: Synthetic oligonucleotide
  Antisense Strand to SEQ ID NO: 341803
accuuuaaagauuacucac

SEQ ID NO: 341805 - RNA, 19 nt, Artificial Sequence
  Description of Artificial Sequence: Synthetic oligonucleotide
  Sense Strand Starting at position 292 of SEQ ID NO: 315965
cugcuugucuucucuacua

SEQ ID NO: 341806 - RNA, 19 nt, Artificial Sequence
  Description of Artificial Sequence: Synthetic oligonucleotide
  Antisense Strand to SEQ ID NO: 341805
uaguagagaagacaagcag

SEQ ID NO: 341807 - RNA, 19 nt, Artificial Sequence
  Description of Artificial Sequence: Synthetic oligonucleotide
  Sense Strand Starting at position 292 of SEQ ID NO: 315967
gcuugucuucucuacuaga

SEQ ID NO: 341808 - RNA, 19 nt, Artificial Sequence
  Description of Artificial Sequence: Synthetic oligonucleotide
  Antisense Strand to SEQ ID NO: 341807
ucuaguagagaagacaagc

SEQ ID NO: 341809 - RNA, 19 nt, Artificial Sequence
  Description of Artificial Sequence: Synthetic oligonucleotide
  Sense Strand Starting at position 292 of SEQ ID NO: 316019
cuuguuuacugcuauacua

SEQ ID NO: 341810 - RNA, 19 nt, Artificial Sequence
  Description of Artificial Sequence: Synthetic oligonucleotide
  Antisense Strand to SEQ ID NO: 341809
uaguauagcaguaaacaag

SEQ ID NO: 341811 - RNA, 19 nt, Artificial Sequence
  Description of Artificial Sequence: Synthetic oligonucleotide
  Sense Strand Starting at position 292 of SEQ ID NO: 316021
uguuuacugcuauacuaua

SEQ ID NO: 341812 - RNA, 19 nt, Artificial Sequence
  Description of Artificial Sequence: Synthetic oligonucleotide
  Antisense Strand to SEQ ID NO: 341811
uauaguauagcaguaaaca

SEQ ID NO: 341813 - RNA, 19 nt, Artificial Sequence
  Description of Artificial Sequence: Synthetic oligonucleotide
  Sense Strand Starting at position 292 of SEQ ID NO: 316026
acugcuauacuauagaugu

SEQ ID NO: 341814 - RNA, 19 nt, Artificial Sequence
  Description of Artificial Sequence: Synthetic oligonucleotide
  Antisense Strand to SEQ ID NO: 341813
acaucuauaguauagcagu

SEQ ID NO: 341815 - RNA, 19 nt, Artificial Sequence
  Description of Artificial Sequence: Synthetic oligonucleotide
  Sense Strand Starting at position 292 of SEQ ID NO: 316047
agugcuauuuguugaauga

SEQ ID NO: 341816 - RNA, 19 nt, Artificial Sequence
  Description of Artificial Sequence: Synthetic oligonucleotide
  Antisense Strand to SEQ ID NO: 341815
ucauucaacaaauagcacu

SEQ ID NO: 341817 - RNA, 19 nt, Artificial Sequence
  Description of Artificial Sequence: Synthetic oligonucleotide
  Sense Strand Starting at position 292 of SEQ ID NO: 316259
aguaauagcuaaguacagu

SEQ ID NO: 341818 - RNA, 19 nt, Artificial Sequence
  Description of Artificial Sequence: Synthetic oligonucleotide
  Antisense Strand to SEQ ID NO: 341817
acuguacuuagcuauuacu

SEQ ID NO: 341819 - RNA, 19 nt, Artificial Sequence
  Description of Artificial Sequence: Synthetic oligonucleotide
  Sense Strand Starting at position 292 of SEQ ID NO: 316301
cuguucuacugacuaggaa

SEQ ID NO: 341820 - RNA, 19 nt, Artificial Sequence
  Description of Artificial Sequence: Synthetic oligonucleotide
  Antisense Strand to SEQ ID NO: 341819
uuccuagucaguagaacag

SEQ ID NO: 341821 - RNA, 19 nt, Artificial Sequence
  Description of Artificial Sequence: Synthetic oligonucleotide
  Sense Strand Starting at position 292 of SEQ ID NO: 316351
ccauacaacuaguaagaga

SEQ ID NO: 341822 - RNA, 19 nt, Artificial Sequence
  Description of Artificial Sequence: Synthetic oligonucleotide
  Antisense Strand to SEQ ID NO: 341821
ucucuuacuaguuguaugg

SEQ ID NO: 341823 - RNA, 19 nt, Artificial Sequence
  Description of Artificial Sequence: Synthetic oligonucleotide
  Sense Strand Starting at position 292 of SEQ ID NO: 316394
agauuugcaucccagaguu

SEQ ID NO: 341824 - RNA, 19 nt, Artificial Sequence
  Description of Artificial Sequence: Synthetic oligonucleotide
  Antisense Strand to SEQ ID NO: 341823
aacucugggaugcaaaucu

SEQ ID NO: 341825 - RNA, 19 nt, Artificial Sequence
  Description of Artificial Sequence: Synthetic oligonucleotide
  Sense Strand Starting at position 292 of SEQ ID NO: 316417
acucuaaaucgcuguguuc

SEQ ID NO: 341826 - RNA, 19 nt, Artificial Sequence
  Description of Artificial Sequence: Synthetic oligonucleotide
  Antisense Strand to SEQ ID NO: 341825
gaacacagcgauuuagagu

SEQ ID NO: 341827 - RNA, 19 nt, Artificial Sequence
  Description of Artificial Sequence: Synthetic oligonucleotide
  Sense Strand Starting at position 292 of SEQ ID NO: 316455
gugcacccaccuuguuaaa

SEQ ID NO: 341828 - RNA, 19 nt, Artificial Sequence
  Description of Artificial Sequence: Synthetic oligonucleotide
  Antisense Strand to SEQ ID NO: 341827
uuuaacaaggugggugcac

SEQ ID NO: 341829 - RNA, 19 nt, Artificial Sequence
  Description of Artificial Sequence: Synthetic oligonucleotide
  Sense Strand Starting at position 292 of SEQ ID NO: 318298
cgccgcuuucccucggaga

SEQ ID NO: 341830 - RNA, 19 nt, Artificial Sequence
  Description of Artificial Sequence: Synthetic oligonucleotide
  Antisense Strand to SEQ ID NO: 341829
ucuccgagggaaagcggcg

SEQ ID NO: 341831 - RNA, 19 nt, Artificial Sequence
  Description of Artificial Sequence: Synthetic oligonucleotide
  Sense Strand Starting at position 292 of SEQ ID NO: 318299
gccgcuuucccucggagaa

SEQ ID NO: 341832 - RNA, 19 nt, Artificial Sequence
  Description of Artificial Sequence: Synthetic oligonucleotide
  Antisense Strand to SEQ ID NO: 341831
uucuccgagggaaagcggc

SEQ ID NO: 341833 - RNA, 19 nt, Artificial Sequence
  Description of Artificial Sequence: Synthetic oligonucleotide
  Sense Strand Starting at position 292 of SEQ ID NO: 318300
ccgcuuucccucggagaac

SEQ ID NO: 341834 - RNA, 19 nt, Artificial Sequence
  Description of Artificial Sequence: Synthetic oligonucleotide
  Antisense Strand to SEQ ID NO: 341833
guucuccgagggaaagcgg

SEQ ID NO: 341835 - RNA, 19 nt, Artificial Sequence
  Description of Artificial Sequence: Synthetic oligonucleotide
  Sense Strand Starting at position 292 of SEQ ID NO: 318301
cgcuuucccucggagaacu

SEQ ID NO: 341836 - RNA, 19 nt, Artificial Sequence
  Description of Artificial Sequence: Synthetic oligonucleotide
  Antisense Strand to SEQ ID NO: 341835
aguucuccgagggaaagcg

SEQ ID NO: 341837 - RNA, 19 nt, Artificial Sequence
  Description of Artificial Sequence: Synthetic oligonucleotide
  Sense Strand Starting at position 292 of SEQ ID NO: 318370
ucaccuuucgcgugauccu

SEQ ID NO: 341838 - RNA, 19 nt, Artificial Sequence
  Description of Artificial Sequence: Synthetic oligonucleotide
  Antisense Strand to SEQ ID NO: 341837
aggaucacgcgaaagguga

SEQ ID NO: 341839 - RNA, 19 nt, Artificial Sequence
  Description of Artificial Sequence: Synthetic oligonucleotide
  Sense Strand Starting at position 292 of SEQ ID NO: 318371
caccuuucgcgugauccuu

SEQ ID NO: 341840 - RNA, 19 nt, Artificial Sequence
  Description of Artificial Sequence: Synthetic oligonucleotide
  Antisense Strand to SEQ ID NO: 341839
aaggaucacgcgaaaggug

SEQ ID NO: 341841 - RNA, 19 nt, Artificial Sequence
  Description of Artificial Sequence: Synthetic oligonucleotide
  Sense Strand Starting at position 292 of SEQ ID NO: 318484
gaagaagaguuagaaacuu

SEQ ID NO: 341842 - RNA, 19 nt, Artificial Sequence
  Description of Artificial Sequence: Synthetic oligonucleotide
  Antisense Strand to SEQ ID NO: 341841
aaguuucuaacucuucuuc

SEQ ID NO: 341843 - RNA, 19 nt, Artificial Sequence
  Description of Artificial Sequence: Synthetic oligonucleotide
  Sense Strand Starting at position 292 of SEQ ID NO: 318558
gguggcucaugccuuuaua

SEQ ID NO: 341844 - RNA, 19 nt, Artificial Sequence
  Description of Artificial Sequence: Synthetic oligonucleotide
  Antisense Strand to SEQ ID NO: 341843
uauaaaggcaugagccacc

SEQ ID NO: 341845 - RNA, 19 nt, Artificial Sequence
  Description of Artificial Sequence: Synthetic oligonucleotide
  Sense Strand Starting at position 292 of SEQ ID NO: 318561
ggcucaugccuuuauauaa

SEQ ID NO: 341846 - RNA, 19 nt, Artificial Sequence
  Description of Artificial Sequence: Synthetic oligonucleotide
  Antisense Strand to SEQ ID NO: 341845
uuauauaaaggcaugagcc

SEQ ID NO: 341847 - RNA, 19 nt, Artificial Sequence
  Description of Artificial Sequence: Synthetic oligonucleotide
  Sense Strand Starting at position 292 of SEQ ID NO: 318908
ugaauauagcuccaucugu

SEQ ID NO: 341848 - RNA, 19 nt, Artificial Sequence
  Description of Artificial Sequence: Synthetic oligonucleotide
  Antisense Strand to SEQ ID NO: 341847
acagauggagcuauauuca

SEQ ID NO: 341849 - RNA, 19 nt, Artificial Sequence
  Description of Artificial Sequence: Synthetic oligonucleotide
  Sense Strand Starting at position 292 of SEQ ID NO: 318933
gucuuugaauaaguaaugu

SEQ ID NO: 341850 - RNA, 19 nt, Artificial Sequence
  Description of Artificial Sequence: Synthetic oligonucleotide
  Antisense Strand to SEQ ID NO: 341849
acauuacuuauucaaagac

SEQ ID NO: 341851 - RNA, 19 nt, Artificial Sequence
  Description of Artificial Sequence: Synthetic oligonucleotide
  Sense Strand Starting at position 292 of SEQ ID NO: 318982
aguuguaccugugucauag

SEQ ID NO: 341852 - RNA, 19 nt, Artificial Sequence
  Description of Artificial Sequence: Synthetic oligonucleotide
  Antisense Strand to SEQ ID NO: 341851
cuaugacacagguacaacu

SEQ ID NO: 341853 - RNA, 19 nt, Artificial Sequence
  Description of Artificial Sequence: Synthetic oligonucleotide
  Sense Strand Starting at position 292 of SEQ ID NO: 319076
cgagcaucuuaagugcuaa

SEQ ID NO: 341854 - RNA, 19 nt, Artificial Sequence
  Description of Artificial Sequence: Synthetic oligonucleotide
  Antisense Strand to SEQ ID NO: 341853
uuagcacuuaagaugcucg

SEQ ID NO: 341855 - RNA, 19 nt, Artificial Sequence
  Description of Artificial Sequence: Synthetic oligonucleotide
  Sense Strand Starting at position 293 of SEQ ID NO: 315290
cccuaaaccuucucgguuu

SEQ ID NO: 341856 - RNA, 19 nt, Artificial Sequence
  Description of Artificial Sequence: Synthetic oligonucleotide
  Antisense Strand to SEQ ID NO: 341855
aaaccgagaagguuuaggg

SEQ ID NO: 341857 - RNA, 19 nt, Artificial Sequence
  Description of Artificial Sequence: Synthetic oligonucleotide
  Sense Strand Starting at position 293 of SEQ ID NO: 315574
uuacaauccguuugcuaca

SEQ ID NO: 341858 - RNA, 19 nt, Artificial Sequence
  Description of Artificial Sequence: Synthetic oligonucleotide
  Antisense Strand to SEQ ID NO: 341857
uguagcaaacggauuguaa

SEQ ID NO: 341859 - RNA, 19 nt, Artificial Sequence
  Description of Artificial Sequence: Synthetic oligonucleotide
  Sense Strand Starting at position 293 of SEQ ID NO: 315576
acaauccguuugcuacaua

SEQ ID NO: 341860 - RNA, 19 nt, Artificial Sequence
  Description of Artificial Sequence: Synthetic oligonucleotide
  Antisense Strand to SEQ ID NO: 341859
uauguagcaaacggauugu

SEQ ID NO: 341861 - RNA, 19 nt, Artificial Sequence
  Description of Artificial Sequence: Synthetic oligonucleotide
  Sense Strand Starting at position 293 of SEQ ID NO: 315579
auccguuugcuacauagca

SEQ ID NO: 341862 - RNA, 19 nt, Artificial Sequence
  Description of Artificial Sequence: Synthetic oligonucleotide
  Antisense Strand to SEQ ID NO: 341861
ugcuauguagcaaacggau

SEQ ID NO: 341863 - RNA, 19 nt, Artificial Sequence
  Description of Artificial Sequence: Synthetic oligonucleotide
  Sense Strand Starting at position 293 of SEQ ID NO: 315587
gcuacauagcagugugagu

SEQ ID NO: 341864 - RNA, 19 nt, Artificial Sequence
  Description of Artificial Sequence: Synthetic oligonucleotide
  Antisense Strand to SEQ ID NO: 341863
acucacacugcuauguagc

SEQ ID NO: 341865 - RNA, 19 nt, Artificial Sequence
  Description of Artificial Sequence: Synthetic oligonucleotide
  Sense Strand Starting at position 293 of SEQ ID NO: 315589
uacauagcagugugaguaa

SEQ ID NO: 341866 - RNA, 19 nt, Artificial Sequence
  Description of Artificial Sequence: Synthetic oligonucleotide
  Antisense Strand to SEQ ID NO: 341865
uuacucacacugcuaugua

SEQ ID NO: 341867 - RNA, 19 nt, Artificial Sequence
  Description of Artificial Sequence: Synthetic oligonucleotide
  Sense Strand Starting at position 293 of SEQ ID NO: 315592
auagcagugugaguaaucu

SEQ ID NO: 341868 - RNA, 19 nt, Artificial Sequence
  Description of Artificial Sequence: Synthetic oligonucleotide
  Antisense Strand to SEQ ID NO: 341867
agauuacucacacugcuau

SEQ ID NO: 341869 - RNA, 19 nt, Artificial Sequence
  Description of Artificial Sequence: Synthetic oligonucleotide
  Sense Strand Starting at position 293 of SEQ ID NO: 315596
cagugugaguaaucuuuaa

SEQ ID NO: 341870 - RNA, 19 nt, Artificial Sequence
  Description of Artificial Sequence: Synthetic oligonucleotide
  Antisense Strand to SEQ ID NO: 341869
uuaaagauuacucacacug

SEQ ID NO: 341871 - RNA, 19 nt, Artificial Sequence
  Description of Artificial Sequence: Synthetic oligonucleotide
  Sense Strand Starting at position 293 of SEQ ID NO: 315600
gugaguaaucuuuaaaggu

SEQ ID NO: 341872 - RNA, 19 nt, Artificial Sequence
  Description of Artificial Sequence: Synthetic oligonucleotide
  Antisense Strand to SEQ ID NO: 341871
accuuuaaagauuacucac

SEQ ID NO: 341873 - RNA, 19 nt, Artificial Sequence
  Description of Artificial Sequence: Synthetic oligonucleotide
  Sense Strand Starting at position 293 of SEQ ID NO: 315964
cugcuugucuucucuacua

SEQ ID NO: 341874 - RNA, 19 nt, Artificial Sequence
  Description of Artificial Sequence: Synthetic oligonucleotide
  Antisense Strand to SEQ ID NO: 341873
uaguagagaagacaagcag

SEQ ID NO: 341875 - RNA, 19 nt, Artificial Sequence
  Description of Artificial Sequence: Synthetic oligonucleotide
  Sense Strand Starting at position 293 of SEQ ID NO: 315966
gcuugucuucucuacuaga

SEQ ID NO: 341876 - RNA, 19 nt, Artificial Sequence
  Description of Artificial Sequence: Synthetic oligonucleotide
  Antisense Strand to SEQ ID NO: 341875
ucuaguagagaagacaagc

SEQ ID NO: 341877 - RNA, 19 nt, Artificial Sequence
  Description of Artificial Sequence: Synthetic oligonucleotide
  Sense Strand Starting at position 293 of SEQ ID NO: 316018
cuuguuuacugcuauacua

SEQ ID NO: 341878 - RNA, 19 nt, Artificial Sequence
  Description of Artificial Sequence: Synthetic oligonucleotide
  Antisense Strand to SEQ ID NO: 341877
uaguauagcaguaaacaag

SEQ ID NO: 341879 - RNA, 19 nt, Artificial Sequence
  Description of Artificial Sequence: Synthetic oligonucleotide
  Sense Strand Starting at position 293 of SEQ ID NO: 316020
uguuuacugcuauacuaua

SEQ ID NO: 341880 - RNA, 19 nt, Artificial Sequence
  Description of Artificial Sequence: Synthetic oligonucleotide
  Antisense Strand to SEQ ID NO: 341879
uauaguauagcaguaaaca

SEQ ID NO: 341881 - RNA, 19 nt, Artificial Sequence
  Description of Artificial Sequence: Synthetic oligonucleotide
  Sense Strand Starting at position 293 of SEQ ID NO: 316025
acugcuauacuauagaugu

SEQ ID NO: 341882 - RNA, 19 nt, Artificial Sequence
  Description of Artificial Sequence: Synthetic oligonucleotide
  Antisense Strand to SEQ ID NO: 341881
acaucuauaguauagcagu

SEQ ID NO: 341883 - RNA, 19 nt, Artificial Sequence
  Description of Artificial Sequence: Synthetic oligonucleotide
  Sense Strand Starting at position 293 of SEQ ID NO: 316046
agugcuauuuguugaauga

SEQ ID NO: 341884 - RNA, 19 nt, Artificial Sequence
  Description of Artificial Sequence: Synthetic oligonucleotide
  Antisense Strand to SEQ ID NO: 341883
ucauucaacaaauagcacu

SEQ ID NO: 341885 - RNA, 19 nt, Artificial Sequence
  Description of Artificial Sequence: Synthetic oligonucleotide
  Sense Strand Starting at position 293 of SEQ ID NO: 316258
aguaauagcuaaguacagu

SEQ ID NO: 341886 - RNA, 19 nt, Artificial Sequence
  Description of Artificial Sequence: Synthetic oligonucleotide
  Antisense Strand to SEQ ID NO: 341885
acuguacuuagcuauuacu

SEQ ID NO: 341887 - RNA, 19 nt, Artificial Sequence
  Description of Artificial Sequence: Synthetic oligonucleotide
  Sense Strand Starting at position 293 of SEQ ID NO: 316300
cuguucuacugacuaggaa

SEQ ID NO: 341888 - RNA, 19 nt, Artificial Sequence
  Description of Artificial Sequence: Synthetic oligonucleotide
  Antisense Strand to SEQ ID NO: 341887
uuccuagucaguagaacag

SEQ ID NO: 341889 - RNA, 19 nt, Artificial Sequence
  Description of Artificial Sequence: Synthetic oligonucleotide
  Sense Strand Starting at position 293 of SEQ ID NO: 316350
ccauacaacuaguaagaga

SEQ ID NO: 341890 - RNA, 19 nt, Artificial Sequence
  Description of Artificial Sequence: Synthetic oligonucleotide
  Antisense Strand to SEQ ID NO: 341889
ucucuuacuaguuguaugg

SEQ ID NO: 341891 - RNA, 19 nt, Artificial Sequence
  Description of Artificial Sequence: Synthetic oligonucleotide
  Sense Strand Starting at position 293 of SEQ ID NO: 316393
agauuugcaucccagaguu

SEQ ID NO: 341892 - RNA, 19 nt, Artificial Sequence
  Description of Artificial Sequence: Synthetic oligonucleotide
  Antisense Strand to SEQ ID NO: 341891
aacucugggaugcaaaucu

SEQ ID NO: 341893 - RNA, 19 nt, Artificial Sequence
  Description of Artificial Sequence: Synthetic oligonucleotide
  Sense Strand Starting at position 293 of SEQ ID NO: 316416
acucuaaaucgcuguguuc

SEQ ID NO: 341894 - RNA, 19 nt, Artificial Sequence
  Description of Artificial Sequence: Synthetic oligonucleotide
  Antisense Strand to SEQ ID NO: 341893
gaacacagcgauuuagagu

SEQ ID NO: 341895 - RNA, 19 nt, Artificial Sequence
  Description of Artificial Sequence: Synthetic oligonucleotide
  Sense Strand Starting at position 293 of SEQ ID NO: 316454
gugcacccaccuuguuaaa

SEQ ID NO: 341896 - RNA, 19 nt, Artificial Sequence
  Description of Artificial Sequence: Synthetic oligonucleotide
  Antisense Strand to SEQ ID NO: 341895
uuuaacaaggugggugcac

SEQ ID NO: 341897 - RNA, 19 nt, Artificial Sequence
  Description of Artificial Sequence: Synthetic oligonucleotide
  Sense Strand Starting at position 293 of SEQ ID NO: 318297
cgccgcuuucccucggaga

SEQ ID NO: 341898 - RNA, 19 nt, Artificial Sequence
  Description of Artificial Sequence: Synthetic oligonucleotide
  Antisense Strand to SEQ ID NO: 341897
ucuccgagggaaagcggcg

SEQ ID NO: 341899 - RNA, 19 nt, Artificial Sequence
  Description of Artificial Sequence: Synthetic oligonucleotide
  Sense Strand Starting at position 293 of SEQ ID NO: 318298
gccgcuuucccucggagaa

SEQ ID NO: 341900 - RNA, 19 nt, Artificial Sequence
  Description of Artificial Sequence: Synthetic oligonucleotide
  Antisense Strand to SEQ ID NO: 341899
uucuccgagggaaagcggc

SEQ ID NO: 341901 - RNA, 19 nt, Artificial Sequence
  Description of Artificial Sequence: Synthetic oligonucleotide
  Sense Strand Starting at position 293 of SEQ ID NO: 318299
ccgcuuucccucggagaac

SEQ ID NO: 341902 - RNA, 19 nt, Artificial Sequence
  Description of Artificial Sequence: Synthetic oligonucleotide
  Antisense Strand to SEQ ID NO: 341901
guucuccgagggaaagcgg

SEQ ID NO: 341903 - RNA, 19 nt, Artificial Sequence
  Description of Artificial Sequence: Synthetic oligonucleotide
  Sense Strand Starting at position 293 of SEQ ID NO: 318300
cgcuuucccucggagaacu

SEQ ID NO: 341904 - RNA, 19 nt, Artificial Sequence
  Description of Artificial Sequence: Synthetic oligonucleotide
  Antisense Strand to SEQ ID NO: 341903
aguucuccgagggaaagcg

SEQ ID NO: 341905 - RNA, 19 nt, Artificial Sequence
  Description of Artificial Sequence: Synthetic oligonucleotide
  Sense Strand Starting at position 293 of SEQ ID NO: 318369
ucaccuuucgcgugauccu

SEQ ID NO: 341906 - RNA, 19 nt, Artificial Sequence
  Description of Artificial Sequence: Synthetic oligonucleotide
  Antisense Strand to SEQ ID NO: 341905
aggaucacgcgaaagguga

SEQ ID NO: 341907 - RNA, 19 nt, Artificial Sequence
  Description of Artificial Sequence: Synthetic oligonucleotide
  Sense Strand Starting at position 293 of SEQ ID NO: 318370
caccuuucgcgugauccuu

SEQ ID NO: 341908 - RNA, 19 nt, Artificial Sequence
  Description of Artificial Sequence: Synthetic oligonucleotide
  Antisense Strand to SEQ ID NO: 341907
aaggaucacgcgaaaggug

SEQ ID NO: 341909 - RNA, 19 nt, Artificial Sequence
  Description of Artificial Sequence: Synthetic oligonucleotide
  Sense Strand Starting at position 293 of SEQ ID NO: 318483
gaagaagaguuagaaacuu

SEQ ID NO: 341910 - RNA, 19 nt, Artificial Sequence
  Description of Artificial Sequence: Synthetic oligonucleotide
  Antisense Strand to SEQ ID NO: 341909
aaguuucuaacucuucuuc

SEQ ID NO: 341911 - RNA, 19 nt, Artificial Sequence
  Description of Artificial Sequence: Synthetic oligonucleotide
  Sense Strand Starting at position 293 of SEQ ID NO: 318557
gguggcucaugccuuuaua

SEQ ID NO: 341912 - RNA, 19 nt, Artificial Sequence
  Description of Artificial Sequence: Synthetic oligonucleotide
  Antisense Strand to SEQ ID NO: 341911
uauaaaggcaugagccacc

SEQ ID NO: 341913 - RNA, 19 nt, Artificial Sequence
  Description of Artificial Sequence: Synthetic oligonucleotide
  Sense Strand Starting at position 293 of SEQ ID NO: 318560
ggcucaugccuuuauauaa

SEQ ID NO: 341914 - RNA, 19 nt, Artificial Sequence
  Description of Artificial Sequence: Synthetic oligonucleotide
  Antisense Strand to SEQ ID NO: 341913
uuauauaaaggcaugagcc

SEQ ID NO: 341915 - RNA, 19 nt, Artificial Sequence
  Description of Artificial Sequence: Synthetic oligonucleotide
  Sense Strand Starting at position 293 of SEQ ID NO: 318907
ugaauauagcuccaucugu

SEQ ID NO: 341916 - RNA, 19 nt, Artificial Sequence
  Description of Artificial Sequence: Synthetic oligonucleotide
  Antisense Strand to SEQ ID NO: 341915
acagauggagcuauauuca

SEQ ID NO: 341917 - RNA, 19 nt, Artificial Sequence
  Description of Artificial Sequence: Synthetic oligonucleotide
  Sense Strand Starting at position 293 of SEQ ID NO: 318932
gucuuugaauaaguaaugu

SEQ ID NO: 341918 - RNA, 19 nt, Artificial Sequence
  Description of Artificial Sequence: Synthetic oligonucleotide
  Antisense Strand to SEQ ID NO: 341917
acauuacuuauucaaagac

SEQ ID NO: 341919 - RNA, 19 nt, Artificial Sequence
  Description of Artificial Sequence: Synthetic oligonucleotide
  Sense Strand Starting at position 293 of SEQ ID NO: 318981
aguuguaccugugucauag

SEQ ID NO: 341920 - RNA, 19 nt, Artificial Sequence
  Description of Artificial Sequence: Synthetic oligonucleotide
  Antisense Strand to SEQ ID NO: 341919
cuaugacacagguacaacu

SEQ ID NO: 341921 - RNA, 19 nt, Artificial Sequence
  Description of Artificial Sequence: Synthetic oligonucleotide
  Sense Strand Starting at position 293 of SEQ ID NO: 319075
cgagcaucuuaagugcuaa

SEQ ID NO: 341922 - RNA, 19 nt, Artificial Sequence
  Description of Artificial Sequence: Synthetic oligonucleotide
  Antisense Strand to SEQ ID NO: 341921
uuagcacuuaagaugcucg

SEQ ID NO: 341923 - RNA, 19 nt, Artificial Sequence
  Description of Artificial Sequence: Synthetic oligonucleotide
  Sense Strand Starting at position 294 of SEQ ID NO: 315316
uguaacuaagcauagaagu

SEQ ID NO: 341924 - RNA, 19 nt, Artificial Sequence
  Description of Artificial Sequence: Synthetic oligonucleotide
  Antisense Strand to SEQ ID NO: 341923
acuucuaugcuuaguuaca

SEQ ID NO: 341925 - RNA, 19 nt, Artificial Sequence
  Description of Artificial Sequence: Synthetic oligonucleotide
  Sense Strand Starting at position 294 of SEQ ID NO: 315410
ggcucugucucgguggaaa

SEQ ID NO: 341926 - RNA, 19 nt, Artificial Sequence
  Description of Artificial Sequence: Synthetic oligonucleotide
  Antisense Strand to SEQ ID NO: 341925
uuuccaccgagacagagcc

SEQ ID NO: 341927 - RNA, 19 nt, Artificial Sequence
  Description of Artificial Sequence: Synthetic oligonucleotide
  Sense Strand Starting at position 294 of SEQ ID NO: 315412
cucugucucgguggaaauc

SEQ ID NO: 341928 - RNA, 19 nt, Artificial Sequence
  Description of Artificial Sequence: Synthetic oligonucleotide
  Antisense Strand to SEQ ID NO: 341927
gauuuccaccgagacagag

SEQ ID NO: 341929 - RNA, 19 nt, Artificial Sequence
  Description of Artificial Sequence: Synthetic oligonucleotide
  Sense Strand Starting at position 294 of SEQ ID NO: 315580
aguagaaacugggcuuuga

SEQ ID NO: 341930 - RNA, 19 nt, Artificial Sequence
  Description of Artificial Sequence: Synthetic oligonucleotide
  Antisense Strand to SEQ ID NO: 341929
ucaaagcccaguuucuacu

SEQ ID NO: 341931 - RNA, 19 nt, Artificial Sequence
  Description of Artificial Sequence: Synthetic oligonucleotide
  Sense Strand Starting at position 294 of SEQ ID NO: 315637
gcuagagccucuuuaucua

SEQ ID NO: 341932 - RNA, 19 nt, Artificial Sequence
  Description of Artificial Sequence: Synthetic oligonucleotide
  Antisense Strand to SEQ ID NO: 341931
uagauaaagaggcucuagc

SEQ ID NO: 341933 - RNA, 19 nt, Artificial Sequence
  Description of Artificial Sequence: Synthetic oligonucleotide
  Sense Strand Starting at position 294 of SEQ ID NO: 315641
gagccucuuuaucuaguga

SEQ ID NO: 341934 - RNA, 19 nt, Artificial Sequence
  Description of Artificial Sequence: Synthetic oligonucleotide
  Antisense Strand to SEQ ID NO: 341933
ucacuagauaaagaggcuc

SEQ ID NO: 341935 - RNA, 19 nt, Artificial Sequence
  Description of Artificial Sequence: Synthetic oligonucleotide
  Sense Strand Starting at position 294 of SEQ ID NO: 315784
gaggcagugaacuguguua

SEQ ID NO: 341936 - RNA, 19 nt, Artificial Sequence
  Description of Artificial Sequence: Synthetic oligonucleotide
  Antisense Strand to SEQ ID NO: 341935
uaacacaguucacugccuc

SEQ ID NO: 341937 - RNA, 19 nt, Artificial Sequence
  Description of Artificial Sequence: Synthetic oligonucleotide
  Sense Strand Starting at position 294 of SEQ ID NO: 315878
agggauguguccuugcaag

SEQ ID NO: 341938 - RNA, 19 nt, Artificial Sequence
  Description of Artificial Sequence: Synthetic oligonucleotide
  Antisense Strand to SEQ ID NO: 341937
cuugcaaggacacaucccu

SEQ ID NO: 341939 - RNA, 19 nt, Artificial Sequence
  Description of Artificial Sequence: Synthetic oligonucleotide
  Sense Strand Starting at position 294 of SEQ ID NO: 316270
ggucuucugcuuuauuauc

SEQ ID NO: 341940 - RNA, 19 nt, Artificial Sequence
  Description of Artificial Sequence: Synthetic oligonucleotide
  Antisense Strand to SEQ ID NO: 341939
gauaauaaagcagaagacc

SEQ ID NO: 341941 - RNA, 19 nt, Artificial Sequence
  Description of Artificial Sequence: Synthetic oligonucleotide
  Sense Strand Starting at position 294 of SEQ ID NO: 316316
ggcgacuuuaaugguauau

SEQ ID NO: 341942 - RNA, 19 nt, Artificial Sequence
  Description of Artificial Sequence: Synthetic oligonucleotide
  Antisense Strand to SEQ ID NO: 341941
auauaccauuaaagucgcc

SEQ ID NO: 341943 - RNA, 19 nt, Artificial Sequence
  Description of Artificial Sequence: Synthetic oligonucleotide
  Sense Strand Starting at position 294 of SEQ ID NO: 316345
ggcgucugcccucaaauaa

SEQ ID NO: 341944 - RNA, 19 nt, Artificial Sequence
  Description of Artificial Sequence: Synthetic oligonucleotide
  Antisense Strand to SEQ ID NO: 341943
uuauuugagggcagacgcc

SEQ ID NO: 341945 - RNA, 19 nt, Artificial Sequence
  Description of Artificial Sequence: Synthetic oligonucleotide
  Sense Strand Starting at position 294 of SEQ ID NO: 316419
guacguauucucuaccuua

SEQ ID NO: 341946 - RNA, 19 nt, Artificial Sequence
  Description of Artificial Sequence: Synthetic oligonucleotide
  Antisense Strand to SEQ ID NO: 341945
uaagguagagaauacguac

SEQ ID NO: 341947 - RNA, 19 nt, Artificial Sequence
  Description of Artificial Sequence: Synthetic oligonucleotide
  Sense Strand Starting at position 294 of SEQ ID NO: 316422
cguauucucuaccuuagag

SEQ ID NO: 341948 - RNA, 19 nt, Artificial Sequence
  Description of Artificial Sequence: Synthetic oligonucleotide
  Antisense Strand to SEQ ID NO: 341947
cucuaagguagagaauacg

SEQ ID NO: 341949 - RNA, 19 nt, Artificial Sequence
  Description of Artificial Sequence: Synthetic oligonucleotide
  Sense Strand Starting at position 294 of SEQ ID NO: 316637
cggacuugccuugaaguaa

SEQ ID NO: 341950 - RNA, 19 nt, Artificial Sequence
  Description of Artificial Sequence: Synthetic oligonucleotide
  Antisense Strand to SEQ ID NO: 341949
uuacuucaaggcaaguccg

SEQ ID NO: 341951 - RNA, 19 nt, Artificial Sequence
  Description of Artificial Sequence: Synthetic oligonucleotide
  Sense Strand Starting at position 294 of SEQ ID NO: 317409
gcggcccuaauagauuaua

SEQ ID NO: 341952 - RNA, 19 nt, Artificial Sequence
  Description of Artificial Sequence: Synthetic oligonucleotide
  Antisense Strand to SEQ ID NO: 341951
uauaaucuauuagggccgc

SEQ ID NO: 341953 - RNA, 19 nt, Artificial Sequence
  Description of Artificial Sequence: Synthetic oligonucleotide
  Sense Strand Starting at position 294 of SEQ ID NO: 317434
ggcccuacggucuauauaa

SEQ ID NO: 341954 - RNA, 19 nt, Artificial Sequence
  Description of Artificial Sequence: Synthetic oligonucleotide
  Antisense Strand to SEQ ID NO: 341953
uuauauagaccguagggcc

SEQ ID NO: 341955 - RNA, 19 nt, Artificial Sequence
  Description of Artificial Sequence: Synthetic oligonucleotide
  Sense Strand Starting at position 294 of SEQ ID NO: 317441
cggucuauauaaucuacga

SEQ ID NO: 341956 - RNA, 19 nt, Artificial Sequence
  Description of Artificial Sequence: Synthetic oligonucleotide
  Antisense Strand to SEQ ID NO: 341955
ucguagauuauauagaccg

SEQ ID NO: 341957 - RNA, 19 nt, Artificial Sequence
  Description of Artificial Sequence: Synthetic oligonucleotide
  Sense Strand Starting at position 294 of SEQ ID NO: 317459
aucuuuauauucguuugga

SEQ ID NO: 341958 - RNA, 19 nt, Artificial Sequence
  Description of Artificial Sequence: Synthetic oligonucleotide
  Antisense Strand to SEQ ID NO: 341957
uccaaacgaauauaaagau

SEQ ID NO: 341959 - RNA, 19 nt, Artificial Sequence
  Description of Artificial Sequence: Synthetic oligonucleotide
  Sense Strand Starting at position 294 of SEQ ID NO: 317460
ucuuuauauucguuuggag

SEQ ID NO: 341960 - RNA, 19 nt, Artificial Sequence
  Description of Artificial Sequence: Synthetic oligonucleotide
  Antisense Strand to SEQ ID NO: 341959
cuccaaacgaauauaaaga

SEQ ID NO: 341961 - RNA, 19 nt, Artificial Sequence
  Description of Artificial Sequence: Synthetic oligonucleotide
  Sense Strand Starting at position 294 of SEQ ID NO: 317462
uuuauauucguuuggaggu

SEQ ID NO: 341962 - RNA, 19 nt, Artificial Sequence
  Description of Artificial Sequence: Synthetic oligonucleotide
  Antisense Strand to SEQ ID NO: 341961
accuccaaacgaauauaaa

SEQ ID NO: 341963 - RNA, 19 nt, Artificial Sequence
  Description of Artificial Sequence: Synthetic oligonucleotide
  Sense Strand Starting at position 294 of SEQ ID NO: 317490
cgaagauuccugggcugug

SEQ ID NO: 341964 - RNA, 19 nt, Artificial Sequence
  Description of Artificial Sequence: Synthetic oligonucleotide
  Antisense Strand to SEQ ID NO: 341963
cacagcccaggaaucuucg

SEQ ID NO: 341965 - RNA, 19 nt, Artificial Sequence
  Description of Artificial Sequence: Synthetic oligonucleotide
  Sense Strand Starting at position 294 of SEQ ID NO: 317549
ugacgauuuguguguuuaa

SEQ ID NO: 341966 - RNA, 19 nt, Artificial Sequence
  Description of Artificial Sequence: Synthetic oligonucleotide
  Antisense Strand to SEQ ID NO: 341965
uuaaacacacaaaucguca

SEQ ID NO: 341967 - RNA, 19 nt, Artificial Sequence
  Description of Artificial Sequence: Synthetic oligonucleotide
  Sense Strand Starting at position 294 of SEQ ID NO: 317550
gacgauuuguguguuuaac

SEQ ID NO: 341968 - RNA, 19 nt, Artificial Sequence
  Description of Artificial Sequence: Synthetic oligonucleotide
  Antisense Strand to SEQ ID NO: 341967
guuaaacacacaaaucguc

SEQ ID NO: 341969 - RNA, 19 nt, Artificial Sequence
  Description of Artificial Sequence: Synthetic oligonucleotide
  Sense Strand Starting at position 294 of SEQ ID NO: 317552
cgauuuguguguuuaacca

SEQ ID NO: 341970 - RNA, 19 nt, Artificial Sequence
  Description of Artificial Sequence: Synthetic oligonucleotide
  Antisense Strand to SEQ ID NO: 341969
ugguuaaacacacaaaucg

SEQ ID NO: 341971 - RNA, 19 nt, Artificial Sequence
  Description of Artificial Sequence: Synthetic oligonucleotide
  Sense Strand Starting at position 294 of SEQ ID NO: 317718
ugaagaugugcacaccuua

SEQ ID NO: 341972 - RNA, 19 nt, Artificial Sequence
  Description of Artificial Sequence: Synthetic oligonucleotide
  Antisense Strand to SEQ ID NO: 341971
uaaggugugcacaucuuca

SEQ ID NO: 341973 - RNA, 19 nt, Artificial Sequence
  Description of Artificial Sequence: Synthetic oligonucleotide
  Sense Strand Starting at position 294 of SEQ ID NO: 317723
augugcacaccuuaugaau

SEQ ID NO: 341974 - RNA, 19 nt, Artificial Sequence
  Description of Artificial Sequence: Synthetic oligonucleotide
  Antisense Strand to SEQ ID NO: 341973
auucauaaggugugcacau

SEQ ID NO: 341975 - RNA, 19 nt, Artificial Sequence
  Description of Artificial Sequence: Synthetic oligonucleotide
  Sense Strand Starting at position 294 of SEQ ID NO: 317746
aacaccauucgguggaaua

SEQ ID NO: 341976 - RNA, 19 nt, Artificial Sequence
  Description of Artificial Sequence: Synthetic oligonucleotide
  Antisense Strand to SEQ ID NO: 341975
uauuccaccgaaugguguu

SEQ ID NO: 341977 - RNA, 19 nt, Artificial Sequence
  Description of Artificial Sequence: Synthetic oligonucleotide
  Sense Strand Starting at position 294 of SEQ ID NO: 317747
acaccauucgguggaauau

SEQ ID NO: 341978 - RNA, 19 nt, Artificial Sequence
  Description of Artificial Sequence: Synthetic oligonucleotide
  Antisense Strand to SEQ ID NO: 341977
auauuccaccgaauggugu

SEQ ID NO: 341979 - RNA, 19 nt, Artificial Sequence
  Description of Artificial Sequence: Synthetic oligonucleotide
  Sense Strand Starting at position 294 of SEQ ID NO: 317757
guggaauaugcuggagaag

SEQ ID NO: 341980 - RNA, 19 nt, Artificial Sequence
  Description of Artificial Sequence: Synthetic oligonucleotide
  Antisense Strand to SEQ ID NO: 341979
cuucuccagcauauuccac

SEQ ID NO: 341981 - RNA, 19 nt, Artificial Sequence
  Description of Artificial Sequence: Synthetic oligonucleotide
  Sense Strand Starting at position 294 of SEQ ID NO: 317760
gaauaugcuggagaagcuu

SEQ ID NO: 341982 - RNA, 19 nt, Artificial Sequence
  Description of Artificial Sequence: Synthetic oligonucleotide
  Antisense Strand to SEQ ID NO: 341981
aagcuucuccagcauauuc

SEQ ID NO: 341983 - RNA, 19 nt, Artificial Sequence
  Description of Artificial Sequence: Synthetic oligonucleotide
  Sense Strand Starting at position 294 of SEQ ID NO: 317923
aguugcuaacguuauacca

SEQ ID NO: 341984 - RNA, 19 nt, Artificial Sequence
  Description of Artificial Sequence: Synthetic oligonucleotide
  Antisense Strand to SEQ ID NO: 341983
ugguauaacguuagcaacu

SEQ ID NO: 341985 - RNA, 19 nt, Artificial Sequence
  Description of Artificial Sequence: Synthetic oligonucleotide
  Sense Strand Starting at position 294 of SEQ ID NO: 317966
ugacucauuugagauaggu

SEQ ID NO: 341986 - RNA, 19 nt, Artificial Sequence
  Description of Artificial Sequence: Synthetic oligonucleotide
  Antisense Strand to SEQ ID NO: 341985
accuaucucaaaugaguca

SEQ ID NO: 341987 - RNA, 19 nt, Artificial Sequence
  Description of Artificial Sequence: Synthetic oligonucleotide
  Sense Strand Starting at position 294 of SEQ ID NO: 318347
caguauguauguccuaaga

SEQ ID NO: 341988 - RNA, 19 nt, Artificial Sequence
  Description of Artificial Sequence: Synthetic oligonucleotide
  Antisense Strand to SEQ ID NO: 341987
ucuuaggacauacauacug

SEQ ID NO: 341989 - RNA, 19 nt, Artificial Sequence
  Description of Artificial Sequence: Synthetic oligonucleotide
  Sense Strand Starting at position 294 of SEQ ID NO: 318409
agaagacuuuaaucauguu

SEQ ID NO: 341990 - RNA, 19 nt, Artificial Sequence
  Description of Artificial Sequence: Synthetic oligonucleotide
  Antisense Strand to SEQ ID NO: 341989
aacaugauuaaagucuucu

SEQ ID NO: 341991 - RNA, 19 nt, Artificial Sequence
  Description of Artificial Sequence: Synthetic oligonucleotide
  Sense Strand Starting at position 294 of SEQ ID NO: 318491
caguccauccgugaucacu

SEQ ID NO: 341992 - RNA, 19 nt, Artificial Sequence
  Description of Artificial Sequence: Synthetic oligonucleotide
  Antisense Strand to SEQ ID NO: 341991
agugaucacggauggacug

SEQ ID NO: 341993 - RNA, 19 nt, Artificial Sequence
  Description of Artificial Sequence: Synthetic oligonucleotide
  Sense Strand Starting at position 294 of SEQ ID NO: 318497
auccgugaucacuguuaca

SEQ ID NO: 341994 - RNA, 19 nt, Artificial Sequence
  Description of Artificial Sequence: Synthetic oligonucleotide
  Antisense Strand to SEQ ID NO: 341993
uguaacagugaucacggau

SEQ ID NO: 341995 - RNA, 19 nt, Artificial Sequence
  Description of Artificial Sequence: Synthetic oligonucleotide
  Sense Strand Starting at position 294 of SEQ ID NO: 318558
cuugucaugccguugucau

SEQ ID NO: 341996 - RNA, 19 nt, Artificial Sequence
  Description of Artificial Sequence: Synthetic oligonucleotide
  Antisense Strand to SEQ ID NO: 341995
augacaacggcaugacaag

SEQ ID NO: 341997 - RNA, 19 nt, Artificial Sequence
  Description of Artificial Sequence: Synthetic oligonucleotide
  Sense Strand Starting at position 294 of SEQ ID NO: 318728
uugggccguuucuuacaaa

SEQ ID NO: 341998 - RNA, 19 nt, Artificial Sequence
  Description of Artificial Sequence: Synthetic oligonucleotide
  Antisense Strand to SEQ ID NO: 341997
uuuguaagaaacggcccaa

SEQ ID NO: 341999 - RNA, 19 nt, Artificial Sequence
  Description of Artificial Sequence: Synthetic oligonucleotide
  Sense Strand Starting at position 294 of SEQ ID NO: 319006
gcauauuacugguugaaag

SEQ ID NO: 342000 - RNA, 19 nt, Artificial Sequence
  Description of Artificial Sequence: Synthetic oligonucleotide
  Antisense Strand to SEQ ID NO: 341999
cuuucaaccaguaauaugc

SEQ ID NO: 342001 - RNA, 19 nt, Artificial Sequence
  Description of Artificial Sequence: Synthetic oligonucleotide
  Sense Strand Starting at position 294 of SEQ ID NO: 319007
cauauuacugguugaaaga

SEQ ID NO: 342002 - RNA, 19 nt, Artificial Sequence
  Description of Artificial Sequence: Synthetic oligonucleotide
  Antisense Strand to SEQ ID NO: 342001
ucuuucaaccaguaauaug

SEQ ID NO: 342003 - RNA, 19 nt, Artificial Sequence
  Description of Artificial Sequence: Synthetic oligonucleotide
  Sense Strand Starting at position 295 of SEQ ID NO: 315283
gccauaauuugugccaauc

SEQ ID NO: 342004 - RNA, 19 nt, Artificial Sequence
  Description of Artificial Sequence: Synthetic oligonucleotide
  Antisense Strand to SEQ ID NO: 342003
gauuggcacaaauuauggc

SEQ ID NO: 342005 - RNA, 19 nt, Artificial Sequence
  Description of Artificial Sequence: Synthetic oligonucleotide
  Sense Strand Starting at position 295 of SEQ ID NO: 315302
uggagaugaugagaauaga

SEQ ID NO: 342006 - RNA, 19 nt, Artificial Sequence
  Description of Artificial Sequence: Synthetic oligonucleotide
  Antisense Strand to SEQ ID NO: 342005
ucuauucucaucaucucca

SEQ ID NO: 342007 - RNA, 19 nt, Artificial Sequence
  Description of Artificial Sequence: Synthetic oligonucleotide
  Sense Strand Starting at position 295 of SEQ ID NO: 315320
agaagugguaggugaacaa

SEQ ID NO: 342008 - RNA, 19 nt, Artificial Sequence
  Description of Artificial Sequence: Synthetic oligonucleotide
  Antisense Strand to SEQ ID NO: 342007
uuguucaccuaccacuucu

SEQ ID NO: 342009 - RNA, 19 nt, Artificial Sequence
  Description of Artificial Sequence: Synthetic oligonucleotide
  Sense Strand Starting at position 295 of SEQ ID NO: 315361
agcuccagucaguaaagaa

SEQ ID NO: 342010 - RNA, 19 nt, Artificial Sequence
  Description of Artificial Sequence: Synthetic oligonucleotide
  Antisense Strand to SEQ ID NO: 342009
uucuuuacugacuggagcu

SEQ ID NO: 342011 - RNA, 19 nt, Artificial Sequence
  Description of Artificial Sequence: Synthetic oligonucleotide
  Sense Strand Starting at position 295 of SEQ ID NO: 315383
agaauugagaagugccuua

SEQ ID NO: 342012 - RNA, 19 nt, Artificial Sequence
  Description of Artificial Sequence: Synthetic oligonucleotide
  Antisense Strand to SEQ ID NO: 342011
uaaggcacuucucaauucu

SEQ ID NO: 342013 - RNA, 19 nt, Artificial Sequence
  Description of Artificial Sequence: Synthetic oligonucleotide
  Sense Strand Starting at position 295 of SEQ ID NO: 315457
gccugaauuugaccugcuu

SEQ ID NO: 342014 - RNA, 19 nt, Artificial Sequence
  Description of Artificial Sequence: Synthetic oligonucleotide
  Antisense Strand to SEQ ID NO: 342013
aagcaggucaaauucaggc

SEQ ID NO: 342015 - RNA, 19 nt, Artificial Sequence
  Description of Artificial Sequence: Synthetic oligonucleotide
  Sense Strand Starting at position 295 of SEQ ID NO: 315635
cuggaugagaucugucaga

SEQ ID NO: 342016 - RNA, 19 nt, Artificial Sequence
  Description of Artificial Sequence: Synthetic oligonucleotide
  Antisense Strand to SEQ ID NO: 342015
ucugacagaucucauccag

SEQ ID NO: 342017 - RNA, 19 nt, Artificial Sequence
  Description of Artificial Sequence: Synthetic oligonucleotide
  Sense Strand Starting at position 295 of SEQ ID NO: 315668
uuaacuucuguguaacuuu

SEQ ID NO: 342018 - RNA, 19 nt, Artificial Sequence
  Description of Artificial Sequence: Synthetic oligonucleotide
  Antisense Strand to SEQ ID NO: 342017
aaaguuacacagaaguuaa

SEQ ID NO: 342019 - RNA, 19 nt, Artificial Sequence
  Description of Artificial Sequence: Synthetic oligonucleotide
  Sense Strand Starting at position 295 of SEQ ID NO: 315712
gcaauaauagcugaaacgu

SEQ ID NO: 342020 - RNA, 19 nt, Artificial Sequence
  Description of Artificial Sequence: Synthetic oligonucleotide
  Antisense Strand to SEQ ID NO: 342019
acguuucagcuauuauugc

SEQ ID NO: 342021 - RNA, 19 nt, Artificial Sequence
  Description of Artificial Sequence: Synthetic oligonucleotide
  Sense Strand Starting at position 295 of SEQ ID NO: 315723
ugaaacgucccaggagaau

SEQ ID NO: 342022 - RNA, 19 nt, Artificial Sequence
  Description of Artificial Sequence: Synthetic oligonucleotide
  Antisense Strand to SEQ ID NO: 342021
auucuccugggacguuuca

SEQ ID NO: 342023 - RNA, 19 nt, Artificial Sequence
  Description of Artificial Sequence: Synthetic oligonucleotide
  Sense Strand Starting at position 295 of SEQ ID NO: 315757
guaggagcuuucuuggaaa

SEQ ID NO: 342024 - RNA, 19 nt, Artificial Sequence
  Description of Artificial Sequence: Synthetic oligonucleotide
  Antisense Strand to SEQ ID NO: 342023
uuuccaagaaagcuccuac

SEQ ID NO: 342025 - RNA, 19 nt, Artificial Sequence
  Description of Artificial Sequence: Synthetic oligonucleotide
  Sense Strand Starting at position 295 of SEQ ID NO: 315759
aggagcuuucuuggaaaca

SEQ ID NO: 342026 - RNA, 19 nt, Artificial Sequence
  Description of Artificial Sequence: Synthetic oligonucleotide
  Antisense Strand to SEQ ID NO: 342025
uguuuccaagaaagcuccu

SEQ ID NO: 342027 - RNA, 19 nt, Artificial Sequence
  Description of Artificial Sequence: Synthetic oligonucleotide
  Sense Strand Starting at position 295 of SEQ ID NO: 315787
uuauuaacagacggucaua

SEQ ID NO: 342028 - RNA, 19 nt, Artificial Sequence
  Description of Artificial Sequence: Synthetic oligonucleotide
  Antisense Strand to SEQ ID NO: 342027
uaugaccgucuguuaauaa

SEQ ID NO: 342029 - RNA, 19 nt, Artificial Sequence
  Description of Artificial Sequence: Synthetic oligonucleotide
  Sense Strand Starting at position 295 of SEQ ID NO: 315935
aggaaaucuugaguccgaa

SEQ ID NO: 342030 - RNA, 19 nt, Artificial Sequence
  Description of Artificial Sequence: Synthetic oligonucleotide
  Antisense Strand to SEQ ID NO: 342029
uucggacucaagauuuccu

SEQ ID NO: 342031 - RNA, 19 nt, Artificial Sequence
  Description of Artificial Sequence: Synthetic oligonucleotide
  Sense Strand Starting at position 295 of SEQ ID NO: 315938
aaaucuugaguccgaagua

SEQ ID NO: 342032 - RNA, 19 nt, Artificial Sequence
  Description of Artificial Sequence: Synthetic oligonucleotide
  Antisense Strand to SEQ ID NO: 342031
uacuucggacucaagauuu

SEQ ID NO: 342033 - RNA, 19 nt, Artificial Sequence
  Description of Artificial Sequence: Synthetic oligonucleotide
  Sense Strand Starting at position 295 of SEQ ID NO: 315987
ugacaauggucauucuagu

SEQ ID NO: 342034 - RNA, 19 nt, Artificial Sequence
  Description of Artificial Sequence: Synthetic oligonucleotide
  Antisense Strand to SEQ ID NO: 342033
acuagaaugaccauuguca

SEQ ID NO: 342035 - RNA, 19 nt, Artificial Sequence
  Description of Artificial Sequence: Synthetic oligonucleotide
  Sense Strand Starting at position 295 of SEQ ID NO: 316002
uagugcaaucucgggagaa

SEQ ID NO: 342036 - RNA, 19 nt, Artificial Sequence
  Description of Artificial Sequence: Synthetic oligonucleotide
  Antisense Strand to SEQ ID NO: 342035
uucucccgagauugcacua

SEQ ID NO: 342037 - RNA, 19 nt, Artificial Sequence
  Description of Artificial Sequence: Synthetic oligonucleotide
  Sense Strand Starting at position 295 of SEQ ID NO: 316004
gugcaaucucgggagaaga

SEQ ID NO: 342038 - RNA, 19 nt, Artificial Sequence
  Description of Artificial Sequence: Synthetic oligonucleotide
  Antisense Strand to SEQ ID NO: 342037
ucuucucccgagauugcac

SEQ ID NO: 342039 - RNA, 19 nt, Artificial Sequence
  Description of Artificial Sequence: Synthetic oligonucleotide
  Sense Strand Starting at position 295 of SEQ ID NO: 316115
uuaaaugaggcaugucuaa

SEQ ID NO: 342040 - RNA, 19 nt, Artificial Sequence
  Description of Artificial Sequence: Synthetic oligonucleotide
  Antisense Strand to SEQ ID NO: 342039
uuagacaugccucauuuaa

SEQ ID NO: 342041 - RNA, 19 nt, Artificial Sequence
  Description of Artificial Sequence: Synthetic oligonucleotide
  Sense Strand Starting at position 295 of SEQ ID NO: 316238
ccagaaucuguuugggaac

SEQ ID NO: 342042 - RNA, 19 nt, Artificial Sequence
  Description of Artificial Sequence: Synthetic oligonucleotide
  Antisense Strand to SEQ ID NO: 342041
guucccaaacagauucugg

SEQ ID NO: 342043 - RNA, 19 nt, Artificial Sequence
  Description of Artificial Sequence: Synthetic oligonucleotide
  Sense Strand Starting at position 295 of SEQ ID NO: 316253
gaacuugaggcagauguuu

SEQ ID NO: 342044 - RNA, 19 nt, Artificial Sequence
  Description of Artificial Sequence: Synthetic oligonucleotide
  Antisense Strand to SEQ ID NO: 342043
aaacaucugccucaaguuc

SEQ ID NO: 342045 - RNA, 19 nt, Artificial Sequence
  Description of Artificial Sequence: Synthetic oligonucleotide
  Sense Strand Starting at position 295 of SEQ ID NO: 316301
gcgucauuuacauguccag

SEQ ID NO: 342046 - RNA, 19 nt, Artificial Sequence
  Description of Artificial Sequence: Synthetic oligonucleotide
  Antisense Strand to SEQ ID NO: 342045
cuggacauguaaaugacgc

SEQ ID NO: 342047 - RNA, 19 nt, Artificial Sequence
  Description of Artificial Sequence: Synthetic oligonucleotide
  Sense Strand Starting at position 295 of SEQ ID NO: 316338
uugggaacgcauuaucaca

SEQ ID NO: 342048 - RNA, 19 nt, Artificial Sequence
  Description of Artificial Sequence: Synthetic oligonucleotide
  Antisense Strand to SEQ ID NO: 342047
ugugauaaugcguucccaa

SEQ ID NO: 342049 - RNA, 19 nt, Artificial Sequence
  Description of Artificial Sequence: Synthetic oligonucleotide
  Sense Strand Starting at position 295 of SEQ ID NO: 316340
gggaacgcauuaucacaau

SEQ ID NO: 342050 - RNA, 19 nt, Artificial Sequence
  Description of Artificial Sequence: Synthetic oligonucleotide
  Antisense Strand to SEQ ID NO: 342049
auugugauaaugcguuccc

SEQ ID NO: 342051 - RNA, 19 nt, Artificial Sequence
  Description of Artificial Sequence: Synthetic oligonucleotide
  Sense Strand Starting at position 295 of SEQ ID NO: 317447
gggcuuacggcucaaacaa

SEQ ID NO: 342052 - RNA, 19 nt, Artificial Sequence
  Description of Artificial Sequence: Synthetic oligonucleotide
  Antisense Strand to SEQ ID NO: 342051
uuguuugagccguaagccc

SEQ ID NO: 342053 - RNA, 19 nt, Artificial Sequence
  Description of Artificial Sequence: Synthetic oligonucleotide
  Sense Strand Starting at position 295 of SEQ ID NO: 317581
ugaacuaagguuugugaaa

SEQ ID NO: 342054 - RNA, 19 nt, Artificial Sequence
  Description of Artificial Sequence: Synthetic oligonucleotide
  Antisense Strand to SEQ ID NO: 342053
uuucacaaaccuuaguuca

SEQ ID NO: 342055 - RNA, 19 nt, Artificial Sequence
  Description of Artificial Sequence: Synthetic oligonucleotide
  Sense Strand Starting at position 295 of SEQ ID NO: 317635
cuugcugggagcuaagaaa

SEQ ID NO: 342056 - RNA, 19 nt, Artificial Sequence
  Description of Artificial Sequence: Synthetic oligonucleotide
  Antisense Strand to SEQ ID NO: 342055
uuucuuagcucccagcaag

SEQ ID NO: 342057 - RNA, 19 nt, Artificial Sequence
  Description of Artificial Sequence: Synthetic oligonucleotide
  Sense Strand Starting at position 295 of SEQ ID NO: 317685
ggcgaaagucgcguuagca

SEQ ID NO: 342058 - RNA, 19 nt, Artificial Sequence
  Description of Artificial Sequence: Synthetic oligonucleotide
  Antisense Strand to SEQ ID NO: 342057
ugcuaacgcgacuuucgcc

SEQ ID NO: 342059 - RNA, 19 nt, Artificial Sequence
  Description of Artificial Sequence: Synthetic oligonucleotide
  Sense Strand Starting at position 295 of SEQ ID NO: 318019
gcagcuaguacaggagaua

SEQ ID NO: 342060 - RNA, 19 nt, Artificial Sequence
  Description of Artificial Sequence: Synthetic oligonucleotide
  Antisense Strand to SEQ ID NO: 342059
uaucuccuguacuagcugc

SEQ ID NO: 342061 - RNA, 19 nt, Artificial Sequence
  Description of Artificial Sequence: Synthetic oligonucleotide
  Sense Strand Starting at position 295 of SEQ ID NO: 318223
ggaggagaagguugcucau

SEQ ID NO: 342062 - RNA, 19 nt, Artificial Sequence
  Description of Artificial Sequence: Synthetic oligonucleotide
  Antisense Strand to SEQ ID NO: 342061
augagcaaccuucuccucc

SEQ ID NO: 342063 - RNA, 19 nt, Artificial Sequence
  Description of Artificial Sequence: Synthetic oligonucleotide
  Sense Strand Starting at position 295 of SEQ ID NO: 318225
aggagaagguugcucauaa

SEQ ID NO: 342064 - RNA, 19 nt, Artificial Sequence
  Description of Artificial Sequence: Synthetic oligonucleotide
  Antisense Strand to SEQ ID NO: 342063
uuaugagcaaccuucuccu

SEQ ID NO: 342065 - RNA, 19 nt, Artificial Sequence
  Description of Artificial Sequence: Synthetic oligonucleotide
  Sense Strand Starting at position 295 of SEQ ID NO: 318226
ggagaagguugcucauaag

SEQ ID NO: 342066 - RNA, 19 nt, Artificial Sequence
  Description of Artificial Sequence: Synthetic oligonucleotide
  Antisense Strand to SEQ ID NO: 342065
cuuaugagcaaccuucucc

SEQ ID NO: 342067 - RNA, 19 nt, Artificial Sequence
  Description of Artificial Sequence: Synthetic oligonucleotide
  Sense Strand Starting at position 295 of SEQ ID NO: 318494
ccuauuucucugugagccu

SEQ ID NO: 342068 - RNA, 19 nt, Artificial Sequence
  Description of Artificial Sequence: Synthetic oligonucleotide
  Antisense Strand to SEQ ID NO: 342067
aggcucacagagaaauagg

SEQ ID NO: 342069 - RNA, 19 nt, Artificial Sequence
  Description of Artificial Sequence: Synthetic oligonucleotide
  Sense Strand Starting at position 295 of SEQ ID NO: 318505
gugagccuagucugagaaa

SEQ ID NO: 342070 - RNA, 19 nt, Artificial Sequence
  Description of Artificial Sequence: Synthetic oligonucleotide
  Antisense Strand to SEQ ID NO: 342069
uuucucagacuaggcucac

SEQ ID NO: 342071 - RNA, 19 nt, Artificial Sequence
  Description of Artificial Sequence: Synthetic oligonucleotide
  Sense Strand Starting at position 295 of SEQ ID NO: 318695
cguauuauugaaugacuau

SEQ ID NO: 342072 - RNA, 19 nt, Artificial Sequence
  Description of Artificial Sequence: Synthetic oligonucleotide
  Antisense Strand to SEQ ID NO: 342071
auagucauucaauaauacg

SEQ ID NO: 342073 - RNA, 19 nt, Artificial Sequence
  Description of Artificial Sequence: Synthetic oligonucleotide
  Sense Strand Starting at position 295 of SEQ ID NO: 318730
uuguucugugaucaaacca

SEQ ID NO: 342074 - RNA, 19 nt, Artificial Sequence
  Description of Artificial Sequence: Synthetic oligonucleotide
  Antisense Strand to SEQ ID NO: 342073
ugguuugaucacagaacaa

SEQ ID NO: 342075 - RNA, 19 nt, Artificial Sequence
  Description of Artificial Sequence: Synthetic oligonucleotide
  Sense Strand Starting at position 295 of SEQ ID NO: 318811
gggagucaauaggauuuaa

SEQ ID NO: 342076 - RNA, 19 nt, Artificial Sequence
  Description of Artificial Sequence: Synthetic oligonucleotide
  Antisense Strand to SEQ ID NO: 342075
uuaaauccuauugacuccc

SEQ ID NO: 342077 - RNA, 19 nt, Artificial Sequence
  Description of Artificial Sequence: Synthetic oligonucleotide
  Sense Strand Starting at position 295 of SEQ ID NO: 318901
cacuuaagugaaugguaaa

SEQ ID NO: 342078 - RNA, 19 nt, Artificial Sequence
  Description of Artificial Sequence: Synthetic oligonucleotide
  Antisense Strand to SEQ ID NO: 342077
uuuaccauucacuuaagug

SEQ ID NO: 342079 - RNA, 19 nt, Artificial Sequence
  Description of Artificial Sequence: Synthetic oligonucleotide
  Sense Strand Starting at position 295 of SEQ ID NO: 318947
acaaauugcgucuaugaca

SEQ ID NO: 342080 - RNA, 19 nt, Artificial Sequence
  Description of Artificial Sequence: Synthetic oligonucleotide
  Antisense Strand to SEQ ID NO: 342079
ugucauagacgcaauuugu

SEQ ID NO: 342081 - RNA, 19 nt, Artificial Sequence
  Description of Artificial Sequence: Synthetic oligonucleotide
  Sense Strand Starting at position 295 of SEQ ID NO: 319038
cuauauguccuacauuguu

SEQ ID NO: 342082 - RNA, 19 nt, Artificial Sequence
  Description of Artificial Sequence: Synthetic oligonucleotide
  Antisense Strand to SEQ ID NO: 342081
aacaauguaggacauauag

SEQ ID NO: 342083 - RNA, 19 nt, Artificial Sequence
  Description of Artificial Sequence: Synthetic oligonucleotide
  Sense Strand Starting at position 296 of SEQ ID NO: 315283
gcuaaagaaaugugcagaa

SEQ ID NO: 342084 - RNA, 19 nt, Artificial Sequence
  Description of Artificial Sequence: Synthetic oligonucleotide
  Antisense Strand to SEQ ID NO: 342083
uucugcacauuucuuuagc

SEQ ID NO: 342085 - RNA, 19 nt, Artificial Sequence
  Description of Artificial Sequence: Synthetic oligonucleotide
  Sense Strand Starting at position 296 of SEQ ID NO: 315327
uuccuaucauuaucagguu

SEQ ID NO: 342086 - RNA, 19 nt, Artificial Sequence
  Description of Artificial Sequence: Synthetic oligonucleotide
  Antisense Strand to SEQ ID NO: 342085
aaccugauaaugauaggaa

SEQ ID NO: 342087 - RNA, 19 nt, Artificial Sequence
  Description of Artificial Sequence: Synthetic oligonucleotide
  Sense Strand Starting at position 296 of SEQ ID NO: 315572
augaacgacucaucuauaa

SEQ ID NO: 342088 - RNA, 19 nt, Artificial Sequence
  Description of Artificial Sequence: Synthetic oligonucleotide
  Antisense Strand to SEQ ID NO: 342087
uuauagaugagucguucau

SEQ ID NO: 342089 - RNA, 19 nt, Artificial Sequence
  Description of Artificial Sequence: Synthetic oligonucleotide
  Sense Strand Starting at position 296 of SEQ ID NO: 315644
caucuaagaugguuguaga

SEQ ID NO: 342090 - RNA, 19 nt, Artificial Sequence
  Description of Artificial Sequence: Synthetic oligonucleotide
  Antisense Strand to SEQ ID NO: 342089
ucuacaaccaucuuagaug

SEQ ID NO: 342091 - RNA, 19 nt, Artificial Sequence
  Description of Artificial Sequence: Synthetic oligonucleotide
  Sense Strand Starting at position 296 of SEQ ID NO: 315645
aucuaagaugguuguagaa

SEQ ID NO: 342092 - RNA, 19 nt, Artificial Sequence
  Description of Artificial Sequence: Synthetic oligonucleotide
  Antisense Strand to SEQ ID NO: 342091
uucuacaaccaucuuagau

SEQ ID NO: 342093 - RNA, 19 nt, Artificial Sequence
  Description of Artificial Sequence: Synthetic oligonucleotide
  Sense Strand Starting at position 296 of SEQ ID NO: 315725
ggauuugcaugguauauuu

SEQ ID NO: 342094 - RNA, 19 nt, Artificial Sequence
  Description of Artificial Sequence: Synthetic oligonucleotide
  Antisense Strand to SEQ ID NO: 342093
aaauauaccaugcaaaucc

SEQ ID NO: 342095 - RNA, 19 nt, Artificial Sequence
  Description of Artificial Sequence: Synthetic oligonucleotide
  Sense Strand Starting at position 296 of SEQ ID NO: 315961
aggaaacaauuagacaaau

SEQ ID NO: 342096 - RNA, 19 nt, Artificial Sequence
  Description of Artificial Sequence: Synthetic oligonucleotide
  Antisense Strand to SEQ ID NO: 342095
auuugucuaauuguuuccu

SEQ ID NO: 342097 - RNA, 19 nt, Artificial Sequence
  Description of Artificial Sequence: Synthetic oligonucleotide
  Sense Strand Starting at position 296 of SEQ ID NO: 316263
aguguuuauacagggaaau

SEQ ID NO: 342098 - RNA, 19 nt, Artificial Sequence
  Description of Artificial Sequence: Synthetic oligonucleotide
  Antisense Strand to SEQ ID NO: 342097
auuucccuguauaaacacu

SEQ ID NO: 342099 - RNA, 19 nt, Artificial Sequence
  Description of Artificial Sequence: Synthetic oligonucleotide
  Sense Strand Starting at position 296 of SEQ ID NO: 316264
guguuuauacagggaaaug

SEQ ID NO: 342100 - RNA, 19 nt, Artificial Sequence
  Description of Artificial Sequence: Synthetic oligonucleotide
  Antisense Strand to SEQ ID NO: 342099
cauuucccuguauaaacac

SEQ ID NO: 342101 - RNA, 19 nt, Artificial Sequence
  Description of Artificial Sequence: Synthetic oligonucleotide
  Sense Strand Starting at position 296 of SEQ ID NO: 316458
cuuugccauucuuugagga

SEQ ID NO: 342102 - RNA, 19 nt, Artificial Sequence
  Description of Artificial Sequence: Synthetic oligonucleotide
  Antisense Strand to SEQ ID NO: 342101
uccucaaagaauggcaaag

SEQ ID NO: 342103 - RNA, 19 nt, Artificial Sequence
  Description of Artificial Sequence: Synthetic oligonucleotide
  Sense Strand Starting at position 296 of SEQ ID NO: 316608
uuuccaauccaguaauugu

SEQ ID NO: 342104 - RNA, 19 nt, Artificial Sequence
  Description of Artificial Sequence: Synthetic oligonucleotide
  Antisense Strand to SEQ ID NO: 342103
acaauuacuggauuggaaa

SEQ ID NO: 342105 - RNA, 19 nt, Artificial Sequence
  Description of Artificial Sequence: Synthetic oligonucleotide
  Sense Strand Starting at position 296 of SEQ ID NO: 316617
caguaauugugaguuaaau

SEQ ID NO: 342106 - RNA, 19 nt, Artificial Sequence
  Description of Artificial Sequence: Synthetic oligonucleotide
  Antisense Strand to SEQ ID NO: 342105
auuuaacucacaauuacug

SEQ ID NO: 342107 - RNA, 19 nt, Artificial Sequence
  Description of Artificial Sequence: Synthetic oligonucleotide
  Sense Strand Starting at position 296 of SEQ ID NO: 316863
uggagaauaucaguugcau

SEQ ID NO: 342108 - RNA, 19 nt, Artificial Sequence
  Description of Artificial Sequence: Synthetic oligonucleotide
  Antisense Strand to SEQ ID NO: 342107
augcaacugauauucucca

SEQ ID NO: 342109 - RNA, 19 nt, Artificial Sequence
  Description of Artificial Sequence: Synthetic oligonucleotide
  Sense Strand Starting at position 296 of SEQ ID NO: 316869
auaucaguugcauagaaua

SEQ ID NO: 342110 - RNA, 19 nt, Artificial Sequence
  Description of Artificial Sequence: Synthetic oligonucleotide
  Antisense Strand to SEQ ID NO: 342109
uauucuaugcaacugauau

SEQ ID NO: 342111 - RNA, 19 nt, Artificial Sequence
  Description of Artificial Sequence: Synthetic oligonucleotide
  Sense Strand Starting at position 296 of SEQ ID NO: 316883
gaauauuaguugcuagaag

SEQ ID NO: 342112 - RNA, 19 nt, Artificial Sequence
  Description of Artificial Sequence: Synthetic oligonucleotide
  Antisense Strand to SEQ ID NO: 342111
cuucuagcaacuaauauuc

SEQ ID NO: 342113 - RNA, 19 nt, Artificial Sequence
  Description of Artificial Sequence: Synthetic oligonucleotide
  Sense Strand Starting at position 296 of SEQ ID NO: 316891
guugcuagaaggcagaaau

SEQ ID NO: 342114 - RNA, 19 nt, Artificial Sequence
  Description of Artificial Sequence: Synthetic oligonucleotide
  Antisense Strand to SEQ ID NO: 342113
auuucugccuucuagcaac

SEQ ID NO: 342115 - RNA, 19 nt, Artificial Sequence
  Description of Artificial Sequence: Synthetic oligonucleotide
  Sense Strand Starting at position 296 of SEQ ID NO: 317289
uugcuuagucaugagaaua

SEQ ID NO: 342116 - RNA, 19 nt, Artificial Sequence
  Description of Artificial Sequence: Synthetic oligonucleotide
  Antisense Strand to SEQ ID NO: 342115
uauucucaugacuaagcaa

SEQ ID NO: 342117 - RNA, 19 nt, Artificial Sequence
  Description of Artificial Sequence: Synthetic oligonucleotide
  Sense Strand Starting at position 296 of SEQ ID NO: 317340
uauugaugguuucuagaaa

SEQ ID NO: 342118 - RNA, 19 nt, Artificial Sequence
  Description of Artificial Sequence: Synthetic oligonucleotide
  Antisense Strand to SEQ ID NO: 342117
uuucuagaaaccaucaaua

SEQ ID NO: 342119 - RNA, 19 nt, Artificial Sequence
  Description of Artificial Sequence: Synthetic oligonucleotide
  Sense Strand Starting at position 296 of SEQ ID NO: 317399
gccuuuaaugcuuaccaag

SEQ ID NO: 342120 - RNA, 19 nt, Artificial Sequence
  Description of Artificial Sequence: Synthetic oligonucleotide
  Antisense Strand to SEQ ID NO: 342119
cuugguaagcauuaaaggc

SEQ ID NO: 342121 - RNA, 19 nt, Artificial Sequence
  Description of Artificial Sequence: Synthetic oligonucleotide
  Sense Strand Starting at position 296 of SEQ ID NO: 317430
acagacuuugcugagucaa

SEQ ID NO: 342122 - RNA, 19 nt, Artificial Sequence
  Description of Artificial Sequence: Synthetic oligonucleotide
  Antisense Strand to SEQ ID NO: 342121
uugacucagcaaagucugu

SEQ ID NO: 342123 - RNA, 19 nt, Artificial Sequence
  Description of Artificial Sequence: Synthetic oligonucleotide
  Sense Strand Starting at position 296 of SEQ ID NO: 317432
agacuuugcugagucaaga

SEQ ID NO: 342124 - RNA, 19 nt, Artificial Sequence
  Description of Artificial Sequence: Synthetic oligonucleotide
  Antisense Strand to SEQ ID NO: 342123
ucuugacucagcaaagucu

SEQ ID NO: 342125 - RNA, 19 nt, Artificial Sequence
  Description of Artificial Sequence: Synthetic oligonucleotide
  Sense Strand Starting at position 296 of SEQ ID NO: 317553
aagcuugugagagguaaga

SEQ ID NO: 342126 - RNA, 19 nt, Artificial Sequence
  Description of Artificial Sequence: Synthetic oligonucleotide
  Antisense Strand to SEQ ID NO: 342125
ucuuaccucucacaagcuu

SEQ ID NO: 342127 - RNA, 19 nt, Artificial Sequence
  Description of Artificial Sequence: Synthetic oligonucleotide
  Sense Strand Starting at position 296 of SEQ ID NO: 317555
gcuugugagagguaagagu

SEQ ID NO: 342128 - RNA, 19 nt, Artificial Sequence
  Description of Artificial Sequence: Synthetic oligonucleotide
  Antisense Strand to SEQ ID NO: 342127
acucuuaccucucacaagc

SEQ ID NO: 342129 - RNA, 19 nt, Artificial Sequence
  Description of Artificial Sequence: Synthetic oligonucleotide
  Sense Strand Starting at position 296 of SEQ ID NO: 317778
auuguacuaugacuaggua

SEQ ID NO: 342130 - RNA, 19 nt, Artificial Sequence
  Description of Artificial Sequence: Synthetic oligonucleotide
  Antisense Strand to SEQ ID NO: 342129
uaccuagucauaguacaau

SEQ ID NO: 342131 - RNA, 19 nt, Artificial Sequence
  Description of Artificial Sequence: Synthetic oligonucleotide
  Sense Strand Starting at position 296 of SEQ ID NO: 317779
uuguacuaugacuagguaa

SEQ ID NO: 342132 - RNA, 19 nt, Artificial Sequence
  Description of Artificial Sequence: Synthetic oligonucleotide
  Antisense Strand to SEQ ID NO: 342131
uuaccuagucauaguacaa

SEQ ID NO: 342133 - RNA, 19 nt, Artificial Sequence
  Description of Artificial Sequence: Synthetic oligonucleotide
  Sense Strand Starting at position 296 of SEQ ID NO: 317781
guacuaugacuagguaaga

SEQ ID NO: 342134 - RNA, 19 nt, Artificial Sequence
  Description of Artificial Sequence: Synthetic oligonucleotide
  Antisense Strand to SEQ ID NO: 342133
ucuuaccuagucauaguac

SEQ ID NO: 342135 - RNA, 19 nt, Artificial Sequence
  Description of Artificial Sequence: Synthetic oligonucleotide
  Sense Strand Starting at position 296 of SEQ ID NO: 317804
gucuguuuccaggacaugu

SEQ ID NO: 342136 - RNA, 19 nt, Artificial Sequence
  Description of Artificial Sequence: Synthetic oligonucleotide
  Antisense Strand to SEQ ID NO: 342135
acauguccuggaaacagac

SEQ ID NO: 342137 - RNA, 19 nt, Artificial Sequence
  Description of Artificial Sequence: Synthetic oligonucleotide
  Sense Strand Starting at position 296 of SEQ ID NO: 317806
cuguuuccaggacauguau

SEQ ID NO: 342138 - RNA, 19 nt, Artificial Sequence
  Description of Artificial Sequence: Synthetic oligonucleotide
  Antisense Strand to SEQ ID NO: 342137
auacauguccuggaaacag

SEQ ID NO: 342139 - RNA, 19 nt, Artificial Sequence
  Description of Artificial Sequence: Synthetic oligonucleotide
  Sense Strand Starting at position 296 of SEQ ID NO: 317824
ugcuaccauuuagaagaaa

SEQ ID NO: 342140 - RNA, 19 nt, Artificial Sequence
  Description of Artificial Sequence: Synthetic oligonucleotide
  Antisense Strand to SEQ ID NO: 342139
uuucuucuaaaugguagca

SEQ ID NO: 342141 - RNA, 19 nt, Artificial Sequence
  Description of Artificial Sequence: Synthetic oligonucleotide
  Sense Strand Starting at position 296 of SEQ ID NO: 317846
ucaagaugucugcaaccua

SEQ ID NO: 342142 - RNA, 19 nt, Artificial Sequence
  Description of Artificial Sequence: Synthetic oligonucleotide
  Antisense Strand to SEQ ID NO: 342141
uagguugcagacaucuuga

SEQ ID NO: 342143 - RNA, 19 nt, Artificial Sequence
  Description of Artificial Sequence: Synthetic oligonucleotide
  Sense Strand Starting at position 296 of SEQ ID NO: 317866
ucucaaauuguugagcaaa

SEQ ID NO: 342144 - RNA, 19 nt, Artificial Sequence
  Description of Artificial Sequence: Synthetic oligonucleotide
  Antisense Strand to SEQ ID NO: 342143
uuugcucaacaauuugaga

SEQ ID NO: 342145 - RNA, 19 nt, Artificial Sequence
  Description of Artificial Sequence: Synthetic oligonucleotide
  Sense Strand Starting at position 296 of SEQ ID NO: 317898
uaucauguugagugguaaa

SEQ ID NO: 342146 - RNA, 19 nt, Artificial Sequence
  Description of Artificial Sequence: Synthetic oligonucleotide
  Antisense Strand to SEQ ID NO: 342145
uuuaccacucaacaugaua

SEQ ID NO: 342147 - RNA, 19 nt, Artificial Sequence
  Description of Artificial Sequence: Synthetic oligonucleotide
  Sense Strand Starting at position 296 of SEQ ID NO: 318109
aggguuagcuaacuaaaca

SEQ ID NO: 342148 - RNA, 19 nt, Artificial Sequence
  Description of Artificial Sequence: Synthetic oligonucleotide
  Antisense Strand to SEQ ID NO: 342147
uguuuaguuagcuaacccu

SEQ ID NO: 342149 - RNA, 19 nt, Artificial Sequence
  Description of Artificial Sequence: Synthetic oligonucleotide
  Sense Strand Starting at position 296 of SEQ ID NO: 318222
uaggaaugagauugcaucu

SEQ ID NO: 342150 - RNA, 19 nt, Artificial Sequence
  Description of Artificial Sequence: Synthetic oligonucleotide
  Antisense Strand to SEQ ID NO: 342149
agaugcaaucucauuccua

SEQ ID NO: 342151 - RNA, 19 nt, Artificial Sequence
  Description of Artificial Sequence: Synthetic oligonucleotide
  Sense Strand Starting at position 296 of SEQ ID NO: 318389
gauguauuauggucaauuc

SEQ ID NO: 342152 - RNA, 19 nt, Artificial Sequence
  Description of Artificial Sequence: Synthetic oligonucleotide
  Antisense Strand to SEQ ID NO: 342151
gaauugaccauaauacauc

SEQ ID NO: 342153 - RNA, 19 nt, Artificial Sequence
  Description of Artificial Sequence: Synthetic oligonucleotide
  Sense Strand Starting at position 296 of SEQ ID NO: 318416
gcaaaugugccuuaauaua

SEQ ID NO: 342154 - RNA, 19 nt, Artificial Sequence
  Description of Artificial Sequence: Synthetic oligonucleotide
  Antisense Strand to SEQ ID NO: 342153
uauauuaaggcacauuugc

SEQ ID NO: 342155 - RNA, 19 nt, Artificial Sequence
  Description of Artificial Sequence: Synthetic oligonucleotide
  Sense Strand Starting at position 296 of SEQ ID NO: 318578
uccaguguuuauuugguaa

SEQ ID NO: 342156 - RNA, 19 nt, Artificial Sequence
  Description of Artificial Sequence: Synthetic oligonucleotide
  Antisense Strand to SEQ ID NO: 342155
uuaccaaauaaacacugga

SEQ ID NO: 342157 - RNA, 19 nt, Artificial Sequence
  Description of Artificial Sequence: Synthetic oligonucleotide
  Sense Strand Starting at position 296 of SEQ ID NO: 318597
uggucugcuccuugaauuu

SEQ ID NO: 342158 - RNA, 19 nt, Artificial Sequence
  Description of Artificial Sequence: Synthetic oligonucleotide
  Antisense Strand to SEQ ID NO: 342157
aaauucaaggagcagacca

SEQ ID NO: 342159 - RNA, 19 nt, Artificial Sequence
  Description of Artificial Sequence: Synthetic oligonucleotide
  Sense Strand Starting at position 296 of SEQ ID NO: 318655
aaacauucugaggguuaau

SEQ ID NO: 342160 - RNA, 19 nt, Artificial Sequence
  Description of Artificial Sequence: Synthetic oligonucleotide
  Antisense Strand to SEQ ID NO: 342159
auuaacccucagaauguuu

SEQ ID NO: 342161 - RNA, 19 nt, Artificial Sequence
  Description of Artificial Sequence: Synthetic oligonucleotide
  Sense Strand Starting at position 296 of SEQ ID NO: 318916
ggaaauuauucuuuagagu

SEQ ID NO: 342162 - RNA, 19 nt, Artificial Sequence
  Description of Artificial Sequence: Synthetic oligonucleotide
  Antisense Strand to SEQ ID NO: 342161
acucuaaagaauaauuucc

SEQ ID NO: 342163 - RNA, 19 nt, Artificial Sequence
  Description of Artificial Sequence: Synthetic oligonucleotide
  Sense Strand Starting at position 297 of SEQ ID NO: 316613
uggucccuucuccgggaua

SEQ ID NO: 342164 - RNA, 19 nt, Artificial Sequence
  Description of Artificial Sequence: Synthetic oligonucleotide
  Antisense Strand to SEQ ID NO: 342163
uaucccggagaagggacca

SEQ ID NO: 342165 - RNA, 19 nt, Artificial Sequence
  Description of Artificial Sequence: Synthetic oligonucleotide
  Sense Strand Starting at position 297 of SEQ ID NO: 316714
auggaugcuuggcuuuaga

SEQ ID NO: 342166 - RNA, 19 nt, Artificial Sequence
  Description of Artificial Sequence: Synthetic oligonucleotide
  Antisense Strand to SEQ ID NO: 342165
ucuaaagccaagcauccau

SEQ ID NO: 342167 - RNA, 19 nt, Artificial Sequence
  Description of Artificial Sequence: Synthetic oligonucleotide
  Sense Strand Starting at position 297 of SEQ ID NO: 316723
uggcuuuagagugaucugu

SEQ ID NO: 342168 - RNA, 19 nt, Artificial Sequence
  Description of Artificial Sequence: Synthetic oligonucleotide
  Antisense Strand to SEQ ID NO: 342167
acagaucacucuaaagcca

SEQ ID NO: 342169 - RNA, 19 nt, Artificial Sequence
  Description of Artificial Sequence: Synthetic oligonucleotide
  Sense Strand Starting at position 297 of SEQ ID NO: 316827
ccuaguuacuuaguuuauu

SEQ ID NO: 342170 - RNA, 19 nt, Artificial Sequence
  Description of Artificial Sequence: Synthetic oligonucleotide
  Antisense Strand to SEQ ID NO: 342169
aauaaacuaaguaacuagg

SEQ ID NO: 342171 - RNA, 19 nt, Artificial Sequence
  Description of Artificial Sequence: Synthetic oligonucleotide
  Sense Strand Starting at position 297 of SEQ ID NO: 316872
auguguuacucacccaaau

SEQ ID NO: 342172 - RNA, 19 nt, Artificial Sequence
  Description of Artificial Sequence: Synthetic oligonucleotide
  Antisense Strand to SEQ ID NO: 342171
auuugggugaguaacacau

SEQ ID NO: 342173 - RNA, 19 nt, Artificial Sequence
  Description of Artificial Sequence: Synthetic oligonucleotide
  Sense Strand Starting at position 297 of SEQ ID NO: 316902
guaucagcccaaggagaua

SEQ ID NO: 342174 - RNA, 19 nt, Artificial Sequence
  Description of Artificial Sequence: Synthetic oligonucleotide
  Antisense Strand to SEQ ID NO: 342173
uaucuccuugggcugauac

SEQ ID NO: 342175 - RNA, 19 nt, Artificial Sequence
  Description of Artificial Sequence: Synthetic oligonucleotide
  Sense Strand Starting at position 297 of SEQ ID NO: 316947
ucccauugcugucuuagaa

SEQ ID NO: 342176 - RNA, 19 nt, Artificial Sequence
  Description of Artificial Sequence: Synthetic oligonucleotide
  Antisense Strand to SEQ ID NO: 342175
uucuaagacagcaauggga

SEQ ID NO: 342177 - RNA, 19 nt, Artificial Sequence
  Description of Artificial Sequence: Synthetic oligonucleotide
  Sense Strand Starting at position 297 of SEQ ID NO: 316954
gcugucuuagaagaccaaa

SEQ ID NO: 342178 - RNA, 19 nt, Artificial Sequence
  Description of Artificial Sequence: Synthetic oligonucleotide
  Antisense Strand to SEQ ID NO: 342177
uuuggucuucuaagacagc

SEQ ID NO: 342179 - RNA, 19 nt, Artificial Sequence
  Description of Artificial Sequence: Synthetic oligonucleotide
  Sense Strand Starting at position 297 of SEQ ID NO: 316986
uggagauucuaucuccuaa

SEQ ID NO: 342180 - RNA, 19 nt, Artificial Sequence
  Description of Artificial Sequence: Synthetic oligonucleotide
  Antisense Strand to SEQ ID NO: 342179
uuaggagauagaaucucca

SEQ ID NO: 342181 - RNA, 19 nt, Artificial Sequence
  Description of Artificial Sequence: Synthetic oligonucleotide
  Sense Strand Starting at position 297 of SEQ ID NO: 317029
ggaguugccuugguucaaa

SEQ ID NO: 342182 - RNA, 19 nt, Artificial Sequence
  Description of Artificial Sequence: Synthetic oligonucleotide
  Antisense Strand to SEQ ID NO: 342181
uuugaaccaaggcaacucc

SEQ ID NO: 342183 - RNA, 19 nt, Artificial Sequence
  Description of Artificial Sequence: Synthetic oligonucleotide
  Sense Strand Starting at position 297 of SEQ ID NO: 317048
accuguuucucagcagaac

SEQ ID NO: 342184 - RNA, 19 nt, Artificial Sequence
  Description of Artificial Sequence: Synthetic oligonucleotide
  Antisense Strand to SEQ ID NO: 342183
guucugcugagaaacaggu

SEQ ID NO: 342185 - RNA, 19 nt, Artificial Sequence
  Description of Artificial Sequence: Synthetic oligonucleotide
  Sense Strand Starting at position 297 of SEQ ID NO: 317049
ccuguuucucagcagaacu

SEQ ID NO: 342186 - RNA, 19 nt, Artificial Sequence
  Description of Artificial Sequence: Synthetic oligonucleotide
  Antisense Strand to SEQ ID NO: 342185
aguucugcugagaaacagg

SEQ ID NO: 342187 - RNA, 19 nt, Artificial Sequence
  Description of Artificial Sequence: Synthetic oligonucleotide
  Sense Strand Starting at position 297 of SEQ ID NO: 317051
uguuucucagcagaacuau

SEQ ID NO: 342188 - RNA, 19 nt, Artificial Sequence
  Description of Artificial Sequence: Synthetic oligonucleotide
  Antisense Strand to SEQ ID NO: 342187
auaguucugcugagaaaca

SEQ ID NO: 342189 - RNA, 19 nt, Artificial Sequence
  Description of Artificial Sequence: Synthetic oligonucleotide
  Sense Strand Starting at position 297 of SEQ ID NO: 317076
agccuauuugccuagccua

SEQ ID NO: 342190 - RNA, 19 nt, Artificial Sequence
  Description of Artificial Sequence: Synthetic oligonucleotide
  Antisense Strand to SEQ ID NO: 342189
uaggcuaggcaaauaggcu

SEQ ID NO: 342191 - RNA, 19 nt, Artificial Sequence
  Description of Artificial Sequence: Synthetic oligonucleotide
  Sense Strand Starting at position 297 of SEQ ID NO: 317103
accucuccugccugguaaa

SEQ ID NO: 342192 - RNA, 19 nt, Artificial Sequence
  Description of Artificial Sequence: Synthetic oligonucleotide
  Antisense Strand to SEQ ID NO: 342191
uuuaccaggcaggagaggu

SEQ ID NO: 342193 - RNA, 19 nt, Artificial Sequence
  Description of Artificial Sequence: Synthetic oligonucleotide
  Sense Strand Starting at position 297 of SEQ ID NO: 317115
ugguaaacuccucaugcca

SEQ ID NO: 342194 - RNA, 19 nt, Artificial Sequence
  Description of Artificial Sequence: Synthetic oligonucleotide
  Antisense Strand to SEQ ID NO: 342193
uggcaugaggaguuuacca

SEQ ID NO: 342195 - RNA, 19 nt, Artificial Sequence
  Description of Artificial Sequence: Synthetic oligonucleotide
  Sense Strand Starting at position 297 of SEQ ID NO: 317167
gaaggcuucucagcaguua

SEQ ID NO: 342196 - RNA, 19 nt, Artificial Sequence
  Description of Artificial Sequence: Synthetic oligonucleotide
  Antisense Strand to SEQ ID NO: 342195
uaacugcugagaagccuuc

SEQ ID NO: 342197 - RNA, 19 nt, Artificial Sequence
  Description of Artificial Sequence: Synthetic oligonucleotide
  Sense Strand Starting at position 297 of SEQ ID NO: 317217
aguuauuccucacuggacu

SEQ ID NO: 342198 - RNA, 19 nt, Artificial Sequence
  Description of Artificial Sequence: Synthetic oligonucleotide
  Antisense Strand to SEQ ID NO: 342197
aguccagugaggaauaacu

SEQ ID NO: 342199 - RNA, 19 nt, Artificial Sequence
  Description of Artificial Sequence: Synthetic oligonucleotide
  Sense Strand Starting at position 297 of SEQ ID NO: 317360
ggguaaggcucuuucuuuc

SEQ ID NO: 342200 - RNA, 19 nt, Artificial Sequence
  Description of Artificial Sequence: Synthetic oligonucleotide
  Antisense Strand to SEQ ID NO: 342199
gaaagaaagagccuuaccc

SEQ ID NO: 342201 - RNA, 19 nt, Artificial Sequence
  Description of Artificial Sequence: Synthetic oligonucleotide
  Sense Strand Starting at position 297 of SEQ ID NO: 317724
aggguuuaauggaggaagu

SEQ ID NO: 342202 - RNA, 19 nt, Artificial Sequence
  Description of Artificial Sequence: Synthetic oligonucleotide
  Antisense Strand to SEQ ID NO: 342201
acuuccuccauuaaacccu

SEQ ID NO: 342203 - RNA, 19 nt, Artificial Sequence
  Description of Artificial Sequence: Synthetic oligonucleotide
  Sense Strand Starting at position 297 of SEQ ID NO: 317725
ggguuuaauggaggaaguu

SEQ ID NO: 342204 - RNA, 19 nt, Artificial Sequence
  Description of Artificial Sequence: Synthetic oligonucleotide
  Antisense Strand to SEQ ID NO: 342203
aacuuccuccauuaaaccc

SEQ ID NO: 342205 - RNA, 19 nt, Artificial Sequence
  Description of Artificial Sequence: Synthetic oligonucleotide
  Sense Strand Starting at position 297 of SEQ ID NO: 317804
ggagaugaagucugcuaac

SEQ ID NO: 342206 - RNA, 19 nt, Artificial Sequence
  Description of Artificial Sequence: Synthetic oligonucleotide
  Antisense Strand to SEQ ID NO: 342205
guuagcagacuucaucucc

SEQ ID NO: 342207 - RNA, 19 nt, Artificial Sequence
  Description of Artificial Sequence: Synthetic oligonucleotide
  Sense Strand Starting at position 297 of SEQ ID NO: 318173
ucugaucuucccuagugga

SEQ ID NO: 342208 - RNA, 19 nt, Artificial Sequence
  Description of Artificial Sequence: Synthetic oligonucleotide
  Antisense Strand to SEQ ID NO: 342207
uccacuagggaagaucaga

SEQ ID NO: 342209 - RNA, 19 nt, Artificial Sequence
  Description of Artificial Sequence: Synthetic oligonucleotide
  Sense Strand Starting at position 297 of SEQ ID NO: 318186
aguggaucucacuagcagu

SEQ ID NO: 342210 - RNA, 19 nt, Artificial Sequence
  Description of Artificial Sequence: Synthetic oligonucleotide
  Antisense Strand to SEQ ID NO: 342209
acugcuagugagauccacu

SEQ ID NO: 342211 - RNA, 19 nt, Artificial Sequence
  Description of Artificial Sequence: Synthetic oligonucleotide
  Sense Strand Starting at position 297 of SEQ ID NO: 318194
ucacuagcaguuugagaac

SEQ ID NO: 342212 - RNA, 19 nt, Artificial Sequence
  Description of Artificial Sequence: Synthetic oligonucleotide
  Antisense Strand to SEQ ID NO: 342211
guucucaaacugcuaguga

SEQ ID NO: 342213 - RNA, 19 nt, Artificial Sequence
  Description of Artificial Sequence: Synthetic oligonucleotide
  Sense Strand Starting at position 297 of SEQ ID NO: 318303
ugcagcgugacuuugaguu

SEQ ID NO: 342214 - RNA, 19 nt, Artificial Sequence
  Description of Artificial Sequence: Synthetic oligonucleotide
  Antisense Strand to SEQ ID NO: 342213
aacucaaagucacgcugca

SEQ ID NO: 342215 - RNA, 19 nt, Artificial Sequence
  Description of Artificial Sequence: Synthetic oligonucleotide
  Sense Strand Starting at position 297 of SEQ ID NO: 318309
gugacuuugaguuagcaac

SEQ ID NO: 342216 - RNA, 19 nt, Artificial Sequence
  Description of Artificial Sequence: Synthetic oligonucleotide
  Antisense Strand to SEQ ID NO: 342215
guugcuaacucaaagucac

SEQ ID NO: 342217 - RNA, 19 nt, Artificial Sequence
  Description of Artificial Sequence: Synthetic oligonucleotide
  Sense Strand Starting at position 297 of SEQ ID NO: 318346
aaugcuugguaaccagaga

SEQ ID NO: 342218 - RNA, 19 nt, Artificial Sequence
  Description of Artificial Sequence: Synthetic oligonucleotide
  Antisense Strand to SEQ ID NO: 342217
ucucugguuaccaagcauu

SEQ ID NO: 342219 - RNA, 19 nt, Artificial Sequence
  Description of Artificial Sequence: Synthetic oligonucleotide
  Sense Strand Starting at position 297 of SEQ ID NO: 318480
guauuuaugucucuugcac

SEQ ID NO: 342220 - RNA, 19 nt, Artificial Sequence
  Description of Artificial Sequence: Synthetic oligonucleotide
  Antisense Strand to SEQ ID NO: 342219
gugcaagagacauaaauac

SEQ ID NO: 342221 - RNA, 19 nt, Artificial Sequence
  Description of Artificial Sequence: Synthetic oligonucleotide
  Sense Strand Starting at position 297 of SEQ ID NO: 318703
agcuguguggacuggaaau

SEQ ID NO: 342222 - RNA, 19 nt, Artificial Sequence
  Description of Artificial Sequence: Synthetic oligonucleotide
  Antisense Strand to SEQ ID NO: 342221
auuuccaguccacacagcu

SEQ ID NO: 342223 - RNA, 19 nt, Artificial Sequence
  Description of Artificial Sequence: Synthetic oligonucleotide
  Sense Strand Starting at position 297 of SEQ ID NO: 318716
ggaaauuccuggcuuuaag

SEQ ID NO: 342224 - RNA, 19 nt, Artificial Sequence
  Description of Artificial Sequence: Synthetic oligonucleotide
  Antisense Strand to SEQ ID NO: 342223
cuuaaagccaggaauuucc

SEQ ID NO: 342225 - RNA, 19 nt, Artificial Sequence
  Description of Artificial Sequence: Synthetic oligonucleotide
  Sense Strand Starting at position 297 of SEQ ID NO: 318727
gcuuuaaguccucaguauu

SEQ ID NO: 342226 - RNA, 19 nt, Artificial Sequence
  Description of Artificial Sequence: Synthetic oligonucleotide
  Antisense Strand to SEQ ID NO: 342225
aauacugaggacuuaaagc

SEQ ID NO: 342227 - RNA, 19 nt, Artificial Sequence
  Description of Artificial Sequence: Synthetic oligonucleotide
  Sense Strand Starting at position 297 of SEQ ID NO: 318730
uuaaguccucaguauuaac

SEQ ID NO: 342228 - RNA, 19 nt, Artificial Sequence
  Description of Artificial Sequence: Synthetic oligonucleotide
  Antisense Strand to SEQ ID NO: 342227
guuaauacugaggacuuaa

SEQ ID NO: 342229 - RNA, 19 nt, Artificial Sequence
  Description of Artificial Sequence: Synthetic oligonucleotide
  Sense Strand Starting at position 297 of SEQ ID NO: 318819
ggacgugagccuaguguga

SEQ ID NO: 342230 - RNA, 19 nt, Artificial Sequence
  Description of Artificial Sequence: Synthetic oligonucleotide
  Antisense Strand to SEQ ID NO: 342229
ucacacuaggcucacgucc

SEQ ID NO: 342231 - RNA, 19 nt, Artificial Sequence
  Description of Artificial Sequence: Synthetic oligonucleotide
  Sense Strand Starting at position 297 of SEQ ID NO: 318918
gagaucugguuguuuacau

SEQ ID NO: 342232 - RNA, 19 nt, Artificial Sequence
  Description of Artificial Sequence: Synthetic oligonucleotide
  Antisense Strand to SEQ ID NO: 342231
auguaaacaaccagaucuc

SEQ ID NO: 342233 - RNA, 19 nt, Artificial Sequence
  Description of Artificial Sequence: Synthetic oligonucleotide
  Sense Strand Starting at position 297 of SEQ ID NO: 318925
gguuguuuacaugaaccua

SEQ ID NO: 342234 - RNA, 19 nt, Artificial Sequence
  Description of Artificial Sequence: Synthetic oligonucleotide
  Antisense Strand to SEQ ID NO: 342233
uagguucauguaaacaacc

SEQ ID NO: 342235 - RNA, 19 nt, Artificial Sequence
  Description of Artificial Sequence: Synthetic oligonucleotide
  Sense Strand Starting at position 297 of SEQ ID NO: 318991
uuugucuuccgccaagauu

SEQ ID NO: 342236 - RNA, 19 nt, Artificial Sequence
  Description of Artificial Sequence: Synthetic oligonucleotide
  Antisense Strand to SEQ ID NO: 342235
aaucuuggcggaagacaaa

SEQ ID NO: 342237 - RNA, 19 nt, Artificial Sequence
  Description of Artificial Sequence: Synthetic oligonucleotide
  Sense Strand Starting at position 297 of SEQ ID NO: 319043
gcuggcucuauguugugua

SEQ ID NO: 342238 - RNA, 19 nt, Artificial Sequence
  Description of Artificial Sequence: Synthetic oligonucleotide
  Antisense Strand to SEQ ID NO: 342237
uacacaacauagagccagc

SEQ ID NO: 342239 - RNA, 19 nt, Artificial Sequence
  Description of Artificial Sequence: Synthetic oligonucleotide
  Sense Strand Starting at position 297 of SEQ ID NO: 319185
ugugcuaauuugccuuauu

SEQ ID NO: 342240 - RNA, 19 nt, Artificial Sequence
  Description of Artificial Sequence: Synthetic oligonucleotide
  Antisense Strand to SEQ ID NO: 342239
aauaaggcaaauuagcaca

SEQ ID NO: 342241 - RNA, 19 nt, Artificial Sequence
  Description of Artificial Sequence: Synthetic oligonucleotide
  Sense Strand Starting at position 297 of SEQ ID NO: 319186
gugcuaauuugccuuauuc

SEQ ID NO: 342242 - RNA, 19 nt, Artificial Sequence
  Description of Artificial Sequence: Synthetic oligonucleotide
  Antisense Strand to SEQ ID NO: 342241
gaauaaggcaaauuagcac

SEQ ID NO: 342243 - RNA, 19 nt, Artificial Sequence
  Description of Artificial Sequence: Synthetic oligonucleotide
  Sense Strand Starting at position 298 of SEQ ID NO: 315287
agccguuaugccgcacaaa

SEQ ID NO: 342244 - RNA, 19 nt, Artificial Sequence
  Description of Artificial Sequence: Synthetic oligonucleotide
  Antisense Strand to SEQ ID NO: 342243
uuugugcggcauaacggcu

SEQ ID NO: 342245 - RNA, 19 nt, Artificial Sequence
  Description of Artificial Sequence: Synthetic oligonucleotide
  Sense Strand Starting at position 298 of SEQ ID NO: 315523
ccuacugcaucuuugucau

SEQ ID NO: 342246 - RNA, 19 nt, Artificial Sequence
  Description of Artificial Sequence: Synthetic oligonucleotide
  Antisense Strand to SEQ ID NO: 342245
augacaaagaugcaguagg

SEQ ID NO: 342247 - RNA, 19 nt, Artificial Sequence
  Description of Artificial Sequence: Synthetic oligonucleotide
  Sense Strand Starting at position 298 of SEQ ID NO: 315617
gggugaaaucaucguauaa

SEQ ID NO: 342248 - RNA, 19 nt, Artificial Sequence
  Description of Artificial Sequence: Synthetic oligonucleotide
  Antisense Strand to SEQ ID NO: 342247
uuauacgaugauuucaccc

SEQ ID NO: 342249 - RNA, 19 nt, Artificial Sequence
  Description of Artificial Sequence: Synthetic oligonucleotide
  Sense Strand Starting at position 298 of SEQ ID NO: 315619
gugaaaucaucguauaagu

SEQ ID NO: 342250 - RNA, 19 nt, Artificial Sequence
  Description of Artificial Sequence: Synthetic oligonucleotide
  Antisense Strand to SEQ ID NO: 342249
acuuauacgaugauuucac

SEQ ID NO: 342251 - RNA, 19 nt, Artificial Sequence
  Description of Artificial Sequence: Synthetic oligonucleotide
  Sense Strand Starting at position 298 of SEQ ID NO: 315621
gaaaucaucguauaaguca

SEQ ID NO: 342252 - RNA, 19 nt, Artificial Sequence
  Description of Artificial Sequence: Synthetic oligonucleotide
  Antisense Strand to SEQ ID NO: 342251
ugacuuauacgaugauuuc

SEQ ID NO: 342253 - RNA, 19 nt, Artificial Sequence
  Description of Artificial Sequence: Synthetic oligonucleotide
  Sense Strand Starting at position 298 of SEQ ID NO: 315740
cauccaguccuucgaagua

SEQ ID NO: 342254 - RNA, 19 nt, Artificial Sequence
  Description of Artificial Sequence: Synthetic oligonucleotide
  Antisense Strand to SEQ ID NO: 342253
uacuucgaaggacuggaug

SEQ ID NO: 342255 - RNA, 19 nt, Artificial Sequence
  Description of Artificial Sequence: Synthetic oligonucleotide
  Sense Strand Starting at position 298 of SEQ ID NO: 315752
cgaaguagucgaugucaau

SEQ ID NO: 342256 - RNA, 19 nt, Artificial Sequence
  Description of Artificial Sequence: Synthetic oligonucleotide
  Antisense Strand to SEQ ID NO: 342255
auugacaucgacuacuucg

SEQ ID NO: 342257 - RNA, 19 nt, Artificial Sequence
  Description of Artificial Sequence: Synthetic oligonucleotide
  Sense Strand Starting at position 298 of SEQ ID NO: 315759
gucgaugucaaugauaucu

SEQ ID NO: 342258 - RNA, 19 nt, Artificial Sequence
  Description of Artificial Sequence: Synthetic oligonucleotide
  Antisense Strand to SEQ ID NO: 342257
agauaucauugacaucgac

SEQ ID NO: 342259 - RNA, 19 nt, Artificial Sequence
  Description of Artificial Sequence: Synthetic oligonucleotide
  Sense Strand Starting at position 298 of SEQ ID NO: 315761
cgaugucaaugauaucuga

SEQ ID NO: 342260 - RNA, 19 nt, Artificial Sequence
  Description of Artificial Sequence: Synthetic oligonucleotide
  Antisense Strand to SEQ ID NO: 342259
ucagauaucauugacaucg

SEQ ID NO: 342261 - RNA, 19 nt, Artificial Sequence
  Description of Artificial Sequence: Synthetic oligonucleotide
  Sense Strand Starting at position 298 of SEQ ID NO: 317809
aggcucuaaucggaucaga

SEQ ID NO: 342262 - RNA, 19 nt, Artificial Sequence
  Description of Artificial Sequence: Synthetic oligonucleotide
  Antisense Strand to SEQ ID NO: 342261
ucugauccgauuagagccu

SEQ ID NO: 342263 - RNA, 19 nt, Artificial Sequence
  Description of Artificial Sequence: Synthetic oligonucleotide
  Sense Strand Starting at position 298 of SEQ ID NO: 317814
cuaaucggaucagaucuaa

SEQ ID NO: 342264 - RNA, 19 nt, Artificial Sequence
  Description of Artificial Sequence: Synthetic oligonucleotide
  Antisense Strand to SEQ ID NO: 342263
uuagaucugauccgauuag

SEQ ID NO: 342265 - RNA, 19 nt, Artificial Sequence
  Description of Artificial Sequence: Synthetic oligonucleotide
  Sense Strand Starting at position 298 of SEQ ID NO: 317824
cagaucuaauccguucgca

SEQ ID NO: 342266 - RNA, 19 nt, Artificial Sequence
  Description of Artificial Sequence: Synthetic oligonucleotide
  Antisense Strand to SEQ ID NO: 342265
ugcgaacggauuagaucug

SEQ ID NO: 342267 - RNA, 19 nt, Artificial Sequence
  Description of Artificial Sequence: Synthetic oligonucleotide
  Sense Strand Starting at position 298 of SEQ ID NO: 317984
uggucccuucuccgggaua

SEQ ID NO: 342268 - RNA, 19 nt, Artificial Sequence
  Description of Artificial Sequence: Synthetic oligonucleotide
  Antisense Strand to SEQ ID NO: 342267
uaucccggagaagggacca

SEQ ID NO: 342269 - RNA, 19 nt, Artificial Sequence
  Description of Artificial Sequence: Synthetic oligonucleotide
  Sense Strand Starting at position 298 of SEQ ID NO: 318085
auggaugcuuggcuuuaga

SEQ ID NO: 342270 - RNA, 19 nt, Artificial Sequence
  Description of Artificial Sequence: Synthetic oligonucleotide
  Antisense Strand to SEQ ID NO: 342269
ucuaaagccaagcauccau

SEQ ID NO: 342271 - RNA, 19 nt, Artificial Sequence
  Description of Artificial Sequence: Synthetic oligonucleotide
  Sense Strand Starting at position 298 of SEQ ID NO: 318094
uggcuuuagagugaucugu

SEQ ID NO: 342272 - RNA, 19 nt, Artificial Sequence
  Description of Artificial Sequence: Synthetic oligonucleotide
  Antisense Strand to SEQ ID NO: 342271
acagaucacucuaaagcca

SEQ ID NO: 342273 - RNA, 19 nt, Artificial Sequence
  Description of Artificial Sequence: Synthetic oligonucleotide
  Sense Strand Starting at position 298 of SEQ ID NO: 318198
ccuaguuacuuaguuuauu

SEQ ID NO: 342274 - RNA, 19 nt, Artificial Sequence
  Description of Artificial Sequence: Synthetic oligonucleotide
  Antisense Strand to SEQ ID NO: 342273
aauaaacuaaguaacuagg

SEQ ID NO: 342275 - RNA, 19 nt, Artificial Sequence
  Description of Artificial Sequence: Synthetic oligonucleotide
  Sense Strand Starting at position 298 of SEQ ID NO: 318237
cccuuaauguguuacucac

SEQ ID NO: 342276 - RNA, 19 nt, Artificial Sequence
  Description of Artificial Sequence: Synthetic oligonucleotide
  Antisense Strand to SEQ ID NO: 342275
gugaguaacacauuaaggg

SEQ ID NO: 342277 - RNA, 19 nt, Artificial Sequence
  Description of Artificial Sequence: Synthetic oligonucleotide
  Sense Strand Starting at position 298 of SEQ ID NO: 318243
auguguuacucacccaaau

SEQ ID NO: 342278 - RNA, 19 nt, Artificial Sequence
  Description of Artificial Sequence: Synthetic oligonucleotide
  Antisense Strand to SEQ ID NO: 342277
auuugggugaguaacacau

SEQ ID NO: 342279 - RNA, 19 nt, Artificial Sequence
  Description of Artificial Sequence: Synthetic oligonucleotide
  Sense Strand Starting at position 298 of SEQ ID NO: 318273
guaucagcccaaggagaua

SEQ ID NO: 342280 - RNA, 19 nt, Artificial Sequence
  Description of Artificial Sequence: Synthetic oligonucleotide
  Antisense Strand to SEQ ID NO: 342279
uaucuccuugggcugauac

SEQ ID NO: 342281 - RNA, 19 nt, Artificial Sequence
  Description of Artificial Sequence: Synthetic oligonucleotide
  Sense Strand Starting at position 298 of SEQ ID NO: 318318
ucccauugcugucuuagaa

SEQ ID NO: 342282 - RNA, 19 nt, Artificial Sequence
  Description of Artificial Sequence: Synthetic oligonucleotide
  Antisense Strand to SEQ ID NO: 342281
uucuaagacagcaauggga

SEQ ID NO: 342283 - RNA, 19 nt, Artificial Sequence
  Description of Artificial Sequence: Synthetic oligonucleotide
  Sense Strand Starting at position 298 of SEQ ID NO: 318325
gcugucuuagaagaccaaa

SEQ ID NO: 342284 - RNA, 19 nt, Artificial Sequence
  Description of Artificial Sequence: Synthetic oligonucleotide
  Antisense Strand to SEQ ID NO: 342283
uuuggucuucuaagacagc

SEQ ID NO: 342285 - RNA, 19 nt, Artificial Sequence
  Description of Artificial Sequence: Synthetic oligonucleotide
  Sense Strand Starting at position 298 of SEQ ID NO: 318357
uggagauucuaucuccuaa

SEQ ID NO: 342286 - RNA, 19 nt, Artificial Sequence
  Description of Artificial Sequence: Synthetic oligonucleotide
  Antisense Strand to SEQ ID NO: 342285
uuaggagauagaaucucca

SEQ ID NO: 342287 - RNA, 19 nt, Artificial Sequence
  Description of Artificial Sequence: Synthetic oligonucleotide
  Sense Strand Starting at position 298 of SEQ ID NO: 318400
ggaguugccuugguucaaa

SEQ ID NO: 342288 - RNA, 19 nt, Artificial Sequence
  Description of Artificial Sequence: Synthetic oligonucleotide
  Antisense Strand to SEQ ID NO: 342287
uuugaaccaaggcaacucc

SEQ ID NO: 342289 - RNA, 19 nt, Artificial Sequence
  Description of Artificial Sequence: Synthetic oligonucleotide
  Sense Strand Starting at position 298 of SEQ ID NO: 318419
accuguuucucagcagaac

SEQ ID NO: 342290 - RNA, 19 nt, Artificial Sequence
  Description of Artificial Sequence: Synthetic oligonucleotide
  Antisense Strand to SEQ ID NO: 342289
guucugcugagaaacaggu

SEQ ID NO: 342291 - RNA, 19 nt, Artificial Sequence
  Description of Artificial Sequence: Synthetic oligonucleotide
  Sense Strand Starting at position 298 of SEQ ID NO: 318420
ccuguuucucagcagaacu

SEQ ID NO: 342292 - RNA, 19 nt, Artificial Sequence
  Description of Artificial Sequence: Synthetic oligonucleotide
  Antisense Strand to SEQ ID NO: 342291
aguucugcugagaaacagg

SEQ ID NO: 342293 - RNA, 19 nt, Artificial Sequence
  Description of Artificial Sequence: Synthetic oligonucleotide
  Sense Strand Starting at position 298 of SEQ ID NO: 318422
uguuucucagcagaacuau

SEQ ID NO: 342294 - RNA, 19 nt, Artificial Sequence
  Description of Artificial Sequence: Synthetic oligonucleotide
  Antisense Strand to SEQ ID NO: 342293
auaguucugcugagaaaca

SEQ ID NO: 342295 - RNA, 19 nt, Artificial Sequence
  Description of Artificial Sequence: Synthetic oligonucleotide
  Sense Strand Starting at position 298 of SEQ ID NO: 318447
agccuauuugccuagccua

SEQ ID NO: 342296 - RNA, 19 nt, Artificial Sequence
  Description of Artificial Sequence: Synthetic oligonucleotide
  Antisense Strand to SEQ ID NO: 342295
uaggcuaggcaaauaggcu

SEQ ID NO: 342297 - RNA, 19 nt, Artificial Sequence
  Description of Artificial Sequence: Synthetic oligonucleotide
  Sense Strand Starting at position 298 of SEQ ID NO: 318474
accucuccugccugguaaa

SEQ ID NO: 342298 - RNA, 19 nt, Artificial Sequence
  Description of Artificial Sequence: Synthetic oligonucleotide
  Antisense Strand to SEQ ID NO: 342297
uuuaccaggcaggagaggu

SEQ ID NO: 342299 - RNA, 19 nt, Artificial Sequence
  Description of Artificial Sequence: Synthetic oligonucleotide
  Sense Strand Starting at position 298 of SEQ ID NO: 318486
ugguaaacuccucaugcca

SEQ ID NO: 342300 - RNA, 19 nt, Artificial Sequence
  Description of Artificial Sequence: Synthetic oligonucleotide
  Antisense Strand to SEQ ID NO: 342299
uggcaugaggaguuuacca

SEQ ID NO: 342301 - RNA, 19 nt, Artificial Sequence
  Description of Artificial Sequence: Synthetic oligonucleotide
  Sense Strand Starting at position 298 of SEQ ID NO: 318488
guaaacuccucaugccaga

SEQ ID NO: 342302 - RNA, 19 nt, Artificial Sequence
  Description of Artificial Sequence: Synthetic oligonucleotide
  Antisense Strand to SEQ ID NO: 342301
ucuggcaugaggaguuuac

SEQ ID NO: 342303 - RNA, 19 nt, Artificial Sequence
  Description of Artificial Sequence: Synthetic oligonucleotide
  Sense Strand Starting at position 298 of SEQ ID NO: 318538
gaaggcuucucagcaguua

SEQ ID NO: 342304 - RNA, 19 nt, Artificial Sequence
  Description of Artificial Sequence: Synthetic oligonucleotide
  Antisense Strand to SEQ ID NO: 342303
uaacugcugagaagccuuc

SEQ ID NO: 342305 - RNA, 19 nt, Artificial Sequence
  Description of Artificial Sequence: Synthetic oligonucleotide
  Sense Strand Starting at position 298 of SEQ ID NO: 318588
aguuauuccucacuggacu

SEQ ID NO: 342306 - RNA, 19 nt, Artificial Sequence
  Description of Artificial Sequence: Synthetic oligonucleotide
  Antisense Strand to SEQ ID NO: 342305
aguccagugaggaauaacu

SEQ ID NO: 342307 - RNA, 19 nt, Artificial Sequence
  Description of Artificial Sequence: Synthetic oligonucleotide
  Sense Strand Starting at position 298 of SEQ ID NO: 318731
ggguaaggcucuuucuuuc

SEQ ID NO: 342308 - RNA, 19 nt, Artificial Sequence
  Description of Artificial Sequence: Synthetic oligonucleotide
  Antisense Strand to SEQ ID NO: 342307
gaaagaaagagccuuaccc

SEQ ID NO: 342309 - RNA, 19 nt, Artificial Sequence
  Description of Artificial Sequence: Synthetic oligonucleotide
  Sense Strand Starting at position 298 of SEQ ID NO: 318932
uauguagacucucuguguu

SEQ ID NO: 342310 - RNA, 19 nt, Artificial Sequence
  Description of Artificial Sequence: Synthetic oligonucleotide
  Antisense Strand to SEQ ID NO: 342309
aacacagagagucuacaua

SEQ ID NO: 342311 - RNA, 19 nt, Artificial Sequence
  Description of Artificial Sequence: Synthetic oligonucleotide
  Sense Strand Starting at position 298 of SEQ ID NO: 318971
ucggguuguggcugucaga

SEQ ID NO: 342312 - RNA, 19 nt, Artificial Sequence
  Description of Artificial Sequence: Synthetic oligonucleotide
  Antisense Strand to SEQ ID NO: 342311
ucugacagccacaacccga

SEQ ID NO: 342313 - RNA, 19 nt, Artificial Sequence
  Description of Artificial Sequence: Synthetic oligonucleotide
  Sense Strand Starting at position 298 of SEQ ID NO: 319019
gccagucugugugggaaga

SEQ ID NO: 342314 - RNA, 19 nt, Artificial Sequence
  Description of Artificial Sequence: Synthetic oligonucleotide
  Antisense Strand to SEQ ID NO: 342313
ucuucccacacagacuggc

SEQ ID NO: 342315 - RNA, 19 nt, Artificial Sequence
  Description of Artificial Sequence: Synthetic oligonucleotide
  Sense Strand Starting at position 298 of SEQ ID NO: 319095
aggguuuaauggaggaagu

SEQ ID NO: 342316 - RNA, 19 nt, Artificial Sequence
  Description of Artificial Sequence: Synthetic oligonucleotide
  Antisense Strand to SEQ ID NO: 342315
acuuccuccauuaaacccu

SEQ ID NO: 342317 - RNA, 19 nt, Artificial Sequence
  Description of Artificial Sequence: Synthetic oligonucleotide
  Sense Strand Starting at position 298 of SEQ ID NO: 319096
ggguuuaauggaggaaguu

SEQ ID NO: 342318 - RNA, 19 nt, Artificial Sequence
  Description of Artificial Sequence: Synthetic oligonucleotide
  Antisense Strand to SEQ ID NO: 342317
aacuuccuccauuaaaccc

SEQ ID NO: 342319 - RNA, 19 nt, Artificial Sequence
  Description of Artificial Sequence: Synthetic oligonucleotide
  Sense Strand Starting at position 298 of SEQ ID NO: 319175
ggagaugaagucugcuaac

SEQ ID NO: 342320 - RNA, 19 nt, Artificial Sequence
  Description of Artificial Sequence: Synthetic oligonucleotide
  Antisense Strand to SEQ ID NO: 342319
guuagcagacuucaucucc

SEQ ID NO: 342321 - RNA, 19 nt, Artificial Sequence
  Description of Artificial Sequence: Synthetic oligonucleotide
  Sense Strand Starting at position 298 of SEQ ID NO: 319178
gaugaagucugcuaacgcu

SEQ ID NO: 342322 - RNA, 19 nt, Artificial Sequence
  Description of Artificial Sequence: Synthetic oligonucleotide
  Antisense Strand to SEQ ID NO: 342321
agcguuagcagacuucauc

SEQ ID NO: 342323 - RNA, 19 nt, Artificial Sequence
  Description of Artificial Sequence: Synthetic oligonucleotide
  Sense Strand Starting at position 299 of SEQ ID NO: 315294
ucaggaacuuccugggaga

SEQ ID NO: 342324 - RNA, 19 nt, Artificial Sequence
  Description of Artificial Sequence: Synthetic oligonucleotide
  Antisense Strand to SEQ ID NO: 342323
ucucccaggaaguuccuga

SEQ ID NO: 342325 - RNA, 19 nt, Artificial Sequence
  Description of Artificial Sequence: Synthetic oligonucleotide
  Sense Strand Starting at position 299 of SEQ ID NO: 315475
cuggauaggugccaaaugu

SEQ ID NO: 342326 - RNA, 19 nt, Artificial Sequence
  Description of Artificial Sequence: Synthetic oligonucleotide
  Antisense Strand to SEQ ID NO: 342325
acauuuggcaccuauccag

SEQ ID NO: 342327 - RNA, 19 nt, Artificial Sequence
  Description of Artificial Sequence: Synthetic oligonucleotide
  Sense Strand Starting at position 299 of SEQ ID NO: 315485
gccaaauguuugcuggcua

SEQ ID NO: 342328 - RNA, 19 nt, Artificial Sequence
  Description of Artificial Sequence: Synthetic oligonucleotide
  Antisense Strand to SEQ ID NO: 342327
uagccagcaaacauuuggc

SEQ ID NO: 342329 - RNA, 19 nt, Artificial Sequence
  Description of Artificial Sequence: Synthetic oligonucleotide
  Sense Strand Starting at position 299 of SEQ ID NO: 315508
aggcacuuguuccugcaga

SEQ ID NO: 342330 - RNA, 19 nt, Artificial Sequence
  Description of Artificial Sequence: Synthetic oligonucleotide
  Antisense Strand to SEQ ID NO: 342329
ucugcaggaacaagugccu

SEQ ID NO: 342331 - RNA, 19 nt, Artificial Sequence
  Description of Artificial Sequence: Synthetic oligonucleotide
  Sense Strand Starting at position 299 of SEQ ID NO: 315689
ucuugaagcucugaauuga

SEQ ID NO: 342332 - RNA, 19 nt, Artificial Sequence
  Description of Artificial Sequence: Synthetic oligonucleotide
  Antisense Strand to SEQ ID NO: 342331
ucaauucagagcuucaaga

SEQ ID NO: 342333 - RNA, 19 nt, Artificial Sequence
  Description of Artificial Sequence: Synthetic oligonucleotide
  Sense Strand Starting at position 299 of SEQ ID NO: 315782
guaggucucuccgaggaag

SEQ ID NO: 342334 - RNA, 19 nt, Artificial Sequence
  Description of Artificial Sequence: Synthetic oligonucleotide
  Antisense Strand to SEQ ID NO: 342333
cuuccucggagagaccuac

SEQ ID NO: 342335 - RNA, 19 nt, Artificial Sequence
  Description of Artificial Sequence: Synthetic oligonucleotide
  Sense Strand Starting at position 299 of SEQ ID NO: 315784
aggucucuccgaggaagga

SEQ ID NO: 342336 - RNA, 19 nt, Artificial Sequence
  Description of Artificial Sequence: Synthetic oligonucleotide
  Antisense Strand to SEQ ID NO: 342335
uccuuccucggagagaccu

SEQ ID NO: 342337 - RNA, 19 nt, Artificial Sequence
  Description of Artificial Sequence: Synthetic oligonucleotide
  Sense Strand Starting at position 299 of SEQ ID NO: 315797
gaaggaauguaggcagagu

SEQ ID NO: 342338 - RNA, 19 nt, Artificial Sequence
  Description of Artificial Sequence: Synthetic oligonucleotide
  Antisense Strand to SEQ ID NO: 342337
acucugccuacauuccuuc

SEQ ID NO: 342339 - RNA, 19 nt, Artificial Sequence
  Description of Artificial Sequence: Synthetic oligonucleotide
  Sense Strand Starting at position 299 of SEQ ID NO: 315798
aaggaauguaggcagaguu

SEQ ID NO: 342340 - RNA, 19 nt, Artificial Sequence
  Description of Artificial Sequence: Synthetic oligonucleotide
  Antisense Strand to SEQ ID NO: 342339
aacucugccuacauuccuu

SEQ ID NO: 342341 - RNA, 19 nt, Artificial Sequence
  Description of Artificial Sequence: Synthetic oligonucleotide
  Sense Strand Starting at position 299 of SEQ ID NO: 315953
uuaaguagggagugacaau

SEQ ID NO: 342342 - RNA, 19 nt, Artificial Sequence
  Description of Artificial Sequence: Synthetic oligonucleotide
  Antisense Strand to SEQ ID NO: 342341
auugucacucccuacuuaa

SEQ ID NO: 342343 - RNA, 19 nt, Artificial Sequence
  Description of Artificial Sequence: Synthetic oligonucleotide
  Sense Strand Starting at position 299 of SEQ ID NO: 315962
gagugacaaugccagauuu

SEQ ID NO: 342344 - RNA, 19 nt, Artificial Sequence
  Description of Artificial Sequence: Synthetic oligonucleotide
  Antisense Strand to SEQ ID NO: 342343
aaaucuggcauugucacuc

SEQ ID NO: 342345 - RNA, 19 nt, Artificial Sequence
  Description of Artificial Sequence: Synthetic oligonucleotide
  Sense Strand Starting at position 299 of SEQ ID NO: 316171
gagacuucuggguggaggu

SEQ ID NO: 342346 - RNA, 19 nt, Artificial Sequence
  Description of Artificial Sequence: Synthetic oligonucleotide
  Antisense Strand to SEQ ID NO: 342345
accuccacccagaagucuc

SEQ ID NO: 342347 - RNA, 19 nt, Artificial Sequence
  Description of Artificial Sequence: Synthetic oligonucleotide
  Sense Strand Starting at position 299 of SEQ ID NO: 316276
gugacuaagugugugacua

SEQ ID NO: 342348 - RNA, 19 nt, Artificial Sequence
  Description of Artificial Sequence: Synthetic oligonucleotide
  Antisense Strand to SEQ ID NO: 342347
uagucacacacuuagucac

SEQ ID NO: 342349 - RNA, 19 nt, Artificial Sequence
  Description of Artificial Sequence: Synthetic oligonucleotide
  Sense Strand Starting at position 299 of SEQ ID NO: 316277
ugacuaagugugugacuau

SEQ ID NO: 342350 - RNA, 19 nt, Artificial Sequence
  Description of Artificial Sequence: Synthetic oligonucleotide
  Antisense Strand to SEQ ID NO: 342349
auagucacacacuuaguca

SEQ ID NO: 342351 - RNA, 19 nt, Artificial Sequence
  Description of Artificial Sequence: Synthetic oligonucleotide
  Sense Strand Starting at position 299 of SEQ ID NO: 316278
gacuaagugugugacuaug

SEQ ID NO: 342352 - RNA, 19 nt, Artificial Sequence
  Description of Artificial Sequence: Synthetic oligonucleotide
  Antisense Strand to SEQ ID NO: 342351
cauagucacacacuuaguc

SEQ ID NO: 342353 - RNA, 19 nt, Artificial Sequence
  Description of Artificial Sequence: Synthetic oligonucleotide
  Sense Strand Starting at position 299 of SEQ ID NO: 316389
aggagaagugcgugggaga

SEQ ID NO: 342354 - RNA, 19 nt, Artificial Sequence
  Description of Artificial Sequence: Synthetic oligonucleotide
  Antisense Strand to SEQ ID NO: 342353
ucucccacgcacuucuccu

SEQ ID NO: 342355 - RNA, 19 nt, Artificial Sequence
  Description of Artificial Sequence: Synthetic oligonucleotide
  Sense Strand Starting at position 299 of SEQ ID NO: 317245
cccuccucgucaguggaaa

SEQ ID NO: 342356 - RNA, 19 nt, Artificial Sequence
  Description of Artificial Sequence: Synthetic oligonucleotide
  Antisense Strand to SEQ ID NO: 342355
uuuccacugacgaggaggg

SEQ ID NO: 342357 - RNA, 19 nt, Artificial Sequence
  Description of Artificial Sequence: Synthetic oligonucleotide
  Sense Strand Starting at position 299 of SEQ ID NO: 317544
caguuuacagauggguaga

SEQ ID NO: 342358 - RNA, 19 nt, Artificial Sequence
  Description of Artificial Sequence: Synthetic oligonucleotide
  Antisense Strand to SEQ ID NO: 342357
ucuacccaucuguaaacug

SEQ ID NO: 342359 - RNA, 19 nt, Artificial Sequence
  Description of Artificial Sequence: Synthetic oligonucleotide
  Sense Strand Starting at position 299 of SEQ ID NO: 317802
ggauguaaucagugggccu

SEQ ID NO: 342360 - RNA, 19 nt, Artificial Sequence
  Description of Artificial Sequence: Synthetic oligonucleotide
  Antisense Strand to SEQ ID NO: 342359
aggcccacugauuacaucc

SEQ ID NO: 342361 - RNA, 19 nt, Artificial Sequence
  Description of Artificial Sequence: Synthetic oligonucleotide
  Sense Strand Starting at position 299 of SEQ ID NO: 317849
gacccuucccugcagaagu

SEQ ID NO: 342362 - RNA, 19 nt, Artificial Sequence
  Description of Artificial Sequence: Synthetic oligonucleotide
  Antisense Strand to SEQ ID NO: 342361
acuucugcagggaaggguc

SEQ ID NO: 342363 - RNA, 19 nt, Artificial Sequence
  Description of Artificial Sequence: Synthetic oligonucleotide
  Sense Strand Starting at position 299 of SEQ ID NO: 317939
ugguuucuuccgggccaga

SEQ ID NO: 342364 - RNA, 19 nt, Artificial Sequence
  Description of Artificial Sequence: Synthetic oligonucleotide
  Antisense Strand to SEQ ID NO: 342363
ucuggcccggaagaaacca

SEQ ID NO: 342365 - RNA, 19 nt, Artificial Sequence
  Description of Artificial Sequence: Synthetic oligonucleotide
  Sense Strand Starting at position 299 of SEQ ID NO: 317952
gccagaucuuggccacuua

SEQ ID NO: 342366 - RNA, 19 nt, Artificial Sequence
  Description of Artificial Sequence: Synthetic oligonucleotide
  Antisense Strand to SEQ ID NO: 342365
uaaguggccaagaucuggc

SEQ ID NO: 342367 - RNA, 19 nt, Artificial Sequence
  Description of Artificial Sequence: Synthetic oligonucleotide
  Sense Strand Starting at position 299 of SEQ ID NO: 317953
ccagaucuuggccacuuaa

SEQ ID NO: 342368 - RNA, 19 nt, Artificial Sequence
  Description of Artificial Sequence: Synthetic oligonucleotide
  Antisense Strand to SEQ ID NO: 342367
uuaaguggccaagaucugg

SEQ ID NO: 342369 - RNA, 19 nt, Artificial Sequence
  Description of Artificial Sequence: Synthetic oligonucleotide
  Sense Strand Starting at position 299 of SEQ ID NO: 318099
cagguacgagucuacucau

SEQ ID NO: 342370 - RNA, 19 nt, Artificial Sequence
  Description of Artificial Sequence: Synthetic oligonucleotide
  Antisense Strand to SEQ ID NO: 342369
augaguagacucguaccug

SEQ ID NO: 342371 - RNA, 19 nt, Artificial Sequence
  Description of Artificial Sequence: Synthetic oligonucleotide
  Sense Strand Starting at position 299 of SEQ ID NO: 318102
guacgagucuacucaucac

SEQ ID NO: 342372 - RNA, 19 nt, Artificial Sequence
  Description of Artificial Sequence: Synthetic oligonucleotide
  Antisense Strand to SEQ ID NO: 342371
gugaugaguagacucguac

SEQ ID NO: 342373 - RNA, 19 nt, Artificial Sequence
  Description of Artificial Sequence: Synthetic oligonucleotide
  Sense Strand Starting at position 299 of SEQ ID NO: 318157
ggucuucucgacuggaaug

SEQ ID NO: 342374 - RNA, 19 nt, Artificial Sequence
  Description of Artificial Sequence: Synthetic oligonucleotide
  Antisense Strand to SEQ ID NO: 342373
cauuccagucgagaagacc

SEQ ID NO: 342375 - RNA, 19 nt, Artificial Sequence
  Description of Artificial Sequence: Synthetic oligonucleotide
  Sense Strand Starting at position 299 of SEQ ID NO: 318304
gguucuucugacuguccua

SEQ ID NO: 342376 - RNA, 19 nt, Artificial Sequence
  Description of Artificial Sequence: Synthetic oligonucleotide
  Antisense Strand to SEQ ID NO: 342375
uaggacagucagaagaacc

SEQ ID NO: 342377 - RNA, 19 nt, Artificial Sequence
  Description of Artificial Sequence: Synthetic oligonucleotide
  Sense Strand Starting at position 299 of SEQ ID NO: 318307
ucuucugacuguccuagau

SEQ ID NO: 342378 - RNA, 19 nt, Artificial Sequence
  Description of Artificial Sequence: Synthetic oligonucleotide
  Antisense Strand to SEQ ID NO: 342377
aucuaggacagucagaaga

SEQ ID NO: 342379 - RNA, 19 nt, Artificial Sequence
  Description of Artificial Sequence: Synthetic oligonucleotide
  Sense Strand Starting at position 299 of SEQ ID NO: 318309
uucugacuguccuagauga

SEQ ID NO: 342380 - RNA, 19 nt, Artificial Sequence
  Description of Artificial Sequence: Synthetic oligonucleotide
  Antisense Strand to SEQ ID NO: 342379
ucaucuaggacagucagaa

SEQ ID NO: 342381 - RNA, 19 nt, Artificial Sequence
  Description of Artificial Sequence: Synthetic oligonucleotide
  Sense Strand Starting at position 299 of SEQ ID NO: 318457
cacagaugugcauguagaa

SEQ ID NO: 342382 - RNA, 19 nt, Artificial Sequence
  Description of Artificial Sequence: Synthetic oligonucleotide
  Antisense Strand to SEQ ID NO: 342381
uucuacaugcacaucugug

SEQ ID NO: 342383 - RNA, 19 nt, Artificial Sequence
  Description of Artificial Sequence: Synthetic oligonucleotide
  Sense Strand Starting at position 299 of SEQ ID NO: 318540
agauaaaggcccuguccuu

SEQ ID NO: 342384 - RNA, 19 nt, Artificial Sequence
  Description of Artificial Sequence: Synthetic oligonucleotide
  Antisense Strand to SEQ ID NO: 342383
aaggacagggccuuuaucu

SEQ ID NO: 342385 - RNA, 19 nt, Artificial Sequence
  Description of Artificial Sequence: Synthetic oligonucleotide
  Sense Strand Starting at position 299 of SEQ ID NO: 318637
ccaguacccuccugaugaa

SEQ ID NO: 342386 - RNA, 19 nt, Artificial Sequence
  Description of Artificial Sequence: Synthetic oligonucleotide
  Antisense Strand to SEQ ID NO: 342385
uucaucaggaggguacugg

SEQ ID NO: 342387 - RNA, 19 nt, Artificial Sequence
  Description of Artificial Sequence: Synthetic oligonucleotide
  Sense Strand Starting at position 299 of SEQ ID NO: 318682
cugaaauaaucggcccuuu

SEQ ID NO: 342388 - RNA, 19 nt, Artificial Sequence
  Description of Artificial Sequence: Synthetic oligonucleotide
  Antisense Strand to SEQ ID NO: 342387
aaagggccgauuauuucag

SEQ ID NO: 342389 - RNA, 19 nt, Artificial Sequence
  Description of Artificial Sequence: Synthetic oligonucleotide
  Sense Strand Starting at position 299 of SEQ ID NO: 318765
augccauuaauguguguac

SEQ ID NO: 342390 - RNA, 19 nt, Artificial Sequence
  Description of Artificial Sequence: Synthetic oligonucleotide
  Antisense Strand to SEQ ID NO: 342389
guacacacauuaauggcau

SEQ ID NO: 342391 - RNA, 19 nt, Artificial Sequence
  Description of Artificial Sequence: Synthetic oligonucleotide
  Sense Strand Starting at position 299 of SEQ ID NO: 318767
gccauuaauguguguacgu

SEQ ID NO: 342392 - RNA, 19 nt, Artificial Sequence
  Description of Artificial Sequence: Synthetic oligonucleotide
  Antisense Strand to SEQ ID NO: 342391
acguacacacauuaauggc

SEQ ID NO: 342393 - RNA, 19 nt, Artificial Sequence
  Description of Artificial Sequence: Synthetic oligonucleotide
  Sense Strand Starting at position 299 of SEQ ID NO: 318769
cauuaauguguguacgugu

SEQ ID NO: 342394 - RNA, 19 nt, Artificial Sequence
  Description of Artificial Sequence: Synthetic oligonucleotide
  Antisense Strand to SEQ ID NO: 342393
acacguacacacauuaaug

SEQ ID NO: 342395 - RNA, 19 nt, Artificial Sequence
  Description of Artificial Sequence: Synthetic oligonucleotide
  Sense Strand Starting at position 299 of SEQ ID NO: 318772
uaauguguguacgugucau

SEQ ID NO: 342396 - RNA, 19 nt, Artificial Sequence
  Description of Artificial Sequence: Synthetic oligonucleotide
  Antisense Strand to SEQ ID NO: 342395
augacacguacacacauua

SEQ ID NO: 342397 - RNA, 19 nt, Artificial Sequence
  Description of Artificial Sequence: Synthetic oligonucleotide
  Sense Strand Starting at position 299 of SEQ ID NO: 319125
uaacguuaguccuucugca

SEQ ID NO: 342398 - RNA, 19 nt, Artificial Sequence
  Description of Artificial Sequence: Synthetic oligonucleotide
  Antisense Strand to SEQ ID NO: 342397
ugcagaaggacuaacguua

SEQ ID NO: 342399 - RNA, 19 nt, Artificial Sequence
  Description of Artificial Sequence: Synthetic oligonucleotide
  Sense Strand Starting at position 299 of SEQ ID NO: 319158
auacaugagguaugauucu

SEQ ID NO: 342400 - RNA, 19 nt, Artificial Sequence
  Description of Artificial Sequence: Synthetic oligonucleotide
  Antisense Strand to SEQ ID NO: 342399
agaaucauaccucauguau

SEQ ID NO: 342401 - RNA, 19 nt, Artificial Sequence
  Description of Artificial Sequence: Synthetic oligonucleotide
  Sense Strand Starting at position 299 of SEQ ID NO: 319164
gagguaugauucugucgca

SEQ ID NO: 342402 - RNA, 19 nt, Artificial Sequence
  Description of Artificial Sequence: Synthetic oligonucleotide
  Antisense Strand to SEQ ID NO: 342401
ugcgacagaaucauaccuc

SEQ ID NO: 342403 - RNA, 19 nt, Artificial Sequence
  Description of Artificial Sequence: Synthetic oligonucleotide
  Sense Strand Starting at position 300 of SEQ ID NO: 315604
aucuaagguuuaucaagac

SEQ ID NO: 342404 - RNA, 19 nt, Artificial Sequence
  Description of Artificial Sequence: Synthetic oligonucleotide
  Antisense Strand to SEQ ID NO: 342403
gucuugauaaaccuuagau

SEQ ID NO: 342405 - RNA, 19 nt, Artificial Sequence
  Description of Artificial Sequence: Synthetic oligonucleotide
  Sense Strand Starting at position 300 of SEQ ID NO: 315650
guuugagaacauugaucug

SEQ ID NO: 342406 - RNA, 19 nt, Artificial Sequence
  Description of Artificial Sequence: Synthetic oligonucleotide
  Antisense Strand to SEQ ID NO: 342405
cagaucaauguucucaaac

SEQ ID NO: 342407 - RNA, 19 nt, Artificial Sequence
  Description of Artificial Sequence: Synthetic oligonucleotide
  Sense Strand Starting at position 300 of SEQ ID NO: 315821
gcuuucuaguucccagaau

SEQ ID NO: 342408 - RNA, 19 nt, Artificial Sequence
  Description of Artificial Sequence: Synthetic oligonucleotide
  Antisense Strand to SEQ ID NO: 342407
auucugggaacuagaaagc

SEQ ID NO: 342409 - RNA, 19 nt, Artificial Sequence
  Description of Artificial Sequence: Synthetic oligonucleotide
  Sense Strand Starting at position 300 of SEQ ID NO: 315892
gcugucauagaaugauguu

SEQ ID NO: 342410 - RNA, 19 nt, Artificial Sequence
  Description of Artificial Sequence: Synthetic oligonucleotide
  Antisense Strand to SEQ ID NO: 342409
aacaucauucuaugacagc

SEQ ID NO: 342411 - RNA, 19 nt, Artificial Sequence
  Description of Artificial Sequence: Synthetic oligonucleotide
  Sense Strand Starting at position 300 of SEQ ID NO: 316031
gcuagaugauagcuaauca

SEQ ID NO: 342412 - RNA, 19 nt, Artificial Sequence
  Description of Artificial Sequence: Synthetic oligonucleotide
  Antisense Strand to SEQ ID NO: 342411
ugauuagcuaucaucuagc

SEQ ID NO: 342413 - RNA, 19 nt, Artificial Sequence
  Description of Artificial Sequence: Synthetic oligonucleotide
  Sense Strand Starting at position 300 of SEQ ID NO: 316496
ucuguucuauuaguugaau

SEQ ID NO: 342414 - RNA, 19 nt, Artificial Sequence
  Description of Artificial Sequence: Synthetic oligonucleotide
  Antisense Strand to SEQ ID NO: 342413
auucaacuaauagaacaga

SEQ ID NO: 342415 - RNA, 19 nt, Artificial Sequence
  Description of Artificial Sequence: Synthetic oligonucleotide
  Sense Strand Starting at position 300 of SEQ ID NO: 316497
cuguucuauuaguugaauu

SEQ ID NO: 342416 - RNA, 19 nt, Artificial Sequence
  Description of Artificial Sequence: Synthetic oligonucleotide
  Antisense Strand to SEQ ID NO: 342415
aauucaacuaauagaacag

SEQ ID NO: 342417 - RNA, 19 nt, Artificial Sequence
  Description of Artificial Sequence: Synthetic oligonucleotide
  Sense Strand Starting at position 300 of SEQ ID NO: 316499
guucuauuaguugaauuac

SEQ ID NO: 342418 - RNA, 19 nt, Artificial Sequence
  Description of Artificial Sequence: Synthetic oligonucleotide
  Antisense Strand to SEQ ID NO: 342417
guaauucaacuaauagaac

SEQ ID NO: 342419 - RNA, 19 nt, Artificial Sequence
  Description of Artificial Sequence: Synthetic oligonucleotide
  Sense Strand Starting at position 300 of SEQ ID NO: 316567
ugaaguuuguaaguagauu

SEQ ID NO: 342420 - RNA, 19 nt, Artificial Sequence
  Description of Artificial Sequence: Synthetic oligonucleotide
  Antisense Strand to SEQ ID NO: 342419
aaucuacuuacaaacuuca

SEQ ID NO: 342421 - RNA, 19 nt, Artificial Sequence
  Description of Artificial Sequence: Synthetic oligonucleotide
  Sense Strand Starting at position 300 of SEQ ID NO: 316568
gaaguuuguaaguagauug

SEQ ID NO: 342422 - RNA, 19 nt, Artificial Sequence
  Description of Artificial Sequence: Synthetic oligonucleotide
  Antisense Strand to SEQ ID NO: 342421
caaucuacuuacaaacuuc

SEQ ID NO: 342423 - RNA, 19 nt, Artificial Sequence
  Description of Artificial Sequence: Synthetic oligonucleotide
  Sense Strand Starting at position 300 of SEQ ID NO: 316579
guagauugccuuuacaaua

SEQ ID NO: 342424 - RNA, 19 nt, Artificial Sequence
  Description of Artificial Sequence: Synthetic oligonucleotide
  Antisense Strand to SEQ ID NO: 342423
uauuguaaaggcaaucuac

SEQ ID NO: 342425 - RNA, 19 nt, Artificial Sequence
  Description of Artificial Sequence: Synthetic oligonucleotide
  Sense Strand Starting at position 300 of SEQ ID NO: 316637
agugcauuccaagacuacu

SEQ ID NO: 342426 - RNA, 19 nt, Artificial Sequence
  Description of Artificial Sequence: Synthetic oligonucleotide
  Antisense Strand to SEQ ID NO: 342425
aguagucuuggaaugcacu

SEQ ID NO: 342427 - RNA, 19 nt, Artificial Sequence
  Description of Artificial Sequence: Synthetic oligonucleotide
  Sense Strand Starting at position 300 of SEQ ID NO: 316694
uuggcuucacuuggugaga

SEQ ID NO: 342428 - RNA, 19 nt, Artificial Sequence
  Description of Artificial Sequence: Synthetic oligonucleotide
  Antisense Strand to SEQ ID NO: 342427
ucucaccaagugaagccaa

SEQ ID NO: 342429 - RNA, 19 nt, Artificial Sequence
  Description of Artificial Sequence: Synthetic oligonucleotide
  Sense Strand Starting at position 300 of SEQ ID NO: 316695
uggcuucacuuggugagau

SEQ ID NO: 342430 - RNA, 19 nt, Artificial Sequence
  Description of Artificial Sequence: Synthetic oligonucleotide
  Antisense Strand to SEQ ID NO: 342429
aucucaccaagugaagcca

SEQ ID NO: 342431 - RNA, 19 nt, Artificial Sequence
  Description of Artificial Sequence: Synthetic oligonucleotide
  Sense Strand Starting at position 300 of SEQ ID NO: 316734
cugaauuaguaauucuaga

SEQ ID NO: 342432 - RNA, 19 nt, Artificial Sequence
  Description of Artificial Sequence: Synthetic oligonucleotide
  Antisense Strand to SEQ ID NO: 342431
ucuagaauuacuaauucag

SEQ ID NO: 342433 - RNA, 19 nt, Artificial Sequence
  Description of Artificial Sequence: Synthetic oligonucleotide
  Sense Strand Starting at position 300 of SEQ ID NO: 316983
gggacaacuuaugaaucaa

SEQ ID NO: 342434 - RNA, 19 nt, Artificial Sequence
  Description of Artificial Sequence: Synthetic oligonucleotide
  Antisense Strand to SEQ ID NO: 342433
uugauucauaaguuguccc

SEQ ID NO: 342435 - RNA, 19 nt, Artificial Sequence
  Description of Artificial Sequence: Synthetic oligonucleotide
  Sense Strand Starting at position 300 of SEQ ID NO: 317277
ucuugcuuccuggagagaa

SEQ ID NO: 342436 - RNA, 19 nt, Artificial Sequence
  Description of Artificial Sequence: Synthetic oligonucleotide
  Antisense Strand to SEQ ID NO: 342435
uucucuccaggaagcaaga

SEQ ID NO: 342437 - RNA, 19 nt, Artificial Sequence
  Description of Artificial Sequence: Synthetic oligonucleotide
  Sense Strand Starting at position 300 of SEQ ID NO: 317287
uggagagaauaugcuacau

SEQ ID NO: 342438 - RNA, 19 nt, Artificial Sequence
  Description of Artificial Sequence: Synthetic oligonucleotide
  Antisense Strand to SEQ ID NO: 342437
auguagcauauucucucca

SEQ ID NO: 342439 - RNA, 19 nt, Artificial Sequence
  Description of Artificial Sequence: Synthetic oligonucleotide
  Sense Strand Starting at position 300 of SEQ ID NO: 317517
uaauaaugucaagguuagu

SEQ ID NO: 342440 - RNA, 19 nt, Artificial Sequence
  Description of Artificial Sequence: Synthetic oligonucleotide
  Antisense Strand to SEQ ID NO: 342439
acuaaccuugacauuauua

SEQ ID NO: 342441 - RNA, 19 nt, Artificial Sequence
  Description of Artificial Sequence: Synthetic oligonucleotide
  Sense Strand Starting at position 300 of SEQ ID NO: 317520
uaaugucaagguuaguuua

SEQ ID NO: 342442 - RNA, 19 nt, Artificial Sequence
  Description of Artificial Sequence: Synthetic oligonucleotide
  Antisense Strand to SEQ ID NO: 342441
uaaacuaaccuugacauua

SEQ ID NO: 342443 - RNA, 19 nt, Artificial Sequence
  Description of Artificial Sequence: Synthetic oligonucleotide
  Sense Strand Starting at position 300 of SEQ ID NO: 317522
augucaagguuaguuuaga

SEQ ID NO: 342444 - RNA, 19 nt, Artificial Sequence
  Description of Artificial Sequence: Synthetic oligonucleotide
  Antisense Strand to SEQ ID NO: 342443
ucuaaacuaaccuugacau

SEQ ID NO: 342445 - RNA, 19 nt, Artificial Sequence
  Description of Artificial Sequence: Synthetic oligonucleotide
  Sense Strand Starting at position 300 of SEQ ID NO: 317523
ugucaagguuaguuuagaa

SEQ ID NO: 342446 - RNA, 19 nt, Artificial Sequence
  Description of Artificial Sequence: Synthetic oligonucleotide
  Antisense Strand to SEQ ID NO: 342445
uucuaaacuaaccuugaca

SEQ ID NO: 342447 - RNA, 19 nt, Artificial Sequence
  Description of Artificial Sequence: Synthetic oligonucleotide
  Sense Strand Starting at position 300 of SEQ ID NO: 317571
gaucuaucuggaggaccuu

SEQ ID NO: 342448 - RNA, 19 nt, Artificial Sequence
  Description of Artificial Sequence: Synthetic oligonucleotide
  Antisense Strand to SEQ ID NO: 342447
aagguccuccagauagauc

SEQ ID NO: 342449 - RNA, 19 nt, Artificial Sequence
  Description of Artificial Sequence: Synthetic oligonucleotide
  Sense Strand Starting at position 300 of SEQ ID NO: 317596
augugucuucuuuacucuu

SEQ ID NO: 342450 - RNA, 19 nt, Artificial Sequence
  Description of Artificial Sequence: Synthetic oligonucleotide
  Antisense Strand to SEQ ID NO: 342449
aagaguaaagaagacacau

SEQ ID NO: 342451 - RNA, 19 nt, Artificial Sequence
  Description of Artificial Sequence: Synthetic oligonucleotide
  Sense Strand Starting at position 300 of SEQ ID NO: 317715
ugucauauuugcuugcugu

SEQ ID NO: 342452 - RNA, 19 nt, Artificial Sequence
  Description of Artificial Sequence: Synthetic oligonucleotide
  Antisense Strand to SEQ ID NO: 342451
acagcaagcaaauaugaca

SEQ ID NO: 342453 - RNA, 19 nt, Artificial Sequence
  Description of Artificial Sequence: Synthetic oligonucleotide
  Sense Strand Starting at position 300 of SEQ ID NO: 317716
gucauauuugcuugcuguu

SEQ ID NO: 342454 - RNA, 19 nt, Artificial Sequence
  Description of Artificial Sequence: Synthetic oligonucleotide
  Antisense Strand to SEQ ID NO: 342453
aacagcaagcaaauaugac

SEQ ID NO: 342455 - RNA, 19 nt, Artificial Sequence
  Description of Artificial Sequence: Synthetic oligonucleotide
  Sense Strand Starting at position 300 of SEQ ID NO: 317820
ggcaaaguacauggugaau

SEQ ID NO: 342456 - RNA, 19 nt, Artificial Sequence
  Description of Artificial Sequence: Synthetic oligonucleotide
  Antisense Strand to SEQ ID NO: 342455
auucaccauguacuuugcc

SEQ ID NO: 342457 - RNA, 19 nt, Artificial Sequence
  Description of Artificial Sequence: Synthetic oligonucleotide
  Sense Strand Starting at position 300 of SEQ ID NO: 317978
gagccuuucuauguugaua

SEQ ID NO: 342458 - RNA, 19 nt, Artificial Sequence
  Description of Artificial Sequence: Synthetic oligonucleotide
  Antisense Strand to SEQ ID NO: 342457
uaucaacauagaaaggcuc

SEQ ID NO: 342459 - RNA, 19 nt, Artificial Sequence
  Description of Artificial Sequence: Synthetic oligonucleotide
  Sense Strand Starting at position 300 of SEQ ID NO: 318037
uuccuuuaacugugauaug

SEQ ID NO: 342460 - RNA, 19 nt, Artificial Sequence
  Description of Artificial Sequence: Synthetic oligonucleotide
  Antisense Strand to SEQ ID NO: 342459
cauaucacaguuaaaggaa

SEQ ID NO: 342461 - RNA, 19 nt, Artificial Sequence
  Description of Artificial Sequence: Synthetic oligonucleotide
  Sense Strand Starting at position 300 of SEQ ID NO: 318131
uucucuauugaugacgauu

SEQ ID NO: 342462 - RNA, 19 nt, Artificial Sequence
  Description of Artificial Sequence: Synthetic oligonucleotide
  Antisense Strand to SEQ ID NO: 342461
aaucgucaucaauagagaa

SEQ ID NO: 342463 - RNA, 19 nt, Artificial Sequence
  Description of Artificial Sequence: Synthetic oligonucleotide
  Sense Strand Starting at position 300 of SEQ ID NO: 318215
agggcuucugcagacaacu

SEQ ID NO: 342464 - RNA, 19 nt, Artificial Sequence
  Description of Artificial Sequence: Synthetic oligonucleotide
  Antisense Strand to SEQ ID NO: 342463
aguugucugcagaagcccu

SEQ ID NO: 342465 - RNA, 19 nt, Artificial Sequence
  Description of Artificial Sequence: Synthetic oligonucleotide
  Sense Strand Starting at position 300 of SEQ ID NO: 318224
gcagacaacuuaucuagaa

SEQ ID NO: 342466 - RNA, 19 nt, Artificial Sequence
  Description of Artificial Sequence: Synthetic oligonucleotide
  Antisense Strand to SEQ ID NO: 342465
uucuagauaaguugucugc

SEQ ID NO: 342467 - RNA, 19 nt, Artificial Sequence
  Description of Artificial Sequence: Synthetic oligonucleotide
  Sense Strand Starting at position 300 of SEQ ID NO: 318249
uggccacauugugugaaua

SEQ ID NO: 342468 - RNA, 19 nt, Artificial Sequence
  Description of Artificial Sequence: Synthetic oligonucleotide
  Antisense Strand to SEQ ID NO: 342467
uauucacacaauguggcca

SEQ ID NO: 342469 - RNA, 19 nt, Artificial Sequence
  Description of Artificial Sequence: Synthetic oligonucleotide
  Sense Strand Starting at position 300 of SEQ ID NO: 318250
ggccacauugugugaauau

SEQ ID NO: 342470 - RNA, 19 nt, Artificial Sequence
  Description of Artificial Sequence: Synthetic oligonucleotide
  Antisense Strand to SEQ ID NO: 342469
auauucacacaauguggcc

SEQ ID NO: 342471 - RNA, 19 nt, Artificial Sequence
  Description of Artificial Sequence: Synthetic oligonucleotide
  Sense Strand Starting at position 300 of SEQ ID NO: 318295
gggaauauauaauacauac

SEQ ID NO: 342472 - RNA, 19 nt, Artificial Sequence
  Description of Artificial Sequence: Synthetic oligonucleotide
  Antisense Strand to SEQ ID NO: 342471
guauguauuauauauuccc

SEQ ID NO: 342473 - RNA, 19 nt, Artificial Sequence
  Description of Artificial Sequence: Synthetic oligonucleotide
  Sense Strand Starting at position 300 of SEQ ID NO: 318404
agacaauuauuggcaccaa

SEQ ID NO: 342474 - RNA, 19 nt, Artificial Sequence
  Description of Artificial Sequence: Synthetic oligonucleotide
  Antisense Strand to SEQ ID NO: 342473
uuggugccaauaauugucu

SEQ ID NO: 342475 - RNA, 19 nt, Artificial Sequence
  Description of Artificial Sequence: Synthetic oligonucleotide
  Sense Strand Starting at position 300 of SEQ ID NO: 318901
uuuggagacuguucuauau

SEQ ID NO: 342476 - RNA, 19 nt, Artificial Sequence
  Description of Artificial Sequence: Synthetic oligonucleotide
  Antisense Strand to SEQ ID NO: 342475
auauagaacagucuccaaa

SEQ ID NO: 342477 - RNA, 19 nt, Artificial Sequence
  Description of Artificial Sequence: Synthetic oligonucleotide
  Sense Strand Starting at position 300 of SEQ ID NO: 318970
uggcaaacucuuggagcua

SEQ ID NO: 342478 - RNA, 19 nt, Artificial Sequence
  Description of Artificial Sequence: Synthetic oligonucleotide
  Antisense Strand to SEQ ID NO: 342477
uagcuccaagaguuugcca

SEQ ID NO: 342479 - RNA, 19 nt, Artificial Sequence
  Description of Artificial Sequence: Synthetic oligonucleotide
  Sense Strand Starting at position 300 of SEQ ID NO: 318995
ugucuuacaggcuaaacua

SEQ ID NO: 342480 - RNA, 19 nt, Artificial Sequence
  Description of Artificial Sequence: Synthetic oligonucleotide
  Antisense Strand to SEQ ID NO: 342479
uaguuuagccuguaagaca

SEQ ID NO: 342481 - RNA, 19 nt, Artificial Sequence
  Description of Artificial Sequence: Synthetic oligonucleotide
  Sense Strand Starting at position 300 of SEQ ID NO: 319117
aucugaagacuuuggcuca

SEQ ID NO: 342482 - RNA, 19 nt, Artificial Sequence
  Description of Artificial Sequence: Synthetic oligonucleotide
  Antisense Strand to SEQ ID NO: 342481
ugagccaaagucuucagau

SEQ ID NO: 342483 - RNA, 19 nt, Artificial Sequence
  Description of Artificial Sequence: Synthetic oligonucleotide
  Sense Strand Starting at position 301 of SEQ ID NO: 315247
uguggauucucucuggcaa

SEQ ID NO: 342484 - RNA, 19 nt, Artificial Sequence
  Description of Artificial Sequence: Synthetic oligonucleotide
  Antisense Strand to SEQ ID NO: 342483
uugccagagagaauccaca

SEQ ID NO: 342485 - RNA, 19 nt, Artificial Sequence
  Description of Artificial Sequence: Synthetic oligonucleotide
  Sense Strand Starting at position 301 of SEQ ID NO: 315248
guggauucucucuggcaaa

SEQ ID NO: 342486 - RNA, 19 nt, Artificial Sequence
  Description of Artificial Sequence: Synthetic oligonucleotide
  Antisense Strand to SEQ ID NO: 342485
uuugccagagagaauccac

SEQ ID NO: 342487 - RNA, 19 nt, Artificial Sequence
  Description of Artificial Sequence: Synthetic oligonucleotide
  Sense Strand Starting at position 301 of SEQ ID NO: 315249
uggauucucucuggcaaag

SEQ ID NO: 342488 - RNA, 19 nt, Artificial Sequence
  Description of Artificial Sequence: Synthetic oligonucleotide
  Antisense Strand to SEQ ID NO: 342487
cuuugccagagagaaucca

SEQ ID NO: 342489 - RNA, 19 nt, Artificial Sequence
  Description of Artificial Sequence: Synthetic oligonucleotide
  Sense Strand Starting at position 301 of SEQ ID NO: 315424
ccacuugggucccagagaa

SEQ ID NO: 342490 - RNA, 19 nt, Artificial Sequence
  Description of Artificial Sequence: Synthetic oligonucleotide
  Antisense Strand to SEQ ID NO: 342489
uucucugggacccaagugg

SEQ ID NO: 342491 - RNA, 19 nt, Artificial Sequence
  Description of Artificial Sequence: Synthetic oligonucleotide
  Sense Strand Starting at position 301 of SEQ ID NO: 315459
ggagcacucucuugcagaa

SEQ ID NO: 342492 - RNA, 19 nt, Artificial Sequence
  Description of Artificial Sequence: Synthetic oligonucleotide
  Antisense Strand to SEQ ID NO: 342491
uucugcaagagagugcucc

SEQ ID NO: 342493 - RNA, 19 nt, Artificial Sequence
  Description of Artificial Sequence: Synthetic oligonucleotide
  Sense Strand Starting at position 301 of SEQ ID NO: 315461
agcacucucuugcagaauu

SEQ ID NO: 342494 - RNA, 19 nt, Artificial Sequence
  Description of Artificial Sequence: Synthetic oligonucleotide
  Antisense Strand to SEQ ID NO: 342493
aauucugcaagagagugcu

SEQ ID NO: 342495 - RNA, 19 nt, Artificial Sequence
  Description of Artificial Sequence: Synthetic oligonucleotide
  Sense Strand Starting at position 301 of SEQ ID NO: 315512
cugagagaguuugaauucu

SEQ ID NO: 342496 - RNA, 19 nt, Artificial Sequence
  Description of Artificial Sequence: Synthetic oligonucleotide
  Antisense Strand to SEQ ID NO: 342495
agaauucaaacucucucag

SEQ ID NO: 342497 - RNA, 19 nt, Artificial Sequence
  Description of Artificial Sequence: Synthetic oligonucleotide
  Sense Strand Starting at position 301 of SEQ ID NO: 315566
auacaauguuuguggucua

SEQ ID NO: 342498 - RNA, 19 nt, Artificial Sequence
  Description of Artificial Sequence: Synthetic oligonucleotide
  Antisense Strand to SEQ ID NO: 342497
uagaccacaaacauuguau

SEQ ID NO: 342499 - RNA, 19 nt, Artificial Sequence
  Description of Artificial Sequence: Synthetic oligonucleotide
  Sense Strand Starting at position 301 of SEQ ID NO: 315569
caauguuuguggucuacga

SEQ ID NO: 342500 - RNA, 19 nt, Artificial Sequence
  Description of Artificial Sequence: Synthetic oligonucleotide
  Antisense Strand to SEQ ID NO: 342499
ucguagaccacaaacauug

SEQ ID NO: 342501 - RNA, 19 nt, Artificial Sequence
  Description of Artificial Sequence: Synthetic oligonucleotide
  Sense Strand Starting at position 301 of SEQ ID NO: 315571
auguuuguggucuacgaaa

SEQ ID NO: 342502 - RNA, 19 nt, Artificial Sequence
  Description of Artificial Sequence: Synthetic oligonucleotide
  Antisense Strand to SEQ ID NO: 342501
uuucguagaccacaaacau

SEQ ID NO: 342503 - RNA, 19 nt, Artificial Sequence
  Description of Artificial Sequence: Synthetic oligonucleotide
  Sense Strand Starting at position 301 of SEQ ID NO: 315573
guuuguggucuacgaaacu

SEQ ID NO: 342504 - RNA, 19 nt, Artificial Sequence
  Description of Artificial Sequence: Synthetic oligonucleotide
  Antisense Strand to SEQ ID NO: 342503
aguuucguagaccacaaac

SEQ ID NO: 342505 - RNA, 19 nt, Artificial Sequence
  Description of Artificial Sequence: Synthetic oligonucleotide
  Sense Strand Starting at position 301 of SEQ ID NO: 315903
agcuuuagucaccagaaca

SEQ ID NO: 342506 - RNA, 19 nt, Artificial Sequence
  Description of Artificial Sequence: Synthetic oligonucleotide
  Antisense Strand to SEQ ID NO: 342505
uguucuggugacuaaagcu

SEQ ID NO: 342507 - RNA, 19 nt, Artificial Sequence
  Description of Artificial Sequence: Synthetic oligonucleotide
  Sense Strand Starting at position 301 of SEQ ID NO: 315928
gccagauuccuugacccuu

SEQ ID NO: 342508 - RNA, 19 nt, Artificial Sequence
  Description of Artificial Sequence: Synthetic oligonucleotide
  Antisense Strand to SEQ ID NO: 342507
aagggucaaggaaucuggc

SEQ ID NO: 342509 - RNA, 19 nt, Artificial Sequence
  Description of Artificial Sequence: Synthetic oligonucleotide
  Sense Strand Starting at position 301 of SEQ ID NO: 315982
cacagaaaguuccaggcau

SEQ ID NO: 342510 - RNA, 19 nt, Artificial Sequence
  Description of Artificial Sequence: Synthetic oligonucleotide
  Antisense Strand to SEQ ID NO: 342509
augccuggaacuuucugug

SEQ ID NO: 342511 - RNA, 19 nt, Artificial Sequence
  Description of Artificial Sequence: Synthetic oligonucleotide
  Sense Strand Starting at position 301 of SEQ ID NO: 316019
ccaagucucuaagugggaa

SEQ ID NO: 342512 - RNA, 19 nt, Artificial Sequence
  Description of Artificial Sequence: Synthetic oligonucleotide
  Antisense Strand to SEQ ID NO: 342511
uucccacuuagagacuugg

SEQ ID NO: 342513 - RNA, 19 nt, Artificial Sequence
  Description of Artificial Sequence: Synthetic oligonucleotide
  Sense Strand Starting at position 301 of SEQ ID NO: 316161
ggacacuccuggcacuaua

SEQ ID NO: 342514 - RNA, 19 nt, Artificial Sequence
  Description of Artificial Sequence: Synthetic oligonucleotide
  Antisense Strand to SEQ ID NO: 342513
uauagugccaggagugucc

SEQ ID NO: 342515 - RNA, 19 nt, Artificial Sequence
  Description of Artificial Sequence: Synthetic oligonucleotide
  Sense Strand Starting at position 301 of SEQ ID NO: 316188
acaagugcccuuuaaagcu

SEQ ID NO: 342516 - RNA, 19 nt, Artificial Sequence
  Description of Artificial Sequence: Synthetic oligonucleotide
  Antisense Strand to SEQ ID NO: 342515
agcuuuaaagggcacuugu

SEQ ID NO: 342517 - RNA, 19 nt, Artificial Sequence
  Description of Artificial Sequence: Synthetic oligonucleotide
  Sense Strand Starting at position 301 of SEQ ID NO: 316196
ccuuuaaagcuggguccua

SEQ ID NO: 342518 - RNA, 19 nt, Artificial Sequence
  Description of Artificial Sequence: Synthetic oligonucleotide
  Antisense Strand to SEQ ID NO: 342517
uaggacccagcuuuaaagg

SEQ ID NO: 342519 - RNA, 19 nt, Artificial Sequence
  Description of Artificial Sequence: Synthetic oligonucleotide
  Sense Strand Starting at position 301 of SEQ ID NO: 316197
cuuuaaagcuggguccuaa

SEQ ID NO: 342520 - RNA, 19 nt, Artificial Sequence
  Description of Artificial Sequence: Synthetic oligonucleotide
  Antisense Strand to SEQ ID NO: 342519
uuaggacccagcuuuaaag

SEQ ID NO: 342521 - RNA, 19 nt, Artificial Sequence
  Description of Artificial Sequence: Synthetic oligonucleotide
  Sense Strand Starting at position 301 of SEQ ID NO: 316376
auggccucauugucugaua

SEQ ID NO: 342522 - RNA, 19 nt, Artificial Sequence
  Description of Artificial Sequence: Synthetic oligonucleotide
  Antisense Strand to SEQ ID NO: 342521
uaucagacaaugaggccau

SEQ ID NO: 342523 - RNA, 19 nt, Artificial Sequence
  Description of Artificial Sequence: Synthetic oligonucleotide
  Sense Strand Starting at position 301 of SEQ ID NO: 316378
ggccucauugucugauaca

SEQ ID NO: 342524 - RNA, 19 nt, Artificial Sequence
  Description of Artificial Sequence: Synthetic oligonucleotide
  Antisense Strand to SEQ ID NO: 342523
uguaucagacaaugaggcc

SEQ ID NO: 342525 - RNA, 19 nt, Artificial Sequence
  Description of Artificial Sequence: Synthetic oligonucleotide
  Sense Strand Starting at position 301 of SEQ ID NO: 316379
gccucauugucugauacac

SEQ ID NO: 342526 - RNA, 19 nt, Artificial Sequence
  Description of Artificial Sequence: Synthetic oligonucleotide
  Antisense Strand to SEQ ID NO: 342525
guguaucagacaaugaggc

SEQ ID NO: 342527 - RNA, 19 nt, Artificial Sequence
  Description of Artificial Sequence: Synthetic oligonucleotide
  Sense Strand Starting at position 301 of SEQ ID NO: 316381
cucauugucugauacacag

SEQ ID NO: 342528 - RNA, 19 nt, Artificial Sequence
  Description of Artificial Sequence: Synthetic oligonucleotide
  Antisense Strand to SEQ ID NO: 342527
cuguguaucagacaaugag

SEQ ID NO: 342529 - RNA, 19 nt, Artificial Sequence
  Description of Artificial Sequence: Synthetic oligonucleotide
  Sense Strand Starting at position 301 of SEQ ID NO: 316532
gguguagucacacaaucau

SEQ ID NO: 342530 - RNA, 19 nt, Artificial Sequence
  Description of Artificial Sequence: Synthetic oligonucleotide
  Antisense Strand to SEQ ID NO: 342529
augauugugugacuacacc

SEQ ID NO: 342531 - RNA, 19 nt, Artificial Sequence
  Description of Artificial Sequence: Synthetic oligonucleotide
  Sense Strand Starting at position 301 of SEQ ID NO: 316560
caaacucugucaggaguga

SEQ ID NO: 342532 - RNA, 19 nt, Artificial Sequence
  Description of Artificial Sequence: Synthetic oligonucleotide
  Antisense Strand to SEQ ID NO: 342531
ucacuccugacagaguuug

SEQ ID NO: 342533 - RNA, 19 nt, Artificial Sequence
  Description of Artificial Sequence: Synthetic oligonucleotide
  Sense Strand Starting at position 301 of SEQ ID NO: 316750
cugugaggugcacacauau

SEQ ID NO: 342534 - RNA, 19 nt, Artificial Sequence
  Description of Artificial Sequence: Synthetic oligonucleotide
  Antisense Strand to SEQ ID NO: 342533
auaugugugcaccucacag

SEQ ID NO: 342535 - RNA, 19 nt, Artificial Sequence
  Description of Artificial Sequence: Synthetic oligonucleotide
  Sense Strand Starting at position 301 of SEQ ID NO: 316819
cuuagaaccucuguguuag

SEQ ID NO: 342536 - RNA, 19 nt, Artificial Sequence
  Description of Artificial Sequence: Synthetic oligonucleotide
  Antisense Strand to SEQ ID NO: 342535
cuaacacagagguucuaag

SEQ ID NO: 342537 - RNA, 19 nt, Artificial Sequence
  Description of Artificial Sequence: Synthetic oligonucleotide
  Sense Strand Starting at position 301 of SEQ ID NO: 317847
cagaaugagugaggugaga

SEQ ID NO: 342538 - RNA, 19 nt, Artificial Sequence
  Description of Artificial Sequence: Synthetic oligonucleotide
  Antisense Strand to SEQ ID NO: 342537
ucucaccucacucauucug

SEQ ID NO: 342539 - RNA, 19 nt, Artificial Sequence
  Description of Artificial Sequence: Synthetic oligonucleotide
  Sense Strand Starting at position 301 of SEQ ID NO: 317889
ggaggagucugaggcagau

SEQ ID NO: 342540 - RNA, 19 nt, Artificial Sequence
  Description of Artificial Sequence: Synthetic oligonucleotide
  Antisense Strand to SEQ ID NO: 342539
aucugccucagacuccucc

SEQ ID NO: 342541 - RNA, 19 nt, Artificial Sequence
  Description of Artificial Sequence: Synthetic oligonucleotide
  Sense Strand Starting at position 301 of SEQ ID NO: 318339
ucgggagugaucugugcag

SEQ ID NO: 342542 - RNA, 19 nt, Artificial Sequence
  Description of Artificial Sequence: Synthetic oligonucleotide
  Antisense Strand to SEQ ID NO: 342541
cugcacagaucacucccga

SEQ ID NO: 342543 - RNA, 19 nt, Artificial Sequence
  Description of Artificial Sequence: Synthetic oligonucleotide
  Sense Strand Starting at position 301 of SEQ ID NO: 318340
cgggagugaucugugcaga

SEQ ID NO: 342544 - RNA, 19 nt, Artificial Sequence
  Description of Artificial Sequence: Synthetic oligonucleotide
  Antisense Strand to SEQ ID NO: 342543
ucugcacagaucacucccg

SEQ ID NO: 342545 - RNA, 19 nt, Artificial Sequence
  Description of Artificial Sequence: Synthetic oligonucleotide
  Sense Strand Starting at position 301 of SEQ ID NO: 318341
gggagugaucugugcagag

SEQ ID NO: 342546 - RNA, 19 nt, Artificial Sequence
  Description of Artificial Sequence: Synthetic oligonucleotide
  Antisense Strand to SEQ ID NO: 342545
cucugcacagaucacuccc

SEQ ID NO: 342547 - RNA, 19 nt, Artificial Sequence
  Description of Artificial Sequence: Synthetic oligonucleotide
  Sense Strand Starting at position 301 of SEQ ID NO: 318343
gagugaucugugcagagag

SEQ ID NO: 342548 - RNA, 19 nt, Artificial Sequence
  Description of Artificial Sequence: Synthetic oligonucleotide
  Antisense Strand to SEQ ID NO: 342547
cucucugcacagaucacuc

SEQ ID NO: 342549 - RNA, 19 nt, Artificial Sequence
  Description of Artificial Sequence: Synthetic oligonucleotide
  Sense Strand Starting at position 301 of SEQ ID NO: 318406
gcgggacucgcgucagcau

SEQ ID NO: 342550 - RNA, 19 nt, Artificial Sequence
  Description of Artificial Sequence: Synthetic oligonucleotide
  Antisense Strand to SEQ ID NO: 342549
augcugacgcgagucccgc

SEQ ID NO: 342551 - RNA, 19 nt, Artificial Sequence
  Description of Artificial Sequence: Synthetic oligonucleotide
  Sense Strand Starting at position 301 of SEQ ID NO: 318481
gugagggugucgugacuga

SEQ ID NO: 342552 - RNA, 19 nt, Artificial Sequence
  Description of Artificial Sequence: Synthetic oligonucleotide
  Antisense Strand to SEQ ID NO: 342551
ucagucacgacacccucac

SEQ ID NO: 342553 - RNA, 19 nt, Artificial Sequence
  Description of Artificial Sequence: Synthetic oligonucleotide
  Sense Strand Starting at position 301 of SEQ ID NO: 318606
agggacugugcuugugcaa

SEQ ID NO: 342554 - RNA, 19 nt, Artificial Sequence
  Description of Artificial Sequence: Synthetic oligonucleotide
  Antisense Strand to SEQ ID NO: 342553
uugcacaagcacagucccu

SEQ ID NO: 342555 - RNA, 19 nt, Artificial Sequence
  Description of Artificial Sequence: Synthetic oligonucleotide
  Sense Strand Starting at position 301 of SEQ ID NO: 318830
gcgcgcucuccacgaauca

SEQ ID NO: 342556 - RNA, 19 nt, Artificial Sequence
  Description of Artificial Sequence: Synthetic oligonucleotide
  Antisense Strand to SEQ ID NO: 342555
ugauucguggagagcgcgc

SEQ ID NO: 342557 - RNA, 19 nt, Artificial Sequence
  Description of Artificial Sequence: Synthetic oligonucleotide
  Sense Strand Starting at position 301 of SEQ ID NO: 319095
ucuccaaaguauuaaagga

SEQ ID NO: 342558 - RNA, 19 nt, Artificial Sequence
  Description of Artificial Sequence: Synthetic oligonucleotide
  Antisense Strand to SEQ ID NO: 342557
uccuuuaauacuuuggaga

SEQ ID NO: 342559 - RNA, 19 nt, Artificial Sequence
  Description of Artificial Sequence: Synthetic oligonucleotide
  Sense Strand Starting at position 301 of SEQ ID NO: 319161
ggucucuguaccuguagga

SEQ ID NO: 342560 - RNA, 19 nt, Artificial Sequence
  Description of Artificial Sequence: Synthetic oligonucleotide
  Antisense Strand to SEQ ID NO: 342559
uccuacagguacagagacc

SEQ ID NO: 342561 - RNA, 19 nt, Artificial Sequence
  Description of Artificial Sequence: Synthetic oligonucleotide
  Sense Strand Starting at position 301 of SEQ ID NO: 319201
gggagacaguccugggaca

SEQ ID NO: 342562 - RNA, 19 nt, Artificial Sequence
  Description of Artificial Sequence: Synthetic oligonucleotide
  Antisense Strand to SEQ ID NO: 342561
ugucccaggacugucuccc

SEQ ID NO: 342563 - RNA, 19 nt, Artificial Sequence
  Description of Artificial Sequence: Synthetic oligonucleotide
  Sense Strand Starting at position 302 of SEQ ID NO: 315255
aaugaauauugggcgcaaa

SEQ ID NO: 342564 - RNA, 19 nt, Artificial Sequence
  Description of Artificial Sequence: Synthetic oligonucleotide
  Antisense Strand to SEQ ID NO: 342563
uuugcgcccaauauucauu

SEQ ID NO: 342565 - RNA, 19 nt, Artificial Sequence
  Description of Artificial Sequence: Synthetic oligonucleotide
  Sense Strand Starting at position 302 of SEQ ID NO: 315256
augaauauugggcgcaaau

SEQ ID NO: 342566 - RNA, 19 nt, Artificial Sequence
  Description of Artificial Sequence: Synthetic oligonucleotide
  Antisense Strand to SEQ ID NO: 342565
auuugcgcccaauauucau

SEQ ID NO: 342567 - RNA, 19 nt, Artificial Sequence
  Description of Artificial Sequence: Synthetic oligonucleotide
  Sense Strand Starting at position 302 of SEQ ID NO: 315258
gaauauugggcgcaaauua

SEQ ID NO: 342568 - RNA, 19 nt, Artificial Sequence
  Description of Artificial Sequence: Synthetic oligonucleotide
  Antisense Strand to SEQ ID NO: 342567
uaauuugcgcccaauauuc

SEQ ID NO: 342569 - RNA, 19 nt, Artificial Sequence
  Description of Artificial Sequence: Synthetic oligonucleotide
  Sense Strand Starting at position 302 of SEQ ID NO: 315266
ggcgcaaauuaaccaaauu

SEQ ID NO: 342570 - RNA, 19 nt, Artificial Sequence
  Description of Artificial Sequence: Synthetic oligonucleotide
  Antisense Strand to SEQ ID NO: 342569
aauuugguuaauuugcgcc

SEQ ID NO: 342571 - RNA, 19 nt, Artificial Sequence
  Description of Artificial Sequence: Synthetic oligonucleotide
  Sense Strand Starting at position 302 of SEQ ID NO: 315487
uuuacuauuucuuaggaug

SEQ ID NO: 342572 - RNA, 19 nt, Artificial Sequence
  Description of Artificial Sequence: Synthetic oligonucleotide
  Antisense Strand to SEQ ID NO: 342571
cauccuaagaaauaguaaa

SEQ ID NO: 342573 - RNA, 19 nt, Artificial Sequence
  Description of Artificial Sequence: Synthetic oligonucleotide
  Sense Strand Starting at position 302 of SEQ ID NO: 315490
acuauuucuuaggaugaau

SEQ ID NO: 342574 - RNA, 19 nt, Artificial Sequence
  Description of Artificial Sequence: Synthetic oligonucleotide
  Antisense Strand to SEQ ID NO: 342573
auucauccuaagaaauagu

SEQ ID NO: 342575 - RNA, 19 nt, Artificial Sequence
  Description of Artificial Sequence: Synthetic oligonucleotide
  Sense Strand Starting at position 302 of SEQ ID NO: 315568
ugaaauggcuuccuaaauu

SEQ ID NO: 342576 - RNA, 19 nt, Artificial Sequence
  Description of Artificial Sequence: Synthetic oligonucleotide
  Antisense Strand to SEQ ID NO: 342575
aauuuaggaagccauuuca

SEQ ID NO: 342577 - RNA, 19 nt, Artificial Sequence
  Description of Artificial Sequence: Synthetic oligonucleotide
  Sense Strand Starting at position 302 of SEQ ID NO: 315660
caaguugaugucuagccua

SEQ ID NO: 342578 - RNA, 19 nt, Artificial Sequence
  Description of Artificial Sequence: Synthetic oligonucleotide
  Antisense Strand to SEQ ID NO: 342577
uaggcuagacaucaacuug

SEQ ID NO: 342579 - RNA, 19 nt, Artificial Sequence
  Description of Artificial Sequence: Synthetic oligonucleotide
  Sense Strand Starting at position 302 of SEQ ID NO: 315665
ugaugucuagccuaagcca

SEQ ID NO: 342580 - RNA, 19 nt, Artificial Sequence
  Description of Artificial Sequence: Synthetic oligonucleotide
  Antisense Strand to SEQ ID NO: 342579
uggcuuaggcuagacauca

SEQ ID NO: 342581 - RNA, 19 nt, Artificial Sequence
  Description of Artificial Sequence: Synthetic oligonucleotide
  Sense Strand Starting at position 302 of SEQ ID NO: 316146
cgaagcggucugagucaga

SEQ ID NO: 342582 - RNA, 19 nt, Artificial Sequence
  Description of Artificial Sequence: Synthetic oligonucleotide
  Antisense Strand to SEQ ID NO: 342581
ucugacucagaccgcuucg

SEQ ID NO: 342583 - RNA, 19 nt, Artificial Sequence
  Description of Artificial Sequence: Synthetic oligonucleotide
  Sense Strand Starting at position 302 of SEQ ID NO: 316388
agaguuuaguugcucuaag

SEQ ID NO: 342584 - RNA, 19 nt, Artificial Sequence
  Description of Artificial Sequence: Synthetic oligonucleotide
  Antisense Strand to SEQ ID NO: 342583
cuuagagcaacuaaacucu

SEQ ID NO: 342585 - RNA, 19 nt, Artificial Sequence
  Description of Artificial Sequence: Synthetic oligonucleotide
  Sense Strand Starting at position 302 of SEQ ID NO: 316389
gaguuuaguugcucuaagg

SEQ ID NO: 342586 - RNA, 19 nt, Artificial Sequence
  Description of Artificial Sequence: Synthetic oligonucleotide
  Antisense Strand to SEQ ID NO: 342585
ccuuagagcaacuaaacuc

SEQ ID NO: 342587 - RNA, 19 nt, Artificial Sequence
  Description of Artificial Sequence: Synthetic oligonucleotide
  Sense Strand Starting at position 302 of SEQ ID NO: 316398
ugcucuaagguuuaaaguu

SEQ ID NO: 342588 - RNA, 19 nt, Artificial Sequence
  Description of Artificial Sequence: Synthetic oligonucleotide
  Antisense Strand to SEQ ID NO: 342587
aacuuuaaaccuuagagca

SEQ ID NO: 342589 - RNA, 19 nt, Artificial Sequence
  Description of Artificial Sequence: Synthetic oligonucleotide
  Sense Strand Starting at position 302 of SEQ ID NO: 316487
aggaaaucuuaagagaaag

SEQ ID NO: 342590 - RNA, 19 nt, Artificial Sequence
  Description of Artificial Sequence: Synthetic oligonucleotide
  Antisense Strand to SEQ ID NO: 342589
cuuucucuuaagauuuccu

SEQ ID NO: 342591 - RNA, 19 nt, Artificial Sequence
  Description of Artificial Sequence: Synthetic oligonucleotide
  Sense Strand Starting at position 302 of SEQ ID NO: 316952
gaaguuuggcuccgagagg

SEQ ID NO: 342592 - RNA, 19 nt, Artificial Sequence
  Description of Artificial Sequence: Synthetic oligonucleotide
  Antisense Strand to SEQ ID NO: 342591
ccucucggagccaaacuuc

SEQ ID NO: 342593 - RNA, 19 nt, Artificial Sequence
  Description of Artificial Sequence: Synthetic oligonucleotide
  Sense Strand Starting at position 302 of SEQ ID NO: 317982
cugugaacucuccguagaa

SEQ ID NO: 342594 - RNA, 19 nt, Artificial Sequence
  Description of Artificial Sequence: Synthetic oligonucleotide
  Antisense Strand to SEQ ID NO: 342593
uucuacggagaguucacag

SEQ ID NO: 342595 - RNA, 19 nt, Artificial Sequence
  Description of Artificial Sequence: Synthetic oligonucleotide
  Sense Strand Starting at position 302 of SEQ ID NO: 317983
ugugaacucuccguagaac

SEQ ID NO: 342596 - RNA, 19 nt, Artificial Sequence
  Description of Artificial Sequence: Synthetic oligonucleotide
  Antisense Strand to SEQ ID NO: 342595
guucuacggagaguucaca

SEQ ID NO: 342597 - RNA, 19 nt, Artificial Sequence
  Description of Artificial Sequence: Synthetic oligonucleotide
  Sense Strand Starting at position 302 of SEQ ID NO: 318020
ucaacaaguccuuaggagu

SEQ ID NO: 342598 - RNA, 19 nt, Artificial Sequence
  Description of Artificial Sequence: Synthetic oligonucleotide
  Antisense Strand to SEQ ID NO: 342597
acuccuaaggacuuguuga

SEQ ID NO: 342599 - RNA, 19 nt, Artificial Sequence
  Description of Artificial Sequence: Synthetic oligonucleotide
  Sense Strand Starting at position 302 of SEQ ID NO: 318035
gaguaccuacugugaacaa

SEQ ID NO: 342600 - RNA, 19 nt, Artificial Sequence
  Description of Artificial Sequence: Synthetic oligonucleotide
  Antisense Strand to SEQ ID NO: 342599
uuguucacaguagguacuc

SEQ ID NO: 342601 - RNA, 19 nt, Artificial Sequence
  Description of Artificial Sequence: Synthetic oligonucleotide
  Sense Strand Starting at position 302 of SEQ ID NO: 318087
ugucaauuagguuaauucu

SEQ ID NO: 342602 - RNA, 19 nt, Artificial Sequence
  Description of Artificial Sequence: Synthetic oligonucleotide
  Antisense Strand to SEQ ID NO: 342601
agaauuaaccuaauugaca

SEQ ID NO: 342603 - RNA, 19 nt, Artificial Sequence
  Description of Artificial Sequence: Synthetic oligonucleotide
  Sense Strand Starting at position 302 of SEQ ID NO: 318128
uuccacuugucacuaggua

SEQ ID NO: 342604 - RNA, 19 nt, Artificial Sequence
  Description of Artificial Sequence: Synthetic oligonucleotide
  Antisense Strand to SEQ ID NO: 342603
uaccuagugacaaguggaa

SEQ ID NO: 342605 - RNA, 19 nt, Artificial Sequence
  Description of Artificial Sequence: Synthetic oligonucleotide
  Sense Strand Starting at position 302 of SEQ ID NO: 318129
uccacuugucacuagguau

SEQ ID NO: 342606 - RNA, 19 nt, Artificial Sequence
  Description of Artificial Sequence: Synthetic oligonucleotide
  Antisense Strand to SEQ ID NO: 342605
auaccuagugacaagugga

SEQ ID NO: 342607 - RNA, 19 nt, Artificial Sequence
  Description of Artificial Sequence: Synthetic oligonucleotide
  Sense Strand Starting at position 302 of SEQ ID NO: 318132
acuugucacuagguaucaa

SEQ ID NO: 342608 - RNA, 19 nt, Artificial Sequence
  Description of Artificial Sequence: Synthetic oligonucleotide
  Antisense Strand to SEQ ID NO: 342607
uugauaccuagugacaagu

SEQ ID NO: 342609 - RNA, 19 nt, Artificial Sequence
  Description of Artificial Sequence: Synthetic oligonucleotide
  Sense Strand Starting at position 302 of SEQ ID NO: 318195
cgguauuacuuauuuguga

SEQ ID NO: 342610 - RNA, 19 nt, Artificial Sequence
  Description of Artificial Sequence: Synthetic oligonucleotide
  Antisense Strand to SEQ ID NO: 342609
ucacaaauaaguaauaccg

SEQ ID NO: 342611 - RNA, 19 nt, Artificial Sequence
  Description of Artificial Sequence: Synthetic oligonucleotide
  Sense Strand Starting at position 302 of SEQ ID NO: 318215
auccaaguauguuuauaga

SEQ ID NO: 342612 - RNA, 19 nt, Artificial Sequence
  Description of Artificial Sequence: Synthetic oligonucleotide
  Antisense Strand to SEQ ID NO: 342611
ucuauaaacauacuuggau

SEQ ID NO: 342613 - RNA, 19 nt, Artificial Sequence
  Description of Artificial Sequence: Synthetic oligonucleotide
  Sense Strand Starting at position 302 of SEQ ID NO: 318235
aaagcuaucgauuaagcag

SEQ ID NO: 342614 - RNA, 19 nt, Artificial Sequence
  Description of Artificial Sequence: Synthetic oligonucleotide
  Antisense Strand to SEQ ID NO: 342613
cugcuuaaucgauagcuuu

SEQ ID NO: 342615 - RNA, 19 nt, Artificial Sequence
  Description of Artificial Sequence: Synthetic oligonucleotide
  Sense Strand Starting at position 302 of SEQ ID NO: 318363
caacaaguaugaucgauuc

SEQ ID NO: 342616 - RNA, 19 nt, Artificial Sequence
  Description of Artificial Sequence: Synthetic oligonucleotide
  Antisense Strand to SEQ ID NO: 342615
gaaucgaucauacuuguug

SEQ ID NO: 342617 - RNA, 19 nt, Artificial Sequence
  Description of Artificial Sequence: Synthetic oligonucleotide
  Sense Strand Starting at position 302 of SEQ ID NO: 318448
cagugaaaguuaccucugu

SEQ ID NO: 342618 - RNA, 19 nt, Artificial Sequence
  Description of Artificial Sequence: Synthetic oligonucleotide
  Antisense Strand to SEQ ID NO: 342617
acagagguaacuuucacug

SEQ ID NO: 342619 - RNA, 19 nt, Artificial Sequence
  Description of Artificial Sequence: Synthetic oligonucleotide
  Sense Strand Starting at position 302 of SEQ ID NO: 318557
ggagguaggauauguaguu

SEQ ID NO: 342620 - RNA, 19 nt, Artificial Sequence
  Description of Artificial Sequence: Synthetic oligonucleotide
  Antisense Strand to SEQ ID NO: 342619
aacuacauauccuaccucc

SEQ ID NO: 342621 - RNA, 19 nt, Artificial Sequence
  Description of Artificial Sequence: Synthetic oligonucleotide
  Sense Strand Starting at position 302 of SEQ ID NO: 318558
gagguaggauauguaguuu

SEQ ID NO: 342622 - RNA, 19 nt, Artificial Sequence
  Description of Artificial Sequence: Synthetic oligonucleotide
  Antisense Strand to SEQ ID NO: 342621
aaacuacauauccuaccuc

SEQ ID NO: 342623 - RNA, 19 nt, Artificial Sequence
  Description of Artificial Sequence: Synthetic oligonucleotide
  Sense Strand Starting at position 302 of SEQ ID NO: 318564
ggauauguaguuuaaggca

SEQ ID NO: 342624 - RNA, 19 nt, Artificial Sequence
  Description of Artificial Sequence: Synthetic oligonucleotide
  Antisense Strand to SEQ ID NO: 342623
ugccuuaaacuacauaucc

SEQ ID NO: 342625 - RNA, 19 nt, Artificial Sequence
  Description of Artificial Sequence: Synthetic oligonucleotide
  Sense Strand Starting at position 302 of SEQ ID NO: 318727
agaugauguucagugagau

SEQ ID NO: 342626 - RNA, 19 nt, Artificial Sequence
  Description of Artificial Sequence: Synthetic oligonucleotide
  Antisense Strand to SEQ ID NO: 342625
aucucacugaacaucaucu

SEQ ID NO: 342627 - RNA, 19 nt, Artificial Sequence
  Description of Artificial Sequence: Synthetic oligonucleotide
  Sense Strand Starting at position 302 of SEQ ID NO: 318740
ugagauccauugucuagaa

SEQ ID NO: 342628 - RNA, 19 nt, Artificial Sequence
  Description of Artificial Sequence: Synthetic oligonucleotide
  Antisense Strand to SEQ ID NO: 342627
uucuagacaauggaucuca

SEQ ID NO: 342629 - RNA, 19 nt, Artificial Sequence
  Description of Artificial Sequence: Synthetic oligonucleotide
  Sense Strand Starting at position 302 of SEQ ID NO: 318741
gagauccauugucuagaaa

SEQ ID NO: 342630 - RNA, 19 nt, Artificial Sequence
  Description of Artificial Sequence: Synthetic oligonucleotide
  Antisense Strand to SEQ ID NO: 342629
uuucuagacaauggaucuc

SEQ ID NO: 342631 - RNA, 19 nt, Artificial Sequence
  Description of Artificial Sequence: Synthetic oligonucleotide
  Sense Strand Starting at position 302 of SEQ ID NO: 318795
agaaucuaaguguagcuau

SEQ ID NO: 342632 - RNA, 19 nt, Artificial Sequence
  Description of Artificial Sequence: Synthetic oligonucleotide
  Antisense Strand to SEQ ID NO: 342631
auagcuacacuuagauucu

SEQ ID NO: 342633 - RNA, 19 nt, Artificial Sequence
  Description of Artificial Sequence: Synthetic oligonucleotide
  Sense Strand Starting at position 302 of SEQ ID NO: 318812
auugguuguggucacaauu

SEQ ID NO: 342634 - RNA, 19 nt, Artificial Sequence
  Description of Artificial Sequence: Synthetic oligonucleotide
  Antisense Strand to SEQ ID NO: 342633
aauugugaccacaaccaau

SEQ ID NO: 342635 - RNA, 19 nt, Artificial Sequence
  Description of Artificial Sequence: Synthetic oligonucleotide
  Sense Strand Starting at position 302 of SEQ ID NO: 319078
ucuugaaauugguuaagaa

SEQ ID NO: 342636 - RNA, 19 nt, Artificial Sequence
  Description of Artificial Sequence: Synthetic oligonucleotide
  Antisense Strand to SEQ ID NO: 342635
uucuuaaccaauuucaaga

SEQ ID NO: 342637 - RNA, 19 nt, Artificial Sequence
  Description of Artificial Sequence: Synthetic oligonucleotide
  Sense Strand Starting at position 302 of SEQ ID NO: 319142
uuuguauuucucuguucca

SEQ ID NO: 342638 - RNA, 19 nt, Artificial Sequence
  Description of Artificial Sequence: Synthetic oligonucleotide
  Antisense Strand to SEQ ID NO: 342637
uggaacagagaaauacaaa

SEQ ID NO: 342639 - RNA, 19 nt, Artificial Sequence
  Description of Artificial Sequence: Synthetic oligonucleotide
  Sense Strand Starting at position 302 of SEQ ID NO: 319143
uuguauuucucuguuccau

SEQ ID NO: 342640 - RNA, 19 nt, Artificial Sequence
  Description of Artificial Sequence: Synthetic oligonucleotide
  Antisense Strand to SEQ ID NO: 342639
auggaacagagaaauacaa

SEQ ID NO: 342641 - RNA, 19 nt, Artificial Sequence
  Description of Artificial Sequence: Synthetic oligonucleotide
  Sense Strand Starting at position 302 of SEQ ID NO: 319145
guauuucucuguuccauua

SEQ ID NO: 342642 - RNA, 19 nt, Artificial Sequence
  Description of Artificial Sequence: Synthetic oligonucleotide
  Antisense Strand to SEQ ID NO: 342641
uaauggaacagagaaauac

SEQ ID NO: 342643 - RNA, 19 nt, Artificial Sequence
  Description of Artificial Sequence: Synthetic oligonucleotide
  Sense Strand Starting at position 303 of SEQ ID NO: 315237
ugcaguuuccuagaaucaa

SEQ ID NO: 342644 - RNA, 19 nt, Artificial Sequence
  Description of Artificial Sequence: Synthetic oligonucleotide
  Antisense Strand to SEQ ID NO: 342643
uugauucuaggaaacugca

SEQ ID NO: 342645 - RNA, 19 nt, Artificial Sequence
  Description of Artificial Sequence: Synthetic oligonucleotide
  Sense Strand Starting at position 303 of SEQ ID NO: 315448
uuagcaacccauggucaau

SEQ ID NO: 342646 - RNA, 19 nt, Artificial Sequence
  Description of Artificial Sequence: Synthetic oligonucleotide
  Antisense Strand to SEQ ID NO: 342645
auugaccauggguugcuaa

SEQ ID NO: 342647 - RNA, 19 nt, Artificial Sequence
  Description of Artificial Sequence: Synthetic oligonucleotide
  Sense Strand Starting at position 303 of SEQ ID NO: 315451
gcaacccauggucaauauu

SEQ ID NO: 342648 - RNA, 19 nt, Artificial Sequence
  Description of Artificial Sequence: Synthetic oligonucleotide
  Antisense Strand to SEQ ID NO: 342647
aauauugaccauggguugc

SEQ ID NO: 342649 - RNA, 19 nt, Artificial Sequence
  Description of Artificial Sequence: Synthetic oligonucleotide
  Sense Strand Starting at position 303 of SEQ ID NO: 315720
ccagguugaguguauuaua

SEQ ID NO: 342650 - RNA, 19 nt, Artificial Sequence
  Description of Artificial Sequence: Synthetic oligonucleotide
  Antisense Strand to SEQ ID NO: 342649
uauaauacacucaaccugg

SEQ ID NO: 342651 - RNA, 19 nt, Artificial Sequence
  Description of Artificial Sequence: Synthetic oligonucleotide
  Sense Strand Starting at position 303 of SEQ ID NO: 315988
acgaguauuucccuuuccu

SEQ ID NO: 342652 - RNA, 19 nt, Artificial Sequence
  Description of Artificial Sequence: Synthetic oligonucleotide
  Antisense Strand to SEQ ID NO: 342651
aggaaagggaaauacucgu

SEQ ID NO: 342653 - RNA, 19 nt, Artificial Sequence
  Description of Artificial Sequence: Synthetic oligonucleotide
  Sense Strand Starting at position 303 of SEQ ID NO: 316031
agaguuagccaauaguauc

SEQ ID NO: 342654 - RNA, 19 nt, Artificial Sequence
  Description of Artificial Sequence: Synthetic oligonucleotide
  Antisense Strand to SEQ ID NO: 342653
gauacuauuggcuaacucu

SEQ ID NO: 342655 - RNA, 19 nt, Artificial Sequence
  Description of Artificial Sequence: Synthetic oligonucleotide
  Sense Strand Starting at position 303 of SEQ ID NO: 316048
ucuuguuuccuguaaggga

SEQ ID NO: 342656 - RNA, 19 nt, Artificial Sequence
  Description of Artificial Sequence: Synthetic oligonucleotide
  Antisense Strand to SEQ ID NO: 342655
ucccuuacaggaaacaaga

SEQ ID NO: 342657 - RNA, 19 nt, Artificial Sequence
  Description of Artificial Sequence: Synthetic oligonucleotide
  Sense Strand Starting at position 303 of SEQ ID NO: 316350
cagaguacucacuggacca

SEQ ID NO: 342658 - RNA, 19 nt, Artificial Sequence
  Description of Artificial Sequence: Synthetic oligonucleotide
  Antisense Strand to SEQ ID NO: 342657
ugguccagugaguacucug

SEQ ID NO: 342659 - RNA, 19 nt, Artificial Sequence
  Description of Artificial Sequence: Synthetic oligonucleotide
  Sense Strand Starting at position 303 of SEQ ID NO: 316451
ccuauaucugcugaauuag

SEQ ID NO: 342660 - RNA, 19 nt, Artificial Sequence
  Description of Artificial Sequence: Synthetic oligonucleotide
  Antisense Strand to SEQ ID NO: 342659
cuaauucagcagauauagg

SEQ ID NO: 342661 - RNA, 19 nt, Artificial Sequence
  Description of Artificial Sequence: Synthetic oligonucleotide
  Sense Strand Starting at position 303 of SEQ ID NO: 316489
uucuuagaagagugauaug

SEQ ID NO: 342662 - RNA, 19 nt, Artificial Sequence
  Description of Artificial Sequence: Synthetic oligonucleotide
  Antisense Strand to SEQ ID NO: 342661
cauaucacucuucuaagaa

SEQ ID NO: 342663 - RNA, 19 nt, Artificial Sequence
  Description of Artificial Sequence: Synthetic oligonucleotide
  Sense Strand Starting at position 303 of SEQ ID NO: 316494
agaagagugauaugcauac

SEQ ID NO: 342664 - RNA, 19 nt, Artificial Sequence
  Description of Artificial Sequence: Synthetic oligonucleotide
  Antisense Strand to SEQ ID NO: 342663
guaugcauaucacucuucu

SEQ ID NO: 342665 - RNA, 19 nt, Artificial Sequence
  Description of Artificial Sequence: Synthetic oligonucleotide
  Sense Strand Starting at position 303 of SEQ ID NO: 316507
gcauacuaaguuugagaag

SEQ ID NO: 342666 - RNA, 19 nt, Artificial Sequence
  Description of Artificial Sequence: Synthetic oligonucleotide
  Antisense Strand to SEQ ID NO: 342665
cuucucaaacuuaguaugc

SEQ ID NO: 342667 - RNA, 19 nt, Artificial Sequence
  Description of Artificial Sequence: Synthetic oligonucleotide
  Sense Strand Starting at position 303 of SEQ ID NO: 316519
ugagaagcuuugguacuga

SEQ ID NO: 342668 - RNA, 19 nt, Artificial Sequence
  Description of Artificial Sequence: Synthetic oligonucleotide
  Antisense Strand to SEQ ID NO: 342667
ucaguaccaaagcuucuca

SEQ ID NO: 342669 - RNA, 19 nt, Artificial Sequence
  Description of Artificial Sequence: Synthetic oligonucleotide
  Sense Strand Starting at position 303 of SEQ ID NO: 316565
guagaugcucgguaaauau

SEQ ID NO: 342670 - RNA, 19 nt, Artificial Sequence
  Description of Artificial Sequence: Synthetic oligonucleotide
  Antisense Strand to SEQ ID NO: 342669
auauuuaccgagcaucuac

SEQ ID NO: 342671 - RNA, 19 nt, Artificial Sequence
  Description of Artificial Sequence: Synthetic oligonucleotide
  Sense Strand Starting at position 303 of SEQ ID NO: 316609
ggcauuuaguggcucccua

SEQ ID NO: 342672 - RNA, 19 nt, Artificial Sequence
  Description of Artificial Sequence: Synthetic oligonucleotide
  Antisense Strand to SEQ ID NO: 342671
uagggagccacuaaaugcc

SEQ ID NO: 342673 - RNA, 19 nt, Artificial Sequence
  Description of Artificial Sequence: Synthetic oligonucleotide
  Sense Strand Starting at position 303 of SEQ ID NO: 316855
uggcauaugcuauauaauu

SEQ ID NO: 342674 - RNA, 19 nt, Artificial Sequence
  Description of Artificial Sequence: Synthetic oligonucleotide
  Antisense Strand to SEQ ID NO: 342673
aauuauauagcauaugcca

SEQ ID NO: 342675 - RNA, 19 nt, Artificial Sequence
  Description of Artificial Sequence: Synthetic oligonucleotide
  Sense Strand Starting at position 303 of SEQ ID NO: 317375
gagggcuccuuucuuggau

SEQ ID NO: 342676 - RNA, 19 nt, Artificial Sequence
  Description of Artificial Sequence: Synthetic oligonucleotide
  Antisense Strand to SEQ ID NO: 342675
auccaagaaaggagcccuc

SEQ ID NO: 342677 - RNA, 19 nt, Artificial Sequence
  Description of Artificial Sequence: Synthetic oligonucleotide
  Sense Strand Starting at position 303 of SEQ ID NO: 317387
cuuggaucuggccaagacu

SEQ ID NO: 342678 - RNA, 19 nt, Artificial Sequence
  Description of Artificial Sequence: Synthetic oligonucleotide
  Antisense Strand to SEQ ID NO: 342677
agucuuggccagauccaag

SEQ ID NO: 342679 - RNA, 19 nt, Artificial Sequence
  Description of Artificial Sequence: Synthetic oligonucleotide
  Sense Strand Starting at position 303 of SEQ ID NO: 317499
cauccagggccuggauaau

SEQ ID NO: 342680 - RNA, 19 nt, Artificial Sequence
  Description of Artificial Sequence: Synthetic oligonucleotide
  Antisense Strand to SEQ ID NO: 342679
auuauccaggcccuggaug

SEQ ID NO: 342681 - RNA, 19 nt, Artificial Sequence
  Description of Artificial Sequence: Synthetic oligonucleotide
  Sense Strand Starting at position 303 of SEQ ID NO: 317932
augccauggcuuggauaga

SEQ ID NO: 342682 - RNA, 19 nt, Artificial Sequence
  Description of Artificial Sequence: Synthetic oligonucleotide
  Antisense Strand to SEQ ID NO: 342681
ucuauccaagccauggcau

SEQ ID NO: 342683 - RNA, 19 nt, Artificial Sequence
  Description of Artificial Sequence: Synthetic oligonucleotide
  Sense Strand Starting at position 303 of SEQ ID NO: 317942
uuggauagauaccugugaa

SEQ ID NO: 342684 - RNA, 19 nt, Artificial Sequence
  Description of Artificial Sequence: Synthetic oligonucleotide
  Antisense Strand to SEQ ID NO: 342683
uucacagguaucuauccaa

SEQ ID NO: 342685 - RNA, 19 nt, Artificial Sequence
  Description of Artificial Sequence: Synthetic oligonucleotide
  Sense Strand Starting at position 303 of SEQ ID NO: 317943
uggauagauaccugugaau

SEQ ID NO: 342686 - RNA, 19 nt, Artificial Sequence
  Description of Artificial Sequence: Synthetic oligonucleotide
  Antisense Strand to SEQ ID NO: 342685
auucacagguaucuaucca

SEQ ID NO: 342687 - RNA, 19 nt, Artificial Sequence
  Description of Artificial Sequence: Synthetic oligonucleotide
  Sense Strand Starting at position 303 of SEQ ID NO: 317945
gauagauaccugugaaugu

SEQ ID NO: 342688 - RNA, 19 nt, Artificial Sequence
  Description of Artificial Sequence: Synthetic oligonucleotide
  Antisense Strand to SEQ ID NO: 342687
acauucacagguaucuauc

SEQ ID NO: 342689 - RNA, 19 nt, Artificial Sequence
  Description of Artificial Sequence: Synthetic oligonucleotide
  Sense Strand Starting at position 303 of SEQ ID NO: 317991
gaacucugaccuuggguaa

SEQ ID NO: 342690 - RNA, 19 nt, Artificial Sequence
  Description of Artificial Sequence: Synthetic oligonucleotide
  Antisense Strand to SEQ ID NO: 342689
uuacccaaggucagaguuc

SEQ ID NO: 342691 - RNA, 19 nt, Artificial Sequence
  Description of Artificial Sequence: Synthetic oligonucleotide
  Sense Strand Starting at position 303 of SEQ ID NO: 318031
guaagcaagucgguuauuu

SEQ ID NO: 342692 - RNA, 19 nt, Artificial Sequence
  Description of Artificial Sequence: Synthetic oligonucleotide
  Antisense Strand to SEQ ID NO: 342691
aaauaaccgacuugcuuac

SEQ ID NO: 342693 - RNA, 19 nt, Artificial Sequence
  Description of Artificial Sequence: Synthetic oligonucleotide
  Sense Strand Starting at position 303 of SEQ ID NO: 318043
guuauuuggcccugagcga

SEQ ID NO: 342694 - RNA, 19 nt, Artificial Sequence
  Description of Artificial Sequence: Synthetic oligonucleotide
  Antisense Strand to SEQ ID NO: 342693
ucgcucagggccaaauaac

SEQ ID NO: 342695 - RNA, 19 nt, Artificial Sequence
  Description of Artificial Sequence: Synthetic oligonucleotide
  Sense Strand Starting at position 303 of SEQ ID NO: 318404
cugcauuucucuuccaguu

SEQ ID NO: 342696 - RNA, 19 nt, Artificial Sequence
  Description of Artificial Sequence: Synthetic oligonucleotide
  Antisense Strand to SEQ ID NO: 342695
aacuggaagagaaaugcag

SEQ ID NO: 342697 - RNA, 19 nt, Artificial Sequence
  Description of Artificial Sequence: Synthetic oligonucleotide
  Sense Strand Starting at position 303 of SEQ ID NO: 318450
guuucugcugggcagagaa

SEQ ID NO: 342698 - RNA, 19 nt, Artificial Sequence
  Description of Artificial Sequence: Synthetic oligonucleotide
  Antisense Strand to SEQ ID NO: 342697
uucucugcccagcagaaac

SEQ ID NO: 342699 - RNA, 19 nt, Artificial Sequence
  Description of Artificial Sequence: Synthetic oligonucleotide
  Sense Strand Starting at position 303 of SEQ ID NO: 318452
uucugcugggcagagaaau

SEQ ID NO: 342700 - RNA, 19 nt, Artificial Sequence
  Description of Artificial Sequence: Synthetic oligonucleotide
  Antisense Strand to SEQ ID NO: 342699
auuucucugcccagcagaa

SEQ ID NO: 342701 - RNA, 19 nt, Artificial Sequence
  Description of Artificial Sequence: Synthetic oligonucleotide
  Sense Strand Starting at position 303 of SEQ ID NO: 318601
acuggagacuuggugugaa

SEQ ID NO: 342702 - RNA, 19 nt, Artificial Sequence
  Description of Artificial Sequence: Synthetic oligonucleotide
  Antisense Strand to SEQ ID NO: 342701
uucacaccaagucuccagu

SEQ ID NO: 342703 - RNA, 19 nt, Artificial Sequence
  Description of Artificial Sequence: Synthetic oligonucleotide
  Sense Strand Starting at position 303 of SEQ ID NO: 318604
ggagacuuggugugaauaa

SEQ ID NO: 342704 - RNA, 19 nt, Artificial Sequence
  Description of Artificial Sequence: Synthetic oligonucleotide
  Antisense Strand to SEQ ID NO: 342703
uuauucacaccaagucucc

SEQ ID NO: 342705 - RNA, 19 nt, Artificial Sequence
  Description of Artificial Sequence: Synthetic oligonucleotide
  Sense Strand Starting at position 303 of SEQ ID NO: 318616
ugaauaaagcuuuguggga

SEQ ID NO: 342706 - RNA, 19 nt, Artificial Sequence
  Description of Artificial Sequence: Synthetic oligonucleotide
  Antisense Strand to SEQ ID NO: 342705
ucccacaaagcuuuauuca

SEQ ID NO: 342707 - RNA, 19 nt, Artificial Sequence
  Description of Artificial Sequence: Synthetic oligonucleotide
  Sense Strand Starting at position 303 of SEQ ID NO: 318617
gaauaaagcuuugugggaa

SEQ ID NO: 342708 - RNA, 19 nt, Artificial Sequence
  Description of Artificial Sequence: Synthetic oligonucleotide
  Antisense Strand to SEQ ID NO: 342707
uucccacaaagcuuuauuc

SEQ ID NO: 342709 - RNA, 19 nt, Artificial Sequence
  Description of Artificial Sequence: Synthetic oligonucleotide
  Sense Strand Starting at position 303 of SEQ ID NO: 318724
uggagaaauuugggaauaa

SEQ ID NO: 342710 - RNA, 19 nt, Artificial Sequence
  Description of Artificial Sequence: Synthetic oligonucleotide
  Antisense Strand to SEQ ID NO: 342709
uuauucccaaauuucucca

SEQ ID NO: 342711 - RNA, 19 nt, Artificial Sequence
  Description of Artificial Sequence: Synthetic oligonucleotide
  Sense Strand Starting at position 303 of SEQ ID NO: 318765
cuaggucugccugaggcaa

SEQ ID NO: 342712 - RNA, 19 nt, Artificial Sequence
  Description of Artificial Sequence: Synthetic oligonucleotide
  Antisense Strand to SEQ ID NO: 342711
uugccucaggcagaccuag

SEQ ID NO: 342713 - RNA, 19 nt, Artificial Sequence
  Description of Artificial Sequence: Synthetic oligonucleotide
  Sense Strand Starting at position 303 of SEQ ID NO: 319079
cugaguuugagugauccuu

SEQ ID NO: 342714 - RNA, 19 nt, Artificial Sequence
  Description of Artificial Sequence: Synthetic oligonucleotide
  Antisense Strand to SEQ ID NO: 342713
aaggaucacucaaacucag

SEQ ID NO: 342715 - RNA, 19 nt, Artificial Sequence
  Description of Artificial Sequence: Synthetic oligonucleotide
  Sense Strand Starting at position 303 of SEQ ID NO: 319122
ggauuacacguuuaagcca

SEQ ID NO: 342716 - RNA, 19 nt, Artificial Sequence
  Description of Artificial Sequence: Synthetic oligonucleotide
  Antisense Strand to SEQ ID NO: 342715
uggcuuaaacguguaaucc

SEQ ID NO: 342717 - RNA, 19 nt, Artificial Sequence
  Description of Artificial Sequence: Synthetic oligonucleotide
  Sense Strand Starting at position 303 of SEQ ID NO: 319172
ucaucuuauaugugaggag

SEQ ID NO: 342718 - RNA, 19 nt, Artificial Sequence
  Description of Artificial Sequence: Synthetic oligonucleotide
  Antisense Strand to SEQ ID NO: 342717
cuccucacauauaagauga

SEQ ID NO: 342719 - RNA, 19 nt, Artificial Sequence
  Description of Artificial Sequence: Synthetic oligonucleotide
  Sense Strand Starting at position 303 of SEQ ID NO: 319181
augugaggaguuugagaca

SEQ ID NO: 342720 - RNA, 19 nt, Artificial Sequence
  Description of Artificial Sequence: Synthetic oligonucleotide
  Antisense Strand to SEQ ID NO: 342719
ugucucaaacuccucacau

SEQ ID NO: 342721 - RNA, 19 nt, Artificial Sequence
  Description of Artificial Sequence: Synthetic oligonucleotide
  Sense Strand Starting at position 303 of SEQ ID NO: 319203
aggagaaguuauguaacuu

SEQ ID NO: 342722 - RNA, 19 nt, Artificial Sequence
  Description of Artificial Sequence: Synthetic oligonucleotide
  Antisense Strand to SEQ ID NO: 342721
aaguuacauaacuucuccu

SEQ ID NO: 342723 - RNA, 19 nt, Artificial Sequence
  Description of Artificial Sequence: Synthetic oligonucleotide
  Sense Strand Starting at position 304 of SEQ ID NO: 315317
cugggaugcccugagcaau

SEQ ID NO: 342724 - RNA, 19 nt, Artificial Sequence
  Description of Artificial Sequence: Synthetic oligonucleotide
  Antisense Strand to SEQ ID NO: 342723
auugcucagggcaucccag

SEQ ID NO: 342725 - RNA, 19 nt, Artificial Sequence
  Description of Artificial Sequence: Synthetic oligonucleotide
  Sense Strand Starting at position 304 of SEQ ID NO: 315563
cugugauugccagaggcaa

SEQ ID NO: 342726 - RNA, 19 nt, Artificial Sequence
  Description of Artificial Sequence: Synthetic oligonucleotide
  Antisense Strand to SEQ ID NO: 342725
uugccucuggcaaucacag

SEQ ID NO: 342727 - RNA, 19 nt, Artificial Sequence
  Description of Artificial Sequence: Synthetic oligonucleotide
  Sense Strand Starting at position 304 of SEQ ID NO: 315690
caaaccugagccugaguau

SEQ ID NO: 342728 - RNA, 19 nt, Artificial Sequence
  Description of Artificial Sequence: Synthetic oligonucleotide
  Antisense Strand to SEQ ID NO: 342727
auacucaggcucagguuug

SEQ ID NO: 342729 - RNA, 19 nt, Artificial Sequence
  Description of Artificial Sequence: Synthetic oligonucleotide
  Sense Strand Starting at position 304 of SEQ ID NO: 315697
gagccugaguauccucaca

SEQ ID NO: 342730 - RNA, 19 nt, Artificial Sequence
  Description of Artificial Sequence: Synthetic oligonucleotide
  Antisense Strand to SEQ ID NO: 342729
ugugaggauacucaggcuc

SEQ ID NO: 342731 - RNA, 19 nt, Artificial Sequence
  Description of Artificial Sequence: Synthetic oligonucleotide
  Sense Strand Starting at position 304 of SEQ ID NO: 315699
gccugaguauccucacaau

SEQ ID NO: 342732 - RNA, 19 nt, Artificial Sequence
  Description of Artificial Sequence: Synthetic oligonucleotide
  Antisense Strand to SEQ ID NO: 342731
auugugaggauacucaggc

SEQ ID NO: 342733 - RNA, 19 nt, Artificial Sequence
  Description of Artificial Sequence: Synthetic oligonucleotide
  Sense Strand Starting at position 304 of SEQ ID NO: 315705
guauccucacaaugguuau

SEQ ID NO: 342734 - RNA, 19 nt, Artificial Sequence
  Description of Artificial Sequence: Synthetic oligonucleotide
  Antisense Strand to SEQ ID NO: 342733
auaaccauugugaggauac

SEQ ID NO: 342735 - RNA, 19 nt, Artificial Sequence
  Description of Artificial Sequence: Synthetic oligonucleotide
  Sense Strand Starting at position 304 of SEQ ID NO: 315748
cuaaauuugugccaggaau

SEQ ID NO: 342736 - RNA, 19 nt, Artificial Sequence
  Description of Artificial Sequence: Synthetic oligonucleotide
  Antisense Strand to SEQ ID NO: 342735
auuccuggcacaaauuuag

SEQ ID NO: 342737 - RNA, 19 nt, Artificial Sequence
  Description of Artificial Sequence: Synthetic oligonucleotide
  Sense Strand Starting at position 304 of SEQ ID NO: 315759
ccaggaauuuauuaaugga

SEQ ID NO: 342738 - RNA, 19 nt, Artificial Sequence
  Description of Artificial Sequence: Synthetic oligonucleotide
  Antisense Strand to SEQ ID NO: 342737
uccauuaauaaauuccugg

SEQ ID NO: 342739 - RNA, 19 nt, Artificial Sequence
  Description of Artificial Sequence: Synthetic oligonucleotide
  Sense Strand Starting at position 304 of SEQ ID NO: 315762
ggaauuuauuaauggagaa

SEQ ID NO: 342740 - RNA, 19 nt, Artificial Sequence
  Description of Artificial Sequence: Synthetic oligonucleotide
  Antisense Strand to SEQ ID NO: 342739
uucuccauuaauaaauucc

SEQ ID NO: 342741 - RNA, 19 nt, Artificial Sequence
  Description of Artificial Sequence: Synthetic oligonucleotide
  Sense Strand Starting at position 304 of SEQ ID NO: 316071
ugcaguuuccuagaaucaa

SEQ ID NO: 342742 - RNA, 19 nt, Artificial Sequence
  Description of Artificial Sequence: Synthetic oligonucleotide
  Antisense Strand to SEQ ID NO: 342741
uugauucuaggaaacugca

SEQ ID NO: 342743 - RNA, 19 nt, Artificial Sequence
  Description of Artificial Sequence: Synthetic oligonucleotide
  Sense Strand Starting at position 304 of SEQ ID NO: 316244
gcgagaaccuccuuauacc

SEQ ID NO: 342744 - RNA, 19 nt, Artificial Sequence
  Description of Artificial Sequence: Synthetic oligonucleotide
  Antisense Strand to SEQ ID NO: 342743
gguauaaggagguucucgc

SEQ ID NO: 342745 - RNA, 19 nt, Artificial Sequence
  Description of Artificial Sequence: Synthetic oligonucleotide
  Sense Strand Starting at position 304 of SEQ ID NO: 316282
uuagcaacccauggucaau

SEQ ID NO: 342746 - RNA, 19 nt, Artificial Sequence
  Description of Artificial Sequence: Synthetic oligonucleotide
  Antisense Strand to SEQ ID NO: 342745
auugaccauggguugcuaa

SEQ ID NO: 342747 - RNA, 19 nt, Artificial Sequence
  Description of Artificial Sequence: Synthetic oligonucleotide
  Sense Strand Starting at position 304 of SEQ ID NO: 316285
gcaacccauggucaauauu

SEQ ID NO: 342748 - RNA, 19 nt, Artificial Sequence
  Description of Artificial Sequence: Synthetic oligonucleotide
  Antisense Strand to SEQ ID NO: 342747
aauauugaccauggguugc

SEQ ID NO: 342749 - RNA, 19 nt, Artificial Sequence
  Description of Artificial Sequence: Synthetic oligonucleotide
  Sense Strand Starting at position 304 of SEQ ID NO: 316554
ccagguugaguguauuaua

SEQ ID NO: 342750 - RNA, 19 nt, Artificial Sequence
  Description of Artificial Sequence: Synthetic oligonucleotide
  Antisense Strand to SEQ ID NO: 342749
uauaauacacucaaccugg

SEQ ID NO: 342751 - RNA, 19 nt, Artificial Sequence
  Description of Artificial Sequence: Synthetic oligonucleotide
  Sense Strand Starting at position 304 of SEQ ID NO: 316822
acgaguauuucccuuuccu

SEQ ID NO: 342752 - RNA, 19 nt, Artificial Sequence
  Description of Artificial Sequence: Synthetic oligonucleotide
  Antisense Strand to SEQ ID NO: 342751
aggaaagggaaauacucgu

SEQ ID NO: 342753 - RNA, 19 nt, Artificial Sequence
  Description of Artificial Sequence: Synthetic oligonucleotide
  Sense Strand Starting at position 304 of SEQ ID NO: 316860
uuugcagaguuagccaaua

SEQ ID NO: 342754 - RNA, 19 nt, Artificial Sequence
  Description of Artificial Sequence: Synthetic oligonucleotide
  Antisense Strand to SEQ ID NO: 342753
uauuggcuaacucugcaaa

SEQ ID NO: 342755 - RNA, 19 nt, Artificial Sequence
  Description of Artificial Sequence: Synthetic oligonucleotide
  Sense Strand Starting at position 304 of SEQ ID NO: 316862
ugcagaguuagccaauagu

SEQ ID NO: 342756 - RNA, 19 nt, Artificial Sequence
  Description of Artificial Sequence: Synthetic oligonucleotide
  Antisense Strand to SEQ ID NO: 342755
acuauuggcuaacucugca

SEQ ID NO: 342757 - RNA, 19 nt, Artificial Sequence
  Description of Artificial Sequence: Synthetic oligonucleotide
  Sense Strand Starting at position 304 of SEQ ID NO: 316865
agaguuagccaauaguauc

SEQ ID NO: 342758 - RNA, 19 nt, Artificial Sequence
  Description of Artificial Sequence: Synthetic oligonucleotide
  Antisense Strand to SEQ ID NO: 342757
gauacuauuggcuaacucu

SEQ ID NO: 342759 - RNA, 19 nt, Artificial Sequence
  Description of Artificial Sequence: Synthetic oligonucleotide
  Sense Strand Starting at position 304 of SEQ ID NO: 316882
ucuuguuuccuguaaggga

SEQ ID NO: 342760 - RNA, 19 nt, Artificial Sequence
  Description of Artificial Sequence: Synthetic oligonucleotide
  Antisense Strand to SEQ ID NO: 342759
ucccuuacaggaaacaaga

SEQ ID NO: 342761 - RNA, 19 nt, Artificial Sequence
  Description of Artificial Sequence: Synthetic oligonucleotide
  Sense Strand Starting at position 304 of SEQ ID NO: 317184
cagaguacucacuggacca

SEQ ID NO: 342762 - RNA, 19 nt, Artificial Sequence
  Description of Artificial Sequence: Synthetic oligonucleotide
  Antisense Strand to SEQ ID NO: 342761
ugguccagugaguacucug

SEQ ID NO: 342763 - RNA, 19 nt, Artificial Sequence
  Description of Artificial Sequence: Synthetic oligonucleotide
  Sense Strand Starting at position 304 of SEQ ID NO: 317285
ccuauaucugcugaauuag

SEQ ID NO: 342764 - RNA, 19 nt, Artificial Sequence
  Description of Artificial Sequence: Synthetic oligonucleotide
  Antisense Strand to SEQ ID NO: 342763
cuaauucagcagauauagg

SEQ ID NO: 342765 - RNA, 19 nt, Artificial Sequence
  Description of Artificial Sequence: Synthetic oligonucleotide
  Sense Strand Starting at position 304 of SEQ ID NO: 317323
uucuuagaagagugauaug

SEQ ID NO: 342766 - RNA, 19 nt, Artificial Sequence
  Description of Artificial Sequence: Synthetic oligonucleotide
  Antisense Strand to SEQ ID NO: 342765
cauaucacucuucuaagaa

SEQ ID NO: 342767 - RNA, 19 nt, Artificial Sequence
  Description of Artificial Sequence: Synthetic oligonucleotide
  Sense Strand Starting at position 304 of SEQ ID NO: 317328
agaagagugauaugcauac

SEQ ID NO: 342768 - RNA, 19 nt, Artificial Sequence
  Description of Artificial Sequence: Synthetic oligonucleotide
  Antisense Strand to SEQ ID NO: 342767
guaugcauaucacucuucu

SEQ ID NO: 342769 - RNA, 19 nt, Artificial Sequence
  Description of Artificial Sequence: Synthetic oligonucleotide
  Sense Strand Starting at position 304 of SEQ ID NO: 317341
gcauacuaaguuugagaag

SEQ ID NO: 342770 - RNA, 19 nt, Artificial Sequence
  Description of Artificial Sequence: Synthetic oligonucleotide
  Antisense Strand to SEQ ID NO: 342769
cuucucaaacuuaguaugc

SEQ ID NO: 342771 - RNA, 19 nt, Artificial Sequence
  Description of Artificial Sequence: Synthetic oligonucleotide
  Sense Strand Starting at position 304 of SEQ ID NO: 317353
ugagaagcuuugguacuga

SEQ ID NO: 342772 - RNA, 19 nt, Artificial Sequence
  Description of Artificial Sequence: Synthetic oligonucleotide
  Antisense Strand to SEQ ID NO: 342771
ucaguaccaaagcuucuca

SEQ ID NO: 342773 - RNA, 19 nt, Artificial Sequence
  Description of Artificial Sequence: Synthetic oligonucleotide
  Sense Strand Starting at position 304 of SEQ ID NO: 317399
guagaugcucgguaaauau

SEQ ID NO: 342774 - RNA, 19 nt, Artificial Sequence
  Description of Artificial Sequence: Synthetic oligonucleotide
  Antisense Strand to SEQ ID NO: 342773
auauuuaccgagcaucuac

SEQ ID NO: 342775 - RNA, 19 nt, Artificial Sequence
  Description of Artificial Sequence: Synthetic oligonucleotide
  Sense Strand Starting at position 304 of SEQ ID NO: 317443
ggcauuuaguggcucccua

SEQ ID NO: 342776 - RNA, 19 nt, Artificial Sequence
  Description of Artificial Sequence: Synthetic oligonucleotide
  Antisense Strand to SEQ ID NO: 342775
uagggagccacuaaaugcc

SEQ ID NO: 342777 - RNA, 19 nt, Artificial Sequence
  Description of Artificial Sequence: Synthetic oligonucleotide
  Sense Strand Starting at position 304 of SEQ ID NO: 317689
uggcauaugcuauauaauu

SEQ ID NO: 342778 - RNA, 19 nt, Artificial Sequence
  Description of Artificial Sequence: Synthetic oligonucleotide
  Antisense Strand to SEQ ID NO: 342777
aauuauauagcauaugcca

SEQ ID NO: 342779 - RNA, 19 nt, Artificial Sequence
  Description of Artificial Sequence: Synthetic oligonucleotide
  Sense Strand Starting at position 304 of SEQ ID NO: 318209
gagggcuccuuucuuggau

SEQ ID NO: 342780 - RNA, 19 nt, Artificial Sequence
  Description of Artificial Sequence: Synthetic oligonucleotide
  Antisense Strand to SEQ ID NO: 342779
auccaagaaaggagcccuc

SEQ ID NO: 342781 - RNA, 19 nt, Artificial Sequence
  Description of Artificial Sequence: Synthetic oligonucleotide
  Sense Strand Starting at position 304 of SEQ ID NO: 318221
cuuggaucuggccaagacu

SEQ ID NO: 342782 - RNA, 19 nt, Artificial Sequence
  Description of Artificial Sequence: Synthetic oligonucleotide
  Antisense Strand to SEQ ID NO: 342781
agucuuggccagauccaag

SEQ ID NO: 342783 - RNA, 19 nt, Artificial Sequence
  Description of Artificial Sequence: Synthetic oligonucleotide
  Sense Strand Starting at position 304 of SEQ ID NO: 318333
cauccagggccuggauaau

SEQ ID NO: 342784 - RNA, 19 nt, Artificial Sequence
  Description of Artificial Sequence: Synthetic oligonucleotide
  Antisense Strand to SEQ ID NO: 342783
auuauccaggcccuggaug

SEQ ID NO: 342785 - RNA, 19 nt, Artificial Sequence
  Description of Artificial Sequence: Synthetic oligonucleotide
  Sense Strand Starting at position 304 of SEQ ID NO: 318766
augccauggcuuggauaga

SEQ ID NO: 342786 - RNA, 19 nt, Artificial Sequence
  Description of Artificial Sequence: Synthetic oligonucleotide
  Antisense Strand to SEQ ID NO: 342785
ucuauccaagccauggcau

SEQ ID NO: 342787 - RNA, 19 nt, Artificial Sequence
  Description of Artificial Sequence: Synthetic oligonucleotide
  Sense Strand Starting at position 304 of SEQ ID NO: 318776
uuggauagauaccugugaa

SEQ ID NO: 342788 - RNA, 19 nt, Artificial Sequence
  Description of Artificial Sequence: Synthetic oligonucleotide
  Antisense Strand to SEQ ID NO: 342787
uucacagguaucuauccaa

SEQ ID NO: 342789 - RNA, 19 nt, Artificial Sequence
  Description of Artificial Sequence: Synthetic oligonucleotide
  Sense Strand Starting at position 304 of SEQ ID NO: 318777
uggauagauaccugugaau

SEQ ID NO: 342790 - RNA, 19 nt, Artificial Sequence
  Description of Artificial Sequence: Synthetic oligonucleotide
  Antisense Strand to SEQ ID NO: 342789
auucacagguaucuaucca

SEQ ID NO: 342791 - RNA, 19 nt, Artificial Sequence
  Description of Artificial Sequence: Synthetic oligonucleotide
  Sense Strand Starting at position 304 of SEQ ID NO: 318779
gauagauaccugugaaugu

SEQ ID NO: 342792 - RNA, 19 nt, Artificial Sequence
  Description of Artificial Sequence: Synthetic oligonucleotide
  Antisense Strand to SEQ ID NO: 342791
acauucacagguaucuauc

SEQ ID NO: 342793 - RNA, 19 nt, Artificial Sequence
  Description of Artificial Sequence: Synthetic oligonucleotide
  Sense Strand Starting at position 304 of SEQ ID NO: 318783
gauaccugugaauguguga

SEQ ID NO: 342794 - RNA, 19 nt, Artificial Sequence
  Description of Artificial Sequence: Synthetic oligonucleotide
  Antisense Strand to SEQ ID NO: 342793
ucacacauucacagguauc

SEQ ID NO: 342795 - RNA, 19 nt, Artificial Sequence
  Description of Artificial Sequence: Synthetic oligonucleotide
  Sense Strand Starting at position 304 of SEQ ID NO: 318825
gaacucugaccuuggguaa

SEQ ID NO: 342796 - RNA, 19 nt, Artificial Sequence
  Description of Artificial Sequence: Synthetic oligonucleotide
  Antisense Strand to SEQ ID NO: 342795
uuacccaaggucagaguuc

SEQ ID NO: 342797 - RNA, 19 nt, Artificial Sequence
  Description of Artificial Sequence: Synthetic oligonucleotide
  Sense Strand Starting at position 304 of SEQ ID NO: 318865
guaagcaagucgguuauuu

SEQ ID NO: 342798 - RNA, 19 nt, Artificial Sequence
  Description of Artificial Sequence: Synthetic oligonucleotide
  Antisense Strand to SEQ ID NO: 342797
aaauaaccgacuugcuuac

SEQ ID NO: 342799 - RNA, 19 nt, Artificial Sequence
  Description of Artificial Sequence: Synthetic oligonucleotide
  Sense Strand Starting at position 304 of SEQ ID NO: 318877
guuauuuggcccugagcga

SEQ ID NO: 342800 - RNA, 19 nt, Artificial Sequence
  Description of Artificial Sequence: Synthetic oligonucleotide
  Antisense Strand to SEQ ID NO: 342799
ucgcucagggccaaauaac

SEQ ID NO: 342801 - RNA, 19 nt, Artificial Sequence
  Description of Artificial Sequence: Synthetic oligonucleotide
  Sense Strand Starting at position 304 of SEQ ID NO: 319131
gguacagccuuauuccuua

SEQ ID NO: 342802 - RNA, 19 nt, Artificial Sequence
  Description of Artificial Sequence: Synthetic oligonucleotide
  Antisense Strand to SEQ ID NO: 342801
uaaggaauaaggcuguacc

SEQ ID NO: 342803 - RNA, 19 nt, Artificial Sequence
  Description of Artificial Sequence: Synthetic oligonucleotide
  Sense Strand Starting at position 305 of SEQ ID NO: 315258
ccagguugaguguauuaua

SEQ ID NO: 342804 - RNA, 19 nt, Artificial Sequence
  Description of Artificial Sequence: Synthetic oligonucleotide
  Antisense Strand to SEQ ID NO: 342803
uauaauacacucaaccugg

SEQ ID NO: 342805 - RNA, 19 nt, Artificial Sequence
  Description of Artificial Sequence: Synthetic oligonucleotide
  Sense Strand Starting at position 305 of SEQ ID NO: 315526
acgaguauuucccuuuccu

SEQ ID NO: 342806 - RNA, 19 nt, Artificial Sequence
  Description of Artificial Sequence: Synthetic oligonucleotide
  Antisense Strand to SEQ ID NO: 342805
aggaaagggaaauacucgu

SEQ ID NO: 342807 - RNA, 19 nt, Artificial Sequence
  Description of Artificial Sequence: Synthetic oligonucleotide
  Sense Strand Starting at position 305 of SEQ ID NO: 315569
agaguuagccaauaguauc

SEQ ID NO: 342808 - RNA, 19 nt, Artificial Sequence
  Description of Artificial Sequence: Synthetic oligonucleotide
  Antisense Strand to SEQ ID NO: 342807
gauacuauuggcuaacucu

SEQ ID NO: 342809 - RNA, 19 nt, Artificial Sequence
  Description of Artificial Sequence: Synthetic oligonucleotide
  Sense Strand Starting at position 305 of SEQ ID NO: 315586
ucuuguuuccuguaaggga

SEQ ID NO: 342810 - RNA, 19 nt, Artificial Sequence
  Description of Artificial Sequence: Synthetic oligonucleotide
  Antisense Strand to SEQ ID NO: 342809
ucccuuacaggaaacaaga

SEQ ID NO: 342811 - RNA, 19 nt, Artificial Sequence
  Description of Artificial Sequence: Synthetic oligonucleotide
  Sense Strand Starting at position 305 of SEQ ID NO: 315888
cagaguacucacuggacca

SEQ ID NO: 342812 - RNA, 19 nt, Artificial Sequence
  Description of Artificial Sequence: Synthetic oligonucleotide
  Antisense Strand to SEQ ID NO: 342811
ugguccagugaguacucug

SEQ ID NO: 342813 - RNA, 19 nt, Artificial Sequence
  Description of Artificial Sequence: Synthetic oligonucleotide
  Sense Strand Starting at position 305 of SEQ ID NO: 315989
ccuauaucugcugaauuag

SEQ ID NO: 342814 - RNA, 19 nt, Artificial Sequence
  Description of Artificial Sequence: Synthetic oligonucleotide
  Antisense Strand to SEQ ID NO: 342813
cuaauucagcagauauagg

SEQ ID NO: 342815 - RNA, 19 nt, Artificial Sequence
  Description of Artificial Sequence: Synthetic oligonucleotide
  Sense Strand Starting at position 305 of SEQ ID NO: 316027
uucuuagaagagugauaug

SEQ ID NO: 342816 - RNA, 19 nt, Artificial Sequence
  Description of Artificial Sequence: Synthetic oligonucleotide
  Antisense Strand to SEQ ID NO: 342815
cauaucacucuucuaagaa

SEQ ID NO: 342817 - RNA, 19 nt, Artificial Sequence
  Description of Artificial Sequence: Synthetic oligonucleotide
  Sense Strand Starting at position 305 of SEQ ID NO: 316032
agaagagugauaugcauac

SEQ ID NO: 342818 - RNA, 19 nt, Artificial Sequence
  Description of Artificial Sequence: Synthetic oligonucleotide
  Antisense Strand to SEQ ID NO: 342817
guaugcauaucacucuucu

SEQ ID NO: 342819 - RNA, 19 nt, Artificial Sequence
  Description of Artificial Sequence: Synthetic oligonucleotide
  Sense Strand Starting at position 305 of SEQ ID NO: 316045
gcauacuaaguuugagaag

SEQ ID NO: 342820 - RNA, 19 nt, Artificial Sequence
  Description of Artificial Sequence: Synthetic oligonucleotide
  Antisense Strand to SEQ ID NO: 342819
cuucucaaacuuaguaugc

SEQ ID NO: 342821 - RNA, 19 nt, Artificial Sequence
  Description of Artificial Sequence: Synthetic oligonucleotide
  Sense Strand Starting at position 305 of SEQ ID NO: 316057
ugagaagcuuugguacuga

SEQ ID NO: 342822 - RNA, 19 nt, Artificial Sequence
  Description of Artificial Sequence: Synthetic oligonucleotide
  Antisense Strand to SEQ ID NO: 342821
ucaguaccaaagcuucuca

SEQ ID NO: 342823 - RNA, 19 nt, Artificial Sequence
  Description of Artificial Sequence: Synthetic oligonucleotide
  Sense Strand Starting at position 305 of SEQ ID NO: 316103
guagaugcucgguaaauau

SEQ ID NO: 342824 - RNA, 19 nt, Artificial Sequence
  Description of Artificial Sequence: Synthetic oligonucleotide
  Antisense Strand to SEQ ID NO: 342823
auauuuaccgagcaucuac

SEQ ID NO: 342825 - RNA, 19 nt, Artificial Sequence
  Description of Artificial Sequence: Synthetic oligonucleotide
  Sense Strand Starting at position 305 of SEQ ID NO: 316147
ggcauuuaguggcucccua

SEQ ID NO: 342826 - RNA, 19 nt, Artificial Sequence
  Description of Artificial Sequence: Synthetic oligonucleotide
  Antisense Strand to SEQ ID NO: 342825
uagggagccacuaaaugcc

SEQ ID NO: 342827 - RNA, 19 nt, Artificial Sequence
  Description of Artificial Sequence: Synthetic oligonucleotide
  Sense Strand Starting at position 305 of SEQ ID NO: 316393
uggcauaugcuauauaauu

SEQ ID NO: 342828 - RNA, 19 nt, Artificial Sequence
  Description of Artificial Sequence: Synthetic oligonucleotide
  Antisense Strand to SEQ ID NO: 342827
aauuauauagcauaugcca

SEQ ID NO: 342829 - RNA, 19 nt, Artificial Sequence
  Description of Artificial Sequence: Synthetic oligonucleotide
  Sense Strand Starting at position 305 of SEQ ID NO: 316913
gagggcuccuuucuuggau

SEQ ID NO: 342830 - RNA, 19 nt, Artificial Sequence
  Description of Artificial Sequence: Synthetic oligonucleotide
  Antisense Strand to SEQ ID NO: 342829
auccaagaaaggagcccuc

SEQ ID NO: 342831 - RNA, 19 nt, Artificial Sequence
  Description of Artificial Sequence: Synthetic oligonucleotide
  Sense Strand Starting at position 305 of SEQ ID NO: 316925
cuuggaucuggccaagacu

SEQ ID NO: 342832 - RNA, 19 nt, Artificial Sequence
  Description of Artificial Sequence: Synthetic oligonucleotide
  Antisense Strand to SEQ ID NO: 342831
agucuuggccagauccaag

SEQ ID NO: 342833 - RNA, 19 nt, Artificial Sequence
  Description of Artificial Sequence: Synthetic oligonucleotide
  Sense Strand Starting at position 305 of SEQ ID NO: 317037
cauccagggccuggauaau

SEQ ID NO: 342834 - RNA, 19 nt, Artificial Sequence
  Description of Artificial Sequence: Synthetic oligonucleotide
  Antisense Strand to SEQ ID NO: 342833
auuauccaggcccuggaug

SEQ ID NO: 342835 - RNA, 19 nt, Artificial Sequence
  Description of Artificial Sequence: Synthetic oligonucleotide
  Sense Strand Starting at position 305 of SEQ ID NO: 317470
augccauggcuuggauaga

SEQ ID NO: 342836 - RNA, 19 nt, Artificial Sequence
  Description of Artificial Sequence: Synthetic oligonucleotide
  Antisense Strand to SEQ ID NO: 342835
ucuauccaagccauggcau

SEQ ID NO: 342837 - RNA, 19 nt, Artificial Sequence
  Description of Artificial Sequence: Synthetic oligonucleotide
  Sense Strand Starting at position 305 of SEQ ID NO: 317480
uuggauagauaccugugaa

SEQ ID NO: 342838 - RNA, 19 nt, Artificial Sequence
  Description of Artificial Sequence: Synthetic oligonucleotide
  Antisense Strand to SEQ ID NO: 342837
uucacagguaucuauccaa

SEQ ID NO: 342839 - RNA, 19 nt, Artificial Sequence
  Description of Artificial Sequence: Synthetic oligonucleotide
  Sense Strand Starting at position 305 of SEQ ID NO: 317481
uggauagauaccugugaau

SEQ ID NO: 342840 - RNA, 19 nt, Artificial Sequence
  Description of Artificial Sequence: Synthetic oligonucleotide
  Antisense Strand to SEQ ID NO: 342839
auucacagguaucuaucca

SEQ ID NO: 342841 - RNA, 19 nt, Artificial Sequence
  Description of Artificial Sequence: Synthetic oligonucleotide
  Sense Strand Starting at position 305 of SEQ ID NO: 317483
gauagauaccugugaaugu

SEQ ID NO: 342842 - RNA, 19 nt, Artificial Sequence
  Description of Artificial Sequence: Synthetic oligonucleotide
  Antisense Strand to SEQ ID NO: 342841
acauucacagguaucuauc

SEQ ID NO: 342843 - RNA, 19 nt, Artificial Sequence
  Description of Artificial Sequence: Synthetic oligonucleotide
  Sense Strand Starting at position 305 of SEQ ID NO: 317529
gaacucugaccuuggguaa

SEQ ID NO: 342844 - RNA, 19 nt, Artificial Sequence
  Description of Artificial Sequence: Synthetic oligonucleotide
  Antisense Strand to SEQ ID NO: 342843
uuacccaaggucagaguuc

SEQ ID NO: 342845 - RNA, 19 nt, Artificial Sequence
  Description of Artificial Sequence: Synthetic oligonucleotide
  Sense Strand Starting at position 305 of SEQ ID NO: 317569
guaagcaagucgguuauuu

SEQ ID NO: 342846 - RNA, 19 nt, Artificial Sequence
  Description of Artificial Sequence: Synthetic oligonucleotide
  Antisense Strand to SEQ ID NO: 342845
aaauaaccgacuugcuuac

SEQ ID NO: 342847 - RNA, 19 nt, Artificial Sequence
  Description of Artificial Sequence: Synthetic oligonucleotide
  Sense Strand Starting at position 305 of SEQ ID NO: 317581
guuauuuggcccugagcga

SEQ ID NO: 342848 - RNA, 19 nt, Artificial Sequence
  Description of Artificial Sequence: Synthetic oligonucleotide
  Antisense Strand to SEQ ID NO: 342847
ucgcucagggccaaauaac

SEQ ID NO: 342849 - RNA, 19 nt, Artificial Sequence
  Description of Artificial Sequence: Synthetic oligonucleotide
  Sense Strand Starting at position 305 of SEQ ID NO: 317942
cugcauuucucuuccaguu

SEQ ID NO: 342850 - RNA, 19 nt, Artificial Sequence
  Description of Artificial Sequence: Synthetic oligonucleotide
  Antisense Strand to SEQ ID NO: 342849
aacuggaagagaaaugcag

SEQ ID NO: 342851 - RNA, 19 nt, Artificial Sequence
  Description of Artificial Sequence: Synthetic oligonucleotide
  Sense Strand Starting at position 305 of SEQ ID NO: 317988
guuucugcugggcagagaa

SEQ ID NO: 342852 - RNA, 19 nt, Artificial Sequence
  Description of Artificial Sequence: Synthetic oligonucleotide
  Antisense Strand to SEQ ID NO: 342851
uucucugcccagcagaaac

SEQ ID NO: 342853 - RNA, 19 nt, Artificial Sequence
  Description of Artificial Sequence: Synthetic oligonucleotide
  Sense Strand Starting at position 305 of SEQ ID NO: 317990
uucugcugggcagagaaau

SEQ ID NO: 342854 - RNA, 19 nt, Artificial Sequence
  Description of Artificial Sequence: Synthetic oligonucleotide
  Antisense Strand to SEQ ID NO: 342853
auuucucugcccagcagaa

SEQ ID NO: 342855 - RNA, 19 nt, Artificial Sequence
  Description of Artificial Sequence: Synthetic oligonucleotide
  Sense Strand Starting at position 305 of SEQ ID NO: 318139
acuggagacuuggugugaa

SEQ ID NO: 342856 - RNA, 19 nt, Artificial Sequence
  Description of Artificial Sequence: Synthetic oligonucleotide
  Antisense Strand to SEQ ID NO: 342855
uucacaccaagucuccagu

SEQ ID NO: 342857 - RNA, 19 nt, Artificial Sequence
  Description of Artificial Sequence: Synthetic oligonucleotide
  Sense Strand Starting at position 305 of SEQ ID NO: 318142
ggagacuuggugugaauaa

SEQ ID NO: 342858 - RNA, 19 nt, Artificial Sequence
  Description of Artificial Sequence: Synthetic oligonucleotide
  Antisense Strand to SEQ ID NO: 342857
uuauucacaccaagucucc

SEQ ID NO: 342859 - RNA, 19 nt, Artificial Sequence
  Description of Artificial Sequence: Synthetic oligonucleotide
  Sense Strand Starting at position 305 of SEQ ID NO: 318154
ugaauaaagcuuuguggga

SEQ ID NO: 342860 - RNA, 19 nt, Artificial Sequence
  Description of Artificial Sequence: Synthetic oligonucleotide
  Antisense Strand to SEQ ID NO: 342859
ucccacaaagcuuuauuca

SEQ ID NO: 342861 - RNA, 19 nt, Artificial Sequence
  Description of Artificial Sequence: Synthetic oligonucleotide
  Sense Strand Starting at position 305 of SEQ ID NO: 318155
gaauaaagcuuugugggaa

SEQ ID NO: 342862 - RNA, 19 nt, Artificial Sequence
  Description of Artificial Sequence: Synthetic oligonucleotide
  Antisense Strand to SEQ ID NO: 342861
uucccacaaagcuuuauuc

SEQ ID NO: 342863 - RNA, 19 nt, Artificial Sequence
  Description of Artificial Sequence: Synthetic oligonucleotide
  Sense Strand Starting at position 305 of SEQ ID NO: 318262
uggagaaauuugggaauaa

SEQ ID NO: 342864 - RNA, 19 nt, Artificial Sequence
  Description of Artificial Sequence: Synthetic oligonucleotide
  Antisense Strand to SEQ ID NO: 342863
uuauucccaaauuucucca

SEQ ID NO: 342865 - RNA, 19 nt, Artificial Sequence
  Description of Artificial Sequence: Synthetic oligonucleotide
  Sense Strand Starting at position 305 of SEQ ID NO: 318617
cugaguuugagugauccuu

SEQ ID NO: 342866 - RNA, 19 nt, Artificial Sequence
  Description of Artificial Sequence: Synthetic oligonucleotide
  Antisense Strand to SEQ ID NO: 342865
aaggaucacucaaacucag

SEQ ID NO: 342867 - RNA, 19 nt, Artificial Sequence
  Description of Artificial Sequence: Synthetic oligonucleotide
  Sense Strand Starting at position 305 of SEQ ID NO: 318660
ggauuacacguuuaagcca

SEQ ID NO: 342868 - RNA, 19 nt, Artificial Sequence
  Description of Artificial Sequence: Synthetic oligonucleotide
  Antisense Strand to SEQ ID NO: 342867
uggcuuaaacguguaaucc

SEQ ID NO: 342869 - RNA, 19 nt, Artificial Sequence
  Description of Artificial Sequence: Synthetic oligonucleotide
  Sense Strand Starting at position 305 of SEQ ID NO: 318710
ucaucuuauaugugaggag

SEQ ID NO: 342870 - RNA, 19 nt, Artificial Sequence
  Description of Artificial Sequence: Synthetic oligonucleotide
  Antisense Strand to SEQ ID NO: 342869
cuccucacauauaagauga

SEQ ID NO: 342871 - RNA, 19 nt, Artificial Sequence
  Description of Artificial Sequence: Synthetic oligonucleotide
  Sense Strand Starting at position 305 of SEQ ID NO: 318719
augugaggaguuugagaca

SEQ ID NO: 342872 - RNA, 19 nt, Artificial Sequence
  Description of Artificial Sequence: Synthetic oligonucleotide
  Antisense Strand to SEQ ID NO: 342871
ugucucaaacuccucacau

SEQ ID NO: 342873 - RNA, 19 nt, Artificial Sequence
  Description of Artificial Sequence: Synthetic oligonucleotide
  Sense Strand Starting at position 305 of SEQ ID NO: 318741
aggagaaguuauguaacuu

SEQ ID NO: 342874 - RNA, 19 nt, Artificial Sequence
  Description of Artificial Sequence: Synthetic oligonucleotide
  Antisense Strand to SEQ ID NO: 342873
aaguuacauaacuucuccu

SEQ ID NO: 342875 - RNA, 19 nt, Artificial Sequence
  Description of Artificial Sequence: Synthetic oligonucleotide
  Sense Strand Starting at position 305 of SEQ ID NO: 318789
gggccaauauuugaacuua

SEQ ID NO: 342876 - RNA, 19 nt, Artificial Sequence
  Description of Artificial Sequence: Synthetic oligonucleotide
  Antisense Strand to SEQ ID NO: 342875
uaaguucaaauauuggccc

SEQ ID NO: 342877 - RNA, 19 nt, Artificial Sequence
  Description of Artificial Sequence: Synthetic oligonucleotide
  Sense Strand Starting at position 305 of SEQ ID NO: 318800
ugaacuuagcauugagguu

SEQ ID NO: 342878 - RNA, 19 nt, Artificial Sequence
  Description of Artificial Sequence: Synthetic oligonucleotide
  Antisense Strand to SEQ ID NO: 342877
aaccucaaugcuaaguuca

SEQ ID NO: 342879 - RNA, 19 nt, Artificial Sequence
  Description of Artificial Sequence: Synthetic oligonucleotide
  Sense Strand Starting at position 305 of SEQ ID NO: 318940
aauagcauaucuguggaau

SEQ ID NO: 342880 - RNA, 19 nt, Artificial Sequence
  Description of Artificial Sequence: Synthetic oligonucleotide
  Antisense Strand to SEQ ID NO: 342879
auuccacagauaugcuauu

SEQ ID NO: 342881 - RNA, 19 nt, Artificial Sequence
  Description of Artificial Sequence: Synthetic oligonucleotide
  Sense Strand Starting at position 305 of SEQ ID NO: 318941
auagcauaucuguggaaua

SEQ ID NO: 342882 - RNA, 19 nt, Artificial Sequence
  Description of Artificial Sequence: Synthetic oligonucleotide
  Antisense Strand to SEQ ID NO: 342881
uauuccacagauaugcuau

SEQ ID NO: 342883 - RNA, 19 nt, Artificial Sequence
  Description of Artificial Sequence: Synthetic oligonucleotide
  Sense Strand Starting at position 306 of SEQ ID NO: 315370
ggagcagacuuuguggaga

SEQ ID NO: 342884 - RNA, 19 nt, Artificial Sequence
  Description of Artificial Sequence: Synthetic oligonucleotide
  Antisense Strand to SEQ ID NO: 342883
ucuccacaaagucugcucc

SEQ ID NO: 342885 - RNA, 19 nt, Artificial Sequence
  Description of Artificial Sequence: Synthetic oligonucleotide
  Sense Strand Starting at position 306 of SEQ ID NO: 315476
ugaaguugggcugagacua

SEQ ID NO: 342886 - RNA, 19 nt, Artificial Sequence
  Description of Artificial Sequence: Synthetic oligonucleotide
  Antisense Strand to SEQ ID NO: 342885
uagucucagcccaacuuca

SEQ ID NO: 342887 - RNA, 19 nt, Artificial Sequence
  Description of Artificial Sequence: Synthetic oligonucleotide
  Sense Strand Starting at position 306 of SEQ ID NO: 315720
cugggaugcccugagcaau

SEQ ID NO: 342888 - RNA, 19 nt, Artificial Sequence
  Description of Artificial Sequence: Synthetic oligonucleotide
  Antisense Strand to SEQ ID NO: 342887
auugcucagggcaucccag

SEQ ID NO: 342889 - RNA, 19 nt, Artificial Sequence
  Description of Artificial Sequence: Synthetic oligonucleotide
  Sense Strand Starting at position 306 of SEQ ID NO: 315871
uuguggaguggguguugaa

SEQ ID NO: 342890 - RNA, 19 nt, Artificial Sequence
  Description of Artificial Sequence: Synthetic oligonucleotide
  Antisense Strand to SEQ ID NO: 342889
uucaacacccacuccacaa

SEQ ID NO: 342891 - RNA, 19 nt, Artificial Sequence
  Description of Artificial Sequence: Synthetic oligonucleotide
  Sense Strand Starting at position 306 of SEQ ID NO: 315966
cugugauugccagaggcaa

SEQ ID NO: 342892 - RNA, 19 nt, Artificial Sequence
  Description of Artificial Sequence: Synthetic oligonucleotide
  Antisense Strand to SEQ ID NO: 342891
uugccucuggcaaucacag

SEQ ID NO: 342893 - RNA, 19 nt, Artificial Sequence
  Description of Artificial Sequence: Synthetic oligonucleotide
  Sense Strand Starting at position 306 of SEQ ID NO: 316093
caaaccugagccugaguau

SEQ ID NO: 342894 - RNA, 19 nt, Artificial Sequence
  Description of Artificial Sequence: Synthetic oligonucleotide
  Antisense Strand to SEQ ID NO: 342893
auacucaggcucagguuug

SEQ ID NO: 342895 - RNA, 19 nt, Artificial Sequence
  Description of Artificial Sequence: Synthetic oligonucleotide
  Sense Strand Starting at position 306 of SEQ ID NO: 316100
gagccugaguauccucaca

SEQ ID NO: 342896 - RNA, 19 nt, Artificial Sequence
  Description of Artificial Sequence: Synthetic oligonucleotide
  Antisense Strand to SEQ ID NO: 342895
ugugaggauacucaggcuc

SEQ ID NO: 342897 - RNA, 19 nt, Artificial Sequence
  Description of Artificial Sequence: Synthetic oligonucleotide
  Sense Strand Starting at position 306 of SEQ ID NO: 316102
gccugaguauccucacaau

SEQ ID NO: 342898 - RNA, 19 nt, Artificial Sequence
  Description of Artificial Sequence: Synthetic oligonucleotide
  Antisense Strand to SEQ ID NO: 342897
auugugaggauacucaggc

SEQ ID NO: 342899 - RNA, 19 nt, Artificial Sequence
  Description of Artificial Sequence: Synthetic oligonucleotide
  Sense Strand Starting at position 306 of SEQ ID NO: 316108
guauccucacaaugguuau

SEQ ID NO: 342900 - RNA, 19 nt, Artificial Sequence
  Description of Artificial Sequence: Synthetic oligonucleotide
  Antisense Strand to SEQ ID NO: 342899
auaaccauugugaggauac

SEQ ID NO: 342901 - RNA, 19 nt, Artificial Sequence
  Description of Artificial Sequence: Synthetic oligonucleotide
  Sense Strand Starting at position 306 of SEQ ID NO: 316151
cuaaauuugugccaggaau

SEQ ID NO: 342902 - RNA, 19 nt, Artificial Sequence
  Description of Artificial Sequence: Synthetic oligonucleotide
  Antisense Strand to SEQ ID NO: 342901
auuccuggcacaaauuuag

SEQ ID NO: 342903 - RNA, 19 nt, Artificial Sequence
  Description of Artificial Sequence: Synthetic oligonucleotide
  Sense Strand Starting at position 306 of SEQ ID NO: 316162
ccaggaauuuauuaaugga

SEQ ID NO: 342904 - RNA, 19 nt, Artificial Sequence
  Description of Artificial Sequence: Synthetic oligonucleotide
  Antisense Strand to SEQ ID NO: 342903
uccauuaauaaauuccugg

SEQ ID NO: 342905 - RNA, 19 nt, Artificial Sequence
  Description of Artificial Sequence: Synthetic oligonucleotide
  Sense Strand Starting at position 306 of SEQ ID NO: 316165
ggaauuuauuaauggagaa

SEQ ID NO: 342906 - RNA, 19 nt, Artificial Sequence
  Description of Artificial Sequence: Synthetic oligonucleotide
  Antisense Strand to SEQ ID NO: 342905
uucuccauuaauaaauucc

SEQ ID NO: 342907 - RNA, 19 nt, Artificial Sequence
  Description of Artificial Sequence: Synthetic oligonucleotide
  Sense Strand Starting at position 306 of SEQ ID NO: 316474
ugcaguuuccuagaaucaa

SEQ ID NO: 342908 - RNA, 19 nt, Artificial Sequence
  Description of Artificial Sequence: Synthetic oligonucleotide
  Antisense Strand to SEQ ID NO: 342907
uugauucuaggaaacugca

SEQ ID NO: 342909 - RNA, 19 nt, Artificial Sequence
  Description of Artificial Sequence: Synthetic oligonucleotide
  Sense Strand Starting at position 306 of SEQ ID NO: 316647
gcgagaaccuccuuauacc

SEQ ID NO: 342910 - RNA, 19 nt, Artificial Sequence
  Description of Artificial Sequence: Synthetic oligonucleotide
  Antisense Strand to SEQ ID NO: 342909
gguauaaggagguucucgc

SEQ ID NO: 342911 - RNA, 19 nt, Artificial Sequence
  Description of Artificial Sequence: Synthetic oligonucleotide
  Sense Strand Starting at position 306 of SEQ ID NO: 316685
uuagcaacccauggucaau

SEQ ID NO: 342912 - RNA, 19 nt, Artificial Sequence
  Description of Artificial Sequence: Synthetic oligonucleotide
  Antisense Strand to SEQ ID NO: 342911
auugaccauggguugcuaa

SEQ ID NO: 342913 - RNA, 19 nt, Artificial Sequence
  Description of Artificial Sequence: Synthetic oligonucleotide
  Sense Strand Starting at position 306 of SEQ ID NO: 316688
gcaacccauggucaauauu

SEQ ID NO: 342914 - RNA, 19 nt, Artificial Sequence
  Description of Artificial Sequence: Synthetic oligonucleotide
  Antisense Strand to SEQ ID NO: 342913
aauauugaccauggguugc

SEQ ID NO: 342915 - RNA, 19 nt, Artificial Sequence
  Description of Artificial Sequence: Synthetic oligonucleotide
  Sense Strand Starting at position 306 of SEQ ID NO: 316957
ccagguugaguguauuaua

SEQ ID NO: 342916 - RNA, 19 nt, Artificial Sequence
  Description of Artificial Sequence: Synthetic oligonucleotide
  Antisense Strand to SEQ ID NO: 342915
uauaauacacucaaccugg

SEQ ID NO: 342917 - RNA, 19 nt, Artificial Sequence
  Description of Artificial Sequence: Synthetic oligonucleotide
  Sense Strand Starting at position 306 of SEQ ID NO: 317225
acgaguauuucccuuuccu

SEQ ID NO: 342918 - RNA, 19 nt, Artificial Sequence
  Description of Artificial Sequence: Synthetic oligonucleotide
  Antisense Strand to SEQ ID NO: 342917
aggaaagggaaauacucgu

SEQ ID NO: 342919 - RNA, 19 nt, Artificial Sequence
  Description of Artificial Sequence: Synthetic oligonucleotide
  Sense Strand Starting at position 306 of SEQ ID NO: 317263
uuugcagaguuagccaaua

SEQ ID NO: 342920 - RNA, 19 nt, Artificial Sequence
  Description of Artificial Sequence: Synthetic oligonucleotide
  Antisense Strand to SEQ ID NO: 342919
uauuggcuaacucugcaaa

SEQ ID NO: 342921 - RNA, 19 nt, Artificial Sequence
  Description of Artificial Sequence: Synthetic oligonucleotide
  Sense Strand Starting at position 306 of SEQ ID NO: 317265
ugcagaguuagccaauagu

SEQ ID NO: 342922 - RNA, 19 nt, Artificial Sequence
  Description of Artificial Sequence: Synthetic oligonucleotide
  Antisense Strand to SEQ ID NO: 342921
acuauuggcuaacucugca

SEQ ID NO: 342923 - RNA, 19 nt, Artificial Sequence
  Description of Artificial Sequence: Synthetic oligonucleotide
  Sense Strand Starting at position 306 of SEQ ID NO: 317268
agaguuagccaauaguauc

SEQ ID NO: 342924 - RNA, 19 nt, Artificial Sequence
  Description of Artificial Sequence: Synthetic oligonucleotide
  Antisense Strand to SEQ ID NO: 342923
gauacuauuggcuaacucu

SEQ ID NO: 342925 - RNA, 19 nt, Artificial Sequence
  Description of Artificial Sequence: Synthetic oligonucleotide
  Sense Strand Starting at position 306 of SEQ ID NO: 317285
ucuuguuuccuguaaggga

SEQ ID NO: 342926 - RNA, 19 nt, Artificial Sequence
  Description of Artificial Sequence: Synthetic oligonucleotide
  Antisense Strand to SEQ ID NO: 342925
ucccuuacaggaaacaaga

SEQ ID NO: 342927 - RNA, 19 nt, Artificial Sequence
  Description of Artificial Sequence: Synthetic oligonucleotide
  Sense Strand Starting at position 306 of SEQ ID NO: 317587
cagaguacucacuggacca

SEQ ID NO: 342928 - RNA, 19 nt, Artificial Sequence
  Description of Artificial Sequence: Synthetic oligonucleotide
  Antisense Strand to SEQ ID NO: 342927
ugguccagugaguacucug

SEQ ID NO: 342929 - RNA, 19 nt, Artificial Sequence
  Description of Artificial Sequence: Synthetic oligonucleotide
  Sense Strand Starting at position 306 of SEQ ID NO: 317688
ccuauaucugcugaauuag

SEQ ID NO: 342930 - RNA, 19 nt, Artificial Sequence
  Description of Artificial Sequence: Synthetic oligonucleotide
  Antisense Strand to SEQ ID NO: 342929
cuaauucagcagauauagg

SEQ ID NO: 342931 - RNA, 19 nt, Artificial Sequence
  Description of Artificial Sequence: Synthetic oligonucleotide
  Sense Strand Starting at position 306 of SEQ ID NO: 317726
uucuuagaagagugauaug

SEQ ID NO: 342932 - RNA, 19 nt, Artificial Sequence
  Description of Artificial Sequence: Synthetic oligonucleotide
  Antisense Strand to SEQ ID NO: 342931
cauaucacucuucuaagaa

SEQ ID NO: 342933 - RNA, 19 nt, Artificial Sequence
  Description of Artificial Sequence: Synthetic oligonucleotide
  Sense Strand Starting at position 306 of SEQ ID NO: 317731
agaagagugauaugcauac

SEQ ID NO: 342934 - RNA, 19 nt, Artificial Sequence
  Description of Artificial Sequence: Synthetic oligonucleotide
  Antisense Strand to SEQ ID NO: 342933
guaugcauaucacucuucu

SEQ ID NO: 342935 - RNA, 19 nt, Artificial Sequence
  Description of Artificial Sequence: Synthetic oligonucleotide
  Sense Strand Starting at position 306 of SEQ ID NO: 317744
gcauacuaaguuugagaag

SEQ ID NO: 342936 - RNA, 19 nt, Artificial Sequence
  Description of Artificial Sequence: Synthetic oligonucleotide
  Antisense Strand to SEQ ID NO: 342935
cuucucaaacuuaguaugc

SEQ ID NO: 342937 - RNA, 19 nt, Artificial Sequence
  Description of Artificial Sequence: Synthetic oligonucleotide
  Sense Strand Starting at position 306 of SEQ ID NO: 317756
ugagaagcuuugguacuga

SEQ ID NO: 342938 - RNA, 19 nt, Artificial Sequence
  Description of Artificial Sequence: Synthetic oligonucleotide
  Antisense Strand to SEQ ID NO: 342937
ucaguaccaaagcuucuca

SEQ ID NO: 342939 - RNA, 19 nt, Artificial Sequence
  Description of Artificial Sequence: Synthetic oligonucleotide
  Sense Strand Starting at position 306 of SEQ ID NO: 317802
guagaugcucgguaaauau

SEQ ID NO: 342940 - RNA, 19 nt, Artificial Sequence
  Description of Artificial Sequence: Synthetic oligonucleotide
  Antisense Strand to SEQ ID NO: 342939
auauuuaccgagcaucuac

SEQ ID NO: 342941 - RNA, 19 nt, Artificial Sequence
  Description of Artificial Sequence: Synthetic oligonucleotide
  Sense Strand Starting at position 306 of SEQ ID NO: 317846
ggcauuuaguggcucccua

SEQ ID NO: 342942 - RNA, 19 nt, Artificial Sequence
  Description of Artificial Sequence: Synthetic oligonucleotide
  Antisense Strand to SEQ ID NO: 342941
uagggagccacuaaaugcc

SEQ ID NO: 342943 - RNA, 19 nt, Artificial Sequence
  Description of Artificial Sequence: Synthetic oligonucleotide
  Sense Strand Starting at position 306 of SEQ ID NO: 318092
uggcauaugcuauauaauu

SEQ ID NO: 342944 - RNA, 19 nt, Artificial Sequence
  Description of Artificial Sequence: Synthetic oligonucleotide
  Antisense Strand to SEQ ID NO: 342943
aauuauauagcauaugcca

SEQ ID NO: 342945 - RNA, 19 nt, Artificial Sequence
  Description of Artificial Sequence: Synthetic oligonucleotide
  Sense Strand Starting at position 306 of SEQ ID NO: 318612
gagggcuccuuucuuggau

SEQ ID NO: 342946 - RNA, 19 nt, Artificial Sequence
  Description of Artificial Sequence: Synthetic oligonucleotide
  Antisense Strand to SEQ ID NO: 342945
auccaagaaaggagcccuc

SEQ ID NO: 342947 - RNA, 19 nt, Artificial Sequence
  Description of Artificial Sequence: Synthetic oligonucleotide
  Sense Strand Starting at position 306 of SEQ ID NO: 318624
cuuggaucuggccaagacu

SEQ ID NO: 342948 - RNA, 19 nt, Artificial Sequence
  Description of Artificial Sequence: Synthetic oligonucleotide
  Antisense Strand to SEQ ID NO: 342947
agucuuggccagauccaag

SEQ ID NO: 342949 - RNA, 19 nt, Artificial Sequence
  Description of Artificial Sequence: Synthetic oligonucleotide
  Sense Strand Starting at position 306 of SEQ ID NO: 318736
cauccagggccuggauaau

SEQ ID NO: 342950 - RNA, 19 nt, Artificial Sequence
  Description of Artificial Sequence: Synthetic oligonucleotide
  Antisense Strand to SEQ ID NO: 342949
auuauccaggcccuggaug

SEQ ID NO: 342951 - RNA, 19 nt, Artificial Sequence
  Description of Artificial Sequence: Synthetic oligonucleotide
  Sense Strand Starting at position 306 of SEQ ID NO: 318888
cucucauccugguuuaagu

SEQ ID NO: 342952 - RNA, 19 nt, Artificial Sequence
  Description of Artificial Sequence: Synthetic oligonucleotide
  Antisense Strand to SEQ ID NO: 342951
acuuaaaccaggaugagag

SEQ ID NO: 342953 - RNA, 19 nt, Artificial Sequence
  Description of Artificial Sequence: Synthetic oligonucleotide
  Sense Strand Starting at position 306 of SEQ ID NO: 319169
augccauggcuuggauaga

SEQ ID NO: 342954 - RNA, 19 nt, Artificial Sequence
  Description of Artificial Sequence: Synthetic oligonucleotide
  Antisense Strand to SEQ ID NO: 342953
ucuauccaagccauggcau

SEQ ID NO: 342955 - RNA, 19 nt, Artificial Sequence
  Description of Artificial Sequence: Synthetic oligonucleotide
  Sense Strand Starting at position 306 of SEQ ID NO: 319179
uuggauagauaccugugaa

SEQ ID NO: 342956 - RNA, 19 nt, Artificial Sequence
  Description of Artificial Sequence: Synthetic oligonucleotide
  Antisense Strand to SEQ ID NO: 342955
uucacagguaucuauccaa

SEQ ID NO: 342957 - RNA, 19 nt, Artificial Sequence
  Description of Artificial Sequence: Synthetic oligonucleotide
  Sense Strand Starting at position 306 of SEQ ID NO: 319180
uggauagauaccugugaau

SEQ ID NO: 342958 - RNA, 19 nt, Artificial Sequence
  Description of Artificial Sequence: Synthetic oligonucleotide
  Antisense Strand to SEQ ID NO: 342957
auucacagguaucuaucca

SEQ ID NO: 342959 - RNA, 19 nt, Artificial Sequence
  Description of Artificial Sequence: Synthetic oligonucleotide
  Sense Strand Starting at position 306 of SEQ ID NO: 319182
gauagauaccugugaaugu

SEQ ID NO: 342960 - RNA, 19 nt, Artificial Sequence
  Description of Artificial Sequence: Synthetic oligonucleotide
  Antisense Strand to SEQ ID NO: 342959
acauucacagguaucuauc

SEQ ID NO: 342961 - RNA, 19 nt, Artificial Sequence
  Description of Artificial Sequence: Synthetic oligonucleotide
  Sense Strand Starting at position 306 of SEQ ID NO: 319186
gauaccugugaauguguga

SEQ ID NO: 342962 - RNA, 19 nt, Artificial Sequence
  Description of Artificial Sequence: Synthetic oligonucleotide
  Antisense Strand to SEQ ID NO: 342961
ucacacauucacagguauc

SEQ ID NO: 342963 - RNA, 19 nt, Artificial Sequence
  Description of Artificial Sequence: Synthetic oligonucleotide
  Sense Strand Starting at position 307 of SEQ ID NO: 315327
gcaacaucagcccaugagu

SEQ ID NO: 342964 - RNA, 19 nt, Artificial Sequence
  Description of Artificial Sequence: Synthetic oligonucleotide
  Antisense Strand to SEQ ID NO: 342963
acucaugggcugauguugc

SEQ ID NO: 342965 - RNA, 19 nt, Artificial Sequence
  Description of Artificial Sequence: Synthetic oligonucleotide
  Sense Strand Starting at position 307 of SEQ ID NO: 315393
gcucauuuccagugaccug

SEQ ID NO: 342966 - RNA, 19 nt, Artificial Sequence
  Description of Artificial Sequence: Synthetic oligonucleotide
  Antisense Strand to SEQ ID NO: 342965
caggucacuggaaaugagc

SEQ ID NO: 342967 - RNA, 19 nt, Artificial Sequence
  Description of Artificial Sequence: Synthetic oligonucleotide
  Sense Strand Starting at position 307 of SEQ ID NO: 315428
gcaccucuagaagauguau

SEQ ID NO: 342968 - RNA, 19 nt, Artificial Sequence
  Description of Artificial Sequence: Synthetic oligonucleotide
  Antisense Strand to SEQ ID NO: 342967
auacaucuucuagaggugc

SEQ ID NO: 342969 - RNA, 19 nt, Artificial Sequence
  Description of Artificial Sequence: Synthetic oligonucleotide
  Sense Strand Starting at position 307 of SEQ ID NO: 315514
gcauauaaacgaugagguu

SEQ ID NO: 342970 - RNA, 19 nt, Artificial Sequence
  Description of Artificial Sequence: Synthetic oligonucleotide
  Antisense Strand to SEQ ID NO: 342969
aaccucaucguuuauaugc

SEQ ID NO: 342971 - RNA, 19 nt, Artificial Sequence
  Description of Artificial Sequence: Synthetic oligonucleotide
  Sense Strand Starting at position 307 of SEQ ID NO: 315618
cugucuuuccagggaccaa

SEQ ID NO: 342972 - RNA, 19 nt, Artificial Sequence
  Description of Artificial Sequence: Synthetic oligonucleotide
  Antisense Strand to SEQ ID NO: 342971
uuggucccuggaaagacag

SEQ ID NO: 342973 - RNA, 19 nt, Artificial Sequence
  Description of Artificial Sequence: Synthetic oligonucleotide
  Sense Strand Starting at position 307 of SEQ ID NO: 315667
cugccuuugggcuaagacu

SEQ ID NO: 342974 - RNA, 19 nt, Artificial Sequence
  Description of Artificial Sequence: Synthetic oligonucleotide
  Antisense Strand to SEQ ID NO: 342973
agucuuagcccaaaggcag

SEQ ID NO: 342975 - RNA, 19 nt, Artificial Sequence
  Description of Artificial Sequence: Synthetic oligonucleotide
  Sense Strand Starting at position 307 of SEQ ID NO: 315676
ggcuaagacugcuuaauaa

SEQ ID NO: 342976 - RNA, 19 nt, Artificial Sequence
  Description of Artificial Sequence: Synthetic oligonucleotide
  Antisense Strand to SEQ ID NO: 342975
uuauuaagcagucuuagcc

SEQ ID NO: 342977 - RNA, 19 nt, Artificial Sequence
  Description of Artificial Sequence: Synthetic oligonucleotide
  Sense Strand Starting at position 307 of SEQ ID NO: 315709
acgucacaauuguuagauc

SEQ ID NO: 342978 - RNA, 19 nt, Artificial Sequence
  Description of Artificial Sequence: Synthetic oligonucleotide
  Antisense Strand to SEQ ID NO: 342977
gaucuaacaauugugacgu

SEQ ID NO: 342979 - RNA, 19 nt, Artificial Sequence
  Description of Artificial Sequence: Synthetic oligonucleotide
  Sense Strand Starting at position 307 of SEQ ID NO: 315718
uuguuagaucucuaagggu

SEQ ID NO: 342980 - RNA, 19 nt, Artificial Sequence
  Description of Artificial Sequence: Synthetic oligonucleotide
  Antisense Strand to SEQ ID NO: 342979
acccuuagagaucuaacaa

SEQ ID NO: 342981 - RNA, 19 nt, Artificial Sequence
  Description of Artificial Sequence: Synthetic oligonucleotide
  Sense Strand Starting at position 307 of SEQ ID NO: 315739
uaggucagccaguagacau

SEQ ID NO: 342982 - RNA, 19 nt, Artificial Sequence
  Description of Artificial Sequence: Synthetic oligonucleotide
  Antisense Strand to SEQ ID NO: 342981
augucuacuggcugaccua

SEQ ID NO: 342983 - RNA, 19 nt, Artificial Sequence
  Description of Artificial Sequence: Synthetic oligonucleotide
  Sense Strand Starting at position 307 of SEQ ID NO: 315785
cuguauuaaguaggucaga

SEQ ID NO: 342984 - RNA, 19 nt, Artificial Sequence
  Description of Artificial Sequence: Synthetic oligonucleotide
  Antisense Strand to SEQ ID NO: 342983
ucugaccuacuuaauacag

SEQ ID NO: 342985 - RNA, 19 nt, Artificial Sequence
  Description of Artificial Sequence: Synthetic oligonucleotide
  Sense Strand Starting at position 307 of SEQ ID NO: 315786
uguauuaaguaggucagau

SEQ ID NO: 342986 - RNA, 19 nt, Artificial Sequence
  Description of Artificial Sequence: Synthetic oligonucleotide
  Antisense Strand to SEQ ID NO: 342985
aucugaccuacuuaauaca

SEQ ID NO: 342987 - RNA, 19 nt, Artificial Sequence
  Description of Artificial Sequence: Synthetic oligonucleotide
  Sense Strand Starting at position 307 of SEQ ID NO: 315879
ugcucuuaagaauaauguu

SEQ ID NO: 342988 - RNA, 19 nt, Artificial Sequence
  Description of Artificial Sequence: Synthetic oligonucleotide
  Antisense Strand to SEQ ID NO: 342987
aacauuauucuuaagagca

SEQ ID NO: 342989 - RNA, 19 nt, Artificial Sequence
  Description of Artificial Sequence: Synthetic oligonucleotide
  Sense Strand Starting at position 307 of SEQ ID NO: 316016
guguaauaauugguaaacu

SEQ ID NO: 342990 - RNA, 19 nt, Artificial Sequence
  Description of Artificial Sequence: Synthetic oligonucleotide
  Antisense Strand to SEQ ID NO: 342989
aguuuaccaauuauuacac

SEQ ID NO: 342991 - RNA, 19 nt, Artificial Sequence
  Description of Artificial Sequence: Synthetic oligonucleotide
  Sense Strand Starting at position 307 of SEQ ID NO: 316321
ugcuaagaacaguguaaac

SEQ ID NO: 342992 - RNA, 19 nt, Artificial Sequence
  Description of Artificial Sequence: Synthetic oligonucleotide
  Antisense Strand to SEQ ID NO: 342991
guuuacacuguucuuagca

SEQ ID NO: 342993 - RNA, 19 nt, Artificial Sequence
  Description of Artificial Sequence: Synthetic oligonucleotide
  Sense Strand Starting at position 307 of SEQ ID NO: 316707
guggaauuaugggugacuu

SEQ ID NO: 342994 - RNA, 19 nt, Artificial Sequence
  Description of Artificial Sequence: Synthetic oligonucleotide
  Antisense Strand to SEQ ID NO: 342993
aagucacccauaauuccac

SEQ ID NO: 342995 - RNA, 19 nt, Artificial Sequence
  Description of Artificial Sequence: Synthetic oligonucleotide
  Sense Strand Starting at position 307 of SEQ ID NO: 316708
uggaauuaugggugacuua

SEQ ID NO: 342996 - RNA, 19 nt, Artificial Sequence
  Description of Artificial Sequence: Synthetic oligonucleotide
  Antisense Strand to SEQ ID NO: 342995
uaagucacccauaauucca

SEQ ID NO: 342997 - RNA, 19 nt, Artificial Sequence
  Description of Artificial Sequence: Synthetic oligonucleotide
  Sense Strand Starting at position 307 of SEQ ID NO: 316906
gggucugacuaugccauua

SEQ ID NO: 342998 - RNA, 19 nt, Artificial Sequence
  Description of Artificial Sequence: Synthetic oligonucleotide
  Antisense Strand to SEQ ID NO: 342997
uaauggcauagucagaccc

SEQ ID NO: 342999 - RNA, 19 nt, Artificial Sequence
  Description of Artificial Sequence: Synthetic oligonucleotide
  Sense Strand Starting at position 307 of SEQ ID NO: 316953
aacugugugccuggaaaca

SEQ ID NO: 343000 - RNA, 19 nt, Artificial Sequence
  Description of Artificial Sequence: Synthetic oligonucleotide
  Antisense Strand to SEQ ID NO: 342999
uguuuccaggcacacaguu

SEQ ID NO: 343001 - RNA, 19 nt, Artificial Sequence
  Description of Artificial Sequence: Synthetic oligonucleotide
  Sense Strand Starting at position 307 of SEQ ID NO: 317014
agcaaauggcagugaugga

SEQ ID NO: 343002 - RNA, 19 nt, Artificial Sequence
  Description of Artificial Sequence: Synthetic oligonucleotide
  Antisense Strand to SEQ ID NO: 343001
uccaucacugccauuugcu

SEQ ID NO: 343003 - RNA, 19 nt, Artificial Sequence
  Description of Artificial Sequence: Synthetic oligonucleotide
  Sense Strand Starting at position 307 of SEQ ID NO: 317015
gcaaauggcagugauggaa

SEQ ID NO: 343004 - RNA, 19 nt, Artificial Sequence
  Description of Artificial Sequence: Synthetic oligonucleotide
  Antisense Strand to SEQ ID NO: 343003
uuccaucacugccauuugc

SEQ ID NO: 343005 - RNA, 19 nt, Artificial Sequence
  Description of Artificial Sequence: Synthetic oligonucleotide
  Sense Strand Starting at position 307 of SEQ ID NO: 317286
cccucagcugguuacuaua

SEQ ID NO: 343006 - RNA, 19 nt, Artificial Sequence
  Description of Artificial Sequence: Synthetic oligonucleotide
  Antisense Strand to SEQ ID NO: 343005
uauaguaaccagcugaggg

SEQ ID NO: 343007 - RNA, 19 nt, Artificial Sequence
  Description of Artificial Sequence: Synthetic oligonucleotide
  Sense Strand Starting at position 307 of SEQ ID NO: 317643
auaugugauagcuguuaag

SEQ ID NO: 343008 - RNA, 19 nt, Artificial Sequence
  Description of Artificial Sequence: Synthetic oligonucleotide
  Antisense Strand to SEQ ID NO: 343007
cuuaacagcuaucacauau

SEQ ID NO: 343009 - RNA, 19 nt, Artificial Sequence
  Description of Artificial Sequence: Synthetic oligonucleotide
  Sense Strand Starting at position 307 of SEQ ID NO: 317786
gguaucugucauuaccaga

SEQ ID NO: 343010 - RNA, 19 nt, Artificial Sequence
  Description of Artificial Sequence: Synthetic oligonucleotide
  Antisense Strand to SEQ ID NO: 343009
ucugguaaugacagauacc

SEQ ID NO: 343011 - RNA, 19 nt, Artificial Sequence
  Description of Artificial Sequence: Synthetic oligonucleotide
  Sense Strand Starting at position 307 of SEQ ID NO: 317818
ugaugaugggucugccaga

SEQ ID NO: 343012 - RNA, 19 nt, Artificial Sequence
  Description of Artificial Sequence: Synthetic oligonucleotide
  Antisense Strand to SEQ ID NO: 343011
ucuggcagacccaucauca

SEQ ID NO: 343013 - RNA, 19 nt, Artificial Sequence
  Description of Artificial Sequence: Synthetic oligonucleotide
  Sense Strand Starting at position 307 of SEQ ID NO: 317920
ggaaucaucugguuuccuu

SEQ ID NO: 343014 - RNA, 19 nt, Artificial Sequence
  Description of Artificial Sequence: Synthetic oligonucleotide
  Antisense Strand to SEQ ID NO: 343013
aaggaaaccagaugauucc

SEQ ID NO: 343015 - RNA, 19 nt, Artificial Sequence
  Description of Artificial Sequence: Synthetic oligonucleotide
  Sense Strand Starting at position 307 of SEQ ID NO: 317947
cucuguacuccuggaauuc

SEQ ID NO: 343016 - RNA, 19 nt, Artificial Sequence
  Description of Artificial Sequence: Synthetic oligonucleotide
  Antisense Strand to SEQ ID NO: 343015
gaauuccaggaguacagag

SEQ ID NO: 343017 - RNA, 19 nt, Artificial Sequence
  Description of Artificial Sequence: Synthetic oligonucleotide
  Sense Strand Starting at position 307 of SEQ ID NO: 317966
cccagauguugacuacuuu

SEQ ID NO: 343018 - RNA, 19 nt, Artificial Sequence
  Description of Artificial Sequence: Synthetic oligonucleotide
  Antisense Strand to SEQ ID NO: 343017
aaaguagucaacaucuggg

SEQ ID NO: 343019 - RNA, 19 nt, Artificial Sequence
  Description of Artificial Sequence: Synthetic oligonucleotide
  Sense Strand Starting at position 307 of SEQ ID NO: 317970
gauguugacuacuuugauc

SEQ ID NO: 343020 - RNA, 19 nt, Artificial Sequence
  Description of Artificial Sequence: Synthetic oligonucleotide
  Antisense Strand to SEQ ID NO: 343019
gaucaaaguagucaacauc

SEQ ID NO: 343021 - RNA, 19 nt, Artificial Sequence
  Description of Artificial Sequence: Synthetic oligonucleotide
  Sense Strand Starting at position 307 of SEQ ID NO: 317975
ugacuacuuugaucucagu

SEQ ID NO: 343022 - RNA, 19 nt, Artificial Sequence
  Description of Artificial Sequence: Synthetic oligonucleotide
  Antisense Strand to SEQ ID NO: 343021
acugagaucaaaguaguca

SEQ ID NO: 343023 - RNA, 19 nt, Artificial Sequence
  Description of Artificial Sequence: Synthetic oligonucleotide
  Sense Strand Starting at position 307 of SEQ ID NO: 317981
cuuugaucucaguacaguu

SEQ ID NO: 343024 - RNA, 19 nt, Artificial Sequence
  Description of Artificial Sequence: Synthetic oligonucleotide
  Antisense Strand to SEQ ID NO: 343023
aacuguacugagaucaaag

SEQ ID NO: 343025 - RNA, 19 nt, Artificial Sequence
  Description of Artificial Sequence: Synthetic oligonucleotide
  Sense Strand Starting at position 307 of SEQ ID NO: 318006
gucagucuccaugaucuaa

SEQ ID NO: 343026 - RNA, 19 nt, Artificial Sequence
  Description of Artificial Sequence: Synthetic oligonucleotide
  Antisense Strand to SEQ ID NO: 343025
uuagaucauggagacugac

SEQ ID NO: 343027 - RNA, 19 nt, Artificial Sequence
  Description of Artificial Sequence: Synthetic oligonucleotide
  Sense Strand Starting at position 307 of SEQ ID NO: 318030
cugacccuucugggaaaua

SEQ ID NO: 343028 - RNA, 19 nt, Artificial Sequence
  Description of Artificial Sequence: Synthetic oligonucleotide
  Antisense Strand to SEQ ID NO: 343027
uauuucccagaagggucag

SEQ ID NO: 343029 - RNA, 19 nt, Artificial Sequence
  Description of Artificial Sequence: Synthetic oligonucleotide
  Sense Strand Starting at position 307 of SEQ ID NO: 318430
aacagaagauuagagagau

SEQ ID NO: 343030 - RNA, 19 nt, Artificial Sequence
  Description of Artificial Sequence: Synthetic oligonucleotide
  Antisense Strand to SEQ ID NO: 343029
aucucucuaaucuucuguu

SEQ ID NO: 343031 - RNA, 19 nt, Artificial Sequence
  Description of Artificial Sequence: Synthetic oligonucleotide
  Sense Strand Starting at position 307 of SEQ ID NO: 318440
uagagagauuagcccacuu

SEQ ID NO: 343032 - RNA, 19 nt, Artificial Sequence
  Description of Artificial Sequence: Synthetic oligonucleotide
  Antisense Strand to SEQ ID NO: 343031
aagugggcuaaucucucua

SEQ ID NO: 343033 - RNA, 19 nt, Artificial Sequence
  Description of Artificial Sequence: Synthetic oligonucleotide
  Sense Strand Starting at position 307 of SEQ ID NO: 318639
guacaaaugagugaggugu

SEQ ID NO: 343034 - RNA, 19 nt, Artificial Sequence
  Description of Artificial Sequence: Synthetic oligonucleotide
  Antisense Strand to SEQ ID NO: 343033
acaccucacucauuuguac

SEQ ID NO: 343035 - RNA, 19 nt, Artificial Sequence
  Description of Artificial Sequence: Synthetic oligonucleotide
  Sense Strand Starting at position 307 of SEQ ID NO: 318821
ccugacauuuaggaaucuu

SEQ ID NO: 343036 - RNA, 19 nt, Artificial Sequence
  Description of Artificial Sequence: Synthetic oligonucleotide
  Antisense Strand to SEQ ID NO: 343035
aagauuccuaaaugucagg

SEQ ID NO: 343037 - RNA, 19 nt, Artificial Sequence
  Description of Artificial Sequence: Synthetic oligonucleotide
  Sense Strand Starting at position 307 of SEQ ID NO: 318831
aggaaucuuuaagcuuuga

SEQ ID NO: 343038 - RNA, 19 nt, Artificial Sequence
  Description of Artificial Sequence: Synthetic oligonucleotide
  Antisense Strand to SEQ ID NO: 343037
ucaaagcuuaaagauuccu

SEQ ID NO: 343039 - RNA, 19 nt, Artificial Sequence
  Description of Artificial Sequence: Synthetic oligonucleotide
  Sense Strand Starting at position 307 of SEQ ID NO: 318897
uccauagggcaguguuaga

SEQ ID NO: 343040 - RNA, 19 nt, Artificial Sequence
  Description of Artificial Sequence: Synthetic oligonucleotide
  Antisense Strand to SEQ ID NO: 343039
ucuaacacugcccuaugga

SEQ ID NO: 343041 - RNA, 19 nt, Artificial Sequence
  Description of Artificial Sequence: Synthetic oligonucleotide
  Sense Strand Starting at position 307 of SEQ ID NO: 319072
guggccauucuuuaauaga

SEQ ID NO: 343042 - RNA, 19 nt, Artificial Sequence
  Description of Artificial Sequence: Synthetic oligonucleotide
  Antisense Strand to SEQ ID NO: 343041
ucuauuaaagaauggccac

SEQ ID NO: 343043 - RNA, 19 nt, Artificial Sequence
  Description of Artificial Sequence: Synthetic oligonucleotide
  Sense Strand Starting at position 308 of SEQ ID NO: 315757
gcaggaguaguuggagcau

SEQ ID NO: 343044 - RNA, 19 nt, Artificial Sequence
  Description of Artificial Sequence: Synthetic oligonucleotide
  Antisense Strand to SEQ ID NO: 343043
augcuccaacuacuccugc

SEQ ID NO: 343045 - RNA, 19 nt, Artificial Sequence
  Description of Artificial Sequence: Synthetic oligonucleotide
  Sense Strand Starting at position 308 of SEQ ID NO: 316091
ggccucuuccuggaucaga

SEQ ID NO: 343046 - RNA, 19 nt, Artificial Sequence
  Description of Artificial Sequence: Synthetic oligonucleotide
  Antisense Strand to SEQ ID NO: 343045
ucugauccaggaagaggcc

SEQ ID NO: 343047 - RNA, 19 nt, Artificial Sequence
  Description of Artificial Sequence: Synthetic oligonucleotide
  Sense Strand Starting at position 308 of SEQ ID NO: 316345
agaagucagcuaugaauuc

SEQ ID NO: 343048 - RNA, 19 nt, Artificial Sequence
  Description of Artificial Sequence: Synthetic oligonucleotide
  Antisense Strand to SEQ ID NO: 343047
gaauucauagcugacuucu

SEQ ID NO: 343049 - RNA, 19 nt, Artificial Sequence
  Description of Artificial Sequence: Synthetic oligonucleotide
  Sense Strand Starting at position 308 of SEQ ID NO: 316620
aaguuaugguaggaaagaa

SEQ ID NO: 343050 - RNA, 19 nt, Artificial Sequence
  Description of Artificial Sequence: Synthetic oligonucleotide
  Antisense Strand to SEQ ID NO: 343049
uucuuuccuaccauaacuu

SEQ ID NO: 343051 - RNA, 19 nt, Artificial Sequence
  Description of Artificial Sequence: Synthetic oligonucleotide
  Sense Strand Starting at position 308 of SEQ ID NO: 316657
caggaauggucacaacaug

SEQ ID NO: 343052 - RNA, 19 nt, Artificial Sequence
  Description of Artificial Sequence: Synthetic oligonucleotide
  Antisense Strand to SEQ ID NO: 343051
cauguugugaccauuccug

SEQ ID NO: 343053 - RNA, 19 nt, Artificial Sequence
  Description of Artificial Sequence: Synthetic oligonucleotide
  Sense Strand Starting at position 308 of SEQ ID NO: 316757
cgcaaagccauguaagacu

SEQ ID NO: 343054 - RNA, 19 nt, Artificial Sequence
  Description of Artificial Sequence: Synthetic oligonucleotide
  Antisense Strand to SEQ ID NO: 343053
agucuuacauggcuuugcg

SEQ ID NO: 343055 - RNA, 19 nt, Artificial Sequence
  Description of Artificial Sequence: Synthetic oligonucleotide
  Sense Strand Starting at position 308 of SEQ ID NO: 316829
cgcggagcacuauggaaau

SEQ ID NO: 343056 - RNA, 19 nt, Artificial Sequence
  Description of Artificial Sequence: Synthetic oligonucleotide
  Antisense Strand to SEQ ID NO: 343055
auuuccauagugcuccgcg

SEQ ID NO: 343057 - RNA, 19 nt, Artificial Sequence
  Description of Artificial Sequence: Synthetic oligonucleotide
  Sense Strand Starting at position 308 of SEQ ID NO: 317292
gccgcaucgaaugcauauu

SEQ ID NO: 343058 - RNA, 19 nt, Artificial Sequence
  Description of Artificial Sequence: Synthetic oligonucleotide
  Antisense Strand to SEQ ID NO: 343057
aauaugcauucgaugcggc

SEQ ID NO: 343059 - RNA, 19 nt, Artificial Sequence
  Description of Artificial Sequence: Synthetic oligonucleotide
  Sense Strand Starting at position 308 of SEQ ID NO: 317392
ggacguucucgagagcuca

SEQ ID NO: 343060 - RNA, 19 nt, Artificial Sequence
  Description of Artificial Sequence: Synthetic oligonucleotide
  Antisense Strand to SEQ ID NO: 343059
ugagcucucgagaacgucc

SEQ ID NO: 343061 - RNA, 19 nt, Artificial Sequence
  Description of Artificial Sequence: Synthetic oligonucleotide
  Sense Strand Starting at position 308 of SEQ ID NO: 317545
uuggcaguguuuguaggau

SEQ ID NO: 343062 - RNA, 19 nt, Artificial Sequence
  Description of Artificial Sequence: Synthetic oligonucleotide
  Antisense Strand to SEQ ID NO: 343061
auccuacaaacacugccaa

SEQ ID NO: 343063 - RNA, 19 nt, Artificial Sequence
  Description of Artificial Sequence: Synthetic oligonucleotide
  Sense Strand Starting at position 308 of SEQ ID NO: 317615
uugggugacccaugaguau

SEQ ID NO: 343064 - RNA, 19 nt, Artificial Sequence
  Description of Artificial Sequence: Synthetic oligonucleotide
  Antisense Strand to SEQ ID NO: 343063
auacucaugggucacccaa

SEQ ID NO: 343065 - RNA, 19 nt, Artificial Sequence
  Description of Artificial Sequence: Synthetic oligonucleotide
  Sense Strand Starting at position 308 of SEQ ID NO: 317622
acccaugaguaucccugaa

SEQ ID NO: 343066 - RNA, 19 nt, Artificial Sequence
  Description of Artificial Sequence: Synthetic oligonucleotide
  Antisense Strand to SEQ ID NO: 343065
uucagggauacucaugggu

SEQ ID NO: 343067 - RNA, 19 nt, Artificial Sequence
  Description of Artificial Sequence: Synthetic oligonucleotide
  Sense Strand Starting at position 308 of SEQ ID NO: 317624
ccaugaguaucccugaacu

SEQ ID NO: 343068 - RNA, 19 nt, Artificial Sequence
  Description of Artificial Sequence: Synthetic oligonucleotide
  Antisense Strand to SEQ ID NO: 343067
aguucagggauacucaugg

SEQ ID NO: 343069 - RNA, 19 nt, Artificial Sequence
  Description of Artificial Sequence: Synthetic oligonucleotide
  Sense Strand Starting at position 308 of SEQ ID NO: 317683
aggagaaaguguuccaggu

SEQ ID NO: 343070 - RNA, 19 nt, Artificial Sequence
  Description of Artificial Sequence: Synthetic oligonucleotide
  Antisense Strand to SEQ ID NO: 343069
accuggaacacuuucuccu

SEQ ID NO: 343071 - RNA, 19 nt, Artificial Sequence
  Description of Artificial Sequence: Synthetic oligonucleotide
  Sense Strand Starting at position 308 of SEQ ID NO: 317687
gaaaguguuccagguagag

SEQ ID NO: 343072 - RNA, 19 nt, Artificial Sequence
  Description of Artificial Sequence: Synthetic oligonucleotide
  Antisense Strand to SEQ ID NO: 343071
cucuaccuggaacacuuuc

SEQ ID NO: 343073 - RNA, 19 nt, Artificial Sequence
  Description of Artificial Sequence: Synthetic oligonucleotide
  Sense Strand Starting at position 308 of SEQ ID NO: 317738
gagaucauagcguauguuu

SEQ ID NO: 343074 - RNA, 19 nt, Artificial Sequence
  Description of Artificial Sequence: Synthetic oligonucleotide
  Antisense Strand to SEQ ID NO: 343073
aaacauacgcuaugaucuc

SEQ ID NO: 343075 - RNA, 19 nt, Artificial Sequence
  Description of Artificial Sequence: Synthetic oligonucleotide
  Sense Strand Starting at position 308 of SEQ ID NO: 317743
cauagcguauguuuggaaa

SEQ ID NO: 343076 - RNA, 19 nt, Artificial Sequence
  Description of Artificial Sequence: Synthetic oligonucleotide
  Antisense Strand to SEQ ID NO: 343075
uuuccaaacauacgcuaug

SEQ ID NO: 343077 - RNA, 19 nt, Artificial Sequence
  Description of Artificial Sequence: Synthetic oligonucleotide
  Sense Strand Starting at position 308 of SEQ ID NO: 317770
aguaauaggccugagugga

SEQ ID NO: 343078 - RNA, 19 nt, Artificial Sequence
  Description of Artificial Sequence: Synthetic oligonucleotide
  Antisense Strand to SEQ ID NO: 343077
uccacucaggccuauuacu

SEQ ID NO: 343079 - RNA, 19 nt, Artificial Sequence
  Description of Artificial Sequence: Synthetic oligonucleotide
  Sense Strand Starting at position 308 of SEQ ID NO: 317833
gcaugaggaggucaccauu

SEQ ID NO: 343080 - RNA, 19 nt, Artificial Sequence
  Description of Artificial Sequence: Synthetic oligonucleotide
  Antisense Strand to SEQ ID NO: 343079
aauggugaccuccucaugc

SEQ ID NO: 343081 - RNA, 19 nt, Artificial Sequence
  Description of Artificial Sequence: Synthetic oligonucleotide
  Sense Strand Starting at position 308 of SEQ ID NO: 317929
ccgagagcuguuugacaca

SEQ ID NO: 343082 - RNA, 19 nt, Artificial Sequence
  Description of Artificial Sequence: Synthetic oligonucleotide
  Antisense Strand to SEQ ID NO: 343081
ugugucaaacagcucucgg

SEQ ID NO: 343083 - RNA, 19 nt, Artificial Sequence
  Description of Artificial Sequence: Synthetic oligonucleotide
  Sense Strand Starting at position 308 of SEQ ID NO: 317980
gcagaacaagcuuaucacu

SEQ ID NO: 343084 - RNA, 19 nt, Artificial Sequence
  Description of Artificial Sequence: Synthetic oligonucleotide
  Antisense Strand to SEQ ID NO: 343083
agugauaagcuuguucugc

SEQ ID NO: 343085 - RNA, 19 nt, Artificial Sequence
  Description of Artificial Sequence: Synthetic oligonucleotide
  Sense Strand Starting at position 308 of SEQ ID NO: 317986
caagcuuaucacuguguga

SEQ ID NO: 343086 - RNA, 19 nt, Artificial Sequence
  Description of Artificial Sequence: Synthetic oligonucleotide
  Antisense Strand to SEQ ID NO: 343085
ucacacagugauaagcuug

SEQ ID NO: 343087 - RNA, 19 nt, Artificial Sequence
  Description of Artificial Sequence: Synthetic oligonucleotide
  Sense Strand Starting at position 308 of SEQ ID NO: 317988
agcuuaucacugugugaga

SEQ ID NO: 343088 - RNA, 19 nt, Artificial Sequence
  Description of Artificial Sequence: Synthetic oligonucleotide
  Antisense Strand to SEQ ID NO: 343087
ucucacacagugauaagcu

SEQ ID NO: 343089 - RNA, 19 nt, Artificial Sequence
  Description of Artificial Sequence: Synthetic oligonucleotide
  Sense Strand Starting at position 308 of SEQ ID NO: 317989
gcuuaucacugugugagac

SEQ ID NO: 343090 - RNA, 19 nt, Artificial Sequence
  Description of Artificial Sequence: Synthetic oligonucleotide
  Antisense Strand to SEQ ID NO: 343089
gucucacacagugauaagc

SEQ ID NO: 343091 - RNA, 19 nt, Artificial Sequence
  Description of Artificial Sequence: Synthetic oligonucleotide
  Sense Strand Starting at position 308 of SEQ ID NO: 318071
gggccugacuguguuccaa

SEQ ID NO: 343092 - RNA, 19 nt, Artificial Sequence
  Description of Artificial Sequence: Synthetic oligonucleotide
  Antisense Strand to SEQ ID NO: 343091
uuggaacacagucaggccc

SEQ ID NO: 343093 - RNA, 19 nt, Artificial Sequence
  Description of Artificial Sequence: Synthetic oligonucleotide
  Sense Strand Starting at position 308 of SEQ ID NO: 318073
gccugacuguguuccaauu

SEQ ID NO: 343094 - RNA, 19 nt, Artificial Sequence
  Description of Artificial Sequence: Synthetic oligonucleotide
  Antisense Strand to SEQ ID NO: 343093
aauuggaacacagucaggc

SEQ ID NO: 343095 - RNA, 19 nt, Artificial Sequence
  Description of Artificial Sequence: Synthetic oligonucleotide
  Sense Strand Starting at position 308 of SEQ ID NO: 318218
ccucgagcccauuguuaaa

SEQ ID NO: 343096 - RNA, 19 nt, Artificial Sequence
  Description of Artificial Sequence: Synthetic oligonucleotide
  Antisense Strand to SEQ ID NO: 343095
uuuaacaaugggcucgagg

SEQ ID NO: 343097 - RNA, 19 nt, Artificial Sequence
  Description of Artificial Sequence: Synthetic oligonucleotide
  Sense Strand Starting at position 308 of SEQ ID NO: 318245
uggcuaucugaccacacua

SEQ ID NO: 343098 - RNA, 19 nt, Artificial Sequence
  Description of Artificial Sequence: Synthetic oligonucleotide
  Antisense Strand to SEQ ID NO: 343097
uaguguggucagauagcca

SEQ ID NO: 343099 - RNA, 19 nt, Artificial Sequence
  Description of Artificial Sequence: Synthetic oligonucleotide
  Sense Strand Starting at position 308 of SEQ ID NO: 318258
acacuagaggucugcaaug

SEQ ID NO: 343100 - RNA, 19 nt, Artificial Sequence
  Description of Artificial Sequence: Synthetic oligonucleotide
  Antisense Strand to SEQ ID NO: 343099
cauugcagaccucuagugu

SEQ ID NO: 343101 - RNA, 19 nt, Artificial Sequence
  Description of Artificial Sequence: Synthetic oligonucleotide
  Sense Strand Starting at position 308 of SEQ ID NO: 318263
agaggucugcaaugagaug

SEQ ID NO: 343102 - RNA, 19 nt, Artificial Sequence
  Description of Artificial Sequence: Synthetic oligonucleotide
  Antisense Strand to SEQ ID NO: 343101
caucucauugcagaccucu

SEQ ID NO: 343103 - RNA, 19 nt, Artificial Sequence
  Description of Artificial Sequence: Synthetic oligonucleotide
  Sense Strand Starting at position 308 of SEQ ID NO: 318274
augagaugggcuuggguuu

SEQ ID NO: 343104 - RNA, 19 nt, Artificial Sequence
  Description of Artificial Sequence: Synthetic oligonucleotide
  Antisense Strand to SEQ ID NO: 343103
aaacccaagcccaucucau

SEQ ID NO: 343105 - RNA, 19 nt, Artificial Sequence
  Description of Artificial Sequence: Synthetic oligonucleotide
  Sense Strand Starting at position 308 of SEQ ID NO: 318316
guguucccaugucuccaaa

SEQ ID NO: 343106 - RNA, 19 nt, Artificial Sequence
  Description of Artificial Sequence: Synthetic oligonucleotide
  Antisense Strand to SEQ ID NO: 343105
uuuggagacaugggaacac

SEQ ID NO: 343107 - RNA, 19 nt, Artificial Sequence
  Description of Artificial Sequence: Synthetic oligonucleotide
  Sense Strand Starting at position 308 of SEQ ID NO: 318318
guucccaugucuccaaagu

SEQ ID NO: 343108 - RNA, 19 nt, Artificial Sequence
  Description of Artificial Sequence: Synthetic oligonucleotide
  Antisense Strand to SEQ ID NO: 343107
acuuuggagacaugggaac

SEQ ID NO: 343109 - RNA, 19 nt, Artificial Sequence
  Description of Artificial Sequence: Synthetic oligonucleotide
  Sense Strand Starting at position 308 of SEQ ID NO: 318777
cuccguuucucacuccaua

SEQ ID NO: 343110 - RNA, 19 nt, Artificial Sequence
  Description of Artificial Sequence: Synthetic oligonucleotide
  Antisense Strand to SEQ ID NO: 343109
uauggagugagaaacggag

SEQ ID NO: 343111 - RNA, 19 nt, Artificial Sequence
  Description of Artificial Sequence: Synthetic oligonucleotide
  Sense Strand Starting at position 308 of SEQ ID NO: 318976
ggcccaggaguaugaugua

SEQ ID NO: 343112 - RNA, 19 nt, Artificial Sequence
  Description of Artificial Sequence: Synthetic oligonucleotide
  Antisense Strand to SEQ ID NO: 343111
uacaucauacuccugggcc

SEQ ID NO: 343113 - RNA, 19 nt, Artificial Sequence
  Description of Artificial Sequence: Synthetic oligonucleotide
  Sense Strand Starting at position 308 of SEQ ID NO: 318981
aggaguaugauguaccugu

SEQ ID NO: 343114 - RNA, 19 nt, Artificial Sequence
  Description of Artificial Sequence: Synthetic oligonucleotide
  Antisense Strand to SEQ ID NO: 343113
acagguacaucauacuccu

SEQ ID NO: 343115 - RNA, 19 nt, Artificial Sequence
  Description of Artificial Sequence: Synthetic oligonucleotide
  Sense Strand Starting at position 308 of SEQ ID NO: 318985
guaugauguaccugucuuu

SEQ ID NO: 343116 - RNA, 19 nt, Artificial Sequence
  Description of Artificial Sequence: Synthetic oligonucleotide
  Antisense Strand to SEQ ID NO: 343115
aaagacagguacaucauac

SEQ ID NO: 343117 - RNA, 19 nt, Artificial Sequence
  Description of Artificial Sequence: Synthetic oligonucleotide
  Sense Strand Starting at position 308 of SEQ ID NO: 318990
auguaccugucuuuaccaa

SEQ ID NO: 343118 - RNA, 19 nt, Artificial Sequence
  Description of Artificial Sequence: Synthetic oligonucleotide
  Antisense Strand to SEQ ID NO: 343117
uugguaaagacagguacau

SEQ ID NO: 343119 - RNA, 19 nt, Artificial Sequence
  Description of Artificial Sequence: Synthetic oligonucleotide
  Sense Strand Starting at position 308 of SEQ ID NO: 318991
uguaccugucuuuaccaaa

SEQ ID NO: 343120 - RNA, 19 nt, Artificial Sequence
  Description of Artificial Sequence: Synthetic oligonucleotide
  Antisense Strand to SEQ ID NO: 343119
uuugguaaagacagguaca

SEQ ID NO: 343121 - RNA, 19 nt, Artificial Sequence
  Description of Artificial Sequence: Synthetic oligonucleotide
  Sense Strand Starting at position 308 of SEQ ID NO: 319172
ccgccacauccagaagauu

SEQ ID NO: 343122 - RNA, 19 nt, Artificial Sequence
  Description of Artificial Sequence: Synthetic oligonucleotide
  Antisense Strand to SEQ ID NO: 343121
aaucuucuggauguggcgg

SEQ ID NO: 343123 - RNA, 19 nt, Artificial Sequence
  Description of Artificial Sequence: Synthetic oligonucleotide
  Sense Strand Starting at position 309 of SEQ ID NO: 315347
acaggugagagaugcaaua

SEQ ID NO: 343124 - RNA, 19 nt, Artificial Sequence
  Description of Artificial Sequence: Synthetic oligonucleotide
  Antisense Strand to SEQ ID NO: 343123
uauugcaucucucaccugu

SEQ ID NO: 343125 - RNA, 19 nt, Artificial Sequence
  Description of Artificial Sequence: Synthetic oligonucleotide
  Sense Strand Starting at position 309 of SEQ ID NO: 315671
ugccauuaggguugaggaa

SEQ ID NO: 343126 - RNA, 19 nt, Artificial Sequence
  Description of Artificial Sequence: Synthetic oligonucleotide
  Antisense Strand to SEQ ID NO: 343125
uuccucaacccuaauggca

SEQ ID NO: 343127 - RNA, 19 nt, Artificial Sequence
  Description of Artificial Sequence: Synthetic oligonucleotide
  Sense Strand Starting at position 309 of SEQ ID NO: 315719
gguggaugucaggguccau

SEQ ID NO: 343128 - RNA, 19 nt, Artificial Sequence
  Description of Artificial Sequence: Synthetic oligonucleotide
  Antisense Strand to SEQ ID NO: 343127
auggacccugacauccacc

SEQ ID NO: 343129 - RNA, 19 nt, Artificial Sequence
  Description of Artificial Sequence: Synthetic oligonucleotide
  Sense Strand Starting at position 309 of SEQ ID NO: 315767
ggaugucuccauggcggaa

SEQ ID NO: 343130 - RNA, 19 nt, Artificial Sequence
  Description of Artificial Sequence: Synthetic oligonucleotide
  Antisense Strand to SEQ ID NO: 343129
uuccgccauggagacaucc

SEQ ID NO: 343131 - RNA, 19 nt, Artificial Sequence
  Description of Artificial Sequence: Synthetic oligonucleotide
  Sense Strand Starting at position 309 of SEQ ID NO: 315804
ggacaucuucaggguauag

SEQ ID NO: 343132 - RNA, 19 nt, Artificial Sequence
  Description of Artificial Sequence: Synthetic oligonucleotide
  Antisense Strand to SEQ ID NO: 343131
cuauacccugaagaugucc

SEQ ID NO: 343133 - RNA, 19 nt, Artificial Sequence
  Description of Artificial Sequence: Synthetic oligonucleotide
  Sense Strand Starting at position 309 of SEQ ID NO: 315917
cgaguuugaaggcaaagga

SEQ ID NO: 343134 - RNA, 19 nt, Artificial Sequence
  Description of Artificial Sequence: Synthetic oligonucleotide
  Antisense Strand to SEQ ID NO: 343133
uccuuugccuucaaacucg

SEQ ID NO: 343135 - RNA, 19 nt, Artificial Sequence
  Description of Artificial Sequence: Synthetic oligonucleotide
  Sense Strand Starting at position 309 of SEQ ID NO: 316289
ugcggaacuccaugaauaa

SEQ ID NO: 343136 - RNA, 19 nt, Artificial Sequence
  Description of Artificial Sequence: Synthetic oligonucleotide
  Antisense Strand to SEQ ID NO: 343135
uuauucauggaguuccgca

SEQ ID NO: 343137 - RNA, 19 nt, Artificial Sequence
  Description of Artificial Sequence: Synthetic oligonucleotide
  Sense Strand Starting at position 309 of SEQ ID NO: 316290
gcggaacuccaugaauaac

SEQ ID NO: 343138 - RNA, 19 nt, Artificial Sequence
  Description of Artificial Sequence: Synthetic oligonucleotide
  Antisense Strand to SEQ ID NO: 343137
guuauucauggaguuccgc

SEQ ID NO: 343139 - RNA, 19 nt, Artificial Sequence
  Description of Artificial Sequence: Synthetic oligonucleotide
  Sense Strand Starting at position 309 of SEQ ID NO: 316331
gcuccuuguccuucgugua

SEQ ID NO: 343140 - RNA, 19 nt, Artificial Sequence
  Description of Artificial Sequence: Synthetic oligonucleotide
  Antisense Strand to SEQ ID NO: 343139
uacacgaaggacaaggagc

SEQ ID NO: 343141 - RNA, 19 nt, Artificial Sequence
  Description of Artificial Sequence: Synthetic oligonucleotide
  Sense Strand Starting at position 309 of SEQ ID NO: 316371
agcugugaacaagauguaa

SEQ ID NO: 343142 - RNA, 19 nt, Artificial Sequence
  Description of Artificial Sequence: Synthetic oligonucleotide
  Antisense Strand to SEQ ID NO: 343141
uuacaucuuguucacagcu

SEQ ID NO: 343143 - RNA, 19 nt, Artificial Sequence
  Description of Artificial Sequence: Synthetic oligonucleotide
  Sense Strand Starting at position 309 of SEQ ID NO: 316383
gauguaauagcagaagcga

SEQ ID NO: 343144 - RNA, 19 nt, Artificial Sequence
  Description of Artificial Sequence: Synthetic oligonucleotide
  Antisense Strand to SEQ ID NO: 343143
ucgcuucugcuauuacauc

SEQ ID NO: 343145 - RNA, 19 nt, Artificial Sequence
  Description of Artificial Sequence: Synthetic oligonucleotide
  Sense Strand Starting at position 309 of SEQ ID NO: 316449
ggacgucagcauuacaaag

SEQ ID NO: 343146 - RNA, 19 nt, Artificial Sequence
  Description of Artificial Sequence: Synthetic oligonucleotide
  Antisense Strand to SEQ ID NO: 343145
cuuuguaaugcugacgucc

SEQ ID NO: 343147 - RNA, 19 nt, Artificial Sequence
  Description of Artificial Sequence: Synthetic oligonucleotide
  Sense Strand Starting at position 309 of SEQ ID NO: 316535
cugaguguaucaucucaug

SEQ ID NO: 343148 - RNA, 19 nt, Artificial Sequence
  Description of Artificial Sequence: Synthetic oligonucleotide
  Antisense Strand to SEQ ID NO: 343147
caugagaugauacacucag

SEQ ID NO: 343149 - RNA, 19 nt, Artificial Sequence
  Description of Artificial Sequence: Synthetic oligonucleotide
  Sense Strand Starting at position 309 of SEQ ID NO: 316561
ugcacugaacgguauccaa

SEQ ID NO: 343150 - RNA, 19 nt, Artificial Sequence
  Description of Artificial Sequence: Synthetic oligonucleotide
  Antisense Strand to SEQ ID NO: 343149
uuggauaccguucagugca

SEQ ID NO: 343151 - RNA, 19 nt, Artificial Sequence
  Description of Artificial Sequence: Synthetic oligonucleotide
  Sense Strand Starting at position 309 of SEQ ID NO: 316564
acugaacgguauccaaaua

SEQ ID NO: 343152 - RNA, 19 nt, Artificial Sequence
  Description of Artificial Sequence: Synthetic oligonucleotide
  Antisense Strand to SEQ ID NO: 343151
uauuuggauaccguucagu

SEQ ID NO: 343153 - RNA, 19 nt, Artificial Sequence
  Description of Artificial Sequence: Synthetic oligonucleotide
  Sense Strand Starting at position 309 of SEQ ID NO: 316850
ggcacagguauccagcaau

SEQ ID NO: 343154 - RNA, 19 nt, Artificial Sequence
  Description of Artificial Sequence: Synthetic oligonucleotide
  Antisense Strand to SEQ ID NO: 343153
auugcuggauaccugugcc

SEQ ID NO: 343155 - RNA, 19 nt, Artificial Sequence
  Description of Artificial Sequence: Synthetic oligonucleotide
  Sense Strand Starting at position 309 of SEQ ID NO: 316898
cccagagaaccauggcuau

SEQ ID NO: 343156 - RNA, 19 nt, Artificial Sequence
  Description of Artificial Sequence: Synthetic oligonucleotide
  Antisense Strand to SEQ ID NO: 343155
auagccaugguucucuggg

SEQ ID NO: 343157 - RNA, 19 nt, Artificial Sequence
  Description of Artificial Sequence: Synthetic oligonucleotide
  Sense Strand Starting at position 309 of SEQ ID NO: 316911
ggcuaugcuccugcggauu

SEQ ID NO: 343158 - RNA, 19 nt, Artificial Sequence
  Description of Artificial Sequence: Synthetic oligonucleotide
  Antisense Strand to SEQ ID NO: 343157
aauccgcaggagcauagcc

SEQ ID NO: 343159 - RNA, 19 nt, Artificial Sequence
  Description of Artificial Sequence: Synthetic oligonucleotide
  Sense Strand Starting at position 309 of SEQ ID NO: 316982
uuggaaaguccaggaugua

SEQ ID NO: 343160 - RNA, 19 nt, Artificial Sequence
  Description of Artificial Sequence: Synthetic oligonucleotide
  Antisense Strand to SEQ ID NO: 343159
uacauccuggacuuuccaa

SEQ ID NO: 343161 - RNA, 19 nt, Artificial Sequence
  Description of Artificial Sequence: Synthetic oligonucleotide
  Sense Strand Starting at position 309 of SEQ ID NO: 316995
gauguaaaggucugagcac

SEQ ID NO: 343162 - RNA, 19 nt, Artificial Sequence
  Description of Artificial Sequence: Synthetic oligonucleotide
  Antisense Strand to SEQ ID NO: 343161
gugcucagaccuuuacauc

SEQ ID NO: 343163 - RNA, 19 nt, Artificial Sequence
  Description of Artificial Sequence: Synthetic oligonucleotide
  Sense Strand Starting at position 309 of SEQ ID NO: 317093
ggacuuaacacuuggcuga

SEQ ID NO: 343164 - RNA, 19 nt, Artificial Sequence
  Description of Artificial Sequence: Synthetic oligonucleotide
  Antisense Strand to SEQ ID NO: 343163
ucagccaaguguuaagucc

SEQ ID NO: 343165 - RNA, 19 nt, Artificial Sequence
  Description of Artificial Sequence: Synthetic oligonucleotide
  Sense Strand Starting at position 309 of SEQ ID NO: 317142
ggagaaagcucagagagaa

SEQ ID NO: 343166 - RNA, 19 nt, Artificial Sequence
  Description of Artificial Sequence: Synthetic oligonucleotide
  Antisense Strand to SEQ ID NO: 343165
uucucucugagcuuucucc

SEQ ID NO: 343167 - RNA, 19 nt, Artificial Sequence
  Description of Artificial Sequence: Synthetic oligonucleotide
  Sense Strand Starting at position 309 of SEQ ID NO: 317459
cucccucaucugugaagua

SEQ ID NO: 343168 - RNA, 19 nt, Artificial Sequence
  Description of Artificial Sequence: Synthetic oligonucleotide
  Antisense Strand to SEQ ID NO: 343167
uacuucacagaugagggag

SEQ ID NO: 343169 - RNA, 19 nt, Artificial Sequence
  Description of Artificial Sequence: Synthetic oligonucleotide
  Sense Strand Starting at position 309 of SEQ ID NO: 317500
ggugcuguugugaggcaaa

SEQ ID NO: 343170 - RNA, 19 nt, Artificial Sequence
  Description of Artificial Sequence: Synthetic oligonucleotide
  Antisense Strand to SEQ ID NO: 343169
uuugccucacaacagcacc

SEQ ID NO: 343171 - RNA, 19 nt, Artificial Sequence
  Description of Artificial Sequence: Synthetic oligonucleotide
  Sense Strand Starting at position 309 of SEQ ID NO: 317561
augcuagugcuccauauau

SEQ ID NO: 343172 - RNA, 19 nt, Artificial Sequence
  Description of Artificial Sequence: Synthetic oligonucleotide
  Antisense Strand to SEQ ID NO: 343171
auauauggagcacuagcau

SEQ ID NO: 343173 - RNA, 19 nt, Artificial Sequence
  Description of Artificial Sequence: Synthetic oligonucleotide
  Sense Strand Starting at position 309 of SEQ ID NO: 317572
ccauauauguuaguuagua

SEQ ID NO: 343174 - RNA, 19 nt, Artificial Sequence
  Description of Artificial Sequence: Synthetic oligonucleotide
  Antisense Strand to SEQ ID NO: 343173
uacuaacuaacauauaugg

SEQ ID NO: 343175 - RNA, 19 nt, Artificial Sequence
  Description of Artificial Sequence: Synthetic oligonucleotide
  Sense Strand Starting at position 309 of SEQ ID NO: 317580
guuaguuaguauccuaaag

SEQ ID NO: 343176 - RNA, 19 nt, Artificial Sequence
  Description of Artificial Sequence: Synthetic oligonucleotide
  Antisense Strand to SEQ ID NO: 343175
cuuuaggauacuaacuaac

SEQ ID NO: 343177 - RNA, 19 nt, Artificial Sequence
  Description of Artificial Sequence: Synthetic oligonucleotide
  Sense Strand Starting at position 309 of SEQ ID NO: 317689
ucucaaagaugcuugccaa

SEQ ID NO: 343178 - RNA, 19 nt, Artificial Sequence
  Description of Artificial Sequence: Synthetic oligonucleotide
  Antisense Strand to SEQ ID NO: 343177
uuggcaagcaucuuugaga

SEQ ID NO: 343179 - RNA, 19 nt, Artificial Sequence
  Description of Artificial Sequence: Synthetic oligonucleotide
  Sense Strand Starting at position 309 of SEQ ID NO: 317690
cucaaagaugcuugccaag

SEQ ID NO: 343180 - RNA, 19 nt, Artificial Sequence
  Description of Artificial Sequence: Synthetic oligonucleotide
  Antisense Strand to SEQ ID NO: 343179
cuuggcaagcaucuuugag

SEQ ID NO: 343181 - RNA, 19 nt, Artificial Sequence
  Description of Artificial Sequence: Synthetic oligonucleotide
  Sense Strand Starting at position 309 of SEQ ID NO: 318055
ggcagaauccuggaauugu

SEQ ID NO: 343182 - RNA, 19 nt, Artificial Sequence
  Description of Artificial Sequence: Synthetic oligonucleotide
  Antisense Strand to SEQ ID NO: 343181
acaauuccaggauucugcc

SEQ ID NO: 343183 - RNA, 19 nt, Artificial Sequence
  Description of Artificial Sequence: Synthetic oligonucleotide
  Sense Strand Starting at position 309 of SEQ ID NO: 318129
ugaggaucuaggugcagaa

SEQ ID NO: 343184 - RNA, 19 nt, Artificial Sequence
  Description of Artificial Sequence: Synthetic oligonucleotide
  Antisense Strand to SEQ ID NO: 343183
uucugcaccuagauccuca

SEQ ID NO: 343185 - RNA, 19 nt, Artificial Sequence
  Description of Artificial Sequence: Synthetic oligonucleotide
  Sense Strand Starting at position 309 of SEQ ID NO: 318216
ggccuucugagacauguca

SEQ ID NO: 343186 - RNA, 19 nt, Artificial Sequence
  Description of Artificial Sequence: Synthetic oligonucleotide
  Antisense Strand to SEQ ID NO: 343185
ugacaugucucagaaggcc

SEQ ID NO: 343187 - RNA, 19 nt, Artificial Sequence
  Description of Artificial Sequence: Synthetic oligonucleotide
  Sense Strand Starting at position 309 of SEQ ID NO: 318585
uagaauucggucugaaacu

SEQ ID NO: 343188 - RNA, 19 nt, Artificial Sequence
  Description of Artificial Sequence: Synthetic oligonucleotide
  Antisense Strand to SEQ ID NO: 343187
aguuucagaccgaauucua

SEQ ID NO: 343189 - RNA, 19 nt, Artificial Sequence
  Description of Artificial Sequence: Synthetic oligonucleotide
  Sense Strand Starting at position 309 of SEQ ID NO: 318594
gucugaaacugggccaaau

SEQ ID NO: 343190 - RNA, 19 nt, Artificial Sequence
  Description of Artificial Sequence: Synthetic oligonucleotide
  Antisense Strand to SEQ ID NO: 343189
auuuggcccaguuucagac

SEQ ID NO: 343191 - RNA, 19 nt, Artificial Sequence
  Description of Artificial Sequence: Synthetic oligonucleotide
  Sense Strand Starting at position 309 of SEQ ID NO: 318709
ucccuccuuccuuggagaa

SEQ ID NO: 343192 - RNA, 19 nt, Artificial Sequence
  Description of Artificial Sequence: Synthetic oligonucleotide
  Antisense Strand to SEQ ID NO: 343191
uucuccaaggaaggaggga

SEQ ID NO: 343193 - RNA, 19 nt, Artificial Sequence
  Description of Artificial Sequence: Synthetic oligonucleotide
  Sense Strand Starting at position 309 of SEQ ID NO: 318762
cacuuacuggcagaaaugu

SEQ ID NO: 343194 - RNA, 19 nt, Artificial Sequence
  Description of Artificial Sequence: Synthetic oligonucleotide
  Antisense Strand to SEQ ID NO: 343193
acauuucugccaguaagug

SEQ ID NO: 343195 - RNA, 19 nt, Artificial Sequence
  Description of Artificial Sequence: Synthetic oligonucleotide
  Sense Strand Starting at position 309 of SEQ ID NO: 318781
ugcuacgaucugggauuau

SEQ ID NO: 343196 - RNA, 19 nt, Artificial Sequence
  Description of Artificial Sequence: Synthetic oligonucleotide
  Antisense Strand to SEQ ID NO: 343195
auaaucccagaucguagca

SEQ ID NO: 343197 - RNA, 19 nt, Artificial Sequence
  Description of Artificial Sequence: Synthetic oligonucleotide
  Sense Strand Starting at position 309 of SEQ ID NO: 318837
caguuuauggucuaaugga

SEQ ID NO: 343198 - RNA, 19 nt, Artificial Sequence
  Description of Artificial Sequence: Synthetic oligonucleotide
  Antisense Strand to SEQ ID NO: 343197
uccauuagaccauaaacug

SEQ ID NO: 343199 - RNA, 19 nt, Artificial Sequence
  Description of Artificial Sequence: Synthetic oligonucleotide
  Sense Strand Starting at position 309 of SEQ ID NO: 319115
auguuaguacuguaauugu

SEQ ID NO: 343200 - RNA, 19 nt, Artificial Sequence
  Description of Artificial Sequence: Synthetic oligonucleotide
  Antisense Strand to SEQ ID NO: 343199
acaauuacaguacuaacau

SEQ ID NO: 343201 - RNA, 19 nt, Artificial Sequence
  Description of Artificial Sequence: Synthetic oligonucleotide
  Sense Strand Starting at position 309 of SEQ ID NO: 319165
augcaaacuuaauugguaa

SEQ ID NO: 343202 - RNA, 19 nt, Artificial Sequence
  Description of Artificial Sequence: Synthetic oligonucleotide
  Antisense Strand to SEQ ID NO: 343201
uuaccaauuaaguuugcau

SEQ ID NO: 343203 - RNA, 19 nt, Artificial Sequence
  Description of Artificial Sequence: Synthetic oligonucleotide
  Sense Strand Starting at position 310 of SEQ ID NO: 315282
guuggaacuccugagcaca

SEQ ID NO: 343204 - RNA, 19 nt, Artificial Sequence
  Description of Artificial Sequence: Synthetic oligonucleotide
  Antisense Strand to SEQ ID NO: 343203
ugugcucaggaguuccaac

SEQ ID NO: 343205 - RNA, 19 nt, Artificial Sequence
  Description of Artificial Sequence: Synthetic oligonucleotide
  Sense Strand Starting at position 310 of SEQ ID NO: 315479
gcgggcagacacuauuaau

SEQ ID NO: 343206 - RNA, 19 nt, Artificial Sequence
  Description of Artificial Sequence: Synthetic oligonucleotide
  Antisense Strand to SEQ ID NO: 343205
auuaauagugucugcccgc

SEQ ID NO: 343207 - RNA, 19 nt, Artificial Sequence
  Description of Artificial Sequence: Synthetic oligonucleotide
  Sense Strand Starting at position 310 of SEQ ID NO: 315482
ggcagacacuauuaaucau

SEQ ID NO: 343208 - RNA, 19 nt, Artificial Sequence
  Description of Artificial Sequence: Synthetic oligonucleotide
  Antisense Strand to SEQ ID NO: 343207
augauuaauagugucugcc

SEQ ID NO: 343209 - RNA, 19 nt, Artificial Sequence
  Description of Artificial Sequence: Synthetic oligonucleotide
  Sense Strand Starting at position 310 of SEQ ID NO: 315531
ugaauuccuuaagggcaga

SEQ ID NO: 343210 - RNA, 19 nt, Artificial Sequence
  Description of Artificial Sequence: Synthetic oligonucleotide
  Antisense Strand to SEQ ID NO: 343209
ucugcccuuaaggaauuca

SEQ ID NO: 343211 - RNA, 19 nt, Artificial Sequence
  Description of Artificial Sequence: Synthetic oligonucleotide
  Sense Strand Starting at position 310 of SEQ ID NO: 315561
uuacaugggucccuaggau

SEQ ID NO: 343212 - RNA, 19 nt, Artificial Sequence
  Description of Artificial Sequence: Synthetic oligonucleotide
  Antisense Strand to SEQ ID NO: 343211
auccuagggacccauguaa

SEQ ID NO: 343213 - RNA, 19 nt, Artificial Sequence
  Description of Artificial Sequence: Synthetic oligonucleotide
  Sense Strand Starting at position 310 of SEQ ID NO: 316022
uccagcucuuuaucuggaa

SEQ ID NO: 343214 - RNA, 19 nt, Artificial Sequence
  Description of Artificial Sequence: Synthetic oligonucleotide
  Antisense Strand to SEQ ID NO: 343213
uuccagauaaagagcugga

SEQ ID NO: 343215 - RNA, 19 nt, Artificial Sequence
  Description of Artificial Sequence: Synthetic oligonucleotide
  Sense Strand Starting at position 310 of SEQ ID NO: 316023
ccagcucuuuaucuggaau

SEQ ID NO: 343216 - RNA, 19 nt, Artificial Sequence
  Description of Artificial Sequence: Synthetic oligonucleotide
  Antisense Strand to SEQ ID NO: 343215
auuccagauaaagagcugg

SEQ ID NO: 343217 - RNA, 19 nt, Artificial Sequence
  Description of Artificial Sequence: Synthetic oligonucleotide
  Sense Strand Starting at position 310 of SEQ ID NO: 316026
gcucuuuaucuggaauuau

SEQ ID NO: 343218 - RNA, 19 nt, Artificial Sequence
  Description of Artificial Sequence: Synthetic oligonucleotide
  Antisense Strand to SEQ ID NO: 343217
auaauuccagauaaagagc

SEQ ID NO: 343219 - RNA, 19 nt, Artificial Sequence
  Description of Artificial Sequence: Synthetic oligonucleotide
  Sense Strand Starting at position 310 of SEQ ID NO: 316035
cuggaauuauguccuauaa

SEQ ID NO: 343220 - RNA, 19 nt, Artificial Sequence
  Description of Artificial Sequence: Synthetic oligonucleotide
  Antisense Strand to SEQ ID NO: 343219
uuauaggacauaauuccag

SEQ ID NO: 343221 - RNA, 19 nt, Artificial Sequence
  Description of Artificial Sequence: Synthetic oligonucleotide
  Sense Strand Starting at position 310 of SEQ ID NO: 316037
ggaauuauguccuauaaac

SEQ ID NO: 343222 - RNA, 19 nt, Artificial Sequence
  Description of Artificial Sequence: Synthetic oligonucleotide
  Antisense Strand to SEQ ID NO: 343221
guuuauaggacauaauucc

SEQ ID NO: 343223 - RNA, 19 nt, Artificial Sequence
  Description of Artificial Sequence: Synthetic oligonucleotide
  Sense Strand Starting at position 310 of SEQ ID NO: 316069
cacggagucuggcuucuau

SEQ ID NO: 343224 - RNA, 19 nt, Artificial Sequence
  Description of Artificial Sequence: Synthetic oligonucleotide
  Antisense Strand to SEQ ID NO: 343223
auagaagccagacuccgug

SEQ ID NO: 343225 - RNA, 19 nt, Artificial Sequence
  Description of Artificial Sequence: Synthetic oligonucleotide
  Sense Strand Starting at position 310 of SEQ ID NO: 316080
gcuucuaugccaggaguca

SEQ ID NO: 343226 - RNA, 19 nt, Artificial Sequence
  Description of Artificial Sequence: Synthetic oligonucleotide
  Antisense Strand to SEQ ID NO: 343225
ugacuccuggcauagaagc

SEQ ID NO: 343227 - RNA, 19 nt, Artificial Sequence
  Description of Artificial Sequence: Synthetic oligonucleotide
  Sense Strand Starting at position 310 of SEQ ID NO: 316094
agucacuucuacucgcuua

SEQ ID NO: 343228 - RNA, 19 nt, Artificial Sequence
  Description of Artificial Sequence: Synthetic oligonucleotide
  Antisense Strand to SEQ ID NO: 343227
uaagcgaguagaagugacu

SEQ ID NO: 343229 - RNA, 19 nt, Artificial Sequence
  Description of Artificial Sequence: Synthetic oligonucleotide
  Sense Strand Starting at position 310 of SEQ ID NO: 316106
ucgcuuauuuagggaagca

SEQ ID NO: 343230 - RNA, 19 nt, Artificial Sequence
  Description of Artificial Sequence: Synthetic oligonucleotide
  Antisense Strand to SEQ ID NO: 343229
ugcuucccuaaauaagcga

SEQ ID NO: 343231 - RNA, 19 nt, Artificial Sequence
  Description of Artificial Sequence: Synthetic oligonucleotide
  Sense Strand Starting at position 310 of SEQ ID NO: 316127
aggcuagaaucuuaaguua

SEQ ID NO: 343232 - RNA, 19 nt, Artificial Sequence
  Description of Artificial Sequence: Synthetic oligonucleotide
  Antisense Strand to SEQ ID NO: 343231
uaacuuaagauucuagccu

SEQ ID NO: 343233 - RNA, 19 nt, Artificial Sequence
  Description of Artificial Sequence: Synthetic oligonucleotide
  Sense Strand Starting at position 310 of SEQ ID NO: 316130
cuagaaucuuaaguuagac

SEQ ID NO: 343234 - RNA, 19 nt, Artificial Sequence
  Description of Artificial Sequence: Synthetic oligonucleotide
  Antisense Strand to SEQ ID NO: 343233
gucuaacuuaagauucuag

SEQ ID NO: 343235 - RNA, 19 nt, Artificial Sequence
  Description of Artificial Sequence: Synthetic oligonucleotide
  Sense Strand Starting at position 310 of SEQ ID NO: 316139
uaaguuagacucugcgcua

SEQ ID NO: 343236 - RNA, 19 nt, Artificial Sequence
  Description of Artificial Sequence: Synthetic oligonucleotide
  Antisense Strand to SEQ ID NO: 343235
uagcgcagagucuaacuua

SEQ ID NO: 343237 - RNA, 19 nt, Artificial Sequence
  Description of Artificial Sequence: Synthetic oligonucleotide
  Sense Strand Starting at position 310 of SEQ ID NO: 316140
aaguuagacucugcgcuau

SEQ ID NO: 343238 - RNA, 19 nt, Artificial Sequence
  Description of Artificial Sequence: Synthetic oligonucleotide
  Antisense Strand to SEQ ID NO: 343237
auagcgcagagucuaacuu

SEQ ID NO: 343239 - RNA, 19 nt, Artificial Sequence
  Description of Artificial Sequence: Synthetic oligonucleotide
  Sense Strand Starting at position 310 of SEQ ID NO: 316142
guuagacucugcgcuauga

SEQ ID NO: 343240 - RNA, 19 nt, Artificial Sequence
  Description of Artificial Sequence: Synthetic oligonucleotide
  Antisense Strand to SEQ ID NO: 343239
ucauagcgcagagucuaac

SEQ ID NO: 343241 - RNA, 19 nt, Artificial Sequence
  Description of Artificial Sequence: Synthetic oligonucleotide
  Sense Strand Starting at position 310 of SEQ ID NO: 316144
uagacucugcgcuaugaag

SEQ ID NO: 343242 - RNA, 19 nt, Artificial Sequence
  Description of Artificial Sequence: Synthetic oligonucleotide
  Antisense Strand to SEQ ID NO: 343241
cuucauagcgcagagucua

SEQ ID NO: 343243 - RNA, 19 nt, Artificial Sequence
  Description of Artificial Sequence: Synthetic oligonucleotide
  Sense Strand Starting at position 310 of SEQ ID NO: 316290
guuaccaguugaguuugua

SEQ ID NO: 343244 - RNA, 19 nt, Artificial Sequence
  Description of Artificial Sequence: Synthetic oligonucleotide
  Antisense Strand to SEQ ID NO: 343243
uacaaacucaacugguaac

SEQ ID NO: 343245 - RNA, 19 nt, Artificial Sequence
  Description of Artificial Sequence: Synthetic oligonucleotide
  Sense Strand Starting at position 310 of SEQ ID NO: 316293
accaguugaguuuguagga

SEQ ID NO: 343246 - RNA, 19 nt, Artificial Sequence
  Description of Artificial Sequence: Synthetic oligonucleotide
  Antisense Strand to SEQ ID NO: 343245
uccuacaaacucaacuggu

SEQ ID NO: 343247 - RNA, 19 nt, Artificial Sequence
  Description of Artificial Sequence: Synthetic oligonucleotide
  Sense Strand Starting at position 310 of SEQ ID NO: 316294
ccaguugaguuuguaggaa

SEQ ID NO: 343248 - RNA, 19 nt, Artificial Sequence
  Description of Artificial Sequence: Synthetic oligonucleotide
  Antisense Strand to SEQ ID NO: 343247
uuccuacaaacucaacugg

SEQ ID NO: 343249 - RNA, 19 nt, Artificial Sequence
  Description of Artificial Sequence: Synthetic oligonucleotide
  Sense Strand Starting at position 310 of SEQ ID NO: 316298
uugaguuuguaggaaacua

SEQ ID NO: 343250 - RNA, 19 nt, Artificial Sequence
  Description of Artificial Sequence: Synthetic oligonucleotide
  Antisense Strand to SEQ ID NO: 343249
uaguuuccuacaaacucaa

SEQ ID NO: 343251 - RNA, 19 nt, Artificial Sequence
  Description of Artificial Sequence: Synthetic oligonucleotide
  Sense Strand Starting at position 310 of SEQ ID NO: 317555
cuuauuuccuucgaaugca

SEQ ID NO: 343252 - RNA, 19 nt, Artificial Sequence
  Description of Artificial Sequence: Synthetic oligonucleotide
  Antisense Strand to SEQ ID NO: 343251
ugcauucgaaggaaauaag

SEQ ID NO: 343253 - RNA, 19 nt, Artificial Sequence
  Description of Artificial Sequence: Synthetic oligonucleotide
  Sense Strand Starting at position 310 of SEQ ID NO: 317607
caggaagcguucucucaau

SEQ ID NO: 343254 - RNA, 19 nt, Artificial Sequence
  Description of Artificial Sequence: Synthetic oligonucleotide
  Antisense Strand to SEQ ID NO: 343253
auugagagaacgcuuccug

SEQ ID NO: 343255 - RNA, 19 nt, Artificial Sequence
  Description of Artificial Sequence: Synthetic oligonucleotide
  Sense Strand Starting at position 310 of SEQ ID NO: 317904
gguugcugccuggaacauu

SEQ ID NO: 343256 - RNA, 19 nt, Artificial Sequence
  Description of Artificial Sequence: Synthetic oligonucleotide
  Antisense Strand to SEQ ID NO: 343255
aauguuccaggcagcaacc

SEQ ID NO: 343257 - RNA, 19 nt, Artificial Sequence
  Description of Artificial Sequence: Synthetic oligonucleotide
  Sense Strand Starting at position 310 of SEQ ID NO: 318024
accggaugggucugggaau

SEQ ID NO: 343258 - RNA, 19 nt, Artificial Sequence
  Description of Artificial Sequence: Synthetic oligonucleotide
  Antisense Strand to SEQ ID NO: 343257
auucccagacccauccggu

SEQ ID NO: 343259 - RNA, 19 nt, Artificial Sequence
  Description of Artificial Sequence: Synthetic oligonucleotide
  Sense Strand Starting at position 310 of SEQ ID NO: 318026
cggaugggucugggaauga

SEQ ID NO: 343260 - RNA, 19 nt, Artificial Sequence
  Description of Artificial Sequence: Synthetic oligonucleotide
  Antisense Strand to SEQ ID NO: 343259
ucauucccagacccauccg

SEQ ID NO: 343261 - RNA, 19 nt, Artificial Sequence
  Description of Artificial Sequence: Synthetic oligonucleotide
  Sense Strand Starting at position 310 of SEQ ID NO: 318263
augcaaguugcagagauaa

SEQ ID NO: 343262 - RNA, 19 nt, Artificial Sequence
  Description of Artificial Sequence: Synthetic oligonucleotide
  Antisense Strand to SEQ ID NO: 343261
uuaucucugcaacuugcau

SEQ ID NO: 343263 - RNA, 19 nt, Artificial Sequence
  Description of Artificial Sequence: Synthetic oligonucleotide
  Sense Strand Starting at position 310 of SEQ ID NO: 318265
gcaaguugcagagauaaga

SEQ ID NO: 343264 - RNA, 19 nt, Artificial Sequence
  Description of Artificial Sequence: Synthetic oligonucleotide
  Antisense Strand to SEQ ID NO: 343263
ucuuaucucugcaacuugc

SEQ ID NO: 343265 - RNA, 19 nt, Artificial Sequence
  Description of Artificial Sequence: Synthetic oligonucleotide
  Sense Strand Starting at position 310 of SEQ ID NO: 319071
cuccuuuggcucugagagu

SEQ ID NO: 343266 - RNA, 19 nt, Artificial Sequence
  Description of Artificial Sequence: Synthetic oligonucleotide
  Antisense Strand to SEQ ID NO: 343265
acucucagagccaaaggag

SEQ ID NO: 343267 - RNA, 19 nt, Artificial Sequence
  Description of Artificial Sequence: Synthetic oligonucleotide
  Sense Strand Starting at position 310 of SEQ ID NO: 319125
gccauacguucugcugcau

SEQ ID NO: 343268 - RNA, 19 nt, Artificial Sequence
  Description of Artificial Sequence: Synthetic oligonucleotide
  Antisense Strand to SEQ ID NO: 343267
augcagcagaacguauggc

SEQ ID NO: 343269 - RNA, 19 nt, Artificial Sequence
  Description of Artificial Sequence: Synthetic oligonucleotide
  Sense Strand Starting at position 310 of SEQ ID NO: 319146
uuuagugucugacuauaua

SEQ ID NO: 343270 - RNA, 19 nt, Artificial Sequence
  Description of Artificial Sequence: Synthetic oligonucleotide
  Antisense Strand to SEQ ID NO: 343269
uauauagucagacacuaaa

SEQ ID NO: 343271 - RNA, 19 nt, Artificial Sequence
  Description of Artificial Sequence: Synthetic oligonucleotide
  Sense Strand Starting at position 310 of SEQ ID NO: 319149
agugucugacuauauaguu

SEQ ID NO: 343272 - RNA, 19 nt, Artificial Sequence
  Description of Artificial Sequence: Synthetic oligonucleotide
  Antisense Strand to SEQ ID NO: 343271
aacuauauagucagacacu

SEQ ID NO: 343273 - RNA, 19 nt, Artificial Sequence
  Description of Artificial Sequence: Synthetic oligonucleotide
  Sense Strand Starting at position 310 of SEQ ID NO: 319170
acaucucaggucuguaauu

SEQ ID NO: 343274 - RNA, 19 nt, Artificial Sequence
  Description of Artificial Sequence: Synthetic oligonucleotide
  Antisense Strand to SEQ ID NO: 343273
aauuacagaccugagaugu

SEQ ID NO: 343275 - RNA, 19 nt, Artificial Sequence
  Description of Artificial Sequence: Synthetic oligonucleotide
  Sense Strand Starting at position 310 of SEQ ID NO: 319218
aucucuugagcccaugauu

SEQ ID NO: 343276 - RNA, 19 nt, Artificial Sequence
  Description of Artificial Sequence: Synthetic oligonucleotide
  Antisense Strand to SEQ ID NO: 343275
aaucaugggcucaagagau

SEQ ID NO: 343277 - RNA, 19 nt, Artificial Sequence
  Description of Artificial Sequence: Synthetic oligonucleotide
  Sense Strand Starting at position 311 of SEQ ID NO: 316126
cuuauuuccuucgaaugca

SEQ ID NO: 343278 - RNA, 19 nt, Artificial Sequence
  Description of Artificial Sequence: Synthetic oligonucleotide
  Antisense Strand to SEQ ID NO: 343277
ugcauucgaaggaaauaag

SEQ ID NO: 343279 - RNA, 19 nt, Artificial Sequence
  Description of Artificial Sequence: Synthetic oligonucleotide
  Sense Strand Starting at position 311 of SEQ ID NO: 316178
caggaagcguucucucaau

SEQ ID NO: 343280 - RNA, 19 nt, Artificial Sequence
  Description of Artificial Sequence: Synthetic oligonucleotide
  Antisense Strand to SEQ ID NO: 343279
auugagagaacgcuuccug

SEQ ID NO: 343281 - RNA, 19 nt, Artificial Sequence
  Description of Artificial Sequence: Synthetic oligonucleotide
  Sense Strand Starting at position 311 of SEQ ID NO: 316475
gguugcugccuggaacauu

SEQ ID NO: 343282 - RNA, 19 nt, Artificial Sequence
  Description of Artificial Sequence: Synthetic oligonucleotide
  Antisense Strand to SEQ ID NO: 343281
aauguuccaggcagcaacc

SEQ ID NO: 343283 - RNA, 19 nt, Artificial Sequence
  Description of Artificial Sequence: Synthetic oligonucleotide
  Sense Strand Starting at position 311 of SEQ ID NO: 316595
accggaugggucugggaau

SEQ ID NO: 343284 - RNA, 19 nt, Artificial Sequence
  Description of Artificial Sequence: Synthetic oligonucleotide
  Antisense Strand to SEQ ID NO: 343283
auucccagacccauccggu

SEQ ID NO: 343285 - RNA, 19 nt, Artificial Sequence
  Description of Artificial Sequence: Synthetic oligonucleotide
  Sense Strand Starting at position 311 of SEQ ID NO: 316597
cggaugggucugggaauga

SEQ ID NO: 343286 - RNA, 19 nt, Artificial Sequence
  Description of Artificial Sequence: Synthetic oligonucleotide
  Antisense Strand to SEQ ID NO: 343285
ucauucccagacccauccg

SEQ ID NO: 343287 - RNA, 19 nt, Artificial Sequence
  Description of Artificial Sequence: Synthetic oligonucleotide
  Sense Strand Starting at position 311 of SEQ ID NO: 316834
augcaaguugcagagauaa

SEQ ID NO: 343288 - RNA, 19 nt, Artificial Sequence
  Description of Artificial Sequence: Synthetic oligonucleotide
  Antisense Strand to SEQ ID NO: 343287
uuaucucugcaacuugcau

SEQ ID NO: 343289 - RNA, 19 nt, Artificial Sequence
  Description of Artificial Sequence: Synthetic oligonucleotide
  Sense Strand Starting at position 311 of SEQ ID NO: 316836
gcaaguugcagagauaaga

SEQ ID NO: 343290 - RNA, 19 nt, Artificial Sequence
  Description of Artificial Sequence: Synthetic oligonucleotide
  Antisense Strand to SEQ ID NO: 343289
ucuuaucucugcaacuugc

SEQ ID NO: 343291 - RNA, 19 nt, Artificial Sequence
  Description of Artificial Sequence: Synthetic oligonucleotide
  Sense Strand Starting at position 311 of SEQ ID NO: 317642
cuccuuuggcucugagagu

SEQ ID NO: 343292 - RNA, 19 nt, Artificial Sequence
  Description of Artificial Sequence: Synthetic oligonucleotide
  Antisense Strand to SEQ ID NO: 343291
acucucagagccaaaggag

SEQ ID NO: 343293 - RNA, 19 nt, Artificial Sequence
  Description of Artificial Sequence: Synthetic oligonucleotide
  Sense Strand Starting at position 311 of SEQ ID NO: 317696
gccauacguucugcugcau

SEQ ID NO: 343294 - RNA, 19 nt, Artificial Sequence
  Description of Artificial Sequence: Synthetic oligonucleotide
  Antisense Strand to SEQ ID NO: 343293
augcagcagaacguauggc

SEQ ID NO: 343295 - RNA, 19 nt, Artificial Sequence
  Description of Artificial Sequence: Synthetic oligonucleotide
  Sense Strand Starting at position 311 of SEQ ID NO: 317717
uuuagugucugacuauaua

SEQ ID NO: 343296 - RNA, 19 nt, Artificial Sequence
  Description of Artificial Sequence: Synthetic oligonucleotide
  Antisense Strand to SEQ ID NO: 343295
uauauagucagacacuaaa

SEQ ID NO: 343297 - RNA, 19 nt, Artificial Sequence
  Description of Artificial Sequence: Synthetic oligonucleotide
  Sense Strand Starting at position 311 of SEQ ID NO: 317720
agugucugacuauauaguu

SEQ ID NO: 343298 - RNA, 19 nt, Artificial Sequence
  Description of Artificial Sequence: Synthetic oligonucleotide
  Antisense Strand to SEQ ID NO: 343297
aacuauauagucagacacu

SEQ ID NO: 343299 - RNA, 19 nt, Artificial Sequence
  Description of Artificial Sequence: Synthetic oligonucleotide
  Sense Strand Starting at position 311 of SEQ ID NO: 317741
acaucucaggucuguaauu

SEQ ID NO: 343300 - RNA, 19 nt, Artificial Sequence
  Description of Artificial Sequence: Synthetic oligonucleotide
  Antisense Strand to SEQ ID NO: 343299
aauuacagaccugagaugu

SEQ ID NO: 343301 - RNA, 19 nt, Artificial Sequence
  Description of Artificial Sequence: Synthetic oligonucleotide
  Sense Strand Starting at position 311 of SEQ ID NO: 317789
aucucuugagcccaugauu

SEQ ID NO: 343302 - RNA, 19 nt, Artificial Sequence
  Description of Artificial Sequence: Synthetic oligonucleotide
  Antisense Strand to SEQ ID NO: 343301
aaucaugggcucaagagau

SEQ ID NO: 343303 - RNA, 19 nt, Artificial Sequence
  Description of Artificial Sequence: Synthetic oligonucleotide
  Sense Strand Starting at position 311 of SEQ ID NO: 317819
uggacuauauagugagaca

SEQ ID NO: 343304 - RNA, 19 nt, Artificial Sequence
  Description of Artificial Sequence: Synthetic oligonucleotide
  Antisense Strand to SEQ ID NO: 343303
ugucucacuauauagucca

SEQ ID NO: 343305 - RNA, 19 nt, Artificial Sequence
  Description of Artificial Sequence: Synthetic oligonucleotide
  Sense Strand Starting at position 311 of SEQ ID NO: 317859
uuaaauuagccaggugcuu

SEQ ID NO: 343306 - RNA, 19 nt, Artificial Sequence
  Description of Artificial Sequence: Synthetic oligonucleotide
  Antisense Strand to SEQ ID NO: 343305
aagcaccuggcuaauuuaa

SEQ ID NO: 343307 - RNA, 19 nt, Artificial Sequence
  Description of Artificial Sequence: Synthetic oligonucleotide
  Sense Strand Starting at position 311 of SEQ ID NO: 317872
gugcuugagcuuuggagau

SEQ ID NO: 343308 - RNA, 19 nt, Artificial Sequence
  Description of Artificial Sequence: Synthetic oligonucleotide
  Antisense Strand to SEQ ID NO: 343307
aucuccaaagcucaagcac

SEQ ID NO: 343309 - RNA, 19 nt, Artificial Sequence
  Description of Artificial Sequence: Synthetic oligonucleotide
  Sense Strand Starting at position 311 of SEQ ID NO: 317874
gcuugagcuuuggagauua

SEQ ID NO: 343310 - RNA, 19 nt, Artificial Sequence
  Description of Artificial Sequence: Synthetic oligonucleotide
  Antisense Strand to SEQ ID NO: 343309
uaaucuccaaagcucaagc

SEQ ID NO: 343311 - RNA, 19 nt, Artificial Sequence
  Description of Artificial Sequence: Synthetic oligonucleotide
  Sense Strand Starting at position 311 of SEQ ID NO: 318357
uggaguccauaccaaagau

SEQ ID NO: 343312 - RNA, 19 nt, Artificial Sequence
  Description of Artificial Sequence: Synthetic oligonucleotide
  Antisense Strand to SEQ ID NO: 343311
aucuuugguauggacucca

SEQ ID NO: 343313 - RNA, 19 nt, Artificial Sequence
  Description of Artificial Sequence: Synthetic oligonucleotide
  Sense Strand Starting at position 311 of SEQ ID NO: 318426
aaguuaaggccuuguuacu

SEQ ID NO: 343314 - RNA, 19 nt, Artificial Sequence
  Description of Artificial Sequence: Synthetic oligonucleotide
  Antisense Strand to SEQ ID NO: 343313
aguaacaaggccuuaacuu

SEQ ID NO: 343315 - RNA, 19 nt, Artificial Sequence
  Description of Artificial Sequence: Synthetic oligonucleotide
  Sense Strand Starting at position 311 of SEQ ID NO: 318435
ccuuguuacucucuuuagu

SEQ ID NO: 343316 - RNA, 19 nt, Artificial Sequence
  Description of Artificial Sequence: Synthetic oligonucleotide
  Antisense Strand to SEQ ID NO: 343315
acuaaagagaguaacaagg

SEQ ID NO: 343317 - RNA, 19 nt, Artificial Sequence
  Description of Artificial Sequence: Synthetic oligonucleotide
  Sense Strand Starting at position 311 of SEQ ID NO: 318437
uuguuacucucuuuaguuc

SEQ ID NO: 343318 - RNA, 19 nt, Artificial Sequence
  Description of Artificial Sequence: Synthetic oligonucleotide
  Antisense Strand to SEQ ID NO: 343317
gaacuaaagagaguaacaa

SEQ ID NO: 343319 - RNA, 19 nt, Artificial Sequence
  Description of Artificial Sequence: Synthetic oligonucleotide
  Sense Strand Starting at position 311 of SEQ ID NO: 318444
ucucuuuaguucuaagagu

SEQ ID NO: 343320 - RNA, 19 nt, Artificial Sequence
  Description of Artificial Sequence: Synthetic oligonucleotide
  Antisense Strand to SEQ ID NO: 343319
acucuuagaacuaaagaga

SEQ ID NO: 343321 - RNA, 19 nt, Artificial Sequence
  Description of Artificial Sequence: Synthetic oligonucleotide
  Sense Strand Starting at position 311 of SEQ ID NO: 318468
ccuuuacccucagugggaa

SEQ ID NO: 343322 - RNA, 19 nt, Artificial Sequence
  Description of Artificial Sequence: Synthetic oligonucleotide
  Antisense Strand to SEQ ID NO: 343321
uucccacugaggguaaagg

SEQ ID NO: 343323 - RNA, 19 nt, Artificial Sequence
  Description of Artificial Sequence: Synthetic oligonucleotide
  Sense Strand Starting at position 311 of SEQ ID NO: 318570
cagguuuggugcucacaac

SEQ ID NO: 343324 - RNA, 19 nt, Artificial Sequence
  Description of Artificial Sequence: Synthetic oligonucleotide
  Antisense Strand to SEQ ID NO: 343323
guugugagcaccaaaccug

SEQ ID NO: 343325 - RNA, 19 nt, Artificial Sequence
  Description of Artificial Sequence: Synthetic oligonucleotide
  Sense Strand Starting at position 311 of SEQ ID NO: 318675
gcuggaucguuugagcuca

SEQ ID NO: 343326 - RNA, 19 nt, Artificial Sequence
  Description of Artificial Sequence: Synthetic oligonucleotide
  Antisense Strand to SEQ ID NO: 343325
ugagcucaaacgauccagc

SEQ ID NO: 343327 - RNA, 19 nt, Artificial Sequence
  Description of Artificial Sequence: Synthetic oligonucleotide
  Sense Strand Starting at position 311 of SEQ ID NO: 318702
agagcuguccauggccaua

SEQ ID NO: 343328 - RNA, 19 nt, Artificial Sequence
  Description of Artificial Sequence: Synthetic oligonucleotide
  Antisense Strand to SEQ ID NO: 343327
uauggccauggacagcucu

SEQ ID NO: 343329 - RNA, 19 nt, Artificial Sequence
  Description of Artificial Sequence: Synthetic oligonucleotide
  Sense Strand Starting at position 311 of SEQ ID NO: 318738
aagcucgucugaucucaga

SEQ ID NO: 343330 - RNA, 19 nt, Artificial Sequence
  Description of Artificial Sequence: Synthetic oligonucleotide
  Antisense Strand to SEQ ID NO: 343329
ucugagaucagacgagcuu

SEQ ID NO: 343331 - RNA, 19 nt, Artificial Sequence
  Description of Artificial Sequence: Synthetic oligonucleotide
  Sense Strand Starting at position 311 of SEQ ID NO: 318988
guaagauccugacucaaga

SEQ ID NO: 343332 - RNA, 19 nt, Artificial Sequence
  Description of Artificial Sequence: Synthetic oligonucleotide
  Antisense Strand to SEQ ID NO: 343331
ucuugagucaggaucuuac

SEQ ID NO: 343333 - RNA, 19 nt, Artificial Sequence
  Description of Artificial Sequence: Synthetic oligonucleotide
  Sense Strand Starting at position 312 of SEQ ID NO: 315293
gccggaaccuguguuugga

SEQ ID NO: 343334 - RNA, 19 nt, Artificial Sequence
  Description of Artificial Sequence: Synthetic oligonucleotide
  Antisense Strand to SEQ ID NO: 343333
uccaaacacagguuccggc

SEQ ID NO: 343335 - RNA, 19 nt, Artificial Sequence
  Description of Artificial Sequence: Synthetic oligonucleotide
  Sense Strand Starting at position 312 of SEQ ID NO: 315296
ggaaccuguguuuggaaga

SEQ ID NO: 343336 - RNA, 19 nt, Artificial Sequence
  Description of Artificial Sequence: Synthetic oligonucleotide
  Antisense Strand to SEQ ID NO: 343335
ucuuccaaacacagguucc

SEQ ID NO: 343337 - RNA, 19 nt, Artificial Sequence
  Description of Artificial Sequence: Synthetic oligonucleotide
  Sense Strand Starting at position 312 of SEQ ID NO: 315465
ugaggugcuucugucagaa

SEQ ID NO: 343338 - RNA, 19 nt, Artificial Sequence
  Description of Artificial Sequence: Synthetic oligonucleotide
  Antisense Strand to SEQ ID NO: 343337
uucugacagaagcaccuca

SEQ ID NO: 343339 - RNA, 19 nt, Artificial Sequence
  Description of Artificial Sequence: Synthetic oligonucleotide
  Sense Strand Starting at position 312 of SEQ ID NO: 315591
gguugagugccuccgucua

SEQ ID NO: 343340 - RNA, 19 nt, Artificial Sequence
  Description of Artificial Sequence: Synthetic oligonucleotide
  Antisense Strand to SEQ ID NO: 343339
uagacggaggcacucaacc

SEQ ID NO: 343341 - RNA, 19 nt, Artificial Sequence
  Description of Artificial Sequence: Synthetic oligonucleotide
  Sense Strand Starting at position 312 of SEQ ID NO: 315655
uucaguguucuugggaugu

SEQ ID NO: 343342 - RNA, 19 nt, Artificial Sequence
  Description of Artificial Sequence: Synthetic oligonucleotide
  Antisense Strand to SEQ ID NO: 343341
acaucccaagaacacugaa

SEQ ID NO: 343343 - RNA, 19 nt, Artificial Sequence
  Description of Artificial Sequence: Synthetic oligonucleotide
  Sense Strand Starting at position 312 of SEQ ID NO: 315665
uugggaugugucuacagac

SEQ ID NO: 343344 - RNA, 19 nt, Artificial Sequence
  Description of Artificial Sequence: Synthetic oligonucleotide
  Antisense Strand to SEQ ID NO: 343343
gucuguagacacaucccaa

SEQ ID NO: 343345 - RNA, 19 nt, Artificial Sequence
  Description of Artificial Sequence: Synthetic oligonucleotide
  Sense Strand Starting at position 312 of SEQ ID NO: 315757
ugguuucugucagcuaaca

SEQ ID NO: 343346 - RNA, 19 nt, Artificial Sequence
  Description of Artificial Sequence: Synthetic oligonucleotide
  Antisense Strand to SEQ ID NO: 343345
uguuagcugacagaaacca

SEQ ID NO: 343347 - RNA, 19 nt, Artificial Sequence
  Description of Artificial Sequence: Synthetic oligonucleotide
  Sense Strand Starting at position 312 of SEQ ID NO: 315989
ggaggacaaucauaacugu

SEQ ID NO: 343348 - RNA, 19 nt, Artificial Sequence
  Description of Artificial Sequence: Synthetic oligonucleotide
  Antisense Strand to SEQ ID NO: 343347
acaguuaugauuguccucc

SEQ ID NO: 343349 - RNA, 19 nt, Artificial Sequence
  Description of Artificial Sequence: Synthetic oligonucleotide
  Sense Strand Starting at position 312 of SEQ ID NO: 315995
caaucauaacuguggaagu

SEQ ID NO: 343350 - RNA, 19 nt, Artificial Sequence
  Description of Artificial Sequence: Synthetic oligonucleotide
  Antisense Strand to SEQ ID NO: 343349
acuuccacaguuaugauug

SEQ ID NO: 343351 - RNA, 19 nt, Artificial Sequence
  Description of Artificial Sequence: Synthetic oligonucleotide
  Sense Strand Starting at position 312 of SEQ ID NO: 316006
guggaaguacaguauacuu

SEQ ID NO: 343352 - RNA, 19 nt, Artificial Sequence
  Description of Artificial Sequence: Synthetic oligonucleotide
  Antisense Strand to SEQ ID NO: 343351
aaguauacuguacuuccac

SEQ ID NO: 343353 - RNA, 19 nt, Artificial Sequence
  Description of Artificial Sequence: Synthetic oligonucleotide
  Sense Strand Starting at position 312 of SEQ ID NO: 316015
caguauacuugguuuggga

SEQ ID NO: 343354 - RNA, 19 nt, Artificial Sequence
  Description of Artificial Sequence: Synthetic oligonucleotide
  Antisense Strand to SEQ ID NO: 343353
ucccaaaccaaguauacug

SEQ ID NO: 343355 - RNA, 19 nt, Artificial Sequence
  Description of Artificial Sequence: Synthetic oligonucleotide
  Sense Strand Starting at position 312 of SEQ ID NO: 316017
guauacuugguuugggaga

SEQ ID NO: 343356 - RNA, 19 nt, Artificial Sequence
  Description of Artificial Sequence: Synthetic oligonucleotide
  Antisense Strand to SEQ ID NO: 343355
ucucccaaaccaaguauac

SEQ ID NO: 343357 - RNA, 19 nt, Artificial Sequence
  Description of Artificial Sequence: Synthetic oligonucleotide
  Sense Strand Starting at position 312 of SEQ ID NO: 316306
gacacagucugccuaggau

SEQ ID NO: 343358 - RNA, 19 nt, Artificial Sequence
  Description of Artificial Sequence: Synthetic oligonucleotide
  Antisense Strand to SEQ ID NO: 343357
auccuaggcagacuguguc

SEQ ID NO: 343359 - RNA, 19 nt, Artificial Sequence
  Description of Artificial Sequence: Synthetic oligonucleotide
  Sense Strand Starting at position 312 of SEQ ID NO: 316344
ccgucauuagcagagguaa

SEQ ID NO: 343360 - RNA, 19 nt, Artificial Sequence
  Description of Artificial Sequence: Synthetic oligonucleotide
  Antisense Strand to SEQ ID NO: 343359
uuaccucugcuaaugacgg

SEQ ID NO: 343361 - RNA, 19 nt, Artificial Sequence
  Description of Artificial Sequence: Synthetic oligonucleotide
  Sense Strand Starting at position 312 of SEQ ID NO: 316346
gucauuagcagagguaagu

SEQ ID NO: 343362 - RNA, 19 nt, Artificial Sequence
  Description of Artificial Sequence: Synthetic oligonucleotide
  Antisense Strand to SEQ ID NO: 343361
acuuaccucugcuaaugac

SEQ ID NO: 343363 - RNA, 19 nt, Artificial Sequence
  Description of Artificial Sequence: Synthetic oligonucleotide
  Sense Strand Starting at position 312 of SEQ ID NO: 317510
cgaagucucacauguuugu

SEQ ID NO: 343364 - RNA, 19 nt, Artificial Sequence
  Description of Artificial Sequence: Synthetic oligonucleotide
  Antisense Strand to SEQ ID NO: 343363
acaaacaugugagacuucg

SEQ ID NO: 343365 - RNA, 19 nt, Artificial Sequence
  Description of Artificial Sequence: Synthetic oligonucleotide
  Sense Strand Starting at position 312 of SEQ ID NO: 317562
ugaugaauauucgucacug

SEQ ID NO: 343366 - RNA, 19 nt, Artificial Sequence
  Description of Artificial Sequence: Synthetic oligonucleotide
  Antisense Strand to SEQ ID NO: 343365
cagugacgaauauucauca

SEQ ID NO: 343367 - RNA, 19 nt, Artificial Sequence
  Description of Artificial Sequence: Synthetic oligonucleotide
  Sense Strand Starting at position 312 of SEQ ID NO: 317563
gaugaauauucgucacugg

SEQ ID NO: 343368 - RNA, 19 nt, Artificial Sequence
  Description of Artificial Sequence: Synthetic oligonucleotide
  Antisense Strand to SEQ ID NO: 343367
ccagugacgaauauucauc

SEQ ID NO: 343369 - RNA, 19 nt, Artificial Sequence
  Description of Artificial Sequence: Synthetic oligonucleotide
  Sense Strand Starting at position 312 of SEQ ID NO: 317564
augaauauucgucacugga

SEQ ID NO: 343370 - RNA, 19 nt, Artificial Sequence
  Description of Artificial Sequence: Synthetic oligonucleotide
  Antisense Strand to SEQ ID NO: 343369
uccagugacgaauauucau

SEQ ID NO: 343371 - RNA, 19 nt, Artificial Sequence
  Description of Artificial Sequence: Synthetic oligonucleotide
  Sense Strand Starting at position 312 of SEQ ID NO: 317566
gaauauucgucacuggaau

SEQ ID NO: 343372 - RNA, 19 nt, Artificial Sequence
  Description of Artificial Sequence: Synthetic oligonucleotide
  Antisense Strand to SEQ ID NO: 343371
auuccagugacgaauauuc

SEQ ID NO: 343373 - RNA, 19 nt, Artificial Sequence
  Description of Artificial Sequence: Synthetic oligonucleotide
  Sense Strand Starting at position 312 of SEQ ID NO: 317567
aauauucgucacuggaaua

SEQ ID NO: 343374 - RNA, 19 nt, Artificial Sequence
  Description of Artificial Sequence: Synthetic oligonucleotide
  Antisense Strand to SEQ ID NO: 343373
uauuccagugacgaauauu

SEQ ID NO: 343375 - RNA, 19 nt, Artificial Sequence
  Description of Artificial Sequence: Synthetic oligonucleotide
  Sense Strand Starting at position 312 of SEQ ID NO: 317683
ucucguuugagauaugggu

SEQ ID NO: 343376 - RNA, 19 nt, Artificial Sequence
  Description of Artificial Sequence: Synthetic oligonucleotide
  Antisense Strand to SEQ ID NO: 343375
acccauaucucaaacgaga

SEQ ID NO: 343377 - RNA, 19 nt, Artificial Sequence
  Description of Artificial Sequence: Synthetic oligonucleotide
  Sense Strand Starting at position 312 of SEQ ID NO: 317685
ucguuugagauaugggugu

SEQ ID NO: 343378 - RNA, 19 nt, Artificial Sequence
  Description of Artificial Sequence: Synthetic oligonucleotide
  Antisense Strand to SEQ ID NO: 343377
acacccauaucucaaacga

SEQ ID NO: 343379 - RNA, 19 nt, Artificial Sequence
  Description of Artificial Sequence: Synthetic oligonucleotide
  Sense Strand Starting at position 312 of SEQ ID NO: 317687
guuugagauauggguguuu

SEQ ID NO: 343380 - RNA, 19 nt, Artificial Sequence
  Description of Artificial Sequence: Synthetic oligonucleotide
  Antisense Strand to SEQ ID NO: 343379
aaacacccauaucucaaac

SEQ ID NO: 343381 - RNA, 19 nt, Artificial Sequence
  Description of Artificial Sequence: Synthetic oligonucleotide
  Sense Strand Starting at position 312 of SEQ ID NO: 318000
gguggucuuuaugcccaau

SEQ ID NO: 343382 - RNA, 19 nt, Artificial Sequence
  Description of Artificial Sequence: Synthetic oligonucleotide
  Antisense Strand to SEQ ID NO: 343381
auugggcauaaagaccacc

SEQ ID NO: 343383 - RNA, 19 nt, Artificial Sequence
  Description of Artificial Sequence: Synthetic oligonucleotide
  Sense Strand Starting at position 312 of SEQ ID NO: 318002
uggucuuuaugcccaauaa

SEQ ID NO: 343384 - RNA, 19 nt, Artificial Sequence
  Description of Artificial Sequence: Synthetic oligonucleotide
  Antisense Strand to SEQ ID NO: 343383
uuauugggcauaaagacca

SEQ ID NO: 343385 - RNA, 19 nt, Artificial Sequence
  Description of Artificial Sequence: Synthetic oligonucleotide
  Sense Strand Starting at position 312 of SEQ ID NO: 318003
ggucuuuaugcccaauaaa

SEQ ID NO: 343386 - RNA, 19 nt, Artificial Sequence
  Description of Artificial Sequence: Synthetic oligonucleotide
  Antisense Strand to SEQ ID NO: 343385
uuuauugggcauaaagacc

SEQ ID NO: 343387 - RNA, 19 nt, Artificial Sequence
  Description of Artificial Sequence: Synthetic oligonucleotide
  Sense Strand Starting at position 312 of SEQ ID NO: 318051
uucucuugauaccugagaa

SEQ ID NO: 343388 - RNA, 19 nt, Artificial Sequence
  Description of Artificial Sequence: Synthetic oligonucleotide
  Antisense Strand to SEQ ID NO: 343387
uucucagguaucaagagaa

SEQ ID NO: 343389 - RNA, 19 nt, Artificial Sequence
  Description of Artificial Sequence: Synthetic oligonucleotide
  Sense Strand Starting at position 312 of SEQ ID NO: 318055
cuugauaccugagaaauca

SEQ ID NO: 343390 - RNA, 19 nt, Artificial Sequence
  Description of Artificial Sequence: Synthetic oligonucleotide
  Antisense Strand to SEQ ID NO: 343389
ugauuucucagguaucaag

SEQ ID NO: 343391 - RNA, 19 nt, Artificial Sequence
  Description of Artificial Sequence: Synthetic oligonucleotide
  Sense Strand Starting at position 312 of SEQ ID NO: 318420
augugacuccuuuaaccug

SEQ ID NO: 343392 - RNA, 19 nt, Artificial Sequence
  Description of Artificial Sequence: Synthetic oligonucleotide
  Antisense Strand to SEQ ID NO: 343391
cagguuaaaggagucacau

SEQ ID NO: 343393 - RNA, 19 nt, Artificial Sequence
  Description of Artificial Sequence: Synthetic oligonucleotide
  Sense Strand Starting at position 312 of SEQ ID NO: 318435
ccuggugugcuuuaacaac

SEQ ID NO: 343394 - RNA, 19 nt, Artificial Sequence
  Description of Artificial Sequence: Synthetic oligonucleotide
  Antisense Strand to SEQ ID NO: 343393
guuguuaaagcacaccagg

SEQ ID NO: 343395 - RNA, 19 nt, Artificial Sequence
  Description of Artificial Sequence: Synthetic oligonucleotide
  Sense Strand Starting at position 312 of SEQ ID NO: 318538
ggaguaucuugcuccucua

SEQ ID NO: 343396 - RNA, 19 nt, Artificial Sequence
  Description of Artificial Sequence: Synthetic oligonucleotide
  Antisense Strand to SEQ ID NO: 343395
uagaggagcaagauacucc

SEQ ID NO: 343397 - RNA, 19 nt, Artificial Sequence
  Description of Artificial Sequence: Synthetic oligonucleotide
  Sense Strand Starting at position 312 of SEQ ID NO: 318541
guaucuugcuccucuacca

SEQ ID NO: 343398 - RNA, 19 nt, Artificial Sequence
  Description of Artificial Sequence: Synthetic oligonucleotide
  Antisense Strand to SEQ ID NO: 343397
ugguagaggagcaagauac

SEQ ID NO: 343399 - RNA, 19 nt, Artificial Sequence
  Description of Artificial Sequence: Synthetic oligonucleotide
  Sense Strand Starting at position 312 of SEQ ID NO: 318656
uagagaagcuaacucagua

SEQ ID NO: 343400 - RNA, 19 nt, Artificial Sequence
  Description of Artificial Sequence: Synthetic oligonucleotide
  Antisense Strand to SEQ ID NO: 343399
uacugaguuagcuucucua

SEQ ID NO: 343401 - RNA, 19 nt, Artificial Sequence
  Description of Artificial Sequence: Synthetic oligonucleotide
  Sense Strand Starting at position 312 of SEQ ID NO: 318660
gaagcuaacucaguagaga

SEQ ID NO: 343402 - RNA, 19 nt, Artificial Sequence
  Description of Artificial Sequence: Synthetic oligonucleotide
  Antisense Strand to SEQ ID NO: 343401
ucucuacugaguuagcuuc

SEQ ID NO: 343403 - RNA, 19 nt, Artificial Sequence
  Description of Artificial Sequence: Synthetic oligonucleotide
  Sense Strand Starting at position 312 of SEQ ID NO: 318835
gugaucgugucauuccaaa

SEQ ID NO: 343404 - RNA, 19 nt, Artificial Sequence
  Description of Artificial Sequence: Synthetic oligonucleotide
  Antisense Strand to SEQ ID NO: 343403
uuuggaaugacacgaucac

SEQ ID NO: 343405 - RNA, 19 nt, Artificial Sequence
  Description of Artificial Sequence: Synthetic oligonucleotide
  Sense Strand Starting at position 312 of SEQ ID NO: 318871
ggugcaugaccuggagaca

SEQ ID NO: 343406 - RNA, 19 nt, Artificial Sequence
  Description of Artificial Sequence: Synthetic oligonucleotide
  Antisense Strand to SEQ ID NO: 343405
ugucuccaggucaugcacc

SEQ ID NO: 343407 - RNA, 19 nt, Artificial Sequence
  Description of Artificial Sequence: Synthetic oligonucleotide
  Sense Strand Starting at position 312 of SEQ ID NO: 318979
aaguaagagggcuaucuuu

SEQ ID NO: 343408 - RNA, 19 nt, Artificial Sequence
  Description of Artificial Sequence: Synthetic oligonucleotide
  Antisense Strand to SEQ ID NO: 343407
aaagauagcccucuuacuu

SEQ ID NO: 343409 - RNA, 19 nt, Artificial Sequence
  Description of Artificial Sequence: Synthetic oligonucleotide
  Sense Strand Starting at position 312 of SEQ ID NO: 318987
gggcuaucuuuagcgagau

SEQ ID NO: 343410 - RNA, 19 nt, Artificial Sequence
  Description of Artificial Sequence: Synthetic oligonucleotide
  Antisense Strand to SEQ ID NO: 343409
aucucgcuaaagauagccc

SEQ ID NO: 343411 - RNA, 19 nt, Artificial Sequence
  Description of Artificial Sequence: Synthetic oligonucleotide
  Sense Strand Starting at position 312 of SEQ ID NO: 319182
caagcagcucaguaaagua

SEQ ID NO: 343412 - RNA, 19 nt, Artificial Sequence
  Description of Artificial Sequence: Synthetic oligonucleotide
  Antisense Strand to SEQ ID NO: 343411
uacuuuacugagcugcuug

SEQ ID NO: 343413 - RNA, 19 nt, Artificial Sequence
  Description of Artificial Sequence: Synthetic oligonucleotide
  Sense Strand Starting at position 313 of SEQ ID NO: 315537
gguggucuuuaugcccaau

SEQ ID NO: 343414 - RNA, 19 nt, Artificial Sequence
  Description of Artificial Sequence: Synthetic oligonucleotide
  Antisense Strand to SEQ ID NO: 343413
auugggcauaaagaccacc

SEQ ID NO: 343415 - RNA, 19 nt, Artificial Sequence
  Description of Artificial Sequence: Synthetic oligonucleotide
  Sense Strand Starting at position 313 of SEQ ID NO: 315539
uggucuuuaugcccaauaa

SEQ ID NO: 343416 - RNA, 19 nt, Artificial Sequence
  Description of Artificial Sequence: Synthetic oligonucleotide
  Antisense Strand to SEQ ID NO: 343415
uuauugggcauaaagacca

SEQ ID NO: 343417 - RNA, 19 nt, Artificial Sequence
  Description of Artificial Sequence: Synthetic oligonucleotide
  Sense Strand Starting at position 313 of SEQ ID NO: 315540
ggucuuuaugcccaauaaa

SEQ ID NO: 343418 - RNA, 19 nt, Artificial Sequence
  Description of Artificial Sequence: Synthetic oligonucleotide
  Antisense Strand to SEQ ID NO: 343417
uuuauugggcauaaagacc

SEQ ID NO: 343419 - RNA, 19 nt, Artificial Sequence
  Description of Artificial Sequence: Synthetic oligonucleotide
  Sense Strand Starting at position 313 of SEQ ID NO: 315588
uucucuugauaccugagaa

SEQ ID NO: 343420 - RNA, 19 nt, Artificial Sequence
  Description of Artificial Sequence: Synthetic oligonucleotide
  Antisense Strand to SEQ ID NO: 343419
uucucagguaucaagagaa

SEQ ID NO: 343421 - RNA, 19 nt, Artificial Sequence
  Description of Artificial Sequence: Synthetic oligonucleotide
  Sense Strand Starting at position 313 of SEQ ID NO: 315592
cuugauaccugagaaauca

SEQ ID NO: 343422 - RNA, 19 nt, Artificial Sequence
  Description of Artificial Sequence: Synthetic oligonucleotide
  Antisense Strand to SEQ ID NO: 343421
ugauuucucagguaucaag

SEQ ID NO: 343423 - RNA, 19 nt, Artificial Sequence
  Description of Artificial Sequence: Synthetic oligonucleotide
  Sense Strand Starting at position 313 of SEQ ID NO: 315957
augugacuccuuuaaccug

SEQ ID NO: 343424 - RNA, 19 nt, Artificial Sequence
  Description of Artificial Sequence: Synthetic oligonucleotide
  Antisense Strand to SEQ ID NO: 343423
cagguuaaaggagucacau

SEQ ID NO: 343425 - RNA, 19 nt, Artificial Sequence
  Description of Artificial Sequence: Synthetic oligonucleotide
  Sense Strand Starting at position 313 of SEQ ID NO: 315965
ccuuuaaccuggugugcuu

SEQ ID NO: 343426 - RNA, 19 nt, Artificial Sequence
  Description of Artificial Sequence: Synthetic oligonucleotide
  Antisense Strand to SEQ ID NO: 343425
aagcacaccagguuaaagg

SEQ ID NO: 343427 - RNA, 19 nt, Artificial Sequence
  Description of Artificial Sequence: Synthetic oligonucleotide
  Sense Strand Starting at position 313 of SEQ ID NO: 315972
ccuggugugcuuuaacaac

SEQ ID NO: 343428 - RNA, 19 nt, Artificial Sequence
  Description of Artificial Sequence: Synthetic oligonucleotide
  Antisense Strand to SEQ ID NO: 343427
guuguuaaagcacaccagg

SEQ ID NO: 343429 - RNA, 19 nt, Artificial Sequence
  Description of Artificial Sequence: Synthetic oligonucleotide
  Sense Strand Starting at position 313 of SEQ ID NO: 316036
accaaauaaugcgaccaua

SEQ ID NO: 343430 - RNA, 19 nt, Artificial Sequence
  Description of Artificial Sequence: Synthetic oligonucleotide
  Antisense Strand to SEQ ID NO: 343429
uauggucgcauuauuuggu

SEQ ID NO: 343431 - RNA, 19 nt, Artificial Sequence
  Description of Artificial Sequence: Synthetic oligonucleotide
  Sense Strand Starting at position 313 of SEQ ID NO: 316075
ggaguaucuugcuccucua

SEQ ID NO: 343432 - RNA, 19 nt, Artificial Sequence
  Description of Artificial Sequence: Synthetic oligonucleotide
  Antisense Strand to SEQ ID NO: 343431
uagaggagcaagauacucc

SEQ ID NO: 343433 - RNA, 19 nt, Artificial Sequence
  Description of Artificial Sequence: Synthetic oligonucleotide
  Sense Strand Starting at position 313 of SEQ ID NO: 316078
guaucuugcuccucuacca

SEQ ID NO: 343434 - RNA, 19 nt, Artificial Sequence
  Description of Artificial Sequence: Synthetic oligonucleotide
  Antisense Strand to SEQ ID NO: 343433
ugguagaggagcaagauac

SEQ ID NO: 343435 - RNA, 19 nt, Artificial Sequence
  Description of Artificial Sequence: Synthetic oligonucleotide
  Sense Strand Starting at position 313 of SEQ ID NO: 316193
uagagaagcuaacucagua

SEQ ID NO: 343436 - RNA, 19 nt, Artificial Sequence
  Description of Artificial Sequence: Synthetic oligonucleotide
  Antisense Strand to SEQ ID NO: 343435
uacugaguuagcuucucua

SEQ ID NO: 343437 - RNA, 19 nt, Artificial Sequence
  Description of Artificial Sequence: Synthetic oligonucleotide
  Sense Strand Starting at position 313 of SEQ ID NO: 316197
gaagcuaacucaguagaga

SEQ ID NO: 343438 - RNA, 19 nt, Artificial Sequence
  Description of Artificial Sequence: Synthetic oligonucleotide
  Antisense Strand to SEQ ID NO: 343437
ucucuacugaguuagcuuc

SEQ ID NO: 343439 - RNA, 19 nt, Artificial Sequence
  Description of Artificial Sequence: Synthetic oligonucleotide
  Sense Strand Starting at position 313 of SEQ ID NO: 316367
cgggagugaucgugucauu

SEQ ID NO: 343440 - RNA, 19 nt, Artificial Sequence
  Description of Artificial Sequence: Synthetic oligonucleotide
  Antisense Strand to SEQ ID NO: 343439
aaugacacgaucacucccg

SEQ ID NO: 343441 - RNA, 19 nt, Artificial Sequence
  Description of Artificial Sequence: Synthetic oligonucleotide
  Sense Strand Starting at position 313 of SEQ ID NO: 316370
gagugaucgugucauucca

SEQ ID NO: 343442 - RNA, 19 nt, Artificial Sequence
  Description of Artificial Sequence: Synthetic oligonucleotide
  Antisense Strand to SEQ ID NO: 343441
uggaaugacacgaucacuc

SEQ ID NO: 343443 - RNA, 19 nt, Artificial Sequence
  Description of Artificial Sequence: Synthetic oligonucleotide
  Sense Strand Starting at position 313 of SEQ ID NO: 316372
gugaucgugucauuccaaa

SEQ ID NO: 343444 - RNA, 19 nt, Artificial Sequence
  Description of Artificial Sequence: Synthetic oligonucleotide
  Antisense Strand to SEQ ID NO: 343443
uuuggaaugacacgaucac

SEQ ID NO: 343445 - RNA, 19 nt, Artificial Sequence
  Description of Artificial Sequence: Synthetic oligonucleotide
  Sense Strand Starting at position 313 of SEQ ID NO: 316408
ggugcaugaccuggagaca

SEQ ID NO: 343446 - RNA, 19 nt, Artificial Sequence
  Description of Artificial Sequence: Synthetic oligonucleotide
  Antisense Strand to SEQ ID NO: 343445
ugucuccaggucaugcacc

SEQ ID NO: 343447 - RNA, 19 nt, Artificial Sequence
  Description of Artificial Sequence: Synthetic oligonucleotide
  Sense Strand Starting at position 313 of SEQ ID NO: 316516
aaguaagagggcuaucuuu

SEQ ID NO: 343448 - RNA, 19 nt, Artificial Sequence
  Description of Artificial Sequence: Synthetic oligonucleotide
  Antisense Strand to SEQ ID NO: 343447
aaagauagcccucuuacuu

SEQ ID NO: 343449 - RNA, 19 nt, Artificial Sequence
  Description of Artificial Sequence: Synthetic oligonucleotide
  Sense Strand Starting at position 313 of SEQ ID NO: 316524
gggcuaucuuuagcgagau

SEQ ID NO: 343450 - RNA, 19 nt, Artificial Sequence
  Description of Artificial Sequence: Synthetic oligonucleotide
  Antisense Strand to SEQ ID NO: 343449
aucucgcuaaagauagccc

SEQ ID NO: 343451 - RNA, 19 nt, Artificial Sequence
  Description of Artificial Sequence: Synthetic oligonucleotide
  Sense Strand Starting at position 313 of SEQ ID NO: 316525
ggcuaucuuuagcgagaug

SEQ ID NO: 343452 - RNA, 19 nt, Artificial Sequence
  Description of Artificial Sequence: Synthetic oligonucleotide
  Antisense Strand to SEQ ID NO: 343451
caucucgcuaaagauagcc

SEQ ID NO: 343453 - RNA, 19 nt, Artificial Sequence
  Description of Artificial Sequence: Synthetic oligonucleotide
  Sense Strand Starting at position 313 of SEQ ID NO: 316563
gggagucacuaccauugca

SEQ ID NO: 343454 - RNA, 19 nt, Artificial Sequence
  Description of Artificial Sequence: Synthetic oligonucleotide
  Antisense Strand to SEQ ID NO: 343453
ugcaaugguagugacuccc

SEQ ID NO: 343455 - RNA, 19 nt, Artificial Sequence
  Description of Artificial Sequence: Synthetic oligonucleotide
  Sense Strand Starting at position 313 of SEQ ID NO: 316719
caagcagcucaguaaagua

SEQ ID NO: 343456 - RNA, 19 nt, Artificial Sequence
  Description of Artificial Sequence: Synthetic oligonucleotide
  Antisense Strand to SEQ ID NO: 343455
uacuuuacugagcugcuug

SEQ ID NO: 343457 - RNA, 19 nt, Artificial Sequence
  Description of Artificial Sequence: Synthetic oligonucleotide
  Sense Strand Starting at position 313 of SEQ ID NO: 316815
gcuggaaugcucuggagac

SEQ ID NO: 343458 - RNA, 19 nt, Artificial Sequence
  Description of Artificial Sequence: Synthetic oligonucleotide
  Antisense Strand to SEQ ID NO: 343457
gucuccagagcauuccagc

SEQ ID NO: 343459 - RNA, 19 nt, Artificial Sequence
  Description of Artificial Sequence: Synthetic oligonucleotide
  Sense Strand Starting at position 313 of SEQ ID NO: 316816
cuggaaugcucuggagaca

SEQ ID NO: 343460 - RNA, 19 nt, Artificial Sequence
  Description of Artificial Sequence: Synthetic oligonucleotide
  Antisense Strand to SEQ ID NO: 343459
ugucuccagagcauuccag

SEQ ID NO: 343461 - RNA, 19 nt, Artificial Sequence
  Description of Artificial Sequence: Synthetic oligonucleotide
  Sense Strand Starting at position 313 of SEQ ID NO: 316963
ccgggaguagguugugaaa

SEQ ID NO: 343462 - RNA, 19 nt, Artificial Sequence
  Description of Artificial Sequence: Synthetic oligonucleotide
  Antisense Strand to SEQ ID NO: 343461
uuucacaaccuacucccgg

SEQ ID NO: 343463 - RNA, 19 nt, Artificial Sequence
  Description of Artificial Sequence: Synthetic oligonucleotide
  Sense Strand Starting at position 313 of SEQ ID NO: 316972
gguugugaaacggagucua

SEQ ID NO: 343464 - RNA, 19 nt, Artificial Sequence
  Description of Artificial Sequence: Synthetic oligonucleotide
  Antisense Strand to SEQ ID NO: 343463
uagacuccguuucacaacc

SEQ ID NO: 343465 - RNA, 19 nt, Artificial Sequence
  Description of Artificial Sequence: Synthetic oligonucleotide
  Sense Strand Starting at position 313 of SEQ ID NO: 317059
ggucccgauccggauuaga

SEQ ID NO: 343466 - RNA, 19 nt, Artificial Sequence
  Description of Artificial Sequence: Synthetic oligonucleotide
  Antisense Strand to SEQ ID NO: 343465
ucuaauccggaucgggacc

SEQ ID NO: 343467 - RNA, 19 nt, Artificial Sequence
  Description of Artificial Sequence: Synthetic oligonucleotide
  Sense Strand Starting at position 313 of SEQ ID NO: 317087
caggauuagcccuguuggu

SEQ ID NO: 343468 - RNA, 19 nt, Artificial Sequence
  Description of Artificial Sequence: Synthetic oligonucleotide
  Antisense Strand to SEQ ID NO: 343467
accaacagggcuaauccug

SEQ ID NO: 343469 - RNA, 19 nt, Artificial Sequence
  Description of Artificial Sequence: Synthetic oligonucleotide
  Sense Strand Starting at position 313 of SEQ ID NO: 318756
ccugcuuggucccugcaaa

SEQ ID NO: 343470 - RNA, 19 nt, Artificial Sequence
  Description of Artificial Sequence: Synthetic oligonucleotide
  Antisense Strand to SEQ ID NO: 343469
uuugcagggaccaagcagg

SEQ ID NO: 343471 - RNA, 19 nt, Artificial Sequence
  Description of Artificial Sequence: Synthetic oligonucleotide
  Sense Strand Starting at position 313 of SEQ ID NO: 318827
guggauuugucguauuaaa

SEQ ID NO: 343472 - RNA, 19 nt, Artificial Sequence
  Description of Artificial Sequence: Synthetic oligonucleotide
  Antisense Strand to SEQ ID NO: 343471
uuuaauacgacaaauccac

SEQ ID NO: 343473 - RNA, 19 nt, Artificial Sequence
  Description of Artificial Sequence: Synthetic oligonucleotide
  Sense Strand Starting at position 314 of SEQ ID NO: 315273
auacuagagucaucuccau

SEQ ID NO: 343474 - RNA, 19 nt, Artificial Sequence
  Description of Artificial Sequence: Synthetic oligonucleotide
  Antisense Strand to SEQ ID NO: 343473
auggagaugacucuaguau

SEQ ID NO: 343475 - RNA, 19 nt, Artificial Sequence
  Description of Artificial Sequence: Synthetic oligonucleotide
  Sense Strand Starting at position 314 of SEQ ID NO: 315352
guaugacaaaggugaacau

SEQ ID NO: 343476 - RNA, 19 nt, Artificial Sequence
  Description of Artificial Sequence: Synthetic oligonucleotide
  Antisense Strand to SEQ ID NO: 343475
auguucaccuuugucauac

SEQ ID NO: 343477 - RNA, 19 nt, Artificial Sequence
  Description of Artificial Sequence: Synthetic oligonucleotide
  Sense Strand Starting at position 314 of SEQ ID NO: 315487
uccagcuauuagguugaca

SEQ ID NO: 343478 - RNA, 19 nt, Artificial Sequence
  Description of Artificial Sequence: Synthetic oligonucleotide
  Antisense Strand to SEQ ID NO: 343477
ugucaaccuaauagcugga

SEQ ID NO: 343479 - RNA, 19 nt, Artificial Sequence
  Description of Artificial Sequence: Synthetic oligonucleotide
  Sense Strand Starting at position 314 of SEQ ID NO: 315489
cagcuauuagguugacaau

SEQ ID NO: 343480 - RNA, 19 nt, Artificial Sequence
  Description of Artificial Sequence: Synthetic oligonucleotide
  Antisense Strand to SEQ ID NO: 343479
auugucaaccuaauagcug

SEQ ID NO: 343481 - RNA, 19 nt, Artificial Sequence
  Description of Artificial Sequence: Synthetic oligonucleotide
  Sense Strand Starting at position 314 of SEQ ID NO: 315490
agcuauuagguugacaauu

SEQ ID NO: 343482 - RNA, 19 nt, Artificial Sequence
  Description of Artificial Sequence: Synthetic oligonucleotide
  Antisense Strand to SEQ ID NO: 343481
aauugucaaccuaauagcu

SEQ ID NO: 343483 - RNA, 19 nt, Artificial Sequence
  Description of Artificial Sequence: Synthetic oligonucleotide
  Sense Strand Starting at position 314 of SEQ ID NO: 315624
aucauaauuugauaggcga

SEQ ID NO: 343484 - RNA, 19 nt, Artificial Sequence
  Description of Artificial Sequence: Synthetic oligonucleotide
  Antisense Strand to SEQ ID NO: 343483
ucgccuaucaaauuaugau

SEQ ID NO: 343485 - RNA, 19 nt, Artificial Sequence
  Description of Artificial Sequence: Synthetic oligonucleotide
  Sense Strand Starting at position 314 of SEQ ID NO: 315640
cgaggauacucaucacuau

SEQ ID NO: 343486 - RNA, 19 nt, Artificial Sequence
  Description of Artificial Sequence: Synthetic oligonucleotide
  Antisense Strand to SEQ ID NO: 343485
auagugaugaguauccucg

SEQ ID NO: 343487 - RNA, 19 nt, Artificial Sequence
  Description of Artificial Sequence: Synthetic oligonucleotide
  Sense Strand Starting at position 314 of SEQ ID NO: 316338
guuauaaguguugggauua

SEQ ID NO: 343488 - RNA, 19 nt, Artificial Sequence
  Description of Artificial Sequence: Synthetic oligonucleotide
  Antisense Strand to SEQ ID NO: 343487
uaaucccaacacuuauaac

SEQ ID NO: 343489 - RNA, 19 nt, Artificial Sequence
  Description of Artificial Sequence: Synthetic oligonucleotide
  Sense Strand Starting at position 314 of SEQ ID NO: 316435
augaaacaauucggauuua

SEQ ID NO: 343490 - RNA, 19 nt, Artificial Sequence
  Description of Artificial Sequence: Synthetic oligonucleotide
  Antisense Strand to SEQ ID NO: 343489
uaaauccgaauuguuucau

SEQ ID NO: 343491 - RNA, 19 nt, Artificial Sequence
  Description of Artificial Sequence: Synthetic oligonucleotide
  Sense Strand Starting at position 314 of SEQ ID NO: 316436
ugaaacaauucggauuuaa

SEQ ID NO: 343492 - RNA, 19 nt, Artificial Sequence
  Description of Artificial Sequence: Synthetic oligonucleotide
  Antisense Strand to SEQ ID NO: 343491
uuaaauccgaauuguuuca

SEQ ID NO: 343493 - RNA, 19 nt, Artificial Sequence
  Description of Artificial Sequence: Synthetic oligonucleotide
  Sense Strand Starting at position 314 of SEQ ID NO: 316489
cuuacaacucaaggugauu

SEQ ID NO: 343494 - RNA, 19 nt, Artificial Sequence
  Description of Artificial Sequence: Synthetic oligonucleotide
  Antisense Strand to SEQ ID NO: 343493
aaucaccuugaguuguaag

SEQ ID NO: 343495 - RNA, 19 nt, Artificial Sequence
  Description of Artificial Sequence: Synthetic oligonucleotide
  Sense Strand Starting at position 314 of SEQ ID NO: 316618
ugaagagacugagaauuau

SEQ ID NO: 343496 - RNA, 19 nt, Artificial Sequence
  Description of Artificial Sequence: Synthetic oligonucleotide
  Antisense Strand to SEQ ID NO: 343495
auaauucucagucucuuca

SEQ ID NO: 343497 - RNA, 19 nt, Artificial Sequence
  Description of Artificial Sequence: Synthetic oligonucleotide
  Sense Strand Starting at position 314 of SEQ ID NO: 316660
guaauacgcgcguucguga

SEQ ID NO: 343498 - RNA, 19 nt, Artificial Sequence
  Description of Artificial Sequence: Synthetic oligonucleotide
  Antisense Strand to SEQ ID NO: 343497
ucacgaacgcgcguauuac

SEQ ID NO: 343499 - RNA, 19 nt, Artificial Sequence
  Description of Artificial Sequence: Synthetic oligonucleotide
  Sense Strand Starting at position 314 of SEQ ID NO: 316686
guuggucugcguguucaga

SEQ ID NO: 343500 - RNA, 19 nt, Artificial Sequence
  Description of Artificial Sequence: Synthetic oligonucleotide
  Antisense Strand to SEQ ID NO: 343499
ucugaacacgcagaccaac

SEQ ID NO: 343501 - RNA, 19 nt, Artificial Sequence
  Description of Artificial Sequence: Synthetic oligonucleotide
  Sense Strand Starting at position 314 of SEQ ID NO: 316806
ccugguuuaucgagaggga

SEQ ID NO: 343502 - RNA, 19 nt, Artificial Sequence
  Description of Artificial Sequence: Synthetic oligonucleotide
  Antisense Strand to SEQ ID NO: 343501
ucccucucgauaaaccagg

SEQ ID NO: 343503 - RNA, 19 nt, Artificial Sequence
  Description of Artificial Sequence: Synthetic oligonucleotide
  Sense Strand Starting at position 314 of SEQ ID NO: 317132
gaaguuuaagaaggcaagu

SEQ ID NO: 343504 - RNA, 19 nt, Artificial Sequence
  Description of Artificial Sequence: Synthetic oligonucleotide
  Antisense Strand to SEQ ID NO: 343503
acuugccuucuuaaacuuc

SEQ ID NO: 343505 - RNA, 19 nt, Artificial Sequence
  Description of Artificial Sequence: Synthetic oligonucleotide
  Sense Strand Starting at position 314 of SEQ ID NO: 317187
gggagagcgcgccagaaau

SEQ ID NO: 343506 - RNA, 19 nt, Artificial Sequence
  Description of Artificial Sequence: Synthetic oligonucleotide
  Antisense Strand to SEQ ID NO: 343505
auuucuggcgcgcucuccc

SEQ ID NO: 343507 - RNA, 19 nt, Artificial Sequence
  Description of Artificial Sequence: Synthetic oligonucleotide
  Sense Strand Starting at position 314 of SEQ ID NO: 317322
aaccucugccaguagagaa

SEQ ID NO: 343508 - RNA, 19 nt, Artificial Sequence
  Description of Artificial Sequence: Synthetic oligonucleotide
  Antisense Strand to SEQ ID NO: 343507
uucucuacuggcagagguu

SEQ ID NO: 343509 - RNA, 19 nt, Artificial Sequence
  Description of Artificial Sequence: Synthetic oligonucleotide
  Sense Strand Starting at position 314 of SEQ ID NO: 317350
ggaaaugggugccucaaga

SEQ ID NO: 343510 - RNA, 19 nt, Artificial Sequence
  Description of Artificial Sequence: Synthetic oligonucleotide
  Antisense Strand to SEQ ID NO: 343509
ucuugaggcacccauuucc

SEQ ID NO: 343511 - RNA, 19 nt, Artificial Sequence
  Description of Artificial Sequence: Synthetic oligonucleotide
  Sense Strand Starting at position 314 of SEQ ID NO: 318129
uacugaaauguaugguaua

SEQ ID NO: 343512 - RNA, 19 nt, Artificial Sequence
  Description of Artificial Sequence: Synthetic oligonucleotide
  Antisense Strand to SEQ ID NO: 343511
uauaccauacauuucagua

SEQ ID NO: 343513 - RNA, 19 nt, Artificial Sequence
  Description of Artificial Sequence: Synthetic oligonucleotide
  Sense Strand Starting at position 314 of SEQ ID NO: 318210
caggguuagcgccaucacu

SEQ ID NO: 343514 - RNA, 19 nt, Artificial Sequence
  Description of Artificial Sequence: Synthetic oligonucleotide
  Antisense Strand to SEQ ID NO: 343513
agugauggcgcuaacccug

SEQ ID NO: 343515 - RNA, 19 nt, Artificial Sequence
  Description of Artificial Sequence: Synthetic oligonucleotide
  Sense Strand Starting at position 314 of SEQ ID NO: 318281
cgaagcaagucuguggaaa

SEQ ID NO: 343516 - RNA, 19 nt, Artificial Sequence
  Description of Artificial Sequence: Synthetic oligonucleotide
  Antisense Strand to SEQ ID NO: 343515
uuuccacagacuugcuucg

SEQ ID NO: 343517 - RNA, 19 nt, Artificial Sequence
  Description of Artificial Sequence: Synthetic oligonucleotide
  Sense Strand Starting at position 314 of SEQ ID NO: 318433
cugugauuaccagguacag

SEQ ID NO: 343518 - RNA, 19 nt, Artificial Sequence
  Description of Artificial Sequence: Synthetic oligonucleotide
  Antisense Strand to SEQ ID NO: 343517
cuguaccugguaaucacag

SEQ ID NO: 343519 - RNA, 19 nt, Artificial Sequence
  Description of Artificial Sequence: Synthetic oligonucleotide
  Sense Strand Starting at position 314 of SEQ ID NO: 318435
gugauuaccagguacagca

SEQ ID NO: 343520 - RNA, 19 nt, Artificial Sequence
  Description of Artificial Sequence: Synthetic oligonucleotide
  Antisense Strand to SEQ ID NO: 343519
ugcuguaccugguaaucac

SEQ ID NO: 343521 - RNA, 19 nt, Artificial Sequence
  Description of Artificial Sequence: Synthetic oligonucleotide
  Sense Strand Starting at position 314 of SEQ ID NO: 318480
acauguguuugcucaggga

SEQ ID NO: 343522 - RNA, 19 nt, Artificial Sequence
  Description of Artificial Sequence: Synthetic oligonucleotide
  Antisense Strand to SEQ ID NO: 343521
ucccugagcaaacacaugu

SEQ ID NO: 343523 - RNA, 19 nt, Artificial Sequence
  Description of Artificial Sequence: Synthetic oligonucleotide
  Sense Strand Starting at position 314 of SEQ ID NO: 318549
uaggccugccuagagaauu

SEQ ID NO: 343524 - RNA, 19 nt, Artificial Sequence
  Description of Artificial Sequence: Synthetic oligonucleotide
  Antisense Strand to SEQ ID NO: 343523
aauucucuaggcaggccua

SEQ ID NO: 343525 - RNA, 19 nt, Artificial Sequence
  Description of Artificial Sequence: Synthetic oligonucleotide
  Sense Strand Starting at position 314 of SEQ ID NO: 318557
ccuagagaauucuagaaca

SEQ ID NO: 343526 - RNA, 19 nt, Artificial Sequence
  Description of Artificial Sequence: Synthetic oligonucleotide
  Antisense Strand to SEQ ID NO: 343525
uguucuagaauucucuagg

SEQ ID NO: 343527 - RNA, 19 nt, Artificial Sequence
  Description of Artificial Sequence: Synthetic oligonucleotide
  Sense Strand Starting at position 314 of SEQ ID NO: 318567
ucuagaacauucuuaaggu

SEQ ID NO: 343528 - RNA, 19 nt, Artificial Sequence
  Description of Artificial Sequence: Synthetic oligonucleotide
  Antisense Strand to SEQ ID NO: 343527
accuuaagaauguucuaga

SEQ ID NO: 343529 - RNA, 19 nt, Artificial Sequence
  Description of Artificial Sequence: Synthetic oligonucleotide
  Sense Strand Starting at position 314 of SEQ ID NO: 318770
gguggacuucuauaacgug

SEQ ID NO: 343530 - RNA, 19 nt, Artificial Sequence
  Description of Artificial Sequence: Synthetic oligonucleotide
  Antisense Strand to SEQ ID NO: 343529
cacguuauagaaguccacc

SEQ ID NO: 343531 - RNA, 19 nt, Artificial Sequence
  Description of Artificial Sequence: Synthetic oligonucleotide
  Sense Strand Starting at position 314 of SEQ ID NO: 318776
cuucuauaacgugagcagu

SEQ ID NO: 343532 - RNA, 19 nt, Artificial Sequence
  Description of Artificial Sequence: Synthetic oligonucleotide
  Antisense Strand to SEQ ID NO: 343531
acugcucacguuauagaag

SEQ ID NO: 343533 - RNA, 19 nt, Artificial Sequence
  Description of Artificial Sequence: Synthetic oligonucleotide
  Sense Strand Starting at position 314 of SEQ ID NO: 318782
uaacgugagcaguaucuca

SEQ ID NO: 343534 - RNA, 19 nt, Artificial Sequence
  Description of Artificial Sequence: Synthetic oligonucleotide
  Antisense Strand to SEQ ID NO: 343533
ugagauacugcucacguua

SEQ ID NO: 343535 - RNA, 19 nt, Artificial Sequence
  Description of Artificial Sequence: Synthetic oligonucleotide
  Sense Strand Starting at position 314 of SEQ ID NO: 318810
ccuaguaaugcgggauuaa

SEQ ID NO: 343536 - RNA, 19 nt, Artificial Sequence
  Description of Artificial Sequence: Synthetic oligonucleotide
  Antisense Strand to SEQ ID NO: 343535
uuaaucccgcauuacuagg

SEQ ID NO: 343537 - RNA, 19 nt, Artificial Sequence
  Description of Artificial Sequence: Synthetic oligonucleotide
  Sense Strand Starting at position 314 of SEQ ID NO: 318811
cuaguaaugcgggauuaaa

SEQ ID NO: 343538 - RNA, 19 nt, Artificial Sequence
  Description of Artificial Sequence: Synthetic oligonucleotide
  Antisense Strand to SEQ ID NO: 343537
uuuaaucccgcauuacuag

SEQ ID NO: 343539 - RNA, 19 nt, Artificial Sequence
  Description of Artificial Sequence: Synthetic oligonucleotide
  Sense Strand Starting at position 314 of SEQ ID NO: 318986
cuaguuugcccaggacuua

SEQ ID NO: 343540 - RNA, 19 nt, Artificial Sequence
  Description of Artificial Sequence: Synthetic oligonucleotide
  Antisense Strand to SEQ ID NO: 343539
uaaguccugggcaaacuag

SEQ ID NO: 343541 - RNA, 19 nt, Artificial Sequence
  Description of Artificial Sequence: Synthetic oligonucleotide
  Sense Strand Starting at position 314 of SEQ ID NO: 319020
gagaaauuccuacgucccu

SEQ ID NO: 343542 - RNA, 19 nt, Artificial Sequence
  Description of Artificial Sequence: Synthetic oligonucleotide
  Antisense Strand to SEQ ID NO: 343541
agggacguaggaauuucuc

SEQ ID NO: 343543 - RNA, 19 nt, Artificial Sequence
  Description of Artificial Sequence: Synthetic oligonucleotide
  Sense Strand Starting at position 314 of SEQ ID NO: 319021
agaaauuccuacgucccua

SEQ ID NO: 343544 - RNA, 19 nt, Artificial Sequence
  Description of Artificial Sequence: Synthetic oligonucleotide
  Antisense Strand to SEQ ID NO: 343543
uagggacguaggaauuucu

SEQ ID NO: 343545 - RNA, 19 nt, Artificial Sequence
  Description of Artificial Sequence: Synthetic oligonucleotide
  Sense Strand Starting at position 314 of SEQ ID NO: 319026
uuccuacgucccuaaggaa

SEQ ID NO: 343546 - RNA, 19 nt, Artificial Sequence
  Description of Artificial Sequence: Synthetic oligonucleotide
  Antisense Strand to SEQ ID NO: 343545
uuccuuagggacguaggaa

SEQ ID NO: 343547 - RNA, 19 nt, Artificial Sequence
  Description of Artificial Sequence: Synthetic oligonucleotide
  Sense Strand Starting at position 314 of SEQ ID NO: 319082
uuguuacucucuguaacuu

SEQ ID NO: 343548 - RNA, 19 nt, Artificial Sequence
  Description of Artificial Sequence: Synthetic oligonucleotide
  Antisense Strand to SEQ ID NO: 343547
aaguuacagagaguaacaa

SEQ ID NO: 343549 - RNA, 19 nt, Artificial Sequence
  Description of Artificial Sequence: Synthetic oligonucleotide
  Sense Strand Starting at position 314 of SEQ ID NO: 319099
uugagaucuggauguuuag

SEQ ID NO: 343550 - RNA, 19 nt, Artificial Sequence
  Description of Artificial Sequence: Synthetic oligonucleotide
  Antisense Strand to SEQ ID NO: 343549
cuaaacauccagaucucaa

SEQ ID NO: 343551 - RNA, 19 nt, Artificial Sequence
  Description of Artificial Sequence: Synthetic oligonucleotide
  Sense Strand Starting at position 314 of SEQ ID NO: 319111
uguuuagugguaggaggua

SEQ ID NO: 343552 - RNA, 19 nt, Artificial Sequence
  Description of Artificial Sequence: Synthetic oligonucleotide
  Antisense Strand to SEQ ID NO: 343551
uaccuccuaccacuaaaca

SEQ ID NO: 343553 - RNA, 19 nt, Artificial Sequence
  Description of Artificial Sequence: Synthetic oligonucleotide
  Sense Strand Starting at position 315 of SEQ ID NO: 315629
guuauaaguguugggauua

SEQ ID NO: 343554 - RNA, 19 nt, Artificial Sequence
  Description of Artificial Sequence: Synthetic oligonucleotide
  Antisense Strand to SEQ ID NO: 343553
uaaucccaacacuuauaac

SEQ ID NO: 343555 - RNA, 19 nt, Artificial Sequence
  Description of Artificial Sequence: Synthetic oligonucleotide
  Sense Strand Starting at position 315 of SEQ ID NO: 315726
augaaacaauucggauuua

SEQ ID NO: 343556 - RNA, 19 nt, Artificial Sequence
  Description of Artificial Sequence: Synthetic oligonucleotide
  Antisense Strand to SEQ ID NO: 343555
uaaauccgaauuguuucau

SEQ ID NO: 343557 - RNA, 19 nt, Artificial Sequence
  Description of Artificial Sequence: Synthetic oligonucleotide
  Sense Strand Starting at position 315 of SEQ ID NO: 315727
ugaaacaauucggauuuaa

SEQ ID NO: 343558 - RNA, 19 nt, Artificial Sequence
  Description of Artificial Sequence: Synthetic oligonucleotide
  Antisense Strand to SEQ ID NO: 343557
uuaaauccgaauuguuuca

SEQ ID NO: 343559 - RNA, 19 nt, Artificial Sequence
  Description of Artificial Sequence: Synthetic oligonucleotide
  Sense Strand Starting at position 315 of SEQ ID NO: 315780
cuuacaacucaaggugauu

SEQ ID NO: 343560 - RNA, 19 nt, Artificial Sequence
  Description of Artificial Sequence: Synthetic oligonucleotide
  Antisense Strand to SEQ ID NO: 343559
aaucaccuugaguuguaag

SEQ ID NO: 343561 - RNA, 19 nt, Artificial Sequence
  Description of Artificial Sequence: Synthetic oligonucleotide
  Sense Strand Starting at position 315 of SEQ ID NO: 315909
ugaagagacugagaauuau

SEQ ID NO: 343562 - RNA, 19 nt, Artificial Sequence
  Description of Artificial Sequence: Synthetic oligonucleotide
  Antisense Strand to SEQ ID NO: 343561
auaauucucagucucuuca

SEQ ID NO: 343563 - RNA, 19 nt, Artificial Sequence
  Description of Artificial Sequence: Synthetic oligonucleotide
  Sense Strand Starting at position 315 of SEQ ID NO: 315951
guaauacgcgcguucguga

SEQ ID NO: 343564 - RNA, 19 nt, Artificial Sequence
  Description of Artificial Sequence: Synthetic oligonucleotide
  Antisense Strand to SEQ ID NO: 343563
ucacgaacgcgcguauuac

SEQ ID NO: 343565 - RNA, 19 nt, Artificial Sequence
  Description of Artificial Sequence: Synthetic oligonucleotide
  Sense Strand Starting at position 315 of SEQ ID NO: 315977
guuggucugcguguucaga

SEQ ID NO: 343566 - RNA, 19 nt, Artificial Sequence
  Description of Artificial Sequence: Synthetic oligonucleotide
  Antisense Strand to SEQ ID NO: 343565
ucugaacacgcagaccaac

SEQ ID NO: 343567 - RNA, 19 nt, Artificial Sequence
  Description of Artificial Sequence: Synthetic oligonucleotide
  Sense Strand Starting at position 315 of SEQ ID NO: 316097
ccugguuuaucgagaggga

SEQ ID NO: 343568 - RNA, 19 nt, Artificial Sequence
  Description of Artificial Sequence: Synthetic oligonucleotide
  Antisense Strand to SEQ ID NO: 343567
ucccucucgauaaaccagg

SEQ ID NO: 343569 - RNA, 19 nt, Artificial Sequence
  Description of Artificial Sequence: Synthetic oligonucleotide
  Sense Strand Starting at position 315 of SEQ ID NO: 316423
gaaguuuaagaaggcaagu

SEQ ID NO: 343570 - RNA, 19 nt, Artificial Sequence
  Description of Artificial Sequence: Synthetic oligonucleotide
  Antisense Strand to SEQ ID NO: 343569
acuugccuucuuaaacuuc

SEQ ID NO: 343571 - RNA, 19 nt, Artificial Sequence
  Description of Artificial Sequence: Synthetic oligonucleotide
  Sense Strand Starting at position 315 of SEQ ID NO: 316478
gggagagcgcgccagaaau

SEQ ID NO: 343572 - RNA, 19 nt, Artificial Sequence
  Description of Artificial Sequence: Synthetic oligonucleotide
  Antisense Strand to SEQ ID NO: 343571
auuucuggcgcgcucuccc

SEQ ID NO: 343573 - RNA, 19 nt, Artificial Sequence
  Description of Artificial Sequence: Synthetic oligonucleotide
  Sense Strand Starting at position 315 of SEQ ID NO: 316613
aaccucugccaguagagaa

SEQ ID NO: 343574 - RNA, 19 nt, Artificial Sequence
  Description of Artificial Sequence: Synthetic oligonucleotide
  Antisense Strand to SEQ ID NO: 343573
uucucuacuggcagagguu

SEQ ID NO: 343575 - RNA, 19 nt, Artificial Sequence
  Description of Artificial Sequence: Synthetic oligonucleotide
  Sense Strand Starting at position 315 of SEQ ID NO: 316641
ggaaaugggugccucaaga

SEQ ID NO: 343576 - RNA, 19 nt, Artificial Sequence
  Description of Artificial Sequence: Synthetic oligonucleotide
  Antisense Strand to SEQ ID NO: 343575
ucuugaggcacccauuucc

SEQ ID NO: 343577 - RNA, 19 nt, Artificial Sequence
  Description of Artificial Sequence: Synthetic oligonucleotide
  Sense Strand Starting at position 315 of SEQ ID NO: 317420
uacugaaauguaugguaua

SEQ ID NO: 343578 - RNA, 19 nt, Artificial Sequence
  Description of Artificial Sequence: Synthetic oligonucleotide
  Antisense Strand to SEQ ID NO: 343577
uauaccauacauuucagua

SEQ ID NO: 343579 - RNA, 19 nt, Artificial Sequence
  Description of Artificial Sequence: Synthetic oligonucleotide
  Sense Strand Starting at position 315 of SEQ ID NO: 317501
caggguuagcgccaucacu

SEQ ID NO: 343580 - RNA, 19 nt, Artificial Sequence
  Description of Artificial Sequence: Synthetic oligonucleotide
  Antisense Strand to SEQ ID NO: 343579
agugauggcgcuaacccug

SEQ ID NO: 343581 - RNA, 19 nt, Artificial Sequence
  Description of Artificial Sequence: Synthetic oligonucleotide
  Sense Strand Starting at position 315 of SEQ ID NO: 317572
cgaagcaagucuguggaaa

SEQ ID NO: 343582 - RNA, 19 nt, Artificial Sequence
  Description of Artificial Sequence: Synthetic oligonucleotide
  Antisense Strand to SEQ ID NO: 343581
uuuccacagacuugcuucg

SEQ ID NO: 343583 - RNA, 19 nt, Artificial Sequence
  Description of Artificial Sequence: Synthetic oligonucleotide
  Sense Strand Starting at position 315 of SEQ ID NO: 317724
cugugauuaccagguacag

SEQ ID NO: 343584 - RNA, 19 nt, Artificial Sequence
  Description of Artificial Sequence: Synthetic oligonucleotide
  Antisense Strand to SEQ ID NO: 343583
cuguaccugguaaucacag

SEQ ID NO: 343585 - RNA, 19 nt, Artificial Sequence
  Description of Artificial Sequence: Synthetic oligonucleotide
  Sense Strand Starting at position 315 of SEQ ID NO: 317726
gugauuaccagguacagca

SEQ ID NO: 343586 - RNA, 19 nt, Artificial Sequence
  Description of Artificial Sequence: Synthetic oligonucleotide
  Antisense Strand to SEQ ID NO: 343585
ugcuguaccugguaaucac

SEQ ID NO: 343587 - RNA, 19 nt, Artificial Sequence
  Description of Artificial Sequence: Synthetic oligonucleotide
  Sense Strand Starting at position 315 of SEQ ID NO: 317771
acauguguuugcucaggga

SEQ ID NO: 343588 - RNA, 19 nt, Artificial Sequence
  Description of Artificial Sequence: Synthetic oligonucleotide
  Antisense Strand to SEQ ID NO: 343587
ucccugagcaaacacaugu

SEQ ID NO: 343589 - RNA, 19 nt, Artificial Sequence
  Description of Artificial Sequence: Synthetic oligonucleotide
  Sense Strand Starting at position 315 of SEQ ID NO: 317840
uaggccugccuagagaauu

SEQ ID NO: 343590 - RNA, 19 nt, Artificial Sequence
  Description of Artificial Sequence: Synthetic oligonucleotide
  Antisense Strand to SEQ ID NO: 343589
aauucucuaggcaggccua

SEQ ID NO: 343591 - RNA, 19 nt, Artificial Sequence
  Description of Artificial Sequence: Synthetic oligonucleotide
  Sense Strand Starting at position 315 of SEQ ID NO: 317848
ccuagagaauucuagaaca

SEQ ID NO: 343592 - RNA, 19 nt, Artificial Sequence
  Description of Artificial Sequence: Synthetic oligonucleotide
  Antisense Strand to SEQ ID NO: 343591
uguucuagaauucucuagg

SEQ ID NO: 343593 - RNA, 19 nt, Artificial Sequence
  Description of Artificial Sequence: Synthetic oligonucleotide
  Sense Strand Starting at position 315 of SEQ ID NO: 317858
ucuagaacauucuuaaggu

SEQ ID NO: 343594 - RNA, 19 nt, Artificial Sequence
  Description of Artificial Sequence: Synthetic oligonucleotide
  Antisense Strand to SEQ ID NO: 343593
accuuaagaauguucuaga

SEQ ID NO: 343595 - RNA, 19 nt, Artificial Sequence
  Description of Artificial Sequence: Synthetic oligonucleotide
  Sense Strand Starting at position 315 of SEQ ID NO: 318061
gguggacuucuauaacgug

SEQ ID NO: 343596 - RNA, 19 nt, Artificial Sequence
  Description of Artificial Sequence: Synthetic oligonucleotide
  Antisense Strand to SEQ ID NO: 343595
cacguuauagaaguccacc

SEQ ID NO: 343597 - RNA, 19 nt, Artificial Sequence
  Description of Artificial Sequence: Synthetic oligonucleotide
  Sense Strand Starting at position 315 of SEQ ID NO: 318067
cuucuauaacgugagcagu

SEQ ID NO: 343598 - RNA, 19 nt, Artificial Sequence
  Description of Artificial Sequence: Synthetic oligonucleotide
  Antisense Strand to SEQ ID NO: 343597
acugcucacguuauagaag

SEQ ID NO: 343599 - RNA, 19 nt, Artificial Sequence
  Description of Artificial Sequence: Synthetic oligonucleotide
  Sense Strand Starting at position 315 of SEQ ID NO: 318069
ucuauaacgugagcaguau

SEQ ID NO: 343600 - RNA, 19 nt, Artificial Sequence
  Description of Artificial Sequence: Synthetic oligonucleotide
  Antisense Strand to SEQ ID NO: 343599
auacugcucacguuauaga

SEQ ID NO: 343601 - RNA, 19 nt, Artificial Sequence
  Description of Artificial Sequence: Synthetic oligonucleotide
  Sense Strand Starting at position 315 of SEQ ID NO: 318073
uaacgugagcaguaucuca

SEQ ID NO: 343602 - RNA, 19 nt, Artificial Sequence
  Description of Artificial Sequence: Synthetic oligonucleotide
  Antisense Strand to SEQ ID NO: 343601
ugagauacugcucacguua

SEQ ID NO: 343603 - RNA, 19 nt, Artificial Sequence
  Description of Artificial Sequence: Synthetic oligonucleotide
  Sense Strand Starting at position 315 of SEQ ID NO: 318101
ccuaguaaugcgggauuaa

SEQ ID NO: 343604 - RNA, 19 nt, Artificial Sequence
  Description of Artificial Sequence: Synthetic oligonucleotide
  Antisense Strand to SEQ ID NO: 343603
uuaaucccgcauuacuagg

SEQ ID NO: 343605 - RNA, 19 nt, Artificial Sequence
  Description of Artificial Sequence: Synthetic oligonucleotide
  Sense Strand Starting at position 315 of SEQ ID NO: 318102
cuaguaaugcgggauuaaa

SEQ ID NO: 343606 - RNA, 19 nt, Artificial Sequence
  Description of Artificial Sequence: Synthetic oligonucleotide
  Antisense Strand to SEQ ID NO: 343605
uuuaaucccgcauuacuag

SEQ ID NO: 343607 - RNA, 19 nt, Artificial Sequence
  Description of Artificial Sequence: Synthetic oligonucleotide
  Sense Strand Starting at position 315 of SEQ ID NO: 318227
ucuucuccugcccgggaua

SEQ ID NO: 343608 - RNA, 19 nt, Artificial Sequence
  Description of Artificial Sequence: Synthetic oligonucleotide
  Antisense Strand to SEQ ID NO: 343607
uaucccgggcaggagaaga

SEQ ID NO: 343609 - RNA, 19 nt, Artificial Sequence
  Description of Artificial Sequence: Synthetic oligonucleotide
  Sense Strand Starting at position 315 of SEQ ID NO: 318277
cuaguuugcccaggacuua

SEQ ID NO: 343610 - RNA, 19 nt, Artificial Sequence
  Description of Artificial Sequence: Synthetic oligonucleotide
  Antisense Strand to SEQ ID NO: 343609
uaaguccugggcaaacuag

SEQ ID NO: 343611 - RNA, 19 nt, Artificial Sequence
  Description of Artificial Sequence: Synthetic oligonucleotide
  Sense Strand Starting at position 315 of SEQ ID NO: 318311
gagaaauuccuacgucccu

SEQ ID NO: 343612 - RNA, 19 nt, Artificial Sequence
  Description of Artificial Sequence: Synthetic oligonucleotide
  Antisense Strand to SEQ ID NO: 343611
agggacguaggaauuucuc

SEQ ID NO: 343613 - RNA, 19 nt, Artificial Sequence
  Description of Artificial Sequence: Synthetic oligonucleotide
  Sense Strand Starting at position 315 of SEQ ID NO: 318312
agaaauuccuacgucccua

SEQ ID NO: 343614 - RNA, 19 nt, Artificial Sequence
  Description of Artificial Sequence: Synthetic oligonucleotide
  Antisense Strand to SEQ ID NO: 343613
uagggacguaggaauuucu

SEQ ID NO: 343615 - RNA, 19 nt, Artificial Sequence
  Description of Artificial Sequence: Synthetic oligonucleotide
  Sense Strand Starting at position 315 of SEQ ID NO: 318317
uuccuacgucccuaaggaa

SEQ ID NO: 343616 - RNA, 19 nt, Artificial Sequence
  Description of Artificial Sequence: Synthetic oligonucleotide
  Antisense Strand to SEQ ID NO: 343615
uuccuuagggacguaggaa

SEQ ID NO: 343617 - RNA, 19 nt, Artificial Sequence
  Description of Artificial Sequence: Synthetic oligonucleotide
  Sense Strand Starting at position 315 of SEQ ID NO: 318371
uguuguuacucucuguaac

SEQ ID NO: 343618 - RNA, 19 nt, Artificial Sequence
  Description of Artificial Sequence: Synthetic oligonucleotide
  Antisense Strand to SEQ ID NO: 343617
guuacagagaguaacaaca

SEQ ID NO: 343619 - RNA, 19 nt, Artificial Sequence
  Description of Artificial Sequence: Synthetic oligonucleotide
  Sense Strand Starting at position 315 of SEQ ID NO: 318373
uuguuacucucuguaacuu

SEQ ID NO: 343620 - RNA, 19 nt, Artificial Sequence
  Description of Artificial Sequence: Synthetic oligonucleotide
  Antisense Strand to SEQ ID NO: 343619
aaguuacagagaguaacaa

SEQ ID NO: 343621 - RNA, 19 nt, Artificial Sequence
  Description of Artificial Sequence: Synthetic oligonucleotide
  Sense Strand Starting at position 315 of SEQ ID NO: 318390
uugagaucuggauguuuag

SEQ ID NO: 343622 - RNA, 19 nt, Artificial Sequence
  Description of Artificial Sequence: Synthetic oligonucleotide
  Antisense Strand to SEQ ID NO: 343621
cuaaacauccagaucucaa

SEQ ID NO: 343623 - RNA, 19 nt, Artificial Sequence
  Description of Artificial Sequence: Synthetic oligonucleotide
  Sense Strand Starting at position 315 of SEQ ID NO: 318402
uguuuagugguaggaggua

SEQ ID NO: 343624 - RNA, 19 nt, Artificial Sequence
  Description of Artificial Sequence: Synthetic oligonucleotide
  Antisense Strand to SEQ ID NO: 343623
uaccuccuaccacuaaaca

SEQ ID NO: 343625 - RNA, 19 nt, Artificial Sequence
  Description of Artificial Sequence: Synthetic oligonucleotide
  Sense Strand Starting at position 315 of SEQ ID NO: 318616
acguuuggaguuuaaaucu

SEQ ID NO: 343626 - RNA, 19 nt, Artificial Sequence
  Description of Artificial Sequence: Synthetic oligonucleotide
  Antisense Strand to SEQ ID NO: 343625
agauuuaaacuccaaacgu

SEQ ID NO: 343627 - RNA, 19 nt, Artificial Sequence
  Description of Artificial Sequence: Synthetic oligonucleotide
  Sense Strand Starting at position 315 of SEQ ID NO: 318691
ucucuccugccuuaagaga

SEQ ID NO: 343628 - RNA, 19 nt, Artificial Sequence
  Description of Artificial Sequence: Synthetic oligonucleotide
  Antisense Strand to SEQ ID NO: 343627
ucucuuaaggcaggagaga

SEQ ID NO: 343629 - RNA, 19 nt, Artificial Sequence
  Description of Artificial Sequence: Synthetic oligonucleotide
  Sense Strand Starting at position 315 of SEQ ID NO: 318786
ggcugaaagugauucucau

SEQ ID NO: 343630 - RNA, 19 nt, Artificial Sequence
  Description of Artificial Sequence: Synthetic oligonucleotide
  Antisense Strand to SEQ ID NO: 343629
augagaaucacuuucagcc

SEQ ID NO: 343631 - RNA, 19 nt, Artificial Sequence
  Description of Artificial Sequence: Synthetic oligonucleotide
  Sense Strand Starting at position 315 of SEQ ID NO: 318790
gaaagugauucucauaaga

SEQ ID NO: 343632 - RNA, 19 nt, Artificial Sequence
  Description of Artificial Sequence: Synthetic oligonucleotide
  Antisense Strand to SEQ ID NO: 343631
ucuuaugagaaucacuuuc

SEQ ID NO: 343633 - RNA, 19 nt, Artificial Sequence
  Description of Artificial Sequence: Synthetic oligonucleotide
  Sense Strand Starting at position 316 of SEQ ID NO: 315318
agugaaauaaucuaacggu

SEQ ID NO: 343634 - RNA, 19 nt, Artificial Sequence
  Description of Artificial Sequence: Synthetic oligonucleotide
  Antisense Strand to SEQ ID NO: 343633
accguuagauuauuucacu

SEQ ID NO: 343635 - RNA, 19 nt, Artificial Sequence
  Description of Artificial Sequence: Synthetic oligonucleotide
  Sense Strand Starting at position 316 of SEQ ID NO: 315325
uaaucuaacgguuggacuu

SEQ ID NO: 343636 - RNA, 19 nt, Artificial Sequence
  Description of Artificial Sequence: Synthetic oligonucleotide
  Antisense Strand to SEQ ID NO: 343635
aaguccaaccguuagauua

SEQ ID NO: 343637 - RNA, 19 nt, Artificial Sequence
  Description of Artificial Sequence: Synthetic oligonucleotide
  Sense Strand Starting at position 316 of SEQ ID NO: 315402
gcaauauaauagucguuga

SEQ ID NO: 343638 - RNA, 19 nt, Artificial Sequence
  Description of Artificial Sequence: Synthetic oligonucleotide
  Antisense Strand to SEQ ID NO: 343637
ucaacgacuauuauauugc

SEQ ID NO: 343639 - RNA, 19 nt, Artificial Sequence
  Description of Artificial Sequence: Synthetic oligonucleotide
  Sense Strand Starting at position 316 of SEQ ID NO: 315405
auauaauagucguugaagc

SEQ ID NO: 343640 - RNA, 19 nt, Artificial Sequence
  Description of Artificial Sequence: Synthetic oligonucleotide
  Antisense Strand to SEQ ID NO: 343639
gcuucaacgacuauuauau

SEQ ID NO: 343641 - RNA, 19 nt, Artificial Sequence
  Description of Artificial Sequence: Synthetic oligonucleotide
  Sense Strand Starting at position 316 of SEQ ID NO: 315406
uauaauagucguugaagcu

SEQ ID NO: 343642 - RNA, 19 nt, Artificial Sequence
  Description of Artificial Sequence: Synthetic oligonucleotide
  Antisense Strand to SEQ ID NO: 343641
agcuucaacgacuauuaua

SEQ ID NO: 343643 - RNA, 19 nt, Artificial Sequence
  Description of Artificial Sequence: Synthetic oligonucleotide
  Sense Strand Starting at position 316 of SEQ ID NO: 315412
agucguugaagcugguuaa

SEQ ID NO: 343644 - RNA, 19 nt, Artificial Sequence
  Description of Artificial Sequence: Synthetic oligonucleotide
  Antisense Strand to SEQ ID NO: 343643
uuaaccagcuucaacgacu

SEQ ID NO: 343645 - RNA, 19 nt, Artificial Sequence
  Description of Artificial Sequence: Synthetic oligonucleotide
  Sense Strand Starting at position 316 of SEQ ID NO: 315467
guguaugcuuaagaauuuc

SEQ ID NO: 343646 - RNA, 19 nt, Artificial Sequence
  Description of Artificial Sequence: Synthetic oligonucleotide
  Antisense Strand to SEQ ID NO: 343645
gaaauucuuaagcauacac

SEQ ID NO: 343647 - RNA, 19 nt, Artificial Sequence
  Description of Artificial Sequence: Synthetic oligonucleotide
  Sense Strand Starting at position 316 of SEQ ID NO: 315496
aguuuaaggucuuuaauuc

SEQ ID NO: 343648 - RNA, 19 nt, Artificial Sequence
  Description of Artificial Sequence: Synthetic oligonucleotide
  Antisense Strand to SEQ ID NO: 343647
gaauuaaagaccuuaaacu

SEQ ID NO: 343649 - RNA, 19 nt, Artificial Sequence
  Description of Artificial Sequence: Synthetic oligonucleotide
  Sense Strand Starting at position 316 of SEQ ID NO: 315555
gugugaggucuuugcaauu

SEQ ID NO: 343650 - RNA, 19 nt, Artificial Sequence
  Description of Artificial Sequence: Synthetic oligonucleotide
  Antisense Strand to SEQ ID NO: 343649
aauugcaaagaccucacac

SEQ ID NO: 343651 - RNA, 19 nt, Artificial Sequence
  Description of Artificial Sequence: Synthetic oligonucleotide
  Sense Strand Starting at position 316 of SEQ ID NO: 316243
guugcagugggucaauauc

SEQ ID NO: 343652 - RNA, 19 nt, Artificial Sequence
  Description of Artificial Sequence: Synthetic oligonucleotide
  Antisense Strand to SEQ ID NO: 343651
gauauugacccacugcaac

SEQ ID NO: 343653 - RNA, 19 nt, Artificial Sequence
  Description of Artificial Sequence: Synthetic oligonucleotide
  Sense Strand Starting at position 316 of SEQ ID NO: 316329
aaaggaauugcccaguauc

SEQ ID NO: 343654 - RNA, 19 nt, Artificial Sequence
  Description of Artificial Sequence: Synthetic oligonucleotide
  Antisense Strand to SEQ ID NO: 343653
gauacugggcaauuccuuu

SEQ ID NO: 343655 - RNA, 19 nt, Artificial Sequence
  Description of Artificial Sequence: Synthetic oligonucleotide
  Sense Strand Starting at position 316 of SEQ ID NO: 316332
ggaauugcccaguauccau

SEQ ID NO: 343656 - RNA, 19 nt, Artificial Sequence
  Description of Artificial Sequence: Synthetic oligonucleotide
  Antisense Strand to SEQ ID NO: 343655
auggauacugggcaauucc

SEQ ID NO: 343657 - RNA, 19 nt, Artificial Sequence
  Description of Artificial Sequence: Synthetic oligonucleotide
  Sense Strand Starting at position 316 of SEQ ID NO: 316515
auuccagaguccuaucaag

SEQ ID NO: 343658 - RNA, 19 nt, Artificial Sequence
  Description of Artificial Sequence: Synthetic oligonucleotide
  Antisense Strand to SEQ ID NO: 343657
cuugauaggacucuggaau

SEQ ID NO: 343659 - RNA, 19 nt, Artificial Sequence
  Description of Artificial Sequence: Synthetic oligonucleotide
  Sense Strand Starting at position 316 of SEQ ID NO: 316559
agcuucuuccuccagguua

SEQ ID NO: 343660 - RNA, 19 nt, Artificial Sequence
  Description of Artificial Sequence: Synthetic oligonucleotide
  Antisense Strand to SEQ ID NO: 343659
uaaccuggaggaagaagcu

SEQ ID NO: 343661 - RNA, 19 nt, Artificial Sequence
  Description of Artificial Sequence: Synthetic oligonucleotide
  Sense Strand Starting at position 316 of SEQ ID NO: 316608
uggauaagauguguaugga

SEQ ID NO: 343662 - RNA, 19 nt, Artificial Sequence
  Description of Artificial Sequence: Synthetic oligonucleotide
  Antisense Strand to SEQ ID NO: 343661
uccauacacaucuuaucca

SEQ ID NO: 343663 - RNA, 19 nt, Artificial Sequence
  Description of Artificial Sequence: Synthetic oligonucleotide
  Sense Strand Starting at position 316 of SEQ ID NO: 316636
agugacauuuccuaagcac

SEQ ID NO: 343664 - RNA, 19 nt, Artificial Sequence
  Description of Artificial Sequence: Synthetic oligonucleotide
  Antisense Strand to SEQ ID NO: 343663
gugcuuaggaaaugucacu

SEQ ID NO: 343665 - RNA, 19 nt, Artificial Sequence
  Description of Artificial Sequence: Synthetic oligonucleotide
  Sense Strand Starting at position 316 of SEQ ID NO: 316891
aagguuugcaugugacgau

SEQ ID NO: 343666 - RNA, 19 nt, Artificial Sequence
  Description of Artificial Sequence: Synthetic oligonucleotide
  Antisense Strand to SEQ ID NO: 343665
aucgucacaugcaaaccuu

SEQ ID NO: 343667 - RNA, 19 nt, Artificial Sequence
  Description of Artificial Sequence: Synthetic oligonucleotide
  Sense Strand Starting at position 316 of SEQ ID NO: 317263
accuaauucugggauccca

SEQ ID NO: 343668 - RNA, 19 nt, Artificial Sequence
  Description of Artificial Sequence: Synthetic oligonucleotide
  Antisense Strand to SEQ ID NO: 343667
ugggaucccagaauuaggu

SEQ ID NO: 343669 - RNA, 19 nt, Artificial Sequence
  Description of Artificial Sequence: Synthetic oligonucleotide
  Sense Strand Starting at position 316 of SEQ ID NO: 317438
gucugaagagcucaguuua

SEQ ID NO: 343670 - RNA, 19 nt, Artificial Sequence
  Description of Artificial Sequence: Synthetic oligonucleotide
  Antisense Strand to SEQ ID NO: 343669
uaaacugagcucuucagac

SEQ ID NO: 343671 - RNA, 19 nt, Artificial Sequence
  Description of Artificial Sequence: Synthetic oligonucleotide
  Sense Strand Starting at position 316 of SEQ ID NO: 317443
aagagcucaguuuaaguuu

SEQ ID NO: 343672 - RNA, 19 nt, Artificial Sequence
  Description of Artificial Sequence: Synthetic oligonucleotide
  Antisense Strand to SEQ ID NO: 343671
aaacuuaaacugagcucuu

SEQ ID NO: 343673 - RNA, 19 nt, Artificial Sequence
  Description of Artificial Sequence: Synthetic oligonucleotide
  Sense Strand Starting at position 316 of SEQ ID NO: 318124
uguguuuacugaguaccga

SEQ ID NO: 343674 - RNA, 19 nt, Artificial Sequence
  Description of Artificial Sequence: Synthetic oligonucleotide
  Antisense Strand to SEQ ID NO: 343673
ucgguacucaguaaacaca

SEQ ID NO: 343675 - RNA, 19 nt, Artificial Sequence
  Description of Artificial Sequence: Synthetic oligonucleotide
  Sense Strand Starting at position 316 of SEQ ID NO: 318125
guguuuacugaguaccgaa

SEQ ID NO: 343676 - RNA, 19 nt, Artificial Sequence
  Description of Artificial Sequence: Synthetic oligonucleotide
  Antisense Strand to SEQ ID NO: 343675
uucgguacucaguaaacac

SEQ ID NO: 343677 - RNA, 19 nt, Artificial Sequence
  Description of Artificial Sequence: Synthetic oligonucleotide
  Sense Strand Starting at position 316 of SEQ ID NO: 318240
uggcuugcauuaucuucua

SEQ ID NO: 343678 - RNA, 19 nt, Artificial Sequence
  Description of Artificial Sequence: Synthetic oligonucleotide
  Antisense Strand to SEQ ID NO: 343677
uagaagauaaugcaagcca

SEQ ID NO: 343679 - RNA, 19 nt, Artificial Sequence
  Description of Artificial Sequence: Synthetic oligonucleotide
  Sense Strand Starting at position 316 of SEQ ID NO: 318251
aucuucuacugagaaguca

SEQ ID NO: 343680 - RNA, 19 nt, Artificial Sequence
  Description of Artificial Sequence: Synthetic oligonucleotide
  Antisense Strand to SEQ ID NO: 343679
ugacuucucaguagaagau

SEQ ID NO: 343681 - RNA, 19 nt, Artificial Sequence
  Description of Artificial Sequence: Synthetic oligonucleotide
  Sense Strand Starting at position 316 of SEQ ID NO: 318295
cugaaaguaauguggguuu

SEQ ID NO: 343682 - RNA, 19 nt, Artificial Sequence
  Description of Artificial Sequence: Synthetic oligonucleotide
  Antisense Strand to SEQ ID NO: 343681
aaacccacauuacuuucag

SEQ ID NO: 343683 - RNA, 19 nt, Artificial Sequence
  Description of Artificial Sequence: Synthetic oligonucleotide
  Sense Strand Starting at position 316 of SEQ ID NO: 318706
aaauauaucuaggugguuu

SEQ ID NO: 343684 - RNA, 19 nt, Artificial Sequence
  Description of Artificial Sequence: Synthetic oligonucleotide
  Antisense Strand to SEQ ID NO: 343683
aaaccaccuagauauauuu

SEQ ID NO: 343685 - RNA, 19 nt, Artificial Sequence
  Description of Artificial Sequence: Synthetic oligonucleotide
  Sense Strand Starting at position 316 of SEQ ID NO: 318756
gaaucuauagcuugguauc

SEQ ID NO: 343686 - RNA, 19 nt, Artificial Sequence
  Description of Artificial Sequence: Synthetic oligonucleotide
  Antisense Strand to SEQ ID NO: 343685
gauaccaagcuauagauuc

SEQ ID NO: 343687 - RNA, 19 nt, Artificial Sequence
  Description of Artificial Sequence: Synthetic oligonucleotide
  Sense Strand Starting at position 316 of SEQ ID NO: 318785
uuuggaauauucuugguca

SEQ ID NO: 343688 - RNA, 19 nt, Artificial Sequence
  Description of Artificial Sequence: Synthetic oligonucleotide
  Antisense Strand to SEQ ID NO: 343687
ugaccaagaauauuccaaa

SEQ ID NO: 343689 - RNA, 19 nt, Artificial Sequence
  Description of Artificial Sequence: Synthetic oligonucleotide
  Sense Strand Starting at position 316 of SEQ ID NO: 318787
uggaauauucuuggucagu

SEQ ID NO: 343690 - RNA, 19 nt, Artificial Sequence
  Description of Artificial Sequence: Synthetic oligonucleotide
  Antisense Strand to SEQ ID NO: 343689
acugaccaagaauauucca

SEQ ID NO: 343691 - RNA, 19 nt, Artificial Sequence
  Description of Artificial Sequence: Synthetic oligonucleotide
  Sense Strand Starting at position 316 of SEQ ID NO: 318788
ggaauauucuuggucagua

SEQ ID NO: 343692 - RNA, 19 nt, Artificial Sequence
  Description of Artificial Sequence: Synthetic oligonucleotide
  Antisense Strand to SEQ ID NO: 343691
uacugaccaagaauauucc

SEQ ID NO: 343693 - RNA, 19 nt, Artificial Sequence
  Description of Artificial Sequence: Synthetic oligonucleotide
  Sense Strand Starting at position 316 of SEQ ID NO: 318796
cuuggucaguaucuacuua

SEQ ID NO: 343694 - RNA, 19 nt, Artificial Sequence
  Description of Artificial Sequence: Synthetic oligonucleotide
  Antisense Strand to SEQ ID NO: 343693
uaaguagauacugaccaag

SEQ ID NO: 343695 - RNA, 19 nt, Artificial Sequence
  Description of Artificial Sequence: Synthetic oligonucleotide
  Sense Strand Starting at position 316 of SEQ ID NO: 318800
gucaguaucuacuuaaaug

SEQ ID NO: 343696 - RNA, 19 nt, Artificial Sequence
  Description of Artificial Sequence: Synthetic oligonucleotide
  Antisense Strand to SEQ ID NO: 343695
cauuuaaguagauacugac

SEQ ID NO: 343697 - RNA, 19 nt, Artificial Sequence
  Description of Artificial Sequence: Synthetic oligonucleotide
  Sense Strand Starting at position 316 of SEQ ID NO: 318923
uuggauaguuucuaauaac

SEQ ID NO: 343698 - RNA, 19 nt, Artificial Sequence
  Description of Artificial Sequence: Synthetic oligonucleotide
  Antisense Strand to SEQ ID NO: 343697
guuauuagaaacuauccaa

SEQ ID NO: 343699 - RNA, 19 nt, Artificial Sequence
  Description of Artificial Sequence: Synthetic oligonucleotide
  Sense Strand Starting at position 316 of SEQ ID NO: 318968
uuguucuauguccaaugua

SEQ ID NO: 343700 - RNA, 19 nt, Artificial Sequence
  Description of Artificial Sequence: Synthetic oligonucleotide
  Antisense Strand to SEQ ID NO: 343699
uacauuggacauagaacaa

SEQ ID NO: 343701 - RNA, 19 nt, Artificial Sequence
  Description of Artificial Sequence: Synthetic oligonucleotide
  Sense Strand Starting at position 316 of SEQ ID NO: 318971
uucuauguccaauguacaa

SEQ ID NO: 343702 - RNA, 19 nt, Artificial Sequence
  Description of Artificial Sequence: Synthetic oligonucleotide
  Antisense Strand to SEQ ID NO: 343701
uuguacauuggacauagaa

SEQ ID NO: 343703 - RNA, 19 nt, Artificial Sequence
  Description of Artificial Sequence: Synthetic oligonucleotide
  Sense Strand Starting at position 316 of SEQ ID NO: 319034
ggauuuauauuggauucuu

SEQ ID NO: 343704 - RNA, 19 nt, Artificial Sequence
  Description of Artificial Sequence: Synthetic oligonucleotide
  Antisense Strand to SEQ ID NO: 343703
aagaauccaauauaaaucc

SEQ ID NO: 343705 - RNA, 19 nt, Artificial Sequence
  Description of Artificial Sequence: Synthetic oligonucleotide
  Sense Strand Starting at position 316 of SEQ ID NO: 319056
cagugaagccaauaguuua

SEQ ID NO: 343706 - RNA, 19 nt, Artificial Sequence
  Description of Artificial Sequence: Synthetic oligonucleotide
  Antisense Strand to SEQ ID NO: 343705
uaaacuauuggcuucacug

SEQ ID NO: 343707 - RNA, 19 nt, Artificial Sequence
  Description of Artificial Sequence: Synthetic oligonucleotide
  Sense Strand Starting at position 316 of SEQ ID NO: 319150
uagguugccugucuucuaa

SEQ ID NO: 343708 - RNA, 19 nt, Artificial Sequence
  Description of Artificial Sequence: Synthetic oligonucleotide
  Antisense Strand to SEQ ID NO: 343707
uuagaagacaggcaaccua

SEQ ID NO: 343709 - RNA, 19 nt, Artificial Sequence
  Description of Artificial Sequence: Synthetic oligonucleotide
  Sense Strand Starting at position 316 of SEQ ID NO: 319178
cuuacuuaucugcagagcu

SEQ ID NO: 343710 - RNA, 19 nt, Artificial Sequence
  Description of Artificial Sequence: Synthetic oligonucleotide
  Antisense Strand to SEQ ID NO: 343709
agcucugcagauaaguaag

SEQ ID NO: 343711 - RNA, 19 nt, Artificial Sequence
  Description of Artificial Sequence: Synthetic oligonucleotide
  Sense Strand Starting at position 316 of SEQ ID NO: 319180
uacuuaucugcagagcuga

SEQ ID NO: 343712 - RNA, 19 nt, Artificial Sequence
  Description of Artificial Sequence: Synthetic oligonucleotide
  Antisense Strand to SEQ ID NO: 343711
ucagcucugcagauaagua

SEQ ID NO: 343713 - RNA, 19 nt, Artificial Sequence
  Description of Artificial Sequence: Synthetic oligonucleotide
  Sense Strand Starting at position 317 of SEQ ID NO: 315258
gcaucaagguaccuuauau

SEQ ID NO: 343714 - RNA, 19 nt, Artificial Sequence
  Description of Artificial Sequence: Synthetic oligonucleotide
  Antisense Strand to SEQ ID NO: 343713
auauaagguaccuugaugc

SEQ ID NO: 343715 - RNA, 19 nt, Artificial Sequence
  Description of Artificial Sequence: Synthetic oligonucleotide
  Sense Strand Starting at position 317 of SEQ ID NO: 315296
uuacguuugaacugggaua

SEQ ID NO: 343716 - RNA, 19 nt, Artificial Sequence
  Description of Artificial Sequence: Synthetic oligonucleotide
  Antisense Strand to SEQ ID NO: 343715
uaucccaguucaaacguaa

SEQ ID NO: 343717 - RNA, 19 nt, Artificial Sequence
  Description of Artificial Sequence: Synthetic oligonucleotide
  Sense Strand Starting at position 317 of SEQ ID NO: 315298
acguuugaacugggauaac

SEQ ID NO: 343718 - RNA, 19 nt, Artificial Sequence
  Description of Artificial Sequence: Synthetic oligonucleotide
  Antisense Strand to SEQ ID NO: 343717
guuaucccaguucaaacgu

SEQ ID NO: 343719 - RNA, 19 nt, Artificial Sequence
  Description of Artificial Sequence: Synthetic oligonucleotide
  Sense Strand Starting at position 317 of SEQ ID NO: 315330
gcugauuguagugaagauu

SEQ ID NO: 343720 - RNA, 19 nt, Artificial Sequence
  Description of Artificial Sequence: Synthetic oligonucleotide
  Antisense Strand to SEQ ID NO: 343719
aaucuucacuacaaucagc

SEQ ID NO: 343721 - RNA, 19 nt, Artificial Sequence
  Description of Artificial Sequence: Synthetic oligonucleotide
  Sense Strand Starting at position 317 of SEQ ID NO: 315395
caaaguaagcccuaagugu

SEQ ID NO: 343722 - RNA, 19 nt, Artificial Sequence
  Description of Artificial Sequence: Synthetic oligonucleotide
  Antisense Strand to SEQ ID NO: 343721
acacuuagggcuuacuuug

SEQ ID NO: 343723 - RNA, 19 nt, Artificial Sequence
  Description of Artificial Sequence: Synthetic oligonucleotide
  Sense Strand Starting at position 317 of SEQ ID NO: 315451
ggaaauacaucucuacagu

SEQ ID NO: 343724 - RNA, 19 nt, Artificial Sequence
  Description of Artificial Sequence: Synthetic oligonucleotide
  Antisense Strand to SEQ ID NO: 343723
acuguagagauguauuucc

SEQ ID NO: 343725 - RNA, 19 nt, Artificial Sequence
  Description of Artificial Sequence: Synthetic oligonucleotide
  Sense Strand Starting at position 317 of SEQ ID NO: 315583
auagaaacgugucuagaug

SEQ ID NO: 343726 - RNA, 19 nt, Artificial Sequence
  Description of Artificial Sequence: Synthetic oligonucleotide
  Antisense Strand to SEQ ID NO: 343725
caucuagacacguuucuau

SEQ ID NO: 343727 - RNA, 19 nt, Artificial Sequence
  Description of Artificial Sequence: Synthetic oligonucleotide
  Sense Strand Starting at position 317 of SEQ ID NO: 315584
uagaaacgugucuagaugu

SEQ ID NO: 343728 - RNA, 19 nt, Artificial Sequence
  Description of Artificial Sequence: Synthetic oligonucleotide
  Antisense Strand to SEQ ID NO: 343727
acaucuagacacguuucua

SEQ ID NO: 343729 - RNA, 19 nt, Artificial Sequence
  Description of Artificial Sequence: Synthetic oligonucleotide
  Sense Strand Starting at position 317 of SEQ ID NO: 315733
acauaaagcugggcuuaaa

SEQ ID NO: 343730 - RNA, 19 nt, Artificial Sequence
  Description of Artificial Sequence: Synthetic oligonucleotide
  Antisense Strand to SEQ ID NO: 343729
uuuaagcccagcuuuaugu

SEQ ID NO: 343731 - RNA, 19 nt, Artificial Sequence
  Description of Artificial Sequence: Synthetic oligonucleotide
  Sense Strand Starting at position 317 of SEQ ID NO: 316046
ucuggaaaggcuuaccuuu

SEQ ID NO: 343732 - RNA, 19 nt, Artificial Sequence
  Description of Artificial Sequence: Synthetic oligonucleotide
  Antisense Strand to SEQ ID NO: 343731
aaagguaagccuuuccaga

SEQ ID NO: 343733 - RNA, 19 nt, Artificial Sequence
  Description of Artificial Sequence: Synthetic oligonucleotide
  Sense Strand Starting at position 317 of SEQ ID NO: 316111
agacccaguguuugaccaa

SEQ ID NO: 343734 - RNA, 19 nt, Artificial Sequence
  Description of Artificial Sequence: Synthetic oligonucleotide
  Antisense Strand to SEQ ID NO: 343733
uuggucaaacacugggucu

SEQ ID NO: 343735 - RNA, 19 nt, Artificial Sequence
  Description of Artificial Sequence: Synthetic oligonucleotide
  Sense Strand Starting at position 317 of SEQ ID NO: 316147
gccucaaugauggauugua

SEQ ID NO: 343736 - RNA, 19 nt, Artificial Sequence
  Description of Artificial Sequence: Synthetic oligonucleotide
  Antisense Strand to SEQ ID NO: 343735
uacaauccaucauugaggc

SEQ ID NO: 343737 - RNA, 19 nt, Artificial Sequence
  Description of Artificial Sequence: Synthetic oligonucleotide
  Sense Strand Starting at position 317 of SEQ ID NO: 316152
aaugauggauuguaaagaa

SEQ ID NO: 343738 - RNA, 19 nt, Artificial Sequence
  Description of Artificial Sequence: Synthetic oligonucleotide
  Antisense Strand to SEQ ID NO: 343737
uucuuuacaauccaucauu

SEQ ID NO: 343739 - RNA, 19 nt, Artificial Sequence
  Description of Artificial Sequence: Synthetic oligonucleotide
  Sense Strand Starting at position 317 of SEQ ID NO: 316181
auccaagacucagagauaa

SEQ ID NO: 343740 - RNA, 19 nt, Artificial Sequence
  Description of Artificial Sequence: Synthetic oligonucleotide
  Antisense Strand to SEQ ID NO: 343739
uuaucucugagucuuggau

SEQ ID NO: 343741 - RNA, 19 nt, Artificial Sequence
  Description of Artificial Sequence: Synthetic oligonucleotide
  Sense Strand Starting at position 317 of SEQ ID NO: 316345
ggucauuaccuccaaaggu

SEQ ID NO: 343742 - RNA, 19 nt, Artificial Sequence
  Description of Artificial Sequence: Synthetic oligonucleotide
  Antisense Strand to SEQ ID NO: 343741
accuuuggagguaaugacc

SEQ ID NO: 343743 - RNA, 19 nt, Artificial Sequence
  Description of Artificial Sequence: Synthetic oligonucleotide
  Sense Strand Starting at position 317 of SEQ ID NO: 317374
gcuaguucuccggcccauu

SEQ ID NO: 343744 - RNA, 19 nt, Artificial Sequence
  Description of Artificial Sequence: Synthetic oligonucleotide
  Antisense Strand to SEQ ID NO: 343743
aaugggccggagaacuagc

SEQ ID NO: 343745 - RNA, 19 nt, Artificial Sequence
  Description of Artificial Sequence: Synthetic oligonucleotide
  Sense Strand Starting at position 317 of SEQ ID NO: 317807
acagcuccgaguuagaaua

SEQ ID NO: 343746 - RNA, 19 nt, Artificial Sequence
  Description of Artificial Sequence: Synthetic oligonucleotide
  Antisense Strand to SEQ ID NO: 343745
uauucuaacucggagcugu

SEQ ID NO: 343747 - RNA, 19 nt, Artificial Sequence
  Description of Artificial Sequence: Synthetic oligonucleotide
  Sense Strand Starting at position 317 of SEQ ID NO: 317993
ccugcugucuaucuacaga

SEQ ID NO: 343748 - RNA, 19 nt, Artificial Sequence
  Description of Artificial Sequence: Synthetic oligonucleotide
  Antisense Strand to SEQ ID NO: 343747
ucuguagauagacagcagg

SEQ ID NO: 343749 - RNA, 19 nt, Artificial Sequence
  Description of Artificial Sequence: Synthetic oligonucleotide
  Sense Strand Starting at position 317 of SEQ ID NO: 317996
gcugucuaucuacagaaau

SEQ ID NO: 343750 - RNA, 19 nt, Artificial Sequence
  Description of Artificial Sequence: Synthetic oligonucleotide
  Antisense Strand to SEQ ID NO: 343749
auuucuguagauagacagc

SEQ ID NO: 343751 - RNA, 19 nt, Artificial Sequence
  Description of Artificial Sequence: Synthetic oligonucleotide
  Sense Strand Starting at position 317 of SEQ ID NO: 318036
ggaaauauagcaugcaagu

SEQ ID NO: 343752 - RNA, 19 nt, Artificial Sequence
  Description of Artificial Sequence: Synthetic oligonucleotide
  Antisense Strand to SEQ ID NO: 343751
acuugcaugcuauauuucc

SEQ ID NO: 343753 - RNA, 19 nt, Artificial Sequence
  Description of Artificial Sequence: Synthetic oligonucleotide
  Sense Strand Starting at position 317 of SEQ ID NO: 318088
caguuugauggagacugua

SEQ ID NO: 343754 - RNA, 19 nt, Artificial Sequence
  Description of Artificial Sequence: Synthetic oligonucleotide
  Antisense Strand to SEQ ID NO: 343753
uacagucuccaucaaacug

SEQ ID NO: 343755 - RNA, 19 nt, Artificial Sequence
  Description of Artificial Sequence: Synthetic oligonucleotide
  Sense Strand Starting at position 317 of SEQ ID NO: 318151
aggucuacgcagugauuua

SEQ ID NO: 343756 - RNA, 19 nt, Artificial Sequence
  Description of Artificial Sequence: Synthetic oligonucleotide
  Antisense Strand to SEQ ID NO: 343755
uaaaucacugcguagaccu

SEQ ID NO: 343757 - RNA, 19 nt, Artificial Sequence
  Description of Artificial Sequence: Synthetic oligonucleotide
  Sense Strand Starting at position 317 of SEQ ID NO: 318152
ggucuacgcagugauuuau

SEQ ID NO: 343758 - RNA, 19 nt, Artificial Sequence
  Description of Artificial Sequence: Synthetic oligonucleotide
  Antisense Strand to SEQ ID NO: 343757
auaaaucacugcguagacc

SEQ ID NO: 343759 - RNA, 19 nt, Artificial Sequence
  Description of Artificial Sequence: Synthetic oligonucleotide
  Sense Strand Starting at position 317 of SEQ ID NO: 318261
ggaacaaguugugugggaa

SEQ ID NO: 343760 - RNA, 19 nt, Artificial Sequence
  Description of Artificial Sequence: Synthetic oligonucleotide
  Antisense Strand to SEQ ID NO: 343759
uucccacacaacuuguucc

SEQ ID NO: 343761 - RNA, 19 nt, Artificial Sequence
  Description of Artificial Sequence: Synthetic oligonucleotide
  Sense Strand Starting at position 317 of SEQ ID NO: 318262
gaacaaguugugugggaaa

SEQ ID NO: 343762 - RNA, 19 nt, Artificial Sequence
  Description of Artificial Sequence: Synthetic oligonucleotide
  Antisense Strand to SEQ ID NO: 343761
uuucccacacaacuuguuc

SEQ ID NO: 343763 - RNA, 19 nt, Artificial Sequence
  Description of Artificial Sequence: Synthetic oligonucleotide
  Sense Strand Starting at position 317 of SEQ ID NO: 318264
acaaguugugugggaaagu

SEQ ID NO: 343764 - RNA, 19 nt, Artificial Sequence
  Description of Artificial Sequence: Synthetic oligonucleotide
  Antisense Strand to SEQ ID NO: 343763
acuuucccacacaacuugu

SEQ ID NO: 343765 - RNA, 19 nt, Artificial Sequence
  Description of Artificial Sequence: Synthetic oligonucleotide
  Sense Strand Starting at position 317 of SEQ ID NO: 318273
gugggaaaguaaguuaauu

SEQ ID NO: 343766 - RNA, 19 nt, Artificial Sequence
  Description of Artificial Sequence: Synthetic oligonucleotide
  Antisense Strand to SEQ ID NO: 343765
aauuaacuuacuuucccac

SEQ ID NO: 343767 - RNA, 19 nt, Artificial Sequence
  Description of Artificial Sequence: Synthetic oligonucleotide
  Sense Strand Starting at position 317 of SEQ ID NO: 318335
agcuauguaacaggcagau

SEQ ID NO: 343768 - RNA, 19 nt, Artificial Sequence
  Description of Artificial Sequence: Synthetic oligonucleotide
  Antisense Strand to SEQ ID NO: 343767
aucugccuguuacauagcu

SEQ ID NO: 343769 - RNA, 19 nt, Artificial Sequence
  Description of Artificial Sequence: Synthetic oligonucleotide
  Sense Strand Starting at position 317 of SEQ ID NO: 318341
guaacaggcagauggauau

SEQ ID NO: 343770 - RNA, 19 nt, Artificial Sequence
  Description of Artificial Sequence: Synthetic oligonucleotide
  Antisense Strand to SEQ ID NO: 343769
auauccaucugccuguuac

SEQ ID NO: 343771 - RNA, 19 nt, Artificial Sequence
  Description of Artificial Sequence: Synthetic oligonucleotide
  Sense Strand Starting at position 317 of SEQ ID NO: 318376
gauugagagcuuugaaauu

SEQ ID NO: 343772 - RNA, 19 nt, Artificial Sequence
  Description of Artificial Sequence: Synthetic oligonucleotide
  Antisense Strand to SEQ ID NO: 343771
aauuucaaagcucucaauc

SEQ ID NO: 343773 - RNA, 19 nt, Artificial Sequence
  Description of Artificial Sequence: Synthetic oligonucleotide
  Sense Strand Starting at position 317 of SEQ ID NO: 318390
aaauuauggcucugggagu

SEQ ID NO: 343774 - RNA, 19 nt, Artificial Sequence
  Description of Artificial Sequence: Synthetic oligonucleotide
  Antisense Strand to SEQ ID NO: 343773
acucccagagccauaauuu

SEQ ID NO: 343775 - RNA, 19 nt, Artificial Sequence
  Description of Artificial Sequence: Synthetic oligonucleotide
  Sense Strand Starting at position 317 of SEQ ID NO: 318397
ggcucugggagucauacau

SEQ ID NO: 343776 - RNA, 19 nt, Artificial Sequence
  Description of Artificial Sequence: Synthetic oligonucleotide
  Antisense Strand to SEQ ID NO: 343775
auguaugacucccagagcc

SEQ ID NO: 343777 - RNA, 19 nt, Artificial Sequence
  Description of Artificial Sequence: Synthetic oligonucleotide
  Sense Strand Starting at position 317 of SEQ ID NO: 318403
gggagucauacauagccau

SEQ ID NO: 343778 - RNA, 19 nt, Artificial Sequence
  Description of Artificial Sequence: Synthetic oligonucleotide
  Antisense Strand to SEQ ID NO: 343777
auggcuauguaugacuccc

SEQ ID NO: 343779 - RNA, 19 nt, Artificial Sequence
  Description of Artificial Sequence: Synthetic oligonucleotide
  Sense Strand Starting at position 317 of SEQ ID NO: 318406
agucauacauagccauaca

SEQ ID NO: 343780 - RNA, 19 nt, Artificial Sequence
  Description of Artificial Sequence: Synthetic oligonucleotide
  Antisense Strand to SEQ ID NO: 343779
uguauggcuauguaugacu

SEQ ID NO: 343781 - RNA, 19 nt, Artificial Sequence
  Description of Artificial Sequence: Synthetic oligonucleotide
  Sense Strand Starting at position 317 of SEQ ID NO: 318417
gccauacauguauacauau

SEQ ID NO: 343782 - RNA, 19 nt, Artificial Sequence
  Description of Artificial Sequence: Synthetic oligonucleotide
  Antisense Strand to SEQ ID NO: 343781
auauguauacauguauggc

SEQ ID NO: 343783 - RNA, 19 nt, Artificial Sequence
  Description of Artificial Sequence: Synthetic oligonucleotide
  Sense Strand Starting at position 317 of SEQ ID NO: 318440
auguauacauagucauaca

SEQ ID NO: 343784 - RNA, 19 nt, Artificial Sequence
  Description of Artificial Sequence: Synthetic oligonucleotide
  Antisense Strand to SEQ ID NO: 343783
uguaugacuauguauacau

SEQ ID NO: 343785 - RNA, 19 nt, Artificial Sequence
  Description of Artificial Sequence: Synthetic oligonucleotide
  Sense Strand Starting at position 317 of SEQ ID NO: 318502
augaaagucuaaguuggaa

SEQ ID NO: 343786 - RNA, 19 nt, Artificial Sequence
  Description of Artificial Sequence: Synthetic oligonucleotide
  Antisense Strand to SEQ ID NO: 343785
uuccaacuuagacuuucau

SEQ ID NO: 343787 - RNA, 19 nt, Artificial Sequence
  Description of Artificial Sequence: Synthetic oligonucleotide
  Sense Strand Starting at position 317 of SEQ ID NO: 318801
aaaugccagugucuugaau

SEQ ID NO: 343788 - RNA, 19 nt, Artificial Sequence
  Description of Artificial Sequence: Synthetic oligonucleotide
  Antisense Strand to SEQ ID NO: 343787
auucaagacacuggcauuu

SEQ ID NO: 343789 - RNA, 19 nt, Artificial Sequence
  Description of Artificial Sequence: Synthetic oligonucleotide
  Sense Strand Starting at position 317 of SEQ ID NO: 318910
uugacuacugcugacguaa

SEQ ID NO: 343790 - RNA, 19 nt, Artificial Sequence
  Description of Artificial Sequence: Synthetic oligonucleotide
  Antisense Strand to SEQ ID NO: 343789
uuacgucagcaguagucaa

SEQ ID NO: 343791 - RNA, 19 nt, Artificial Sequence
  Description of Artificial Sequence: Synthetic oligonucleotide
  Sense Strand Starting at position 317 of SEQ ID NO: 319039
aaagaaugacauugucagu

SEQ ID NO: 343792 - RNA, 19 nt, Artificial Sequence
  Description of Artificial Sequence: Synthetic oligonucleotide
  Antisense Strand to SEQ ID NO: 343791
acugacaaugucauucuuu

SEQ ID NO: 343793 - RNA, 19 nt, Artificial Sequence
  Description of Artificial Sequence: Synthetic oligonucleotide
  Sense Strand Starting at position 318 of SEQ ID NO: 315270
uccucugugacaggaagaa

SEQ ID NO: 343794 - RNA, 19 nt, Artificial Sequence
  Description of Artificial Sequence: Synthetic oligonucleotide
  Antisense Strand to SEQ ID NO: 343793
uucuuccugucacagagga

SEQ ID NO: 343795 - RNA, 19 nt, Artificial Sequence
  Description of Artificial Sequence: Synthetic oligonucleotide
  Sense Strand Starting at position 318 of SEQ ID NO: 315762
guccucgcucugucaucua

SEQ ID NO: 343796 - RNA, 19 nt, Artificial Sequence
  Description of Artificial Sequence: Synthetic oligonucleotide
  Antisense Strand to SEQ ID NO: 343795
uagaugacagagcgaggac

SEQ ID NO: 343797 - RNA, 19 nt, Artificial Sequence
  Description of Artificial Sequence: Synthetic oligonucleotide
  Sense Strand Starting at position 318 of SEQ ID NO: 316151
ugagaugucagcuaagagc

SEQ ID NO: 343798 - RNA, 19 nt, Artificial Sequence
  Description of Artificial Sequence: Synthetic oligonucleotide
  Antisense Strand to SEQ ID NO: 343797
gcucuuagcugacaucuca

SEQ ID NO: 343799 - RNA, 19 nt, Artificial Sequence
  Description of Artificial Sequence: Synthetic oligonucleotide
  Sense Strand Starting at position 318 of SEQ ID NO: 316198
ugaggagcagagugaucuu

SEQ ID NO: 343800 - RNA, 19 nt, Artificial Sequence
  Description of Artificial Sequence: Synthetic oligonucleotide
  Antisense Strand to SEQ ID NO: 343799
aagaucacucugcuccuca

SEQ ID NO: 343801 - RNA, 19 nt, Artificial Sequence
  Description of Artificial Sequence: Synthetic oligonucleotide
  Sense Strand Starting at position 318 of SEQ ID NO: 316278
ucaggaugugcugagugaa

SEQ ID NO: 343802 - RNA, 19 nt, Artificial Sequence
  Description of Artificial Sequence: Synthetic oligonucleotide
  Antisense Strand to SEQ ID NO: 343801
uucacucagcacauccuga

SEQ ID NO: 343803 - RNA, 19 nt, Artificial Sequence
  Description of Artificial Sequence: Synthetic oligonucleotide
  Sense Strand Starting at position 318 of SEQ ID NO: 316343
caggaaugguuucuccaga

SEQ ID NO: 343804 - RNA, 19 nt, Artificial Sequence
  Description of Artificial Sequence: Synthetic oligonucleotide
  Antisense Strand to SEQ ID NO: 343803
ucuggagaaaccauuccug

SEQ ID NO: 343805 - RNA, 19 nt, Artificial Sequence
  Description of Artificial Sequence: Synthetic oligonucleotide
  Sense Strand Starting at position 318 of SEQ ID NO: 316344
aggaaugguuucuccagau

SEQ ID NO: 343806 - RNA, 19 nt, Artificial Sequence
  Description of Artificial Sequence: Synthetic oligonucleotide
  Antisense Strand to SEQ ID NO: 343805
aucuggagaaaccauuccu

SEQ ID NO: 343807 - RNA, 19 nt, Artificial Sequence
  Description of Artificial Sequence: Synthetic oligonucleotide
  Sense Strand Starting at position 318 of SEQ ID NO: 316393
gcagcuuccgcucugugau

SEQ ID NO: 343808 - RNA, 19 nt, Artificial Sequence
  Description of Artificial Sequence: Synthetic oligonucleotide
  Antisense Strand to SEQ ID NO: 343807
aucacagagcggaagcugc

SEQ ID NO: 343809 - RNA, 19 nt, Artificial Sequence
  Description of Artificial Sequence: Synthetic oligonucleotide
  Sense Strand Starting at position 318 of SEQ ID NO: 316428
uuuagagaauggucacaua

SEQ ID NO: 343810 - RNA, 19 nt, Artificial Sequence
  Description of Artificial Sequence: Synthetic oligonucleotide
  Antisense Strand to SEQ ID NO: 343809
uaugugaccauucucuaaa

SEQ ID NO: 343811 - RNA, 19 nt, Artificial Sequence
  Description of Artificial Sequence: Synthetic oligonucleotide
  Sense Strand Starting at position 318 of SEQ ID NO: 316453
gcuguccugcaacaagaaa

SEQ ID NO: 343812 - RNA, 19 nt, Artificial Sequence
  Description of Artificial Sequence: Synthetic oligonucleotide
  Antisense Strand to SEQ ID NO: 343811
uuucuuguugcaggacagc

SEQ ID NO: 343813 - RNA, 19 nt, Artificial Sequence
  Description of Artificial Sequence: Synthetic oligonucleotide
  Sense Strand Starting at position 318 of SEQ ID NO: 316538
gaugacugacucuagcauu

SEQ ID NO: 343814 - RNA, 19 nt, Artificial Sequence
  Description of Artificial Sequence: Synthetic oligonucleotide
  Antisense Strand to SEQ ID NO: 343813
aaugcuagagucagucauc

SEQ ID NO: 343815 - RNA, 19 nt, Artificial Sequence
  Description of Artificial Sequence: Synthetic oligonucleotide
  Sense Strand Starting at position 318 of SEQ ID NO: 316544
ugacucuagcauuacaguu

SEQ ID NO: 343816 - RNA, 19 nt, Artificial Sequence
  Description of Artificial Sequence: Synthetic oligonucleotide
  Antisense Strand to SEQ ID NO: 343815
aacuguaaugcuagaguca

SEQ ID NO: 343817 - RNA, 19 nt, Artificial Sequence
  Description of Artificial Sequence: Synthetic oligonucleotide
  Sense Strand Starting at position 318 of SEQ ID NO: 316551
agcauuacaguuuauaagu

SEQ ID NO: 343818 - RNA, 19 nt, Artificial Sequence
  Description of Artificial Sequence: Synthetic oligonucleotide
  Antisense Strand to SEQ ID NO: 343817
acuuauaaacuguaaugcu

SEQ ID NO: 343819 - RNA, 19 nt, Artificial Sequence
  Description of Artificial Sequence: Synthetic oligonucleotide
  Sense Strand Starting at position 318 of SEQ ID NO: 316575
uccugagagucuguuagaa

SEQ ID NO: 343820 - RNA, 19 nt, Artificial Sequence
  Description of Artificial Sequence: Synthetic oligonucleotide
  Antisense Strand to SEQ ID NO: 343819
uucuaacagacucucagga

SEQ ID NO: 343821 - RNA, 19 nt, Artificial Sequence
  Description of Artificial Sequence: Synthetic oligonucleotide
  Sense Strand Starting at position 318 of SEQ ID NO: 316583
gucuguuagaaaugacaga

SEQ ID NO: 343822 - RNA, 19 nt, Artificial Sequence
  Description of Artificial Sequence: Synthetic oligonucleotide
  Antisense Strand to SEQ ID NO: 343821
ucugucauuucuaacagac

SEQ ID NO: 343823 - RNA, 19 nt, Artificial Sequence
  Description of Artificial Sequence: Synthetic oligonucleotide
  Sense Strand Starting at position 318 of SEQ ID NO: 316793
uguauugugggagaaaccu

SEQ ID NO: 343824 - RNA, 19 nt, Artificial Sequence
  Description of Artificial Sequence: Synthetic oligonucleotide
  Antisense Strand to SEQ ID NO: 343823
agguuucucccacaauaca

SEQ ID NO: 343825 - RNA, 19 nt, Artificial Sequence
  Description of Artificial Sequence: Synthetic oligonucleotide
  Sense Strand Starting at position 318 of SEQ ID NO: 316878
auaagaucugaugguuaca

SEQ ID NO: 343826 - RNA, 19 nt, Artificial Sequence
  Description of Artificial Sequence: Synthetic oligonucleotide
  Antisense Strand to SEQ ID NO: 343825
uguaaccaucagaucuuau

SEQ ID NO: 343827 - RNA, 19 nt, Artificial Sequence
  Description of Artificial Sequence: Synthetic oligonucleotide
  Sense Strand Starting at position 318 of SEQ ID NO: 317063
ucagguaugucucuauaag

SEQ ID NO: 343828 - RNA, 19 nt, Artificial Sequence
  Description of Artificial Sequence: Synthetic oligonucleotide
  Antisense Strand to SEQ ID NO: 343827
cuuauagagacauaccuga

SEQ ID NO: 343829 - RNA, 19 nt, Artificial Sequence
  Description of Artificial Sequence: Synthetic oligonucleotide
  Sense Strand Starting at position 318 of SEQ ID NO: 317073
cucuauaagcagcaugaaa

SEQ ID NO: 343830 - RNA, 19 nt, Artificial Sequence
  Description of Artificial Sequence: Synthetic oligonucleotide
  Antisense Strand to SEQ ID NO: 343829
uuucaugcugcuuauagag

SEQ ID NO: 343831 - RNA, 19 nt, Artificial Sequence
  Description of Artificial Sequence: Synthetic oligonucleotide
  Sense Strand Starting at position 318 of SEQ ID NO: 317122
aggccugacucuguaaaca

SEQ ID NO: 343832 - RNA, 19 nt, Artificial Sequence
  Description of Artificial Sequence: Synthetic oligonucleotide
  Antisense Strand to SEQ ID NO: 343831
uguuuacagagucaggccu

SEQ ID NO: 343833 - RNA, 19 nt, Artificial Sequence
  Description of Artificial Sequence: Synthetic oligonucleotide
  Sense Strand Starting at position 318 of SEQ ID NO: 317175
aggaucuacagcugagaua

SEQ ID NO: 343834 - RNA, 19 nt, Artificial Sequence
  Description of Artificial Sequence: Synthetic oligonucleotide
  Antisense Strand to SEQ ID NO: 343833
uaucucagcuguagauccu

SEQ ID NO: 343835 - RNA, 19 nt, Artificial Sequence
  Description of Artificial Sequence: Synthetic oligonucleotide
  Sense Strand Starting at position 318 of SEQ ID NO: 317389
agcaguaugcgaagagguu

SEQ ID NO: 343836 - RNA, 19 nt, Artificial Sequence
  Description of Artificial Sequence: Synthetic oligonucleotide
  Antisense Strand to SEQ ID NO: 343835
aaccucuucgcauacugcu

SEQ ID NO: 343837 - RNA, 19 nt, Artificial Sequence
  Description of Artificial Sequence: Synthetic oligonucleotide
  Sense Strand Starting at position 318 of SEQ ID NO: 317422
ugagacagaucuggauuua

SEQ ID NO: 343838 - RNA, 19 nt, Artificial Sequence
  Description of Artificial Sequence: Synthetic oligonucleotide
  Antisense Strand to SEQ ID NO: 343837
uaaauccagaucugucuca

SEQ ID NO: 343839 - RNA, 19 nt, Artificial Sequence
  Description of Artificial Sequence: Synthetic oligonucleotide
  Sense Strand Starting at position 318 of SEQ ID NO: 317465
uugugugaaccuggacaaa

SEQ ID NO: 343840 - RNA, 19 nt, Artificial Sequence
  Description of Artificial Sequence: Synthetic oligonucleotide
  Antisense Strand to SEQ ID NO: 343839
uuuguccagguucacacaa

SEQ ID NO: 343841 - RNA, 19 nt, Artificial Sequence
  Description of Artificial Sequence: Synthetic oligonucleotide
  Sense Strand Starting at position 318 of SEQ ID NO: 317787
uucuuaaagcucugacuga

SEQ ID NO: 343842 - RNA, 19 nt, Artificial Sequence
  Description of Artificial Sequence: Synthetic oligonucleotide
  Antisense Strand to SEQ ID NO: 343841
ucagucagagcuuuaagaa

SEQ ID NO: 343843 - RNA, 19 nt, Artificial Sequence
  Description of Artificial Sequence: Synthetic oligonucleotide
  Sense Strand Starting at position 318 of SEQ ID NO: 318224
uugaaucaacuguagcaga

SEQ ID NO: 343844 - RNA, 19 nt, Artificial Sequence
  Description of Artificial Sequence: Synthetic oligonucleotide
  Antisense Strand to SEQ ID NO: 343843
ucugcuacaguugauucaa

SEQ ID NO: 343845 - RNA, 19 nt, Artificial Sequence
  Description of Artificial Sequence: Synthetic oligonucleotide
  Sense Strand Starting at position 318 of SEQ ID NO: 318316
uguacaaucuguucugaga

SEQ ID NO: 343846 - RNA, 19 nt, Artificial Sequence
  Description of Artificial Sequence: Synthetic oligonucleotide
  Antisense Strand to SEQ ID NO: 343845
ucucagaacagauuguaca

SEQ ID NO: 343847 - RNA, 19 nt, Artificial Sequence
  Description of Artificial Sequence: Synthetic oligonucleotide
  Sense Strand Starting at position 318 of SEQ ID NO: 318330
ugagaugauuuccaucuag

SEQ ID NO: 343848 - RNA, 19 nt, Artificial Sequence
  Description of Artificial Sequence: Synthetic oligonucleotide
  Antisense Strand to SEQ ID NO: 343847
cuagauggaaaucaucuca

SEQ ID NO: 343849 - RNA, 19 nt, Artificial Sequence
  Description of Artificial Sequence: Synthetic oligonucleotide
  Sense Strand Starting at position 318 of SEQ ID NO: 318351
gcaggugucagaugagaug

SEQ ID NO: 343850 - RNA, 19 nt, Artificial Sequence
  Description of Artificial Sequence: Synthetic oligonucleotide
  Antisense Strand to SEQ ID NO: 343849
caucucaucugacaccugc

SEQ ID NO: 343851 - RNA, 19 nt, Artificial Sequence
  Description of Artificial Sequence: Synthetic oligonucleotide
  Sense Strand Starting at position 318 of SEQ ID NO: 318551
aaggaauacuaguuuguau

SEQ ID NO: 343852 - RNA, 19 nt, Artificial Sequence
  Description of Artificial Sequence: Synthetic oligonucleotide
  Antisense Strand to SEQ ID NO: 343851
auacaaacuaguauuccuu

SEQ ID NO: 343853 - RNA, 19 nt, Artificial Sequence
  Description of Artificial Sequence: Synthetic oligonucleotide
  Sense Strand Starting at position 318 of SEQ ID NO: 318600
caggaaggugacugucaaa

SEQ ID NO: 343854 - RNA, 19 nt, Artificial Sequence
  Description of Artificial Sequence: Synthetic oligonucleotide
  Antisense Strand to SEQ ID NO: 343853
uuugacagucaccuuccug

SEQ ID NO: 343855 - RNA, 19 nt, Artificial Sequence
  Description of Artificial Sequence: Synthetic oligonucleotide
  Sense Strand Starting at position 318 of SEQ ID NO: 318674
acaguaggauccuugauac

SEQ ID NO: 343856 - RNA, 19 nt, Artificial Sequence
  Description of Artificial Sequence: Synthetic oligonucleotide
  Antisense Strand to SEQ ID NO: 343855
guaucaaggauccuacugu

SEQ ID NO: 343857 - RNA, 19 nt, Artificial Sequence
  Description of Artificial Sequence: Synthetic oligonucleotide
  Sense Strand Starting at position 318 of SEQ ID NO: 318696
cugucagacuaaguaaaug

SEQ ID NO: 343858 - RNA, 19 nt, Artificial Sequence
  Description of Artificial Sequence: Synthetic oligonucleotide
  Antisense Strand to SEQ ID NO: 343857
cauuuacuuagucugacag

SEQ ID NO: 343859 - RNA, 19 nt, Artificial Sequence
  Description of Artificial Sequence: Synthetic oligonucleotide
  Sense Strand Starting at position 318 of SEQ ID NO: 318769
agccuauauccuggacuga

SEQ ID NO: 343860 - RNA, 19 nt, Artificial Sequence
  Description of Artificial Sequence: Synthetic oligonucleotide
  Antisense Strand to SEQ ID NO: 343859
ucaguccaggauauaggcu

SEQ ID NO: 343861 - RNA, 19 nt, Artificial Sequence
  Description of Artificial Sequence: Synthetic oligonucleotide
  Sense Strand Starting at position 318 of SEQ ID NO: 318886
gcauaaagaggauguaaug

SEQ ID NO: 343862 - RNA, 19 nt, Artificial Sequence
  Description of Artificial Sequence: Synthetic oligonucleotide
  Antisense Strand to SEQ ID NO: 343861
cauuacauccucuuuaugc

SEQ ID NO: 343863 - RNA, 19 nt, Artificial Sequence
  Description of Artificial Sequence: Synthetic oligonucleotide
  Sense Strand Starting at position 318 of SEQ ID NO: 319119
aaugaauggucagccacua

SEQ ID NO: 343864 - RNA, 19 nt, Artificial Sequence
  Description of Artificial Sequence: Synthetic oligonucleotide
  Antisense Strand to SEQ ID NO: 343863
uaguggcugaccauucauu

SEQ ID NO: 343865 - RNA, 19 nt, Artificial Sequence
  Description of Artificial Sequence: Synthetic oligonucleotide
  Sense Strand Starting at position 318 of SEQ ID NO: 319124
auggucagccacuauauga

SEQ ID NO: 343866 - RNA, 19 nt, Artificial Sequence
  Description of Artificial Sequence: Synthetic oligonucleotide
  Antisense Strand to SEQ ID NO: 343865
ucauauaguggcugaccau

SEQ ID NO: 343867 - RNA, 19 nt, Artificial Sequence
  Description of Artificial Sequence: Synthetic oligonucleotide
  Sense Strand Starting at position 318 of SEQ ID NO: 319134
acuauaugacaguggcaaa

SEQ ID NO: 343868 - RNA, 19 nt, Artificial Sequence
  Description of Artificial Sequence: Synthetic oligonucleotide
  Antisense Strand to SEQ ID NO: 343867
uuugccacugucauauagu

SEQ ID NO: 343869 - RNA, 19 nt, Artificial Sequence
  Description of Artificial Sequence: Synthetic oligonucleotide
  Sense Strand Starting at position 318 of SEQ ID NO: 319167
uguaucaugggaugauaua

SEQ ID NO: 343870 - RNA, 19 nt, Artificial Sequence
  Description of Artificial Sequence: Synthetic oligonucleotide
  Antisense Strand to SEQ ID NO: 343869
uauaucaucccaugauaca

SEQ ID NO: 343871 - RNA, 19 nt, Artificial Sequence
  Description of Artificial Sequence: Synthetic oligonucleotide
  Sense Strand Starting at position 318 of SEQ ID NO: 319179
ugauauaagccucagcuaa

SEQ ID NO: 343872 - RNA, 19 nt, Artificial Sequence
  Description of Artificial Sequence: Synthetic oligonucleotide
  Antisense Strand to SEQ ID NO: 343871
uuagcugaggcuuauauca

SEQ ID NO: 343873 - RNA, 19 nt, Artificial Sequence
  Description of Artificial Sequence: Synthetic oligonucleotide
  Sense Strand Starting at position 319 of SEQ ID NO: 315303
auugaauguguugggauua

SEQ ID NO: 343874 - RNA, 19 nt, Artificial Sequence
  Description of Artificial Sequence: Synthetic oligonucleotide
  Antisense Strand to SEQ ID NO: 343873
uaaucccaacacauucaau

SEQ ID NO: 343875 - RNA, 19 nt, Artificial Sequence
  Description of Artificial Sequence: Synthetic oligonucleotide
  Sense Strand Starting at position 319 of SEQ ID NO: 315344
cucgauuucuuccagaagu

SEQ ID NO: 343876 - RNA, 19 nt, Artificial Sequence
  Description of Artificial Sequence: Synthetic oligonucleotide
  Antisense Strand to SEQ ID NO: 343875
acuucuggaagaaaucgag

SEQ ID NO: 343877 - RNA, 19 nt, Artificial Sequence
  Description of Artificial Sequence: Synthetic oligonucleotide
  Sense Strand Starting at position 319 of SEQ ID NO: 315456
guaaucaacugucuuacag

SEQ ID NO: 343878 - RNA, 19 nt, Artificial Sequence
  Description of Artificial Sequence: Synthetic oligonucleotide
  Antisense Strand to SEQ ID NO: 343877
cuguaagacaguugauuac

SEQ ID NO: 343879 - RNA, 19 nt, Artificial Sequence
  Description of Artificial Sequence: Synthetic oligonucleotide
  Sense Strand Starting at position 319 of SEQ ID NO: 315511
aguuacaacucacuguaaa

SEQ ID NO: 343880 - RNA, 19 nt, Artificial Sequence
  Description of Artificial Sequence: Synthetic oligonucleotide
  Antisense Strand to SEQ ID NO: 343879
uuuacagugaguuguaacu

SEQ ID NO: 343881 - RNA, 19 nt, Artificial Sequence
  Description of Artificial Sequence: Synthetic oligonucleotide
  Sense Strand Starting at position 319 of SEQ ID NO: 315609
agguuauuauagcuuguau

SEQ ID NO: 343882 - RNA, 19 nt, Artificial Sequence
  Description of Artificial Sequence: Synthetic oligonucleotide
  Antisense Strand to SEQ ID NO: 343881
auacaagcuauaauaaccu

SEQ ID NO: 343883 - RNA, 19 nt, Artificial Sequence
  Description of Artificial Sequence: Synthetic oligonucleotide
  Sense Strand Starting at position 319 of SEQ ID NO: 315984
uguauuauaggguaaacga

SEQ ID NO: 343884 - RNA, 19 nt, Artificial Sequence
  Description of Artificial Sequence: Synthetic oligonucleotide
  Antisense Strand to SEQ ID NO: 343883
ucguuuacccuauaauaca

SEQ ID NO: 343885 - RNA, 19 nt, Artificial Sequence
  Description of Artificial Sequence: Synthetic oligonucleotide
  Sense Strand Starting at position 319 of SEQ ID NO: 316011
ggucaucuuccagaguucu

SEQ ID NO: 343886 - RNA, 19 nt, Artificial Sequence
  Description of Artificial Sequence: Synthetic oligonucleotide
  Antisense Strand to SEQ ID NO: 343885
agaacucuggaagaugacc

SEQ ID NO: 343887 - RNA, 19 nt, Artificial Sequence
  Description of Artificial Sequence: Synthetic oligonucleotide
  Sense Strand Starting at position 319 of SEQ ID NO: 316022
agaguucugucaguuuaag

SEQ ID NO: 343888 - RNA, 19 nt, Artificial Sequence
  Description of Artificial Sequence: Synthetic oligonucleotide
  Antisense Strand to SEQ ID NO: 343887
cuuaaacugacagaacucu

SEQ ID NO: 343889 - RNA, 19 nt, Artificial Sequence
  Description of Artificial Sequence: Synthetic oligonucleotide
  Sense Strand Starting at position 319 of SEQ ID NO: 316041
gauuucguaucuuauugaa

SEQ ID NO: 343890 - RNA, 19 nt, Artificial Sequence
  Description of Artificial Sequence: Synthetic oligonucleotide
  Antisense Strand to SEQ ID NO: 343889
uucaauaagauacgaaauc

SEQ ID NO: 343891 - RNA, 19 nt, Artificial Sequence
  Description of Artificial Sequence: Synthetic oligonucleotide
  Sense Strand Starting at position 319 of SEQ ID NO: 316062
gugaacuccagucauuggu

SEQ ID NO: 343892 - RNA, 19 nt, Artificial Sequence
  Description of Artificial Sequence: Synthetic oligonucleotide
  Antisense Strand to SEQ ID NO: 343891
accaaugacuggaguucac

SEQ ID NO: 343893 - RNA, 19 nt, Artificial Sequence
  Description of Artificial Sequence: Synthetic oligonucleotide
  Sense Strand Starting at position 319 of SEQ ID NO: 316064
gaacuccagucauugguga

SEQ ID NO: 343894 - RNA, 19 nt, Artificial Sequence
  Description of Artificial Sequence: Synthetic oligonucleotide
  Antisense Strand to SEQ ID NO: 343893
ucaccaaugacuggaguuc

SEQ ID NO: 343895 - RNA, 19 nt, Artificial Sequence
  Description of Artificial Sequence: Synthetic oligonucleotide
  Sense Strand Starting at position 319 of SEQ ID NO: 316065
aacuccagucauuggugaa

SEQ ID NO: 343896 - RNA, 19 nt, Artificial Sequence
  Description of Artificial Sequence: Synthetic oligonucleotide
  Antisense Strand to SEQ ID NO: 343895
uucaccaaugacuggaguu

SEQ ID NO: 343897 - RNA, 19 nt, Artificial Sequence
  Description of Artificial Sequence: Synthetic oligonucleotide
  Sense Strand Starting at position 319 of SEQ ID NO: 316103
acguauuacuuucuaagug

SEQ ID NO: 343898 - RNA, 19 nt, Artificial Sequence
  Description of Artificial Sequence: Synthetic oligonucleotide
  Antisense Strand to SEQ ID NO: 343897
cacuuagaaaguaauacgu

SEQ ID NO: 343899 - RNA, 19 nt, Artificial Sequence
  Description of Artificial Sequence: Synthetic oligonucleotide
  Sense Strand Starting at position 319 of SEQ ID NO: 316119
guguaaagccuguagcuga

SEQ ID NO: 343900 - RNA, 19 nt, Artificial Sequence
  Description of Artificial Sequence: Synthetic oligonucleotide
  Antisense Strand to SEQ ID NO: 343899
ucagcuacaggcuuuacac

SEQ ID NO: 343901 - RNA, 19 nt, Artificial Sequence
  Description of Artificial Sequence: Synthetic oligonucleotide
  Sense Strand Starting at position 319 of SEQ ID NO: 316127
ccuguagcugaaugaguua

SEQ ID NO: 343902 - RNA, 19 nt, Artificial Sequence
  Description of Artificial Sequence: Synthetic oligonucleotide
  Antisense Strand to SEQ ID NO: 343901
uaacucauucagcuacagg

SEQ ID NO: 343903 - RNA, 19 nt, Artificial Sequence
  Description of Artificial Sequence: Synthetic oligonucleotide
  Sense Strand Starting at position 319 of SEQ ID NO: 316130
guagcugaaugaguuaauu

SEQ ID NO: 343904 - RNA, 19 nt, Artificial Sequence
  Description of Artificial Sequence: Synthetic oligonucleotide
  Antisense Strand to SEQ ID NO: 343903
aauuaacucauucagcuac

SEQ ID NO: 343905 - RNA, 19 nt, Artificial Sequence
  Description of Artificial Sequence: Synthetic oligonucleotide
  Sense Strand Starting at position 319 of SEQ ID NO: 316142
guuaauuaggaagggucaa

SEQ ID NO: 343906 - RNA, 19 nt, Artificial Sequence
  Description of Artificial Sequence: Synthetic oligonucleotide
  Antisense Strand to SEQ ID NO: 343905
uugacccuuccuaauuaac

SEQ ID NO: 343907 - RNA, 19 nt, Artificial Sequence
  Description of Artificial Sequence: Synthetic oligonucleotide
  Sense Strand Starting at position 319 of SEQ ID NO: 316163
acaagaaagugggaaauua

SEQ ID NO: 343908 - RNA, 19 nt, Artificial Sequence
  Description of Artificial Sequence: Synthetic oligonucleotide
  Antisense Strand to SEQ ID NO: 343907
uaauuucccacuuucuugu

SEQ ID NO: 343909 - RNA, 19 nt, Artificial Sequence
  Description of Artificial Sequence: Synthetic oligonucleotide
  Sense Strand Starting at position 319 of SEQ ID NO: 316270
gcacgaaagccagaaagua

SEQ ID NO: 343910 - RNA, 19 nt, Artificial Sequence
  Description of Artificial Sequence: Synthetic oligonucleotide
  Antisense Strand to SEQ ID NO: 343909
uacuuucuggcuuucgugc

SEQ ID NO: 343911 - RNA, 19 nt, Artificial Sequence
  Description of Artificial Sequence: Synthetic oligonucleotide
  Sense Strand Starting at position 319 of SEQ ID NO: 316359
ucucucuuguuuguacaaa

SEQ ID NO: 343912 - RNA, 19 nt, Artificial Sequence
  Description of Artificial Sequence: Synthetic oligonucleotide
  Antisense Strand to SEQ ID NO: 343911
uuuguacaaacaagagaga

SEQ ID NO: 343913 - RNA, 19 nt, Artificial Sequence
  Description of Artificial Sequence: Synthetic oligonucleotide
  Sense Strand Starting at position 319 of SEQ ID NO: 316413
uccuaagugccuuggaauc

SEQ ID NO: 343914 - RNA, 19 nt, Artificial Sequence
  Description of Artificial Sequence: Synthetic oligonucleotide
  Antisense Strand to SEQ ID NO: 343913
gauuccaaggcacuuagga

SEQ ID NO: 343915 - RNA, 19 nt, Artificial Sequence
  Description of Artificial Sequence: Synthetic oligonucleotide
  Sense Strand Starting at position 319 of SEQ ID NO: 316434
uuccgaaacucuguguagu

SEQ ID NO: 343916 - RNA, 19 nt, Artificial Sequence
  Description of Artificial Sequence: Synthetic oligonucleotide
  Antisense Strand to SEQ ID NO: 343915
acuacacagaguuucggaa

SEQ ID NO: 343917 - RNA, 19 nt, Artificial Sequence
  Description of Artificial Sequence: Synthetic oligonucleotide
  Sense Strand Starting at position 319 of SEQ ID NO: 316440
aacucuguguaguucgauu

SEQ ID NO: 343918 - RNA, 19 nt, Artificial Sequence
  Description of Artificial Sequence: Synthetic oligonucleotide
  Antisense Strand to SEQ ID NO: 343917
aaucgaacuacacagaguu

SEQ ID NO: 343919 - RNA, 19 nt, Artificial Sequence
  Description of Artificial Sequence: Synthetic oligonucleotide
  Sense Strand Starting at position 319 of SEQ ID NO: 316523
ccaaaugaccucugcgaca

SEQ ID NO: 343920 - RNA, 19 nt, Artificial Sequence
  Description of Artificial Sequence: Synthetic oligonucleotide
  Antisense Strand to SEQ ID NO: 343919
ugucgcagaggucauuugg

SEQ ID NO: 343921 - RNA, 19 nt, Artificial Sequence
  Description of Artificial Sequence: Synthetic oligonucleotide
  Sense Strand Starting at position 319 of SEQ ID NO: 316568
ggagaggaggaguguuuau

SEQ ID NO: 343922 - RNA, 19 nt, Artificial Sequence
  Description of Artificial Sequence: Synthetic oligonucleotide
  Antisense Strand to SEQ ID NO: 343921
auaaacacuccuccucucc

SEQ ID NO: 343923 - RNA, 19 nt, Artificial Sequence
  Description of Artificial Sequence: Synthetic oligonucleotide
  Sense Strand Starting at position 319 of SEQ ID NO: 316681
cccaauguaucugcaaaga

SEQ ID NO: 343924 - RNA, 19 nt, Artificial Sequence
  Description of Artificial Sequence: Synthetic oligonucleotide
  Antisense Strand to SEQ ID NO: 343923
ucuuugcagauacauuggg

SEQ ID NO: 343925 - RNA, 19 nt, Artificial Sequence
  Description of Artificial Sequence: Synthetic oligonucleotide
  Sense Strand Starting at position 319 of SEQ ID NO: 317125
ucuugaaucccagagccua

SEQ ID NO: 343926 - RNA, 19 nt, Artificial Sequence
  Description of Artificial Sequence: Synthetic oligonucleotide
  Antisense Strand to SEQ ID NO: 343925
uaggcucugggauucaaga

SEQ ID NO: 343927 - RNA, 19 nt, Artificial Sequence
  Description of Artificial Sequence: Synthetic oligonucleotide
  Sense Strand Starting at position 319 of SEQ ID NO: 317447
gagcucuuuccaggcaaag

SEQ ID NO: 343928 - RNA, 19 nt, Artificial Sequence
  Description of Artificial Sequence: Synthetic oligonucleotide
  Antisense Strand to SEQ ID NO: 343927
cuuugccuggaaagagcuc

SEQ ID NO: 343929 - RNA, 19 nt, Artificial Sequence
  Description of Artificial Sequence: Synthetic oligonucleotide
  Sense Strand Starting at position 319 of SEQ ID NO: 317449
gcucuuuccaggcaaaggu

SEQ ID NO: 343930 - RNA, 19 nt, Artificial Sequence
  Description of Artificial Sequence: Synthetic oligonucleotide
  Antisense Strand to SEQ ID NO: 343929
accuuugccuggaaagagc

SEQ ID NO: 343931 - RNA, 19 nt, Artificial Sequence
  Description of Artificial Sequence: Synthetic oligonucleotide
  Sense Strand Starting at position 319 of SEQ ID NO: 317538
gucuguggaauguggaaau

SEQ ID NO: 343932 - RNA, 19 nt, Artificial Sequence
  Description of Artificial Sequence: Synthetic oligonucleotide
  Antisense Strand to SEQ ID NO: 343931
auuuccacauuccacagac

SEQ ID NO: 343933 - RNA, 19 nt, Artificial Sequence
  Description of Artificial Sequence: Synthetic oligonucleotide
  Sense Strand Starting at position 319 of SEQ ID NO: 317549
guggaaaugcgggacucua

SEQ ID NO: 343934 - RNA, 19 nt, Artificial Sequence
  Description of Artificial Sequence: Synthetic oligonucleotide
  Antisense Strand to SEQ ID NO: 343933
uagagucccgcauuuccac

SEQ ID NO: 343935 - RNA, 19 nt, Artificial Sequence
  Description of Artificial Sequence: Synthetic oligonucleotide
  Sense Strand Starting at position 319 of SEQ ID NO: 317644
cagauauggaugugucgac

SEQ ID NO: 343936 - RNA, 19 nt, Artificial Sequence
  Description of Artificial Sequence: Synthetic oligonucleotide
  Antisense Strand to SEQ ID NO: 343935
gucgacacauccauaucug

SEQ ID NO: 343937 - RNA, 19 nt, Artificial Sequence
  Description of Artificial Sequence: Synthetic oligonucleotide
  Sense Strand Starting at position 319 of SEQ ID NO: 317648
uauggaugugucgaccuaa

SEQ ID NO: 343938 - RNA, 19 nt, Artificial Sequence
  Description of Artificial Sequence: Synthetic oligonucleotide
  Antisense Strand to SEQ ID NO: 343937
uuaggucgacacauccaua

SEQ ID NO: 343939 - RNA, 19 nt, Artificial Sequence
  Description of Artificial Sequence: Synthetic oligonucleotide
  Sense Strand Starting at position 319 of SEQ ID NO: 318572
gcgucugacccacauaaau

SEQ ID NO: 343940 - RNA, 19 nt, Artificial Sequence
  Description of Artificial Sequence: Synthetic oligonucleotide
  Antisense Strand to SEQ ID NO: 343939
auuuaugugggucagacgc

SEQ ID NO: 343941 - RNA, 19 nt, Artificial Sequence
  Description of Artificial Sequence: Synthetic oligonucleotide
  Sense Strand Starting at position 319 of SEQ ID NO: 318623
ggguuuaauuugucuugcu

SEQ ID NO: 343942 - RNA, 19 nt, Artificial Sequence
  Description of Artificial Sequence: Synthetic oligonucleotide
  Antisense Strand to SEQ ID NO: 343941
agcaagacaaauuaaaccc

SEQ ID NO: 343943 - RNA, 19 nt, Artificial Sequence
  Description of Artificial Sequence: Synthetic oligonucleotide
  Sense Strand Starting at position 319 of SEQ ID NO: 318624
gguuuaauuugucuugcuu

SEQ ID NO: 343944 - RNA, 19 nt, Artificial Sequence
  Description of Artificial Sequence: Synthetic oligonucleotide
  Antisense Strand to SEQ ID NO: 343943
aagcaagacaaauuaaacc

SEQ ID NO: 343945 - RNA, 19 nt, Artificial Sequence
  Description of Artificial Sequence: Synthetic oligonucleotide
  Sense Strand Starting at position 319 of SEQ ID NO: 318674
auugguaagugucuguuga

SEQ ID NO: 343946 - RNA, 19 nt, Artificial Sequence
  Description of Artificial Sequence: Synthetic oligonucleotide
  Antisense Strand to SEQ ID NO: 343945
ucaacagacacuuaccaau

SEQ ID NO: 343947 - RNA, 19 nt, Artificial Sequence
  Description of Artificial Sequence: Synthetic oligonucleotide
  Sense Strand Starting at position 319 of SEQ ID NO: 318712
agaguuaggcacuagcuaa

SEQ ID NO: 343948 - RNA, 19 nt, Artificial Sequence
  Description of Artificial Sequence: Synthetic oligonucleotide
  Antisense Strand to SEQ ID NO: 343947
uuagcuagugccuaacucu

SEQ ID NO: 343949 - RNA, 19 nt, Artificial Sequence
  Description of Artificial Sequence: Synthetic oligonucleotide
  Sense Strand Starting at position 319 of SEQ ID NO: 318789
agcaacauuucuuucguua

SEQ ID NO: 343950 - RNA, 19 nt, Artificial Sequence
  Description of Artificial Sequence: Synthetic oligonucleotide
  Antisense Strand to SEQ ID NO: 343949
uaacgaaagaaauguugcu

SEQ ID NO: 343951 - RNA, 19 nt, Artificial Sequence
  Description of Artificial Sequence: Synthetic oligonucleotide
  Sense Strand Starting at position 319 of SEQ ID NO: 319116
ggguaugguagcuagaugu

SEQ ID NO: 343952 - RNA, 19 nt, Artificial Sequence
  Description of Artificial Sequence: Synthetic oligonucleotide
  Antisense Strand to SEQ ID NO: 343951
acaucuagcuaccauaccc

SEQ ID NO: 343953 - RNA, 19 nt, Artificial Sequence
  Description of Artificial Sequence: Synthetic oligonucleotide
  Sense Strand Starting at position 320 of SEQ ID NO: 315253
gauggagucucacuacuau

SEQ ID NO: 343954 - RNA, 19 nt, Artificial Sequence
  Description of Artificial Sequence: Synthetic oligonucleotide
  Antisense Strand to SEQ ID NO: 343953
auaguagugagacuccauc

SEQ ID NO: 343955 - RNA, 19 nt, Artificial Sequence
  Description of Artificial Sequence: Synthetic oligonucleotide
  Sense Strand Starting at position 320 of SEQ ID NO: 315376
cggugaguuagcuaaacca

SEQ ID NO: 343956 - RNA, 19 nt, Artificial Sequence
  Description of Artificial Sequence: Synthetic oligonucleotide
  Antisense Strand to SEQ ID NO: 343955
ugguuuagcuaacucaccg

SEQ ID NO: 343957 - RNA, 19 nt, Artificial Sequence
  Description of Artificial Sequence: Synthetic oligonucleotide
  Sense Strand Starting at position 320 of SEQ ID NO: 315474
gguagaauuacauggguua

SEQ ID NO: 343958 - RNA, 19 nt, Artificial Sequence
  Description of Artificial Sequence: Synthetic oligonucleotide
  Antisense Strand to SEQ ID NO: 343957
uaacccauguaauucuacc

SEQ ID NO: 343959 - RNA, 19 nt, Artificial Sequence
  Description of Artificial Sequence: Synthetic oligonucleotide
  Sense Strand Starting at position 320 of SEQ ID NO: 315475
guagaauuacauggguuau

SEQ ID NO: 343960 - RNA, 19 nt, Artificial Sequence
  Description of Artificial Sequence: Synthetic oligonucleotide
  Antisense Strand to SEQ ID NO: 343959
auaacccauguaauucuac

SEQ ID NO: 343961 - RNA, 19 nt, Artificial Sequence
  Description of Artificial Sequence: Synthetic oligonucleotide
  Sense Strand Starting at position 320 of SEQ ID NO: 315485
auggguuauggcuaaguuu

SEQ ID NO: 343962 - RNA, 19 nt, Artificial Sequence
  Description of Artificial Sequence: Synthetic oligonucleotide
  Antisense Strand to SEQ ID NO: 343961
aaacuuagccauaacccau

SEQ ID NO: 343963 - RNA, 19 nt, Artificial Sequence
  Description of Artificial Sequence: Synthetic oligonucleotide
  Sense Strand Starting at position 320 of SEQ ID NO: 315569
accacuugaugccugaauu

SEQ ID NO: 343964 - RNA, 19 nt, Artificial Sequence
  Description of Artificial Sequence: Synthetic oligonucleotide
  Antisense Strand to SEQ ID NO: 343963
aauucaggcaucaaguggu

SEQ ID NO: 343965 - RNA, 19 nt, Artificial Sequence
  Description of Artificial Sequence: Synthetic oligonucleotide
  Sense Strand Starting at position 320 of SEQ ID NO: 315570
ccacuugaugccugaauuc

SEQ ID NO: 343966 - RNA, 19 nt, Artificial Sequence
  Description of Artificial Sequence: Synthetic oligonucleotide
  Antisense Strand to SEQ ID NO: 343965
gaauucaggcaucaagugg

SEQ ID NO: 343967 - RNA, 19 nt, Artificial Sequence
  Description of Artificial Sequence: Synthetic oligonucleotide
  Sense Strand Starting at position 320 of SEQ ID NO: 315577
augccugaauuccugaaca

SEQ ID NO: 343968 - RNA, 19 nt, Artificial Sequence
  Description of Artificial Sequence: Synthetic oligonucleotide
  Antisense Strand to SEQ ID NO: 343967
uguucaggaauucaggcau

SEQ ID NO: 343969 - RNA, 19 nt, Artificial Sequence
  Description of Artificial Sequence: Synthetic oligonucleotide
  Sense Strand Starting at position 320 of SEQ ID NO: 315683
gaguguuucccagggaauu

SEQ ID NO: 343970 - RNA, 19 nt, Artificial Sequence
  Description of Artificial Sequence: Synthetic oligonucleotide
  Antisense Strand to SEQ ID NO: 343969
aauucccugggaaacacuc

SEQ ID NO: 343971 - RNA, 19 nt, Artificial Sequence
  Description of Artificial Sequence: Synthetic oligonucleotide
  Sense Strand Starting at position 320 of SEQ ID NO: 315684
aguguuucccagggaauua

SEQ ID NO: 343972 - RNA, 19 nt, Artificial Sequence
  Description of Artificial Sequence: Synthetic oligonucleotide
  Antisense Strand to SEQ ID NO: 343971
uaauucccugggaaacacu

SEQ ID NO: 343973 - RNA, 19 nt, Artificial Sequence
  Description of Artificial Sequence: Synthetic oligonucleotide
  Sense Strand Starting at position 320 of SEQ ID NO: 315685
guguuucccagggaauuaa

SEQ ID NO: 343974 - RNA, 19 nt, Artificial Sequence
  Description of Artificial Sequence: Synthetic oligonucleotide
  Antisense Strand to SEQ ID NO: 343973
uuaauucccugggaaacac

SEQ ID NO: 343975 - RNA, 19 nt, Artificial Sequence
  Description of Artificial Sequence: Synthetic oligonucleotide
  Sense Strand Starting at position 320 of SEQ ID NO: 315695
gggaauuaacgucauuacu

SEQ ID NO: 343976 - RNA, 19 nt, Artificial Sequence
  Description of Artificial Sequence: Synthetic oligonucleotide
  Antisense Strand to SEQ ID NO: 343975
aguaaugacguuaauuccc

SEQ ID NO: 343977 - RNA, 19 nt, Artificial Sequence
  Description of Artificial Sequence: Synthetic oligonucleotide
  Sense Strand Starting at position 320 of SEQ ID NO: 315709
uuacuucgagcuuacuaua

SEQ ID NO: 343978 - RNA, 19 nt, Artificial Sequence
  Description of Artificial Sequence: Synthetic oligonucleotide
  Antisense Strand to SEQ ID NO: 343977
uauaguaagcucgaaguaa

SEQ ID NO: 343979 - RNA, 19 nt, Artificial Sequence
  Description of Artificial Sequence: Synthetic oligonucleotide
  Sense Strand Starting at position 320 of SEQ ID NO: 315714
ucgagcuuacuauacuuau

SEQ ID NO: 343980 - RNA, 19 nt, Artificial Sequence
  Description of Artificial Sequence: Synthetic oligonucleotide
  Antisense Strand to SEQ ID NO: 343979
auaaguauaguaagcucga

SEQ ID NO: 343981 - RNA, 19 nt, Artificial Sequence
  Description of Artificial Sequence: Synthetic oligonucleotide
  Sense Strand Starting at position 320 of SEQ ID NO: 315737
augcuaagagucuggaaac

SEQ ID NO: 343982 - RNA, 19 nt, Artificial Sequence
  Description of Artificial Sequence: Synthetic oligonucleotide
  Antisense Strand to SEQ ID NO: 343981
guuuccagacucuuagcau

SEQ ID NO: 343983 - RNA, 19 nt, Artificial Sequence
  Description of Artificial Sequence: Synthetic oligonucleotide
  Sense Strand Starting at position 320 of SEQ ID NO: 315761
gaguaaugucuaugaccau

SEQ ID NO: 343984 - RNA, 19 nt, Artificial Sequence
  Description of Artificial Sequence: Synthetic oligonucleotide
  Antisense Strand to SEQ ID NO: 343983
auggucauagacauuacuc

SEQ ID NO: 343985 - RNA, 19 nt, Artificial Sequence
  Description of Artificial Sequence: Synthetic oligonucleotide
  Sense Strand Starting at position 320 of SEQ ID NO: 315795
acuagaaacuguuuagacu

SEQ ID NO: 343986 - RNA, 19 nt, Artificial Sequence
  Description of Artificial Sequence: Synthetic oligonucleotide
  Antisense Strand to SEQ ID NO: 343985
agucuaaacaguuucuagu

SEQ ID NO: 343987 - RNA, 19 nt, Artificial Sequence
  Description of Artificial Sequence: Synthetic oligonucleotide
  Sense Strand Starting at position 320 of SEQ ID NO: 315815
ccugguggaucucugaaca

SEQ ID NO: 343988 - RNA, 19 nt, Artificial Sequence
  Description of Artificial Sequence: Synthetic oligonucleotide
  Antisense Strand to SEQ ID NO: 343987
uguucagagauccaccagg

SEQ ID NO: 343989 - RNA, 19 nt, Artificial Sequence
  Description of Artificial Sequence: Synthetic oligonucleotide
  Sense Strand Starting at position 320 of SEQ ID NO: 315993
ugggacuagaagugucauu

SEQ ID NO: 343990 - RNA, 19 nt, Artificial Sequence
  Description of Artificial Sequence: Synthetic oligonucleotide
  Antisense Strand to SEQ ID NO: 343989
aaugacacuucuaguccca

SEQ ID NO: 343991 - RNA, 19 nt, Artificial Sequence
  Description of Artificial Sequence: Synthetic oligonucleotide
  Sense Strand Starting at position 320 of SEQ ID NO: 316047
ggagcauucccuuaacaca

SEQ ID NO: 343992 - RNA, 19 nt, Artificial Sequence
  Description of Artificial Sequence: Synthetic oligonucleotide
  Antisense Strand to SEQ ID NO: 343991
uguguuaagggaaugcucc

SEQ ID NO: 343993 - RNA, 19 nt, Artificial Sequence
  Description of Artificial Sequence: Synthetic oligonucleotide
  Sense Strand Starting at position 320 of SEQ ID NO: 316087
caaagaggccuuuauguuc

SEQ ID NO: 343994 - RNA, 19 nt, Artificial Sequence
  Description of Artificial Sequence: Synthetic oligonucleotide
  Antisense Strand to SEQ ID NO: 343993
gaacauaaaggccucuuug

SEQ ID NO: 343995 - RNA, 19 nt, Artificial Sequence
  Description of Artificial Sequence: Synthetic oligonucleotide
  Sense Strand Starting at position 320 of SEQ ID NO: 316224
agcagagucagguacuuaa

SEQ ID NO: 343996 - RNA, 19 nt, Artificial Sequence
  Description of Artificial Sequence: Synthetic oligonucleotide
  Antisense Strand to SEQ ID NO: 343995
uuaaguaccugacucugcu

SEQ ID NO: 343997 - RNA, 19 nt, Artificial Sequence
  Description of Artificial Sequence: Synthetic oligonucleotide
  Sense Strand Starting at position 320 of SEQ ID NO: 316227
agagucagguacuuaauua

SEQ ID NO: 343998 - RNA, 19 nt, Artificial Sequence
  Description of Artificial Sequence: Synthetic oligonucleotide
  Antisense Strand to SEQ ID NO: 343997
uaauuaaguaccugacucu

SEQ ID NO: 343999 - RNA, 19 nt, Artificial Sequence
  Description of Artificial Sequence: Synthetic oligonucleotide
  Sense Strand Starting at position 320 of SEQ ID NO: 316234
gguacuuaauuaccaaagu

SEQ ID NO: 344000 - RNA, 19 nt, Artificial Sequence
  Description of Artificial Sequence: Synthetic oligonucleotide
  Antisense Strand to SEQ ID NO: 343999
acuuugguaauuaaguacc

SEQ ID NO: 344001 - RNA, 19 nt, Artificial Sequence
  Description of Artificial Sequence: Synthetic oligonucleotide
  Sense Strand Starting at position 320 of SEQ ID NO: 316558
gggaaacucuccuucucca

SEQ ID NO: 344002 - RNA, 19 nt, Artificial Sequence
  Description of Artificial Sequence: Synthetic oligonucleotide
  Antisense Strand to SEQ ID NO: 344001
uggagaaggagaguuuccc

SEQ ID NO: 344003 - RNA, 19 nt, Artificial Sequence
  Description of Artificial Sequence: Synthetic oligonucleotide
  Sense Strand Starting at position 320 of SEQ ID NO: 316700
gggaaagucuuuccuucuc

SEQ ID NO: 344004 - RNA, 19 nt, Artificial Sequence
  Description of Artificial Sequence: Synthetic oligonucleotide
  Antisense Strand to SEQ ID NO: 344003
gagaaggaaagacuuuccc

SEQ ID NO: 344005 - RNA, 19 nt, Artificial Sequence
  Description of Artificial Sequence: Synthetic oligonucleotide
  Sense Strand Starting at position 320 of SEQ ID NO: 317631
ggcugaaacggaugguuga

SEQ ID NO: 344006 - RNA, 19 nt, Artificial Sequence
  Description of Artificial Sequence: Synthetic oligonucleotide
  Antisense Strand to SEQ ID NO: 344005
ucaaccauccguuucagcc

SEQ ID NO: 344007 - RNA, 19 nt, Artificial Sequence
  Description of Artificial Sequence: Synthetic oligonucleotide
  Sense Strand Starting at position 320 of SEQ ID NO: 317761
guaucagaccuacaucagu

SEQ ID NO: 344008 - RNA, 19 nt, Artificial Sequence
  Description of Artificial Sequence: Synthetic oligonucleotide
  Antisense Strand to SEQ ID NO: 344007
acugauguaggucugauac

SEQ ID NO: 344009 - RNA, 19 nt, Artificial Sequence
  Description of Artificial Sequence: Synthetic oligonucleotide
  Sense Strand Starting at position 320 of SEQ ID NO: 317866
accugucuacugggagaca

SEQ ID NO: 344010 - RNA, 19 nt, Artificial Sequence
  Description of Artificial Sequence: Synthetic oligonucleotide
  Antisense Strand to SEQ ID NO: 344009
ugucucccaguagacaggu

SEQ ID NO: 344011 - RNA, 19 nt, Artificial Sequence
  Description of Artificial Sequence: Synthetic oligonucleotide
  Sense Strand Starting at position 320 of SEQ ID NO: 318119
aggauucugagcugaggau

SEQ ID NO: 344012 - RNA, 19 nt, Artificial Sequence
  Description of Artificial Sequence: Synthetic oligonucleotide
  Antisense Strand to SEQ ID NO: 344011
auccucagcucagaauccu

SEQ ID NO: 344013 - RNA, 19 nt, Artificial Sequence
  Description of Artificial Sequence: Synthetic oligonucleotide
  Sense Strand Starting at position 320 of SEQ ID NO: 318169
agaagacuccuguggagua

SEQ ID NO: 344014 - RNA, 19 nt, Artificial Sequence
  Description of Artificial Sequence: Synthetic oligonucleotide
  Antisense Strand to SEQ ID NO: 344013
uacuccacaggagucuucu

SEQ ID NO: 344015 - RNA, 19 nt, Artificial Sequence
  Description of Artificial Sequence: Synthetic oligonucleotide
  Sense Strand Starting at position 320 of SEQ ID NO: 318211
guaguauccaguuggagag

SEQ ID NO: 344016 - RNA, 19 nt, Artificial Sequence
  Description of Artificial Sequence: Synthetic oligonucleotide
  Antisense Strand to SEQ ID NO: 344015
cucuccaacuggauacuac

SEQ ID NO: 344017 - RNA, 19 nt, Artificial Sequence
  Description of Artificial Sequence: Synthetic oligonucleotide
  Sense Strand Starting at position 320 of SEQ ID NO: 318212
uaguauccaguuggagaga

SEQ ID NO: 344018 - RNA, 19 nt, Artificial Sequence
  Description of Artificial Sequence: Synthetic oligonucleotide
  Antisense Strand to SEQ ID NO: 344017
ucucuccaacuggauacua

SEQ ID NO: 344019 - RNA, 19 nt, Artificial Sequence
  Description of Artificial Sequence: Synthetic oligonucleotide
  Sense Strand Starting at position 320 of SEQ ID NO: 318380
gcauuaaacgaccagauca

SEQ ID NO: 344020 - RNA, 19 nt, Artificial Sequence
  Description of Artificial Sequence: Synthetic oligonucleotide
  Antisense Strand to SEQ ID NO: 344019
ugaucuggucguuuaaugc

SEQ ID NO: 344021 - RNA, 19 nt, Artificial Sequence
  Description of Artificial Sequence: Synthetic oligonucleotide
  Sense Strand Starting at position 320 of SEQ ID NO: 318434
acagaacuucuuugguaac

SEQ ID NO: 344022 - RNA, 19 nt, Artificial Sequence
  Description of Artificial Sequence: Synthetic oligonucleotide
  Antisense Strand to SEQ ID NO: 344021
guuaccaaagaaguucugu

SEQ ID NO: 344023 - RNA, 19 nt, Artificial Sequence
  Description of Artificial Sequence: Synthetic oligonucleotide
  Sense Strand Starting at position 320 of SEQ ID NO: 318679
ggagguucuccaggaauuc

SEQ ID NO: 344024 - RNA, 19 nt, Artificial Sequence
  Description of Artificial Sequence: Synthetic oligonucleotide
  Antisense Strand to SEQ ID NO: 344023
gaauuccuggagaaccucc

SEQ ID NO: 344025 - RNA, 19 nt, Artificial Sequence
  Description of Artificial Sequence: Synthetic oligonucleotide
  Sense Strand Starting at position 320 of SEQ ID NO: 318731
ggcguuaaugaggaggauu

SEQ ID NO: 344026 - RNA, 19 nt, Artificial Sequence
  Description of Artificial Sequence: Synthetic oligonucleotide
  Antisense Strand to SEQ ID NO: 344025
aauccuccucauuaacgcc

SEQ ID NO: 344027 - RNA, 19 nt, Artificial Sequence
  Description of Artificial Sequence: Synthetic oligonucleotide
  Sense Strand Starting at position 320 of SEQ ID NO: 318733
cguuaaugaggaggauuca

SEQ ID NO: 344028 - RNA, 19 nt, Artificial Sequence
  Description of Artificial Sequence: Synthetic oligonucleotide
  Antisense Strand to SEQ ID NO: 344027
ugaauccuccucauuaacg

SEQ ID NO: 344029 - RNA, 19 nt, Artificial Sequence
  Description of Artificial Sequence: Synthetic oligonucleotide
  Sense Strand Starting at position 320 of SEQ ID NO: 318822
agguacaggccuuaguuau

SEQ ID NO: 344030 - RNA, 19 nt, Artificial Sequence
  Description of Artificial Sequence: Synthetic oligonucleotide
  Antisense Strand to SEQ ID NO: 344029
auaacuaaggccuguaccu

SEQ ID NO: 344031 - RNA, 19 nt, Artificial Sequence
  Description of Artificial Sequence: Synthetic oligonucleotide
  Sense Strand Starting at position 320 of SEQ ID NO: 318967
uuaggcuuuccugaccauu

SEQ ID NO: 344032 - RNA, 19 nt, Artificial Sequence
  Description of Artificial Sequence: Synthetic oligonucleotide
  Antisense Strand to SEQ ID NO: 344031
aauggucaggaaagccuaa

SEQ ID NO: 344033 - RNA, 19 nt, Artificial Sequence
  Description of Artificial Sequence: Synthetic oligonucleotide
  Sense Strand Starting at position 321 of SEQ ID NO: 315241
cguuauaaagaauguccca

SEQ ID NO: 344034 - RNA, 19 nt, Artificial Sequence
  Description of Artificial Sequence: Synthetic oligonucleotide
  Antisense Strand to SEQ ID NO: 344033
ugggacauucuuuauaacg

SEQ ID NO: 344035 - RNA, 19 nt, Artificial Sequence
  Description of Artificial Sequence: Synthetic oligonucleotide
  Sense Strand Starting at position 321 of SEQ ID NO: 315329
augcuuucugguuaaauug

SEQ ID NO: 344036 - RNA, 19 nt, Artificial Sequence
  Description of Artificial Sequence: Synthetic oligonucleotide
  Antisense Strand to SEQ ID NO: 344035
caauuuaaccagaaagcau

SEQ ID NO: 344037 - RNA, 19 nt, Artificial Sequence
  Description of Artificial Sequence: Synthetic oligonucleotide
  Sense Strand Starting at position 321 of SEQ ID NO: 315374
uuaacauggcaaggugaau

SEQ ID NO: 344038 - RNA, 19 nt, Artificial Sequence
  Description of Artificial Sequence: Synthetic oligonucleotide
  Antisense Strand to SEQ ID NO: 344037
auucaccuugccauguuaa

SEQ ID NO: 344039 - RNA, 19 nt, Artificial Sequence
  Description of Artificial Sequence: Synthetic oligonucleotide
  Sense Strand Starting at position 321 of SEQ ID NO: 315550
ugauuaauucuugguucuc

SEQ ID NO: 344040 - RNA, 19 nt, Artificial Sequence
  Description of Artificial Sequence: Synthetic oligonucleotide
  Antisense Strand to SEQ ID NO: 344039
gagaaccaagaauuaauca

SEQ ID NO: 344041 - RNA, 19 nt, Artificial Sequence
  Description of Artificial Sequence: Synthetic oligonucleotide
  Sense Strand Starting at position 321 of SEQ ID NO: 315645
cugguucuuaguggaaacu

SEQ ID NO: 344042 - RNA, 19 nt, Artificial Sequence
  Description of Artificial Sequence: Synthetic oligonucleotide
  Antisense Strand to SEQ ID NO: 344041
aguuuccacuaagaaccag

SEQ ID NO: 344043 - RNA, 19 nt, Artificial Sequence
  Description of Artificial Sequence: Synthetic oligonucleotide
  Sense Strand Starting at position 321 of SEQ ID NO: 315646
ugguucuuaguggaaacuu

SEQ ID NO: 344044 - RNA, 19 nt, Artificial Sequence
  Description of Artificial Sequence: Synthetic oligonucleotide
  Antisense Strand to SEQ ID NO: 344043
aaguuuccacuaagaacca

SEQ ID NO: 344045 - RNA, 19 nt, Artificial Sequence
  Description of Artificial Sequence: Synthetic oligonucleotide
  Sense Strand Starting at position 321 of SEQ ID NO: 315723
guagcuucgcauuaagaaa

SEQ ID NO: 344046 - RNA, 19 nt, Artificial Sequence
  Description of Artificial Sequence: Synthetic oligonucleotide
  Antisense Strand to SEQ ID NO: 344045
uuucuuaaugcgaagcuac

SEQ ID NO: 344047 - RNA, 19 nt, Artificial Sequence
  Description of Artificial Sequence: Synthetic oligonucleotide
  Sense Strand Starting at position 321 of SEQ ID NO: 315772
aggccacuacaguauuaau

SEQ ID NO: 344048 - RNA, 19 nt, Artificial Sequence
  Description of Artificial Sequence: Synthetic oligonucleotide
  Antisense Strand to SEQ ID NO: 344047
auuaauacuguaguggccu

SEQ ID NO: 344049 - RNA, 19 nt, Artificial Sequence
  Description of Artificial Sequence: Synthetic oligonucleotide
  Sense Strand Starting at position 321 of SEQ ID NO: 315796
cgaaaucugucaccaauac

SEQ ID NO: 344050 - RNA, 19 nt, Artificial Sequence
  Description of Artificial Sequence: Synthetic oligonucleotide
  Antisense Strand to SEQ ID NO: 344049
guauuggugacagauuucg

SEQ ID NO: 344051 - RNA, 19 nt, Artificial Sequence
  Description of Artificial Sequence: Synthetic oligonucleotide
  Sense Strand Starting at position 321 of SEQ ID NO: 315935
acgucaagaauagauguuu

SEQ ID NO: 344052 - RNA, 19 nt, Artificial Sequence
  Description of Artificial Sequence: Synthetic oligonucleotide
  Antisense Strand to SEQ ID NO: 344051
aaacaucuauucuugacgu

SEQ ID NO: 344053 - RNA, 19 nt, Artificial Sequence
  Description of Artificial Sequence: Synthetic oligonucleotide
  Sense Strand Starting at position 321 of SEQ ID NO: 316010
agcaaaugauguucccuau

SEQ ID NO: 344054 - RNA, 19 nt, Artificial Sequence
  Description of Artificial Sequence: Synthetic oligonucleotide
  Antisense Strand to SEQ ID NO: 344053
auagggaacaucauuugcu

SEQ ID NO: 344055 - RNA, 19 nt, Artificial Sequence
  Description of Artificial Sequence: Synthetic oligonucleotide
  Sense Strand Starting at position 321 of SEQ ID NO: 316053
ccaacuguuccagaggcaa

SEQ ID NO: 344056 - RNA, 19 nt, Artificial Sequence
  Description of Artificial Sequence: Synthetic oligonucleotide
  Antisense Strand to SEQ ID NO: 344055
uugccucuggaacaguugg

SEQ ID NO: 344057 - RNA, 19 nt, Artificial Sequence
  Description of Artificial Sequence: Synthetic oligonucleotide
  Sense Strand Starting at position 321 of SEQ ID NO: 317380
gcucuuugggacugaaaug

SEQ ID NO: 344058 - RNA, 19 nt, Artificial Sequence
  Description of Artificial Sequence: Synthetic oligonucleotide
  Antisense Strand to SEQ ID NO: 344057
cauuucagucccaaagagc

SEQ ID NO: 344059 - RNA, 19 nt, Artificial Sequence
  Description of Artificial Sequence: Synthetic oligonucleotide
  Sense Strand Starting at position 321 of SEQ ID NO: 317389
gacugaaauggcuguuuau

SEQ ID NO: 344060 - RNA, 19 nt, Artificial Sequence
  Description of Artificial Sequence: Synthetic oligonucleotide
  Antisense Strand to SEQ ID NO: 344059
auaaacagccauuucaguc

SEQ ID NO: 344061 - RNA, 19 nt, Artificial Sequence
  Description of Artificial Sequence: Synthetic oligonucleotide
  Sense Strand Starting at position 321 of SEQ ID NO: 317392
ugaaauggcuguuuaugaa

SEQ ID NO: 344062 - RNA, 19 nt, Artificial Sequence
  Description of Artificial Sequence: Synthetic oligonucleotide
  Antisense Strand to SEQ ID NO: 344061
uucauaaacagccauuuca

SEQ ID NO: 344063 - RNA, 19 nt, Artificial Sequence
  Description of Artificial Sequence: Synthetic oligonucleotide
  Sense Strand Starting at position 321 of SEQ ID NO: 317402
guuuaugaauccuugucaa

SEQ ID NO: 344064 - RNA, 19 nt, Artificial Sequence
  Description of Artificial Sequence: Synthetic oligonucleotide
  Antisense Strand to SEQ ID NO: 344063
uugacaaggauucauaaac

SEQ ID NO: 344065 - RNA, 19 nt, Artificial Sequence
  Description of Artificial Sequence: Synthetic oligonucleotide
  Sense Strand Starting at position 321 of SEQ ID NO: 317444
ggaauaaauuauucgugga

SEQ ID NO: 344066 - RNA, 19 nt, Artificial Sequence
  Description of Artificial Sequence: Synthetic oligonucleotide
  Antisense Strand to SEQ ID NO: 344065
uccacgaauaauuuauucc

SEQ ID NO: 344067 - RNA, 19 nt, Artificial Sequence
  Description of Artificial Sequence: Synthetic oligonucleotide
  Sense Strand Starting at position 321 of SEQ ID NO: 317448
uaaauuauucguggaauga

SEQ ID NO: 344068 - RNA, 19 nt, Artificial Sequence
  Description of Artificial Sequence: Synthetic oligonucleotide
  Antisense Strand to SEQ ID NO: 344067
ucauuccacgaauaauuua

SEQ ID NO: 344069 - RNA, 19 nt, Artificial Sequence
  Description of Artificial Sequence: Synthetic oligonucleotide
  Sense Strand Starting at position 321 of SEQ ID NO: 317452
uuauucguggaaugacaca

SEQ ID NO: 344070 - RNA, 19 nt, Artificial Sequence
  Description of Artificial Sequence: Synthetic oligonucleotide
  Antisense Strand to SEQ ID NO: 344069
ugugucauuccacgaauaa

SEQ ID NO: 344071 - RNA, 19 nt, Artificial Sequence
  Description of Artificial Sequence: Synthetic oligonucleotide
  Sense Strand Starting at position 321 of SEQ ID NO: 317928
cgcaaauaaguagacuauu

SEQ ID NO: 344072 - RNA, 19 nt, Artificial Sequence
  Description of Artificial Sequence: Synthetic oligonucleotide
  Antisense Strand to SEQ ID NO: 344071
aauagucuacuuauuugcg

SEQ ID NO: 344073 - RNA, 19 nt, Artificial Sequence
  Description of Artificial Sequence: Synthetic oligonucleotide
  Sense Strand Starting at position 321 of SEQ ID NO: 317991
ugacuagcccaacaaguau

SEQ ID NO: 344074 - RNA, 19 nt, Artificial Sequence
  Description of Artificial Sequence: Synthetic oligonucleotide
  Antisense Strand to SEQ ID NO: 344073
auacuuguugggcuaguca

SEQ ID NO: 344075 - RNA, 19 nt, Artificial Sequence
  Description of Artificial Sequence: Synthetic oligonucleotide
  Sense Strand Starting at position 321 of SEQ ID NO: 318006
guaugacaacuccgauauc

SEQ ID NO: 344076 - RNA, 19 nt, Artificial Sequence
  Description of Artificial Sequence: Synthetic oligonucleotide
  Antisense Strand to SEQ ID NO: 344075
gauaucggaguugucauac

SEQ ID NO: 344077 - RNA, 19 nt, Artificial Sequence
  Description of Artificial Sequence: Synthetic oligonucleotide
  Sense Strand Starting at position 321 of SEQ ID NO: 318139
gucugugacucacucaaca

SEQ ID NO: 344078 - RNA, 19 nt, Artificial Sequence
  Description of Artificial Sequence: Synthetic oligonucleotide
  Antisense Strand to SEQ ID NO: 344077
uguugagugagucacagac

SEQ ID NO: 344079 - RNA, 19 nt, Artificial Sequence
  Description of Artificial Sequence: Synthetic oligonucleotide
  Sense Strand Starting at position 321 of SEQ ID NO: 318212
accuguggaucucugaaca

SEQ ID NO: 344080 - RNA, 19 nt, Artificial Sequence
  Description of Artificial Sequence: Synthetic oligonucleotide
  Antisense Strand to SEQ ID NO: 344079
uguucagagauccacaggu

SEQ ID NO: 344081 - RNA, 19 nt, Artificial Sequence
  Description of Artificial Sequence: Synthetic oligonucleotide
  Sense Strand Starting at position 321 of SEQ ID NO: 318299
ccaggauacuaacuaguau

SEQ ID NO: 344082 - RNA, 19 nt, Artificial Sequence
  Description of Artificial Sequence: Synthetic oligonucleotide
  Antisense Strand to SEQ ID NO: 344081
auacuaguuaguauccugg

SEQ ID NO: 344083 - RNA, 19 nt, Artificial Sequence
  Description of Artificial Sequence: Synthetic oligonucleotide
  Sense Strand Starting at position 321 of SEQ ID NO: 318327
accuacuauguugaguaua

SEQ ID NO: 344084 - RNA, 19 nt, Artificial Sequence
  Description of Artificial Sequence: Synthetic oligonucleotide
  Antisense Strand to SEQ ID NO: 344083
uauacucaacauaguaggu

SEQ ID NO: 344085 - RNA, 19 nt, Artificial Sequence
  Description of Artificial Sequence: Synthetic oligonucleotide
  Sense Strand Starting at position 321 of SEQ ID NO: 318329
cuacuauguugaguauaaa

SEQ ID NO: 344086 - RNA, 19 nt, Artificial Sequence
  Description of Artificial Sequence: Synthetic oligonucleotide
  Antisense Strand to SEQ ID NO: 344085
uuuauacucaacauaguag

SEQ ID NO: 344087 - RNA, 19 nt, Artificial Sequence
  Description of Artificial Sequence: Synthetic oligonucleotide
  Sense Strand Starting at position 321 of SEQ ID NO: 318406
gcgaggugucacgccugua

SEQ ID NO: 344088 - RNA, 19 nt, Artificial Sequence
  Description of Artificial Sequence: Synthetic oligonucleotide
  Antisense Strand to SEQ ID NO: 344087
uacaggcgugacaccucgc

SEQ ID NO: 344089 - RNA, 19 nt, Artificial Sequence
  Description of Artificial Sequence: Synthetic oligonucleotide
  Sense Strand Starting at position 321 of SEQ ID NO: 318452
ggcuaaguucaaggaggau

SEQ ID NO: 344090 - RNA, 19 nt, Artificial Sequence
  Description of Artificial Sequence: Synthetic oligonucleotide
  Antisense Strand to SEQ ID NO: 344089
auccuccuugaacuuagcc

SEQ ID NO: 344091 - RNA, 19 nt, Artificial Sequence
  Description of Artificial Sequence: Synthetic oligonucleotide
  Sense Strand Starting at position 321 of SEQ ID NO: 318502
cuaugaucgcgccugcgaa

SEQ ID NO: 344092 - RNA, 19 nt, Artificial Sequence
  Description of Artificial Sequence: Synthetic oligonucleotide
  Antisense Strand to SEQ ID NO: 344091
uucgcaggcgcgaucauag

SEQ ID NO: 344093 - RNA, 19 nt, Artificial Sequence
  Description of Artificial Sequence: Synthetic oligonucleotide
  Sense Strand Starting at position 321 of SEQ ID NO: 318688
aaguguuagcgucccuguu

SEQ ID NO: 344094 - RNA, 19 nt, Artificial Sequence
  Description of Artificial Sequence: Synthetic oligonucleotide
  Antisense Strand to SEQ ID NO: 344093
aacagggacgcuaacacuu

SEQ ID NO: 344095 - RNA, 19 nt, Artificial Sequence
  Description of Artificial Sequence: Synthetic oligonucleotide
  Sense Strand Starting at position 321 of SEQ ID NO: 318689
aguguuagcgucccuguuu

SEQ ID NO: 344096 - RNA, 19 nt, Artificial Sequence
  Description of Artificial Sequence: Synthetic oligonucleotide
  Antisense Strand to SEQ ID NO: 344095
aaacagggacgcuaacacu

SEQ ID NO: 344097 - RNA, 19 nt, Artificial Sequence
  Description of Artificial Sequence: Synthetic oligonucleotide
  Sense Strand Starting at position 321 of SEQ ID NO: 318709
caaggagguggucaaguau

SEQ ID NO: 344098 - RNA, 19 nt, Artificial Sequence
  Description of Artificial Sequence: Synthetic oligonucleotide
  Antisense Strand to SEQ ID NO: 344097
auacuugaccaccuccuug

SEQ ID NO: 344099 - RNA, 19 nt, Artificial Sequence
  Description of Artificial Sequence: Synthetic oligonucleotide
  Sense Strand Starting at position 321 of SEQ ID NO: 318744
ugacguuugcuggagacuu

SEQ ID NO: 344100 - RNA, 19 nt, Artificial Sequence
  Description of Artificial Sequence: Synthetic oligonucleotide
  Antisense Strand to SEQ ID NO: 344099
aagucuccagcaaacguca

SEQ ID NO: 344101 - RNA, 19 nt, Artificial Sequence
  Description of Artificial Sequence: Synthetic oligonucleotide
  Sense Strand Starting at position 321 of SEQ ID NO: 318752
gcuggagacuuccuuuaga

SEQ ID NO: 344102 - RNA, 19 nt, Artificial Sequence
  Description of Artificial Sequence: Synthetic oligonucleotide
  Antisense Strand to SEQ ID NO: 344101
ucuaaaggaagucuccagc

SEQ ID NO: 344103 - RNA, 19 nt, Artificial Sequence
  Description of Artificial Sequence: Synthetic oligonucleotide
  Sense Strand Starting at position 321 of SEQ ID NO: 318808
caagucuuuggccaaagua

SEQ ID NO: 344104 - RNA, 19 nt, Artificial Sequence
  Description of Artificial Sequence: Synthetic oligonucleotide
  Antisense Strand to SEQ ID NO: 344103
uacuuuggccaaagacuug

SEQ ID NO: 344105 - RNA, 19 nt, Artificial Sequence
  Description of Artificial Sequence: Synthetic oligonucleotide
  Sense Strand Starting at position 321 of SEQ ID NO: 318844
agagaacugcugugguuaa

SEQ ID NO: 344106 - RNA, 19 nt, Artificial Sequence
  Description of Artificial Sequence: Synthetic oligonucleotide
  Antisense Strand to SEQ ID NO: 344105
uuaaccacagcaguucucu

SEQ ID NO: 344107 - RNA, 19 nt, Artificial Sequence
  Description of Artificial Sequence: Synthetic oligonucleotide
  Sense Strand Starting at position 321 of SEQ ID NO: 319032
guuucugguaaaugagagu

SEQ ID NO: 344108 - RNA, 19 nt, Artificial Sequence
  Description of Artificial Sequence: Synthetic oligonucleotide
  Antisense Strand to SEQ ID NO: 344107
acucucauuuaccagaaac

SEQ ID NO: 344109 - RNA, 19 nt, Artificial Sequence
  Description of Artificial Sequence: Synthetic oligonucleotide
  Sense Strand Starting at position 321 of SEQ ID NO: 319038
gguaaaugagagugaugau

SEQ ID NO: 344110 - RNA, 19 nt, Artificial Sequence
  Description of Artificial Sequence: Synthetic oligonucleotide
  Antisense Strand to SEQ ID NO: 344109
aucaucacucucauuuacc

SEQ ID NO: 344111 - RNA, 19 nt, Artificial Sequence
  Description of Artificial Sequence: Synthetic oligonucleotide
  Sense Strand Starting at position 321 of SEQ ID NO: 319047
gagugaugauuacuaacuc

SEQ ID NO: 344112 - RNA, 19 nt, Artificial Sequence
  Description of Artificial Sequence: Synthetic oligonucleotide
  Antisense Strand to SEQ ID NO: 344111
gaguuaguaaucaucacuc

SEQ ID NO: 344113 - RNA, 19 nt, Artificial Sequence
  Description of Artificial Sequence: Synthetic oligonucleotide
  Sense Strand Starting at position 322 of SEQ ID NO: 315359
uguaguaaugccuauagug

SEQ ID NO: 344114 - RNA, 19 nt, Artificial Sequence
  Description of Artificial Sequence: Synthetic oligonucleotide
  Antisense Strand to SEQ ID NO: 344113
cacuauaggcauuacuaca

SEQ ID NO: 344115 - RNA, 19 nt, Artificial Sequence
  Description of Artificial Sequence: Synthetic oligonucleotide
  Sense Strand Starting at position 322 of SEQ ID NO: 315361
uaguaaugccuauagugcu

SEQ ID NO: 344116 - RNA, 19 nt, Artificial Sequence
  Description of Artificial Sequence: Synthetic oligonucleotide
  Antisense Strand to SEQ ID NO: 344115
agcacuauaggcauuacua

SEQ ID NO: 344117 - RNA, 19 nt, Artificial Sequence
  Description of Artificial Sequence: Synthetic oligonucleotide
  Sense Strand Starting at position 322 of SEQ ID NO: 315380
ggguguaaacguuaagggu

SEQ ID NO: 344118 - RNA, 19 nt, Artificial Sequence
  Description of Artificial Sequence: Synthetic oligonucleotide
  Antisense Strand to SEQ ID NO: 344117
acccuuaacguuuacaccc

SEQ ID NO: 344119 - RNA, 19 nt, Artificial Sequence
  Description of Artificial Sequence: Synthetic oligonucleotide
  Sense Strand Starting at position 322 of SEQ ID NO: 315384
guaaacguuaagggugauu

SEQ ID NO: 344120 - RNA, 19 nt, Artificial Sequence
  Description of Artificial Sequence: Synthetic oligonucleotide
  Antisense Strand to SEQ ID NO: 344119
aaucacccuuaacguuuac

SEQ ID NO: 344121 - RNA, 19 nt, Artificial Sequence
  Description of Artificial Sequence: Synthetic oligonucleotide
  Sense Strand Starting at position 322 of SEQ ID NO: 315389
cguuaagggugauuggcaa

SEQ ID NO: 344122 - RNA, 19 nt, Artificial Sequence
  Description of Artificial Sequence: Synthetic oligonucleotide
  Antisense Strand to SEQ ID NO: 344121
uugccaaucacccuuaacg

SEQ ID NO: 344123 - RNA, 19 nt, Artificial Sequence
  Description of Artificial Sequence: Synthetic oligonucleotide
  Sense Strand Starting at position 322 of SEQ ID NO: 315423
ggaguacgaccgggaaguu

SEQ ID NO: 344124 - RNA, 19 nt, Artificial Sequence
  Description of Artificial Sequence: Synthetic oligonucleotide
  Antisense Strand to SEQ ID NO: 344123
aacuucccggucguacucc

SEQ ID NO: 344125 - RNA, 19 nt, Artificial Sequence
  Description of Artificial Sequence: Synthetic oligonucleotide
  Sense Strand Starting at position 322 of SEQ ID NO: 315478
ucauauucggaauggaauc

SEQ ID NO: 344126 - RNA, 19 nt, Artificial Sequence
  Description of Artificial Sequence: Synthetic oligonucleotide
  Antisense Strand to SEQ ID NO: 344125
gauuccauuccgaauauga

SEQ ID NO: 344127 - RNA, 19 nt, Artificial Sequence
  Description of Artificial Sequence: Synthetic oligonucleotide
  Sense Strand Starting at position 322 of SEQ ID NO: 315490
uggaaucuccagcaaaugu

SEQ ID NO: 344128 - RNA, 19 nt, Artificial Sequence
  Description of Artificial Sequence: Synthetic oligonucleotide
  Antisense Strand to SEQ ID NO: 344127
acauuugcuggagauucca

SEQ ID NO: 344129 - RNA, 19 nt, Artificial Sequence
  Description of Artificial Sequence: Synthetic oligonucleotide
  Sense Strand Starting at position 322 of SEQ ID NO: 315534
aguaccuucccauguuaga

SEQ ID NO: 344130 - RNA, 19 nt, Artificial Sequence
  Description of Artificial Sequence: Synthetic oligonucleotide
  Antisense Strand to SEQ ID NO: 344129
ucuaacaugggaagguacu

SEQ ID NO: 344131 - RNA, 19 nt, Artificial Sequence
  Description of Artificial Sequence: Synthetic oligonucleotide
  Sense Strand Starting at position 322 of SEQ ID NO: 315550
agacacaugccuggaauga

SEQ ID NO: 344132 - RNA, 19 nt, Artificial Sequence
  Description of Artificial Sequence: Synthetic oligonucleotide
  Antisense Strand to SEQ ID NO: 344131
ucauuccaggcaugugucu

SEQ ID NO: 344133 - RNA, 19 nt, Artificial Sequence
  Description of Artificial Sequence: Synthetic oligonucleotide
  Sense Strand Starting at position 322 of SEQ ID NO: 315619
augaccaaaccucgacauu

SEQ ID NO: 344134 - RNA, 19 nt, Artificial Sequence
  Description of Artificial Sequence: Synthetic oligonucleotide
  Antisense Strand to SEQ ID NO: 344133
aaugucgagguuuggucau

SEQ ID NO: 344135 - RNA, 19 nt, Artificial Sequence
  Description of Artificial Sequence: Synthetic oligonucleotide
  Sense Strand Starting at position 322 of SEQ ID NO: 315629
cucgacauuugcccucuau

SEQ ID NO: 344136 - RNA, 19 nt, Artificial Sequence
  Description of Artificial Sequence: Synthetic oligonucleotide
  Antisense Strand to SEQ ID NO: 344135
auagagggcaaaugucgag

SEQ ID NO: 344137 - RNA, 19 nt, Artificial Sequence
  Description of Artificial Sequence: Synthetic oligonucleotide
  Sense Strand Starting at position 322 of SEQ ID NO: 315697
ggcucugccagcuguauuu

SEQ ID NO: 344138 - RNA, 19 nt, Artificial Sequence
  Description of Artificial Sequence: Synthetic oligonucleotide
  Antisense Strand to SEQ ID NO: 344137
aaauacagcuggcagagcc

SEQ ID NO: 344139 - RNA, 19 nt, Artificial Sequence
  Description of Artificial Sequence: Synthetic oligonucleotide
  Sense Strand Starting at position 322 of SEQ ID NO: 316410
cuccuuuauucucugaggu

SEQ ID NO: 344140 - RNA, 19 nt, Artificial Sequence
  Description of Artificial Sequence: Synthetic oligonucleotide
  Antisense Strand to SEQ ID NO: 344139
accucagagaauaaaggag

SEQ ID NO: 344141 - RNA, 19 nt, Artificial Sequence
  Description of Artificial Sequence: Synthetic oligonucleotide
  Sense Strand Starting at position 322 of SEQ ID NO: 316528
gcggccagacauuaggaaa

SEQ ID NO: 344142 - RNA, 19 nt, Artificial Sequence
  Description of Artificial Sequence: Synthetic oligonucleotide
  Antisense Strand to SEQ ID NO: 344141
uuuccuaaugucuggccgc

SEQ ID NO: 344143 - RNA, 19 nt, Artificial Sequence
  Description of Artificial Sequence: Synthetic oligonucleotide
  Sense Strand Starting at position 322 of SEQ ID NO: 316576
gcgcgaacuggauaucaag

SEQ ID NO: 344144 - RNA, 19 nt, Artificial Sequence
  Description of Artificial Sequence: Synthetic oligonucleotide
  Antisense Strand to SEQ ID NO: 344143
cuugauauccaguucgcgc

SEQ ID NO: 344145 - RNA, 19 nt, Artificial Sequence
  Description of Artificial Sequence: Synthetic oligonucleotide
  Sense Strand Starting at position 322 of SEQ ID NO: 316987
uccuucuucgcgguuuauu

SEQ ID NO: 344146 - RNA, 19 nt, Artificial Sequence
  Description of Artificial Sequence: Synthetic oligonucleotide
  Antisense Strand to SEQ ID NO: 344145
aauaaaccgcgaagaagga

SEQ ID NO: 344147 - RNA, 19 nt, Artificial Sequence
  Description of Artificial Sequence: Synthetic oligonucleotide
  Sense Strand Starting at position 322 of SEQ ID NO: 317507
gaguuacaggcuuaggagu

SEQ ID NO: 344148 - RNA, 19 nt, Artificial Sequence
  Description of Artificial Sequence: Synthetic oligonucleotide
  Antisense Strand to SEQ ID NO: 344147
acuccuaagccuguaacuc

SEQ ID NO: 344149 - RNA, 19 nt, Artificial Sequence
  Description of Artificial Sequence: Synthetic oligonucleotide
  Sense Strand Starting at position 322 of SEQ ID NO: 317518
uuaggaguguggagaggau

SEQ ID NO: 344150 - RNA, 19 nt, Artificial Sequence
  Description of Artificial Sequence: Synthetic oligonucleotide
  Antisense Strand to SEQ ID NO: 344149
auccucuccacacuccuaa

SEQ ID NO: 344151 - RNA, 19 nt, Artificial Sequence
  Description of Artificial Sequence: Synthetic oligonucleotide
  Sense Strand Starting at position 322 of SEQ ID NO: 317645
ccguaauaucccgaccaaa

SEQ ID NO: 344152 - RNA, 19 nt, Artificial Sequence
  Description of Artificial Sequence: Synthetic oligonucleotide
  Antisense Strand to SEQ ID NO: 344151
uuuggucgggauauuacgg

SEQ ID NO: 344153 - RNA, 19 nt, Artificial Sequence
  Description of Artificial Sequence: Synthetic oligonucleotide
  Sense Strand Starting at position 322 of SEQ ID NO: 317689
ucaacaaguucucuuuguu

SEQ ID NO: 344154 - RNA, 19 nt, Artificial Sequence
  Description of Artificial Sequence: Synthetic oligonucleotide
  Antisense Strand to SEQ ID NO: 344153
aacaaagagaacuuguuga

SEQ ID NO: 344155 - RNA, 19 nt, Artificial Sequence
  Description of Artificial Sequence: Synthetic oligonucleotide
  Sense Strand Starting at position 322 of SEQ ID NO: 317698
ucucuuuguuucccaggaa

SEQ ID NO: 344156 - RNA, 19 nt, Artificial Sequence
  Description of Artificial Sequence: Synthetic oligonucleotide
  Antisense Strand to SEQ ID NO: 344155
uuccugggaaacaaagaga

SEQ ID NO: 344157 - RNA, 19 nt, Artificial Sequence
  Description of Artificial Sequence: Synthetic oligonucleotide
  Sense Strand Starting at position 322 of SEQ ID NO: 317701
cuuuguuucccaggaacuc

SEQ ID NO: 344158 - RNA, 19 nt, Artificial Sequence
  Description of Artificial Sequence: Synthetic oligonucleotide
  Antisense Strand to SEQ ID NO: 344157
gaguuccugggaaacaaag

SEQ ID NO: 344159 - RNA, 19 nt, Artificial Sequence
  Description of Artificial Sequence: Synthetic oligonucleotide
  Sense Strand Starting at position 322 of SEQ ID NO: 317718
ucaguaucucuaggaucca

SEQ ID NO: 344160 - RNA, 19 nt, Artificial Sequence
  Description of Artificial Sequence: Synthetic oligonucleotide
  Antisense Strand to SEQ ID NO: 344159
uggauccuagagauacuga

SEQ ID NO: 344161 - RNA, 19 nt, Artificial Sequence
  Description of Artificial Sequence: Synthetic oligonucleotide
  Sense Strand Starting at position 322 of SEQ ID NO: 317755
gagggucauuucugacaac

SEQ ID NO: 344162 - RNA, 19 nt, Artificial Sequence
  Description of Artificial Sequence: Synthetic oligonucleotide
  Antisense Strand to SEQ ID NO: 344161
guugucagaaaugacccuc

SEQ ID NO: 344163 - RNA, 19 nt, Artificial Sequence
  Description of Artificial Sequence: Synthetic oligonucleotide
  Sense Strand Starting at position 322 of SEQ ID NO: 317758
ggucauuucugacaaccuu

SEQ ID NO: 344164 - RNA, 19 nt, Artificial Sequence
  Description of Artificial Sequence: Synthetic oligonucleotide
  Antisense Strand to SEQ ID NO: 344163
aagguugucagaaaugacc

SEQ ID NO: 344165 - RNA, 19 nt, Artificial Sequence
  Description of Artificial Sequence: Synthetic oligonucleotide
  Sense Strand Starting at position 322 of SEQ ID NO: 317935
uggacuguauuccugcaga

SEQ ID NO: 344166 - RNA, 19 nt, Artificial Sequence
  Description of Artificial Sequence: Synthetic oligonucleotide
  Antisense Strand to SEQ ID NO: 344165
ucugcaggaauacagucca

SEQ ID NO: 344167 - RNA, 19 nt, Artificial Sequence
  Description of Artificial Sequence: Synthetic oligonucleotide
  Sense Strand Starting at position 322 of SEQ ID NO: 317938
acuguauuccugcagaaua

SEQ ID NO: 344168 - RNA, 19 nt, Artificial Sequence
  Description of Artificial Sequence: Synthetic oligonucleotide
  Antisense Strand to SEQ ID NO: 344167
uauucugcaggaauacagu

SEQ ID NO: 344169 - RNA, 19 nt, Artificial Sequence
  Description of Artificial Sequence: Synthetic oligonucleotide
  Sense Strand Starting at position 322 of SEQ ID NO: 317940
uguauuccugcagaauaaa

SEQ ID NO: 344170 - RNA, 19 nt, Artificial Sequence
  Description of Artificial Sequence: Synthetic oligonucleotide
  Antisense Strand to SEQ ID NO: 344169
uuuauucugcaggaauaca

SEQ ID NO: 344171 - RNA, 19 nt, Artificial Sequence
  Description of Artificial Sequence: Synthetic oligonucleotide
  Sense Strand Starting at position 322 of SEQ ID NO: 318183
aggaguuuagacugucauc

SEQ ID NO: 344172 - RNA, 19 nt, Artificial Sequence
  Description of Artificial Sequence: Synthetic oligonucleotide
  Antisense Strand to SEQ ID NO: 344171
gaugacagucuaaacuccu

SEQ ID NO: 344173 - RNA, 19 nt, Artificial Sequence
  Description of Artificial Sequence: Synthetic oligonucleotide
  Sense Strand Starting at position 322 of SEQ ID NO: 318208
auauguggaguuuacucau

SEQ ID NO: 344174 - RNA, 19 nt, Artificial Sequence
  Description of Artificial Sequence: Synthetic oligonucleotide
  Antisense Strand to SEQ ID NO: 344173
augaguaaacuccacauau

SEQ ID NO: 344175 - RNA, 19 nt, Artificial Sequence
  Description of Artificial Sequence: Synthetic oligonucleotide
  Sense Strand Starting at position 322 of SEQ ID NO: 318360
cucaaacacgaaugucaaa

SEQ ID NO: 344176 - RNA, 19 nt, Artificial Sequence
  Description of Artificial Sequence: Synthetic oligonucleotide
  Antisense Strand to SEQ ID NO: 344175
uuugacauucguguuugag

SEQ ID NO: 344177 - RNA, 19 nt, Artificial Sequence
  Description of Artificial Sequence: Synthetic oligonucleotide
  Sense Strand Starting at position 322 of SEQ ID NO: 318396
uugggugguguccauacua

SEQ ID NO: 344178 - RNA, 19 nt, Artificial Sequence
  Description of Artificial Sequence: Synthetic oligonucleotide
  Antisense Strand to SEQ ID NO: 344177
uaguauggacaccacccaa

SEQ ID NO: 344179 - RNA, 19 nt, Artificial Sequence
  Description of Artificial Sequence: Synthetic oligonucleotide
  Sense Strand Starting at position 322 of SEQ ID NO: 318474
gauuccacacagugaugaa

SEQ ID NO: 344180 - RNA, 19 nt, Artificial Sequence
  Description of Artificial Sequence: Synthetic oligonucleotide
  Antisense Strand to SEQ ID NO: 344179
uucaucacuguguggaauc

SEQ ID NO: 344181 - RNA, 19 nt, Artificial Sequence
  Description of Artificial Sequence: Synthetic oligonucleotide
  Sense Strand Starting at position 322 of SEQ ID NO: 318516
guguuugcgacuccucuua

SEQ ID NO: 344182 - RNA, 19 nt, Artificial Sequence
  Description of Artificial Sequence: Synthetic oligonucleotide
  Antisense Strand to SEQ ID NO: 344181
uaagaggagucgcaaacac

SEQ ID NO: 344183 - RNA, 19 nt, Artificial Sequence
  Description of Artificial Sequence: Synthetic oligonucleotide
  Sense Strand Starting at position 322 of SEQ ID NO: 318530
ucuuauccucugggucuua

SEQ ID NO: 344184 - RNA, 19 nt, Artificial Sequence
  Description of Artificial Sequence: Synthetic oligonucleotide
  Antisense Strand to SEQ ID NO: 344183
uaagacccagaggauaaga

SEQ ID NO: 344185 - RNA, 19 nt, Artificial Sequence
  Description of Artificial Sequence: Synthetic oligonucleotide
  Sense Strand Starting at position 322 of SEQ ID NO: 318608
uggugagggugccuucaaa

SEQ ID NO: 344186 - RNA, 19 nt, Artificial Sequence
  Description of Artificial Sequence: Synthetic oligonucleotide
  Antisense Strand to SEQ ID NO: 344185
uuugaaggcacccucacca

SEQ ID NO: 344187 - RNA, 19 nt, Artificial Sequence
  Description of Artificial Sequence: Synthetic oligonucleotide
  Sense Strand Starting at position 322 of SEQ ID NO: 318855
guugcauggauguggaaga

SEQ ID NO: 344188 - RNA, 19 nt, Artificial Sequence
  Description of Artificial Sequence: Synthetic oligonucleotide
  Antisense Strand to SEQ ID NO: 344187
ucuuccacauccaugcaac

SEQ ID NO: 344189 - RNA, 19 nt, Artificial Sequence
  Description of Artificial Sequence: Synthetic oligonucleotide
  Sense Strand Starting at position 322 of SEQ ID NO: 318895
cugcaugcucaauggagga

SEQ ID NO: 344190 - RNA, 19 nt, Artificial Sequence
  Description of Artificial Sequence: Synthetic oligonucleotide
  Antisense Strand to SEQ ID NO: 344189
uccuccauugagcaugcag

SEQ ID NO: 344191 - RNA, 19 nt, Artificial Sequence
  Description of Artificial Sequence: Synthetic oligonucleotide
  Sense Strand Starting at position 322 of SEQ ID NO: 319027
ggguacauguuugcaaaua

SEQ ID NO: 344192 - RNA, 19 nt, Artificial Sequence
  Description of Artificial Sequence: Synthetic oligonucleotide
  Antisense Strand to SEQ ID NO: 344191
uauuugcaaacauguaccc

SEQ ID NO: 344193 - RNA, 19 nt, Artificial Sequence
  Description of Artificial Sequence: Synthetic oligonucleotide
  Sense Strand Starting at position 323 of SEQ ID NO: 315372
accagauucuguuuacccu

SEQ ID NO: 344194 - RNA, 19 nt, Artificial Sequence
  Description of Artificial Sequence: Synthetic oligonucleotide
  Antisense Strand to SEQ ID NO: 344193
aggguaaacagaaucuggu

SEQ ID NO: 344195 - RNA, 19 nt, Artificial Sequence
  Description of Artificial Sequence: Synthetic oligonucleotide
  Sense Strand Starting at position 323 of SEQ ID NO: 315900
cuuggaaacuuguuuaaau

SEQ ID NO: 344196 - RNA, 19 nt, Artificial Sequence
  Description of Artificial Sequence: Synthetic oligonucleotide
  Antisense Strand to SEQ ID NO: 344195
auuuaaacaaguuuccaag

SEQ ID NO: 344197 - RNA, 19 nt, Artificial Sequence
  Description of Artificial Sequence: Synthetic oligonucleotide
  Sense Strand Starting at position 323 of SEQ ID NO: 316328
ggcauuuacuguuuccuaa

SEQ ID NO: 344198 - RNA, 19 nt, Artificial Sequence
  Description of Artificial Sequence: Synthetic oligonucleotide
  Antisense Strand to SEQ ID NO: 344197
uuaggaaacaguaaaugcc

SEQ ID NO: 344199 - RNA, 19 nt, Artificial Sequence
  Description of Artificial Sequence: Synthetic oligonucleotide
  Sense Strand Starting at position 323 of SEQ ID NO: 316486
acugaaugucuagguuaac

SEQ ID NO: 344200 - RNA, 19 nt, Artificial Sequence
  Description of Artificial Sequence: Synthetic oligonucleotide
  Antisense Strand to SEQ ID NO: 344199
guuaaccuagacauucagu

SEQ ID NO: 344201 - RNA, 19 nt, Artificial Sequence
  Description of Artificial Sequence: Synthetic oligonucleotide
  Sense Strand Starting at position 323 of SEQ ID NO: 316487
cugaaugucuagguuaaca

SEQ ID NO: 344202 - RNA, 19 nt, Artificial Sequence
  Description of Artificial Sequence: Synthetic oligonucleotide
  Antisense Strand to SEQ ID NO: 344201
uguuaaccuagacauucag

SEQ ID NO: 344203 - RNA, 19 nt, Artificial Sequence
  Description of Artificial Sequence: Synthetic oligonucleotide
  Sense Strand Starting at position 323 of SEQ ID NO: 316519
uugguagauuaagucagua

SEQ ID NO: 344204 - RNA, 19 nt, Artificial Sequence
  Description of Artificial Sequence: Synthetic oligonucleotide
  Antisense Strand to SEQ ID NO: 344203
uacugacuuaaucuaccaa

SEQ ID NO: 344205 - RNA, 19 nt, Artificial Sequence
  Description of Artificial Sequence: Synthetic oligonucleotide
  Sense Strand Starting at position 323 of SEQ ID NO: 316521
gguagauuaagucaguaac

SEQ ID NO: 344206 - RNA, 19 nt, Artificial Sequence
  Description of Artificial Sequence: Synthetic oligonucleotide
  Antisense Strand to SEQ ID NO: 344205
guuacugacuuaaucuacc

SEQ ID NO: 344207 - RNA, 19 nt, Artificial Sequence
  Description of Artificial Sequence: Synthetic oligonucleotide
  Sense Strand Starting at position 323 of SEQ ID NO: 316891
ugggaaguaucagccuuua

SEQ ID NO: 344208 - RNA, 19 nt, Artificial Sequence
  Description of Artificial Sequence: Synthetic oligonucleotide
  Antisense Strand to SEQ ID NO: 344207
uaaaggcugauacuuccca

SEQ ID NO: 344209 - RNA, 19 nt, Artificial Sequence
  Description of Artificial Sequence: Synthetic oligonucleotide
  Sense Strand Starting at position 323 of SEQ ID NO: 316992
aguaucucgcgagaaauug

SEQ ID NO: 344210 - RNA, 19 nt, Artificial Sequence
  Description of Artificial Sequence: Synthetic oligonucleotide
  Antisense Strand to SEQ ID NO: 344209
caauuucucgcgagauacu

SEQ ID NO: 344211 - RNA, 19 nt, Artificial Sequence
  Description of Artificial Sequence: Synthetic oligonucleotide
  Sense Strand Starting at position 323 of SEQ ID NO: 317265
gcgagaucagcguuucuuu

SEQ ID NO: 344212 - RNA, 19 nt, Artificial Sequence
  Description of Artificial Sequence: Synthetic oligonucleotide
  Antisense Strand to SEQ ID NO: 344211
aaagaaacgcugaucucgc

SEQ ID NO: 344213 - RNA, 19 nt, Artificial Sequence
  Description of Artificial Sequence: Synthetic oligonucleotide
  Sense Strand Starting at position 323 of SEQ ID NO: 317290
acugucaagcccugaaaua

SEQ ID NO: 344214 - RNA, 19 nt, Artificial Sequence
  Description of Artificial Sequence: Synthetic oligonucleotide
  Antisense Strand to SEQ ID NO: 344213
uauuucagggcuugacagu

SEQ ID NO: 344215 - RNA, 19 nt, Artificial Sequence
  Description of Artificial Sequence: Synthetic oligonucleotide
  Sense Strand Starting at position 323 of SEQ ID NO: 317291
cugucaagcccugaaauaa

SEQ ID NO: 344216 - RNA, 19 nt, Artificial Sequence
  Description of Artificial Sequence: Synthetic oligonucleotide
  Antisense Strand to SEQ ID NO: 344215
uuauuucagggcuugacag

SEQ ID NO: 344217 - RNA, 19 nt, Artificial Sequence
  Description of Artificial Sequence: Synthetic oligonucleotide
  Sense Strand Starting at position 323 of SEQ ID NO: 317430
agaacagugucuguuacau

SEQ ID NO: 344218 - RNA, 19 nt, Artificial Sequence
  Description of Artificial Sequence: Synthetic oligonucleotide
  Antisense Strand to SEQ ID NO: 344217
auguaacagacacuguucu

SEQ ID NO: 344219 - RNA, 19 nt, Artificial Sequence
  Description of Artificial Sequence: Synthetic oligonucleotide
  Sense Strand Starting at position 323 of SEQ ID NO: 317446
cauaguaggcauugaauac

SEQ ID NO: 344220 - RNA, 19 nt, Artificial Sequence
  Description of Artificial Sequence: Synthetic oligonucleotide
  Antisense Strand to SEQ ID NO: 344219
guauucaaugccuacuaug

SEQ ID NO: 344221 - RNA, 19 nt, Artificial Sequence
  Description of Artificial Sequence: Synthetic oligonucleotide
  Sense Strand Starting at position 323 of SEQ ID NO: 317459
gaauacacguuucuuggau

SEQ ID NO: 344222 - RNA, 19 nt, Artificial Sequence
  Description of Artificial Sequence: Synthetic oligonucleotide
  Antisense Strand to SEQ ID NO: 344221
auccaagaaacguguauuc

SEQ ID NO: 344223 - RNA, 19 nt, Artificial Sequence
  Description of Artificial Sequence: Synthetic oligonucleotide
  Sense Strand Starting at position 323 of SEQ ID NO: 317465
acguuucuuggaugaauaa

SEQ ID NO: 344224 - RNA, 19 nt, Artificial Sequence
  Description of Artificial Sequence: Synthetic oligonucleotide
  Antisense Strand to SEQ ID NO: 344223
uuauucauccaagaaacgu

SEQ ID NO: 344225 - RNA, 19 nt, Artificial Sequence
  Description of Artificial Sequence: Synthetic oligonucleotide
  Sense Strand Starting at position 323 of SEQ ID NO: 317466
cguuucuuggaugaauaaa

SEQ ID NO: 344226 - RNA, 19 nt, Artificial Sequence
  Description of Artificial Sequence: Synthetic oligonucleotide
  Antisense Strand to SEQ ID NO: 344225
uuuauucauccaagaaacg

SEQ ID NO: 344227 - RNA, 19 nt, Artificial Sequence
  Description of Artificial Sequence: Synthetic oligonucleotide
  Sense Strand Starting at position 323 of SEQ ID NO: 317510
augaaauuggagugacuuu

SEQ ID NO: 344228 - RNA, 19 nt, Artificial Sequence
  Description of Artificial Sequence: Synthetic oligonucleotide
  Antisense Strand to SEQ ID NO: 344227
aaagucacuccaauuucau

SEQ ID NO: 344229 - RNA, 19 nt, Artificial Sequence
  Description of Artificial Sequence: Synthetic oligonucleotide
  Sense Strand Starting at position 323 of SEQ ID NO: 317822
agagacacguccuugauau

SEQ ID NO: 344230 - RNA, 19 nt, Artificial Sequence
  Description of Artificial Sequence: Synthetic oligonucleotide
  Antisense Strand to SEQ ID NO: 344229
auaucaaggacgugucucu

SEQ ID NO: 344231 - RNA, 19 nt, Artificial Sequence
  Description of Artificial Sequence: Synthetic oligonucleotide
  Sense Strand Starting at position 323 of SEQ ID NO: 317823
gagacacguccuugauaug

SEQ ID NO: 344232 - RNA, 19 nt, Artificial Sequence
  Description of Artificial Sequence: Synthetic oligonucleotide
  Antisense Strand to SEQ ID NO: 344231
cauaucaaggacgugucuc

SEQ ID NO: 344233 - RNA, 19 nt, Artificial Sequence
  Description of Artificial Sequence: Synthetic oligonucleotide
  Sense Strand Starting at position 323 of SEQ ID NO: 317824
agacacguccuugauaugu

SEQ ID NO: 344234 - RNA, 19 nt, Artificial Sequence
  Description of Artificial Sequence: Synthetic oligonucleotide
  Antisense Strand to SEQ ID NO: 344233
acauaucaaggacgugucu

SEQ ID NO: 344235 - RNA, 19 nt, Artificial Sequence
  Description of Artificial Sequence: Synthetic oligonucleotide
  Sense Strand Starting at position 323 of SEQ ID NO: 317851
cuggucuugaacugggaaa

SEQ ID NO: 344236 - RNA, 19 nt, Artificial Sequence
  Description of Artificial Sequence: Synthetic oligonucleotide
  Antisense Strand to SEQ ID NO: 344235
uuucccaguucaagaccag

SEQ ID NO: 344237 - RNA, 19 nt, Artificial Sequence
  Description of Artificial Sequence: Synthetic oligonucleotide
  Sense Strand Starting at position 323 of SEQ ID NO: 317852
uggucuugaacugggaaau

SEQ ID NO: 344238 - RNA, 19 nt, Artificial Sequence
  Description of Artificial Sequence: Synthetic oligonucleotide
  Antisense Strand to SEQ ID NO: 344237
auuucccaguucaagacca

SEQ ID NO: 344239 - RNA, 19 nt, Artificial Sequence
  Description of Artificial Sequence: Synthetic oligonucleotide
  Sense Strand Starting at position 323 of SEQ ID NO: 317853
ggucuugaacugggaaaug

SEQ ID NO: 344240 - RNA, 19 nt, Artificial Sequence
  Description of Artificial Sequence: Synthetic oligonucleotide
  Antisense Strand to SEQ ID NO: 344239
cauuucccaguucaagacc

SEQ ID NO: 344241 - RNA, 19 nt, Artificial Sequence
  Description of Artificial Sequence: Synthetic oligonucleotide
  Sense Strand Starting at position 323 of SEQ ID NO: 318551
acaguaagguuaguauaau

SEQ ID NO: 344242 - RNA, 19 nt, Artificial Sequence
  Description of Artificial Sequence: Synthetic oligonucleotide
  Antisense Strand to SEQ ID NO: 344241
auuauacuaaccuuacugu

SEQ ID NO: 344243 - RNA, 19 nt, Artificial Sequence
  Description of Artificial Sequence: Synthetic oligonucleotide
  Sense Strand Starting at position 323 of SEQ ID NO: 318578
augcuuuaugauggaacaa

SEQ ID NO: 344244 - RNA, 19 nt, Artificial Sequence
  Description of Artificial Sequence: Synthetic oligonucleotide
  Antisense Strand to SEQ ID NO: 344243
uuguuccaucauaaagcau

SEQ ID NO: 344245 - RNA, 19 nt, Artificial Sequence
  Description of Artificial Sequence: Synthetic oligonucleotide
  Sense Strand Starting at position 323 of SEQ ID NO: 318625
ggagggaugcugugagguu

SEQ ID NO: 344246 - RNA, 19 nt, Artificial Sequence
  Description of Artificial Sequence: Synthetic oligonucleotide
  Antisense Strand to SEQ ID NO: 344245
aaccucacagcaucccucc

SEQ ID NO: 344247 - RNA, 19 nt, Artificial Sequence
  Description of Artificial Sequence: Synthetic oligonucleotide
  Sense Strand Starting at position 323 of SEQ ID NO: 318720
ugaaucauagcauguugga

SEQ ID NO: 344248 - RNA, 19 nt, Artificial Sequence
  Description of Artificial Sequence: Synthetic oligonucleotide
  Antisense Strand to SEQ ID NO: 344247
uccaacaugcuaugauuca

SEQ ID NO: 344249 - RNA, 19 nt, Artificial Sequence
  Description of Artificial Sequence: Synthetic oligonucleotide
  Sense Strand Starting at position 323 of SEQ ID NO: 318750
aaacuuugucgggauggua

SEQ ID NO: 344250 - RNA, 19 nt, Artificial Sequence
  Description of Artificial Sequence: Synthetic oligonucleotide
  Antisense Strand to SEQ ID NO: 344249
uaccaucccgacaaaguuu

SEQ ID NO: 344251 - RNA, 19 nt, Artificial Sequence
  Description of Artificial Sequence: Synthetic oligonucleotide
  Sense Strand Starting at position 323 of SEQ ID NO: 318775
aauuguuacgccuuugcuu

SEQ ID NO: 344252 - RNA, 19 nt, Artificial Sequence
  Description of Artificial Sequence: Synthetic oligonucleotide
  Antisense Strand to SEQ ID NO: 344251
aagcaaaggcguaacaauu

SEQ ID NO: 344253 - RNA, 19 nt, Artificial Sequence
  Description of Artificial Sequence: Synthetic oligonucleotide
  Sense Strand Starting at position 323 of SEQ ID NO: 318825
ugcccacuaguuugacaaa

SEQ ID NO: 344254 - RNA, 19 nt, Artificial Sequence
  Description of Artificial Sequence: Synthetic oligonucleotide
  Antisense Strand to SEQ ID NO: 344253
uuugucaaacuagugggca

SEQ ID NO: 344255 - RNA, 19 nt, Artificial Sequence
  Description of Artificial Sequence: Synthetic oligonucleotide
  Sense Strand Starting at position 323 of SEQ ID NO: 318877
uuuggaauauuugacugau

SEQ ID NO: 344256 - RNA, 19 nt, Artificial Sequence
  Description of Artificial Sequence: Synthetic oligonucleotide
  Antisense Strand to SEQ ID NO: 344255
aucagucaaauauuccaaa

SEQ ID NO: 344257 - RNA, 19 nt, Artificial Sequence
  Description of Artificial Sequence: Synthetic oligonucleotide
  Sense Strand Starting at position 323 of SEQ ID NO: 318982
auuucuuuccuaugucgau

SEQ ID NO: 344258 - RNA, 19 nt, Artificial Sequence
  Description of Artificial Sequence: Synthetic oligonucleotide
  Antisense Strand to SEQ ID NO: 344257
aucgacauaggaaagaaau

SEQ ID NO: 344259 - RNA, 19 nt, Artificial Sequence
  Description of Artificial Sequence: Synthetic oligonucleotide
  Sense Strand Starting at position 323 of SEQ ID NO: 319087
aaaugugauuugucuguuu

SEQ ID NO: 344260 - RNA, 19 nt, Artificial Sequence
  Description of Artificial Sequence: Synthetic oligonucleotide
  Antisense Strand to SEQ ID NO: 344259
aaacagacaaaucacauuu

SEQ ID NO: 344261 - RNA, 19 nt, Artificial Sequence
  Description of Artificial Sequence: Synthetic oligonucleotide
  Sense Strand Starting at position 323 of SEQ ID NO: 319090
ugugauuugucuguuuggu

SEQ ID NO: 344262 - RNA, 19 nt, Artificial Sequence
  Description of Artificial Sequence: Synthetic oligonucleotide
  Antisense Strand to SEQ ID NO: 344261
accaaacagacaaaucaca

SEQ ID NO: 344263 - RNA, 19 nt, Artificial Sequence
  Description of Artificial Sequence: Synthetic oligonucleotide
  Sense Strand Starting at position 323 of SEQ ID NO: 319092
ugauuugucuguuugguaa

SEQ ID NO: 344264 - RNA, 19 nt, Artificial Sequence
  Description of Artificial Sequence: Synthetic oligonucleotide
  Antisense Strand to SEQ ID NO: 344263
uuaccaaacagacaaauca

SEQ ID NO: 344265 - RNA, 19 nt, Artificial Sequence
  Description of Artificial Sequence: Synthetic oligonucleotide
  Sense Strand Starting at position 323 of SEQ ID NO: 319114
gauguuaauguauggauua

SEQ ID NO: 344266 - RNA, 19 nt, Artificial Sequence
  Description of Artificial Sequence: Synthetic oligonucleotide
  Antisense Strand to SEQ ID NO: 344265
uaauccauacauuaacauc

SEQ ID NO: 344267 - RNA, 19 nt, Artificial Sequence
  Description of Artificial Sequence: Synthetic oligonucleotide
  Sense Strand Starting at position 323 of SEQ ID NO: 319119
uaauguauggauuacugua

SEQ ID NO: 344268 - RNA, 19 nt, Artificial Sequence
  Description of Artificial Sequence: Synthetic oligonucleotide
  Antisense Strand to SEQ ID NO: 344267
uacaguaauccauacauua

SEQ ID NO: 344269 - RNA, 19 nt, Artificial Sequence
  Description of Artificial Sequence: Synthetic oligonucleotide
  Sense Strand Starting at position 323 of SEQ ID NO: 319149
cauugagugccugauacac

SEQ ID NO: 344270 - RNA, 19 nt, Artificial Sequence
  Description of Artificial Sequence: Synthetic oligonucleotide
  Antisense Strand to SEQ ID NO: 344269
guguaucaggcacucaaug

SEQ ID NO: 344271 - RNA, 19 nt, Artificial Sequence
  Description of Artificial Sequence: Synthetic oligonucleotide
  Sense Strand Starting at position 323 of SEQ ID NO: 319214
guuuacaugccgucuaguu

SEQ ID NO: 344272 - RNA, 19 nt, Artificial Sequence
  Description of Artificial Sequence: Synthetic oligonucleotide
  Antisense Strand to SEQ ID NO: 344271
aacuagacggcauguaaac

SEQ ID NO: 344273 - RNA, 19 nt, Artificial Sequence
  Description of Artificial Sequence: Synthetic oligonucleotide
  Sense Strand Starting at position 324 of SEQ ID NO: 315270
gguauucaggcagaaguuu

SEQ ID NO: 344274 - RNA, 19 nt, Artificial Sequence
  Description of Artificial Sequence: Synthetic oligonucleotide
  Antisense Strand to SEQ ID NO: 344273
aaacuucugccugaauacc

SEQ ID NO: 344275 - RNA, 19 nt, Artificial Sequence
  Description of Artificial Sequence: Synthetic oligonucleotide
  Sense Strand Starting at position 324 of SEQ ID NO: 315363
uaagauggccuaggugauu

SEQ ID NO: 344276 - RNA, 19 nt, Artificial Sequence
  Description of Artificial Sequence: Synthetic oligonucleotide
  Antisense Strand to SEQ ID NO: 344275
aaucaccuaggccaucuua

SEQ ID NO: 344277 - RNA, 19 nt, Artificial Sequence
  Description of Artificial Sequence: Synthetic oligonucleotide
  Sense Strand Starting at position 324 of SEQ ID NO: 315608
accagauucuguuuacccu

SEQ ID NO: 344278 - RNA, 19 nt, Artificial Sequence
  Description of Artificial Sequence: Synthetic oligonucleotide
  Antisense Strand to SEQ ID NO: 344277
aggguaaacagaaucuggu

SEQ ID NO: 344279 - RNA, 19 nt, Artificial Sequence
  Description of Artificial Sequence: Synthetic oligonucleotide
  Sense Strand Starting at position 324 of SEQ ID NO: 315769
gguuaacaccuccgaacuu

SEQ ID NO: 344280 - RNA, 19 nt, Artificial Sequence
  Description of Artificial Sequence: Synthetic oligonucleotide
  Antisense Strand to SEQ ID NO: 344279
aaguucggagguguuaacc

SEQ ID NO: 344281 - RNA, 19 nt, Artificial Sequence
  Description of Artificial Sequence: Synthetic oligonucleotide
  Sense Strand Starting at position 324 of SEQ ID NO: 315812
caagaaugccgcgaaauuc

SEQ ID NO: 344282 - RNA, 19 nt, Artificial Sequence
  Description of Artificial Sequence: Synthetic oligonucleotide
  Antisense Strand to SEQ ID NO: 344281
gaauuucgcggcauucuug

SEQ ID NO: 344283 - RNA, 19 nt, Artificial Sequence
  Description of Artificial Sequence: Synthetic oligonucleotide
  Sense Strand Starting at position 324 of SEQ ID NO: 316136
cuuggaaacuuguuuaaau

SEQ ID NO: 344284 - RNA, 19 nt, Artificial Sequence
  Description of Artificial Sequence: Synthetic oligonucleotide
  Antisense Strand to SEQ ID NO: 344283
auuuaaacaaguuuccaag

SEQ ID NO: 344285 - RNA, 19 nt, Artificial Sequence
  Description of Artificial Sequence: Synthetic oligonucleotide
  Sense Strand Starting at position 324 of SEQ ID NO: 316564
ggcauuuacuguuuccuaa

SEQ ID NO: 344286 - RNA, 19 nt, Artificial Sequence
  Description of Artificial Sequence: Synthetic oligonucleotide
  Antisense Strand to SEQ ID NO: 344285
uuaggaaacaguaaaugcc

SEQ ID NO: 344287 - RNA, 19 nt, Artificial Sequence
  Description of Artificial Sequence: Synthetic oligonucleotide
  Sense Strand Starting at position 324 of SEQ ID NO: 316722
acugaaugucuagguuaac

SEQ ID NO: 344288 - RNA, 19 nt, Artificial Sequence
  Description of Artificial Sequence: Synthetic oligonucleotide
  Antisense Strand to SEQ ID NO: 344287
guuaaccuagacauucagu

SEQ ID NO: 344289 - RNA, 19 nt, Artificial Sequence
  Description of Artificial Sequence: Synthetic oligonucleotide
  Sense Strand Starting at position 324 of SEQ ID NO: 316723
cugaaugucuagguuaaca

SEQ ID NO: 344290 - RNA, 19 nt, Artificial Sequence
  Description of Artificial Sequence: Synthetic oligonucleotide
  Antisense Strand to SEQ ID NO: 344289
uguuaaccuagacauucag

SEQ ID NO: 344291 - RNA, 19 nt, Artificial Sequence
  Description of Artificial Sequence: Synthetic oligonucleotide
  Sense Strand Starting at position 324 of SEQ ID NO: 316755
uugguagauuaagucagua

SEQ ID NO: 344292 - RNA, 19 nt, Artificial Sequence
  Description of Artificial Sequence: Synthetic oligonucleotide
  Antisense Strand to SEQ ID NO: 344291
uacugacuuaaucuaccaa

SEQ ID NO: 344293 - RNA, 19 nt, Artificial Sequence
  Description of Artificial Sequence: Synthetic oligonucleotide
  Sense Strand Starting at position 324 of SEQ ID NO: 316757
gguagauuaagucaguaac

SEQ ID NO: 344294 - RNA, 19 nt, Artificial Sequence
  Description of Artificial Sequence: Synthetic oligonucleotide
  Antisense Strand to SEQ ID NO: 344293
guuacugacuuaaucuacc

SEQ ID NO: 344295 - RNA, 19 nt, Artificial Sequence
  Description of Artificial Sequence: Synthetic oligonucleotide
  Sense Strand Starting at position 324 of SEQ ID NO: 317127
ugggaaguaucagccuuua

SEQ ID NO: 344296 - RNA, 19 nt, Artificial Sequence
  Description of Artificial Sequence: Synthetic oligonucleotide
  Antisense Strand to SEQ ID NO: 344295
uaaaggcugauacuuccca

SEQ ID NO: 344297 - RNA, 19 nt, Artificial Sequence
  Description of Artificial Sequence: Synthetic oligonucleotide
  Sense Strand Starting at position 324 of SEQ ID NO: 317156
gaaguaacugcgcacgaaa

SEQ ID NO: 344298 - RNA, 19 nt, Artificial Sequence
  Description of Artificial Sequence: Synthetic oligonucleotide
  Antisense Strand to SEQ ID NO: 344297
uuucgugcgcaguuacuuc

SEQ ID NO: 344299 - RNA, 19 nt, Artificial Sequence
  Description of Artificial Sequence: Synthetic oligonucleotide
  Sense Strand Starting at position 324 of SEQ ID NO: 317226
ucaguaucucgcgagaaau

SEQ ID NO: 344300 - RNA, 19 nt, Artificial Sequence
  Description of Artificial Sequence: Synthetic oligonucleotide
  Antisense Strand to SEQ ID NO: 344299
auuucucgcgagauacuga

SEQ ID NO: 344301 - RNA, 19 nt, Artificial Sequence
  Description of Artificial Sequence: Synthetic oligonucleotide
  Sense Strand Starting at position 324 of SEQ ID NO: 317228
aguaucucgcgagaaauug

SEQ ID NO: 344302 - RNA, 19 nt, Artificial Sequence
  Description of Artificial Sequence: Synthetic oligonucleotide
  Antisense Strand to SEQ ID NO: 344301
caauuucucgcgagauacu

SEQ ID NO: 344303 - RNA, 19 nt, Artificial Sequence
  Description of Artificial Sequence: Synthetic oligonucleotide
  Sense Strand Starting at position 324 of SEQ ID NO: 317501
gcgagaucagcguuucuuu

SEQ ID NO: 344304 - RNA, 19 nt, Artificial Sequence
  Description of Artificial Sequence: Synthetic oligonucleotide
  Antisense Strand to SEQ ID NO: 344303
aaagaaacgcugaucucgc

SEQ ID NO: 344305 - RNA, 19 nt, Artificial Sequence
  Description of Artificial Sequence: Synthetic oligonucleotide
  Sense Strand Starting at position 324 of SEQ ID NO: 317526
acugucaagcccugaaaua

SEQ ID NO: 344306 - RNA, 19 nt, Artificial Sequence
  Description of Artificial Sequence: Synthetic oligonucleotide
  Antisense Strand to SEQ ID NO: 344305
uauuucagggcuugacagu

SEQ ID NO: 344307 - RNA, 19 nt, Artificial Sequence
  Description of Artificial Sequence: Synthetic oligonucleotide
  Sense Strand Starting at position 324 of SEQ ID NO: 317527
cugucaagcccugaaauaa

SEQ ID NO: 344308 - RNA, 19 nt, Artificial Sequence
  Description of Artificial Sequence: Synthetic oligonucleotide
  Antisense Strand to SEQ ID NO: 344307
uuauuucagggcuugacag

SEQ ID NO: 344309 - RNA, 19 nt, Artificial Sequence
  Description of Artificial Sequence: Synthetic oligonucleotide
  Sense Strand Starting at position 324 of SEQ ID NO: 317665
uagaacagugucuguuaca

SEQ ID NO: 344310 - RNA, 19 nt, Artificial Sequence
  Description of Artificial Sequence: Synthetic oligonucleotide
  Antisense Strand to SEQ ID NO: 344309
uguaacagacacuguucua

SEQ ID NO: 344311 - RNA, 19 nt, Artificial Sequence
  Description of Artificial Sequence: Synthetic oligonucleotide
  Sense Strand Starting at position 324 of SEQ ID NO: 317666
agaacagugucuguuacau

SEQ ID NO: 344312 - RNA, 19 nt, Artificial Sequence
  Description of Artificial Sequence: Synthetic oligonucleotide
  Antisense Strand to SEQ ID NO: 344311
auguaacagacacuguucu

SEQ ID NO: 344313 - RNA, 19 nt, Artificial Sequence
  Description of Artificial Sequence: Synthetic oligonucleotide
  Sense Strand Starting at position 324 of SEQ ID NO: 317682
cauaguaggcauugaauac

SEQ ID NO: 344314 - RNA, 19 nt, Artificial Sequence
  Description of Artificial Sequence: Synthetic oligonucleotide
  Antisense Strand to SEQ ID NO: 344313
guauucaaugccuacuaug

SEQ ID NO: 344315 - RNA, 19 nt, Artificial Sequence
  Description of Artificial Sequence: Synthetic oligonucleotide
  Sense Strand Starting at position 324 of SEQ ID NO: 317695
gaauacacguuucuuggau

SEQ ID NO: 344316 - RNA, 19 nt, Artificial Sequence
  Description of Artificial Sequence: Synthetic oligonucleotide
  Antisense Strand to SEQ ID NO: 344315
auccaagaaacguguauuc

SEQ ID NO: 344317 - RNA, 19 nt, Artificial Sequence
  Description of Artificial Sequence: Synthetic oligonucleotide
  Sense Strand Starting at position 324 of SEQ ID NO: 317701
acguuucuuggaugaauaa

SEQ ID NO: 344318 - RNA, 19 nt, Artificial Sequence
  Description of Artificial Sequence: Synthetic oligonucleotide
  Antisense Strand to SEQ ID NO: 344317
uuauucauccaagaaacgu

SEQ ID NO: 344319 - RNA, 19 nt, Artificial Sequence
  Description of Artificial Sequence: Synthetic oligonucleotide
  Sense Strand Starting at position 324 of SEQ ID NO: 317702
cguuucuuggaugaauaaa

SEQ ID NO: 344320 - RNA, 19 nt, Artificial Sequence
  Description of Artificial Sequence: Synthetic oligonucleotide
  Antisense Strand to SEQ ID NO: 344319
uuuauucauccaagaaacg

SEQ ID NO: 344321 - RNA, 19 nt, Artificial Sequence
  Description of Artificial Sequence: Synthetic oligonucleotide
  Sense Strand Starting at position 324 of SEQ ID NO: 317746
augaaauuggagugacuuu

SEQ ID NO: 344322 - RNA, 19 nt, Artificial Sequence
  Description of Artificial Sequence: Synthetic oligonucleotide
  Antisense Strand to SEQ ID NO: 344321
aaagucacuccaauuucau

SEQ ID NO: 344323 - RNA, 19 nt, Artificial Sequence
  Description of Artificial Sequence: Synthetic oligonucleotide
  Sense Strand Starting at position 324 of SEQ ID NO: 318058
agagacacguccuugauau

SEQ ID NO: 344324 - RNA, 19 nt, Artificial Sequence
  Description of Artificial Sequence: Synthetic oligonucleotide
  Antisense Strand to SEQ ID NO: 344323
auaucaaggacgugucucu

SEQ ID NO: 344325 - RNA, 19 nt, Artificial Sequence
  Description of Artificial Sequence: Synthetic oligonucleotide
  Sense Strand Starting at position 324 of SEQ ID NO: 318059
gagacacguccuugauaug

SEQ ID NO: 344326 - RNA, 19 nt, Artificial Sequence
  Description of Artificial Sequence: Synthetic oligonucleotide
  Antisense Strand to SEQ ID NO: 344325
cauaucaaggacgugucuc

SEQ ID NO: 344327 - RNA, 19 nt, Artificial Sequence
  Description of Artificial Sequence: Synthetic oligonucleotide
  Sense Strand Starting at position 324 of SEQ ID NO: 318060
agacacguccuugauaugu

SEQ ID NO: 344328 - RNA, 19 nt, Artificial Sequence
  Description of Artificial Sequence: Synthetic oligonucleotide
  Antisense Strand to SEQ ID NO: 344327
acauaucaaggacgugucu

SEQ ID NO: 344329 - RNA, 19 nt, Artificial Sequence
  Description of Artificial Sequence: Synthetic oligonucleotide
  Sense Strand Starting at position 324 of SEQ ID NO: 318087
cuggucuugaacugggaaa

SEQ ID NO: 344330 - RNA, 19 nt, Artificial Sequence
  Description of Artificial Sequence: Synthetic oligonucleotide
  Antisense Strand to SEQ ID NO: 344329
uuucccaguucaagaccag

SEQ ID NO: 344331 - RNA, 19 nt, Artificial Sequence
  Description of Artificial Sequence: Synthetic oligonucleotide
  Sense Strand Starting at position 324 of SEQ ID NO: 318088
uggucuugaacugggaaau

SEQ ID NO: 344332 - RNA, 19 nt, Artificial Sequence
  Description of Artificial Sequence: Synthetic oligonucleotide
  Antisense Strand to SEQ ID NO: 344331
auuucccaguucaagacca

SEQ ID NO: 344333 - RNA, 19 nt, Artificial Sequence
  Description of Artificial Sequence: Synthetic oligonucleotide
  Sense Strand Starting at position 324 of SEQ ID NO: 318089
ggucuugaacugggaaaug

SEQ ID NO: 344334 - RNA, 19 nt, Artificial Sequence
  Description of Artificial Sequence: Synthetic oligonucleotide
  Antisense Strand to SEQ ID NO: 344333
cauuucccaguucaagacc

SEQ ID NO: 344335 - RNA, 19 nt, Artificial Sequence
  Description of Artificial Sequence: Synthetic oligonucleotide
  Sense Strand Starting at position 324 of SEQ ID NO: 318787
acaguaagguuaguauaau

SEQ ID NO: 344336 - RNA, 19 nt, Artificial Sequence
  Description of Artificial Sequence: Synthetic oligonucleotide
  Antisense Strand to SEQ ID NO: 344335
auuauacuaaccuuacugu

SEQ ID NO: 344337 - RNA, 19 nt, Artificial Sequence
  Description of Artificial Sequence: Synthetic oligonucleotide
  Sense Strand Starting at position 324 of SEQ ID NO: 318814
augcuuuaugauggaacaa

SEQ ID NO: 344338 - RNA, 19 nt, Artificial Sequence
  Description of Artificial Sequence: Synthetic oligonucleotide
  Antisense Strand to SEQ ID NO: 344337
uuguuccaucauaaagcau

SEQ ID NO: 344339 - RNA, 19 nt, Artificial Sequence
  Description of Artificial Sequence: Synthetic oligonucleotide
  Sense Strand Starting at position 324 of SEQ ID NO: 318861
ggagggaugcugugagguu

SEQ ID NO: 344340 - RNA, 19 nt, Artificial Sequence
  Description of Artificial Sequence: Synthetic oligonucleotide
  Antisense Strand to SEQ ID NO: 344339
aaccucacagcaucccucc

SEQ ID NO: 344341 - RNA, 19 nt, Artificial Sequence
  Description of Artificial Sequence: Synthetic oligonucleotide
  Sense Strand Starting at position 324 of SEQ ID NO: 318956
ugaaucauagcauguugga

SEQ ID NO: 344342 - RNA, 19 nt, Artificial Sequence
  Description of Artificial Sequence: Synthetic oligonucleotide
  Antisense Strand to SEQ ID NO: 344341
uccaacaugcuaugauuca

SEQ ID NO: 344343 - RNA, 19 nt, Artificial Sequence
  Description of Artificial Sequence: Synthetic oligonucleotide
  Sense Strand Starting at position 324 of SEQ ID NO: 318986
aaacuuugucgggauggua

SEQ ID NO: 344344 - RNA, 19 nt, Artificial Sequence
  Description of Artificial Sequence: Synthetic oligonucleotide
  Antisense Strand to SEQ ID NO: 344343
uaccaucccgacaaaguuu

SEQ ID NO: 344345 - RNA, 19 nt, Artificial Sequence
  Description of Artificial Sequence: Synthetic oligonucleotide
  Sense Strand Starting at position 324 of SEQ ID NO: 319011
aauuguuacgccuuugcuu

SEQ ID NO: 344346 - RNA, 19 nt, Artificial Sequence
  Description of Artificial Sequence: Synthetic oligonucleotide
  Antisense Strand to SEQ ID NO: 344345
aagcaaaggcguaacaauu

SEQ ID NO: 344347 - RNA, 19 nt, Artificial Sequence
  Description of Artificial Sequence: Synthetic oligonucleotide
  Sense Strand Starting at position 324 of SEQ ID NO: 319061
ugcccacuaguuugacaaa

SEQ ID NO: 344348 - RNA, 19 nt, Artificial Sequence
  Description of Artificial Sequence: Synthetic oligonucleotide
  Antisense Strand to SEQ ID NO: 344347
uuugucaaacuagugggca

SEQ ID NO: 344349 - RNA, 19 nt, Artificial Sequence
  Description of Artificial Sequence: Synthetic oligonucleotide
  Sense Strand Starting at position 324 of SEQ ID NO: 319113
uuuggaauauuugacugau

SEQ ID NO: 344350 - RNA, 19 nt, Artificial Sequence
  Description of Artificial Sequence: Synthetic oligonucleotide
  Antisense Strand to SEQ ID NO: 344349
aucagucaaauauuccaaa

SEQ ID NO: 344351 - RNA, 19 nt, Artificial Sequence
  Description of Artificial Sequence: Synthetic oligonucleotide
  Sense Strand Starting at position 324 of SEQ ID NO: 319218
auuucuuuccuaugucgau

SEQ ID NO: 344352 - RNA, 19 nt, Artificial Sequence
  Description of Artificial Sequence: Synthetic oligonucleotide
  Antisense Strand to SEQ ID NO: 344351
aucgacauaggaaagaaau

SEQ ID NO: 344353 - RNA, 19 nt, Artificial Sequence
  Description of Artificial Sequence: Synthetic oligonucleotide
  Sense Strand Starting at position 325 of SEQ ID NO: 315282
gcaacuauccagugaggua

SEQ ID NO: 344354 - RNA, 19 nt, Artificial Sequence
  Description of Artificial Sequence: Synthetic oligonucleotide
  Antisense Strand to SEQ ID NO: 344353
uaccucacuggauaguugc

SEQ ID NO: 344355 - RNA, 19 nt, Artificial Sequence
  Description of Artificial Sequence: Synthetic oligonucleotide
  Sense Strand Starting at position 325 of SEQ ID NO: 315289
uccagugagguaggaauua

SEQ ID NO: 344356 - RNA, 19 nt, Artificial Sequence
  Description of Artificial Sequence: Synthetic oligonucleotide
  Antisense Strand to SEQ ID NO: 344355
uaauuccuaccucacugga

SEQ ID NO: 344357 - RNA, 19 nt, Artificial Sequence
  Description of Artificial Sequence: Synthetic oligonucleotide
  Sense Strand Starting at position 325 of SEQ ID NO: 315375
gcagauggaaaucagcauu

SEQ ID NO: 344358 - RNA, 19 nt, Artificial Sequence
  Description of Artificial Sequence: Synthetic oligonucleotide
  Antisense Strand to SEQ ID NO: 344357
aaugcugauuuccaucugc

SEQ ID NO: 344359 - RNA, 19 nt, Artificial Sequence
  Description of Artificial Sequence: Synthetic oligonucleotide
  Sense Strand Starting at position 325 of SEQ ID NO: 315381
ggaaaucagcauugaagca

SEQ ID NO: 344360 - RNA, 19 nt, Artificial Sequence
  Description of Artificial Sequence: Synthetic oligonucleotide
  Antisense Strand to SEQ ID NO: 344359
ugcuucaaugcugauuucc

SEQ ID NO: 344361 - RNA, 19 nt, Artificial Sequence
  Description of Artificial Sequence: Synthetic oligonucleotide
  Sense Strand Starting at position 325 of SEQ ID NO: 315420
augcuuauacuaggcuaau

SEQ ID NO: 344362 - RNA, 19 nt, Artificial Sequence
  Description of Artificial Sequence: Synthetic oligonucleotide
  Antisense Strand to SEQ ID NO: 344361
auuagccuaguauaagcau

SEQ ID NO: 344363 - RNA, 19 nt, Artificial Sequence
  Description of Artificial Sequence: Synthetic oligonucleotide
  Sense Strand Starting at position 325 of SEQ ID NO: 315990
cgccuuaaaucucuaagau

SEQ ID NO: 344364 - RNA, 19 nt, Artificial Sequence
  Description of Artificial Sequence: Synthetic oligonucleotide
  Antisense Strand to SEQ ID NO: 344363
aucuuagagauuuaaggcg

SEQ ID NO: 344365 - RNA, 19 nt, Artificial Sequence
  Description of Artificial Sequence: Synthetic oligonucleotide
  Sense Strand Starting at position 325 of SEQ ID NO: 316054
ggguuaccaccuugcaaga

SEQ ID NO: 344366 - RNA, 19 nt, Artificial Sequence
  Description of Artificial Sequence: Synthetic oligonucleotide
  Antisense Strand to SEQ ID NO: 344365
ucuugcaaggugguaaccc

SEQ ID NO: 344367 - RNA, 19 nt, Artificial Sequence
  Description of Artificial Sequence: Synthetic oligonucleotide
  Sense Strand Starting at position 325 of SEQ ID NO: 316252
ugaccaauguugcuacaca

SEQ ID NO: 344368 - RNA, 19 nt, Artificial Sequence
  Description of Artificial Sequence: Synthetic oligonucleotide
  Antisense Strand to SEQ ID NO: 344367
uguguagcaacauugguca

SEQ ID NO: 344369 - RNA, 19 nt, Artificial Sequence
  Description of Artificial Sequence: Synthetic oligonucleotide
  Sense Strand Starting at position 325 of SEQ ID NO: 316271
acgacuagauaugccauau

SEQ ID NO: 344370 - RNA, 19 nt, Artificial Sequence
  Description of Artificial Sequence: Synthetic oligonucleotide
  Antisense Strand to SEQ ID NO: 344369
auauggcauaucuagucgu

SEQ ID NO: 344371 - RNA, 19 nt, Artificial Sequence
  Description of Artificial Sequence: Synthetic oligonucleotide
  Sense Strand Starting at position 325 of SEQ ID NO: 316294
ggcuuaggguuucugagga

SEQ ID NO: 344372 - RNA, 19 nt, Artificial Sequence
  Description of Artificial Sequence: Synthetic oligonucleotide
  Antisense Strand to SEQ ID NO: 344371
uccucagaaacccuaagcc

SEQ ID NO: 344373 - RNA, 19 nt, Artificial Sequence
  Description of Artificial Sequence: Synthetic oligonucleotide
  Sense Strand Starting at position 325 of SEQ ID NO: 316607
cgucguugcgccaaugaag

SEQ ID NO: 344374 - RNA, 19 nt, Artificial Sequence
  Description of Artificial Sequence: Synthetic oligonucleotide
  Antisense Strand to SEQ ID NO: 344373
cuucauuggcgcaacgacg

SEQ ID NO: 344375 - RNA, 19 nt, Artificial Sequence
  Description of Artificial Sequence: Synthetic oligonucleotide
  Sense Strand Starting at position 325 of SEQ ID NO: 317406
gcgccuccugaugcgaaua

SEQ ID NO: 344376 - RNA, 19 nt, Artificial Sequence
  Description of Artificial Sequence: Synthetic oligonucleotide
  Antisense Strand to SEQ ID NO: 344375
uauucgcaucaggaggcgc

SEQ ID NO: 344377 - RNA, 19 nt, Artificial Sequence
  Description of Artificial Sequence: Synthetic oligonucleotide
  Sense Strand Starting at position 325 of SEQ ID NO: 317581
cccaguuugcagggaagau

SEQ ID NO: 344378 - RNA, 19 nt, Artificial Sequence
  Description of Artificial Sequence: Synthetic oligonucleotide
  Antisense Strand to SEQ ID NO: 344377
aucuucccugcaaacuggg

SEQ ID NO: 344379 - RNA, 19 nt, Artificial Sequence
  Description of Artificial Sequence: Synthetic oligonucleotide
  Sense Strand Starting at position 325 of SEQ ID NO: 317596
agaugaaaucaacguguug

SEQ ID NO: 344380 - RNA, 19 nt, Artificial Sequence
  Description of Artificial Sequence: Synthetic oligonucleotide
  Antisense Strand to SEQ ID NO: 344379
caacacguugauuucaucu

SEQ ID NO: 344381 - RNA, 19 nt, Artificial Sequence
  Description of Artificial Sequence: Synthetic oligonucleotide
  Sense Strand Starting at position 325 of SEQ ID NO: 317605
caacguguugguucguuga

SEQ ID NO: 344382 - RNA, 19 nt, Artificial Sequence
  Description of Artificial Sequence: Synthetic oligonucleotide
  Antisense Strand to SEQ ID NO: 344381
ucaacgaaccaacacguug

SEQ ID NO: 344383 - RNA, 19 nt, Artificial Sequence
  Description of Artificial Sequence: Synthetic oligonucleotide
  Sense Strand Starting at position 325 of SEQ ID NO: 317612
uugguucguugauuucgua

SEQ ID NO: 344384 - RNA, 19 nt, Artificial Sequence
  Description of Artificial Sequence: Synthetic oligonucleotide
  Antisense Strand to SEQ ID NO: 344383
uacgaaaucaacgaaccaa

SEQ ID NO: 344385 - RNA, 19 nt, Artificial Sequence
  Description of Artificial Sequence: Synthetic oligonucleotide
  Sense Strand Starting at position 325 of SEQ ID NO: 317616
uucguugauuucguaaacu

SEQ ID NO: 344386 - RNA, 19 nt, Artificial Sequence
  Description of Artificial Sequence: Synthetic oligonucleotide
  Antisense Strand to SEQ ID NO: 344385
aguuuacgaaaucaacgaa

SEQ ID NO: 344387 - RNA, 19 nt, Artificial Sequence
  Description of Artificial Sequence: Synthetic oligonucleotide
  Sense Strand Starting at position 325 of SEQ ID NO: 317680
gagagugccagucauaguu

SEQ ID NO: 344388 - RNA, 19 nt, Artificial Sequence
  Description of Artificial Sequence: Synthetic oligonucleotide
  Antisense Strand to SEQ ID NO: 344387
aacuaugacuggcacucuc

SEQ ID NO: 344389 - RNA, 19 nt, Artificial Sequence
  Description of Artificial Sequence: Synthetic oligonucleotide
  Sense Strand Starting at position 325 of SEQ ID NO: 317688
cagucauaguugcuggaaa

SEQ ID NO: 344390 - RNA, 19 nt, Artificial Sequence
  Description of Artificial Sequence: Synthetic oligonucleotide
  Antisense Strand to SEQ ID NO: 344389
uuuccagcaacuaugacug

SEQ ID NO: 344391 - RNA, 19 nt, Artificial Sequence
  Description of Artificial Sequence: Synthetic oligonucleotide
  Sense Strand Starting at position 325 of SEQ ID NO: 317770
gcuguaguccucuagauaa

SEQ ID NO: 344392 - RNA, 19 nt, Artificial Sequence
  Description of Artificial Sequence: Synthetic oligonucleotide
  Antisense Strand to SEQ ID NO: 344391
uuaucuagaggacuacagc

SEQ ID NO: 344393 - RNA, 19 nt, Artificial Sequence
  Description of Artificial Sequence: Synthetic oligonucleotide
  Sense Strand Starting at position 325 of SEQ ID NO: 317795
aguauagguucaguggaau

SEQ ID NO: 344394 - RNA, 19 nt, Artificial Sequence
  Description of Artificial Sequence: Synthetic oligonucleotide
  Antisense Strand to SEQ ID NO: 344393
auuccacugaaccuauacu

SEQ ID NO: 344395 - RNA, 19 nt, Artificial Sequence
  Description of Artificial Sequence: Synthetic oligonucleotide
  Sense Strand Starting at position 325 of SEQ ID NO: 318198
agaugugaccuuugaggcu

SEQ ID NO: 344396 - RNA, 19 nt, Artificial Sequence
  Description of Artificial Sequence: Synthetic oligonucleotide
  Antisense Strand to SEQ ID NO: 344395
agccucaaaggucacaucu

SEQ ID NO: 344397 - RNA, 19 nt, Artificial Sequence
  Description of Artificial Sequence: Synthetic oligonucleotide
  Sense Strand Starting at position 325 of SEQ ID NO: 318204
gaccuuugaggcuguauga

SEQ ID NO: 344398 - RNA, 19 nt, Artificial Sequence
  Description of Artificial Sequence: Synthetic oligonucleotide
  Antisense Strand to SEQ ID NO: 344397
ucauacagccucaaagguc

SEQ ID NO: 344399 - RNA, 19 nt, Artificial Sequence
  Description of Artificial Sequence: Synthetic oligonucleotide
  Sense Strand Starting at position 325 of SEQ ID NO: 318374
cuguguuguguggagaaua

SEQ ID NO: 344400 - RNA, 19 nt, Artificial Sequence
  Description of Artificial Sequence: Synthetic oligonucleotide
  Antisense Strand to SEQ ID NO: 344399
uauucuccacacaacacag

SEQ ID NO: 344401 - RNA, 19 nt, Artificial Sequence
  Description of Artificial Sequence: Synthetic oligonucleotide
  Sense Strand Starting at position 325 of SEQ ID NO: 318496
agaugacaacauuguguga

SEQ ID NO: 344402 - RNA, 19 nt, Artificial Sequence
  Description of Artificial Sequence: Synthetic oligonucleotide
  Antisense Strand to SEQ ID NO: 344401
ucacacaauguugucaucu

SEQ ID NO: 344403 - RNA, 19 nt, Artificial Sequence
  Description of Artificial Sequence: Synthetic oligonucleotide
  Sense Strand Starting at position 325 of SEQ ID NO: 318500
gacaacauugugugaagga

SEQ ID NO: 344404 - RNA, 19 nt, Artificial Sequence
  Description of Artificial Sequence: Synthetic oligonucleotide
  Antisense Strand to SEQ ID NO: 344403
uccuucacacaauguuguc

SEQ ID NO: 344405 - RNA, 19 nt, Artificial Sequence
  Description of Artificial Sequence: Synthetic oligonucleotide
  Sense Strand Starting at position 325 of SEQ ID NO: 318544
ggagguauuagguacucca

SEQ ID NO: 344406 - RNA, 19 nt, Artificial Sequence
  Description of Artificial Sequence: Synthetic oligonucleotide
  Antisense Strand to SEQ ID NO: 344405
uggaguaccuaauaccucc

SEQ ID NO: 344407 - RNA, 19 nt, Artificial Sequence
  Description of Artificial Sequence: Synthetic oligonucleotide
  Sense Strand Starting at position 325 of SEQ ID NO: 318547
gguauuagguacuccaaga

SEQ ID NO: 344408 - RNA, 19 nt, Artificial Sequence
  Description of Artificial Sequence: Synthetic oligonucleotide
  Antisense Strand to SEQ ID NO: 344407
ucuuggaguaccuaauacc

SEQ ID NO: 344409 - RNA, 19 nt, Artificial Sequence
  Description of Artificial Sequence: Synthetic oligonucleotide
  Sense Strand Starting at position 325 of SEQ ID NO: 318570
agagaaaggagugguuacu

SEQ ID NO: 344410 - RNA, 19 nt, Artificial Sequence
  Description of Artificial Sequence: Synthetic oligonucleotide
  Antisense Strand to SEQ ID NO: 344409
aguaaccacuccuuucucu

SEQ ID NO: 344411 - RNA, 19 nt, Artificial Sequence
  Description of Artificial Sequence: Synthetic oligonucleotide
  Sense Strand Starting at position 325 of SEQ ID NO: 318576
aggagugguuacuccugaa

SEQ ID NO: 344412 - RNA, 19 nt, Artificial Sequence
  Description of Artificial Sequence: Synthetic oligonucleotide
  Antisense Strand to SEQ ID NO: 344411
uucaggaguaaccacuccu

SEQ ID NO: 344413 - RNA, 19 nt, Artificial Sequence
  Description of Artificial Sequence: Synthetic oligonucleotide
  Sense Strand Starting at position 325 of SEQ ID NO: 318583
guuacuccugaauggcaaa

SEQ ID NO: 344414 - RNA, 19 nt, Artificial Sequence
  Description of Artificial Sequence: Synthetic oligonucleotide
  Antisense Strand to SEQ ID NO: 344413
uuugccauucaggaguaac

SEQ ID NO: 344415 - RNA, 19 nt, Artificial Sequence
  Description of Artificial Sequence: Synthetic oligonucleotide
  Sense Strand Starting at position 325 of SEQ ID NO: 318639
agggacaaauccuaggaau

SEQ ID NO: 344416 - RNA, 19 nt, Artificial Sequence
  Description of Artificial Sequence: Synthetic oligonucleotide
  Antisense Strand to SEQ ID NO: 344415
auuccuaggauuugucccu

SEQ ID NO: 344417 - RNA, 19 nt, Artificial Sequence
  Description of Artificial Sequence: Synthetic oligonucleotide
  Sense Strand Starting at position 325 of SEQ ID NO: 318693
gugugcaagcuuuacagga

SEQ ID NO: 344418 - RNA, 19 nt, Artificial Sequence
  Description of Artificial Sequence: Synthetic oligonucleotide
  Antisense Strand to SEQ ID NO: 344417
uccuguaaagcuugcacac

SEQ ID NO: 344419 - RNA, 19 nt, Artificial Sequence
  Description of Artificial Sequence: Synthetic oligonucleotide
  Sense Strand Starting at position 325 of SEQ ID NO: 318825
gagacagagucucuacuca

SEQ ID NO: 344420 - RNA, 19 nt, Artificial Sequence
  Description of Artificial Sequence: Synthetic oligonucleotide
  Antisense Strand to SEQ ID NO: 344419
ugaguagagacucugucuc

SEQ ID NO: 344421 - RNA, 19 nt, Artificial Sequence
  Description of Artificial Sequence: Synthetic oligonucleotide
  Sense Strand Starting at position 325 of SEQ ID NO: 319038
ucaagugguccacacacuu

SEQ ID NO: 344422 - RNA, 19 nt, Artificial Sequence
  Description of Artificial Sequence: Synthetic oligonucleotide
  Antisense Strand to SEQ ID NO: 344421
aaguguguggaccacuuga

SEQ ID NO: 344423 - RNA, 19 nt, Artificial Sequence
  Description of Artificial Sequence: Synthetic oligonucleotide
  Sense Strand Starting at position 325 of SEQ ID NO: 319117
uuagaaagcuuccucugga

SEQ ID NO: 344424 - RNA, 19 nt, Artificial Sequence
  Description of Artificial Sequence: Synthetic oligonucleotide
  Antisense Strand to SEQ ID NO: 344423
uccagaggaagcuuucuaa

SEQ ID NO: 344425 - RNA, 19 nt, Artificial Sequence
  Description of Artificial Sequence: Synthetic oligonucleotide
  Sense Strand Starting at position 325 of SEQ ID NO: 319120
gaaagcuuccucuggaagu

SEQ ID NO: 344426 - RNA, 19 nt, Artificial Sequence
  Description of Artificial Sequence: Synthetic oligonucleotide
  Antisense Strand to SEQ ID NO: 344425
acuuccagaggaagcuuuc

SEQ ID NO: 344427 - RNA, 19 nt, Artificial Sequence
  Description of Artificial Sequence: Synthetic oligonucleotide
  Sense Strand Starting at position 325 of SEQ ID NO: 319122
aagcuuccucuggaaguga

SEQ ID NO: 344428 - RNA, 19 nt, Artificial Sequence
  Description of Artificial Sequence: Synthetic oligonucleotide
  Antisense Strand to SEQ ID NO: 344427
ucacuuccagaggaagcuu

SEQ ID NO: 344429 - RNA, 19 nt, Artificial Sequence
  Description of Artificial Sequence: Synthetic oligonucleotide
  Sense Strand Starting at position 325 of SEQ ID NO: 319144
gguugaaucagcugggaaa

SEQ ID NO: 344430 - RNA, 19 nt, Artificial Sequence
  Description of Artificial Sequence: Synthetic oligonucleotide
  Antisense Strand to SEQ ID NO: 344429
uuucccagcugauucaacc

SEQ ID NO: 344431 - RNA, 19 nt, Artificial Sequence
  Description of Artificial Sequence: Synthetic oligonucleotide
  Sense Strand Starting at position 325 of SEQ ID NO: 319170
cuagcaugcuaauuagauc

SEQ ID NO: 344432 - RNA, 19 nt, Artificial Sequence
  Description of Artificial Sequence: Synthetic oligonucleotide
  Antisense Strand to SEQ ID NO: 344431
gaucuaauuagcaugcuag

SEQ ID NO: 344433 - RNA, 19 nt, Artificial Sequence
  Description of Artificial Sequence: Synthetic oligonucleotide
  Sense Strand Starting at position 326 of SEQ ID NO: 315581
uguaaaguuacuuagacgu

SEQ ID NO: 344434 - RNA, 19 nt, Artificial Sequence
  Description of Artificial Sequence: Synthetic oligonucleotide
  Antisense Strand to SEQ ID NO: 344433
acgucuaaguaacuuuaca

SEQ ID NO: 344435 - RNA, 19 nt, Artificial Sequence
  Description of Artificial Sequence: Synthetic oligonucleotide
  Sense Strand Starting at position 326 of SEQ ID NO: 316167
gaaaguuccugcuuaauga

SEQ ID NO: 344436 - RNA, 19 nt, Artificial Sequence
  Description of Artificial Sequence: Synthetic oligonucleotide
  Antisense Strand to SEQ ID NO: 344435
ucauuaagcaggaacuuuc

SEQ ID NO: 344437 - RNA, 19 nt, Artificial Sequence
  Description of Artificial Sequence: Synthetic oligonucleotide
  Sense Strand Starting at position 326 of SEQ ID NO: 316214
uuacuagucacucggagaa

SEQ ID NO: 344438 - RNA, 19 nt, Artificial Sequence
  Description of Artificial Sequence: Synthetic oligonucleotide
  Antisense Strand to SEQ ID NO: 344437
uucuccgagugacuaguaa

SEQ ID NO: 344439 - RNA, 19 nt, Artificial Sequence
  Description of Artificial Sequence: Synthetic oligonucleotide
  Sense Strand Starting at position 326 of SEQ ID NO: 316218
uagucacucggagaacuuu

SEQ ID NO: 344440 - RNA, 19 nt, Artificial Sequence
  Description of Artificial Sequence: Synthetic oligonucleotide
  Antisense Strand to SEQ ID NO: 344439
aaaguucuccgagugacua

SEQ ID NO: 344441 - RNA, 19 nt, Artificial Sequence
  Description of Artificial Sequence: Synthetic oligonucleotide
  Sense Strand Starting at position 326 of SEQ ID NO: 316227
ggagaacuuuguuucccuu

SEQ ID NO: 344442 - RNA, 19 nt, Artificial Sequence
  Description of Artificial Sequence: Synthetic oligonucleotide
  Antisense Strand to SEQ ID NO: 344441
aagggaaacaaaguucucc

SEQ ID NO: 344443 - RNA, 19 nt, Artificial Sequence
  Description of Artificial Sequence: Synthetic oligonucleotide
  Sense Strand Starting at position 326 of SEQ ID NO: 316235
uuguuucccuuacuacaga

SEQ ID NO: 344444 - RNA, 19 nt, Artificial Sequence
  Description of Artificial Sequence: Synthetic oligonucleotide
  Antisense Strand to SEQ ID NO: 344443
ucuguaguaagggaaacaa

SEQ ID NO: 344445 - RNA, 19 nt, Artificial Sequence
  Description of Artificial Sequence: Synthetic oligonucleotide
  Sense Strand Starting at position 326 of SEQ ID NO: 316303
gccaaaucaucucuggaga

SEQ ID NO: 344446 - RNA, 19 nt, Artificial Sequence
  Description of Artificial Sequence: Synthetic oligonucleotide
  Antisense Strand to SEQ ID NO: 344445
ucuccagagaugauuuggc

SEQ ID NO: 344447 - RNA, 19 nt, Artificial Sequence
  Description of Artificial Sequence: Synthetic oligonucleotide
  Sense Strand Starting at position 326 of SEQ ID NO: 316304
ccaaaucaucucuggagau

SEQ ID NO: 344448 - RNA, 19 nt, Artificial Sequence
  Description of Artificial Sequence: Synthetic oligonucleotide
  Antisense Strand to SEQ ID NO: 344447
aucuccagagaugauuugg

SEQ ID NO: 344449 - RNA, 19 nt, Artificial Sequence
  Description of Artificial Sequence: Synthetic oligonucleotide
  Sense Strand Starting at position 326 of SEQ ID NO: 316346
agaaucugcucaucaauag

SEQ ID NO: 344450 - RNA, 19 nt, Artificial Sequence
  Description of Artificial Sequence: Synthetic oligonucleotide
  Antisense Strand to SEQ ID NO: 344449
cuauugaugagcagauucu

SEQ ID NO: 344451 - RNA, 19 nt, Artificial Sequence
  Description of Artificial Sequence: Synthetic oligonucleotide
  Sense Strand Starting at position 326 of SEQ ID NO: 316645
acauuugcuuugucacagu

SEQ ID NO: 344452 - RNA, 19 nt, Artificial Sequence
  Description of Artificial Sequence: Synthetic oligonucleotide
  Antisense Strand to SEQ ID NO: 344451
acugugacaaagcaaaugu

SEQ ID NO: 344453 - RNA, 19 nt, Artificial Sequence
  Description of Artificial Sequence: Synthetic oligonucleotide
  Sense Strand Starting at position 326 of SEQ ID NO: 316722
ucagaugagcauggcuaau

SEQ ID NO: 344454 - RNA, 19 nt, Artificial Sequence
  Description of Artificial Sequence: Synthetic oligonucleotide
  Antisense Strand to SEQ ID NO: 344453
auuagccaugcucaucuga

SEQ ID NO: 344455 - RNA, 19 nt, Artificial Sequence
  Description of Artificial Sequence: Synthetic oligonucleotide
  Sense Strand Starting at position 326 of SEQ ID NO: 317132
uucugaugguagucauaac

SEQ ID NO: 344456 - RNA, 19 nt, Artificial Sequence
  Description of Artificial Sequence: Synthetic oligonucleotide
  Antisense Strand to SEQ ID NO: 344455
guuaugacuaccaucagaa

SEQ ID NO: 344457 - RNA, 19 nt, Artificial Sequence
  Description of Artificial Sequence: Synthetic oligonucleotide
  Sense Strand Starting at position 326 of SEQ ID NO: 317518
guaguaaacguugauugaa

SEQ ID NO: 344458 - RNA, 19 nt, Artificial Sequence
  Description of Artificial Sequence: Synthetic oligonucleotide
  Antisense Strand to SEQ ID NO: 344457
uucaaucaacguuuacuac

SEQ ID NO: 344459 - RNA, 19 nt, Artificial Sequence
  Description of Artificial Sequence: Synthetic oligonucleotide
  Sense Strand Starting at position 326 of SEQ ID NO: 317520
aguaaacguugauugaaac

SEQ ID NO: 344460 - RNA, 19 nt, Artificial Sequence
  Description of Artificial Sequence: Synthetic oligonucleotide
  Antisense Strand to SEQ ID NO: 344459
guuucaaucaacguuuacu

SEQ ID NO: 344461 - RNA, 19 nt, Artificial Sequence
  Description of Artificial Sequence: Synthetic oligonucleotide
  Sense Strand Starting at position 326 of SEQ ID NO: 317521
guaaacguugauugaaaca

SEQ ID NO: 344462 - RNA, 19 nt, Artificial Sequence
  Description of Artificial Sequence: Synthetic oligonucleotide
  Antisense Strand to SEQ ID NO: 344461
uguuucaaucaacguuuac

SEQ ID NO: 344463 - RNA, 19 nt, Artificial Sequence
  Description of Artificial Sequence: Synthetic oligonucleotide
  Sense Strand Starting at position 326 of SEQ ID NO: 317733
agagcucuuaggcaaugua

SEQ ID NO: 344464 - RNA, 19 nt, Artificial Sequence
  Description of Artificial Sequence: Synthetic oligonucleotide
  Antisense Strand to SEQ ID NO: 344463
uacauugccuaagagcucu

SEQ ID NO: 344465 - RNA, 19 nt, Artificial Sequence
  Description of Artificial Sequence: Synthetic oligonucleotide
  Sense Strand Starting at position 326 of SEQ ID NO: 317832
gcuguucuugaauaaucaa

SEQ ID NO: 344466 - RNA, 19 nt, Artificial Sequence
  Description of Artificial Sequence: Synthetic oligonucleotide
  Antisense Strand to SEQ ID NO: 344465
uugauuauucaagaacagc

SEQ ID NO: 344467 - RNA, 19 nt, Artificial Sequence
  Description of Artificial Sequence: Synthetic oligonucleotide
  Sense Strand Starting at position 326 of SEQ ID NO: 317835
guucuugaauaaucaagua

SEQ ID NO: 344468 - RNA, 19 nt, Artificial Sequence
  Description of Artificial Sequence: Synthetic oligonucleotide
  Antisense Strand to SEQ ID NO: 344467
uacuugauuauucaagaac

SEQ ID NO: 344469 - RNA, 19 nt, Artificial Sequence
  Description of Artificial Sequence: Synthetic oligonucleotide
  Sense Strand Starting at position 326 of SEQ ID NO: 317886
agauauccagcucauguua

SEQ ID NO: 344470 - RNA, 19 nt, Artificial Sequence
  Description of Artificial Sequence: Synthetic oligonucleotide
  Antisense Strand to SEQ ID NO: 344469
uaacaugagcuggauaucu

SEQ ID NO: 344471 - RNA, 19 nt, Artificial Sequence
  Description of Artificial Sequence: Synthetic oligonucleotide
  Sense Strand Starting at position 326 of SEQ ID NO: 317906
aguuaacugauguaaaggu

SEQ ID NO: 344472 - RNA, 19 nt, Artificial Sequence
  Description of Artificial Sequence: Synthetic oligonucleotide
  Antisense Strand to SEQ ID NO: 344471
accuuuacaucaguuaacu

SEQ ID NO: 344473 - RNA, 19 nt, Artificial Sequence
  Description of Artificial Sequence: Synthetic oligonucleotide
  Sense Strand Starting at position 326 of SEQ ID NO: 317949
caaguauggcaugagcuuu

SEQ ID NO: 344474 - RNA, 19 nt, Artificial Sequence
  Description of Artificial Sequence: Synthetic oligonucleotide
  Antisense Strand to SEQ ID NO: 344473
aaagcucaugccauacuug

SEQ ID NO: 344475 - RNA, 19 nt, Artificial Sequence
  Description of Artificial Sequence: Synthetic oligonucleotide
  Sense Strand Starting at position 326 of SEQ ID NO: 318008
ugugcagugaauuaagaaa

SEQ ID NO: 344476 - RNA, 19 nt, Artificial Sequence
  Description of Artificial Sequence: Synthetic oligonucleotide
  Antisense Strand to SEQ ID NO: 344475
uuucuuaauucacugcaca

SEQ ID NO: 344477 - RNA, 19 nt, Artificial Sequence
  Description of Artificial Sequence: Synthetic oligonucleotide
  Sense Strand Starting at position 326 of SEQ ID NO: 318026
agggaaaugcuguaugcca

SEQ ID NO: 344478 - RNA, 19 nt, Artificial Sequence
  Description of Artificial Sequence: Synthetic oligonucleotide
  Antisense Strand to SEQ ID NO: 344477
uggcauacagcauuucccu

SEQ ID NO: 344479 - RNA, 19 nt, Artificial Sequence
  Description of Artificial Sequence: Synthetic oligonucleotide
  Sense Strand Starting at position 326 of SEQ ID NO: 318190
gacucuuaucacuggaggu

SEQ ID NO: 344480 - RNA, 19 nt, Artificial Sequence
  Description of Artificial Sequence: Synthetic oligonucleotide
  Antisense Strand to SEQ ID NO: 344479
accuccagugauaagaguc

SEQ ID NO: 344481 - RNA, 19 nt, Artificial Sequence
  Description of Artificial Sequence: Synthetic oligonucleotide
  Sense Strand Starting at position 326 of SEQ ID NO: 318192
cucuuaucacuggagguua

SEQ ID NO: 344482 - RNA, 19 nt, Artificial Sequence
  Description of Artificial Sequence: Synthetic oligonucleotide
  Antisense Strand to SEQ ID NO: 344481
uaaccuccagugauaagag

SEQ ID NO: 344483 - RNA, 19 nt, Artificial Sequence
  Description of Artificial Sequence: Synthetic oligonucleotide
  Sense Strand Starting at position 326 of SEQ ID NO: 318194
cuuaucacuggagguuaga

SEQ ID NO: 344484 - RNA, 19 nt, Artificial Sequence
  Description of Artificial Sequence: Synthetic oligonucleotide
  Antisense Strand to SEQ ID NO: 344483
ucuaaccuccagugauaag

SEQ ID NO: 344485 - RNA, 19 nt, Artificial Sequence
  Description of Artificial Sequence: Synthetic oligonucleotide
  Sense Strand Starting at position 326 of SEQ ID NO: 318227
uugaauagacauugucaca

SEQ ID NO: 344486 - RNA, 19 nt, Artificial Sequence
  Description of Artificial Sequence: Synthetic oligonucleotide
  Antisense Strand to SEQ ID NO: 344485
ugugacaaugucuauucaa

SEQ ID NO: 344487 - RNA, 19 nt, Artificial Sequence
  Description of Artificial Sequence: Synthetic oligonucleotide
  Sense Strand Starting at position 326 of SEQ ID NO: 318339
ccuuuauaagaugguagau

SEQ ID NO: 344488 - RNA, 19 nt, Artificial Sequence
  Description of Artificial Sequence: Synthetic oligonucleotide
  Antisense Strand to SEQ ID NO: 344487
aucuaccaucuuauaaagg

SEQ ID NO: 344489 - RNA, 19 nt, Artificial Sequence
  Description of Artificial Sequence: Synthetic oligonucleotide
  Sense Strand Starting at position 326 of SEQ ID NO: 318390
uucugugaacucuauuaug

SEQ ID NO: 344490 - RNA, 19 nt, Artificial Sequence
  Description of Artificial Sequence: Synthetic oligonucleotide
  Antisense Strand to SEQ ID NO: 344489
cauaauagaguucacagaa

SEQ ID NO: 344491 - RNA, 19 nt, Artificial Sequence
  Description of Artificial Sequence: Synthetic oligonucleotide
  Sense Strand Starting at position 326 of SEQ ID NO: 318559
aggugaguuaugcaacaac

SEQ ID NO: 344492 - RNA, 19 nt, Artificial Sequence
  Description of Artificial Sequence: Synthetic oligonucleotide
  Antisense Strand to SEQ ID NO: 344491
guuguugcauaacucaccu

SEQ ID NO: 344493 - RNA, 19 nt, Artificial Sequence
  Description of Artificial Sequence: Synthetic oligonucleotide
  Sense Strand Starting at position 326 of SEQ ID NO: 318562
ugaguuaugcaacaacuuu

SEQ ID NO: 344494 - RNA, 19 nt, Artificial Sequence
  Description of Artificial Sequence: Synthetic oligonucleotide
  Antisense Strand to SEQ ID NO: 344493
aaaguuguugcauaacuca

SEQ ID NO: 344495 - RNA, 19 nt, Artificial Sequence
  Description of Artificial Sequence: Synthetic oligonucleotide
  Sense Strand Starting at position 326 of SEQ ID NO: 318664
augugagacaucggagaac

SEQ ID NO: 344496 - RNA, 19 nt, Artificial Sequence
  Description of Artificial Sequence: Synthetic oligonucleotide
  Antisense Strand to SEQ ID NO: 344495
guucuccgaugucucacau

SEQ ID NO: 344497 - RNA, 19 nt, Artificial Sequence
  Description of Artificial Sequence: Synthetic oligonucleotide
  Sense Strand Starting at position 326 of SEQ ID NO: 318778
cagugauauguuuaugcag

SEQ ID NO: 344498 - RNA, 19 nt, Artificial Sequence
  Description of Artificial Sequence: Synthetic oligonucleotide
  Antisense Strand to SEQ ID NO: 344497
cugcauaaacauaucacug

SEQ ID NO: 344499 - RNA, 19 nt, Artificial Sequence
  Description of Artificial Sequence: Synthetic oligonucleotide
  Sense Strand Starting at position 326 of SEQ ID NO: 318855
cagggaaacuaguuaaugu

SEQ ID NO: 344500 - RNA, 19 nt, Artificial Sequence
  Description of Artificial Sequence: Synthetic oligonucleotide
  Antisense Strand to SEQ ID NO: 344499
acauuaacuaguuucccug

SEQ ID NO: 344501 - RNA, 19 nt, Artificial Sequence
  Description of Artificial Sequence: Synthetic oligonucleotide
  Sense Strand Starting at position 326 of SEQ ID NO: 318902
gggcauuacauguggaaag

SEQ ID NO: 344502 - RNA, 19 nt, Artificial Sequence
  Description of Artificial Sequence: Synthetic oligonucleotide
  Antisense Strand to SEQ ID NO: 344501
cuuuccacauguaaugccc

SEQ ID NO: 344503 - RNA, 19 nt, Artificial Sequence
  Description of Artificial Sequence: Synthetic oligonucleotide
  Sense Strand Starting at position 326 of SEQ ID NO: 318995
guuaaacgacuccaaguuu

SEQ ID NO: 344504 - RNA, 19 nt, Artificial Sequence
  Description of Artificial Sequence: Synthetic oligonucleotide
  Antisense Strand to SEQ ID NO: 344503
aaacuuggagucguuuaac

SEQ ID NO: 344505 - RNA, 19 nt, Artificial Sequence
  Description of Artificial Sequence: Synthetic oligonucleotide
  Sense Strand Starting at position 326 of SEQ ID NO: 319001
cgacuccaaguuuaagauu

SEQ ID NO: 344506 - RNA, 19 nt, Artificial Sequence
  Description of Artificial Sequence: Synthetic oligonucleotide
  Antisense Strand to SEQ ID NO: 344505
aaucuuaaacuuggagucg

SEQ ID NO: 344507 - RNA, 19 nt, Artificial Sequence
  Description of Artificial Sequence: Synthetic oligonucleotide
  Sense Strand Starting at position 326 of SEQ ID NO: 319004
cuccaaguuuaagauuuga

SEQ ID NO: 344508 - RNA, 19 nt, Artificial Sequence
  Description of Artificial Sequence: Synthetic oligonucleotide
  Antisense Strand to SEQ ID NO: 344507
ucaaaucuuaaacuuggag

SEQ ID NO: 344509 - RNA, 19 nt, Artificial Sequence
  Description of Artificial Sequence: Synthetic oligonucleotide
  Sense Strand Starting at position 326 of SEQ ID NO: 319041
ggcacauuguauccugaga

SEQ ID NO: 344510 - RNA, 19 nt, Artificial Sequence
  Description of Artificial Sequence: Synthetic oligonucleotide
  Antisense Strand to SEQ ID NO: 344509
ucucaggauacaaugugcc

SEQ ID NO: 344511 - RNA, 19 nt, Artificial Sequence
  Description of Artificial Sequence: Synthetic oligonucleotide
  Sense Strand Starting at position 326 of SEQ ID NO: 319173
gaaagcaggcuguaagagu

SEQ ID NO: 344512 - RNA, 19 nt, Artificial Sequence
  Description of Artificial Sequence: Synthetic oligonucleotide
  Antisense Strand to SEQ ID NO: 344511
acucuuacagccugcuuuc

SEQ ID NO: 344513 - RNA, 19 nt, Artificial Sequence
  Description of Artificial Sequence: Synthetic oligonucleotide
  Sense Strand Starting at position 327 of SEQ ID NO: 315633
guggaacccaugugaauag

SEQ ID NO: 344514 - RNA, 19 nt, Artificial Sequence
  Description of Artificial Sequence: Synthetic oligonucleotide
  Antisense Strand to SEQ ID NO: 344513
cuauucacauggguuccac

SEQ ID NO: 344515 - RNA, 19 nt, Artificial Sequence
  Description of Artificial Sequence: Synthetic oligonucleotide
  Sense Strand Starting at position 327 of SEQ ID NO: 316011
gguagacugucacuacuaa

SEQ ID NO: 344516 - RNA, 19 nt, Artificial Sequence
  Description of Artificial Sequence: Synthetic oligonucleotide
  Antisense Strand to SEQ ID NO: 344515
uuaguagugacagucuacc

SEQ ID NO: 344517 - RNA, 19 nt, Artificial Sequence
  Description of Artificial Sequence: Synthetic oligonucleotide
  Sense Strand Starting at position 327 of SEQ ID NO: 316012
guagacugucacuacuaau

SEQ ID NO: 344518 - RNA, 19 nt, Artificial Sequence
  Description of Artificial Sequence: Synthetic oligonucleotide
  Antisense Strand to SEQ ID NO: 344517
auuaguagugacagucuac

SEQ ID NO: 344519 - RNA, 19 nt, Artificial Sequence
  Description of Artificial Sequence: Synthetic oligonucleotide
  Sense Strand Starting at position 327 of SEQ ID NO: 316113
gguaaagugagauguccag

SEQ ID NO: 344520 - RNA, 19 nt, Artificial Sequence
  Description of Artificial Sequence: Synthetic oligonucleotide
  Antisense Strand to SEQ ID NO: 344519
cuggacaucucacuuuacc

SEQ ID NO: 344521 - RNA, 19 nt, Artificial Sequence
  Description of Artificial Sequence: Synthetic oligonucleotide
  Sense Strand Starting at position 327 of SEQ ID NO: 316117
aagugagauguccagggua

SEQ ID NO: 344522 - RNA, 19 nt, Artificial Sequence
  Description of Artificial Sequence: Synthetic oligonucleotide
  Antisense Strand to SEQ ID NO: 344521
uacccuggacaucucacuu

SEQ ID NO: 344523 - RNA, 19 nt, Artificial Sequence
  Description of Artificial Sequence: Synthetic oligonucleotide
  Sense Strand Starting at position 327 of SEQ ID NO: 316120
ugagauguccaggguacca

SEQ ID NO: 344524 - RNA, 19 nt, Artificial Sequence
  Description of Artificial Sequence: Synthetic oligonucleotide
  Antisense Strand to SEQ ID NO: 344523
ugguacccuggacaucuca

SEQ ID NO: 344525 - RNA, 19 nt, Artificial Sequence
  Description of Artificial Sequence: Synthetic oligonucleotide
  Sense Strand Starting at position 327 of SEQ ID NO: 316161
aucugcaagcuuuaauuga

SEQ ID NO: 344526 - RNA, 19 nt, Artificial Sequence
  Description of Artificial Sequence: Synthetic oligonucleotide
  Antisense Strand to SEQ ID NO: 344525
ucaauuaaagcuugcagau

SEQ ID NO: 344527 - RNA, 19 nt, Artificial Sequence
  Description of Artificial Sequence: Synthetic oligonucleotide
  Sense Strand Starting at position 327 of SEQ ID NO: 316268
agaucugaguuucccaaua

SEQ ID NO: 344528 - RNA, 19 nt, Artificial Sequence
  Description of Artificial Sequence: Synthetic oligonucleotide
  Antisense Strand to SEQ ID NO: 344527
uauugggaaacucagaucu

SEQ ID NO: 344529 - RNA, 19 nt, Artificial Sequence
  Description of Artificial Sequence: Synthetic oligonucleotide
  Sense Strand Starting at position 327 of SEQ ID NO: 316273
ugaguuucccaauagcucu

SEQ ID NO: 344530 - RNA, 19 nt, Artificial Sequence
  Description of Artificial Sequence: Synthetic oligonucleotide
  Antisense Strand to SEQ ID NO: 344529
agagcuauugggaaacuca

SEQ ID NO: 344531 - RNA, 19 nt, Artificial Sequence
  Description of Artificial Sequence: Synthetic oligonucleotide
  Sense Strand Starting at position 327 of SEQ ID NO: 316294
cugggcuggagucaucuau

SEQ ID NO: 344532 - RNA, 19 nt, Artificial Sequence
  Description of Artificial Sequence: Synthetic oligonucleotide
  Antisense Strand to SEQ ID NO: 344531
auagaugacuccagcccag

SEQ ID NO: 344533 - RNA, 19 nt, Artificial Sequence
  Description of Artificial Sequence: Synthetic oligonucleotide
  Sense Strand Starting at position 327 of SEQ ID NO: 316565
guugccuuuccauauuugu

SEQ ID NO: 344534 - RNA, 19 nt, Artificial Sequence
  Description of Artificial Sequence: Synthetic oligonucleotide
  Antisense Strand to SEQ ID NO: 344533
acaaauauggaaaggcaac

SEQ ID NO: 344535 - RNA, 19 nt, Artificial Sequence
  Description of Artificial Sequence: Synthetic oligonucleotide
  Sense Strand Starting at position 327 of SEQ ID NO: 316597
gaggguuccuaagucagaa

SEQ ID NO: 344536 - RNA, 19 nt, Artificial Sequence
  Description of Artificial Sequence: Synthetic oligonucleotide
  Antisense Strand to SEQ ID NO: 344535
uucugacuuaggaacccuc

SEQ ID NO: 344537 - RNA, 19 nt, Artificial Sequence
  Description of Artificial Sequence: Synthetic oligonucleotide
  Sense Strand Starting at position 327 of SEQ ID NO: 317467
ggguguuuggaggaagugu

SEQ ID NO: 344538 - RNA, 19 nt, Artificial Sequence
  Description of Artificial Sequence: Synthetic oligonucleotide
  Antisense Strand to SEQ ID NO: 344537
acacuuccuccaaacaccc

SEQ ID NO: 344539 - RNA, 19 nt, Artificial Sequence
  Description of Artificial Sequence: Synthetic oligonucleotide
  Sense Strand Starting at position 327 of SEQ ID NO: 317475
ggaggaaguguccaaguua

SEQ ID NO: 344540 - RNA, 19 nt, Artificial Sequence
  Description of Artificial Sequence: Synthetic oligonucleotide
  Antisense Strand to SEQ ID NO: 344539
uaacuuggacacuuccucc

SEQ ID NO: 344541 - RNA, 19 nt, Artificial Sequence
  Description of Artificial Sequence: Synthetic oligonucleotide
  Sense Strand Starting at position 327 of SEQ ID NO: 317511
acaacucagugaccuguua

SEQ ID NO: 344542 - RNA, 19 nt, Artificial Sequence
  Description of Artificial Sequence: Synthetic oligonucleotide
  Antisense Strand to SEQ ID NO: 344541
uaacaggucacugaguugu

SEQ ID NO: 344543 - RNA, 19 nt, Artificial Sequence
  Description of Artificial Sequence: Synthetic oligonucleotide
  Sense Strand Starting at position 327 of SEQ ID NO: 317605
auuauaggcgaaggauaaa

SEQ ID NO: 344544 - RNA, 19 nt, Artificial Sequence
  Description of Artificial Sequence: Synthetic oligonucleotide
  Antisense Strand to SEQ ID NO: 344543
uuuauccuucgccuauaau

SEQ ID NO: 344545 - RNA, 19 nt, Artificial Sequence
  Description of Artificial Sequence: Synthetic oligonucleotide
  Sense Strand Starting at position 327 of SEQ ID NO: 317663
aucauuucuuacgugcaau

SEQ ID NO: 344546 - RNA, 19 nt, Artificial Sequence
  Description of Artificial Sequence: Synthetic oligonucleotide
  Antisense Strand to SEQ ID NO: 344545
auugcacguaagaaaugau

SEQ ID NO: 344547 - RNA, 19 nt, Artificial Sequence
  Description of Artificial Sequence: Synthetic oligonucleotide
  Sense Strand Starting at position 327 of SEQ ID NO: 317773
acccauuucgccugccaau

SEQ ID NO: 344548 - RNA, 19 nt, Artificial Sequence
  Description of Artificial Sequence: Synthetic oligonucleotide
  Antisense Strand to SEQ ID NO: 344547
auuggcaggcgaaaugggu

SEQ ID NO: 344549 - RNA, 19 nt, Artificial Sequence
  Description of Artificial Sequence: Synthetic oligonucleotide
  Sense Strand Starting at position 327 of SEQ ID NO: 317787
ccaauaggcgagcaauaaa

SEQ ID NO: 344550 - RNA, 19 nt, Artificial Sequence
  Description of Artificial Sequence: Synthetic oligonucleotide
  Antisense Strand to SEQ ID NO: 344549
uuuauugcucgccuauugg

SEQ ID NO: 344551 - RNA, 19 nt, Artificial Sequence
  Description of Artificial Sequence: Synthetic oligonucleotide
  Sense Strand Starting at position 327 of SEQ ID NO: 317805
agguauguccaguaaaguu

SEQ ID NO: 344552 - RNA, 19 nt, Artificial Sequence
  Description of Artificial Sequence: Synthetic oligonucleotide
  Antisense Strand to SEQ ID NO: 344551
aacuuuacuggacauaccu

SEQ ID NO: 344553 - RNA, 19 nt, Artificial Sequence
  Description of Artificial Sequence: Synthetic oligonucleotide
  Sense Strand Starting at position 327 of SEQ ID NO: 317812
uccaguaaaguuggaagau

SEQ ID NO: 344554 - RNA, 19 nt, Artificial Sequence
  Description of Artificial Sequence: Synthetic oligonucleotide
  Antisense Strand to SEQ ID NO: 344553
aucuuccaacuuuacugga

SEQ ID NO: 344555 - RNA, 19 nt, Artificial Sequence
  Description of Artificial Sequence: Synthetic oligonucleotide
  Sense Strand Starting at position 327 of SEQ ID NO: 317844
auccaucuccagugauuau

SEQ ID NO: 344556 - RNA, 19 nt, Artificial Sequence
  Description of Artificial Sequence: Synthetic oligonucleotide
  Antisense Strand to SEQ ID NO: 344555
auaaucacuggagauggau

SEQ ID NO: 344557 - RNA, 19 nt, Artificial Sequence
  Description of Artificial Sequence: Synthetic oligonucleotide
  Sense Strand Starting at position 327 of SEQ ID NO: 317848
aucuccagugauuaugauu

SEQ ID NO: 344558 - RNA, 19 nt, Artificial Sequence
  Description of Artificial Sequence: Synthetic oligonucleotide
  Antisense Strand to SEQ ID NO: 344557
aaucauaaucacuggagau

SEQ ID NO: 344559 - RNA, 19 nt, Artificial Sequence
  Description of Artificial Sequence: Synthetic oligonucleotide
  Sense Strand Starting at position 327 of SEQ ID NO: 317851
uccagugauuaugauuuga

SEQ ID NO: 344560 - RNA, 19 nt, Artificial Sequence
  Description of Artificial Sequence: Synthetic oligonucleotide
  Antisense Strand to SEQ ID NO: 344559
ucaaaucauaaucacugga

SEQ ID NO: 344561 - RNA, 19 nt, Artificial Sequence
  Description of Artificial Sequence: Synthetic oligonucleotide
  Sense Strand Starting at position 327 of SEQ ID NO: 317856
ugauuaugauuugaccaca

SEQ ID NO: 344562 - RNA, 19 nt, Artificial Sequence
  Description of Artificial Sequence: Synthetic oligonucleotide
  Antisense Strand to SEQ ID NO: 344561
uguggucaaaucauaauca

SEQ ID NO: 344563 - RNA, 19 nt, Artificial Sequence
  Description of Artificial Sequence: Synthetic oligonucleotide
  Sense Strand Starting at position 327 of SEQ ID NO: 317885
gaagaaaggugguuguuga

SEQ ID NO: 344564 - RNA, 19 nt, Artificial Sequence
  Description of Artificial Sequence: Synthetic oligonucleotide
  Antisense Strand to SEQ ID NO: 344563
ucaacaaccaccuuucuuc

SEQ ID NO: 344565 - RNA, 19 nt, Artificial Sequence
  Description of Artificial Sequence: Synthetic oligonucleotide
  Sense Strand Starting at position 327 of SEQ ID NO: 317886
aagaaaggugguuguugau

SEQ ID NO: 344566 - RNA, 19 nt, Artificial Sequence
  Description of Artificial Sequence: Synthetic oligonucleotide
  Antisense Strand to SEQ ID NO: 344565
aucaacaaccaccuuucuu

SEQ ID NO: 344567 - RNA, 19 nt, Artificial Sequence
  Description of Artificial Sequence: Synthetic oligonucleotide
  Sense Strand Starting at position 327 of SEQ ID NO: 318001
cuugucuggaucgggaaau

SEQ ID NO: 344568 - RNA, 19 nt, Artificial Sequence
  Description of Artificial Sequence: Synthetic oligonucleotide
  Antisense Strand to SEQ ID NO: 344567
auuucccgauccagacaag

SEQ ID NO: 344569 - RNA, 19 nt, Artificial Sequence
  Description of Artificial Sequence: Synthetic oligonucleotide
  Sense Strand Starting at position 327 of SEQ ID NO: 318032
acgcaaucacaggauucuu

SEQ ID NO: 344570 - RNA, 19 nt, Artificial Sequence
  Description of Artificial Sequence: Synthetic oligonucleotide
  Antisense Strand to SEQ ID NO: 344569
aagaauccugugauugcgu

SEQ ID NO: 344571 - RNA, 19 nt, Artificial Sequence
  Description of Artificial Sequence: Synthetic oligonucleotide
  Sense Strand Starting at position 327 of SEQ ID NO: 318113
gggcaagagagguguaaga

SEQ ID NO: 344572 - RNA, 19 nt, Artificial Sequence
  Description of Artificial Sequence: Synthetic oligonucleotide
  Antisense Strand to SEQ ID NO: 344571
ucuuacaccucucuugccc

SEQ ID NO: 344573 - RNA, 19 nt, Artificial Sequence
  Description of Artificial Sequence: Synthetic oligonucleotide
  Sense Strand Starting at position 327 of SEQ ID NO: 318280
aaggaaggaucugacuaga

SEQ ID NO: 344574 - RNA, 19 nt, Artificial Sequence
  Description of Artificial Sequence: Synthetic oligonucleotide
  Antisense Strand to SEQ ID NO: 344573
ucuagucagauccuuccuu

SEQ ID NO: 344575 - RNA, 19 nt, Artificial Sequence
  Description of Artificial Sequence: Synthetic oligonucleotide
  Sense Strand Starting at position 327 of SEQ ID NO: 318376
agaccacguguuuguauuu

SEQ ID NO: 344576 - RNA, 19 nt, Artificial Sequence
  Description of Artificial Sequence: Synthetic oligonucleotide
  Antisense Strand to SEQ ID NO: 344575
aaauacaaacacguggucu

SEQ ID NO: 344577 - RNA, 19 nt, Artificial Sequence
  Description of Artificial Sequence: Synthetic oligonucleotide
  Sense Strand Starting at position 327 of SEQ ID NO: 318381
acguguuuguauuuccaca

SEQ ID NO: 344578 - RNA, 19 nt, Artificial Sequence
  Description of Artificial Sequence: Synthetic oligonucleotide
  Antisense Strand to SEQ ID NO: 344577
uguggaaauacaaacacgu

SEQ ID NO: 344579 - RNA, 19 nt, Artificial Sequence
  Description of Artificial Sequence: Synthetic oligonucleotide
  Sense Strand Starting at position 327 of SEQ ID NO: 318691
guccgacccugaguacaaa

SEQ ID NO: 344580 - RNA, 19 nt, Artificial Sequence
  Description of Artificial Sequence: Synthetic oligonucleotide
  Antisense Strand to SEQ ID NO: 344579
uuuguacucagggucggac

SEQ ID NO: 344581 - RNA, 19 nt, Artificial Sequence
  Description of Artificial Sequence: Synthetic oligonucleotide
  Sense Strand Starting at position 327 of SEQ ID NO: 318778
cuggccuugcauuagacua

SEQ ID NO: 344582 - RNA, 19 nt, Artificial Sequence
  Description of Artificial Sequence: Synthetic oligonucleotide
  Antisense Strand to SEQ ID NO: 344581
uagucuaaugcaaggccag

SEQ ID NO: 344583 - RNA, 19 nt, Artificial Sequence
  Description of Artificial Sequence: Synthetic oligonucleotide
  Sense Strand Starting at position 327 of SEQ ID NO: 318785
ugcauuagacuaugaagaa

SEQ ID NO: 344584 - RNA, 19 nt, Artificial Sequence
  Description of Artificial Sequence: Synthetic oligonucleotide
  Antisense Strand to SEQ ID NO: 344583
uucuucauagucuaaugca

SEQ ID NO: 344585 - RNA, 19 nt, Artificial Sequence
  Description of Artificial Sequence: Synthetic oligonucleotide
  Sense Strand Starting at position 327 of SEQ ID NO: 318826
guggcauuucucgaauugu

SEQ ID NO: 344586 - RNA, 19 nt, Artificial Sequence
  Description of Artificial Sequence: Synthetic oligonucleotide
  Antisense Strand to SEQ ID NO: 344585
acaauucgagaaaugccac

SEQ ID NO: 344587 - RNA, 19 nt, Artificial Sequence
  Description of Artificial Sequence: Synthetic oligonucleotide
  Sense Strand Starting at position 327 of SEQ ID NO: 318879
acgagugcuguuucacgca

SEQ ID NO: 344588 - RNA, 19 nt, Artificial Sequence
  Description of Artificial Sequence: Synthetic oligonucleotide
  Antisense Strand to SEQ ID NO: 344587
ugcgugaaacagcacucgu

SEQ ID NO: 344589 - RNA, 19 nt, Artificial Sequence
  Description of Artificial Sequence: Synthetic oligonucleotide
  Sense Strand Starting at position 327 of SEQ ID NO: 319001
gaaggcaaccuuugagauu

SEQ ID NO: 344590 - RNA, 19 nt, Artificial Sequence
  Description of Artificial Sequence: Synthetic oligonucleotide
  Antisense Strand to SEQ ID NO: 344589
aaucucaaagguugccuuc

SEQ ID NO: 344591 - RNA, 19 nt, Artificial Sequence
  Description of Artificial Sequence: Synthetic oligonucleotide
  Sense Strand Starting at position 327 of SEQ ID NO: 319021
auggaaguuaucugagacu

SEQ ID NO: 344592 - RNA, 19 nt, Artificial Sequence
  Description of Artificial Sequence: Synthetic oligonucleotide
  Antisense Strand to SEQ ID NO: 344591
agucucagauaacuuccau

SEQ ID NO: 344593 - RNA, 19 nt, Artificial Sequence
  Description of Artificial Sequence: Synthetic oligonucleotide
  Sense Strand Starting at position 328 of SEQ ID NO: 315655
ugguauaguggcuacuuau

SEQ ID NO: 344594 - RNA, 19 nt, Artificial Sequence
  Description of Artificial Sequence: Synthetic oligonucleotide
  Antisense Strand to SEQ ID NO: 344593
auaaguagccacuauacca

SEQ ID NO: 344595 - RNA, 19 nt, Artificial Sequence
  Description of Artificial Sequence: Synthetic oligonucleotide
  Sense Strand Starting at position 328 of SEQ ID NO: 315663
uggcuacuuaugggacaga

SEQ ID NO: 344596 - RNA, 19 nt, Artificial Sequence
  Description of Artificial Sequence: Synthetic oligonucleotide
  Antisense Strand to SEQ ID NO: 344595
ucugucccauaaguagcca

SEQ ID NO: 344597 - RNA, 19 nt, Artificial Sequence
  Description of Artificial Sequence: Synthetic oligonucleotide
  Sense Strand Starting at position 328 of SEQ ID NO: 315676
gacagauacugagaagaua

SEQ ID NO: 344598 - RNA, 19 nt, Artificial Sequence
  Description of Artificial Sequence: Synthetic oligonucleotide
  Antisense Strand to SEQ ID NO: 344597
uaucuucucaguaucuguc

SEQ ID NO: 344599 - RNA, 19 nt, Artificial Sequence
  Description of Artificial Sequence: Synthetic oligonucleotide
  Sense Strand Starting at position 328 of SEQ ID NO: 315725
gguuuauagguuuauaaug

SEQ ID NO: 344600 - RNA, 19 nt, Artificial Sequence
  Description of Artificial Sequence: Synthetic oligonucleotide
  Antisense Strand to SEQ ID NO: 344599
cauuauaaaccuauaaacc

SEQ ID NO: 344601 - RNA, 19 nt, Artificial Sequence
  Description of Artificial Sequence: Synthetic oligonucleotide
  Sense Strand Starting at position 328 of SEQ ID NO: 315749
uauauucuggcucauguga

SEQ ID NO: 344602 - RNA, 19 nt, Artificial Sequence
  Description of Artificial Sequence: Synthetic oligonucleotide
  Antisense Strand to SEQ ID NO: 344601
ucacaugagccagaauaua

SEQ ID NO: 344603 - RNA, 19 nt, Artificial Sequence
  Description of Artificial Sequence: Synthetic oligonucleotide
  Sense Strand Starting at position 328 of SEQ ID NO: 315762
augugaaugacagggaugu

SEQ ID NO: 344604 - RNA, 19 nt, Artificial Sequence
  Description of Artificial Sequence: Synthetic oligonucleotide
  Antisense Strand to SEQ ID NO: 344603
acaucccugucauucacau

SEQ ID NO: 344605 - RNA, 19 nt, Artificial Sequence
  Description of Artificial Sequence: Synthetic oligonucleotide
  Sense Strand Starting at position 328 of SEQ ID NO: 315766
gaaugacagggaugugagu

SEQ ID NO: 344606 - RNA, 19 nt, Artificial Sequence
  Description of Artificial Sequence: Synthetic oligonucleotide
  Antisense Strand to SEQ ID NO: 344605
acucacaucccugucauuc

SEQ ID NO: 344607 - RNA, 19 nt, Artificial Sequence
  Description of Artificial Sequence: Synthetic oligonucleotide
  Sense Strand Starting at position 328 of SEQ ID NO: 315820
gaagucuuagcagagugaa

SEQ ID NO: 344608 - RNA, 19 nt, Artificial Sequence
  Description of Artificial Sequence: Synthetic oligonucleotide
  Antisense Strand to SEQ ID NO: 344607
uucacucugcuaagacuuc

SEQ ID NO: 344609 - RNA, 19 nt, Artificial Sequence
  Description of Artificial Sequence: Synthetic oligonucleotide
  Sense Strand Starting at position 328 of SEQ ID NO: 315969
uuuguuaaugucuaucuac

SEQ ID NO: 344610 - RNA, 19 nt, Artificial Sequence
  Description of Artificial Sequence: Synthetic oligonucleotide
  Antisense Strand to SEQ ID NO: 344609
guagauagacauuaacaaa

SEQ ID NO: 344611 - RNA, 19 nt, Artificial Sequence
  Description of Artificial Sequence: Synthetic oligonucleotide
  Sense Strand Starting at position 328 of SEQ ID NO: 315985
uaccucaguuagguugaaa

SEQ ID NO: 344612 - RNA, 19 nt, Artificial Sequence
  Description of Artificial Sequence: Synthetic oligonucleotide
  Antisense Strand to SEQ ID NO: 344611
uuucaaccuaacugaggua

SEQ ID NO: 344613 - RNA, 19 nt, Artificial Sequence
  Description of Artificial Sequence: Synthetic oligonucleotide
  Sense Strand Starting at position 328 of SEQ ID NO: 316119
aaauguguuaagugaagga

SEQ ID NO: 344614 - RNA, 19 nt, Artificial Sequence
  Description of Artificial Sequence: Synthetic oligonucleotide
  Antisense Strand to SEQ ID NO: 344613
uccuucacuuaacacauuu

SEQ ID NO: 344615 - RNA, 19 nt, Artificial Sequence
  Description of Artificial Sequence: Synthetic oligonucleotide
  Sense Strand Starting at position 328 of SEQ ID NO: 316123
guguuaagugaaggaauga

SEQ ID NO: 344616 - RNA, 19 nt, Artificial Sequence
  Description of Artificial Sequence: Synthetic oligonucleotide
  Antisense Strand to SEQ ID NO: 344615
ucauuccuucacuuaacac

SEQ ID NO: 344617 - RNA, 19 nt, Artificial Sequence
  Description of Artificial Sequence: Synthetic oligonucleotide
  Sense Strand Starting at position 328 of SEQ ID NO: 316280
gggagucuucaguagugug

SEQ ID NO: 344618 - RNA, 19 nt, Artificial Sequence
  Description of Artificial Sequence: Synthetic oligonucleotide
  Antisense Strand to SEQ ID NO: 344617
cacacuacugaagacuccc

SEQ ID NO: 344619 - RNA, 19 nt, Artificial Sequence
  Description of Artificial Sequence: Synthetic oligonucleotide
  Sense Strand Starting at position 328 of SEQ ID NO: 316411
gcaugaauggcccagucaa

SEQ ID NO: 344620 - RNA, 19 nt, Artificial Sequence
  Description of Artificial Sequence: Synthetic oligonucleotide
  Antisense Strand to SEQ ID NO: 344619
uugacugggccauucaugc

SEQ ID NO: 344621 - RNA, 19 nt, Artificial Sequence
  Description of Artificial Sequence: Synthetic oligonucleotide
  Sense Strand Starting at position 328 of SEQ ID NO: 316428
aagauugugguuugugaua

SEQ ID NO: 344622 - RNA, 19 nt, Artificial Sequence
  Description of Artificial Sequence: Synthetic oligonucleotide
  Antisense Strand to SEQ ID NO: 344621
uaucacaaaccacaaucuu

SEQ ID NO: 344623 - RNA, 19 nt, Artificial Sequence
  Description of Artificial Sequence: Synthetic oligonucleotide
  Sense Strand Starting at position 328 of SEQ ID NO: 316546
aacguaugugucuagagaa

SEQ ID NO: 344624 - RNA, 19 nt, Artificial Sequence
  Description of Artificial Sequence: Synthetic oligonucleotide
  Antisense Strand to SEQ ID NO: 344623
uucucuagacacauacguu

SEQ ID NO: 344625 - RNA, 19 nt, Artificial Sequence
  Description of Artificial Sequence: Synthetic oligonucleotide
  Sense Strand Starting at position 328 of SEQ ID NO: 316581
cagauauaugccgcacguu

SEQ ID NO: 344626 - RNA, 19 nt, Artificial Sequence
  Description of Artificial Sequence: Synthetic oligonucleotide
  Antisense Strand to SEQ ID NO: 344625
aacgugcggcauauaucug

SEQ ID NO: 344627 - RNA, 19 nt, Artificial Sequence
  Description of Artificial Sequence: Synthetic oligonucleotide
  Sense Strand Starting at position 328 of SEQ ID NO: 317667
agauaaauauugguuguca

SEQ ID NO: 344628 - RNA, 19 nt, Artificial Sequence
  Description of Artificial Sequence: Synthetic oligonucleotide
  Antisense Strand to SEQ ID NO: 344627
ugacaaccaauauuuaucu

SEQ ID NO: 344629 - RNA, 19 nt, Artificial Sequence
  Description of Artificial Sequence: Synthetic oligonucleotide
  Sense Strand Starting at position 328 of SEQ ID NO: 317668
gauaaauauugguugucau

SEQ ID NO: 344630 - RNA, 19 nt, Artificial Sequence
  Description of Artificial Sequence: Synthetic oligonucleotide
  Antisense Strand to SEQ ID NO: 344629
augacaaccaauauuuauc

SEQ ID NO: 344631 - RNA, 19 nt, Artificial Sequence
  Description of Artificial Sequence: Synthetic oligonucleotide
  Sense Strand Starting at position 328 of SEQ ID NO: 317669
auaaauauugguugucaug

SEQ ID NO: 344632 - RNA, 19 nt, Artificial Sequence
  Description of Artificial Sequence: Synthetic oligonucleotide
  Antisense Strand to SEQ ID NO: 344631
caugacaaccaauauuuau

SEQ ID NO: 344633 - RNA, 19 nt, Artificial Sequence
  Description of Artificial Sequence: Synthetic oligonucleotide
  Sense Strand Starting at position 328 of SEQ ID NO: 317671
aaauauugguugucaugga

SEQ ID NO: 344634 - RNA, 19 nt, Artificial Sequence
  Description of Artificial Sequence: Synthetic oligonucleotide
  Antisense Strand to SEQ ID NO: 344633
uccaugacaaccaauauuu

SEQ ID NO: 344635 - RNA, 19 nt, Artificial Sequence
  Description of Artificial Sequence: Synthetic oligonucleotide
  Sense Strand Starting at position 328 of SEQ ID NO: 317675
auugguugucauggaacua

SEQ ID NO: 344636 - RNA, 19 nt, Artificial Sequence
  Description of Artificial Sequence: Synthetic oligonucleotide
  Antisense Strand to SEQ ID NO: 344635
uaguuccaugacaaccaau

SEQ ID NO: 344637 - RNA, 19 nt, Artificial Sequence
  Description of Artificial Sequence: Synthetic oligonucleotide
  Sense Strand Starting at position 328 of SEQ ID NO: 317705
aggaacuuagucuguagaa

SEQ ID NO: 344638 - RNA, 19 nt, Artificial Sequence
  Description of Artificial Sequence: Synthetic oligonucleotide
  Antisense Strand to SEQ ID NO: 344637
uucuacagacuaaguuccu

SEQ ID NO: 344639 - RNA, 19 nt, Artificial Sequence
  Description of Artificial Sequence: Synthetic oligonucleotide
  Sense Strand Starting at position 328 of SEQ ID NO: 317706
ggaacuuagucuguagaag

SEQ ID NO: 344640 - RNA, 19 nt, Artificial Sequence
  Description of Artificial Sequence: Synthetic oligonucleotide
  Antisense Strand to SEQ ID NO: 344639
cuucuacagacuaaguucc

SEQ ID NO: 344641 - RNA, 19 nt, Artificial Sequence
  Description of Artificial Sequence: Synthetic oligonucleotide
  Sense Strand Starting at position 328 of SEQ ID NO: 317717
uguagaaggagcgauuacu

SEQ ID NO: 344642 - RNA, 19 nt, Artificial Sequence
  Description of Artificial Sequence: Synthetic oligonucleotide
  Antisense Strand to SEQ ID NO: 344641
aguaaucgcuccuucuaca

SEQ ID NO: 344643 - RNA, 19 nt, Artificial Sequence
  Description of Artificial Sequence: Synthetic oligonucleotide
  Sense Strand Starting at position 328 of SEQ ID NO: 317726
agcgauuacuucuuggaac

SEQ ID NO: 344644 - RNA, 19 nt, Artificial Sequence
  Description of Artificial Sequence: Synthetic oligonucleotide
  Antisense Strand to SEQ ID NO: 344643
guuccaagaaguaaucgcu

SEQ ID NO: 344645 - RNA, 19 nt, Artificial Sequence
  Description of Artificial Sequence: Synthetic oligonucleotide
  Sense Strand Starting at position 328 of SEQ ID NO: 317728
cgauuacuucuuggaacaa

SEQ ID NO: 344646 - RNA, 19 nt, Artificial Sequence
  Description of Artificial Sequence: Synthetic oligonucleotide
  Antisense Strand to SEQ ID NO: 344645
uuguuccaagaaguaaucg

SEQ ID NO: 344647 - RNA, 19 nt, Artificial Sequence
  Description of Artificial Sequence: Synthetic oligonucleotide
  Sense Strand Starting at position 328 of SEQ ID NO: 317831
guacuacaguuaguagaau

SEQ ID NO: 344648 - RNA, 19 nt, Artificial Sequence
  Description of Artificial Sequence: Synthetic oligonucleotide
  Antisense Strand to SEQ ID NO: 344647
auucuacuaacuguaguac

SEQ ID NO: 344649 - RNA, 19 nt, Artificial Sequence
  Description of Artificial Sequence: Synthetic oligonucleotide
  Sense Strand Starting at position 328 of SEQ ID NO: 317837
caguuaguagaaugacaaa

SEQ ID NO: 344650 - RNA, 19 nt, Artificial Sequence
  Description of Artificial Sequence: Synthetic oligonucleotide
  Antisense Strand to SEQ ID NO: 344649
uuugucauucuacuaacug

SEQ ID NO: 344651 - RNA, 19 nt, Artificial Sequence
  Description of Artificial Sequence: Synthetic oligonucleotide
  Sense Strand Starting at position 328 of SEQ ID NO: 318097
gaucauaaguggguuggua

SEQ ID NO: 344652 - RNA, 19 nt, Artificial Sequence
  Description of Artificial Sequence: Synthetic oligonucleotide
  Antisense Strand to SEQ ID NO: 344651
uaccaacccacuuaugauc

SEQ ID NO: 344653 - RNA, 19 nt, Artificial Sequence
  Description of Artificial Sequence: Synthetic oligonucleotide
  Sense Strand Starting at position 328 of SEQ ID NO: 318212
agaucauucugauugcuau

SEQ ID NO: 344654 - RNA, 19 nt, Artificial Sequence
  Description of Artificial Sequence: Synthetic oligonucleotide
  Antisense Strand to SEQ ID NO: 344653
auagcaaucagaaugaucu

SEQ ID NO: 344655 - RNA, 19 nt, Artificial Sequence
  Description of Artificial Sequence: Synthetic oligonucleotide
  Sense Strand Starting at position 328 of SEQ ID NO: 318213
gaucauucugauugcuaug

SEQ ID NO: 344656 - RNA, 19 nt, Artificial Sequence
  Description of Artificial Sequence: Synthetic oligonucleotide
  Antisense Strand to SEQ ID NO: 344655
cauagcaaucagaaugauc

SEQ ID NO: 344657 - RNA, 19 nt, Artificial Sequence
  Description of Artificial Sequence: Synthetic oligonucleotide
  Sense Strand Starting at position 328 of SEQ ID NO: 318218
uucugauugcuaugagaau

SEQ ID NO: 344658 - RNA, 19 nt, Artificial Sequence
  Description of Artificial Sequence: Synthetic oligonucleotide
  Antisense Strand to SEQ ID NO: 344657
auucucauagcaaucagaa

SEQ ID NO: 344659 - RNA, 19 nt, Artificial Sequence
  Description of Artificial Sequence: Synthetic oligonucleotide
  Sense Strand Starting at position 328 of SEQ ID NO: 318258
ucaggaaguucaguuagga

SEQ ID NO: 344660 - RNA, 19 nt, Artificial Sequence
  Description of Artificial Sequence: Synthetic oligonucleotide
  Antisense Strand to SEQ ID NO: 344659
uccuaacugaacuuccuga

SEQ ID NO: 344661 - RNA, 19 nt, Artificial Sequence
  Description of Artificial Sequence: Synthetic oligonucleotide
  Sense Strand Starting at position 328 of SEQ ID NO: 318365
auaagacuugcugguggau

SEQ ID NO: 344662 - RNA, 19 nt, Artificial Sequence
  Description of Artificial Sequence: Synthetic oligonucleotide
  Antisense Strand to SEQ ID NO: 344661
auccaccagcaagucuuau

SEQ ID NO: 344663 - RNA, 19 nt, Artificial Sequence
  Description of Artificial Sequence: Synthetic oligonucleotide
  Sense Strand Starting at position 328 of SEQ ID NO: 318368
agacuugcugguggauaau

SEQ ID NO: 344664 - RNA, 19 nt, Artificial Sequence
  Description of Artificial Sequence: Synthetic oligonucleotide
  Antisense Strand to SEQ ID NO: 344663
auuauccaccagcaagucu

SEQ ID NO: 344665 - RNA, 19 nt, Artificial Sequence
  Description of Artificial Sequence: Synthetic oligonucleotide
  Sense Strand Starting at position 328 of SEQ ID NO: 318446
gggugaugacagcaucacu

SEQ ID NO: 344666 - RNA, 19 nt, Artificial Sequence
  Description of Artificial Sequence: Synthetic oligonucleotide
  Antisense Strand to SEQ ID NO: 344665
agugaugcugucaucaccc

SEQ ID NO: 344667 - RNA, 19 nt, Artificial Sequence
  Description of Artificial Sequence: Synthetic oligonucleotide
  Sense Strand Starting at position 328 of SEQ ID NO: 318483
gcauuuguccagggcagca

SEQ ID NO: 344668 - RNA, 19 nt, Artificial Sequence
  Description of Artificial Sequence: Synthetic oligonucleotide
  Antisense Strand to SEQ ID NO: 344667
ugcugcccuggacaaaugc

SEQ ID NO: 344669 - RNA, 19 nt, Artificial Sequence
  Description of Artificial Sequence: Synthetic oligonucleotide
  Sense Strand Starting at position 328 of SEQ ID NO: 319000
gagggagcuuuggcaaaca

SEQ ID NO: 344670 - RNA, 19 nt, Artificial Sequence
  Description of Artificial Sequence: Synthetic oligonucleotide
  Antisense Strand to SEQ ID NO: 344669
uguuugccaaagcucccuc

SEQ ID NO: 344671 - RNA, 19 nt, Artificial Sequence
  Description of Artificial Sequence: Synthetic oligonucleotide
  Sense Strand Starting at position 328 of SEQ ID NO: 319148
guggucuugucauuuagga

SEQ ID NO: 344672 - RNA, 19 nt, Artificial Sequence
  Description of Artificial Sequence: Synthetic oligonucleotide
  Antisense Strand to SEQ ID NO: 344671
uccuaaaugacaagaccac

SEQ ID NO: 344673 - RNA, 19 nt, Artificial Sequence
  Description of Artificial Sequence: Synthetic oligonucleotide
  Sense Strand Starting at position 329 of SEQ ID NO: 315365
gagugagcaguuuggaaua

SEQ ID NO: 344674 - RNA, 19 nt, Artificial Sequence
  Description of Artificial Sequence: Synthetic oligonucleotide
  Antisense Strand to SEQ ID NO: 344673
uauuccaaacugcucacuc

SEQ ID NO: 344675 - RNA, 19 nt, Artificial Sequence
  Description of Artificial Sequence: Synthetic oligonucleotide
  Sense Strand Starting at position 329 of SEQ ID NO: 315370
agcaguuuggaauaaaugu

SEQ ID NO: 344676 - RNA, 19 nt, Artificial Sequence
  Description of Artificial Sequence: Synthetic oligonucleotide
  Antisense Strand to SEQ ID NO: 344675
acauuuauuccaaacugcu

SEQ ID NO: 344677 - RNA, 19 nt, Artificial Sequence
  Description of Artificial Sequence: Synthetic oligonucleotide
  Sense Strand Starting at position 329 of SEQ ID NO: 315378
ggaauaaauguguacuggu

SEQ ID NO: 344678 - RNA, 19 nt, Artificial Sequence
  Description of Artificial Sequence: Synthetic oligonucleotide
  Antisense Strand to SEQ ID NO: 344677
accaguacacauuuauucc

SEQ ID NO: 344679 - RNA, 19 nt, Artificial Sequence
  Description of Artificial Sequence: Synthetic oligonucleotide
  Sense Strand Starting at position 329 of SEQ ID NO: 315526
cccacaguugcuuacagaa

SEQ ID NO: 344680 - RNA, 19 nt, Artificial Sequence
  Description of Artificial Sequence: Synthetic oligonucleotide
  Antisense Strand to SEQ ID NO: 344679
uucuguaagcaacuguggg

SEQ ID NO: 344681 - RNA, 19 nt, Artificial Sequence
  Description of Artificial Sequence: Synthetic oligonucleotide
  Sense Strand Starting at position 329 of SEQ ID NO: 315539
acagaauagugcuuaguaa

SEQ ID NO: 344682 - RNA, 19 nt, Artificial Sequence
  Description of Artificial Sequence: Synthetic oligonucleotide
  Antisense Strand to SEQ ID NO: 344681
uuacuaagcacuauucugu

SEQ ID NO: 344683 - RNA, 19 nt, Artificial Sequence
  Description of Artificial Sequence: Synthetic oligonucleotide
  Sense Strand Starting at position 329 of SEQ ID NO: 315540
cagaauagugcuuaguaag

SEQ ID NO: 344684 - RNA, 19 nt, Artificial Sequence
  Description of Artificial Sequence: Synthetic oligonucleotide
  Antisense Strand to SEQ ID NO: 344683
cuuacuaagcacuauucug

SEQ ID NO: 344685 - RNA, 19 nt, Artificial Sequence
  Description of Artificial Sequence: Synthetic oligonucleotide
  Sense Strand Starting at position 329 of SEQ ID NO: 315593
gguuauuaaggacaucugu

SEQ ID NO: 344686 - RNA, 19 nt, Artificial Sequence
  Description of Artificial Sequence: Synthetic oligonucleotide
  Antisense Strand to SEQ ID NO: 344685
acagauguccuuaauaacc

SEQ ID NO: 344687 - RNA, 19 nt, Artificial Sequence
  Description of Artificial Sequence: Synthetic oligonucleotide
  Sense Strand Starting at position 329 of SEQ ID NO: 315678
guguuuccaucuucugaaa

SEQ ID NO: 344688 - RNA, 19 nt, Artificial Sequence
  Description of Artificial Sequence: Synthetic oligonucleotide
  Antisense Strand to SEQ ID NO: 344687
uuucagaagauggaaacac

SEQ ID NO: 344689 - RNA, 19 nt, Artificial Sequence
  Description of Artificial Sequence: Synthetic oligonucleotide
  Sense Strand Starting at position 329 of SEQ ID NO: 315705
ggcuuagauucccuaagca

SEQ ID NO: 344690 - RNA, 19 nt, Artificial Sequence
  Description of Artificial Sequence: Synthetic oligonucleotide
  Antisense Strand to SEQ ID NO: 344689
ugcuuagggaaucuaagcc

SEQ ID NO: 344691 - RNA, 19 nt, Artificial Sequence
  Description of Artificial Sequence: Synthetic oligonucleotide
  Sense Strand Starting at position 329 of SEQ ID NO: 315804
gcaagugacaucgacaaca

SEQ ID NO: 344692 - RNA, 19 nt, Artificial Sequence
  Description of Artificial Sequence: Synthetic oligonucleotide
  Antisense Strand to SEQ ID NO: 344691
uguugucgaugucacuugc

SEQ ID NO: 344693 - RNA, 19 nt, Artificial Sequence
  Description of Artificial Sequence: Synthetic oligonucleotide
  Sense Strand Starting at position 329 of SEQ ID NO: 316042
aguugucugucaacgugga

SEQ ID NO: 344694 - RNA, 19 nt, Artificial Sequence
  Description of Artificial Sequence: Synthetic oligonucleotide
  Antisense Strand to SEQ ID NO: 344693
uccacguugacagacaacu

SEQ ID NO: 344695 - RNA, 19 nt, Artificial Sequence
  Description of Artificial Sequence: Synthetic oligonucleotide
  Sense Strand Starting at position 329 of SEQ ID NO: 316116
uccaaacucuccucgaaag

SEQ ID NO: 344696 - RNA, 19 nt, Artificial Sequence
  Description of Artificial Sequence: Synthetic oligonucleotide
  Antisense Strand to SEQ ID NO: 344695
cuuucgaggagaguuugga

SEQ ID NO: 344697 - RNA, 19 nt, Artificial Sequence
  Description of Artificial Sequence: Synthetic oligonucleotide
  Sense Strand Starting at position 329 of SEQ ID NO: 316760
ccgaaacuuuccgccaaga

SEQ ID NO: 344698 - RNA, 19 nt, Artificial Sequence
  Description of Artificial Sequence: Synthetic oligonucleotide
  Antisense Strand to SEQ ID NO: 344697
ucuuggcggaaaguuucgg

SEQ ID NO: 344699 - RNA, 19 nt, Artificial Sequence
  Description of Artificial Sequence: Synthetic oligonucleotide
  Sense Strand Starting at position 329 of SEQ ID NO: 316762
gaaacuuuccgccaagaug

SEQ ID NO: 344700 - RNA, 19 nt, Artificial Sequence
  Description of Artificial Sequence: Synthetic oligonucleotide
  Antisense Strand to SEQ ID NO: 344699
caucuuggcggaaaguuuc

SEQ ID NO: 344701 - RNA, 19 nt, Artificial Sequence
  Description of Artificial Sequence: Synthetic oligonucleotide
  Sense Strand Starting at position 329 of SEQ ID NO: 317400
acuccaggcugauuguuaa

SEQ ID NO: 344702 - RNA, 19 nt, Artificial Sequence
  Description of Artificial Sequence: Synthetic oligonucleotide
  Antisense Strand to SEQ ID NO: 344701
uuaacaaucagccuggagu

SEQ ID NO: 344703 - RNA, 19 nt, Artificial Sequence
  Description of Artificial Sequence: Synthetic oligonucleotide
  Sense Strand Starting at position 329 of SEQ ID NO: 317484
uagagacacugguuaacuu

SEQ ID NO: 344704 - RNA, 19 nt, Artificial Sequence
  Description of Artificial Sequence: Synthetic oligonucleotide
  Antisense Strand to SEQ ID NO: 344703
aaguuaaccagugucucua

SEQ ID NO: 344705 - RNA, 19 nt, Artificial Sequence
  Description of Artificial Sequence: Synthetic oligonucleotide
  Sense Strand Starting at position 329 of SEQ ID NO: 317491
acugguuaacuuggcaaga

SEQ ID NO: 344706 - RNA, 19 nt, Artificial Sequence
  Description of Artificial Sequence: Synthetic oligonucleotide
  Antisense Strand to SEQ ID NO: 344705
ucuugccaaguuaaccagu

SEQ ID NO: 344707 - RNA, 19 nt, Artificial Sequence
  Description of Artificial Sequence: Synthetic oligonucleotide
  Sense Strand Starting at position 329 of SEQ ID NO: 317508
gaguuugaggguuauagua

SEQ ID NO: 344708 - RNA, 19 nt, Artificial Sequence
  Description of Artificial Sequence: Synthetic oligonucleotide
  Antisense Strand to SEQ ID NO: 344707
uacuauaacccucaaacuc

SEQ ID NO: 344709 - RNA, 19 nt, Artificial Sequence
  Description of Artificial Sequence: Synthetic oligonucleotide
  Sense Strand Starting at position 329 of SEQ ID NO: 317548
auuaauuccgaguauggua

SEQ ID NO: 344710 - RNA, 19 nt, Artificial Sequence
  Description of Artificial Sequence: Synthetic oligonucleotide
  Antisense Strand to SEQ ID NO: 344709
uaccauacucggaauuaau

SEQ ID NO: 344711 - RNA, 19 nt, Artificial Sequence
  Description of Artificial Sequence: Synthetic oligonucleotide
  Sense Strand Starting at position 329 of SEQ ID NO: 317550
uaauuccgaguaugguaua

SEQ ID NO: 344712 - RNA, 19 nt, Artificial Sequence
  Description of Artificial Sequence: Synthetic oligonucleotide
  Antisense Strand to SEQ ID NO: 344711
uauaccauacucggaauua

SEQ ID NO: 344713 - RNA, 19 nt, Artificial Sequence
  Description of Artificial Sequence: Synthetic oligonucleotide
  Sense Strand Starting at position 329 of SEQ ID NO: 317555
ccgaguaugguauacuuaa

SEQ ID NO: 344714 - RNA, 19 nt, Artificial Sequence
  Description of Artificial Sequence: Synthetic oligonucleotide
  Antisense Strand to SEQ ID NO: 344713
uuaaguauaccauacucgg

SEQ ID NO: 344715 - RNA, 19 nt, Artificial Sequence
  Description of Artificial Sequence: Synthetic oligonucleotide
  Sense Strand Starting at position 329 of SEQ ID NO: 317994
ggcucuucccaguaaaccu

SEQ ID NO: 344716 - RNA, 19 nt, Artificial Sequence
  Description of Artificial Sequence: Synthetic oligonucleotide
  Antisense Strand to SEQ ID NO: 344715
agguuuacugggaagagcc

SEQ ID NO: 344717 - RNA, 19 nt, Artificial Sequence
  Description of Artificial Sequence: Synthetic oligonucleotide
  Sense Strand Starting at position 329 of SEQ ID NO: 318033
guauccauuggcuaccaaa

SEQ ID NO: 344718 - RNA, 19 nt, Artificial Sequence
  Description of Artificial Sequence: Synthetic oligonucleotide
  Antisense Strand to SEQ ID NO: 344717
uuugguagccaauggauac

SEQ ID NO: 344719 - RNA, 19 nt, Artificial Sequence
  Description of Artificial Sequence: Synthetic oligonucleotide
  Sense Strand Starting at position 329 of SEQ ID NO: 318124
uggauugcaccuuagaauc

SEQ ID NO: 344720 - RNA, 19 nt, Artificial Sequence
  Description of Artificial Sequence: Synthetic oligonucleotide
  Antisense Strand to SEQ ID NO: 344719
gauucuaaggugcaaucca

SEQ ID NO: 344721 - RNA, 19 nt, Artificial Sequence
  Description of Artificial Sequence: Synthetic oligonucleotide
  Sense Strand Starting at position 329 of SEQ ID NO: 318231
cauagacgcuaaucaguaa

SEQ ID NO: 344722 - RNA, 19 nt, Artificial Sequence
  Description of Artificial Sequence: Synthetic oligonucleotide
  Antisense Strand to SEQ ID NO: 344721
uuacugauuagcgucuaug

SEQ ID NO: 344723 - RNA, 19 nt, Artificial Sequence
  Description of Artificial Sequence: Synthetic oligonucleotide
  Sense Strand Starting at position 329 of SEQ ID NO: 318235
gacgcuaaucaguaacaga

SEQ ID NO: 344724 - RNA, 19 nt, Artificial Sequence
  Description of Artificial Sequence: Synthetic oligonucleotide
  Antisense Strand to SEQ ID NO: 344723
ucuguuacugauuagcguc

SEQ ID NO: 344725 - RNA, 19 nt, Artificial Sequence
  Description of Artificial Sequence: Synthetic oligonucleotide
  Sense Strand Starting at position 329 of SEQ ID NO: 318325
agagguauguugguauguu

SEQ ID NO: 344726 - RNA, 19 nt, Artificial Sequence
  Description of Artificial Sequence: Synthetic oligonucleotide
  Antisense Strand to SEQ ID NO: 344725
aacauaccaacauaccucu

SEQ ID NO: 344727 - RNA, 19 nt, Artificial Sequence
  Description of Artificial Sequence: Synthetic oligonucleotide
  Sense Strand Starting at position 329 of SEQ ID NO: 318357
ugugcuuucccggaucaag

SEQ ID NO: 344728 - RNA, 19 nt, Artificial Sequence
  Description of Artificial Sequence: Synthetic oligonucleotide
  Antisense Strand to SEQ ID NO: 344727
cuugauccgggaaagcaca

SEQ ID NO: 344729 - RNA, 19 nt, Artificial Sequence
  Description of Artificial Sequence: Synthetic oligonucleotide
  Sense Strand Starting at position 329 of SEQ ID NO: 318371
ucaagcauccugggaucuu

SEQ ID NO: 344730 - RNA, 19 nt, Artificial Sequence
  Description of Artificial Sequence: Synthetic oligonucleotide
  Antisense Strand to SEQ ID NO: 344729
aagaucccaggaugcuuga

SEQ ID NO: 344731 - RNA, 19 nt, Artificial Sequence
  Description of Artificial Sequence: Synthetic oligonucleotide
  Sense Strand Starting at position 329 of SEQ ID NO: 318505
uagugaaaguggcucauga

SEQ ID NO: 344732 - RNA, 19 nt, Artificial Sequence
  Description of Artificial Sequence: Synthetic oligonucleotide
  Antisense Strand to SEQ ID NO: 344731
ucaugagccacuuucacua

SEQ ID NO: 344733 - RNA, 19 nt, Artificial Sequence
  Description of Artificial Sequence: Synthetic oligonucleotide
  Sense Strand Starting at position 329 of SEQ ID NO: 318507
gugaaaguggcucaugaca

SEQ ID NO: 344734 - RNA, 19 nt, Artificial Sequence
  Description of Artificial Sequence: Synthetic oligonucleotide
  Antisense Strand to SEQ ID NO: 344733
ugucaugagccacuuucac

SEQ ID NO: 344735 - RNA, 19 nt, Artificial Sequence
  Description of Artificial Sequence: Synthetic oligonucleotide
  Sense Strand Starting at position 329 of SEQ ID NO: 318535
cucucaagacuucgcugau

SEQ ID NO: 344736 - RNA, 19 nt, Artificial Sequence
  Description of Artificial Sequence: Synthetic oligonucleotide
  Antisense Strand to SEQ ID NO: 344735
aucagcgaagucuugagag

SEQ ID NO: 344737 - RNA, 19 nt, Artificial Sequence
  Description of Artificial Sequence: Synthetic oligonucleotide
  Sense Strand Starting at position 329 of SEQ ID NO: 318536
ucucaagacuucgcugaug

SEQ ID NO: 344738 - RNA, 19 nt, Artificial Sequence
  Description of Artificial Sequence: Synthetic oligonucleotide
  Antisense Strand to SEQ ID NO: 344737
caucagcgaagucuugaga

SEQ ID NO: 344739 - RNA, 19 nt, Artificial Sequence
  Description of Artificial Sequence: Synthetic oligonucleotide
  Sense Strand Starting at position 329 of SEQ ID NO: 318538
ucaagacuucgcugaugga

SEQ ID NO: 344740 - RNA, 19 nt, Artificial Sequence
  Description of Artificial Sequence: Synthetic oligonucleotide
  Antisense Strand to SEQ ID NO: 344739
uccaucagcgaagucuuga

SEQ ID NO: 344741 - RNA, 19 nt, Artificial Sequence
  Description of Artificial Sequence: Synthetic oligonucleotide
  Sense Strand Starting at position 329 of SEQ ID NO: 318718
uccugcucucaaggauaca

SEQ ID NO: 344742 - RNA, 19 nt, Artificial Sequence
  Description of Artificial Sequence: Synthetic oligonucleotide
  Antisense Strand to SEQ ID NO: 344741
uguauccuugagagcagga

SEQ ID NO: 344743 - RNA, 19 nt, Artificial Sequence
  Description of Artificial Sequence: Synthetic oligonucleotide
  Sense Strand Starting at position 329 of SEQ ID NO: 319070
aguuacuuauugcuggaua

SEQ ID NO: 344744 - RNA, 19 nt, Artificial Sequence
  Description of Artificial Sequence: Synthetic oligonucleotide
  Antisense Strand to SEQ ID NO: 344743
uauccagcaauaaguaacu

SEQ ID NO: 344745 - RNA, 19 nt, Artificial Sequence
  Description of Artificial Sequence: Synthetic oligonucleotide
  Sense Strand Starting at position 329 of SEQ ID NO: 319072
uuacuuauugcuggauaaa

SEQ ID NO: 344746 - RNA, 19 nt, Artificial Sequence
  Description of Artificial Sequence: Synthetic oligonucleotide
  Antisense Strand to SEQ ID NO: 344745
uuuauccagcaauaaguaa

SEQ ID NO: 344747 - RNA, 19 nt, Artificial Sequence
  Description of Artificial Sequence: Synthetic oligonucleotide
  Sense Strand Starting at position 329 of SEQ ID NO: 319139
guuaaacagcgauaaauau

SEQ ID NO: 344748 - RNA, 19 nt, Artificial Sequence
  Description of Artificial Sequence: Synthetic oligonucleotide
  Antisense Strand to SEQ ID NO: 344747
auauuuaucgcuguuuaac

SEQ ID NO: 344749 - RNA, 19 nt, Artificial Sequence
  Description of Artificial Sequence: Synthetic oligonucleotide
  Sense Strand Starting at position 329 of SEQ ID NO: 319148
cgauaaauauuaucucagu

SEQ ID NO: 344750 - RNA, 19 nt, Artificial Sequence
  Description of Artificial Sequence: Synthetic oligonucleotide
  Antisense Strand to SEQ ID NO: 344749
acugagauaauauuuaucg

SEQ ID NO: 344751 - RNA, 19 nt, Artificial Sequence
  Description of Artificial Sequence: Synthetic oligonucleotide
  Sense Strand Starting at position 329 of SEQ ID NO: 319179
ggaauucaggagcggcaua

SEQ ID NO: 344752 - RNA, 19 nt, Artificial Sequence
  Description of Artificial Sequence: Synthetic oligonucleotide
  Antisense Strand to SEQ ID NO: 344751
uaugccgcuccugaauucc

SEQ ID NO: 344753 - RNA, 19 nt, Artificial Sequence
  Description of Artificial Sequence: Synthetic oligonucleotide
  Sense Strand Starting at position 330 of SEQ ID NO: 315257
aaagauaucugucuuguug

SEQ ID NO: 344754 - RNA, 19 nt, Artificial Sequence
  Description of Artificial Sequence: Synthetic oligonucleotide
  Antisense Strand to SEQ ID NO: 344753
caacaagacagauaucuuu

SEQ ID NO: 344755 - RNA, 19 nt, Artificial Sequence
  Description of Artificial Sequence: Synthetic oligonucleotide
  Sense Strand Starting at position 330 of SEQ ID NO: 315638
uauagaacuguugacaguu

SEQ ID NO: 344756 - RNA, 19 nt, Artificial Sequence
  Description of Artificial Sequence: Synthetic oligonucleotide
  Antisense Strand to SEQ ID NO: 344755
aacugucaacaguucuaua

SEQ ID NO: 344757 - RNA, 19 nt, Artificial Sequence
  Description of Artificial Sequence: Synthetic oligonucleotide
  Sense Strand Starting at position 330 of SEQ ID NO: 315644
acuguugacaguuauaguu

SEQ ID NO: 344758 - RNA, 19 nt, Artificial Sequence
  Description of Artificial Sequence: Synthetic oligonucleotide
  Antisense Strand to SEQ ID NO: 344757
aacuauaacugucaacagu

SEQ ID NO: 344759 - RNA, 19 nt, Artificial Sequence
  Description of Artificial Sequence: Synthetic oligonucleotide
  Sense Strand Starting at position 330 of SEQ ID NO: 315843
aguugaacugacugcuuaa

SEQ ID NO: 344760 - RNA, 19 nt, Artificial Sequence
  Description of Artificial Sequence: Synthetic oligonucleotide
  Antisense Strand to SEQ ID NO: 344759
uuaagcagucaguucaacu

SEQ ID NO: 344761 - RNA, 19 nt, Artificial Sequence
  Description of Artificial Sequence: Synthetic oligonucleotide
  Sense Strand Starting at position 330 of SEQ ID NO: 316022
aguauuugcucaucucuuu

SEQ ID NO: 344762 - RNA, 19 nt, Artificial Sequence
  Description of Artificial Sequence: Synthetic oligonucleotide
  Antisense Strand to SEQ ID NO: 344761
aaagagaugagcaaauacu

SEQ ID NO: 344763 - RNA, 19 nt, Artificial Sequence
  Description of Artificial Sequence: Synthetic oligonucleotide
  Sense Strand Starting at position 330 of SEQ ID NO: 316067
auauuccaugacuguguaa

SEQ ID NO: 344764 - RNA, 19 nt, Artificial Sequence
  Description of Artificial Sequence: Synthetic oligonucleotide
  Antisense Strand to SEQ ID NO: 344763
uuacacagucauggaauau

SEQ ID NO: 344765 - RNA, 19 nt, Artificial Sequence
  Description of Artificial Sequence: Synthetic oligonucleotide
  Sense Strand Starting at position 330 of SEQ ID NO: 316165
gccauaauauagcuaagau

SEQ ID NO: 344766 - RNA, 19 nt, Artificial Sequence
  Description of Artificial Sequence: Synthetic oligonucleotide
  Antisense Strand to SEQ ID NO: 344765
aucuuagcuauauuauggc

SEQ ID NO: 344767 - RNA, 19 nt, Artificial Sequence
  Description of Artificial Sequence: Synthetic oligonucleotide
  Sense Strand Starting at position 330 of SEQ ID NO: 316177
cuaagaugucaguauauau

SEQ ID NO: 344768 - RNA, 19 nt, Artificial Sequence
  Description of Artificial Sequence: Synthetic oligonucleotide
  Antisense Strand to SEQ ID NO: 344767
auauauacugacaucuuag

SEQ ID NO: 344769 - RNA, 19 nt, Artificial Sequence
  Description of Artificial Sequence: Synthetic oligonucleotide
  Sense Strand Starting at position 330 of SEQ ID NO: 316387
agaugagcauuauuaauuc

SEQ ID NO: 344770 - RNA, 19 nt, Artificial Sequence
  Description of Artificial Sequence: Synthetic oligonucleotide
  Antisense Strand to SEQ ID NO: 344769
gaauuaauaaugcucaucu

SEQ ID NO: 344771 - RNA, 19 nt, Artificial Sequence
  Description of Artificial Sequence: Synthetic oligonucleotide
  Sense Strand Starting at position 330 of SEQ ID NO: 316413
auguaucaaugggcuuaua

SEQ ID NO: 344772 - RNA, 19 nt, Artificial Sequence
  Description of Artificial Sequence: Synthetic oligonucleotide
  Antisense Strand to SEQ ID NO: 344771
uauaagcccauugauacau

SEQ ID NO: 344773 - RNA, 19 nt, Artificial Sequence
  Description of Artificial Sequence: Synthetic oligonucleotide
  Sense Strand Starting at position 330 of SEQ ID NO: 316699
ccgagaugcagucaauaaa

SEQ ID NO: 344774 - RNA, 19 nt, Artificial Sequence
  Description of Artificial Sequence: Synthetic oligonucleotide
  Antisense Strand to SEQ ID NO: 344773
uuuauugacugcaucucgg

SEQ ID NO: 344775 - RNA, 19 nt, Artificial Sequence
  Description of Artificial Sequence: Synthetic oligonucleotide
  Sense Strand Starting at position 330 of SEQ ID NO: 316847
gcuaguauugccuccucga

SEQ ID NO: 344776 - RNA, 19 nt, Artificial Sequence
  Description of Artificial Sequence: Synthetic oligonucleotide
  Antisense Strand to SEQ ID NO: 344775
ucgaggaggcaauacuagc

SEQ ID NO: 344777 - RNA, 19 nt, Artificial Sequence
  Description of Artificial Sequence: Synthetic oligonucleotide
  Sense Strand Starting at position 330 of SEQ ID NO: 317012
ucacuuguagaucagugaa

SEQ ID NO: 344778 - RNA, 19 nt, Artificial Sequence
  Description of Artificial Sequence: Synthetic oligonucleotide
  Antisense Strand to SEQ ID NO: 344777
uucacugaucuacaaguga

SEQ ID NO: 344779 - RNA, 19 nt, Artificial Sequence
  Description of Artificial Sequence: Synthetic oligonucleotide
  Sense Strand Starting at position 330 of SEQ ID NO: 317069
auuucuuccuaugaaagag

SEQ ID NO: 344780 - RNA, 19 nt, Artificial Sequence
  Description of Artificial Sequence: Synthetic oligonucleotide
  Antisense Strand to SEQ ID NO: 344779
cucuuucauaggaagaaau

SEQ ID NO: 344781 - RNA, 19 nt, Artificial Sequence
  Description of Artificial Sequence: Synthetic oligonucleotide
  Sense Strand Starting at position 330 of SEQ ID NO: 317267
ucgauuagcagguaaagaa

SEQ ID NO: 344782 - RNA, 19 nt, Artificial Sequence
  Description of Artificial Sequence: Synthetic oligonucleotide
  Antisense Strand to SEQ ID NO: 344781
uucuuuaccugcuaaucga

SEQ ID NO: 344783 - RNA, 19 nt, Artificial Sequence
  Description of Artificial Sequence: Synthetic oligonucleotide
  Sense Strand Starting at position 330 of SEQ ID NO: 317277
gguaaagaaggaugcuaua

SEQ ID NO: 344784 - RNA, 19 nt, Artificial Sequence
  Description of Artificial Sequence: Synthetic oligonucleotide
  Antisense Strand to SEQ ID NO: 344783
uauagcauccuucuuuacc

SEQ ID NO: 344785 - RNA, 19 nt, Artificial Sequence
  Description of Artificial Sequence: Synthetic oligonucleotide
  Sense Strand Starting at position 330 of SEQ ID NO: 317289
ugcuauaaacacuggacua

SEQ ID NO: 344786 - RNA, 19 nt, Artificial Sequence
  Description of Artificial Sequence: Synthetic oligonucleotide
  Antisense Strand to SEQ ID NO: 344785
uaguccaguguuuauagca

SEQ ID NO: 344787 - RNA, 19 nt, Artificial Sequence
  Description of Artificial Sequence: Synthetic oligonucleotide
  Sense Strand Starting at position 330 of SEQ ID NO: 317452
agaggauucucucugcaaa

SEQ ID NO: 344788 - RNA, 19 nt, Artificial Sequence
  Description of Artificial Sequence: Synthetic oligonucleotide
  Antisense Strand to SEQ ID NO: 344787
uuugcagagagaauccucu

SEQ ID NO: 344789 - RNA, 19 nt, Artificial Sequence
  Description of Artificial Sequence: Synthetic oligonucleotide
  Sense Strand Starting at position 330 of SEQ ID NO: 317454
aggauucucucugcaaaua

SEQ ID NO: 344790 - RNA, 19 nt, Artificial Sequence
  Description of Artificial Sequence: Synthetic oligonucleotide
  Antisense Strand to SEQ ID NO: 344789
uauuugcagagagaauccu

SEQ ID NO: 344791 - RNA, 19 nt, Artificial Sequence
  Description of Artificial Sequence: Synthetic oligonucleotide
  Sense Strand Starting at position 330 of SEQ ID NO: 317455
ggauucucucugcaaauag

SEQ ID NO: 344792 - RNA, 19 nt, Artificial Sequence
  Description of Artificial Sequence: Synthetic oligonucleotide
  Antisense Strand to SEQ ID NO: 344791
cuauuugcagagagaaucc

SEQ ID NO: 344793 - RNA, 19 nt, Artificial Sequence
  Description of Artificial Sequence: Synthetic oligonucleotide
  Sense Strand Starting at position 330 of SEQ ID NO: 317580
aaaggugcugccuacauua

SEQ ID NO: 344794 - RNA, 19 nt, Artificial Sequence
  Description of Artificial Sequence: Synthetic oligonucleotide
  Antisense Strand to SEQ ID NO: 344793
uaauguaggcagcaccuuu

SEQ ID NO: 344795 - RNA, 19 nt, Artificial Sequence
  Description of Artificial Sequence: Synthetic oligonucleotide
  Sense Strand Starting at position 330 of SEQ ID NO: 317582
aggugcugccuacauuaaa

SEQ ID NO: 344796 - RNA, 19 nt, Artificial Sequence
  Description of Artificial Sequence: Synthetic oligonucleotide
  Antisense Strand to SEQ ID NO: 344795
uuuaauguaggcagcaccu

SEQ ID NO: 344797 - RNA, 19 nt, Artificial Sequence
  Description of Artificial Sequence: Synthetic oligonucleotide
  Sense Strand Starting at position 330 of SEQ ID NO: 317688
ugggucucaagguagauua

SEQ ID NO: 344798 - RNA, 19 nt, Artificial Sequence
  Description of Artificial Sequence: Synthetic oligonucleotide
  Antisense Strand to SEQ ID NO: 344797
uaaucuaccuugagaccca

SEQ ID NO: 344799 - RNA, 19 nt, Artificial Sequence
  Description of Artificial Sequence: Synthetic oligonucleotide
  Sense Strand Starting at position 330 of SEQ ID NO: 317837
aagaauuaacgcugguaaa

SEQ ID NO: 344800 - RNA, 19 nt, Artificial Sequence
  Description of Artificial Sequence: Synthetic oligonucleotide
  Antisense Strand to SEQ ID NO: 344799
uuuaccagcguuaauucuu

SEQ ID NO: 344801 - RNA, 19 nt, Artificial Sequence
  Description of Artificial Sequence: Synthetic oligonucleotide
  Sense Strand Starting at position 330 of SEQ ID NO: 317838
agaauuaacgcugguaaau

SEQ ID NO: 344802 - RNA, 19 nt, Artificial Sequence
  Description of Artificial Sequence: Synthetic oligonucleotide
  Antisense Strand to SEQ ID NO: 344801
auuuaccagcguuaauucu

SEQ ID NO: 344803 - RNA, 19 nt, Artificial Sequence
  Description of Artificial Sequence: Synthetic oligonucleotide
  Sense Strand Starting at position 330 of SEQ ID NO: 317982
aauaguucgccugagaauu

SEQ ID NO: 344804 - RNA, 19 nt, Artificial Sequence
  Description of Artificial Sequence: Synthetic oligonucleotide
  Antisense Strand to SEQ ID NO: 344803
aauucucaggcgaacuauu

SEQ ID NO: 344805 - RNA, 19 nt, Artificial Sequence
  Description of Artificial Sequence: Synthetic oligonucleotide
  Sense Strand Starting at position 330 of SEQ ID NO: 318014
guuauauaugcagauuggu

SEQ ID NO: 344806 - RNA, 19 nt, Artificial Sequence
  Description of Artificial Sequence: Synthetic oligonucleotide
  Antisense Strand to SEQ ID NO: 344805
accaaucugcauauauaac

SEQ ID NO: 344807 - RNA, 19 nt, Artificial Sequence
  Description of Artificial Sequence: Synthetic oligonucleotide
  Sense Strand Starting at position 330 of SEQ ID NO: 318267
cugauaagagcauaucgua

SEQ ID NO: 344808 - RNA, 19 nt, Artificial Sequence
  Description of Artificial Sequence: Synthetic oligonucleotide
  Antisense Strand to SEQ ID NO: 344807
uacgauaugcucuuaucag

SEQ ID NO: 344809 - RNA, 19 nt, Artificial Sequence
  Description of Artificial Sequence: Synthetic oligonucleotide
  Sense Strand Starting at position 330 of SEQ ID NO: 318436
uaaugcugucucuaugaug

SEQ ID NO: 344810 - RNA, 19 nt, Artificial Sequence
  Description of Artificial Sequence: Synthetic oligonucleotide
  Antisense Strand to SEQ ID NO: 344809
caucauagagacagcauua

SEQ ID NO: 344811 - RNA, 19 nt, Artificial Sequence
  Description of Artificial Sequence: Synthetic oligonucleotide
  Sense Strand Starting at position 330 of SEQ ID NO: 318452
augcgucugcugagaagug

SEQ ID NO: 344812 - RNA, 19 nt, Artificial Sequence
  Description of Artificial Sequence: Synthetic oligonucleotide
  Antisense Strand to SEQ ID NO: 344811
cacuucucagcagacgcau

SEQ ID NO: 344813 - RNA, 19 nt, Artificial Sequence
  Description of Artificial Sequence: Synthetic oligonucleotide
  Sense Strand Starting at position 330 of SEQ ID NO: 318457
ucugcugagaagugaacau

SEQ ID NO: 344814 - RNA, 19 nt, Artificial Sequence
  Description of Artificial Sequence: Synthetic oligonucleotide
  Antisense Strand to SEQ ID NO: 344813
auguucacuucucagcaga

SEQ ID NO: 344815 - RNA, 19 nt, Artificial Sequence
  Description of Artificial Sequence: Synthetic oligonucleotide
  Sense Strand Starting at position 330 of SEQ ID NO: 318469
ugaacaugugcucaguaag

SEQ ID NO: 344816 - RNA, 19 nt, Artificial Sequence
  Description of Artificial Sequence: Synthetic oligonucleotide
  Antisense Strand to SEQ ID NO: 344815
cuuacugagcacauguuca

SEQ ID NO: 344817 - RNA, 19 nt, Artificial Sequence
  Description of Artificial Sequence: Synthetic oligonucleotide
  Sense Strand Starting at position 330 of SEQ ID NO: 318487
gggugagagccauguggga

SEQ ID NO: 344818 - RNA, 19 nt, Artificial Sequence
  Description of Artificial Sequence: Synthetic oligonucleotide
  Antisense Strand to SEQ ID NO: 344817
ucccacauggcucucaccc

SEQ ID NO: 344819 - RNA, 19 nt, Artificial Sequence
  Description of Artificial Sequence: Synthetic oligonucleotide
  Sense Strand Starting at position 330 of SEQ ID NO: 318502
gggacucuugagggcaaga

SEQ ID NO: 344820 - RNA, 19 nt, Artificial Sequence
  Description of Artificial Sequence: Synthetic oligonucleotide
  Antisense Strand to SEQ ID NO: 344819
ucuugcccucaagaguccc

SEQ ID NO: 344821 - RNA, 19 nt, Artificial Sequence
  Description of Artificial Sequence: Synthetic oligonucleotide
  Sense Strand Starting at position 330 of SEQ ID NO: 318623
cggaguagagaauguaaga

SEQ ID NO: 344822 - RNA, 19 nt, Artificial Sequence
  Description of Artificial Sequence: Synthetic oligonucleotide
  Antisense Strand to SEQ ID NO: 344821
ucuuacauucucuacuccg

SEQ ID NO: 344823 - RNA, 19 nt, Artificial Sequence
  Description of Artificial Sequence: Synthetic oligonucleotide
  Sense Strand Starting at position 330 of SEQ ID NO: 318807
cuugauccaugucugauga

SEQ ID NO: 344824 - RNA, 19 nt, Artificial Sequence
  Description of Artificial Sequence: Synthetic oligonucleotide
  Antisense Strand to SEQ ID NO: 344823
ucaucagacauggaucaag

SEQ ID NO: 344825 - RNA, 19 nt, Artificial Sequence
  Description of Artificial Sequence: Synthetic oligonucleotide
  Sense Strand Starting at position 330 of SEQ ID NO: 318808
uugauccaugucugaugaa

SEQ ID NO: 344826 - RNA, 19 nt, Artificial Sequence
  Description of Artificial Sequence: Synthetic oligonucleotide
  Antisense Strand to SEQ ID NO: 344825
uucaucagacauggaucaa

SEQ ID NO: 344827 - RNA, 19 nt, Artificial Sequence
  Description of Artificial Sequence: Synthetic oligonucleotide
  Sense Strand Starting at position 330 of SEQ ID NO: 318867
ucugaauuaguauggauga

SEQ ID NO: 344828 - RNA, 19 nt, Artificial Sequence
  Description of Artificial Sequence: Synthetic oligonucleotide
  Antisense Strand to SEQ ID NO: 344827
ucauccauacuaauucaga

SEQ ID NO: 344829 - RNA, 19 nt, Artificial Sequence
  Description of Artificial Sequence: Synthetic oligonucleotide
  Sense Strand Starting at position 330 of SEQ ID NO: 318897
acaacuguugaaugcaaau

SEQ ID NO: 344830 - RNA, 19 nt, Artificial Sequence
  Description of Artificial Sequence: Synthetic oligonucleotide
  Antisense Strand to SEQ ID NO: 344829
auuugcauucaacaguugu

SEQ ID NO: 344831 - RNA, 19 nt, Artificial Sequence
  Description of Artificial Sequence: Synthetic oligonucleotide
  Sense Strand Starting at position 330 of SEQ ID NO: 318969
gugagcaucuauuuauccu

SEQ ID NO: 344832 - RNA, 19 nt, Artificial Sequence
  Description of Artificial Sequence: Synthetic oligonucleotide
  Antisense Strand to SEQ ID NO: 344831
aggauaaauagaugcucac

SEQ ID NO: 344833 - RNA, 19 nt, Artificial Sequence
  Description of Artificial Sequence: Synthetic oligonucleotide
  Sense Strand Starting at position 331 of SEQ ID NO: 315346
aguugucugucaacgugga

SEQ ID NO: 344834 - RNA, 19 nt, Artificial Sequence
  Description of Artificial Sequence: Synthetic oligonucleotide
  Antisense Strand to SEQ ID NO: 344833
uccacguugacagacaacu

SEQ ID NO: 344835 - RNA, 19 nt, Artificial Sequence
  Description of Artificial Sequence: Synthetic oligonucleotide
  Sense Strand Starting at position 331 of SEQ ID NO: 315420
uccaaacucuccucgaaag

SEQ ID NO: 344836 - RNA, 19 nt, Artificial Sequence
  Description of Artificial Sequence: Synthetic oligonucleotide
  Antisense Strand to SEQ ID NO: 344835
cuuucgaggagaguuugga

SEQ ID NO: 344837 - RNA, 19 nt, Artificial Sequence
  Description of Artificial Sequence: Synthetic oligonucleotide
  Sense Strand Starting at position 331 of SEQ ID NO: 316064
ccgaaacuuuccgccaaga

SEQ ID NO: 344838 - RNA, 19 nt, Artificial Sequence
  Description of Artificial Sequence: Synthetic oligonucleotide
  Antisense Strand to SEQ ID NO: 344837
ucuuggcggaaaguuucgg

SEQ ID NO: 344839 - RNA, 19 nt, Artificial Sequence
  Description of Artificial Sequence: Synthetic oligonucleotide
  Sense Strand Starting at position 331 of SEQ ID NO: 316066
gaaacuuuccgccaagaug

SEQ ID NO: 344840 - RNA, 19 nt, Artificial Sequence
  Description of Artificial Sequence: Synthetic oligonucleotide
  Antisense Strand to SEQ ID NO: 344839
caucuuggcggaaaguuuc

SEQ ID NO: 344841 - RNA, 19 nt, Artificial Sequence
  Description of Artificial Sequence: Synthetic oligonucleotide
  Sense Strand Starting at position 331 of SEQ ID NO: 316704
acuccaggcugauuguuaa

SEQ ID NO: 344842 - RNA, 19 nt, Artificial Sequence
  Description of Artificial Sequence: Synthetic oligonucleotide
  Antisense Strand to SEQ ID NO: 344841
uuaacaaucagccuggagu

SEQ ID NO: 344843 - RNA, 19 nt, Artificial Sequence
  Description of Artificial Sequence: Synthetic oligonucleotide
  Sense Strand Starting at position 331 of SEQ ID NO: 316707
ccaggcugauuguuaaguu

SEQ ID NO: 344844 - RNA, 19 nt, Artificial Sequence
  Description of Artificial Sequence: Synthetic oligonucleotide
  Antisense Strand to SEQ ID NO: 344843
aacuuaacaaucagccugg

SEQ ID NO: 344845 - RNA, 19 nt, Artificial Sequence
  Description of Artificial Sequence: Synthetic oligonucleotide
  Sense Strand Starting at position 331 of SEQ ID NO: 316727
cucuucgucccuuaguaau

SEQ ID NO: 344846 - RNA, 19 nt, Artificial Sequence
  Description of Artificial Sequence: Synthetic oligonucleotide
  Antisense Strand to SEQ ID NO: 344845
auuacuaagggacgaagag

SEQ ID NO: 344847 - RNA, 19 nt, Artificial Sequence
  Description of Artificial Sequence: Synthetic oligonucleotide
  Sense Strand Starting at position 331 of SEQ ID NO: 316729
cuucgucccuuaguaauag

SEQ ID NO: 344848 - RNA, 19 nt, Artificial Sequence
  Description of Artificial Sequence: Synthetic oligonucleotide
  Antisense Strand to SEQ ID NO: 344847
cuauuacuaagggacgaag

SEQ ID NO: 344849 - RNA, 19 nt, Artificial Sequence
  Description of Artificial Sequence: Synthetic oligonucleotide
  Sense Strand Starting at position 331 of SEQ ID NO: 316788
uagagacacugguuaacuu

SEQ ID NO: 344850 - RNA, 19 nt, Artificial Sequence
  Description of Artificial Sequence: Synthetic oligonucleotide
  Antisense Strand to SEQ ID NO: 344849
aaguuaaccagugucucua

SEQ ID NO: 344851 - RNA, 19 nt, Artificial Sequence
  Description of Artificial Sequence: Synthetic oligonucleotide
  Sense Strand Starting at position 331 of SEQ ID NO: 316795
acugguuaacuuggcaaga

SEQ ID NO: 344852 - RNA, 19 nt, Artificial Sequence
  Description of Artificial Sequence: Synthetic oligonucleotide
  Antisense Strand to SEQ ID NO: 344851
ucuugccaaguuaaccagu

SEQ ID NO: 344853 - RNA, 19 nt, Artificial Sequence
  Description of Artificial Sequence: Synthetic oligonucleotide
  Sense Strand Starting at position 331 of SEQ ID NO: 316812
gaguuugaggguuauagua

SEQ ID NO: 344854 - RNA, 19 nt, Artificial Sequence
  Description of Artificial Sequence: Synthetic oligonucleotide
  Antisense Strand to SEQ ID NO: 344853
uacuauaacccucaaacuc

SEQ ID NO: 344855 - RNA, 19 nt, Artificial Sequence
  Description of Artificial Sequence: Synthetic oligonucleotide
  Sense Strand Starting at position 331 of SEQ ID NO: 316852
auuaauuccgaguauggua

SEQ ID NO: 344856 - RNA, 19 nt, Artificial Sequence
  Description of Artificial Sequence: Synthetic oligonucleotide
  Antisense Strand to SEQ ID NO: 344855
uaccauacucggaauuaau

SEQ ID NO: 344857 - RNA, 19 nt, Artificial Sequence
  Description of Artificial Sequence: Synthetic oligonucleotide
  Sense Strand Starting at position 331 of SEQ ID NO: 316854
uaauuccgaguaugguaua

SEQ ID NO: 344858 - RNA, 19 nt, Artificial Sequence
  Description of Artificial Sequence: Synthetic oligonucleotide
  Antisense Strand to SEQ ID NO: 344857
uauaccauacucggaauua

SEQ ID NO: 344859 - RNA, 19 nt, Artificial Sequence
  Description of Artificial Sequence: Synthetic oligonucleotide
  Sense Strand Starting at position 331 of SEQ ID NO: 316859
ccgaguaugguauacuuaa

SEQ ID NO: 344860 - RNA, 19 nt, Artificial Sequence
  Description of Artificial Sequence: Synthetic oligonucleotide
  Antisense Strand to SEQ ID NO: 344859
uuaaguauaccauacucgg

SEQ ID NO: 344861 - RNA, 19 nt, Artificial Sequence
  Description of Artificial Sequence: Synthetic oligonucleotide
  Sense Strand Starting at position 331 of SEQ ID NO: 317298
ggcucuucccaguaaaccu

SEQ ID NO: 344862 - RNA, 19 nt, Artificial Sequence
  Description of Artificial Sequence: Synthetic oligonucleotide
  Antisense Strand to SEQ ID NO: 344861
agguuuacugggaagagcc

SEQ ID NO: 344863 - RNA, 19 nt, Artificial Sequence
  Description of Artificial Sequence: Synthetic oligonucleotide
  Sense Strand Starting at position 331 of SEQ ID NO: 317337
guauccauuggcuaccaaa

SEQ ID NO: 344864 - RNA, 19 nt, Artificial Sequence
  Description of Artificial Sequence: Synthetic oligonucleotide
  Antisense Strand to SEQ ID NO: 344863
uuugguagccaauggauac

SEQ ID NO: 344865 - RNA, 19 nt, Artificial Sequence
  Description of Artificial Sequence: Synthetic oligonucleotide
  Sense Strand Starting at position 331 of SEQ ID NO: 317372
cucguauuguaaccuuaac

SEQ ID NO: 344866 - RNA, 19 nt, Artificial Sequence
  Description of Artificial Sequence: Synthetic oligonucleotide
  Antisense Strand to SEQ ID NO: 344865
guuaagguuacaauacgag

SEQ ID NO: 344867 - RNA, 19 nt, Artificial Sequence
  Description of Artificial Sequence: Synthetic oligonucleotide
  Sense Strand Starting at position 331 of SEQ ID NO: 317428
uggauugcaccuuagaauc

SEQ ID NO: 344868 - RNA, 19 nt, Artificial Sequence
  Description of Artificial Sequence: Synthetic oligonucleotide
  Antisense Strand to SEQ ID NO: 344867
gauucuaaggugcaaucca

SEQ ID NO: 344869 - RNA, 19 nt, Artificial Sequence
  Description of Artificial Sequence: Synthetic oligonucleotide
  Sense Strand Starting at position 331 of SEQ ID NO: 317535
cauagacgcuaaucaguaa

SEQ ID NO: 344870 - RNA, 19 nt, Artificial Sequence
  Description of Artificial Sequence: Synthetic oligonucleotide
  Antisense Strand to SEQ ID NO: 344869
uuacugauuagcgucuaug

SEQ ID NO: 344871 - RNA, 19 nt, Artificial Sequence
  Description of Artificial Sequence: Synthetic oligonucleotide
  Sense Strand Starting at position 331 of SEQ ID NO: 317539
gacgcuaaucaguaacaga

SEQ ID NO: 344872 - RNA, 19 nt, Artificial Sequence
  Description of Artificial Sequence: Synthetic oligonucleotide
  Antisense Strand to SEQ ID NO: 344871
ucuguuacugauuagcguc

SEQ ID NO: 344873 - RNA, 19 nt, Artificial Sequence
  Description of Artificial Sequence: Synthetic oligonucleotide
  Sense Strand Starting at position 331 of SEQ ID NO: 317629
agagguauguugguauguu

SEQ ID NO: 344874 - RNA, 19 nt, Artificial Sequence
  Description of Artificial Sequence: Synthetic oligonucleotide
  Antisense Strand to SEQ ID NO: 344873
aacauaccaacauaccucu

SEQ ID NO: 344875 - RNA, 19 nt, Artificial Sequence
  Description of Artificial Sequence: Synthetic oligonucleotide
  Sense Strand Starting at position 331 of SEQ ID NO: 317661
ugugcuuucccggaucaag

SEQ ID NO: 344876 - RNA, 19 nt, Artificial Sequence
  Description of Artificial Sequence: Synthetic oligonucleotide
  Antisense Strand to SEQ ID NO: 344875
cuugauccgggaaagcaca

SEQ ID NO: 344877 - RNA, 19 nt, Artificial Sequence
  Description of Artificial Sequence: Synthetic oligonucleotide
  Sense Strand Starting at position 331 of SEQ ID NO: 317675
ucaagcauccugggaucuu

SEQ ID NO: 344878 - RNA, 19 nt, Artificial Sequence
  Description of Artificial Sequence: Synthetic oligonucleotide
  Antisense Strand to SEQ ID NO: 344877
aagaucccaggaugcuuga

SEQ ID NO: 344879 - RNA, 19 nt, Artificial Sequence
  Description of Artificial Sequence: Synthetic oligonucleotide
  Sense Strand Starting at position 331 of SEQ ID NO: 317809
uagugaaaguggcucauga

SEQ ID NO: 344880 - RNA, 19 nt, Artificial Sequence
  Description of Artificial Sequence: Synthetic oligonucleotide
  Antisense Strand to SEQ ID NO: 344879
ucaugagccacuuucacua

SEQ ID NO: 344881 - RNA, 19 nt, Artificial Sequence
  Description of Artificial Sequence: Synthetic oligonucleotide
  Sense Strand Starting at position 331 of SEQ ID NO: 317811
gugaaaguggcucaugaca

SEQ ID NO: 344882 - RNA, 19 nt, Artificial Sequence
  Description of Artificial Sequence: Synthetic oligonucleotide
  Antisense Strand to SEQ ID NO: 344881
ugucaugagccacuuucac

SEQ ID NO: 344883 - RNA, 19 nt, Artificial Sequence
  Description of Artificial Sequence: Synthetic oligonucleotide
  Sense Strand Starting at position 331 of SEQ ID NO: 317839
cucucaagacuucgcugau

SEQ ID NO: 344884 - RNA, 19 nt, Artificial Sequence
  Description of Artificial Sequence: Synthetic oligonucleotide
  Antisense Strand to SEQ ID NO: 344883
aucagcgaagucuugagag

SEQ ID NO: 344885 - RNA, 19 nt, Artificial Sequence
  Description of Artificial Sequence: Synthetic oligonucleotide
  Sense Strand Starting at position 331 of SEQ ID NO: 317840
ucucaagacuucgcugaug

SEQ ID NO: 344886 - RNA, 19 nt, Artificial Sequence
  Description of Artificial Sequence: Synthetic oligonucleotide
  Antisense Strand to SEQ ID NO: 344885
caucagcgaagucuugaga

SEQ ID NO: 344887 - RNA, 19 nt, Artificial Sequence
  Description of Artificial Sequence: Synthetic oligonucleotide
  Sense Strand Starting at position 331 of SEQ ID NO: 317842
ucaagacuucgcugaugga

SEQ ID NO: 344888 - RNA, 19 nt, Artificial Sequence
  Description of Artificial Sequence: Synthetic oligonucleotide
  Antisense Strand to SEQ ID NO: 344887
uccaucagcgaagucuuga

SEQ ID NO: 344889 - RNA, 19 nt, Artificial Sequence
  Description of Artificial Sequence: Synthetic oligonucleotide
  Sense Strand Starting at position 331 of SEQ ID NO: 317868
ugggaugguugcaguaaga

SEQ ID NO: 344890 - RNA, 19 nt, Artificial Sequence
  Description of Artificial Sequence: Synthetic oligonucleotide
  Antisense Strand to SEQ ID NO: 344889
ucuuacugcaaccauccca

SEQ ID NO: 344891 - RNA, 19 nt, Artificial Sequence
  Description of Artificial Sequence: Synthetic oligonucleotide
  Sense Strand Starting at position 331 of SEQ ID NO: 318022
uccugcucucaaggauaca

SEQ ID NO: 344892 - RNA, 19 nt, Artificial Sequence
  Description of Artificial Sequence: Synthetic oligonucleotide
  Antisense Strand to SEQ ID NO: 344891
uguauccuugagagcagga

SEQ ID NO: 344893 - RNA, 19 nt, Artificial Sequence
  Description of Artificial Sequence: Synthetic oligonucleotide
  Sense Strand Starting at position 331 of SEQ ID NO: 318116
gugaguucucaaugucauc

SEQ ID NO: 344894 - RNA, 19 nt, Artificial Sequence
  Description of Artificial Sequence: Synthetic oligonucleotide
  Antisense Strand to SEQ ID NO: 344893
gaugacauugagaacucac

SEQ ID NO: 344895 - RNA, 19 nt, Artificial Sequence
  Description of Artificial Sequence: Synthetic oligonucleotide
  Sense Strand Starting at position 331 of SEQ ID NO: 318195
uugucauucugugugacag

SEQ ID NO: 344896 - RNA, 19 nt, Artificial Sequence
  Description of Artificial Sequence: Synthetic oligonucleotide
  Antisense Strand to SEQ ID NO: 344895
cugucacacagaaugacaa

SEQ ID NO: 344897 - RNA, 19 nt, Artificial Sequence
  Description of Artificial Sequence: Synthetic oligonucleotide
  Sense Strand Starting at position 331 of SEQ ID NO: 318374
aguuacuuauugcuggaua

SEQ ID NO: 344898 - RNA, 19 nt, Artificial Sequence
  Description of Artificial Sequence: Synthetic oligonucleotide
  Antisense Strand to SEQ ID NO: 344897
uauccagcaauaaguaacu

SEQ ID NO: 344899 - RNA, 19 nt, Artificial Sequence
  Description of Artificial Sequence: Synthetic oligonucleotide
  Sense Strand Starting at position 331 of SEQ ID NO: 318376
uuacuuauugcuggauaaa

SEQ ID NO: 344900 - RNA, 19 nt, Artificial Sequence
  Description of Artificial Sequence: Synthetic oligonucleotide
  Antisense Strand to SEQ ID NO: 344899
uuuauccagcaauaaguaa

SEQ ID NO: 344901 - RNA, 19 nt, Artificial Sequence
  Description of Artificial Sequence: Synthetic oligonucleotide
  Sense Strand Starting at position 331 of SEQ ID NO: 318427
cuuauuagcuuaguaaguu

SEQ ID NO: 344902 - RNA, 19 nt, Artificial Sequence
  Description of Artificial Sequence: Synthetic oligonucleotide
  Antisense Strand to SEQ ID NO: 344901
aacuuacuaagcuaauaag

SEQ ID NO: 344903 - RNA, 19 nt, Artificial Sequence
  Description of Artificial Sequence: Synthetic oligonucleotide
  Sense Strand Starting at position 331 of SEQ ID NO: 318443
guuaaacagcgauaaauau

SEQ ID NO: 344904 - RNA, 19 nt, Artificial Sequence
  Description of Artificial Sequence: Synthetic oligonucleotide
  Antisense Strand to SEQ ID NO: 344903
auauuuaucgcuguuuaac

SEQ ID NO: 344905 - RNA, 19 nt, Artificial Sequence
  Description of Artificial Sequence: Synthetic oligonucleotide
  Sense Strand Starting at position 331 of SEQ ID NO: 318452
cgauaaauauuaucucagu

SEQ ID NO: 344906 - RNA, 19 nt, Artificial Sequence
  Description of Artificial Sequence: Synthetic oligonucleotide
  Antisense Strand to SEQ ID NO: 344905
acugagauaauauuuaucg

SEQ ID NO: 344907 - RNA, 19 nt, Artificial Sequence
  Description of Artificial Sequence: Synthetic oligonucleotide
  Sense Strand Starting at position 331 of SEQ ID NO: 318483
ggaauucaggagcggcaua

SEQ ID NO: 344908 - RNA, 19 nt, Artificial Sequence
  Description of Artificial Sequence: Synthetic oligonucleotide
  Antisense Strand to SEQ ID NO: 344907
uaugccgcuccugaauucc

SEQ ID NO: 344909 - RNA, 19 nt, Artificial Sequence
  Description of Artificial Sequence: Synthetic oligonucleotide
  Sense Strand Starting at position 331 of SEQ ID NO: 318872
guauuacagcucuagagac

SEQ ID NO: 344910 - RNA, 19 nt, Artificial Sequence
  Description of Artificial Sequence: Synthetic oligonucleotide
  Antisense Strand to SEQ ID NO: 344909
gucucuagagcuguaauac

SEQ ID NO: 344911 - RNA, 19 nt, Artificial Sequence
  Description of Artificial Sequence: Synthetic oligonucleotide
  Sense Strand Starting at position 331 of SEQ ID NO: 318886
gagacuaaguaguccaaga

SEQ ID NO: 344912 - RNA, 19 nt, Artificial Sequence
  Description of Artificial Sequence: Synthetic oligonucleotide
  Antisense Strand to SEQ ID NO: 344911
ucuuggacuacuuagucuc

SEQ ID NO: 344913 - RNA, 19 nt, Artificial Sequence
  Description of Artificial Sequence: Synthetic oligonucleotide
  Sense Strand Starting at position 332 of SEQ ID NO: 315941
uagaguaagcagcgaaaca

SEQ ID NO: 344914 - RNA, 19 nt, Artificial Sequence
  Description of Artificial Sequence: Synthetic oligonucleotide
  Antisense Strand to SEQ ID NO: 344913
uguuucgcugcuuacucua

SEQ ID NO: 344915 - RNA, 19 nt, Artificial Sequence
  Description of Artificial Sequence: Synthetic oligonucleotide
  Sense Strand Starting at position 332 of SEQ ID NO: 315970
gcgugagaacuuugauuaa

SEQ ID NO: 344916 - RNA, 19 nt, Artificial Sequence
  Description of Artificial Sequence: Synthetic oligonucleotide
  Antisense Strand to SEQ ID NO: 344915
uuaaucaaaguucucacgc

SEQ ID NO: 344917 - RNA, 19 nt, Artificial Sequence
  Description of Artificial Sequence: Synthetic oligonucleotide
  Sense Strand Starting at position 332 of SEQ ID NO: 316054
acuggaaguuggcauuuaa

SEQ ID NO: 344918 - RNA, 19 nt, Artificial Sequence
  Description of Artificial Sequence: Synthetic oligonucleotide
  Antisense Strand to SEQ ID NO: 344917
uuaaaugccaacuuccagu

SEQ ID NO: 344919 - RNA, 19 nt, Artificial Sequence
  Description of Artificial Sequence: Synthetic oligonucleotide
  Sense Strand Starting at position 332 of SEQ ID NO: 316358
guuguaucagacuguccuu

SEQ ID NO: 344920 - RNA, 19 nt, Artificial Sequence
  Description of Artificial Sequence: Synthetic oligonucleotide
  Antisense Strand to SEQ ID NO: 344919
aaggacagucugauacaac

SEQ ID NO: 344921 - RNA, 19 nt, Artificial Sequence
  Description of Artificial Sequence: Synthetic oligonucleotide
  Sense Strand Starting at position 332 of SEQ ID NO: 316361
guaucagacuguccuuagu

SEQ ID NO: 344922 - RNA, 19 nt, Artificial Sequence
  Description of Artificial Sequence: Synthetic oligonucleotide
  Antisense Strand to SEQ ID NO: 344921
acuaaggacagucugauac

SEQ ID NO: 344923 - RNA, 19 nt, Artificial Sequence
  Description of Artificial Sequence: Synthetic oligonucleotide
  Sense Strand Starting at position 332 of SEQ ID NO: 316364
ucagacuguccuuaguuga

SEQ ID NO: 344924 - RNA, 19 nt, Artificial Sequence
  Description of Artificial Sequence: Synthetic oligonucleotide
  Antisense Strand to SEQ ID NO: 344923
ucaacuaaggacagucuga

SEQ ID NO: 344925 - RNA, 19 nt, Artificial Sequence
  Description of Artificial Sequence: Synthetic oligonucleotide
  Sense Strand Starting at position 332 of SEQ ID NO: 316380
ugacguggccugaaguguu

SEQ ID NO: 344926 - RNA, 19 nt, Artificial Sequence
  Description of Artificial Sequence: Synthetic oligonucleotide
  Antisense Strand to SEQ ID NO: 344925
aacacuucaggccacguca

SEQ ID NO: 344927 - RNA, 19 nt, Artificial Sequence
  Description of Artificial Sequence: Synthetic oligonucleotide
  Sense Strand Starting at position 332 of SEQ ID NO: 316387
gccugaaguguuugaagaa

SEQ ID NO: 344928 - RNA, 19 nt, Artificial Sequence
  Description of Artificial Sequence: Synthetic oligonucleotide
  Antisense Strand to SEQ ID NO: 344927
uucuucaaacacuucaggc

SEQ ID NO: 344929 - RNA, 19 nt, Artificial Sequence
  Description of Artificial Sequence: Synthetic oligonucleotide
  Sense Strand Starting at position 332 of SEQ ID NO: 316410
gucagaauguccgcuacaa

SEQ ID NO: 344930 - RNA, 19 nt, Artificial Sequence
  Description of Artificial Sequence: Synthetic oligonucleotide
  Antisense Strand to SEQ ID NO: 344929
uuguagcggacauucugac

SEQ ID NO: 344931 - RNA, 19 nt, Artificial Sequence
  Description of Artificial Sequence: Synthetic oligonucleotide
  Sense Strand Starting at position 332 of SEQ ID NO: 316412
cagaauguccgcuacaauu

SEQ ID NO: 344932 - RNA, 19 nt, Artificial Sequence
  Description of Artificial Sequence: Synthetic oligonucleotide
  Antisense Strand to SEQ ID NO: 344931
aauuguagcggacauucug

SEQ ID NO: 344933 - RNA, 19 nt, Artificial Sequence
  Description of Artificial Sequence: Synthetic oligonucleotide
  Sense Strand Starting at position 332 of SEQ ID NO: 316465
agguaagcauagcuagaua

SEQ ID NO: 344934 - RNA, 19 nt, Artificial Sequence
  Description of Artificial Sequence: Synthetic oligonucleotide
  Antisense Strand to SEQ ID NO: 344933
uaucuagcuaugcuuaccu

SEQ ID NO: 344935 - RNA, 19 nt, Artificial Sequence
  Description of Artificial Sequence: Synthetic oligonucleotide
  Sense Strand Starting at position 332 of SEQ ID NO: 316542
ggucacagauguccaugua

SEQ ID NO: 344936 - RNA, 19 nt, Artificial Sequence
  Description of Artificial Sequence: Synthetic oligonucleotide
  Antisense Strand to SEQ ID NO: 344935
uacauggacaucugugacc

SEQ ID NO: 344937 - RNA, 19 nt, Artificial Sequence
  Description of Artificial Sequence: Synthetic oligonucleotide
  Sense Strand Starting at position 332 of SEQ ID NO: 316556
auguacuagucuuccaauu

SEQ ID NO: 344938 - RNA, 19 nt, Artificial Sequence
  Description of Artificial Sequence: Synthetic oligonucleotide
  Antisense Strand to SEQ ID NO: 344937
aauuggaagacuaguacau

SEQ ID NO: 344939 - RNA, 19 nt, Artificial Sequence
  Description of Artificial Sequence: Synthetic oligonucleotide
  Sense Strand Starting at position 332 of SEQ ID NO: 316707
ugcugagacgguuaguacu

SEQ ID NO: 344940 - RNA, 19 nt, Artificial Sequence
  Description of Artificial Sequence: Synthetic oligonucleotide
  Antisense Strand to SEQ ID NO: 344939
aguacuaaccgucucagca

SEQ ID NO: 344941 - RNA, 19 nt, Artificial Sequence
  Description of Artificial Sequence: Synthetic oligonucleotide
  Sense Strand Starting at position 332 of SEQ ID NO: 316732
ggucauaggcccugauguu

SEQ ID NO: 344942 - RNA, 19 nt, Artificial Sequence
  Description of Artificial Sequence: Synthetic oligonucleotide
  Antisense Strand to SEQ ID NO: 344941
aacaucagggccuaugacc

SEQ ID NO: 344943 - RNA, 19 nt, Artificial Sequence
  Description of Artificial Sequence: Synthetic oligonucleotide
  Sense Strand Starting at position 332 of SEQ ID NO: 316804
gcacuaagugucuggaacu

SEQ ID NO: 344944 - RNA, 19 nt, Artificial Sequence
  Description of Artificial Sequence: Synthetic oligonucleotide
  Antisense Strand to SEQ ID NO: 344943
aguuccagacacuuagugc

SEQ ID NO: 344945 - RNA, 19 nt, Artificial Sequence
  Description of Artificial Sequence: Synthetic oligonucleotide
  Sense Strand Starting at position 332 of SEQ ID NO: 316847
aaguguauugagugggaaa

SEQ ID NO: 344946 - RNA, 19 nt, Artificial Sequence
  Description of Artificial Sequence: Synthetic oligonucleotide
  Antisense Strand to SEQ ID NO: 344945
uuucccacucaauacacuu

SEQ ID NO: 344947 - RNA, 19 nt, Artificial Sequence
  Description of Artificial Sequence: Synthetic oligonucleotide
  Sense Strand Starting at position 332 of SEQ ID NO: 316848
aguguauugagugggaaag

SEQ ID NO: 344948 - RNA, 19 nt, Artificial Sequence
  Description of Artificial Sequence: Synthetic oligonucleotide
  Antisense Strand to SEQ ID NO: 344947
cuuucccacucaauacacu

SEQ ID NO: 344949 - RNA, 19 nt, Artificial Sequence
  Description of Artificial Sequence: Synthetic oligonucleotide
  Sense Strand Starting at position 332 of SEQ ID NO: 316849
guguauugagugggaaaga

SEQ ID NO: 344950 - RNA, 19 nt, Artificial Sequence
  Description of Artificial Sequence: Synthetic oligonucleotide
  Antisense Strand to SEQ ID NO: 344949
ucuuucccacucaauacac

SEQ ID NO: 344951 - RNA, 19 nt, Artificial Sequence
  Description of Artificial Sequence: Synthetic oligonucleotide
  Sense Strand Starting at position 332 of SEQ ID NO: 316894
agaggcaggguguaaucua

SEQ ID NO: 344952 - RNA, 19 nt, Artificial Sequence
  Description of Artificial Sequence: Synthetic oligonucleotide
  Antisense Strand to SEQ ID NO: 344951
uagauuacacccugccucu

SEQ ID NO: 344953 - RNA, 19 nt, Artificial Sequence
  Description of Artificial Sequence: Synthetic oligonucleotide
  Sense Strand Starting at position 332 of SEQ ID NO: 316902
gguguaaucuaugccugga

SEQ ID NO: 344954 - RNA, 19 nt, Artificial Sequence
  Description of Artificial Sequence: Synthetic oligonucleotide
  Antisense Strand to SEQ ID NO: 344953
uccaggcauagauuacacc

SEQ ID NO: 344955 - RNA, 19 nt, Artificial Sequence
  Description of Artificial Sequence: Synthetic oligonucleotide
  Sense Strand Starting at position 332 of SEQ ID NO: 316904
uguaaucuaugccuggaga

SEQ ID NO: 344956 - RNA, 19 nt, Artificial Sequence
  Description of Artificial Sequence: Synthetic oligonucleotide
  Antisense Strand to SEQ ID NO: 344955
ucuccaggcauagauuaca

SEQ ID NO: 344957 - RNA, 19 nt, Artificial Sequence
  Description of Artificial Sequence: Synthetic oligonucleotide
  Sense Strand Starting at position 332 of SEQ ID NO: 316905
guaaucuaugccuggagac

SEQ ID NO: 344958 - RNA, 19 nt, Artificial Sequence
  Description of Artificial Sequence: Synthetic oligonucleotide
  Antisense Strand to SEQ ID NO: 344957
gucuccaggcauagauuac

SEQ ID NO: 344959 - RNA, 19 nt, Artificial Sequence
  Description of Artificial Sequence: Synthetic oligonucleotide
  Sense Strand Starting at position 332 of SEQ ID NO: 316948
ucugcuuccucugucuaga

SEQ ID NO: 344960 - RNA, 19 nt, Artificial Sequence
  Description of Artificial Sequence: Synthetic oligonucleotide
  Antisense Strand to SEQ ID NO: 344959
ucuagacagaggaagcaga

SEQ ID NO: 344961 - RNA, 19 nt, Artificial Sequence
  Description of Artificial Sequence: Synthetic oligonucleotide
  Sense Strand Starting at position 332 of SEQ ID NO: 317376
gcagaaugcuaauccugga

SEQ ID NO: 344962 - RNA, 19 nt, Artificial Sequence
  Description of Artificial Sequence: Synthetic oligonucleotide
  Antisense Strand to SEQ ID NO: 344961
uccaggauuagcauucugc

SEQ ID NO: 344963 - RNA, 19 nt, Artificial Sequence
  Description of Artificial Sequence: Synthetic oligonucleotide
  Sense Strand Starting at position 332 of SEQ ID NO: 317381
augcuaauccuggaaaguu

SEQ ID NO: 344964 - RNA, 19 nt, Artificial Sequence
  Description of Artificial Sequence: Synthetic oligonucleotide
  Antisense Strand to SEQ ID NO: 344963
aacuuuccaggauuagcau

SEQ ID NO: 344965 - RNA, 19 nt, Artificial Sequence
  Description of Artificial Sequence: Synthetic oligonucleotide
  Sense Strand Starting at position 332 of SEQ ID NO: 317513
cugcuuaccaugugauggu

SEQ ID NO: 344966 - RNA, 19 nt, Artificial Sequence
  Description of Artificial Sequence: Synthetic oligonucleotide
  Antisense Strand to SEQ ID NO: 344965
accaucacaugguaagcag

SEQ ID NO: 344967 - RNA, 19 nt, Artificial Sequence
  Description of Artificial Sequence: Synthetic oligonucleotide
  Sense Strand Starting at position 332 of SEQ ID NO: 317911
gccuuacccuuguugaaau

SEQ ID NO: 344968 - RNA, 19 nt, Artificial Sequence
  Description of Artificial Sequence: Synthetic oligonucleotide
  Antisense Strand to SEQ ID NO: 344967
auuucaacaaggguaaggc

SEQ ID NO: 344969 - RNA, 19 nt, Artificial Sequence
  Description of Artificial Sequence: Synthetic oligonucleotide
  Sense Strand Starting at position 332 of SEQ ID NO: 318085
gucugaggucauggcaagu

SEQ ID NO: 344970 - RNA, 19 nt, Artificial Sequence
  Description of Artificial Sequence: Synthetic oligonucleotide
  Antisense Strand to SEQ ID NO: 344969
acuugccaugaccucagac

SEQ ID NO: 344971 - RNA, 19 nt, Artificial Sequence
  Description of Artificial Sequence: Synthetic oligonucleotide
  Sense Strand Starting at position 332 of SEQ ID NO: 318307
ccaggaucuuccucugauu

SEQ ID NO: 344972 - RNA, 19 nt, Artificial Sequence
  Description of Artificial Sequence: Synthetic oligonucleotide
  Antisense Strand to SEQ ID NO: 344971
aaucagaggaagauccugg

SEQ ID NO: 344973 - RNA, 19 nt, Artificial Sequence
  Description of Artificial Sequence: Synthetic oligonucleotide
  Sense Strand Starting at position 332 of SEQ ID NO: 318343
ugagcuaugccacaagaaa

SEQ ID NO: 344974 - RNA, 19 nt, Artificial Sequence
  Description of Artificial Sequence: Synthetic oligonucleotide
  Antisense Strand to SEQ ID NO: 344973
uuucuuguggcauagcuca

SEQ ID NO: 344975 - RNA, 19 nt, Artificial Sequence
  Description of Artificial Sequence: Synthetic oligonucleotide
  Sense Strand Starting at position 332 of SEQ ID NO: 318404
augggugaggucuacgauu

SEQ ID NO: 344976 - RNA, 19 nt, Artificial Sequence
  Description of Artificial Sequence: Synthetic oligonucleotide
  Antisense Strand to SEQ ID NO: 344975
aaucguagaccucacccau

SEQ ID NO: 344977 - RNA, 19 nt, Artificial Sequence
  Description of Artificial Sequence: Synthetic oligonucleotide
  Sense Strand Starting at position 332 of SEQ ID NO: 318406
gggugaggucuacgauuca

SEQ ID NO: 344978 - RNA, 19 nt, Artificial Sequence
  Description of Artificial Sequence: Synthetic oligonucleotide
  Antisense Strand to SEQ ID NO: 344977
ugaaucguagaccucaccc

SEQ ID NO: 344979 - RNA, 19 nt, Artificial Sequence
  Description of Artificial Sequence: Synthetic oligonucleotide
  Sense Strand Starting at position 332 of SEQ ID NO: 318480
agcaguucugaccagcaua

SEQ ID NO: 344980 - RNA, 19 nt, Artificial Sequence
  Description of Artificial Sequence: Synthetic oligonucleotide
  Antisense Strand to SEQ ID NO: 344979
uaugcuggucagaacugcu

SEQ ID NO: 344981 - RNA, 19 nt, Artificial Sequence
  Description of Artificial Sequence: Synthetic oligonucleotide
  Sense Strand Starting at position 332 of SEQ ID NO: 318483
aguucugaccagcauaauc

SEQ ID NO: 344982 - RNA, 19 nt, Artificial Sequence
  Description of Artificial Sequence: Synthetic oligonucleotide
  Antisense Strand to SEQ ID NO: 344981
gauuaugcuggucagaacu

SEQ ID NO: 344983 - RNA, 19 nt, Artificial Sequence
  Description of Artificial Sequence: Synthetic oligonucleotide
  Sense Strand Starting at position 332 of SEQ ID NO: 318851
gucaguaccacuugguaga

SEQ ID NO: 344984 - RNA, 19 nt, Artificial Sequence
  Description of Artificial Sequence: Synthetic oligonucleotide
  Antisense Strand to SEQ ID NO: 344983
ucuaccaagugguacugac

SEQ ID NO: 344985 - RNA, 19 nt, Artificial Sequence
  Description of Artificial Sequence: Synthetic oligonucleotide
  Sense Strand Starting at position 332 of SEQ ID NO: 318852
ucaguaccacuugguagau

SEQ ID NO: 344986 - RNA, 19 nt, Artificial Sequence
  Description of Artificial Sequence: Synthetic oligonucleotide
  Antisense Strand to SEQ ID NO: 344985
aucuaccaagugguacuga

SEQ ID NO: 344987 - RNA, 19 nt, Artificial Sequence
  Description of Artificial Sequence: Synthetic oligonucleotide
  Sense Strand Starting at position 332 of SEQ ID NO: 318865
guagaugacucacucccua

SEQ ID NO: 344988 - RNA, 19 nt, Artificial Sequence
  Description of Artificial Sequence: Synthetic oligonucleotide
  Antisense Strand to SEQ ID NO: 344987
uagggagugagucaucuac

SEQ ID NO: 344989 - RNA, 19 nt, Artificial Sequence
  Description of Artificial Sequence: Synthetic oligonucleotide
  Sense Strand Starting at position 332 of SEQ ID NO: 318989
ugcgucaguccaggaaaga

SEQ ID NO: 344990 - RNA, 19 nt, Artificial Sequence
  Description of Artificial Sequence: Synthetic oligonucleotide
  Antisense Strand to SEQ ID NO: 344989
ucuuuccuggacugacgca

SEQ ID NO: 344991 - RNA, 19 nt, Artificial Sequence
  Description of Artificial Sequence: Synthetic oligonucleotide
  Sense Strand Starting at position 332 of SEQ ID NO: 319058
caaagauaguggcuguuga

SEQ ID NO: 344992 - RNA, 19 nt, Artificial Sequence
  Description of Artificial Sequence: Synthetic oligonucleotide
  Antisense Strand to SEQ ID NO: 344991
ucaacagccacuaucuuug

SEQ ID NO: 344993 - RNA, 19 nt, Artificial Sequence
  Description of Artificial Sequence: Synthetic oligonucleotide
  Sense Strand Starting at position 333 of SEQ ID NO: 315362
accuuauaggauuguugca

SEQ ID NO: 344994 - RNA, 19 nt, Artificial Sequence
  Description of Artificial Sequence: Synthetic oligonucleotide
  Antisense Strand to SEQ ID NO: 344993
ugcaacaauccuauaaggu

SEQ ID NO: 344995 - RNA, 19 nt, Artificial Sequence
  Description of Artificial Sequence: Synthetic oligonucleotide
  Sense Strand Starting at position 333 of SEQ ID NO: 315379
caagaaguauaggcgauaa

SEQ ID NO: 344996 - RNA, 19 nt, Artificial Sequence
  Description of Artificial Sequence: Synthetic oligonucleotide
  Antisense Strand to SEQ ID NO: 344995
uuaucgccuauacuucuug

SEQ ID NO: 344997 - RNA, 19 nt, Artificial Sequence
  Description of Artificial Sequence: Synthetic oligonucleotide
  Sense Strand Starting at position 333 of SEQ ID NO: 315392
cgauaagaacaaugucugu

SEQ ID NO: 344998 - RNA, 19 nt, Artificial Sequence
  Description of Artificial Sequence: Synthetic oligonucleotide
  Antisense Strand to SEQ ID NO: 344997
acagacauuguucuuaucg

SEQ ID NO: 344999 - RNA, 19 nt, Artificial Sequence
  Description of Artificial Sequence: Synthetic oligonucleotide
  Sense Strand Starting at position 333 of SEQ ID NO: 315396
aagaacaaugucugucagu

SEQ ID NO: 345000 - RNA, 19 nt, Artificial Sequence
  Description of Artificial Sequence: Synthetic oligonucleotide
  Antisense Strand to SEQ ID NO: 344999
acugacagacauuguucuu

SEQ ID NO: 345001 - RNA, 19 nt, Artificial Sequence
  Description of Artificial Sequence: Synthetic oligonucleotide
  Sense Strand Starting at position 333 of SEQ ID NO: 315411
caguguacaguguauaaua

SEQ ID NO: 345002 - RNA, 19 nt, Artificial Sequence
  Description of Artificial Sequence: Synthetic oligonucleotide
  Antisense Strand to SEQ ID NO: 345001
uauuauacacuguacacug

SEQ ID NO: 345003 - RNA, 19 nt, Artificial Sequence
  Description of Artificial Sequence: Synthetic oligonucleotide
  Sense Strand Starting at position 333 of SEQ ID NO: 315413
guguacaguguauaauauu

SEQ ID NO: 345004 - RNA, 19 nt, Artificial Sequence
  Description of Artificial Sequence: Synthetic oligonucleotide
  Antisense Strand to SEQ ID NO: 345003
aauauuauacacuguacac

SEQ ID NO: 345005 - RNA, 19 nt, Artificial Sequence
  Description of Artificial Sequence: Synthetic oligonucleotide
  Sense Strand Starting at position 333 of SEQ ID NO: 315659
guguaucaacgccuauguu

SEQ ID NO: 345006 - RNA, 19 nt, Artificial Sequence
  Description of Artificial Sequence: Synthetic oligonucleotide
  Antisense Strand to SEQ ID NO: 345005
aacauaggcguugauacac

SEQ ID NO: 345007 - RNA, 19 nt, Artificial Sequence
  Description of Artificial Sequence: Synthetic oligonucleotide
  Sense Strand Starting at position 333 of SEQ ID NO: 315829
ucagcaagccucgacacau

SEQ ID NO: 345008 - RNA, 19 nt, Artificial Sequence
  Description of Artificial Sequence: Synthetic oligonucleotide
  Antisense Strand to SEQ ID NO: 345007
augugucgaggcuugcuga

SEQ ID NO: 345009 - RNA, 19 nt, Artificial Sequence
  Description of Artificial Sequence: Synthetic oligonucleotide
  Sense Strand Starting at position 333 of SEQ ID NO: 315923
uagucuaaagaaugacagu

SEQ ID NO: 345010 - RNA, 19 nt, Artificial Sequence
  Description of Artificial Sequence: Synthetic oligonucleotide
  Antisense Strand to SEQ ID NO: 345009
acugucauucuuuagacua

SEQ ID NO: 345011 - RNA, 19 nt, Artificial Sequence
  Description of Artificial Sequence: Synthetic oligonucleotide
  Sense Strand Starting at position 333 of SEQ ID NO: 316026
uuuccuaauggaugaaacu

SEQ ID NO: 345012 - RNA, 19 nt, Artificial Sequence
  Description of Artificial Sequence: Synthetic oligonucleotide
  Antisense Strand to SEQ ID NO: 345011
aguuucauccauuaggaaa

SEQ ID NO: 345013 - RNA, 19 nt, Artificial Sequence
  Description of Artificial Sequence: Synthetic oligonucleotide
  Sense Strand Starting at position 333 of SEQ ID NO: 316052
ugaauuagaugcucuguaa

SEQ ID NO: 345014 - RNA, 19 nt, Artificial Sequence
  Description of Artificial Sequence: Synthetic oligonucleotide
  Antisense Strand to SEQ ID NO: 345013
uuacagagcaucuaauuca

SEQ ID NO: 345015 - RNA, 19 nt, Artificial Sequence
  Description of Artificial Sequence: Synthetic oligonucleotide
  Sense Strand Starting at position 333 of SEQ ID NO: 316055
auuagaugcucuguaaaua

SEQ ID NO: 345016 - RNA, 19 nt, Artificial Sequence
  Description of Artificial Sequence: Synthetic oligonucleotide
  Antisense Strand to SEQ ID NO: 345015
uauuuacagagcaucuaau

SEQ ID NO: 345017 - RNA, 19 nt, Artificial Sequence
  Description of Artificial Sequence: Synthetic oligonucleotide
  Sense Strand Starting at position 333 of SEQ ID NO: 316056
uuagaugcucuguaaauau

SEQ ID NO: 345018 - RNA, 19 nt, Artificial Sequence
  Description of Artificial Sequence: Synthetic oligonucleotide
  Antisense Strand to SEQ ID NO: 345017
auauuuacagagcaucuaa

SEQ ID NO: 345019 - RNA, 19 nt, Artificial Sequence
  Description of Artificial Sequence: Synthetic oligonucleotide
  Sense Strand Starting at position 333 of SEQ ID NO: 316148
ccaguuguugagggaugau

SEQ ID NO: 345020 - RNA, 19 nt, Artificial Sequence
  Description of Artificial Sequence: Synthetic oligonucleotide
  Antisense Strand to SEQ ID NO: 345019
aucaucccucaacaacugg

SEQ ID NO: 345021 - RNA, 19 nt, Artificial Sequence
  Description of Artificial Sequence: Synthetic oligonucleotide
  Sense Strand Starting at position 333 of SEQ ID NO: 316533
ucaguaugauaucuuaguc

SEQ ID NO: 345022 - RNA, 19 nt, Artificial Sequence
  Description of Artificial Sequence: Synthetic oligonucleotide
  Antisense Strand to SEQ ID NO: 345021
gacuaagauaucauacuga

SEQ ID NO: 345023 - RNA, 19 nt, Artificial Sequence
  Description of Artificial Sequence: Synthetic oligonucleotide
  Sense Strand Starting at position 333 of SEQ ID NO: 316571
ugaugcuaugaucaagcaa

SEQ ID NO: 345024 - RNA, 19 nt, Artificial Sequence
  Description of Artificial Sequence: Synthetic oligonucleotide
  Antisense Strand to SEQ ID NO: 345023
uugcuugaucauagcauca

SEQ ID NO: 345025 - RNA, 19 nt, Artificial Sequence
  Description of Artificial Sequence: Synthetic oligonucleotide
  Sense Strand Starting at position 333 of SEQ ID NO: 316599
auacuugaugcauggcaaa

SEQ ID NO: 345026 - RNA, 19 nt, Artificial Sequence
  Description of Artificial Sequence: Synthetic oligonucleotide
  Antisense Strand to SEQ ID NO: 345025
uuugccaugcaucaaguau

SEQ ID NO: 345027 - RNA, 19 nt, Artificial Sequence
  Description of Artificial Sequence: Synthetic oligonucleotide
  Sense Strand Starting at position 333 of SEQ ID NO: 316964
cuauauuugccaugaaugc

SEQ ID NO: 345028 - RNA, 19 nt, Artificial Sequence
  Description of Artificial Sequence: Synthetic oligonucleotide
  Antisense Strand to SEQ ID NO: 345027
gcauucauggcaaauauag

SEQ ID NO: 345029 - RNA, 19 nt, Artificial Sequence
  Description of Artificial Sequence: Synthetic oligonucleotide
  Sense Strand Starting at position 333 of SEQ ID NO: 316982
ccuacaggauuuggagauu

SEQ ID NO: 345030 - RNA, 19 nt, Artificial Sequence
  Description of Artificial Sequence: Synthetic oligonucleotide
  Antisense Strand to SEQ ID NO: 345029
aaucuccaaauccuguagg

SEQ ID NO: 345031 - RNA, 19 nt, Artificial Sequence
  Description of Artificial Sequence: Synthetic oligonucleotide
  Sense Strand Starting at position 333 of SEQ ID NO: 316994
ggagauuccugccuugaaa

SEQ ID NO: 345032 - RNA, 19 nt, Artificial Sequence
  Description of Artificial Sequence: Synthetic oligonucleotide
  Antisense Strand to SEQ ID NO: 345031
uuucaaggcaggaaucucc

SEQ ID NO: 345033 - RNA, 19 nt, Artificial Sequence
  Description of Artificial Sequence: Synthetic oligonucleotide
  Sense Strand Starting at position 333 of SEQ ID NO: 316996
agauuccugccuugaaaga

SEQ ID NO: 345034 - RNA, 19 nt, Artificial Sequence
  Description of Artificial Sequence: Synthetic oligonucleotide
  Antisense Strand to SEQ ID NO: 345033
ucuuucaaggcaggaaucu

SEQ ID NO: 345035 - RNA, 19 nt, Artificial Sequence
  Description of Artificial Sequence: Synthetic oligonucleotide
  Sense Strand Starting at position 333 of SEQ ID NO: 317007
uugaaagaguguuuaaguu

SEQ ID NO: 345036 - RNA, 19 nt, Artificial Sequence
  Description of Artificial Sequence: Synthetic oligonucleotide
  Antisense Strand to SEQ ID NO: 345035
aacuuaaacacucuuucaa

SEQ ID NO: 345037 - RNA, 19 nt, Artificial Sequence
  Description of Artificial Sequence: Synthetic oligonucleotide
  Sense Strand Starting at position 333 of SEQ ID NO: 317078
gaacaaguaccugauuguu

SEQ ID NO: 345038 - RNA, 19 nt, Artificial Sequence
  Description of Artificial Sequence: Synthetic oligonucleotide
  Antisense Strand to SEQ ID NO: 345037
aacaaucagguacuuguuc

SEQ ID NO: 345039 - RNA, 19 nt, Artificial Sequence
  Description of Artificial Sequence: Synthetic oligonucleotide
  Sense Strand Starting at position 333 of SEQ ID NO: 317086
accugauuguuucucacua

SEQ ID NO: 345040 - RNA, 19 nt, Artificial Sequence
  Description of Artificial Sequence: Synthetic oligonucleotide
  Antisense Strand to SEQ ID NO: 345039
uagugagaaacaaucaggu

SEQ ID NO: 345041 - RNA, 19 nt, Artificial Sequence
  Description of Artificial Sequence: Synthetic oligonucleotide
  Sense Strand Starting at position 333 of SEQ ID NO: 317303
ggugaagguugccuggaga

SEQ ID NO: 345042 - RNA, 19 nt, Artificial Sequence
  Description of Artificial Sequence: Synthetic oligonucleotide
  Antisense Strand to SEQ ID NO: 345041
ucuccaggcaaccuucacc

SEQ ID NO: 345043 - RNA, 19 nt, Artificial Sequence
  Description of Artificial Sequence: Synthetic oligonucleotide
  Sense Strand Starting at position 333 of SEQ ID NO: 317366
auaauucguuacucaagua

SEQ ID NO: 345044 - RNA, 19 nt, Artificial Sequence
  Description of Artificial Sequence: Synthetic oligonucleotide
  Antisense Strand to SEQ ID NO: 345043
uacuugaguaacgaauuau

SEQ ID NO: 345045 - RNA, 19 nt, Artificial Sequence
  Description of Artificial Sequence: Synthetic oligonucleotide
  Sense Strand Starting at position 333 of SEQ ID NO: 317561
agugacacccuguaaauau

SEQ ID NO: 345046 - RNA, 19 nt, Artificial Sequence
  Description of Artificial Sequence: Synthetic oligonucleotide
  Antisense Strand to SEQ ID NO: 345045
auauuuacagggugucacu

SEQ ID NO: 345047 - RNA, 19 nt, Artificial Sequence
  Description of Artificial Sequence: Synthetic oligonucleotide
  Sense Strand Starting at position 333 of SEQ ID NO: 317643
ccaggaauucuuuggcaaa

SEQ ID NO: 345048 - RNA, 19 nt, Artificial Sequence
  Description of Artificial Sequence: Synthetic oligonucleotide
  Antisense Strand to SEQ ID NO: 345047
uuugccaaagaauuccugg

SEQ ID NO: 345049 - RNA, 19 nt, Artificial Sequence
  Description of Artificial Sequence: Synthetic oligonucleotide
  Sense Strand Starting at position 333 of SEQ ID NO: 317670
gguuaaggugugugaauuu

SEQ ID NO: 345050 - RNA, 19 nt, Artificial Sequence
  Description of Artificial Sequence: Synthetic oligonucleotide
  Antisense Strand to SEQ ID NO: 345049
aaauucacacaccuuaacc

SEQ ID NO: 345051 - RNA, 19 nt, Artificial Sequence
  Description of Artificial Sequence: Synthetic oligonucleotide
  Sense Strand Starting at position 333 of SEQ ID NO: 317689
agugguaugcugggagaaa

SEQ ID NO: 345052 - RNA, 19 nt, Artificial Sequence
  Description of Artificial Sequence: Synthetic oligonucleotide
  Antisense Strand to SEQ ID NO: 345051
uuucucccagcauaccacu

SEQ ID NO: 345053 - RNA, 19 nt, Artificial Sequence
  Description of Artificial Sequence: Synthetic oligonucleotide
  Sense Strand Starting at position 333 of SEQ ID NO: 317701
ggagaaagaugugaaauuu

SEQ ID NO: 345054 - RNA, 19 nt, Artificial Sequence
  Description of Artificial Sequence: Synthetic oligonucleotide
  Antisense Strand to SEQ ID NO: 345053
aaauuucacaucuuucucc

SEQ ID NO: 345055 - RNA, 19 nt, Artificial Sequence
  Description of Artificial Sequence: Synthetic oligonucleotide
  Sense Strand Starting at position 333 of SEQ ID NO: 317758
gauaauagccuacgagaau

SEQ ID NO: 345056 - RNA, 19 nt, Artificial Sequence
  Description of Artificial Sequence: Synthetic oligonucleotide
  Antisense Strand to SEQ ID NO: 345055
auucucguaggcuauuauc

SEQ ID NO: 345057 - RNA, 19 nt, Artificial Sequence
  Description of Artificial Sequence: Synthetic oligonucleotide
  Sense Strand Starting at position 333 of SEQ ID NO: 317769
acgagaauacuaugugcca

SEQ ID NO: 345058 - RNA, 19 nt, Artificial Sequence
  Description of Artificial Sequence: Synthetic oligonucleotide
  Antisense Strand to SEQ ID NO: 345057
uggcacauaguauucucgu

SEQ ID NO: 345059 - RNA, 19 nt, Artificial Sequence
  Description of Artificial Sequence: Synthetic oligonucleotide
  Sense Strand Starting at position 333 of SEQ ID NO: 317770
cgagaauacuaugugccaa

SEQ ID NO: 345060 - RNA, 19 nt, Artificial Sequence
  Description of Artificial Sequence: Synthetic oligonucleotide
  Antisense Strand to SEQ ID NO: 345059
uuggcacauaguauucucg

SEQ ID NO: 345061 - RNA, 19 nt, Artificial Sequence
  Description of Artificial Sequence: Synthetic oligonucleotide
  Sense Strand Starting at position 333 of SEQ ID NO: 317902
gagaguacagccuacacua

SEQ ID NO: 345062 - RNA, 19 nt, Artificial Sequence
  Description of Artificial Sequence: Synthetic oligonucleotide
  Antisense Strand to SEQ ID NO: 345061
uaguguaggcuguacucuc

SEQ ID NO: 345063 - RNA, 19 nt, Artificial Sequence
  Description of Artificial Sequence: Synthetic oligonucleotide
  Sense Strand Starting at position 333 of SEQ ID NO: 317951
augucauuuaagcgaguga

SEQ ID NO: 345064 - RNA, 19 nt, Artificial Sequence
  Description of Artificial Sequence: Synthetic oligonucleotide
  Antisense Strand to SEQ ID NO: 345063
ucacucgcuuaaaugacau

SEQ ID NO: 345065 - RNA, 19 nt, Artificial Sequence
  Description of Artificial Sequence: Synthetic oligonucleotide
  Sense Strand Starting at position 333 of SEQ ID NO: 318754
uuguccuuuguauagucaa

SEQ ID NO: 345066 - RNA, 19 nt, Artificial Sequence
  Description of Artificial Sequence: Synthetic oligonucleotide
  Antisense Strand to SEQ ID NO: 345065
uugacuauacaaaggacaa

SEQ ID NO: 345067 - RNA, 19 nt, Artificial Sequence
  Description of Artificial Sequence: Synthetic oligonucleotide
  Sense Strand Starting at position 333 of SEQ ID NO: 318957
cugauaggucccgagccaa

SEQ ID NO: 345068 - RNA, 19 nt, Artificial Sequence
  Description of Artificial Sequence: Synthetic oligonucleotide
  Antisense Strand to SEQ ID NO: 345067
uuggcucgggaccuaucag

SEQ ID NO: 345069 - RNA, 19 nt, Artificial Sequence
  Description of Artificial Sequence: Synthetic oligonucleotide
  Sense Strand Starting at position 333 of SEQ ID NO: 319193
uugggucugcgcuccuuaa

SEQ ID NO: 345070 - RNA, 19 nt, Artificial Sequence
  Description of Artificial Sequence: Synthetic oligonucleotide
  Antisense Strand to SEQ ID NO: 345069
uuaaggagcgcagacccaa

SEQ ID NO: 345071 - RNA, 19 nt, Artificial Sequence
  Description of Artificial Sequence: Synthetic oligonucleotide
  Sense Strand Starting at position 333 of SEQ ID NO: 319194
ugggucugcgcuccuuaau

SEQ ID NO: 345072 - RNA, 19 nt, Artificial Sequence
  Description of Artificial Sequence: Synthetic oligonucleotide
  Antisense Strand to SEQ ID NO: 345071
auuaaggagcgcagaccca

SEQ ID NO: 345073 - RNA, 19 nt, Artificial Sequence
  Description of Artificial Sequence: Synthetic oligonucleotide
  Sense Strand Starting at position 334 of SEQ ID NO: 315577
agcugaaaggaguguuucu

SEQ ID NO: 345074 - RNA, 19 nt, Artificial Sequence
  Description of Artificial Sequence: Synthetic oligonucleotide
  Antisense Strand to SEQ ID NO: 345073
agaaacacuccuuucagcu

SEQ ID NO: 345075 - RNA, 19 nt, Artificial Sequence
  Description of Artificial Sequence: Synthetic oligonucleotide
  Sense Strand Starting at position 334 of SEQ ID NO: 315582
aaaggaguguuucucugua

SEQ ID NO: 345076 - RNA, 19 nt, Artificial Sequence
  Description of Artificial Sequence: Synthetic oligonucleotide
  Antisense Strand to SEQ ID NO: 345075
uacagagaaacacuccuuu

SEQ ID NO: 345077 - RNA, 19 nt, Artificial Sequence
  Description of Artificial Sequence: Synthetic oligonucleotide
  Sense Strand Starting at position 334 of SEQ ID NO: 315584
aggaguguuucucuguauu

SEQ ID NO: 345078 - RNA, 19 nt, Artificial Sequence
  Description of Artificial Sequence: Synthetic oligonucleotide
  Antisense Strand to SEQ ID NO: 345077
aauacagagaaacacuccu

SEQ ID NO: 345079 - RNA, 19 nt, Artificial Sequence
  Description of Artificial Sequence: Synthetic oligonucleotide
  Sense Strand Starting at position 334 of SEQ ID NO: 315587
aguguuucucuguauugua

SEQ ID NO: 345080 - RNA, 19 nt, Artificial Sequence
  Description of Artificial Sequence: Synthetic oligonucleotide
  Antisense Strand to SEQ ID NO: 345079
uacaauacagagaaacacu

SEQ ID NO: 345081 - RNA, 19 nt, Artificial Sequence
  Description of Artificial Sequence: Synthetic oligonucleotide
  Sense Strand Starting at position 334 of SEQ ID NO: 315805
auagaaaucucgucuggga

SEQ ID NO: 345082 - RNA, 19 nt, Artificial Sequence
  Description of Artificial Sequence: Synthetic oligonucleotide
  Antisense Strand to SEQ ID NO: 345081
ucccagacgagauuucuau

SEQ ID NO: 345083 - RNA, 19 nt, Artificial Sequence
  Description of Artificial Sequence: Synthetic oligonucleotide
  Sense Strand Starting at position 334 of SEQ ID NO: 315807
agaaaucucgucugggaag

SEQ ID NO: 345084 - RNA, 19 nt, Artificial Sequence
  Description of Artificial Sequence: Synthetic oligonucleotide
  Antisense Strand to SEQ ID NO: 345083
cuucccagacgagauuucu

SEQ ID NO: 345085 - RNA, 19 nt, Artificial Sequence
  Description of Artificial Sequence: Synthetic oligonucleotide
  Sense Strand Starting at position 334 of SEQ ID NO: 315809
aaaucucgucugggaagua

SEQ ID NO: 345086 - RNA, 19 nt, Artificial Sequence
  Description of Artificial Sequence: Synthetic oligonucleotide
  Antisense Strand to SEQ ID NO: 345085
uacuucccagacgagauuu

SEQ ID NO: 345087 - RNA, 19 nt, Artificial Sequence
  Description of Artificial Sequence: Synthetic oligonucleotide
  Sense Strand Starting at position 334 of SEQ ID NO: 315850
agaguuacauguuacauuu

SEQ ID NO: 345088 - RNA, 19 nt, Artificial Sequence
  Description of Artificial Sequence: Synthetic oligonucleotide
  Antisense Strand to SEQ ID NO: 345087
aaauguaacauguaacucu

SEQ ID NO: 345089 - RNA, 19 nt, Artificial Sequence
  Description of Artificial Sequence: Synthetic oligonucleotide
  Sense Strand Starting at position 334 of SEQ ID NO: 315898
cauuuagguuuguaucuga

SEQ ID NO: 345090 - RNA, 19 nt, Artificial Sequence
  Description of Artificial Sequence: Synthetic oligonucleotide
  Antisense Strand to SEQ ID NO: 345089
ucagauacaaaccuaaaug

SEQ ID NO: 345091 - RNA, 19 nt, Artificial Sequence
  Description of Artificial Sequence: Synthetic oligonucleotide
  Sense Strand Starting at position 334 of SEQ ID NO: 315901
uuagguuuguaucugagca

SEQ ID NO: 345092 - RNA, 19 nt, Artificial Sequence
  Description of Artificial Sequence: Synthetic oligonucleotide
  Antisense Strand to SEQ ID NO: 345091
ugcucagauacaaaccuaa

SEQ ID NO: 345093 - RNA, 19 nt, Artificial Sequence
  Description of Artificial Sequence: Synthetic oligonucleotide
  Sense Strand Starting at position 334 of SEQ ID NO: 315905
guuuguaucugagcaaaga

SEQ ID NO: 345094 - RNA, 19 nt, Artificial Sequence
  Description of Artificial Sequence: Synthetic oligonucleotide
  Antisense Strand to SEQ ID NO: 345093
ucuuugcucagauacaaac

SEQ ID NO: 345095 - RNA, 19 nt, Artificial Sequence
  Description of Artificial Sequence: Synthetic oligonucleotide
  Sense Strand Starting at position 334 of SEQ ID NO: 315906
uuuguaucugagcaaagag

SEQ ID NO: 345096 - RNA, 19 nt, Artificial Sequence
  Description of Artificial Sequence: Synthetic oligonucleotide
  Antisense Strand to SEQ ID NO: 345095
cucuuugcucagauacaaa

SEQ ID NO: 345097 - RNA, 19 nt, Artificial Sequence
  Description of Artificial Sequence: Synthetic oligonucleotide
  Sense Strand Starting at position 334 of SEQ ID NO: 316086
accaccuucggucaagaaa

SEQ ID NO: 345098 - RNA, 19 nt, Artificial Sequence
  Description of Artificial Sequence: Synthetic oligonucleotide
  Antisense Strand to SEQ ID NO: 345097
uuucuugaccgaagguggu

SEQ ID NO: 345099 - RNA, 19 nt, Artificial Sequence
  Description of Artificial Sequence: Synthetic oligonucleotide
  Sense Strand Starting at position 334 of SEQ ID NO: 316123
ggucucauguuaucuuuag

SEQ ID NO: 345100 - RNA, 19 nt, Artificial Sequence
  Description of Artificial Sequence: Synthetic oligonucleotide
  Antisense Strand to SEQ ID NO: 345099
cuaaagauaacaugagacc

SEQ ID NO: 345101 - RNA, 19 nt, Artificial Sequence
  Description of Artificial Sequence: Synthetic oligonucleotide
  Sense Strand Starting at position 334 of SEQ ID NO: 316127
ucauguuaucuuuaggcaa

SEQ ID NO: 345102 - RNA, 19 nt, Artificial Sequence
  Description of Artificial Sequence: Synthetic oligonucleotide
  Antisense Strand to SEQ ID NO: 345101
uugccuaaagauaacauga

SEQ ID NO: 345103 - RNA, 19 nt, Artificial Sequence
  Description of Artificial Sequence: Synthetic oligonucleotide
  Sense Strand Starting at position 334 of SEQ ID NO: 316130
uguuaucuuuaggcaauaa

SEQ ID NO: 345104 - RNA, 19 nt, Artificial Sequence
  Description of Artificial Sequence: Synthetic oligonucleotide
  Antisense Strand to SEQ ID NO: 345103
uuauugccuaaagauaaca

SEQ ID NO: 345105 - RNA, 19 nt, Artificial Sequence
  Description of Artificial Sequence: Synthetic oligonucleotide
  Sense Strand Starting at position 334 of SEQ ID NO: 316182
cuauacuggcuccaaauga

SEQ ID NO: 345106 - RNA, 19 nt, Artificial Sequence
  Description of Artificial Sequence: Synthetic oligonucleotide
  Antisense Strand to SEQ ID NO: 345105
ucauuuggagccaguauag

SEQ ID NO: 345107 - RNA, 19 nt, Artificial Sequence
  Description of Artificial Sequence: Synthetic oligonucleotide
  Sense Strand Starting at position 334 of SEQ ID NO: 316286
guagcacugccagaauguu

SEQ ID NO: 345108 - RNA, 19 nt, Artificial Sequence
  Description of Artificial Sequence: Synthetic oligonucleotide
  Antisense Strand to SEQ ID NO: 345107
aacauucuggcagugcuac

SEQ ID NO: 345109 - RNA, 19 nt, Artificial Sequence
  Description of Artificial Sequence: Synthetic oligonucleotide
  Sense Strand Starting at position 334 of SEQ ID NO: 316362
gucuaaagaucuucuuguu

SEQ ID NO: 345110 - RNA, 19 nt, Artificial Sequence
  Description of Artificial Sequence: Synthetic oligonucleotide
  Antisense Strand to SEQ ID NO: 345109
aacaagaagaucuuuagac

SEQ ID NO: 345111 - RNA, 19 nt, Artificial Sequence
  Description of Artificial Sequence: Synthetic oligonucleotide
  Sense Strand Starting at position 334 of SEQ ID NO: 316664
ccaaaugccguuuggcaau

SEQ ID NO: 345112 - RNA, 19 nt, Artificial Sequence
  Description of Artificial Sequence: Synthetic oligonucleotide
  Antisense Strand to SEQ ID NO: 345111
auugccaaacggcauuugg

SEQ ID NO: 345113 - RNA, 19 nt, Artificial Sequence
  Description of Artificial Sequence: Synthetic oligonucleotide
  Sense Strand Starting at position 334 of SEQ ID NO: 316693
cccacuccucugggcaaau

SEQ ID NO: 345114 - RNA, 19 nt, Artificial Sequence
  Description of Artificial Sequence: Synthetic oligonucleotide
  Antisense Strand to SEQ ID NO: 345113
auuugcccagaggaguggg

SEQ ID NO: 345115 - RNA, 19 nt, Artificial Sequence
  Description of Artificial Sequence: Synthetic oligonucleotide
  Sense Strand Starting at position 334 of SEQ ID NO: 317339
gucgcagcucuugaccaau

SEQ ID NO: 345116 - RNA, 19 nt, Artificial Sequence
  Description of Artificial Sequence: Synthetic oligonucleotide
  Antisense Strand to SEQ ID NO: 345115
auuggucaagagcugcgac

SEQ ID NO: 345117 - RNA, 19 nt, Artificial Sequence
  Description of Artificial Sequence: Synthetic oligonucleotide
  Sense Strand Starting at position 334 of SEQ ID NO: 317341
cgcagcucuugaccaauua

SEQ ID NO: 345118 - RNA, 19 nt, Artificial Sequence
  Description of Artificial Sequence: Synthetic oligonucleotide
  Antisense Strand to SEQ ID NO: 345117
uaauuggucaagagcugcg

SEQ ID NO: 345119 - RNA, 19 nt, Artificial Sequence
  Description of Artificial Sequence: Synthetic oligonucleotide
  Sense Strand Starting at position 334 of SEQ ID NO: 317408
ugagcuaccgcgagucgua

SEQ ID NO: 345120 - RNA, 19 nt, Artificial Sequence
  Description of Artificial Sequence: Synthetic oligonucleotide
  Antisense Strand to SEQ ID NO: 345119
uacgacucgcgguagcuca

SEQ ID NO: 345121 - RNA, 19 nt, Artificial Sequence
  Description of Artificial Sequence: Synthetic oligonucleotide
  Sense Strand Starting at position 334 of SEQ ID NO: 317545
aaccaauugugggagagaa

SEQ ID NO: 345122 - RNA, 19 nt, Artificial Sequence
  Description of Artificial Sequence: Synthetic oligonucleotide
  Antisense Strand to SEQ ID NO: 345121
uucucucccacaauugguu

SEQ ID NO: 345123 - RNA, 19 nt, Artificial Sequence
  Description of Artificial Sequence: Synthetic oligonucleotide
  Sense Strand Starting at position 334 of SEQ ID NO: 317650
gggaacaguuauuccacga

SEQ ID NO: 345124 - RNA, 19 nt, Artificial Sequence
  Description of Artificial Sequence: Synthetic oligonucleotide
  Antisense Strand to SEQ ID NO: 345123
ucguggaauaacuguuccc

SEQ ID NO: 345125 - RNA, 19 nt, Artificial Sequence
  Description of Artificial Sequence: Synthetic oligonucleotide
  Sense Strand Starting at position 334 of SEQ ID NO: 317655
caguuauuccacgacaggu

SEQ ID NO: 345126 - RNA, 19 nt, Artificial Sequence
  Description of Artificial Sequence: Synthetic oligonucleotide
  Antisense Strand to SEQ ID NO: 345125
accugucguggaauaacug

SEQ ID NO: 345127 - RNA, 19 nt, Artificial Sequence
  Description of Artificial Sequence: Synthetic oligonucleotide
  Sense Strand Starting at position 334 of SEQ ID NO: 317793
ccgcuucuuaguggugaga

SEQ ID NO: 345128 - RNA, 19 nt, Artificial Sequence
  Description of Artificial Sequence: Synthetic oligonucleotide
  Antisense Strand to SEQ ID NO: 345127
ucucaccacuaagaagcgg

SEQ ID NO: 345129 - RNA, 19 nt, Artificial Sequence
  Description of Artificial Sequence: Synthetic oligonucleotide
  Sense Strand Starting at position 334 of SEQ ID NO: 317834
caagucugagccuaaguuu

SEQ ID NO: 345130 - RNA, 19 nt, Artificial Sequence
  Description of Artificial Sequence: Synthetic oligonucleotide
  Antisense Strand to SEQ ID NO: 345129
aaacuuaggcucagacuug

SEQ ID NO: 345131 - RNA, 19 nt, Artificial Sequence
  Description of Artificial Sequence: Synthetic oligonucleotide
  Sense Strand Starting at position 334 of SEQ ID NO: 317837
gucugagccuaaguuuauc

SEQ ID NO: 345132 - RNA, 19 nt, Artificial Sequence
  Description of Artificial Sequence: Synthetic oligonucleotide
  Antisense Strand to SEQ ID NO: 345131
gauaaacuuaggcucagac

SEQ ID NO: 345133 - RNA, 19 nt, Artificial Sequence
  Description of Artificial Sequence: Synthetic oligonucleotide
  Sense Strand Starting at position 334 of SEQ ID NO: 317879
auuggcaguucugugaauu

SEQ ID NO: 345134 - RNA, 19 nt, Artificial Sequence
  Description of Artificial Sequence: Synthetic oligonucleotide
  Antisense Strand to SEQ ID NO: 345133
aauucacagaacugccaau

SEQ ID NO: 345135 - RNA, 19 nt, Artificial Sequence
  Description of Artificial Sequence: Synthetic oligonucleotide
  Sense Strand Starting at position 334 of SEQ ID NO: 317880
uuggcaguucugugaauuu

SEQ ID NO: 345136 - RNA, 19 nt, Artificial Sequence
  Description of Artificial Sequence: Synthetic oligonucleotide
  Antisense Strand to SEQ ID NO: 345135
aaauucacagaacugccaa

SEQ ID NO: 345137 - RNA, 19 nt, Artificial Sequence
  Description of Artificial Sequence: Synthetic oligonucleotide
  Sense Strand Starting at position 334 of SEQ ID NO: 317920
aaucaucgggcguauagua

SEQ ID NO: 345138 - RNA, 19 nt, Artificial Sequence
  Description of Artificial Sequence: Synthetic oligonucleotide
  Antisense Strand to SEQ ID NO: 345137
uacuauacgcccgaugauu

SEQ ID NO: 345139 - RNA, 19 nt, Artificial Sequence
  Description of Artificial Sequence: Synthetic oligonucleotide
  Sense Strand Starting at position 334 of SEQ ID NO: 318046
gacaaagcucuagguguuu

SEQ ID NO: 345140 - RNA, 19 nt, Artificial Sequence
  Description of Artificial Sequence: Synthetic oligonucleotide
  Antisense Strand to SEQ ID NO: 345139
aaacaccuagagcuuuguc

SEQ ID NO: 345141 - RNA, 19 nt, Artificial Sequence
  Description of Artificial Sequence: Synthetic oligonucleotide
  Sense Strand Starting at position 334 of SEQ ID NO: 318702
gccguuuaugcuuuguaaa

SEQ ID NO: 345142 - RNA, 19 nt, Artificial Sequence
  Description of Artificial Sequence: Synthetic oligonucleotide
  Antisense Strand to SEQ ID NO: 345141
uuuacaaagcauaaacggc

SEQ ID NO: 345143 - RNA, 19 nt, Artificial Sequence
  Description of Artificial Sequence: Synthetic oligonucleotide
  Sense Strand Starting at position 334 of SEQ ID NO: 318817
auugccuuugccugaaaca

SEQ ID NO: 345144 - RNA, 19 nt, Artificial Sequence
  Description of Artificial Sequence: Synthetic oligonucleotide
  Antisense Strand to SEQ ID NO: 345143
uguuucaggcaaaggcaau

SEQ ID NO: 345145 - RNA, 19 nt, Artificial Sequence
  Description of Artificial Sequence: Synthetic oligonucleotide
  Sense Strand Starting at position 334 of SEQ ID NO: 318851
ugugcuagcaugggugauu

SEQ ID NO: 345146 - RNA, 19 nt, Artificial Sequence
  Description of Artificial Sequence: Synthetic oligonucleotide
  Antisense Strand to SEQ ID NO: 345145
aaucacccaugcuagcaca

SEQ ID NO: 345147 - RNA, 19 nt, Artificial Sequence
  Description of Artificial Sequence: Synthetic oligonucleotide
  Sense Strand Starting at position 334 of SEQ ID NO: 318860
augggugauuccuucuuua

SEQ ID NO: 345148 - RNA, 19 nt, Artificial Sequence
  Description of Artificial Sequence: Synthetic oligonucleotide
  Antisense Strand to SEQ ID NO: 345147
uaaagaaggaaucacccau

SEQ ID NO: 345149 - RNA, 19 nt, Artificial Sequence
  Description of Artificial Sequence: Synthetic oligonucleotide
  Sense Strand Starting at position 334 of SEQ ID NO: 318912
ggaggacuuucccugacca

SEQ ID NO: 345150 - RNA, 19 nt, Artificial Sequence
  Description of Artificial Sequence: Synthetic oligonucleotide
  Antisense Strand to SEQ ID NO: 345149
uggucagggaaaguccucc

SEQ ID NO: 345151 - RNA, 19 nt, Artificial Sequence
  Description of Artificial Sequence: Synthetic oligonucleotide
  Sense Strand Starting at position 334 of SEQ ID NO: 318953
ugaguuccuuacucuuaca

SEQ ID NO: 345152 - RNA, 19 nt, Artificial Sequence
  Description of Artificial Sequence: Synthetic oligonucleotide
  Antisense Strand to SEQ ID NO: 345151
uguaagaguaaggaacuca

SEQ ID NO: 345153 - RNA, 19 nt, Artificial Sequence
  Description of Artificial Sequence: Synthetic oligonucleotide
  Sense Strand Starting at position 335 of SEQ ID NO: 315275
acacauguggcuuagcaga

SEQ ID NO: 345154 - RNA, 19 nt, Artificial Sequence
  Description of Artificial Sequence: Synthetic oligonucleotide
  Antisense Strand to SEQ ID NO: 345153
ucugcuaagccacaugugu

SEQ ID NO: 345155 - RNA, 19 nt, Artificial Sequence
  Description of Artificial Sequence: Synthetic oligonucleotide
  Sense Strand Starting at position 335 of SEQ ID NO: 315281
guggcuuagcagaggaguu

SEQ ID NO: 345156 - RNA, 19 nt, Artificial Sequence
  Description of Artificial Sequence: Synthetic oligonucleotide
  Antisense Strand to SEQ ID NO: 345155
aacuccucugcuaagccac

SEQ ID NO: 345157 - RNA, 19 nt, Artificial Sequence
  Description of Artificial Sequence: Synthetic oligonucleotide
  Sense Strand Starting at position 335 of SEQ ID NO: 315305
gcagaacuucuccacugga

SEQ ID NO: 345158 - RNA, 19 nt, Artificial Sequence
  Description of Artificial Sequence: Synthetic oligonucleotide
  Antisense Strand to SEQ ID NO: 345157
uccaguggagaaguucugc

SEQ ID NO: 345159 - RNA, 19 nt, Artificial Sequence
  Description of Artificial Sequence: Synthetic oligonucleotide
  Sense Strand Starting at position 335 of SEQ ID NO: 315308
gaacuucuccacuggaugu

SEQ ID NO: 345160 - RNA, 19 nt, Artificial Sequence
  Description of Artificial Sequence: Synthetic oligonucleotide
  Antisense Strand to SEQ ID NO: 345159
acauccaguggagaaguuc

SEQ ID NO: 345161 - RNA, 19 nt, Artificial Sequence
  Description of Artificial Sequence: Synthetic oligonucleotide
  Sense Strand Starting at position 335 of SEQ ID NO: 315318
acuggauguagcuacagau

SEQ ID NO: 345162 - RNA, 19 nt, Artificial Sequence
  Description of Artificial Sequence: Synthetic oligonucleotide
  Antisense Strand to SEQ ID NO: 345161
aucuguagcuacauccagu

SEQ ID NO: 345163 - RNA, 19 nt, Artificial Sequence
  Description of Artificial Sequence: Synthetic oligonucleotide
  Sense Strand Starting at position 335 of SEQ ID NO: 315450
ugcacaguucuccaugaug

SEQ ID NO: 345164 - RNA, 19 nt, Artificial Sequence
  Description of Artificial Sequence: Synthetic oligonucleotide
  Antisense Strand to SEQ ID NO: 345163
caucauggagaacugugca

SEQ ID NO: 345165 - RNA, 19 nt, Artificial Sequence
  Description of Artificial Sequence: Synthetic oligonucleotide
  Sense Strand Starting at position 335 of SEQ ID NO: 315525
gguggguguccauggagau

SEQ ID NO: 345166 - RNA, 19 nt, Artificial Sequence
  Description of Artificial Sequence: Synthetic oligonucleotide
  Antisense Strand to SEQ ID NO: 345165
aucuccauggacacccacc

SEQ ID NO: 345167 - RNA, 19 nt, Artificial Sequence
  Description of Artificial Sequence: Synthetic oligonucleotide
  Sense Strand Starting at position 335 of SEQ ID NO: 315526
guggguguccauggagaug

SEQ ID NO: 345168 - RNA, 19 nt, Artificial Sequence
  Description of Artificial Sequence: Synthetic oligonucleotide
  Antisense Strand to SEQ ID NO: 345167
caucuccauggacacccac

SEQ ID NO: 345169 - RNA, 19 nt, Artificial Sequence
  Description of Artificial Sequence: Synthetic oligonucleotide
  Sense Strand Starting at position 335 of SEQ ID NO: 315550
ggugucauuauauaguaga

SEQ ID NO: 345170 - RNA, 19 nt, Artificial Sequence
  Description of Artificial Sequence: Synthetic oligonucleotide
  Antisense Strand to SEQ ID NO: 345169
ucuacuauauaaugacacc

SEQ ID NO: 345171 - RNA, 19 nt, Artificial Sequence
  Description of Artificial Sequence: Synthetic oligonucleotide
  Sense Strand Starting at position 335 of SEQ ID NO: 315584
aguguugauguggagguaa

SEQ ID NO: 345172 - RNA, 19 nt, Artificial Sequence
  Description of Artificial Sequence: Synthetic oligonucleotide
  Antisense Strand to SEQ ID NO: 345171
uuaccuccacaucaacacu

SEQ ID NO: 345173 - RNA, 19 nt, Artificial Sequence
  Description of Artificial Sequence: Synthetic oligonucleotide
  Sense Strand Starting at position 335 of SEQ ID NO: 315586
uguugauguggagguaaug

SEQ ID NO: 345174 - RNA, 19 nt, Artificial Sequence
  Description of Artificial Sequence: Synthetic oligonucleotide
  Antisense Strand to SEQ ID NO: 345173
cauuaccuccacaucaaca

SEQ ID NO: 345175 - RNA, 19 nt, Artificial Sequence
  Description of Artificial Sequence: Synthetic oligonucleotide
  Sense Strand Starting at position 335 of SEQ ID NO: 315626
agaguaauuaugggugaug

SEQ ID NO: 345176 - RNA, 19 nt, Artificial Sequence
  Description of Artificial Sequence: Synthetic oligonucleotide
  Antisense Strand to SEQ ID NO: 345175
caucacccauaauuacucu

SEQ ID NO: 345177 - RNA, 19 nt, Artificial Sequence
  Description of Artificial Sequence: Synthetic oligonucleotide
  Sense Strand Starting at position 335 of SEQ ID NO: 315628
aguaauuaugggugauggu

SEQ ID NO: 345178 - RNA, 19 nt, Artificial Sequence
  Description of Artificial Sequence: Synthetic oligonucleotide
  Antisense Strand to SEQ ID NO: 345177
accaucacccauaauuacu

SEQ ID NO: 345179 - RNA, 19 nt, Artificial Sequence
  Description of Artificial Sequence: Synthetic oligonucleotide
  Sense Strand Starting at position 335 of SEQ ID NO: 315695
ugugcuugagaguaauuga

SEQ ID NO: 345180 - RNA, 19 nt, Artificial Sequence
  Description of Artificial Sequence: Synthetic oligonucleotide
  Antisense Strand to SEQ ID NO: 345179
ucaauuacucucaagcaca

SEQ ID NO: 345181 - RNA, 19 nt, Artificial Sequence
  Description of Artificial Sequence: Synthetic oligonucleotide
  Sense Strand Starting at position 335 of SEQ ID NO: 315698
gcuugagaguaauugauga

SEQ ID NO: 345182 - RNA, 19 nt, Artificial Sequence
  Description of Artificial Sequence: Synthetic oligonucleotide
  Antisense Strand to SEQ ID NO: 345181
ucaucaauuacucucaagc

SEQ ID NO: 345183 - RNA, 19 nt, Artificial Sequence
  Description of Artificial Sequence: Synthetic oligonucleotide
  Sense Strand Starting at position 335 of SEQ ID NO: 316049
gcuggagaaucagcucuga

SEQ ID NO: 345184 - RNA, 19 nt, Artificial Sequence
  Description of Artificial Sequence: Synthetic oligonucleotide
  Antisense Strand to SEQ ID NO: 345183
ucagagcugauucuccagc

SEQ ID NO: 345185 - RNA, 19 nt, Artificial Sequence
  Description of Artificial Sequence: Synthetic oligonucleotide
  Sense Strand Starting at position 335 of SEQ ID NO: 316177
ggucaaggccaguauccau

SEQ ID NO: 345186 - RNA, 19 nt, Artificial Sequence
  Description of Artificial Sequence: Synthetic oligonucleotide
  Antisense Strand to SEQ ID NO: 345185
auggauacuggccuugacc

SEQ ID NO: 345187 - RNA, 19 nt, Artificial Sequence
  Description of Artificial Sequence: Synthetic oligonucleotide
  Sense Strand Starting at position 335 of SEQ ID NO: 316216
caggaagguucugcaaauc

SEQ ID NO: 345188 - RNA, 19 nt, Artificial Sequence
  Description of Artificial Sequence: Synthetic oligonucleotide
  Antisense Strand to SEQ ID NO: 345187
gauuugcagaaccuuccug

SEQ ID NO: 345189 - RNA, 19 nt, Artificial Sequence
  Description of Artificial Sequence: Synthetic oligonucleotide
  Sense Strand Starting at position 335 of SEQ ID NO: 316227
ugcaaaucucagggcaaua

SEQ ID NO: 345190 - RNA, 19 nt, Artificial Sequence
  Description of Artificial Sequence: Synthetic oligonucleotide
  Antisense Strand to SEQ ID NO: 345189
uauugcccugagauuugca

SEQ ID NO: 345191 - RNA, 19 nt, Artificial Sequence
  Description of Artificial Sequence: Synthetic oligonucleotide
  Sense Strand Starting at position 335 of SEQ ID NO: 316283
ugagcaguucuccaacaua

SEQ ID NO: 345192 - RNA, 19 nt, Artificial Sequence
  Description of Artificial Sequence: Synthetic oligonucleotide
  Antisense Strand to SEQ ID NO: 345191
uauguuggagaacugcuca

SEQ ID NO: 345193 - RNA, 19 nt, Artificial Sequence
  Description of Artificial Sequence: Synthetic oligonucleotide
  Sense Strand Starting at position 335 of SEQ ID NO: 316409
ggaggcaggaauugugcua

SEQ ID NO: 345194 - RNA, 19 nt, Artificial Sequence
  Description of Artificial Sequence: Synthetic oligonucleotide
  Antisense Strand to SEQ ID NO: 345193
uagcacaauuccugccucc

SEQ ID NO: 345195 - RNA, 19 nt, Artificial Sequence
  Description of Artificial Sequence: Synthetic oligonucleotide
  Sense Strand Starting at position 335 of SEQ ID NO: 316421
ugugcuauuaauggaggau

SEQ ID NO: 345196 - RNA, 19 nt, Artificial Sequence
  Description of Artificial Sequence: Synthetic oligonucleotide
  Antisense Strand to SEQ ID NO: 345195
auccuccauuaauagcaca

SEQ ID NO: 345197 - RNA, 19 nt, Artificial Sequence
  Description of Artificial Sequence: Synthetic oligonucleotide
  Sense Strand Starting at position 335 of SEQ ID NO: 316422
gugcuauuaauggaggaug

SEQ ID NO: 345198 - RNA, 19 nt, Artificial Sequence
  Description of Artificial Sequence: Synthetic oligonucleotide
  Antisense Strand to SEQ ID NO: 345197
cauccuccauuaauagcac

SEQ ID NO: 345199 - RNA, 19 nt, Artificial Sequence
  Description of Artificial Sequence: Synthetic oligonucleotide
  Sense Strand Starting at position 335 of SEQ ID NO: 316424
gcuauuaauggaggauggu

SEQ ID NO: 345200 - RNA, 19 nt, Artificial Sequence
  Description of Artificial Sequence: Synthetic oligonucleotide
  Antisense Strand to SEQ ID NO: 345199
accauccuccauuaauagc

SEQ ID NO: 345201 - RNA, 19 nt, Artificial Sequence
  Description of Artificial Sequence: Synthetic oligonucleotide
  Sense Strand Starting at position 335 of SEQ ID NO: 316615
ccuugcauccuggagaaau

SEQ ID NO: 345202 - RNA, 19 nt, Artificial Sequence
  Description of Artificial Sequence: Synthetic oligonucleotide
  Antisense Strand to SEQ ID NO: 345201
auuucuccaggaugcaagg

SEQ ID NO: 345203 - RNA, 19 nt, Artificial Sequence
  Description of Artificial Sequence: Synthetic oligonucleotide
  Sense Strand Starting at position 335 of SEQ ID NO: 316626
ggagaaaucugagggauuu

SEQ ID NO: 345204 - RNA, 19 nt, Artificial Sequence
  Description of Artificial Sequence: Synthetic oligonucleotide
  Antisense Strand to SEQ ID NO: 345203
aaaucccucagauuucucc

SEQ ID NO: 345205 - RNA, 19 nt, Artificial Sequence
  Description of Artificial Sequence: Synthetic oligonucleotide
  Sense Strand Starting at position 335 of SEQ ID NO: 316649
gaaucccaucaccgguaua

SEQ ID NO: 345206 - RNA, 19 nt, Artificial Sequence
  Description of Artificial Sequence: Synthetic oligonucleotide
  Antisense Strand to SEQ ID NO: 345205
uauaccggugaugggauuc

SEQ ID NO: 345207 - RNA, 19 nt, Artificial Sequence
  Description of Artificial Sequence: Synthetic oligonucleotide
  Sense Strand Starting at position 335 of SEQ ID NO: 316652
ucccaucaccgguauaauu

SEQ ID NO: 345208 - RNA, 19 nt, Artificial Sequence
  Description of Artificial Sequence: Synthetic oligonucleotide
  Antisense Strand to SEQ ID NO: 345207
aauuauaccggugauggga

SEQ ID NO: 345209 - RNA, 19 nt, Artificial Sequence
  Description of Artificial Sequence: Synthetic oligonucleotide
  Sense Strand Starting at position 335 of SEQ ID NO: 317040
uggaguugggugugaggau
